United States Patent Application Publication US 2019/0348154 A1 - sequence listing, part 61

SEQ ID NO: 226921 - DNA, 831 bp, Klebsiella pneumoniae
atgctgatgtgtgatgcgaccggtctgtcgcaacgtcgtgcctgcaggcttacaggtttatccctgtcgacctgccgctatgaggctcaccgtccggctgctgatgcgcatttatcagggcgcatcactgagctggtactggagcgcaggcgttttggctaccgtcgtatttggcagttgctgcgccgtgaagggcttcatgttaatcataagcgcgtgtaccggctttatcacctcagtggcctgggcgtaaaacgcagaagacgtcgtaaagggctggcaacagaacgtctgccgctgctccgtccggcggcgcccaatctgacctggtcgatggatttcgtcatggacgcactttccaccggtcgcaggatcaagtgtcttacctgcgtcgatgatttcacaaaggaatgcctgacggtcactgttgcctttgggatttcaggcgttcaggtctcgcgtattctggacagcattgcactgtttcgaggctatccggcgacgataagaactgaccaggggccggagttcacttgctgtgcactggatcaatgggcctttgagcatggtgttgagttgcgcttaatccagccgggcaagccaacgcagaacggatttattgagagctttaacggacgatttcgcgatgaatgcctgaatgagcactggttcagcgatatcgttcacgcaaggaaaatcattaatgactggcggcaggattataacgagtgtcgtccacattcagcactgaattatcagacgccatcagagtttgcagcacggtggcgaaatggaaaatgtgaaggtaaacaaaccgaccttactaactga

SEQ ID NO: 226922 - DNA, 264 bp, Klebsiella pneumoniae; identical to SEQ ID NO: 94215

SEQ ID NO: 226923 - DNA, 2697 bp, Klebsiella pneumoniae
atgtcccagccagtgggtgatctggtcgttaaaattgacggcgatagcgcaaaatttgatgaggaagttgctcatctgaataagcagctgagcgggttaggtagagccgcgaatgacagtactgcccaggtcaccgcagctttcacgcggcaggagcgtgctgcaaaacgtgccggtatttcaatcggccaatacaataatgcaatgcgcatgttgcctgcgcagcttactgatgtcgcaactcagttagctggtgggcagagcccatggctaattttgctacagcaaggcggtcaggttaaagactcatttggcggcctgatcccaacatttcgaggattacttggagctgtaagtccgttggccgttggggttgcagctttgaccgccgcaggtgccggaattggatatatcttctatcagggaacgtcaaccctttccgattttaataagacgttgacgctatcaggtaacacggctggtctgactaccgacagaatgctggcactggcaaaatcgggacagcaagcaggactcacctttgatcaaaccactgattctctgactgcattaattaatgctggcgtgggggcgggtgcgcgttttgatgaactaagccagtcagttgcaaaattttctacggcatctggtatccccattgaaaaggttgcggaagcgttcgggaaactgaccaatgacccgacgtccggcctgattgcgatggcgcaacaatttcataatgtgacagccgagcagattgattacgttgctcagttacaacgttcaggagatgaagccgctgcacttcaggcggctaatgatgcggcgacgaagggatttaacacccagactcagagcctgatcgataacatgggaacgattgagcgctctgctgattcgttgaaacgcgcgtttaaatccatgtgggatgctgctctggatttggggcggcctgacaccacaggggagatggtaagcaaggcggaatcagcttttaagcaggctgatgacatctggaatctcaggaaaaatgatcgctatgtaaacgatgaagccagagcccgtttctggaatgacagggagtcggcccgactggctcttgatatggcgcagcagcaagcaggtattgccaaagccagcgcagcagcggccgaaaaggaagcggaggcagaatctgaaaaacagaaatatgccgctcaagcacaagccaattatgctaaatcgcagactgcgcttgaaaagtatactgccaggcagaatgaattaaataaagctctgaaagaaggacatatcctacaggctgattacgccatcaatatggccgcagccaagaaagaatatgaagccaccttaaaaaaaacgccgaaaccaaaaggcgttaaagtttctgctggtgatcgttcttctgatcagactgatgccgaaaccctgcagttgatgacgcagttaaagttgctgcaacagcatacggggcttaacgataccatcagtcagcaacgtaaaaatttgtggtctttacagtcaaaattcgcggttatagaagaggcgtcgaaaacacgcgcgctgagtaaagaggaacaatctttactcgccagcaaggataaggttctggcgcaggctgaggttaatgcgaaattaggcgatcagatcgttgctcaggaacgtcttaataagcttcaggataactcgttaaaatatgttactcagatgcaggaaaagactgctgcactgacagatagtgctgggctaagtgacaaggacgcacaacgtaatagcgagagggcgcaattaaggcagggatggaaaaatcaggggggaagcctggaagatgaagggtatcagaaagagctttccgcacttgagggttattacgctgcacaggatgaaatgcgtaataactggttggccggcgttcagtcgtcatgggaaaactatgctgacatggccaccaattacaatcagatcgctgcggatacaaccaatactgcgctcggaggagtaacaagcaatctccagcaggggttatatgatcttgcaactcagtctgaagatgctggcgatgccctgagtaacatggttgaaggttttggtaaaacagtcatccagaccctggcacagcttgctgcacaatggctggtatatcagggggtgcagttgcttgtggggaaaactacacaagcctctgccattgctcctatggtagcgaatgcgcaggccacctccctgcaggcccaactggcagcatatgcttctactgccgccataccaattgttggtcctgctctggctcctgctgctttggctgcagcggctggcgtcacagcccctcttgttgctgcaatttctgcatccgcccttgctggcatggcgcacgacggcattgataaaattccggaaacgggcacctggctgctgaaaaaaggggagcgggttacgacggcaggaacatcagcaaaactggatgccactctggaacaggtgcggaaacagcgttcccttgccggaaacccgctgcatgttgagttcaataacacctacaccgggaaaccggacgatgcaatggtccaaatgttggatcagcggcagcgtgcatctgaaaaaaggcttaagcaatattttacttcccaggttattaatccaactgagaattatggtcgatcacttaaatcagtttatccggggaggcgtaagaaataa

SEQ ID NO: 226924 - DNA, 1194 bp, Klebsiella pneumoniae
atgggaagtgaaaatttatctgatggtttgaatgatattttttcaaacatagtcaatgaagaaagtttaaatttaccatttacggttgaatctgacattattagtgactttaaagaaaagtgccaaatctatttcaaccttttaaatgactatactgagaacaatgaaactggattatccaagagaatcagcagacgtctagaaaaaattattgagatttattttggattagtcacctctttgtcagaatttttatctggtgatattaaggcagcatatgatagctttgatagaaccttttctgacaatgtaacctctcgctatatacatcacatatctattccactaaacaagttgtgcaacgaatccaaacctctatttcgagtcaggaagtctgacacttcaataaaagacagaagtgagatatttcacatccctttctctatgcggcatttagtcaacgcacagagatactctgtcgcaggtttgccatgcttatatcttggatcgtctttgtatgtctgttggttggaaatggataaaccagactttgacaaactatatatttcttcttactcgtctgatgaagagaattctaaaattttggactttaccgccgaaatcctttactcacgtttttatggcattgtcgatgatgatgaaatgccgtaccttacaaaaatggcatatatttgcttaatgccattgatttacgcttgcaattttagaaaaaagcacaacagtacatcatttactcaagagtacataattccaaacttattaatgcaatggattagccgccgggcaaaatcaaatattgttggcatcgcttacagatccacgaaaatggttaaaacaaatgatggggacaagtcaatcaatgttgtactccctccaaaagtcacttaccaacaaacaatctcaaaagatttttgtcccaaactgattaaaatgtttaagctcactccccctgtatcatggcaagtacttaaaacactggattacacatgcgagccaggtgaaggagatagggtaaagtccgcctcaaggtttttgaggcggactgaacgcctgtcagggatcaagaattttgacgacagcattgtgcacctttaccctctcaccgacttctataaactcgagaagtgcatggataacttgcttgagtacgacttcattgaagataagaagtga

SEQ ID NO: 226925 - DNA, 1029 bp, Klebsiella pneumoniae
atgacgatcagaaaacaacctaatggaaaatggttgtgcgagtgttatccgaacgggcgggacggcaagcgcgtgcgcaagcaatttgcgacaaagggcgaggctatagcattcgaaaatttcaccatggatgaagtgaacaaaaagccgtggctgggtgaaaaggaagatcggcggcgtttgtcagaattgattgagcagtggcactccctttatggccagacgctcgcagaccccaagcgcctgatggcgaaactcaacattatttgtaacggcctaggcgatcccatcgcctcggagctaacagctggtgactttaccagatatcgagaagcacgattaaaaggtgagatacgaaacgaagacggcacgctaatgtcgccagtaaagccccgcacggtaaacctggaacagcgtaacttatcatccgtttttggcaccttgaaaaagctgggccactggtcagcgcctaacccgctcgccgggctgcctacattcaaaattgcagagggagaactggcattcctggccccggacgaaattaaacgcctgcttgatgcctgcgctgactctcaaagccccagcttgttgagtattgcaaaaatatgcttggccaccggcgcgcggtggagtgaagccgaaaacctgcagggccatcagttatctaaataccggatcacctataccaaaaccaaaggcaagaaaaaccgaaccgtaccgatatctcaggatctatatgacgaactccccaaaaacagagggaagttgttcactccatgtagaaaagcgtttgagcgcgcagtgaaacgagcaggtattgatttaccagagggtcaatgtactcacgttctgcgccatacattcgccagccattttatgatgaacggcggaaacatactggtccttagagatatattaggtcattccgatatcaaaatgactatggtttatgctcatttttcgcctgatcatcttgaagatgcggtgacaaagaatccactttatgcattaaactactctaaagggtaa

SEQ ID NO: 226926 - DNA, 633 bp, Klebsiella pneumoniae
atgatacatgtaagggctggcgagaatacgggtggaagagaggccattcacaggctaatggccgcatatggttttaagtccagacaacaattgtgtgatcaccttggtgcttcaaaaagcaccatggcaaacagatacttaagagatagctttccggctgaatgggtgatccagtgtgctttagaaaccggaacatccttactctggctcactactggacaaggtgaacccagttcaaaagttggcccaaaaaaagatatcaatttcgtgaactcaaacaaagttaaacccctctcggaactggtatcccccgagattgacaaggcaacccttaatggtggtttattgatcgaggcgggaaaagcaatcattgacagtagcttgctacctgcagaaccaagcaacctaatgcttgtaaatactgcggtagattcttacttagtggatctgagccaaacccctcctgttaacggcatgtggttggtagatattgacggcataaaaagcatcgtgaagctaacacgtttaccaggtaacagattggtcgttcaccaagaagaatcatcctttgaatgtagcctcgacgatatcgaggtcgtaggcagagttttaaaaataatcaagagcctttga

SEQ ID NO: 226927 - DNA, 300 bp, Klebsiella pneumoniae
atgaagaagctaattattgcactgggtctagttttgttggcgggctgcgcaactgtaggaaaggatttctctgagagcgatgtagcgtctatccagaaaggtgtgacaacagagcagacagtgcttgcgacctttggtaagccatcaacagtgacggtcgactcagaaggcaataaggtctatacctggacttatgcccatgccacggcattcagtgtgggccagggtaaaacattggtagtgaagttgaataaagacgcaatcgttgattcgtatgtggtcagcaagacgcagccttag

SEQ ID NO: 226928 - DNA, 540 bp, Klebsiella pneumoniae
atgacagcagaccagattatcgaggggatcctcggtaaagagggtggttatgtcgatcacccctctgataaaggcgggccaacccgctggggcatcacgcagaccacagctcgcgcacatggctaccccggagatatgcgtgagctgcccagggaaacagcaaagcaaatcctgctgagcgattactggaccggaccccggtttgaccaggtggcagctctatctacgttactggcggatgagctttgcgacactggcgtgaacatggggcccagcgtcgccagtaagttctttcagcgctggctgacggcaatgaatatgcgtgggaagctttatcccgaccttatcccggatggcgtgattggaccccgaactatcaccgctctgaaggggtatctttctgcccgcgggaaagaaggcgagcaggtgctgctgagagcactgaactgcagccagggtgccagatatctcgaactggcggagggccgcgaaaccaacgaggattttctctacggctgggttaaggagcgtgtcctgtga

SEQ ID NO: 226929 - DNA, 579 bp, Klebsiella pneumoniae
atgattaacccgtccgaggttggaaaagctggtgaaatggtcaggctgaaaacgctggaggccatctggattcaggggaagctgcgcatgtggggccgctggtcttacatcggcggcggtagtggtggaaatatgttcaatcagttgttggcgtcagggaagataacgaagaccgctataaacgatgctttgcgccgtatgaaaaaatcaggcattaccaagccagagctggaggcattctttcgtgaaatactcgcggggaaaaataaaagcggcctggctttttgtactgatgaggaaggattgataattgattctgtgcttagtgctcagcttgtgcgctccgggaataaagccctctataagctaatcaaggatcggtatgtatatcgcatgagcaagaaggcaatggcgaaagagctaaacgaaaagcatccagaatggtgcttgcggacttgcgagagcaggatcgatgtttggctaaatcttgcagaatcgatgctttacgcaccaatgtgtgacgcatttggcacaaatggcgacagattttacttgaatagttgcgcggaaagtgcttga

SEQ ID NO: 226930 - DNA, 300 bp, Klebsiella pneumoniae
atggctaagacagcaaaacaactgattaaacaggcgtacgaaatagccaaaactatgccaccagaacagacagcaatcatcaaggaactggctaccgtcctcgatgtttcgaatgtagctctgcgccagacgcgtaccgaacgtgacgcccttctcgcagaggtcaaatcctgggcgaaggagtgtgatcgtattactgagcgatataccaagaagcgcataaatctacatgtccttgaagcaatgcgcgatttgaaagcaatttgccccaccagcttccgtaacgtggaggctctctga

SEQ ID NO: 226931 - DNA, 150 bp, Klebsiella pneumoniae
atggagcagctcttgaatggcctgcacgaggttaattactgcctcgatcaggtttgtcgcgaactgcataaacttaagaacatttatcatgtccacttccccttaaatgagttacgggtaagtggaggagagcccattgctgccctgtaa

SEQ ID NO: 226932 - DNA, 204 bp, Klebsiella pneumoniae
atgacaatcgcaaaaactcatactggcaccgtgatcaccaaagacggacctcaatataaattgctgcatgaaacctcttctatgtgggttgtcgggaaaacggagtattacaggaaagacatgggtaaacgacattttgctgagcacacacatcgttggttgctactcgattccgttaagtctatagaagtgaagcatggctga

SEQ ID NO: 226933 - DNA, 216 bp, Klebsiella pneumoniae; identical to SEQ ID NO: 225987

SEQ ID NO: 226934 - DNA, 891 bp, Klebsiella pneumoniae
atgatgatctcatatcaggaacttgttcgcaccttcccaaataaaggacctttaactgaaacggaactaaattatatccttaactctgttagcaaattttatgttcagaagaaaattcaaccctttttatattgttatattcttctgttggcaataacaggaagaaggccattacaattaatctctctaaaagctaaggatctcattaaaaatgagaaagggtattttttaaatgtaccaaaagtaaaacaaaggaaatcattcagaaatgaatttaacatggtaatgattgaaaagttcttatatgacagcttatcaatgctaattaatgaaaatcaggtgtttgtagaagataaatttagtgttgggattaataactatagaggcgaattgccaatcttcatggatttagacaagattacggaaataaaaagaattgagggttttctatctgatttaacaacagattttttccatatgaaaaattcagtcatgtcaaagctattaaaacgctttccttcaaaattcgatgttagatcagaaaggactaacagctatatagagcttaatgccagaagattcagatatacattagggagtcgactggctaatgaaggagcctcaattgaggtgattgctaaagcgttagatcataaatcagcaaactcttctatgatttatataaaaaataatcctgacagtgtttatgatatcgataagaaactaagtgcattttttaaccccttatctaatatacttatgggcgtagagattgaagaaaacaagaacttttttatcaagtatgttttagattcatttttattattagaagatacgaaagaggaatttaaatgtttatcttgtaaaaaattcaatccttggagaatataa

SEQ ID NO: 226935 - DNA, 1632 bp, Klebsiella pneumoniae
atgaataatatatttatttttgaaccaagtaataaaaacaacccacactataatgttattaagttcatcgagttttgtaaggataccttttctaataataatttaacaacttcctgggaaagcaataaatggaaaggtttatatagatttactaagtttaacttaaaaaacaacctcagcagcaaggaacgcttagatgatagttttattaattttgctaaagcatatatgttgcatgtgcattcatttaataaatctaagacgaaacactcaacattatcaatgttgaagattgtagaattcgttttactgaaaatcaatatggaggctaatgtaagctattgcaacaattcagtttttgatgaatgcataagaatagcctctgaaaagtattctaaagcacacgcatttgctattggaaaagaacttgagaaattgagttcttttttaagtgataataggatgattaactcatcttatttattttgggtaaatccaattaggtataggattactcagtcttggactggttatgattcttcacttgaaggccatcctagattgcctgatatcaaatcagttattgcgattgctgagattttttcaaagcgggatgaacaattatcttcaagagatatatttactacatctgtgcttgctttacttatgtgcgcaccgagtaggatatcagaaattttagctttgccagcggattgtgaaattacagaatgtgatggaaagggcattcaaagatacggtttgagatttttttcagcaaaagggtatgaaggtaatataaaatggattccaactctaatgatacctgtagctaaaaaggcaattagcagattaaaagaattatcaagtcaagcgaggttattggctgctgaaattcaaaaaaatcactctaactcaacgatgggaacccttaaagagaatatacctcaagatttcccttggtatgatagagagaagaaaattgaatattctaatgcgctttgcttgttaactgaaggacagttaaatcaaaacaaaaagaaaatgttagataagttattcagacctacaatgagtttttttaaaactgacattgttgattctgattatataaaaggacattttaatatctttaaaagacatggttatataaatgaagatggtagcccatatttgctgagaacacatcaactgaggcatcttctcaacacatttgctcaaataaatggtatggatgaatttagtattgctcgctggtctggacgtaagctaatttctcaaaatgtttcttatgaccacagatcgcatcttcaaatgtctaaagaaataagagaacaaaagttatcagtgtgtgttaatgagcacagaaaaaaggatattccagtggtggatcttaacgagtttgattcacttagtagtggtgcggtacttgtatcaaaacatggctactgcaagcactcatatgcgtttaagccgtgtgaaaattatccgattgagaattctgatttagataacgaaacgatttcaaacattcacgataaaattttaaaaagaacactgtatgataaaaatgatgggaacattaatgctgatagatggtatgaattccataagagaataaaaaaaggagaataa

SEQ ID NO: 226936 - DNA, 414 bp, Klebsiella pneumoniae
atggataaaacaaatattaacttaatggaaaggtatctacttctgcttgatcgattcgttgataaactcgctgaatcaggtttctcagagcaacgaattatagaacaatcatatcttttttgtgcaggattttatatcaaataccaaagtggtatcgaaaaaatgaccttctccaacagggagattgttttaacctttctgctactttcatattatagtcatataaataaactggatgatgatttgatcaacaaagagcgtatgaagcatgtatgttcttcattgattaactttatagtcagtaatggtagccgaacagagaaagtctatatcaacgagaggaaaaaatatgaggcttctaccctaaaaagagggttgtccatcaaagagaagaaaagaaaatatggattgtga

SEQ ID NO: 226937 - DNA, 666 bp, Klebsiella pneumoniae; identical to SEQ ID NO: 18349

SEQ ID NO: 226938 - DNA, 1278 bp, Klebsiella pneumoniae
atgaaagggatgcagaaaatccgcagaggaaagagtttcgctggtatcgtcctctatgcattaaagcccggttctcatcataaaaaagaccctatcgtgatcggtggaaatataacgatagttggcaatgccactaaagatctgatcgctgaatttgatagcaccaaacagcttcgccctgacgtgcaaaaggctgtttggcacaactcgcttcgcttacctaaaggtgaatcacttacggctaaacagtggtcctgcatcgcagatgactacatgacaagaatggggttctctgaaacgcatctcagatgctacatcctacatgacgacgaaaacggccagcacatccatatcatcgccagcagagtgtctcttgatgccggaaagctctacctcggtaggaatgagaacctggcaagtacgagaataatccagcaacttgaaagagattacaatctgacaagaaccaaaggaccgaaagcatctccagcagcgccctcacctaaacctaagctcaaaaaatcccgtaatgagatgatgatagaaaagagaactggtgagctatgcccaaaaggaatcatccaaaacgcccttaacgaactgcttgatactaggcaatcgattaccgacttcgtgcaacagcttgtggcacaaaatatcaggccaatccctaacattgcctctactggacgcataaacggcttctcattcgaatacaacgggattgctttcaaagcatctcaattgggaaaagggtattcctggtctgccttgcaaagcagaatcgactaccaacaggaacgtgataatgctttcctgtttaaactgaaatcatctgtcagagaaacatctgttggtgcaactcatgatatggtcataactatagatgctcctgaaaccacgacagaatacgttaaccgccccatagaagcacttatcctcgataaacgagctgctggtcaggacgaatactctatcgcttctgtcgaagcgcttctcccagaagctgttgcaactaacaaagaagcgatagcaaccgaaacgttaaaagtagcgcccaagcgaagctatagggcttcaacgttcagatggttagagaccatcccctatctcaataccatcattaccatcttcaaaaacctcaaaatcccaaccctcaaacgtcctcgaaaacacaaaaccatcactggcgtgagaatgatagagataacatcatcaccccccaaaactgccattgaaacaccacataaatcgcacagagcttcgctttcaatgtag

SEQ ID NO: 226939 - DNA, 831 bp, Klebsiella pneumoniae; identical to SEQ ID NO: 226921

SEQ ID NO: 226940 - DNA, 264 bp, Klebsiella pneumoniae; identical to SEQ ID NO: 94215

SEQ ID NO: 226941 - DNA, 438 bp, Klebsiella pneumoniae
atgtctaatgttgttgaattctccaaggacagaggcacaaacattgaagtcactaaatttgttcagctcattggtgagtcaaccgtggacattggtaatgacaaagttatcctcactccgtcgaaaacgcttaaggatctgtatgttggtgaatacaagatcctgcttaagctgagagcccttaaagcccttgcaaggaaagagtcagcccaggccctttatacgttcattgaggctctgccacctaatccgatccctgtcagcattgagaggttcaggaagcgtttgtccctcacttccagacctgctcttcagaattcaacggtaagaaaagcacttaagcaactggaggatattggataccttgaataccaggagcttaaggaaggcaacaagatagcgtttcaaatcatcaagagaaatccctccctgaagtag

SEQ ID NO: 226942 - DNA, 855 bp, Klebsiella pneumoniae
atgcgacgtaatgcacaaaaatggatcccgtttggatttgatacggattcaaataaaattgttgatatcgccagcgttgaaaatgggctttcgtgtaactgtatctgcctcatctgtgggacctccctgattgccaggcagggtcaaaataaaaaatggcattttagccacagcacagaagtaaaaggggtttgtagtgagctcacactacaacatataaaaaaatacataaaggtgaaaatacaggaaaaaaaataccttgctctccctcatcttctgcagggtaaggagaaagggatagttaacctcaaaaatctcgctggtggtgggattgtttgtggccttaatgctgacctcacagggatatgtaacgatacgacaatcgggatattcgttaatgatacgtcggaggatatccagccaaatccagaccttttagctcaaacaggccagctggcgctggtggagatcgatgccgttcggattgaaagtataatcactccatatcgtgagaacggggaaggcataaagatgatggatgcgatagaaaagctacttttcacctcagatgaagccaagcggtggatctaccatcccttaatgcagacagcaccaccacatactttacatcagtacaaacgccacctgaatgccagcggcaaccagctgctttctatgattccggtagatctacccatgaatatgaattcgttgcctctggcacctgcacagcaatggcaacatttacgatggacaatagaaatactcgctaaacttacccggccggatataccttcagggagtaccgtttttgatgaactggtatcctatgcaccgaggatgctggattcctag

SEQ ID NO: 226943 - DNA, 255 bp, Klebsiella pneumoniae; identical to SEQ ID NO: 177850

SEQ ID NO: 226944 - DNA, 870 bp, Klebsiella pneumoniae
atgaaatcttgggtaaaaatgaatagttggacatcagaagacaccaaagcagtgaaaacatggtttgatttggatagatatcgagagtttgaaaacatttcaattaatatgctttaccatgaaatatgggcgaggacatatttcttcaaaccagtaatagaagaaggaatgcataaaacagtattgaaaaattatatgcagatattagaaggtaatccttttctcatcaaagagaaagacttgaattatatggatgctgaaaataaactttatcaaccgccatacttttttataaccacggtagatcgaatagctaatatcagttttgcttgtatgaaaaaggctttattcataagagcaaattcagaacaatataagattgattccactattgagaacgaatacatatccgaaaaaatccctgaacagtttcctactacaattatgttagaaatcgatcttgcggctggaagtgatgatgagatagcagaggcactgcgaatatcattaccacaatggcgaaaagttaagggtgtaaaacctgcaccgcttgatgcagtaagatttggttatgggacaataaaaaagttaatgagctatagaataataccaatgcttgatttacttgcttggtcagaaagaaaaaaagtgattctgtcagatgatagaatatcacgattgatttatagagatgaagatgacgataaggtaattagacaagggtatcatattagagatgcagaccgacctttagctatgaaagtagtagaaaatgattttttacgccaattctacttttttataaataaaaatagacatattaaagagatgagcgtttatgatgtaatgaaaattacagacaccgattga

SEQ ID NO: 226945 - DNA, 855 bp, Klebsiella pneumoniae
atggcgctaagtatcgataatataagagttttttcaagggtgttcagccgcccagttttcgaggctttagccaagggaagagaaccgtctaatgtcttggattttgtgtctttctctgatgaaatgaagcaggatgggcaaccattacatacattttttagtgaatgttataaagagttatccaggaattatagaaatgagtatgtttacaaaacagaagtagcaaatcgaatagtttttgggaggcatagtccccggacctcatcattattaagtgagcttcatgtcggaaagtctattgttgatattgcaatttttaacggaacatctacagcgtatgaaattaaaacggaatatgataccccgcgtagattgcaaactcaaaccccagattatttaaaagcattcgataaagtttatgtggttactcatccaaatttatctgaaaaatatgctgagattgttccagataaagttggtgttattgcattaaataatagaggtagccttaagatagttaaaaatgctgagtcaaatttagctaatgttgatatattatatatttttcgtatgctgaaaagaagtgaataccttccagcaatagaaaaattcattggcgagaagatcaatttacccaacgggcttatttatgcattctgcgaggatatatttaaaaaaattccacaggatttagctcacaatatttacattaatgcaatgagaggcagaacgacaagtgatgatattgtaagctttgttaattgccttcctagttgccttcgtgtgttgggaatgtcatctgctttatcaagtgttcaacgtaaaaagatcctcacggttttggggatagtgtag

SEQ ID NO: 226946 - DNA, 957 bp, Klebsiella pneumoniae
atgtatagtccatatctatatggtcgtggttctgagctgttagcgctaagagaattggcagcaagttgtactaatgctgagttgtttataccgataattgaacctgtgctaaccaaaaccgataaacttatacgttgtttagagatactttcagagaaaaacaagagggtcatgttagtcatcaatccaaaacaacatgagtttagtaaagatatagaggctcgaagaaaatttgtagcaacgattaaaaataatttagataaatgtaaaacgcttatccccacccttatagttgactcaagtgtagcaattgaaacccttaatggtttcttaaaagcatttgaaggttcaaatgttgctttaatatacaacaagccaagtattagcgatgtggaattttccaagttaacaaaattaaaatttattgaatttcatatcactattgatgataatgttaccgattttcaatttaatgaaatccctaaaaataaacttattgaagtgaaagataacttcgtcaaattagataagaatgcagattactctggtcaagaagttttcacggataaacataaaaaaattggtaaaacagtattaggtatcggtgatttcactatagtcgggaaaaaacttgagattggtggtggcaaggctggtgccgttgcatctcatttaatttataaacatcctgcaagcggtgatatatggatagaacattttgtttcgaatgacactgatagagacattggcgacgtagcgtcaaaattcttacaaatgacagataaaattgaaaaggaagttagaacaagggccacggagtacggctctaataaagcattagaaaaatataacgagcattataaaagcagaacgtttcccggtttggggaaaaataaagaataccagattagacaccacatacagcacataattgatgtaatatcaggaaaaatctga

SEQ ID NO: 226947 - DNA, 1233 bp, Klebsiella pneumoniae
atgcaaacaacaacggccctgcgcctgtatggcaaacgagacctgcgcctggaaacctttaccctcccggcgatgcaggacgatgagatcctcgcccgggtggtcacggacagcctgtgtctttcctcatggaaagaggccaatcagggtgccgatcataaaaaggtgccagatgatgtggccaccaggcccattattatcggtcatgaattctgcggcgaaatccttgccgtcggtaaaaagtggcagcataagtttcagccagggcagcgctacgtgatccaggccaacctgcagttgcccgaccgacccgactgccccggctactcattcccatggatcggtggcgaagccacccatgtggtgatccccaatgaggtgatggcgcaggattgcctgctcacctgggagggggatacctggtttgaaggatcgctggtggagccgctctcctgcgtcattggcgctttcaacgccaattatcatctgcaggaggggagttacaaccacgtgatggggatccgtcctcagggacacactctgatcctgggcgggacggggccgatggggctgctggctatcgactatgcgctgcacggccccatcaatccttcactactggtagtgaccgataccaataagccgaagctcagctacgcccgccgtcattacccctctgagccgcagacgctgatccactacctcgacggccatgaggccagtcgcgatacgctgctggcgctcagcggcggccatggcttcgacgatatcttcgtgtttgtgccaaacgaacagctgatcaccctggcctcctcgttgctggctccggacggctgcctgaacttctttgctggcccccaggataagcaattcagcgccccgatcaacttctacgacgtgcactacgccttcacccactacgtcggcacctccggcggtaatactgacgatatgcgcgccgcggtggcgctgatgcaggcgaaaaaggtccagacggcgaaagtggtcacccatattctcggcctgaacgccgcgggcgaaaccaccctcgatctgcctgccgtcggcgggggaaaaaagctggtgtataccggaaaagccttcccgctcacgccgctgggcgagatcgccgatcccgaactggcagcgattgtggcgcgtcaccatgggatctggtcccaggaggctgaagcgtatctgctggcccacgcggaggatattacgcatgattaa

SEQ ID NO: 226948 - DNA, 825 bp, Klebsiella pneumoniae
atggaacagaaaaaaatcacgcaaggcgacctggtgagcatgtttctccgctccaacctccagcaggcctcctttaacttcgaacgtattcatggcctggggttttgctacgacatgatcccggcgatcaaacgcctgtatccgctcaaagccgatcaggtcgcggcgctgaagcgtcatctggtgttctttaataccacgccggcggtgtgtggcccggtgatcggcgtcaccgccgccatggaggaggcccgggctaacggcgcggccattgacgatggcgctatcaacggcatcaaagtgggtctgatgggcccgctggccggcgtcggcgacccgctggtctggggcacgctgcggccgattactgcggcccttggcgcctcgctggccctctccggcaacattctgggacctttgttatttttctttattttcaatgcagtgcggctggcaatgaagtggtacggcctgcaactgggcttccgtaaaggggtcaatatcgtcagcgatatgggcggtaacctgctgcagaagctgactgaaggcgcctccattctcggcctgtttgtcatgggggtgctggtgaccaaatggaccaccatcaatgtgccgctggtggtttcccaaacgcccggtgcagacggcgccaccgtcacgatgaccgtccagaacatcctcgatcagctctgccccggcctgctggcgctgggcctgacgctactgatggtgcgtctgctgaacaagaaagtgaatccggtctggctgattttcgcccttttcggcttaggcattatcggcaacgccctcggctttatgtcctga

SEQ ID NO: 226949 - DNA, 2001 bp, Klebsiella pneumoniae
atgggtttcagttctttgcaggaactgctggcctttacacctgataaagccaatgttctggctgtcgataccagtacaggagaacaatatttgtggaatggtaccgagtgggtaccttctgaataccaggtcaattcgcagattaaatcgcttaacgaaatcgttgagaaaagccacagcacgaagttctttcatcggtggaaagacaggatcggaacgattatcgctgggtggaaaaacgatgatgtgggcggtgtttattttctgtcacgtctgctgaagttcggcccgaatggtttttttggcgcgggcatgcaactgtcagaaaatgagatatcgaataaaaccatcgcattcaaaaaggggctggacggtaaaatcagaatcttcgataaacgcggcgtgatgctggcctcgattgagaacggcaacctgcagatggccaaaatgaatattgaaaccatgctgcagttagctgttaagtccgggaatacttcgctaaccatcaaaaaagatggcaaggggatcagcgtttctgacaagcggggagtggtatgtttcaggattgatgaaaggggttacgttcacggtaattttgtgaataaaggcgggagcgccactccggttttgactgaggaacagattattcagcagcttgaaacttcagcctttgcaaagcagtcaaaccgcttcaataaaattttcagttgctctccaaagtcccgtaaaaaagtaaaagtcattcttgtttacgggcagtctttcgccgctggcgcgcaaagcaatgcagcgctcacgactacaccgctttatggcaatgtgatgttgggtcagtcgccccgtggatcattcttctctaaccctccggtagggagtgaggtatacgggccggttggcggggagaataaattttatcctttgcatgaagtttgtcaggacgtggacggaaccattatcccgcaaagtggatatggcgaaacgatttgttcaacggtcggcaatgagttcaagcgcctgcacaacgaagcaatgggcgtcgccaatgatgatgacatggttgtttgtgtaggtagttgcggtgtatccgggcggtcgattgcgcagctacagaaaggagcatccccggagctttacaacagagttgaaacctttcttgcaggcgtcgcggaagcttgtgcagctgatggggtggagtttgaggttatcgggatcatttacctgcagggagaaaatgataattccgccagcaccacttactatgccgcccagtcacagactatgcggcagaaccttatcaattcctgtaaggcggcatccgggcagaccttcgatccaatttatttgattaaccagattggtaacacctatatcaacacaatgggcgtaccacaggcgcagaacagactgccggagcaggccgacaaaaccattctggttggttcgtatcagggactgcctaatcccggcgcacatctctgctcgaactcataccgcaagctgggttgcctcttcgcgcgggaactatggcgctattactctggtaatggtgatttcacttttcggatactgaaagctgttcaccgtgaggacaaagtttatttgtctctaacgccgcgggtagcgccactgaagttttctgctgtttacgataaatggacagagacactccacgcagataaagggataacgctctcagatggtgccgggacattttccccggaagattttagcgttgaaatagtttctgaccgtgtgatccgcattaatgccagtcgtgtcttaaccggagcagtgactgtatcgctgggggataaaagccataacggtactcataatatcagcgactcgtcaaatgaagttggtgggcttaactgggtatacggaataaacggtcagtatactcaggaaaatataccttctctcgttaataaaccttacgcgctcaataattttgccgccattcaacaaattcagtcagaggaaattaaatatgtctcttga

SEQ ID NO: 226950 - DNA, 204 bp, Klebsiella pneumoniae
atggaaaatcaagctcgtctcatccgtttaccagaagtcatgaagaaaactggatttggtaaagcgtggatctatcgtcttatcagccaaaataggtttccacagccagtaaagatcggggttcgtgctaccgcttttgtcgaaagcgaaatcgatgaatggattcaattaattatcgaaaattcaagaaagcatgtcgcttaa

SEQ ID NO: 226951 - DNA, 1206 bp, Klebsiella pneumoniae
atgggatataaagtaaagaaattcatcatgagtaatggggagcgaggatgcctgatccttgataaaaatagtaatctaccagcttactatcaaaatctatttcttactacagacataagaaatagaggcgcaaccgcctcaactatggaaatagttgcaactaacttactaatttttagtaatttcttagatagtaggaaaattaatatagttgatagaattgagcttaaaaagtatctcagcgttgcagaaatagatgatctggtaagatatgcgaaacaaagattcgacagacaaaaaattataaatataaaatcagcaagtaataggtttattgcgaagagaacctttagttatagaatacacgttttttcacgctaccttaagtggttatgtggattagttcattcgtcaaaggggattcatgcaaagtatgaagtagacgtatttattgaaagtatcagagcacatattccaagaaacagttcattgaatatgaatgaaatatctgaaaaatcgttaaatgaagaagagatcaaagtgcttttccgtctattggaaattggcgggattgaaaaccctttccataaggaagtacaggtcaggaacagactaatatttaccttgctcttaaatttaggtttaagggctggagagttgctcaatcttaaaatagatgattttgatctcagagacaacactttaagtgtagtcagaagacatgattcaaaagaagatggaagatcttatcaaccattagtaaagactggagaaagggttattccgttatctgatgagttagcctgtgaaatttttgattacataagtaatagcagagaaaaaatgacaaaaaggaaaaagcataatttcttattggtggcacattgcaccggaaaaaacgcaggagaacccttaagcatttcagcttatgagaaggtgatatcaacactgaaacgagcaagtccagagctatataatctttcaggccataggttaaggcactcttggaattatatgtattctaaaggaatagaaggtgctgaattagaatatagtagaaggaaagatttaaggaattatctaatgggttggtcaaaggagtcaataatgtgtgatagatacaactataaatatatatcgcaacaagagaagaatgtcgtcctaaaggtctataaatcagtaagtaaaataattagtggagtttag

SEQ ID NO: 226952 - DNA, 381 bp, Klebsiella pneumoniae
atggcactgaccaaaaaacagcgcgcagtgctgcgcatgaaatttggcggacgctgcgcttactgcgggtgcgagctgcgcgataaattccatgccgatcacgttgaagctgtacgcaggaatatcagtaacggctacgcaatggacagacctgaaaacgacaccatcgacaatatggtaccagcgtgtatcccctgcaatctgttcaaaatgtgcagcacggttgaggattttcgcagccgcatcgcgactcaggtagatgtgactcgccgggcatcgagaagctaccgtacagcggaatcattcggcctggttcaaccaactaacgcgccggtagtgttctggttcgaaaagtatcaggcagaaggagccaaccaatga

SEQ ID NO: 226953 - DNA, 750 bp, Klebsiella pneumoniae; identical to SEQ ID NO: 110495

SEQ ID NO: 226954 - DNA, 612 bp, Klebsiella pneumoniae
atgaagtctacgttatcaaattatggtataaccaaaccaataagcgttattagaaatccggtttctatagctaatacggagcggcagattttgttgaatgatggctcaattcatatagtatatgtggggcgattgactcctgaaaaaggtatagtagagtttattaaaaaagtaaatcatgaaacaacacaagtcattcatttacatatttatggcgctggtgagtcagcggaggaaattaaatctatcaagtgtagggaaggtttcaagattctttttcacggttttattgatagagatttactgattacagaaatctcaaaataccatatttttgtgttgccttctatatggttagaaaatgctcctgtttcgattgttgaagcagccgaagctggtttaccagttattgtgcctaattatggagggttggcggaaatggcagaagaaacattgtataattacaaatttgattatgaagatagtgacctttctgaggtcattacacaagcggctgataagaaaggtaagaataagctaaataaccctgatagtttctcgtacgagatgtacaaagaaagcattaaaaaaatatattctcaatctttctag

SEQ ID NO: 226955 - DNA, 1251 bp, Klebsiella pneumoniae
atgggaaaattatcagtcttagtgttactaatagtacaggctttttattttagtacacaggtatctgcagtcacatttagtgaccttaatggttccaatggaatctcctctccagaactttcgaaaaaacaagggattagtataatcagaatagatgttccatggagtgaaatcgaatcggtaaaggggaattatgattatacaaaatatgataatgaaattattagggccaaaaaattaggttacgatgttctacctgtacttgcatatgctcctgtttggaacaaaagtattaaaggtaaaattggctcacctcctcttgaaacatcttcatggaatggatttgttgaatctacagtaaaacgttatcgtgcatacccgtataatattacttatttccaagtctggaatgagcctactttgaaggccaaattttggttgggaaataatgaagattttgtgaataaaatctatatacccgctgcaaagatcataaagaaaaacaacggcaaggtagtgtttggcggttggccactatccaatagtataagtgagtttgattatgtattggagggtttaggtgctataaagtatacggatataattgatattcattaccgaggttataaatcctatataaaactatatgataagtatatcaaaacaaataaagcagacggaatttggcaaagtgaattaggatattcatcgaaacctggaaatttgctgtcttcgtaccttaaaatcatgagttgggcgcttagtcataattgggcaaaatcagatacttataaaattttttggtatccagcttgggcaagtcgtgaaaaaaagcaatatggcttagctacaacactaaaagatggaactacagttctcactgaaaatggtaatgagcttgtcttattaaatgacttatacggttctggtgaactagcggttcaagatgtacaaagtaatatgaaaagctcaattgatactgatgattattttttcggagtgaaaattagtccaaacaggatagttattgccgtgctatataatggacacgatgattataatcaactgaattattcccttatgacaaaaaataaccctcggcatataactttagtttcatctaagagaaaacaatatcaattagatcacacttatgaaaagggggttactcatatatttgttgataaagataagattcgcagcatttcaaaaggttatagtgatgtattctttattaaggtagagctttaa

SEQ ID NO: 226956 - DNA, 648 bp, Klebsiella pneumoniae
atgacctgcttattcgcaccttccttagtcgtcgatgcaaagtactattctgctgcctatctcaagcaaagaggtgggatcggtggggttatccatgaactttacaacggcaaagattatagcgaatgccaagagaacagtgtgtttgttcttcaccccgtgttagatgcggttgagaaagtcgtctctccacaggaatgggcgaaagacagttatttgggcgaactatccatgtttgattgggaacctgcacaccatcaacgccaagctacaaactatggtgcagtatgtgcaaacccaatgaagtcgcaacgctatcttgatgaaatccaacgtatgctagggatgtttctacagtacggcattgaagacaatacatcttttcgaggagcatcggatgatactcatgcggtgaatttttgtgtttcttgcgggtctgaaaaagtagttgatgtaacgaaatcaatgagttcaaataatcaaaagcgttggtatcggtgcaatgagtgtacacactttaccgtgtatacccactgtggtacatgcaatacacgattaattaagaatggcgagtattggacctatttgtctttgatgcctatgtcttcaattaacataaagtgtccaaactgcgagtctcccgtatga

SEQ ID NO: 226957 - DNA, 831 bp, Klebsiella pneumoniae
atgctgcagaagatagccaatgccgggaagtcccgcttcctgttgagcgatggcctggcgacggtaaacagggaagggattaagccctggactggcgtgatcactccgcatgagatggtggaggagctgcagagcggatttaccgtaccgtccgatgatgattttgatggtgtcgacgtgacgtacatcaacgggactacctgggcggaggagaccgttaaatgccggacgcctgataatcccacgccggtgaaaatcgagaactacaaactcgatggggtactgaatcaggatcacgcctaccagatcgggatgcgtcgcctgatgaaatacctgcagcagcgggtgacgttccagaccactaccgagctggacgcgctgtgctacaacacgggcgatcgcattgtgctcacggatgatattccgggtaacaacacaatttcctgtctggtggaggcgatgacaacggctggtggcgtgacaacgttcaccgttacggagccgctggactggtctttcgaaaatccccgcgcgctgatccgctatcaggatggctctgcatccgggctgatggtggcgagcagggtgggtgattttcagctgtcagtcccgcacctgagcgagtttgatgatcccatgcgggttgacctgtcgtcggcaaccatcgagccgatccgcctggtgttctgcggctcaacgcgccacgtctacgacgccattgtagaggagatagccccgcagtctgacggaacctgccaggtcaccgcaaaagaatacctcgaatcgttctaccagtacgacgacgccacataccccggcgacgctgcttaa

SEQ ID NO: 226958 - DNA, 345 bp, Klebsiella pneumoniae
gtgaagatgatcattttcgctttgctcgtgctggtggctgtgctcgttctgttacttctgcgcaaatatacccggctggagttcgtaggccatgccagcctgctgctgaaaacgtggtctgtaaagctgggagctatcggcgcgctggttggtgtatgggcacagtcgttcccggatgctgcgctgcacgcctgggcgatgctgccgccagatatcaaaaatattctgccgccaaacatcgttgcgttgattagccctgcgctggtggtgctggccgtgctatcgcaatacgtacgccagccagtattgaaagctaaggccgacgaactgaaggagccgcaatga

SEQ ID NO: 226959 - DNA, 861 bp, Klebsiella pneumoniae
atgttagtgtcgatgaaggacatgcttcagcatgccctgcgggacggctacgccgtcggtcagttcaacattaataatctggaatgggtcggcgccgtattaagcaccgcccagcagtgccgctcaccggttattttgggggtgtccggcggcacggttaagcatatgctcgggttaaaatgtattcatgacattgtggttaacgccatggagtatttgcatattgatgttccggtggcgctgcatctggatcatggcacctcccgggaggcctgcgaagcggcgatcgccgccggcttcagttccattatgtttgatggctcgcatctgccgttcagggaaaacctggccattacccgccacctggtgacgctggcccacagcaaaggtatctctgtggaggccgaactggggaccatcgccggcagtgaagacggcattgtcaattccgaagtcatctacgccgatccgcaggagtgctacaccctggtgacagaaacccaggtggattgcctcgccgccgcgctgggctccacccatggtctgtataaaggtaaagcccgactgggatttaccgagatgaaagccattgccgagcaggtgaaggttccgctggtgctgcatggcggcaccggtattgccgatgaggatatgcgccgggcgattgcctgcggcaccgccaagattaacgttaataccgaaaatatgtacgcctggtgccaacaggtgaaagcaattttcgccgccgacaccgggcacgatgtgaacgatccgcggaaagtcatcgcccagggactgcagccggtacgcgagatgattgcccgccgcatggcactctttggctcagagcagcgctattga

SEQ ID NO: 226960 - DNA, 1533 bp, Klebsiella pneumoniae
atgttactcaccgccagaacaccttcccgatacgccagcgccctggccgcgctttctgtctttatggcggccttgctgctgccgttaagttttaccggcggcgtcatgaccacccccgcgatacagcagtcgctgggcggctctcccgctgcgctgtcgtggctgaccaatggctttatgctgactttcggcagctttttgctggccgcaggggtgacggcggatgccatcgacagaaaacgtatttttatcgccggcgccgcgctgttttgcctgagcagcctgctgttttgcctgacgcacaatctcttcctgtcaggcgtgttgagggctctgcagggcctggccgcggcgatgattttagccagcggcagtgcggcgctggcccagctgtatgatggcgctcagcggacccgggcattcagcatcctgggcacggtgttcggcgttggcctggcgtttggcccgctgctgatcggcttcatgaccgacgcggtgggctggcgcggcgtatacgccctgtttgcgctgctttcggcaggggtgctgcttatcggactggcgtatctgcccgcggcagaaaaaagcgagccgcggacacccgacaacctcggcttactcctgtttacgctggccctgatgctgtttactgcatcgcttatggtcattccggcccgcggttttttatccctgaccacgctggccttgctcatcgcgtcgggggggctgttcgtggcgtttgtcgtgcgctgccggagggtgaacaacccggtgctggacatctccctgctgcgtcatccgcgttttgtcggcgtactgttgctgcctgtcgccacctgctgttgctacgtggtcctgctgattattgttcccctgcattttatgggcggagaggggatgagtgagccgcagagcgcactgtatctgatggcgctgaccacgccgatgctggttttcccatccgttgcggccctgctcacccgctgcttttcaccggggcaggtgtccacggcgggactgatgatggcctccgtcgggttgctgttgctggggaacgcttttcacagccaccatctcccgcagctggtgctggcgctgatcctctgtggagctggggcggcgtttccctgggggctgatggacggcctggcgatttccgctgtgccgatggcgaaagccggtatggcggcaggcctgttcaataccgttcgcgttgccggcgaggggatcgccctggcggtcgtttcggcggtattaacggcaagcaataacctgaccctgcagagtcgcgttcacgggtatgcgcctgaggtgattgaccgcgccgcaggctggctgggggctggcaatatgccgcaggcggctgcgcttttgcctgacttttccctccgggcgctgcgcgagagctatgactctgcttatacgctactgtttagcgggctggcggtcgtcaccctggtgtgcgccctgatggtctggcggacgctatgccggaaggcgggcgctatccaaacccgcgacagtggatgctga

SEQ ID NO: 226961 - DNA, 1065 bp, Klebsiella pneumoniae
atgaaagggataacgacatggatagtgctgggcagcctgctgctgtcaggctgcgaccagaaaagcatccacaaggatgtgccggtgaacccgctgaccgatattaacacccgcctggcgtttacctgcaaacaccagatcattcctgaggcgtctgctgaaaccgatgtcctgtttaaatatgcccgctggctgcaaaaaaataacctgattaaccgggataaaacggtggatgcggaaattgcgcgactgtatcgcatcgcggcggaaaacgggcattacaaagccagtattaacctgcagaacggtgcgctgcgcgggcgctttgcgctgagcagccatgaacgtctgcgcctgagtcagcaactgattgatgcgaaggtggccgccggctactactttattgccatctatctggagcacggtgcggcaggactggcgcaggacccggagatggcgctgcgttactatcgtaaggcggcagatgaagggaatccccaggcccaggcttatgttggtgaaaaactgtttccggccaaaatggcaccacaagtggccatgcagatgtttcaatgcgccgctgaacagggggaagggaaagcagctaattcgttaggaaatatgcttgcaatttacaaaaaatatccggaggcagttgaggttttccaactgggcgttgcagcaggagattcaacctcagccggtttcctgatgcacggattttccggacctgaaccaacggacaggctgttctatctggcactggagaaagacccggagcgtgcccgtcgttatgagcagataggcgctgtgctggcaaaatactcatgggctcagcctgtcgtcccggaaatcaacgatatcgtgccgctgccgccggcgccgctgccggaatgggacggcaagctgaagtggctggaggaacgggaggccaatatcccgccgccagaacccagcgcagcgctgatagagaaactggcgaaagcgaaacagctgaacccggcaacgggcaggccgttgccgacgtcaccggacttcgagaaggacagcgtggcggccccgtga

SEQ ID NO: 226962 - DNA, 810 bp, Klebsiella pneumoniae
atggatggaggtctcactgattcagtgaaacatgctttagaacagaggattaagagtcccttgtgggggttcattattctggcgtggacatggtttaattggcctaacctagcaatgttgttcatgagtgatgcgcctgtaaagttccgaatcgattacatcctttcacaggattatttctatctgtattacgtgtttgcccccatcctttctggcagcattttggctgttgtctctccctatgctcagtggctcctgtctcaggcacataggtgggctgatgacagatacaaggataatgtttttcagtccaaggagagagtgtttcaagataacatcaagctatcaaagcttaaggttcaatcagatatggcagtggatgttgaaattgccaaaatcaacgctgatatacagactgaagtcgaaagaggcaagcgcgagcagatactaactgaagagcttgaaacccaaaagaaaatccttgatgaaaaaattgaacttcttaccaaaaaacttgaggatgagaaagccgattttgaagagttgttaaaggaaaagcaaaagattcaagatattgcgataaacgttacgactctgttagaaaaagccctaagacttgatgacagaaggtcagttcagcaattggtggatgaaatttctgatttgttcagcgtggaagacttcgagctttcagaacaaaggaatgctctgaagaatggtataaggaaaaaacgaagcgtagctgaatttattgaagaggttaaactcaaccaaagcgaaacatcagagattaatcttcaaaataagtga

SEQ ID NO: 226963 - DNA, 564 bp, Klebsiella pneumoniae
atgactaatttaaatcaagctgtaagaattgaatcgccagttgcaagcatttcccacttattaccgttcgaacagaaacagcatattgaaaagttgtacttcccacggattcaacaggccactgaccgaatgagtaaagctgaatttgaatatcaaaacgctctagaatcccgctcagtgcttattcaacagaagacggctgagtatttggctaacccgtctgaaagacacggttttaaagttgttcaggtttacccaacaaaccagcaatctgtgattcaaagcatggctgaacaaggttatatcgttcatcgtgtaggaatgggcttaatctattttatctcatctaaaaagaatgctctgaaagacgcaactgataaagctgaagctgaagctgaattagccattgaaaagatgattgaacgtctgaaggtaaaaacctctgaagctgtacaccagcgaaacaagattgtgattgaagcccgtaaagctctggatgctgtaaaagactttacagattacctgaacgtgattgtcaccgattctgaagaggtgaccgaataa

SEQ ID NO: 226964 - DNA, 837 bp, Klebsiella pneumoniae
atgaaagctgtggatttaataaagaaaatggaattgtatgttcattccgcactttacgcttgtgagttggccgtcgctgctaattcggcaatgtcattttcggaggagaaatggtctactggcccaagtttacatagtgcagcaaaccgtccaagattggataaaacaatcctcccattagccctgaagacatccgaactattccagcttgcaatacatgttattaatgactttaaaactccagaaaaaggaaaaggtggggggcgaaagttcattaatattcatgaaatgactaagcctgaagaaattatgtcggcgcaaacaattctttacttgttttgcctgctggaagaatatgaattctatgtctacgaaaaggaattgtcctcaaatttacagaggatttgtaatgatgataaatacaccttgaaagatgtagaagaatatggcatagaaggcattagaagaaaaagcattgacaggcatatggcagagtatcaattctcctcatgtcgtaaaagaattaaacggtgggggaggttgggtgtaaaagagttatctgaaaatcagatttctctttatgaagtcatctcaaaaagacgaaatgaacttacccatttatcatcacctgaaccagcttcaagacttgaggcattgaactactatttagtttgccgaaatattgtccggtatatatcgatatgcttcggtgataaaagtatcgatgaagttgatgttgactgggaagtttggtctgagctagagcatagcattcaaaatgatagttcagttaatgatttggcaaaaatggttcgagatggtggcaccagagagtaa

SEQ ID NO: 226965 - DNA, 168 bp, Klebsiella pneumoniae; identical to SEQ ID NO: 202073

SEQ ID NO: 226966 - DNA, 132 bp, Klebsiella pneumoniae; identical to SEQ ID NO: 202072

SEQ ID NO: 226967 - DNA, 564 bp, Klebsiella pneumoniae
atgaaactctatgaaatcccgtttacccccgcttatagtgatgtaacccgaatcacttctttcaacggtgttaagttatctctttcagctaaaatgatttacctgtttatggtaggtcttcaaagaaacggtcaagaagtcttcccctcaatcaattacctgtgtgaattgttcggtattggacgaaaggttgctttaggggctttaacccaattacatgaatcaggtcttattagttctattcagcgttatgatagttctaaggtgtacacagttgaaatcatgccacctgaattaattaaacgccaccagcaagataataaacctgaatcagtatctgaaccagagaccataattaccagtgattctaataatgtccttccctttccagtgattgaaggagatgagaatccagttattgacgttgtagaagagattgaaccagttattatccgtctttctaaaccaaagcctaaatcagaaagtaaactgaattatctttttgtcagtgattcagaggaagacgacgaaccaattaaaatgccagtttatgaggaattataa

SEQ ID NO: 226968 - DNA, 150 bp, Klebsiella pneumoniae
atgagaaaagacatcccacagcaagtaacaatccgcgttgaagtatcacacgccattcaccgtaaaattgttgaaatggcagcgaaacagggtgttagctattcagccctgattaaaaacatgattcgtgaaaatgtaatcacagcttaa

SEQ ID NO: 226969 - DNA, 276 bp, Klebsiella pneumoniae
atgacctcatacttatggtgtaaaggtaaagagttgagcaagttggggtgggtacttgccatctttaacgttgcagcctttttatacctgaatcacatattgcttattgaccttattcaacgtgtggctgatacgtctgatggctatgtaagcatctttgatgatgactttgtgtcggatgtttcccgcaacaccattcagattatgattacctatatagcggcctcaactgctggcggttactttggagcaaagaagaaatttaaacaggattaa

SEQ ID NO: 226970 - DNA, 924 bp, Klebsiella pneumoniae
atgaaagaaaccatttataacatcttctgcttttgtcctgatggtgttcacatcacacattgcggaatcgttgcgcatgaacgagatggtgacgataatcaaaaactggaatttttaagcaagcagttagaaactgatttagcttcttgtagggcatttcatgacattcacccttctgtactcgatgatgacaaaaaactgacacttacaaggtacaacacaaacttgagagtgggtaatagctacgccccctttgagttggctcttgaggctgttaaagcccctgctaaccctttactaatcgttacaccagttgttcagaataagttacaatatcatattaagcatccggtagatgaacaattgaggaatgaacacacccctaactatcatattgagggggttcttgacattccagactaccttaataagtatttaacagggagtaaattccatctcaaaaagctgattaatgatgaccacatggagcctgtgaagcttctctttaatcaaaaacactatatatcgagctttaagctacttgtttcattgattgataccattgcttaccttgaatatggtgacgtgaaaaggaatttccaacaatggctcgatacctactcagaaatcagcaagttagatattacatccgatgaagtctatcagttgagaaactctttattgcacatgaccaacctcaactccagagatgttctgaagaaaaagcatcgacgcctgagcattgccatttgcaaaaaaggtcatccgactcagtatcatgatgaaattgtatatttcaactttacagactttttattcatctttgatgaagctgttgatagatgggttgatagctacagagatagtaaaaagcagttaactttaattgaaagatatgatgaagtattgagagataacttctga

SEQ ID NO: 226971 - DNA, 324 bp, Klebsiella pneumoniae
atggctaacaaaaaacatagtgtgtttaaagccctttcaatgggctttgaaaaagttcttgatgagcgtggttatgataatggcgcttattacgtcaaggatggcaagatttggatttttgatattgtagctttaaagcaaaagttaggtgtctcttcaaatgaagaattagaagcacaagattatgatgttgagacatacctttcactggaaaaagagccgaatgaattagcagcactatatgaagatatggctgttgaagatggtgaggcggtttatcttgaaggtggaatgtatctttatcctgatggctcaattcgctaa

SEQ ID NO: 226972 - DNA, 360 bp, Klebsiella pneumoniae
atgaacggaaaaaccaaactggtgattgtgggtggcgtgctggcggtgtgcgccggcattttctgggcgggatatctgaagggctggtacgcacattctgagcacgtaaacagccaggatgagaagaagagcaaaaagcagggggaagccgtagcagctggtgagcagaaggcggcgacggcgaacgccgaagccaaagtgatttaccgtaccgtttatcgtgatgtggtgaaatatgtcaacgacccgaatcatactgtgtgcaagtttgatcctgctgctgtgcagatgcgccagcgagcaatcgacgcggccaactccatccccggatttgatgaacccgccgtgcaagttaagtga

SEQ ID NO: 226973 - DNA, 204 bp, Klebsiella pneumoniae
atgaccatgtattacatccgcaaagaggaggacggcgtttacgccgtctccacaaccgatctcaacagcattatttctggagactggcctgactctgagtattttgaatacgcgatggcggctctggtttcttatctgtcacctcagccagaaagcgaagggtatgttctggttgataaaacccaccataatgaattcgaatag

SEQ ID NO: 226974 - DNA, 2643 bp, Klebsiella pneumoniae
atgtcggtacctaaccagaccccttataacatctacaccgccaacgggctgacgaccgtttttacctatgagttctatatcatcagtgccagcgatctgcaggtgagcattaacggttcggttgtcgccagcgggtacaccgtggcaggtgttggtaacaaggacggcggcgatatcacattcctgaccccgccggcgaacggcgctgtcgtcatgctcgaacgtgtggtaccaacgtaccggctcactgattaccaggacaacggcgacctgctggcggataccgtcaataaagacttcgaccgtatctggatggcaatacagcgcgcgttcatagaccttgggtttgcgctgacgcgtccaatttttggcgggccattcaatgctaacgggtaccgcatcgctaatcttgcggatccggttaatgatcaagacgcagccaccaaaaaattcatcattgaaaatgataagttaaacttatctcgtacgttgcacgtgcctgaatcgtcagttgcggtattaccaagcataccgggaagaaagaacaaaattcttgctttcaatgaccagggaaaccccgtcgcagttcttcctgagagcggatcagcagcagatgtgctaataaatttaggggccagtgatgggcttaaatggatcggaaagtgcaaagacctcagcacactgcgcacgattgagccaacgatttcagggcaaagtattattctggagcgtgctgttatcggcgggccattattaaacgtaattatgacacacaacccggccgcatcagatgcggtcgacgatggatacagtcgtttcgtcaccgctggcggtgcggtatgggatgcggatatttcatttggtcataacgtgtttctggcagggtattctgacgagctaaataaccttgccgactgcttgaatatgattattcaggataaggttaacaaagtaatttcccgtggctacgttgcgggcggcgtggatgctgagataagaattccaccgaaccccaatgctgaaggtatgacggatttttacatgaataaaaaaaccgtcaaaatcccgtcgtttttaaaggtctattccgcaccggcagcgatttatgattacagcgacttcaccactggtgtcggcattattggcagtaatgagtttgacggtctcaccaatgacatgatgttcctgaataacggtggtggatggggagccggatccggtgcctctaacagccataattctggcggatttattggtaatggctgtttaataaaaggcccgaatacaacctcaaatcccaacgcgacaacctatcctggcgtgcgctggggtaacgtcacgtatccgggcggtaaccaggcccatttcagggataccaccttctctgatgcacgtgtttccgggtggggctcagggttccgacctggctctgttaatacctatctgatggatgtggtagcctgtcattttacaaataacacatacggcatagatacctatacggcatggagcggtagcactccgcaatgggctaacagtggcgagaaaatgtcatttcgtgggtgcctgataggtaacaaccgaagccatgctgtttatctggataaccgcggcgatttcttctacttcgatatgtgcagcattgactacaacggtggggatgtattccattgcagcccgaccaacctcggggaagtgaattacattaacggccacatcgagggtaacagcggattaatccttaactgtccgacgcgaacaacgaatgacggggaaaataacgtcaaaattcgcggggcgaaaatctaccccaataaatccaccaacgataaatatggtggcgtcagagatattgtgttcgggacaaccatcaggacgattctggagctggatagttgcaatattttctgccgcgcaccgtatgttaacggcgcatacccgacctggaaaagttataacccagccaacttggcacgtatcatcattaaatatccaggcagcggccagacgtaccggttcctgccatcctatgacggggcatacggttatcgaatcaatgacaagctgctgttttccggtactgaaaatgagaacgtccccacatcacgaacgggggatttctggtgcataaaatcaggcggcgcatcatgtgtgtacggcggcgctggtgacgtagacagtgacggtgtcatcccaattaaaatcacgctgaactcgccgaccgatacggtgcagttgctgttcagccgacaaataacaccggagcggggaacgcagcatattcatggtttttgctcgataaaagcggcggcgtttgccggggcactgaacgtatcggctatcgccagaaccattgccagcgtcaccagaacggtaactgcagcacctggacctgtaacggaaacggagaatctgtacggggtaaaccagagtatttctcaggacattctgacttcgctggcaaaccccacgatttccatcaccaaagatgactacatgggcaccagaccgctggcagtccagctaatcggcgggaattactcgtatcttggattcctgttcaccggcggcaccggtaccttctacgtcaagttaccggtatgggcaaacctcgattcgcatccgactatcggctaccagtaa

SEQ ID NO: 226975 - DNA, 327 bp, Klebsiella pneumoniae
atgcgtacaattatattttctgcaacagtatcattctgtttttttttactaccgttcaccgcttcggcggtagtgttcgggggaagcaatttaggtttcactggttaccctgactttagcgaatccgaaccactaccgccatatgataacagtgacttatctaaaaactcctacagaattcaagttgaaagttatgtaagaagtgctcaggaatatctagataatgctaatagcgatataaaacgcatacaagaatctaagaatgagacggcagaaaaggctaatcgcgtgattgaatcctacaataattacgctaaaggatattag

SEQ ID NO: 226976 - DNA, 441 bp, Klebsiella pneumoniae
atggctcgaccgagaaaaaccattgaaacgccggggcaggaaaaagcagcaccggaagaaaatacgctcgttattgaggggcagttaattaccgctgaacagaacggagtgcagcagcagggtagcggtagcgacgaacagacggtgcagcggaaggtttcaaccctgcttgatggcactcaactggcagaacgtaacgccattctcgccacgctcaacgagcagggcgcagccatcgtcgcccgcttcgaagagtacgccttcacggatgaaattggccacccgctgaccaactgcctcgatttcctcaatctggtgcgcaaagccactgaggtaagcactggcggtacggcggagcaggtgacaaacgaggaaggcaaaaagcaacccgtacgcagcgcgccggtattaaccgaacacggctggcacgttccgggctaa

SEQ ID NO: 226977 - DNA, 519 bp, Klebsiella pneumoniae
atgtcttattatattagaagtattaaatcggagttttgggagaatgagttacctaatggcgggcatatgactatgcctgccgattgcataacaaattgtttaaaaaccacctcgaattcattatcgatatggaagacggaaagtttagaaattcatgatgaatataataaaaaattgcttgcggcaatggctttaagtgttgatcggccaaagcaatataaggttgtttttatcagtgatgaagaactggaagagttaggcttaacccttgctgagacgccaggtgatactccatttgaggaatatcaacatacacacagagatataactaatcttacattagatactattggaaaattcgcttggcttattcaaagtaaagtcaatgatgacggggaattcattgatatcgtttctgttgaggaggttgttgattttataaaaaatatatttcctgacaaggatagtctgccagataaaccaaaatcgtgtaaaaaatggagagatatctatcaataa

SEQ ID NO: 226978 - DNA, 642 bp, Klebsiella pneumoniae
atgagtggtgagatcattcactttgacttcagccaaccaaaacctgctttagtgttgaatcataacatggttttgtttgaacaaaatagcagtagtagtattgaaatcaaaccgaaagctaataatgaaaatgatgttattttacaacttaataattcggatggggggcccggagcacaggggggagaactaacaacagacttgacagttaataaaacaatgcaacacattgttgatgtgatttatagttcatttttgtttgacaatatcgaacaaggttttgagtcaaaaacatacagagtaatcaatgaattagcgaaaagttatggttttgagctcattgatatggcattaactcaggtcattctaaaatatatagtttcaagtgaagtagtggtcatatgtaaatctattgctcttttaaccgaatttgatgccgatgaaattccggctgcatcggtattggcaataacctccttttcccacaaaaaaagtgatgccgtaaaagagatggtgttgatgtcaattgagacatggaaaccggaaatggcattgaaactacttgaggatatggaaccctacaacaaaaaatacctggaaagataccgtcaaaaagttataaagatgcttaaaggacgatga

SEQ ID NO: 226979 - DNA, 693 bp, Klebsiella pneumoniae
atggaattgctttattcaaatacaagtattaattattttctcccatatcaattactatcagcagattcaaaatcgataattaaattaatgcctttcattgaagatggcttctttccaggttatgcggaagtcgctagcaatgattctaataataaagttagaactgtcagggttgataagagttttggggattatcatgttggtgtgacttttgctccttgggctgtaagtattacttttgagtctcagaaaagcgtaggttaccacacgttggtaacactccttgatcatgttttaaaattatttaatgcaacatttgagcaggaaaatattaaaggggggcgagtttctgttgtcattaacgatgcttgtaaaagcagccccgagaatgaaggtctgctttattctaaatttttcaaattagactctaagcctgttgaatggatgttcaggaatgttcttgttgaacagtttaaagatgagaagatttttaatattctatctataactaaggcgccagcagtcattaatgttaaaggcaatatatttgaaggcgattcaatattaatcaatgttgacaagaatactcacccaggcaactcagacttaaggttctccatgcgtgatagtggtttcattaaagatttactaaatgaggctctggaaaatatcaaggacgtaaaggagttatag

SEQ ID NO: 226980 - DNA, 234 bp, Klebsiella pneumoniae
atggatcttaaaacctatctaaagacctctggcgttcgccagcaggatttcgctcaagtggttggcgagacgcagggctatgtcagtcgcgttgcatcaggaaaatgcctacttggtgctgcaactgcattgaaatgggccgctgcaaccggctatcaagtaacaccgcatgatctactccccaatatttaccgaaaaccaactgacggactgccggaacagaatgcagcttaa

SEQ ID NO: 226981 - DNA, 2142 bp, Klebsiella pneumoniae
atgaccatatacaacggcttatttgagcccaaaaaatccgcaatcaaagactgcggcgccgtgcagctggcgatcgccgtcgaagcacctaacaagaaagtcgctgaaagtattatgaccggaaaactctgggagtcttacccggcgaacggagacaactatttcaaacctaagctgtgggaacacattgaaggccagccactgccggcagtcggccagttcgatgagcatttcgcccaagaaaacacctttgatggtgaaaaatgggtggctaacagccagaatgacggcggcaccgagttgccggcaggcgatgaagttatcgatctgatgacggtatcacccagggagcgttttgctgctgtattgctcttcagcctattagagattaacggacatctctattcgcaggttgtagattatcttgatgatctggataaccatgacgaatcaatggaagaggatgaccgttttaatttcaatgtgctttgcgccctgcacaacaacgagccggttaaacatatgcatgttgaaggcctgaataatcttattcagggtattttctcccattttgaaaaccagactccgggcaaagcggctatttctcaatttgtaaaacgctggcttgagaatcccggtaaacgagaagaaatggtaccaggccaaaattcctcactcggcgccgccagcactgataccaacgttaaaatcgcgccaaaacgtggttataaacatacctatgcaacactggatcaggagatcgctgttgccctactccctatttctcccgacgcaccagtattatcaggcaaccttcgcgatgctgagaaaatcattgcagacgagcgcgaagattttaaacgttggtcaatggcgcttcgcaccacagagcacattctgaaatatgaccgagacagtatttttggtgtagtgcagaacgtaccggcgaaagatacctatcatttccctgacagcctacgccgccacatcgattcatggctggatgcaaacggccgctttgaagaagccgacaccgcacctgtcaagcaaccagacactacagaaaacactgcctcaaacgcaggcgaaaaagcggaagtgccgccgccggtcgttacagatacccaggcgaaacaggcacgtaagaagcttaacgatatgggttatggcgtttatgcgtcagacaataacagcgccagcgagccagaggaaaaactgagcgtcaaagcgcaaagaattgctgatgatgtggagcagttggtagagcacataagccagaaagaaaccatgcctagcgctgaagaagtcgtgcgatcagtcggtaatcctggcaccgaacaagacaacctggctctgtggaaacgcgtcttcaaaaccgatgagcgctttaccaaagcattcacgcaaaacggcggcggcacctcaatcaacggcacgtatcttacgatgctggctactcgtgagttcggcctgaaaggcagcggctggggcgtcgatatactggaagaacgctttgacgatggagcgccaattacacggactgtaaaaggaactgacggtaacaatacatgggaactgatctcagatggtaatggcggtttcctcactgaaaaacatcacgtaatgaaaattcgcctttggtatctggtaaacgatgttcgcggagaagaatacgcctacggctgcacaccctacatttacggcagcaaatatggcccgatctgcgatggggaagccgctaaaaaatcccttaccgatgccactaaaaaggcgttatccggcctaggattcagcggcgatatctttatgggcctttacgacaatctggagtaccgccagaaaaacaaggcagagtttgatctgaagaatgccagcgaaaccgcagaggacgcagcacgtcttcgccaggagtttgacgacaaactcagccgtgttgctaacactctggcacatggcgtgacagtgaacgaattaaacggcgtgttctcccctatcgcgcgtgaaatcgacgttcacattaaagccgcacaggccaacggtgacgcacaacatgaacgctacctttctggccgtctgcgccgcctgattgccattaaagatggtcggatcaaagaactgaataaagccgaggagaaagcataa

SEQ ID NO: 226982 - DNA, 1227 bp, Klebsiella pneumoniae
atgattgacgaaaatacatttgtatatgacgatagtgaagagcctcttgctgtgggaaacgtagtcgtaccagcaggaatttcagactctgcaatcgaaaaacactatgaaacaggaaggcttcgtgtcgtacaggaaaggaatgatatttttctgacgcatgttttgagttttattagcgaagattctaaaaataaaatttggtcaaatattcggcctgaatatcaacgtcgtctgcgttgggataacaaaaagaaatctcaactgatcgaaagttttattatgaatattccagtccctcctatttttctttatgaaaaaactctcggtagcttcgaggtaatggatggtcaacaacgattgaatgccatagcatctttttatgaaggagaatttcaacttcagggattaaaaatttggcaagctctcaatggaaaaacatattctcagttaccaccattgataaggagaggattagatcgagcgaagatatctgctatcactttaatgtcagataattcgactaattctgaggatagcgtcgatcttcgcgctcaggtttttgaccgactgaacacagggggtgaaaaactaaatgcccaagagttacgtaatgcactctacgcagggcctttcaacgagttactgataaaattatcaagggagagggattttgcaacggcttgggggattcctgtatatgctgacaatatcagagcagatggaactgttagtgaggcacttgaaaaaaacacatattataagcgtatgtcagatgttgaaatagtattaaggttttttgcttttagacatcttgaaaatatttcaggttcagttcgtagtatgttggatgatacattaaaaaataaccatcacccttcagatgatgaattatcagagatggagttttcgtttaaaaaatgtcttaatctttgcataaaagtatatggtgacgatgtttttagaatcatgacacaaaaaacaaaaaatgattcaaatttgtcaaaaccattttttgatgcacagatgattgctatgttcctaaatcttgaaaatgaacataaaataattgaaaatgctaaaattataaaagccagaactaaagagttagctattccaggtagtgaaagctatgagttaattgtaggtaaagctaacacctcatcatcaataaaagacagaatacaaatcatttctgatgttattactgaggttgtaaatggctag

SEQ ID NO: 226983 - DNA, 489 bp, Klebsiella pneumoniae
atgtacgacagagtcctgcgccttttgcaatatataattaaaggactgaacacggcgaccacagtaatagctgcctttaacgaatttatgaaaggtaccgtgaatctcaaaaaggcagataccgatgacgcgcgcgcaagccgcgactggcttatcggtaagatgaatgatgttgagaagaacgataaagacccggtgagttatcctgcgatccttattggatttcgatcctttgccagaagcctcttttttaaacaaaaaagcggggtacgtaaatatcccgctgcatctttgtcgctaaacaaaactgacgtaaaatcaagcgccaatcacttccttaattcttttggcaatatattcaacatgggtttccagagcaaagtgccccgtattcagcagttccactaccgcattagggttgtcccgtttgaaggcctgcgcacccggtggaataaagaatggatcattttctccccagataataagtga

SEQ ID NO: 226984 - DNA, 873 bp, Klebsiella pneumoniae
atgaatagcaatgtgcatttctcagttgagtacaaatacgcagaagcagatggcgttaaggttttttaccgtgaggcaggaaatcctgaacatccggatctattgttactacatggtttcccaagttcatcccatcagttccgtgaattgatccccttactagctgataagtttcatattattgccccagaccttcccggctttggttttacagaggtgccacaagagcggggatatatctataccttcgacgcactcgctaaaacgatcatttcatttgtagataccctgcaaatggaaaaatttgcaatgtatgtatttgactacggtgctccgacaggcttacggctggcactgaaataccctgatcgtatcactggcctcatttcacagaacggcaatgcatatctggaaggactgggtgatgcctgggctcctatccgcgcctattgggacgatgcgactcctgaaaacaggaaagttatccatgatgcgattcttcatctggaaggcactaaatggcagtatgttcatggtgttgaggatcccgaaaccattgcaccagaagcatattaccttgatgcgttattactggaacgtcccggaaataaagatatccagttagatctctttttagattatgcaaataacctaaaactttatccaggatttcaggctttcttccgcagcactaagcttccatcacttattatctggggagaaaatgatccattctttattccaccgggtgcgcaggccttcaaacgggacaaccctaatgcggtagtggaactgctgaatacggggcactttgctctggaaacccatgttgaatatattgccaaaagaattaaggaagtgattggcgcttga

SEQ ID NO: 226985 - DNA, 597 bp, Klebsiella pneumoniae
atgaccagtccatccagtatcacggacagaggaggcccctggttcctcgcagaacagattgcgttagattttatgaataccgttgccataaccgataaggtggctcacgattttctccagactgacgctgatgttctgcactggctgcacaaagcaggaattgaaattcaggtgcccctgcatgatccctctggcgagttattactgtctgcaagaacactgagggaacttatacgcagtcttgtcgaaaggaaaaaaaaaggtcaacagttcgatcccgatggccttaatgaatacctaagaaaaaatgtaagctatcccaaaataattactgacagtgaaggtacatgccaggttattcgttgttttgagacagcctcacctgcccatgctcttggggctgttgcagaagcggcagcaaagctacttaccgagggtaatttcgagtacgttcgccagtgcgagcatccggactgtactctctggttttacgatcgtaccaaagcgcataaaaggcgttggtgcagtatggcactttgtggaaacaggattaaaattgccaagttcagacaaaaagcggccactgaaagatcataa

SEQ ID NO: 226986 - DNA, 966 bp, Klebsiella pneumoniae
atgaaagtgcataacatcgtcattcttggagttcctggcgtgcagcttctggacgtggcaggaccgcttgatgccttcgctgaagcaaatcgaatccttcaccgggagatctatcacccgattgtcatgtctcttgaaggaggcactatccctgcgtcttcaggcgtaaccctccatgcaaataccagcctttttagcttttccgtaagtggaccgacatcgtttcttatcgcaggcgctccggatattgccgaaaaggagttatctgaagcgcaaatcaaacaaattacaatgatttgccaggagagtaatcgtttcggttcagtgtgtactggagccctgctactggcagaaacagggttaatcaggcatcgccagatcaccacacactggtctgtcgctgctgaattcgccagacgttatccagatatatacgttaatgctgatgctctgtatgtctcggatggccctgtaagaactgctgcaggagtaacgtcaggtatggatctggccatcaggtttattgaagaggacgttggccgtgaaattgcaagagaggttgctgcgaaccttgttatgttttttcgccgtcctggaggacagggcgaatacactcgaaagcagaaaatatcaactaccggacgtaccgccttgcaggatttacaacgttgggtgcttacccatctggacaccacgcataatgctatggagatggcaactcatatcaatcttagtgttcgccatctgaacaggatctttcaacaggaaatgggcgtcagtacaggggagtggctggagcaggcaagaatatcgcgcgccagagagcttcttatcgaacagctaccaataaaagcggtagctgcgagctgcggatacagtagtagtgacgtcatgcgaagggcgtttaaaaaaattacaggaatgagtccggcgacctatcagaaaatatatggcgtcactaaatga

SEQ ID NO: 226987 - DNA, 642 bp, Klebsiella pneumoniae
atgttactgaccgtaaaaggtatacgaattcctgacacgcagatggctcgggatacaacatcattcattcgtgatactgaatcggatttactcttcaaccactccagcagggtttattactgggcagccctggctgctcagaaacgggaaatacatgtcgatcatgaacttctctacgttggatgtatgttccatgatataggtttaactcatgagcactgcagctgtgataaacgtttcgaagtggatggcgcgaatgcagctcgtgattttatgaaaagctatggtgtaacaaaggaagatattgataaagtgtggactgcaattgccttgcacaccacgcctggtataccagaatttatggctccagaaatcgcttttttaacgaccggggttgaaatggatgttttaggtattggttatgatacatacagtgatgaggagagaactgccgttgtaaaccaacatccccgcactgaaaacttcaaggaggacataattcaggccttttatgatggcattaagcatcggccagaaaccacatttgggaacgtgaaagcagatgtccttaaggacaaagacccaagctttacaccattcaatttctgtaaaatcattcgccagtcacactggaaaggctga

SEQ ID NO: 226988 - DNA, 903 bp, Klebsiella pneumoniae
atggataaactgaattcaatgcaggtttttgtgcatgtggtggatacgcatagtttcgcaagggcatcagaaatactgggcttaccacgatcaacggtttcacgtgttataaaagacatggaaacctatctcgggcttcaacttctgcaacgtaccacccgaaaactcagtgtcacagccgacggccaaagatattacgaggaatgcaatagaattctggcagatatcgctacaatagaatcttcatttccaggcagagcgcgacagccgaaaggccggtttaaagttggcatgccccagaccctcgcaagatacagctttattcctagaatatatgaatttctggatctttatcccgaactggatatgatcctctgctcaagtgataacattgaggatctggtccaggaagggtatgactgtgtgatcagaacaggtcggatcgaggattcgacttccctggtggcccgccctctcgcaaaatttaaatgggctgttatggcctctccaaaatatatagaggcgcatggcaaacctgagagcctgaacgatctggatagacacggagccgttggatttctgaaccacagaaccgggcgtaccactgactggttattttcgctggatggcgaagacagagtggttcgcatgaaggagaatttcgttgttgatgatactgatgcctacattcaggctggtattgccggaattggattaatccgggtagcgagctatctggttattccatttataaaaaatggatctcttataccctgcttaaatgagtattcatacgacttgcctttgtcattggtatacccgcagaaccgatatcttccaccttcggttcgctcgttctatgaatggagcaaatcagttcttaaccccccggaaaataactaa

SEQ ID NO: 226989 - DNA, 930 bp, Klebsiella pneumoniae
atgcaagttaaagatttcaatacagctgagaaagtattggtgctgggagcgggacaactgggagacgctatgctgagcgcactggtgccggctgtagaaaaactcaatggttcagttacggtgatcgtttctcccggctcatgggatgagcaaggaaaactcaggtcggaaacgcataaaaagcacaccgctgcaggtgcgcaatttatttcaatggatgtggcaggagccacaattgaatcattacaggaaaccttcaaatggtatgacaccattataaactgtatgggcttcgttgcgggttctggcacgcaactcaaaattacaaaggctgtcctggcagcaaaagtgaaacgttactttccatggcagtttggtgttaactatgatgtcgtgggtaaaggaagcggccaaccggtatgggatgagcagtatgatgtcaggaccctgctgcgccaacaaaattcaacagaatgggtcatcgtttccacgggcatgtttaccagttttctgtttgaacctgagtttaatgtagtcaacctggcggcgaaaacgattaatgctctgggaggctgggatacgcaagtcacagttacaacacctgcagatattggccgcctgacaaccgcaatctatttgcatcagcctcgtataaagaatgaagtggtatttattgcaggagaaacaattaactacggtaagcttgctgagacagtcgaaaggatgacagaacaaacgtttaccaaaaacgtatttacccttcctgcattactggatgaacttcaggctgacccggacaatcaaatgcttcgttaccgtactgcatttgcacggggaacaggtgtctggtggccaatgactgaaacgtttaatgtcaaaaataatatcaaaacagaaagtgttgaagactggttaaaagcggctctttaa

SEQ ID NO: 226990 - DNA, 195 bp, Klebsiella pneumoniae
atgccgttcgtcagcgtaagaatcacacgtgaaggaaatactcctgaacaaaaagcgaaagtgattgaggaaattactgatactctacagagagtattaggcaaaaaaactgaattaactcatatcgttatcgaagaagttgatatggacaactggggtgttgccggtaaaacagcttctgaaataaataagtaa

SEQ ID NO: 226991 - DNA, 714 bp, Klebsiella pneumoniae
atgagcaattcgactaaagttgcaatcattacaggcgcatcacaaggtatgggggcagatctcgtaaaagcataccgggaagcaggatataaaattatagcaacatcccgctccattaaaccgtctattgatgaaaatattctgacagtaaacggtgatatttctgagccaggtacagctgaccgtattatagaggaagctatcaagaattttgggcgcgttgatacccttatcaataacgcagggattttcatggcaaaaccattcactcaattcactgaaaatgattggaaaaaaaatattgcgactaacctggcaggatttttccacattacacagcgtgctattgaggtgatggaatcccagaaatcaggccatattgttcaaatcacaaccaccctggctgatcagcctatcaacggggtaccaagtgtactggcttctttaactaaaggcggactgaatgctgccacccggtctctggccattgaatatgcatctaaaggcattcgtgttaatgccgtatctccgggtgtcatcaaaacgcctatgcacccacaagagacgcatgctgcactcgcttctctccaccctcttggtcggatgggagagatccaggatattgtagatgcagtcatttttcttgaaaaatcacagtttatcacaggtgaaatattacacgtcgatggcggtcagtcagctggccattggtaa

SEQ ID NO: 226992 - DNA, 918 bp, Klebsiella pneumoniae
atgaaaagacaatttgatgacattctgctgggtagcattgaactcttttgcctggcagctgaatgcggcagttttactctggctgcacaggaagcaggtatcacgcctgcagctgtgagccgctcagtatcccggcttgaggaacgtttaggggtgaggttgtttacaagaacaacgaggaacatcaatctgactgaagctggaaaaaattattttcagcagtgttatcaggctctcctccagttaagagaggcagaacgggatgttatgggaaaacaaaatgatccttcgggcacgttaagaatcagtttgcctactacgtatggtcattaccgtattcttcctcttttgccccagtttcgggcacagtatcctaaggttaaggttgatatccatctgagcaaccggaatgttgactttgtcagtgaggggtatgacatcgcaattcgggtcaggtcacaacccgattcaacacttattgcccgtacacttgaagatgcacagttagtcgtggtggcatcgccagcttatctgaaaaacaatcatgcaccgcaaacgctcgaagagctttctgaccatgaatgtattcaatttgaactgccaagtagcggtcgtaaaatttcgtggctcttttatgatgaacgtaaagaacgcgaaataatgaccacaggtagctattgctgctcagatgatgtcctgggcgggttgacgcttgcagtaaatggtgcagggttattccagacctatgcctttgttgcagaacgttatttatccgacggcagcctcacagaagtactgacccagtatcgagggcgctctcgcccttatacccttttatatccacttaatcgccatcttccactacgtgtcagagtttttatcgacttccttatggagcatcgacaaaaatggaagtaa

SEQ ID NO: 226993 - DNA, 612 bp, Klebsiella pneumoniae
atgaccaccctctccccggacaccgtccgccgcattgaagacgccgctgccgccctgatcgccgccggcaccccgaacccgaccaacgagcaggtccgtcagcacctcggcggcggctccctgtcccacatctccccggtgatgcgcgcgttccgcgcccgccagcgcgagcaggccgctgagcaggccacgcccctgcctgcagagctggagcagctgctgaccggccagctggggctgctgtggcaggcggccgtgaaacaggctgaagccggggctctggcggcgcgcgagcaggccgacgacgatattgcccgggccgaccaggagcgggatgaggcgcaggcgacggtgcccgccctggaaagcgagctggcggtactgcgcggggtgatgggcgaacgtgaccgcctgctgcaggaggtgcgcgagctgcgcgcggaggcgctgccgctgcgcgagcaggtggcccgcctgaccgccaccggcgaacacctggcggcgcagctgcaggacacgaaagcggagctgaaggaagcccgggaggacggccgtcagcttcaggccgaactgctggctctggcccgccatgacgggaaggtgaaaaaatga

SEQ ID NO: 226994 - DNA, 768 bp, Klebsiella pneumoniae
atgcagccggctaagctacgcgatgagtcgcgctggtgcgaactacgtcaatttccgggcggtagctgcgatctggcgagcaacggactggcgcaatatctgatggagagtgagggatgcgacccgtgcatcatcttcatgcacgggaacggcgactttcatatagcagaaaactctaccgtacacgcgcatgtcatcgttctgctggacggggaatacatcgatctgacgttggatcagttcgccgaatacccggaatacatctcggctgaatctgtcgagtccggtggcccgttgggaatgcttttgcgtaatatcatgaagcatgaggggccggtcaaaacccggaaggttaatctcgatgacatggaaactatatatgcgtggttacgggactctgccgattccatactggctgcagatcgggagtggcaggctttggaacaatccgtggcagaggcaagggagatggcagagaaattgttcccgtttctgtctgacacgcaaataactgagagcgaacagatccaggcagatacggccactcacgtctctgcacagaaaaaccggcagccaatgacgcatgtgggggtcattacagaatgctaccggccccgcgaggtcaggctgcgggaaaccggcacccagtgggtcagcgagtgcggcctgcgcttcagaaagtccaccggcgcagcggtcggaagcggcgtctggagtgcaaaccgtctcgatttgaagagcatccgtgaaatcgggactgaagattaa

SEQ ID NO: 226995 - DNA, 1134 bp, Klebsiella pneumoniae
atgtatttttatgtggatgaaaccggtcataccggtcccaatctttttgaccacacccagcctgtgctttcctacggtgtgctttcctcaccggatgacctggacaaggttgccgaagcagatcttgctgccttgcgtaagaaactgggagtgccgcgcctgcacgccgcagaactgggtattcaccgccttgatgaggtggttgatacgctacttgtcctgcaaaagaagcaccggatacggtttgatgcctggcaagtggttaaacgggatcacgccattatttctttcttcgaccaggtgttcgaccaggggatgaatcctgcagtgccctgggttgcctactggaccccctttcgttacccgctgctgctgaatctggcaagcctgttcgatgatgaactggctgcaaaagcgtggcgtgcccgcctcgaagcccatgatgaacgtgccttatccctgttcagtgaggtatgcagggcgttacttgcacgcgtccataccctgggggatcaccgttacattgaactgattaccgatgcgttgtcctgggcgatgactcactttgacgagctgggatataactgcaaaaccggtaagcaaaaactgcagatcatgcccaacatgattggatttcagttcgtattgcacggtatctgttcccgcctgggagcaccaaatcgcaaagctgacatcgttgtggaccagcagtcacagttcaacaccacccagcgggagttgagggatttctattaccagatacgtgagatgccgtgggtacacggtcccggtttaccggtcatagatgtgacgaacatgccggctgaaccgctggtcttccagtcgggtatgcagagtgcagggctggagcttgttgatatatatctctggatcttcaaacgctttatggaaggaaaggagttaaccagaccccttgcccgcgtggtttacaccaatcgcaataccggcaggatggacagtgtctccctccagtcggtcgctaaacgtactaaggagttcctcgacaaactgccggagccgacagctgaaatgataaaaaaggccagtgaatacagggatcaggaagaggctaaacggctggctcatcgggtgcaaatcctgccgacatcctga

SEQ ID NO: 226996 - DNA, 492 bp, Klebsiella pneumoniae
atgcacaaagtattctataccctgcaggataatattatggactccctcgggttcccggcctcgttacgacggcagattaataatggggttctacaggccaataaacctgatcgacaggatacgatctggctacgctccgtcgtggcctggcattcctggctcagctatgagcaacattgcattcgctacctccgccccggccacgacggtgattatgaatttctcgagcggcatatacctcagctggattatctgattcagacgacagtgactgaaaatttccgatgtgatatcacggccatagcgggtatgggctgttcgagggatagcgatagagaattctccagcatccaggatttcgccatgaaaaaatgccaggcactgactattaggttaatgccaaatatcgtattaaatatgattttatgtgtgtggtttgattatcatatcctttgcgtgtttcccgccgtgcagatccgatttctggcttaa

SEQ ID NO: 226997 - DNA, 2493 bp, Klebsiella pneumoniae
atgcctgataacatatccttactgaacttcagatattcgcctgttaaaatcagtttaattattgcggctctgtctacagcatctcaaccagccagagccatagagtttgccactggcattcttaatatggatgataacgacaaagtcaaccttaaaaaattcgaacgagctggttatatcgctcctggtaagtatcgattatcagtttcactgaataacaacctcttacatgatgacgttgatatcattttcgtttccgtagacggaaacgaaaatgcgagaccatgcctccctgttgagttggttgataccatggccattaaacctgaacatttaaacaacataatatcgcataatgggtgcatatatgtagaagacattgattcggttaccacgacaactaacctatccaggtccgcattgaatgtttctgtacctcaggcatttttacaatatagtgacagtaactggacacctccttcacgctgggacaatggtattccagggtttatgcttgattatgacattgctgcgagcaaaattaattataaacacagcgataatacacaagattattccagctatggtaccgccggagtaaatgttgggccgtggcgtatacgtggtaattaccagtactcaaactataaaagaggcaacctgcgtgataccaactttgactggacacagctctacctgtatcgttccttcaatgaacaaggtctgaaattacaggcggggcaagtctatctaaattcaagtctgtacgattcgtttcgatataacggtttatctgttcagagtgatgaacgcatgctgccacccgccctccgcggttatgcaccacaggttagcggtatcgctaaaaccaatgctcgtgtaaagatcacacagaaaggccgcactctctatgaaacgaatgtaccaccgggaccttttgtcattagcgatttaaatcaggcagtacagggtcttctggatgtagccgtcgaagaggaggacgggagcgtacaatatttccaggtcaatacagcgagcattcctttcctgacacgacaaggttctatgcgctataagttattttctggtaaaccagtttacaacacgggcaaccgctatattggtcctgaatttatgagtggtgagatttcgtggggcgcatttaataacacctctctctatggcggttttatagcaacgaatcaaaactaccaggctgcgactgcaggtatcgggcaggatttacacttgctcggtgctctttctatggatgtcactcgggcgcagagcaagcttgaacagcagaatacaaaatccggatacagctatcgcgttaattatgctcgtcagtttgccagtaccggtagtcaaatctcttttatgggctatcggttttcagacagtaattacctgtccatgagtgattatcttgactatctgaaaattaacaaactttatcagcgagatcgcgaaacctataccgtcatgggtaatcaacatattccatgggtggacgtgaatacctatctgtcatatacccatcgtaattactggtacggggatagttccaacagtatgtcactttccatgacaagaaactttaacgcctttgatttccgcaacatcacaggcacgttgtccgtgtctaaaacacgttaccgggaatcagatgacagacagatttactttggtataagcatgccaattggtacgggtcaacaaatcagttatgacagccaatatggtgaaggcaatcgctcacataccgtttcctactataactccagtgagcgtgatcgttcctatcgtctctcagcaggaggtcgggatacagacatcagttcaggtagcgctctcgttcgaggtagttatcgccagcgtacacagagcggtgcgtttaatgtgaatgccagccaaaaaaatcgtgcctatcgttcagtcagcgcagactggaacggctctgtcaccattacaccttatggtgctgccttcagcgaaagtcttggaggcgaaacgccgagaatgctggtttcagctcatggagtgtcagatgtgcctttcaatggtggcaatgcaaaaacaaaccgtttcgggattgctgtaataccaggtggcagcagctttgaaagtaatagttatgccgtcgatattcgcagacttccggaaaatgtcgagatggaaaaatccatcttccagagtaccctgacggaaggggcgattggctataaatctcttccggtaaataaaggataccgtgtgatggcgacgattacgctcgcagatggaacggctcctggatttggttcgccggtgacagatactgtcagtggcagagaactcggtattgttggccctggtggacaggcctatttatcaggtatcgacgataatgcaaccgccatcgtggatctgggtaatggaaaaatctgtaacattcacttcccaaaactcaccggtacagcattaacaacattattattgccgtgccagtaa

SEQ ID NO: 226998 - DNA, 750 bp, Klebsiella pneumoniae
atgatcgccagtaaagtgatatatgattctgaaaccgggagcctggcttgctccggacatattaataatgaagagaaaaaaatcactaaaactgctaacagaatactaactttattaattgaatctcatggtcatgtggttgagcgcgaacacctgcttgagcaagtctgggaatctcatggtttagtcagctctaatggttcattaaatcaatatataagcattttaaggaaaacattaacatcattaacagatattgaagatatcattgtatctataccaaaagttggctttataatctcccaggatatcgaaatattgcaattagaagaaaataaaattttagcaaatgaaataagcactaaagcaataaaaaaaacgtctttatccacgaagtttttacttcttacaattattatcgctttaatttcaaacatcatattttctatatattctgatgataatccaagatataaaaccgcaaaaaaactctatgcgattgataaatgccagattcaggcttgggctaacatgcctgaaaatgttaatgaaataataacgaaagctatttctgaaatagcgccgaaattacttgaacaatgttcaaaatatcacgcagccatatttgtcagcttacaaaaaagcatttaccagaatgaagatggaatagttttcctatcattttgcccattacgtgaaaataaaataactcactgtaataacttttaccattacaaatggaaacaataa

SEQ ID NO: 226999 - DNA, 219 bp, Klebsiella pneumoniae
atggtcaatactaacggttcaaagtactggcgcatgaaatatcgatttgccgggaaagagaataagctctcattcggaacctacccggacatctcacttgctgaagctcgcactaaactggatgaggcaaaaaaggtattggcgaatgataaggatcccggagaggtcaataaaggccacgcagttagccaaaaaattctcggataccaatgcatttga

SEQ ID NO: 227000 - DNA, 276 bp, Klebsiella pneumoniae
atgttgtacaataaaaaaggccgcatttctgcgacctatctttacccttaccgtttaaaaatcctcaataagttcttgagcgattttgtgcacctgttgagggttaaactctccatctactgcagggtagttgcattctggcagagtccactcactaggctgatcttcatcaccctcaatgtgaactcctgggtcatttctataatgctctcgattggcgttcacttctttaatggcagctattgcaaaatcacgtccatgccctctgataactag

SEQ ID NO: 227001 - DNA, 555 bp, Klebsiella pneumoniae
atgactatcacactacaggcagtaaacgagctcatctcctccctggagagcgcaggcgagctgtcgatcagagagacaaaggttatggcgctggcgaaagcgtttaagcagctggctgcggagaatgcagggctgaaagcaggagcttcatatttctcatacggctctgagcacaatttcgagtggcacaaaacggctgaggaagctgtcgaggcagctgaggctgcaattgacgactatcgtggcgatgcttgcgatggatggagtgaagaggtcgatagcatctgctggggcatcatcatgcaatcttcaacgaaggttggcgaacgcccacgcaacgaagatgaccgttgtgatcccgcaatcgatacggtttgcgattatgcactgttgcctaatatcgaaaccaccgccaccgatcgcatcgtagccgggattaaggctgatggggtggagatgttcgcgaaaaagcttgagtcacgtggaaggcatcaggactacgttgcaattgccaacgcattcgccaagcagctgcgcgagggggcagacaaatga

SEQ ID NO: 227002 - DNA, 573 bp, Klebsiella pneumoniae
atgactgatatcaccgaactggcgcaatctgaaattaatgatgcgttggcccagcttaagcagatcagcgaataccccacgccgtctactcaatacgctcgagtgctgcgtaaatacatcctcgcgctggagaaggcgctggagaaggcgcagaagcaaacgactgaaagcgaaaaccgcgttcgcaagcagaatcgccacatctgtgagctgttcgacgataacacagcactgcgccagcgcatcgccgagctggagtcccgcaccgtcaccgctgccgccgctgatgtactggcagagcgtaagcggcaggttacgacggagggatggacgccggaacatgatgaccagcatgtaaattttgaaatggcaattgcaggcggactgtacgcgatatcagctgttgatagccatcataagttacgcaattcagctccctcagcatggccatgggacagaaagtggtggaaaccggacggtccgcgacgtgacctggttaaagctggcgcgttaattctggctgaaattgagcggctcgaccgcgccgctggcatcaaggtggaggctgagtga

SEQ ID NO: 227003 - DNA, 375 bp, Klebsiella pneumoniae
atggcactgaccaaaaaacagcgcgcagagctgcgcatgaagtttggcgggcgctgcgcttactgtggctgtgagcttggcgataaatggcacgctgaccacgtcgaagcagtacgcaggaatatcagtaacggctacgcaatggacagaccagaaaacgatattgtcagcaatatggttccggcatgcatcccctgtaacctgttcaaaatgtgcagcaccgttgaggattttcgcaatcgcattgcaacccaagttgatgtgactcgccgggcatcgagaagctaccgtacagcggaatcattcggcctggttcaaccaactaaagcgccggtagtgttctggttcgaaaagtatcaaggggagactgagtga

SEQ ID NO: 227004 - DNA, 228 bp, Klebsiella pneumoniae
atgggcgtaaaaaaaatgatatgcgtcagttccactacgccagcctggtttactccgggcgccgtatacgactcagaacctcgcggtgttgatacctgcatttgtggtgacaacctcgtttcaggcctcaacaaagaggactggtacgaaatgagccagcgcgcagatgggctgtggttcttaatcggttttcagcaggcaattttatttcggggagccaaccaatga

SEQ ID NO: 227005 - DNA, 936 bp, Klebsiella pneumoniae
atgaccaataaccagttaaccagagaaaaagtgcaatggctccatgacgcggctgaagaagctgctgccgcgggtattaaattgacaatgaacccgaacgagctgctgatgttcaccagcgctctgctggccgcaattgacagcgagccggtgattgctgattgcgatccggaagtttacgagaagggtgtaagcgcatgccttgtagtcatcccgaaagaaactgcagaggttatctgcaaaggcatttcagcggccaccggttgcaaggttgactggcattacatcggcggtcgcgtgcatatcaaggcgctccaagccgccctgcagccagcgccagtggtggacagcgatccggtggcgttcatcgataaacaatggacgctggtctattacgttccgtctatgagtgtgggactaaaaattggcgacaagctctatcgccacgcgcagccagctcctgcctctcctgtttgcacatgccccagcggcgacggttcgctgcgctggccatgtccggtgcatgctggcagctctcctgcaattccggatggttacgtgatggtgccgaaagaggcaacccttgagatgatcaaatcaggcgccagtgccgcatcaaacgggatgcttatcccagggatatataaagcgatgctcgcagccgctgattgcagcatcccaatgatttcagatagatggattccggtaagcgagcggatgccggaaatgggtgagcatcaatgctatgtgttagcggctgactttaaaaaccactactggcccaacatccccaacactcaggtcggcgtgtatggcgactggtttggtgatggcaatcccgcctgggatgacggtgatggcgaagacctgcatctcaaagaagtaacccactggatgccgctgccagcagcgccacaggaggtgaaagatgagtaa

SEQ ID NO: 227006 - DNA, 198 bp, Klebsiella pneumoniae
atgagtaaccaaatccctgaagctgtagccgtagcgatgattaatgcggccagagatattacggtagcaaaaattaatgccaaaggcgcaaagttcgacggttatacaacctcggtaaactggtttgatcgttcaatgaaagaggtccgcgaagccgttaaagcagtgcttcctgacattgagcgggaggcaagctga

SEQ ID NO: 227007 - DNA, 141 bp, Klebsiella pneumoniae
atgaaccacgacgttatcgaacgcatccgcgaccgctggcaaaagctccgtctctgccggcaccgcggcaccgtactggttgactaccgaattttgaagaatttcgtccgcatctatcaggcttcaggagagaaagcatga

SEQ ID NO: 227008 - DNA, 339 bp, Klebsiella pneumoniae
atgggtatacatcttgaaggttgtgaaattagtaataatgggataggtatctctgcccctgaatctgctaatgttaccgcaaaagacactaagttctttaacaacggagtgtctattgaagtccgaagcgatgacatcttagccaagcttttaccttactttagggagggcgtcccgcactctcaacttattgaattaattaaattggttcaatccaaccctactttgactgatgagcaaaaaacagaagctgttaaatcaaagggtttggactcttggcttgaagttggtgcaaatgcagcaaccatcgtatctgctattgctgcatttttcatttaa

SEQ ID NO: 227009 - DNA, 396 bp, Klebsiella pneumoniae
atgagcatattgaattttttatcttttgattcaaaggccaaaattatcaatgcattacctatggcgtatgcaaattttattggccatcagcacatcacagcagacacacaaaacggcgaaacagactggctcgggcagcccctcccagttgagcttgccgaaattagtgatttcaataaatcgaccggcgaattcaccttctcttttgtcaagcctcaaccgaatggtggttcttttcattcatacagaacaaggatgtccataaccgagactcaggaagggttagtatttagcgctgctggaaagcaggtttctgtttccaaaaaccccaccaaagagatgattagcgatgtcattgctcttgccgttgaaagcggagtgctttacagccaataa

SEQ ID NO: 227010 - DNA, 555 bp, Klebsiella pneumoniae
atgaatacgtctttaaataaagaaccatctatagattatttccgagagtgcttcacgtatgagtgcgatacaggagtaattaggtggcgcgagcggccagagcatcatttcaagaccctgcgagaccaccgcgtatggaataatcgctatcccgggaggattgctggctctataggttcaaatggatatcgtcaaattaccattctcggattcccggttaaagctcatcgcatcgcctggatgctccatactggaaagttattaaatggatctgtcgatcacgttaatggagtcagagatgacaaccgcatatcaaacctacgcatagcaaccccagaggacaacgcgagaaacaagaagcaaggagcgcttaacaagagcggatcgatgggcgtttattgggtcaaggccgacagaaagtggcgggttagaattggcgtcaatggtaagtacgtcagcgtaggagttttcagcaatttagaggatgcgctagaggccaggaaaactgctgagatcaaatatggctaccatgaaaaccatgggcgagcacaataa

SEQ ID NO: 227011 - DNA, 747 bp, Klebsiella pneumoniae
atgagcctaaagttgaccaacgttgttttccctggtaccggatataaaaatattagtgagtttattgttgaggatatctttgcagatcttcctaacaaatccggtctggttggcgcttattttctttctaatcaggttggaagtcctttaattaactatgcgaacctgaatatcccgctgctgaaggttggcacccccgttgttggtagcaaatacgcaacaacgaccacagcaaattattatgatacccagttaccatcaacggccgtcatgactgagatggggattagccttcctggtgctgattcgcagaatggcgtgttgctcgcgaactatagccagtcaccaaccagtggcgatacgtttcaatattacctcggccatgcgaaagcctttgggcagatgggtacctctattgcaacggctgacaccacggtatccaccaccgatctcccttctggagtactggcagtaactggcggcgttattaaaaatgcctccgtgaaatctatcgcatacgatccgaccaccgatgcgttagtgtcatcaacagcgtctagcgccgggcgtaccgtaacaactgacagaacgttgcgcatcggtacgtcctacgccacaacccagtttacaggcgggtcgagcgtatcggttgttctgctttttaatctcgaacttactgatgcgcaaatccttgctaacgctcgttggctgaaaaataccttcggggttcagtggggactgtggtaa

SEQ ID NO: 227012 - DNA, 987 bp, Klebsiella pneumoniae
atgaccaaacaagaagcccacagcagcattaaaatcccacctatggaatactttacgctcgacagggcagctagtattttgcaatgcgatatagatgatttacttcactatggagttattggggctataccgttatgcgtaatgatgaggggttttccctctgccttgatttttgtgggcggtaaagatatacaagacccaattgatttttatcacgaacacaaaggaaactcatcatttctttttcgtgagaataactacatatctgaatttaattctatgttcaccgagcatgacgcatacaaaacagatggtgggtttattttatttagaggattggcgcacgggctatggtgtctgggacacagtgaaatagaaagtcttctttattctaagagggcaagggtgatagacacgacaattttcaggccgttcggatgggacgccttccgtgagaagactggcctttcgtgtcatataattagcgatagatattttaatcagagctggctaccgacgctaaacagacaactagccgaaagcgcaggttttcagttaagagagagccgaaagcccgcgattaatgagattttgacaacttccgatctatttattgccagagataccattttaaaactcaaaggcgcaatagacacaggcgagccaatgaaaagcataattaatggcggcgttatcgaattgagtttatcgccctcctctgaaaagaaagaacacgggaatacggtaaggtttcgtgaaaatcgagaatttatgatagcgaatttagtttatgtaaaactcacttacccggaggagtgcaagaatgacagaggcgatgagaccaatgacgcatgggcggaggccacgctaaatcactggggatttattggggcggggaaagaagcaccaagtaaagactatttgacaaaaataatcgccgacttgaagcgactgccagcaaaaaggggggctgtgggcaagccttga

SEQ ID NO: 227013 - DNA, 708 bp, Klebsiella pneumoniae
atgaccgccatccagaaagaagcctttcccgtggctggcctgatgtatgccaatgttaacgctttcgacaaggcaaagcctagccaccagaagccagaagcagggaatgattttcctcctatcaatggaatacgggagtttattgctaccgctgaaagccgcgccgcgtgggatttagtgaccagtacgcgcggagggcgtgactggttagaccaccagcgccgggaagcgtgctatattccatttgttgcggcaaaatccgcaaccgggcgtggaaacccgaattactgtatggcgacaccagacgcgccgagcgtctttttttgtgtcgatgccacagcgcacccattcacagcggcacagatccgcaccttgtctatggtggcgttagtggggaggcgttcgcgcctgccggagtccatacagtccggtatttccacccctgctaacgtcaccgccatttcagagcgtggaaactcaggcggtgactccaatacactgtatggaggctgccacatggctactatccccacccaaaaaccatctttcgtctggcttatcgcagcagttcgccgcgatatgccgacaattaccgccaaaattcaccatatcgccgcagagactgagcaggaagcccgccgcattctggcgcgggatcacgtttgctttttcgccggacgtattcgcacagggggcgcacatgcttaa

SEQ ID NO: 227014 - DNA, 180 bp, Klebsiella pneumoniae
atgcttaattacttccgtgttactggctacgccgtcaataagcgcggcctgaccgttggcattcattatgaaatcaccgcgagccgtgccagagaggccatgagtcacgccatgctacaggcgcagcgtgaggggctttctcacgtccgtattacccgcactcagggggtggcagcatga

SEQ ID NO: 227015 - DNA, 315 bp, Klebsiella pneumoniae
atgagcatgtataacgatttgatgcgcggcgactttgacaattgcacgcctgacgacctgaaagccatacagatccgcgcagataatgccgtgagtgatttaatgctgggcgtgagttctatcggcagcctgatgttctgggcggcagctagtgaaaactacgccgaggaaaccgcaaagggtgatatgtacagaattggcgcaatgctgggaactatcggagaagttacccgcgcattgaacgacaccgccgcaaacgccgcactcctgcattcaatcagcaaaaaagaagccaaagggagtgcgggcaaatga

SEQ ID NO: 227016 - DNA, 264 bp, Klebsiella pneumoniae
atgaatatcaacactatctgccaccaccccgcagaggccgaagcaagtgccgcgctattcaatgagcagggcacccctgaagccttcacgctggcacgccgtaccgctgaccgaatggcgcgagcgagtaaagggatcgtgcatgtaatgaccgacattctgccagatatggaggcggaacaatccacagaggtttattgctggctgtataagattctggcgctgattgagatgacgaaaattgatgcggaggaaaacgcatga

SEQ ID NO: 227017 - DNA, 627 bp, Klebsiella pneumoniae
atgagcaaggttttagcattccccgccaaagaagcccacatagaggccacgccagacggtatcaacattctgacgctgaacgatgacggcctttggcagcattcccggatgctgggctactccgctgcgattcgccagcttgatagcggcggctatgaccgtgatttgaccgcagggatgcaggttatttccgggatctgggaagccgagaggaaaggctacttcacagaaagcagcgagcaaatggcgattgtctggcgctggctggtggcctgtctgttcattctggagcagcaggaacgcaacggcacggtagatatagccaacgacgagggcggccatgatcgtgccgtgaagtacgtcgggaagcatggcgggataagcatttacccggctacagaacgtttttcactggcgaaccacgtcgaggcgctggcaattgagaaatacggcgcagatacaggcttgccgatggctgttcatatgtaccagagcatgacggaggcagtgccgggcgaagggctgaaactgtctgcgatggggcgtgagttgctggaagatgcgcacgacagctttatccagatgctgaataccgaaggtatgccagcagcgccaacagcgcactga

SEQ ID NO: 227018 - DNA, 2445 bp, Klebsiella pneumoniae
atgcgtaatatcgaccttatccgcgaagtgaccaccaccgccgcgaacaactggcctcatgtactggctggcctgtctatcgacgtgcctgattcatcacgccgccatgccccctgccctgcatgtggtggaaaagaccgtttcaggttcgacgataacgggcgcggtagctttatctgcaaccagtgcggcgctggcgacggcttagacctgattaagctggtgaaccactgcgacaccatcgaagcggcacagcttgccgctgacgtgctgggtattgattaccgggagacagaaacagaccagaaagcagccagccagagaaggaagcagatggaagctgaccgccagcagcgtgagcaggaaagccagcagcgggcggcagaggacgcagagcagcgaagggctacgtttgcccgtctgtatgccggaatgagccagagagccatacagggcgaagctgagtacctgcaatcaaaagggctgaccgggtttaattacccgataatgccggatggttcgttattgctggagctggtggacgaatccggcgcagtggcagcagcgcagaccattacaccgcagggagagaagcgacttctgacaggttcagcgaagcgcggggcatatcacgccgtaaacgcaccagaacagccgcagagcgtattaattgccgaggggctggcaacggccctttcagttcatctgatgcgcccggacgcgctgacagtggcagcaattgacgcgggcaacctgctacccgttgccgaagtgatgcgccggaagtatccacaggcacaaataatcatcgccgcagacaacgaccaccaccaaaacggagaagccaatacaggcagggaggccgcagagaaagccgccttatccgtggctggctgggtatcaatgccaccgacagactacaaagccgactggaacgaccaccaccagcaacacgggctggaaaccgctacagcagcatttaacgattcaatgtaccaaccgcagggggaagatgtgaaaccgcagctacaggccattgagggcggtaaaaaacgccggagcgcagaggccggggatatttcacagatggccgcgagccagaaggcgcggctactgtctgcccggtgggagcgtctggcagtaaacaccgacagtcaggcggtttatcggtacgcttgcggggtgtgggagaggctgccagaggcagagcttgaacgggagatggtggcaatattcgacgaacacgaggcgcattacacggagaaaggcgttaagtcggttgtagccaccatgaagctacagatcccgcccaccggagagcagccagcggattgtatcggattcagtaacggaatttatgacctgaaagcgcaggagttcagaccgcacgcgcctgataactggctgatgaataacaacggcattgaatacacgccagcggagcgcggggagacccttgcaacccatgcgccgaatttcacccgctggattaatcacgccaccggagggaatggcgacagagccgcgcggattaaggcggcgttgtttatggttctggctcgccgtcatgactggcagctatttatagaagtaaccggggaaggcggcagcgggaaatctgtatttagcagcatagccgtatcactggcaggtgagcacaacacagccagcgccagcatgggaacgctagacacagccagagggcgggcgcagcttgtgggaaaaagcctgattatcatgccagaccagacccgctatgttggcgaaggcgcagggataaaggccattacaggcggcgacccggtagagattgatggtaagtatgaaaagcagttcaccaccgtgctgaatgccgttgttctcgcaaccaacaacgaaccaatgacctttaccgagcgcaacgggggcattgcccgccgccgtgtgatattcccgttcgataatccggtatcagaagcggagaaagaccccgacctgacagcgaagatccgccgtgaaatgccggtaattattcgtcacttgctggcaatgtttgccgaccagaacaaagctaaaacgcttttaatcgagcagcgcgattccgcagaggcgttgggcgttaagcgcgggacagatccggttatagacatgtgcgcggccttgtattttatgaacgagccgaggggcctgatgatgggcggcggaacgtgggcgggccagccagagccgagggtgtatctctatcatctttacctggcattcatggaatatcacgggctgggtaagccgctttccgtcaacaagttctcacgcgccattaaatcagccgccagagaataccgggccagctacctgacacgcagcattaacggcagagcgcagacgaacgtcggggtcaatgagctggcggaggagtttataccgcgagcatatggcagcagcaccgccgaagggggcgaggaatag

SEQ ID NO: 227019 - DNA, 522 bp, Klebsiella pneumoniae
atgacatcaggcggaaatccttcctcattgagtgccgtactagcgatagaacgtaaaccgtgtgatacgagtacgcctcctaagccagcacgcttaagtgcggcattaactgtttggctgttcatcggctgggttggtttgatgcgactgggaaagataaattctcggccaccactgagagacttcatcgttgcaagaatagcgagggcttcatcagacaatggaatcgtatgctcccggttcatcttcattcgagcagcaggaattttccattcgttggcatcaaaatcgatctcatcccatctcgcttcagaggcctcggctggtcgggtaatggtgagaagctgccacatgaacaagcaccgcgttgacatactgatgctagccgtacgcatagtttgcattagctgtggtagttgctccgggcggatgcttggcatgtttttcttttgcggtttctcgaacgcttttccgatatttacactgggaactgcatcaatcaagcctgtgttctgcgcgtaa

SEQ ID NO: 227020 - DNA, 348 bp, Klebsiella pneumoniae
atgctactttccttccactttctgcaattatggcccgagctggagttgaagggtgtcacaggagccactggtaaaaatggcgcgattactcactactggctggaagtggatgattacgttattgatatcaccggggatcaatacaacatcatcaacgccagtaaactcaacgaagctatcgtaaaaaacaggccttttgtgcctgttcacgtcgctcatcgaaaggacagctatctctatgatttatttaaaatacaagggacagaactcttaacctatgggtttccgacaatcggtaatgattttattgatgagatggaatgtgattatcgccagcttgtcgggtga

SEQ ID NO: 227021 - DNA, 678 bp, Klebsiella pneumoniae
atgaagtcaccgtatgatttaactgagagagagtttaaattcttgcagcaggaagctgaagataaatatgattccagaatatcaagctatacccttcgtcgatcacttgctgtgatatctaattatctggaaaactataaccgggtattcgctctgcgcactgatctgaggtttgctcagtcccatgtgccagatgagccagatatgccgacatgctttcagaaagatgatgagaaagccatcactcgggctagggaatcccttaaaagccagttaagggaagaacacaagcgttctggcagggctggtgagtgtgcgccactcggctatatctgggacagagagcgtgttaccggggaacaacctcactaccatctggttctgctatttgacaaagaggtttatgcctatctggggaattacactgaatctgatgctgataatatggcgacccgtattcagaaagcctggtgcagcgccactgggcttgattatcctgaatatgcttatctcccgcattttccgaagaaccacagcatttgtttcacacgacacgacgcgttaacgttaagtgatgattattatgactttttgctacgggtggcctatctgagcaaagactacagcaaagacttctatgacggttatcgcaactttggtacaagccagcttatatga

SEQ ID NO: 227022 - DNA, 1527 bp, Klebsiella pneumoniae
atgaaacttacccataaaaaaactgaaaatcatcatgttaatctgaacaccagagcaattttgactttttttcaacaaatcatttctttcatttatggcaaaaccagcgcggctgttgagcttatctttgcaaccctccaggggagcatggctctggcctgccaggatatgtatgatgttgaaattgatgatgatattatcgttcctgtatcgcattttcacataatactggcaaggtccggaagcaaaaaaacgacggtatacaggctcatcatggcgcaaattcatcaaactgaacgtgagttggctgaggtgttttcagtcaagctgaaggagtatgaacggcaatacgtgctatgggatgaagaatgtaagagccttaagaaatcgcttcagaaagcagtgcgccagaaagagggagtggagacggccagaaatgaactggatgaatgtctcagaaatgaaccggttaagcctgtaagggtgcatctgacggtaacggatcccacgccggaagcccttctgaaagagctggggcaatactccagcttgggtatcacctctgacgagggaagtgcgctgcatgaaagcatcatgcggcgtaagatcgcaattcctaatacattgtggtgtggtgatgattatcgggtcagtcgtgcgtcaacgggtatcacagatattaaagatccccggctcggtatgctgttgatgacacagccggagccacatgacagcacactgaaatcactgggtaacacaatacgatctacgggaatttatgcgcgtacgttaaccatggatcttacgttgctcaccaaactaattgatattgatgagctggtttctggctatgagtccgacctggaaaagttttatgccattcagaaaaaacatttacttgccgggattgaacgcagaaaaaaaaatcaacctcgtatctgtatgacttttgcacctgatgcaaggaagcggttacgtgatgttggcaggcgcgttaagtatctgatgcagccggggggaaagctgtaccattataacgactgggctgcacggtactgcgaacatactgccaggagtgctgctgtgatgcagttgtttatcactcctgactcaaccgttattacgctggaaacactggaagctgcattgttaatatcggaatggcaccttaatcattttattgtaaaaatggatgctgtccgagggccttcccattctgaaagagttatcaagtggcttgaaaataatcttgttaaaaatgggtcttatgattttttaaggcgagacatgatgcaagacatacatcgttcactcagaaaaaaagctgatcttgagcctgttctggaacagcttgctgatgaagggaaagtccagttgtgggaagacgcaagcggaaggcattatgtcaaatatcttgcttccgaaatgacaccttcagaactggatgaaaaacatagagcaatgaaaggtataccgcattatctcgggggaggtagcgctatcagtcgcgtccctttgagagaataa

SEQ ID NO: 227023 - DNA, 480 bp, Klebsiella pneumoniae
gtgcatacttttgcaaacctgatgtacgacgtttacgagtccttcggcctgttccagaaaggggctcgccaagcagacatacgtggatccgctaacttttcaggtcaccagcgttttttcgataacaatgatgacgaagagataaaggaggagaaacgctatgatgaaatcatcagacaccttgatgaggagggggtgttcagtacggagcaaagaagggagattttttataaatatgagcaactttataatgctctgatgactcggcctgtttttactgaactaagtcgcaaacaaatacaaatccgctacgctcagtatatactccccaagctcatcgcacttgatatctataaaacttacaatgctgaaaacaaaaatagcttttatcaccatatacacattttcttgcagaaagagtactgcccatgctgggaggagaaaaaaaaggtgctttttctgccgttcggcagtatctga

SEQ ID NO: 227024 - DNA, 1416 bp, Klebsiella pneumoniae
atgctgggaggagaaaaaaaaggtgctttttctgccgttcggcagtatctgaagaattcagtaagagaactagaattctctcatacagaaaatctgacacctctttttaaagtcattaaaaacatccgccctggtaacacacagaaaaaaggtgcgctggatacatcaattatagaatgccttgaggcgtattctggtattgtcgacgataagacactaaacagcatcagagtcaaccttgataatataaaaaaggcccattactccctgaccgtactcctgaatactgagcgaaaactccctgtcattaatatcatctcacggtactacagaaactatgtagataatggaataaaacccggcaatatatcagcaatgttatgcagattactgtatgaaccagaaccccaagattttatccatcatgataccatgattaactcaattgcgaattattatcataagagagcaataataccgatctctctaaatataaacaaggaatgtttacagagtatcagcgcattaaaaaacatcgttttcaacttcaatgataaaaccattatctccgaagcaccgttaactgatatcgcagtaaaattaaaaaaagaaccccataaacaggttgttcaaccgtattttgaactctggaaacttatagatttaatcagtaaaggggaaacagagaaagcctatgagaaagtcaaaattatttctctggatgatttacctgtaggatacctggcatccgcttttttagttatccatattgcattacgcataaagttcgagagaaaaaccgttaaaaagggtgttttctcatcatctgtaataactattcttgaaaatcagggaatttatactgactatacccccgtcagttgggcttatataggaacccacagtgacggctctgttatgaaaagcacacttctttctgggtccattttatcagatgccaacaatctgaccatcatgcgttcggtaaggatgtataataacatggtcaggagaataagtgactggaatgaccttgaggcggaaggcatttatcctgagtctgtttacggacttcttgataaagttgacactatcttgggtaagatactcaacattatctttgttgaaaaaatcacttccagccaggatttagctttcattctgaaaaataaaaaagttttggctcgaagtgaactgaatgatagccttatcggcatactgattaactgccctcttttgacgtgcgtacgggacctgaagagcttaataaaatatcttcgctgcccgggagaggaaataaaaaatgtaattctttcagttgacaaaaaaacctggaatttgacacgtggagccttgaagattctggaggaagaaagaaagatacaggcgggaaaaacacagggaggtggaaaataa

SEQ ID NO: 227025 - DNA, 1524 bp, Klebsiella pneumoniae
atgattacattggaagaaaaaaagctaagagaaatattagctgttgatgaaattacttttgcaattcctgcacaaagtttcgctatcgaatgctcaataagtgctgaggaggcattgcccgttgttactgagttcgcgcttcgcatcgcttatgtttgtggtacattgagtcctgtacaaattcaagatttttttggattcacaaaaaaagaaactgatgcaataattcagacattactcaacgaacgcctcattaaatggaatgaagatgagctgttagagctaacttcttatgcattaactcgttttcaagatagctcagatcatttacctcggttctttaaaatccaagaatggagctctgaagttatttttgatctaataagttttagtccagcaggacgccccaacagattgaaacgtgtaaattcattagtggagttagccgcgcgaaatattgagaggcaatctaaaacaattcaatatgcagaacaagcctttcaagagcactttcatagtatttgtaagaagaataaagcagagatctataagattagtgcggtagatgctggcgagcattttagcattccactgccgtgtatgtttcatctggatttggatggccaagttaatattcgacgtgatatagataatgaagctttcaataatagacttgaaatatcagaggctattactgatgctctttcaaaacaagaacgtccgcaaaacaatagttttatggattttattcattattttgattattcgttatttgaacgttatgtttcaaatgatgcttttgatttgcgtcgatatgttcaagatgttcatttaacacgtattattggttatgataatagacgtgtcaccccattacttggagcattttatctacaacataacgccgatttaattataactaggcttggagatgagatactaaaacaggaagaaatgttagttaataaggaggttaatttaaaatctggtgaggatggtgaaaaaatagacgccctccctgtttcagaaaaaactatcgtccaaagcgggttgtggcttgccccccaactatccctttgggctagaactcgcggggcaagagagtttgctcagaagattgaccgtctgttagattctaggaataaaaaaaagagcaatcctgttggtacttatgtattgatctctggtcggaataatgcagctaaagatcgtgcatttaaatatagagatcagtttcaatatttatttaatctagatatatgtcttatggacggaaaattagagttgttactgattcctggtttaatggtatgtgttctttttcatttccatttggaacatcaaccggttagcatcccaataggctttatctcgtctgaggtggaacatttgaaaatagcaagttcattgatatctgaatcaacgagaacaaaaaaaatattttcatctatgtatgatagtgaaaacgttcctgttgcctatcaaggattacaaaatttgcttgacataatatctacggaataa

SEQ ID NO: 227026 - DNA, 4824 bp, Klebsiella pneumoniae
atggtagaagttttcaatgcatctagttttagccaaaaatggcatggctatgctggtttcatgatgatggatacaacttatagagatcgagagattgatttagttcttctgacgcatgatagactccttatcgtggagcttaaaaagtggcgcggaaaaattgaaccaatgcatgatcattggttacgtgatggtgatgacatggggcgttcaccagttaaagtccttgccgataagtggaaaattttatcatcaaagattaaaactcgtctaagtgcgccagcaacagaagtatacattgattacagagttgtcatgtgtggtagtgctgatttttctgaaattccagaagatgagaaatcatttgtatgtacacttgaacagtttttaaaaattgccaaatctggggggtaccaaggcgaatttggtccacaaaaagcgcgtaagccttgtgaatatttgcaagtgttcacaccattttttagaggtaaggatttcaagccttcaagtttttcattcaataatttccaaattgttggagaagcaacttttcctcatcctgatggattgtacaaagaatacaaatctgtcaaaaaggatgaccaacgacatgaagcattgttaagacgatgggatttctcagcattatctggcatcgcagatactattgatgaacgagcccgtatagcattgcgagaacataaagttctaggtttcattcatgagcaaaatgaacaacttgatagcgtagttttgcaacctctatcgcatccaactcgagatgatatagatgctgacttctgtgaactatatagactaccgtcgagacaattaagacttaatgaattcattcaacgctttggtgaagatctagatttctgtgaaaggattaactttgtaaaggtgcttttatcccacgcagccgatttacatgacttgggcgttgctcatcgggatattagcgatcataccatttggttagaacggccatctaaaatatctatatcaggtttcctgactgcatatttccctgaattaggaacagttggttctcttcgtgatcagcttcgtgcaagcaaaactattttacctgaggattccgaaattggtcaaggtgaagcgagcgatccattccgtagagatgtttatttattggctgtagttatacatcatattttatttttacaagtacccaagcaagaagactccttatttgtttggaatagtccagctaattttgaaattgatccacaacttagcacttggtttgaaactgctttggatttaattcccgcaggacgattttcagatgcgcgaacgatgcttgattcgtttaatatcttacctttaggatatccggaaaaaacaggtattgacttacgtagattcgagccttatcgaagtgagttgattccaatggttatttatcctattgaggaaaatataaagcagggcataagtcatttatataagtcgactttttctggtgagagtgtttcggttaaagtatggtatgggaggaaaccagatataaaacgaccggaagaggctttacaacttcagaattttcttgataaagctcgcctaataaaatctcagccctgttcttctcttgctgaagttattgattttggtatttcagatgcaggaacctatttagtccaaaaatggttgaatggggaatttctaaatgacgctgtcaaatcatgtcatgttggccgtgaattgatattactatgcaaaaaaatagttagggcagtgttacatttacatgctatgcagttacaacatggggatctgcaccctaacaatattttaatagaagagggagatgttcgctttattgatgcacttgatataccttgttcaggtgataatataatattcactcctgcatatgtgcctacagattacgaatctttgcctatggaggaacgtgattgctacgctgtagccaaagtttgtaatgagattttagaacacgacgttaactgggaagggattgatccatcagctttactaaatgagatcagaagttgtatgggacgggattttaaaatttattctcttgaccgaataaatgatgaaatagagatattaatcaaccctccacaaataaatgagggagtgaggctatcagtattaatgaggcaactgacctccagccaggaattaataaatgacaatggtgtataccatatcagtattagtgaagaacgagtccgttcgccaaagcagcagcctcatattatcgtagcttttgcaggagtacgtaaacagttacaaatctatcttaaagcgacccaattagattttgcatttttacggaccaaagatatagctcatagcttatttgtacggatggcatcacaagccattacacaactcgaagctagtatactattcgaaccctcatccgcggatgaccctaacaagttattagaacatgtaaaaaaaatacctgaggttatctctgcaatatcgacaattcagaatagaattctcggtggcgatcttccttctgatgaggaagaaattgagaactcagaaactctaactgtttctcaaacaagaccacatacagcatcactttggcgtgcaattttagatgcagaagaagattccttacctgaaattgaaatcacctcatcagttgtcagggatatggataagcgtcatgagaaactacgaataccttacagaaaagagggggagtctttagactatgaatcagatgcaaaagttgaggcattacaagaaataaacggtgaactgattcgcgtagggaatgttgatataagagagactacccaatctactctcgtacttgaaaatccaaagattcgtattcagactaatattggcgatactttgaaattacgaagtcaacaagatctatcatcttttattcgtaggcgtcatgcagttacacgtattttaaatgccgaatcggctatcccctcattaatcaattactttgatccattaacttgccctcatccacaatatctacaaccggagccaactgattctgatcttgatgcttataaccgatatgataaagatggagagctatctttttcactcaatcgacagcaacgagatgccttttctaaactttggtcatacggcccattgagtcttttgcaaggccctccaggcactggtaaaacttcattcatcgcatcatttatccattatgctctctcacaaggagcccaaagtatacttcttgcaagccagtcacatgaagcagttaataatgctgcagaaaaagtaattgaactttgtcagcacagcaatctgcccctagatgttgttaggttcggtgcagaaggaatggtatcagaaaaacttcatccatatcattcatcttccattttgcaaaattatcgagatttattccgctcagagatgcgagttagaatttcagcaatgaaccgaaatttaggtctccctaacaaatttgtagaaagatggtttgatattgaatatcaacttaagcgtttgaatcgtgaaatagaaagattaaccactaagctaaataaaaatgaaatatcagaagctaataataatcccctgatagctcgaataaatcagcgacttgaacgatttaagacaattgcatctgaaaagtttggttatgcgggggagggaactccagaggaagtgattaatcaattaagccgtgagacaatgaatcagtttggtgtaacttctttagatgcagtgtctagactggagcaagtaattgcaatgtctcaagagtgggtggatcgcttaggcactctgagaggtaattttgaagaatttcttgcgaagactcgatcacttgtatgtgggacttgtgtgggtctaggacgctcacaatttggtgtagcaaaaaatcgctatgattgggtgatagtcgacgaagctgctcgtgcgacacctggtgaattggctatagcaattcagtcgggccgcagggtgttactggtcggcgatcatcgtcaattgccacctttgtatcctgaaccagtggtgcgaaaaatatcgatagaactaaattactctgatcgcgcggtactaacacgtagtgattttgaacgtgctttcgaatcagattatggtaaacaagtcggagcaacattacgtactcaatatagaatggccccaccaataggtgaaatggtttcagcttgtttttatcccaaaccgttagaacctggacgtggaaatccagaaccttggtttaatcaattacctaaaagattaagttctattgttacttgggttgatacttccgatgctgggggagaatcttatgaaagagcaaaacatcctgggtttgacaatccttatgaagctagagaaattattgatacactgcgttcaatatgtacagcagaatcattcatcaaatatttaattgatgaaacttcagatgaggaaaaaccaattggtgtaatttgcatgtatgcaaatcaagaacgcctattgcaacgtttacttagcgaacaagattgggctactggttatagacatcttattaaaattgatacagttgatagctatcaaggtaaggaaaatcggatcattatcgttgcaacgacgcgcaataataatcagtgtattcaagggttccttagcagctcggagcgaataaatgtagcgatttcccgtgcaatggatagattagtaatcattggggctgctcgtatgtggcgggagaggcatcaaacttcagcgttaggccgtgtattaacccacattgaaacacatcgtgatgggaataacttcaatttggttcaggcattagccattgaggagggacagaaatga

SEQ ID NO: 227027 - DNA, 876 bp, Klebsiella pneumoniae
atgaataaacatgatggcctccaggcctttgaacacccactagctttactaccccatagcctccgcaacgacatccttaagcaccttcgcaaccttacgcagtacgagccagtgatcggcattatgggcaaaactggtgtcgggaagtcgtcactctgtaacgccctgtttcagggggaggtaacacctgtcagtgatgtggaggcctgcacacgcgatgtgctgcgcttcaggctcagcagtggctctcacagcctgctactggtcgacttacccggagtgggtgaaagcaaggctcgtgatgaggagtacaccactctataccgccggatcttgcccaaactggatttggtgttatgggtcatcaaggccgatgacagagcactttcagtggatgaacacttttatcgcaaggtgatgctggcgtatcagcaccgggtgctgtttgtcgtgaatcaggccgacaaggccgaaccctgccatcagtggaataccaccagcaataccccctctcatagccagcagtcgacaattgagaccaagcggagcgctgtacaacagatcttcctgccgcaccatccagtctgtgttgtatcggcccgaactggttgggggctggatgcgatggtagagacgatgatgcgcagcctgcctgaccgggccgcgagcccactgacaacacaactgcatggaaggctctgcaccgagccggtaaaaaagcaggcacgcgagcgctttggtcatgccgtggatgaaatgattggcaatgtggagtcatcatcttttctgccagcgcctgtaagggctgtgattcgaaccgtgcgggaagccgtggtgtccgttgcccgtgccgtctgggattggattttcttctga

SEQ ID NO: 227028 - DNA, 231 bp, Klebsiella pneumoniae; identical to SEQ ID NO: 169373

SEQ ID NO: 227029 - DNA, 822 bp, Klebsiella pneumoniae
atgcgattagccagccgctttggccgtataaatcagatacgccgtgaccggcctttgacccacgaagagctgatgagtcatgtccccagcgtgttcgggagtgacaagcatgaatctcgttcagaccgttacacctacatcccgaccatcacaatcctcgaaagcctgcagcgtgaaggctttgagccgttctttgcctgccagacaaaggttcgggaccagagcaagcgggaggacaccaaacacatgcttcgcctgcgtcgtgccggacaactgaccggccatcaggtaccggaaatcatcctgctcaacagccatgatggttcatcaagttaccagatgctgccggggctgtttcgtggcgtctgtactaatggtctggtctgcggtcagtcattcggcgaagtgcgggtaccgcataaaggtaatgtcgtcgagaaggtgattgaaggggcttacgaagtgctgggggtctttgatcgggtggatgaaaagcgcgatgcgatgcagtcgcttgtgctgccataccctgcccgtcatgcactggcgaatgccgcaatgaagtatcgatttggtgaggaccaccagccggtcacggtatcgcagttgctgacccctcgtcgtcgggaggactacagcgatgatctgtggaccgtataccagcgcgtgcaggagaacctgatgaaagggggattgtcagggcgaaccgctcaggggaaaagcagccgcacccgtgctgttaccggtattgatggcgatgtgaaactcaatcgcgccctgtgggttatggcagaaaacatgctcgaatttttcgggcgttaa

SEQ ID NO: 227030 - DNA, 444 bp, Klebsiella pneumoniae
atgaatacacaaaatcatcagttcgaggagcataccgcaattactgcctcagtggtcccggacgagttacgcatcggcttctggcagcagcactttggctccatcccacaatggataacgcttgaacctcgcattttcgcctggatggatcggctgtgtgccgattaccacggtggtatctggcgcttttcgacactcagcaacggcggcgcttttatggctcccgagtcagatcacgatgagaaatggatattgtttaacagcatgaacggcaatggcgcagagcttaccagtgaagctgcagggatggtcgcctgtctgatggcttacaatcaccacgcctgtcgcaccgagtgtgacgcaatgactgagcactattatcgcttacgtgactacgcgctagaacatccggaatgcagcgccattatgcatctcatcgcctga

SEQ ID NO: 227031 - DNA, 2535 bp, Klebsiella pneumoniae
atgattgatttcacacagcgactaaaaagaaaagaacgaaacacagttattaatccactagagatttatgaatctttagataggcgcagcgttgctggacctttaagaccctcacagttggaaatattaaataaatggtgggggatgtataaggataaaaaagataatattataaagttgcatacaggcgaaggaaaaactcttatagggttacttcttctacagtcaaagttgaatgaatataatcagccctgtgtttatgtttgccctaacatttatcttgcagatcaagttatggatgatgctaggaaatttggtattccctattgttctattgatgaaacgagagcattacctgatgattttctttcgggcagaaagatattaattacatatgtgcaaaaattattcaatggaagaactgtattcggacttggtgctaaatccgtagatgttgggtcaatcattttagatgattctcaggcttgtattgattcaataaaaagctcaatgatgattaaggtaagaaaggatcattcgctttttaaaaaaattcttgggttattttctgatgaattacgtgatcaaggagaaggttcttttttagagattgaaaatggtgtttctcagagcaccattttagcagtgccttactggacttggatagaaaagaaagatgctgttgcaaaaatcctattggattatgtagatgataaaaaagtaaaatatgcatggccgcttattaaggattcattacagtgttgccaggctttcttttctggtgaatatttagaaatatcaccatttacatctgtaatcgaaaagtttggaagttttagtaacgcaaaattcagatttttaatgtctgctacaactcaagatgactcgttctttatcaaggggctaggttttgatatcgatgctgttaagaaccccatgaaaagtgatactcttctttggtcaggcgagaaaatgattttgattccgtcattgattaatgatgattttacaagggatcgtattttaaattggttgttgcagccctacgataagagaatttttggaactgtttgtctaaccccgagctttaaaaataaagagcaatttgaaaagattggtgcagtagtctctactactgataccatgtttagtaatgtcgagaaattaaagaatggggtttattctgaggctattgttttcgctaatagatatgatggaatcgatcttcctgatgattcttgtcggatattaataatcgattcaaaaccattttctgaaacattgactgaaaggtatgaggaagaagtaaggcctagtagtgacataatcaatattaagattgctcaaaaagtggagcaaggtctcggaaggagtgttagagggcagaaggactatagtgttattgttcttgttggcggtgatttggttcaatttattaaaagcccgttaacaaagaaatatttttcagagcaaacaaaacaacaaattgaaattgggaatgagatagtttcttttgcaaaagaagagttggctggacaaaacctgagctcttctcaaatacttgttgatatattaaataagtgtactactcgtgatgacggatggaagcaattttatgttgaaagaatgggtgagattaaaaaaagtgtcgataataaagggttgtatgatctaattctgcttgaaaataaagctgaaaaactctttgttaaaggggatgtggatagggcttgcaagacaatacaggatatctgtgatcatcatgttcaggatcctagagaaaaagggtggtacctacaacttttagctagatatatgtattctttaagtaaggctgaatctaacaagtatcaaaaatctgcgtttcaaaacaacaactcacttctcaagccaagagatggtattgaatataaaaaaatcggaaaaataaacactagcagaactcaaagaatcaaagaatggatggcatcgtacgatgactatcagtctttgatgattgatattgatggtgtccttgaaaatcttagttatggagtccattctgagaagtttgagaaggctttagataatttaggcggtatgattggtttcgtatgccagcgtccagataaagaaatacgcaaaggacctgataacctttgggctgatgttgataatcagtacattatgtttgaatgcaaaaatgaagttgatgaggatagaaaagaaataaacaaagatgaagctggacaaatgaacaaccactgtggttggttcgatgatttctatccaggggagaagtgtcttaagtttatgataattaatactcgtcatctttcttatcatgcggactttactcatgaagtaagaataataaagaaaaatagtttgagaacattaaaaaacaatgtgaggagttttttcaaagagtttcgtgggtttgatattcatcagttgtctgatgagaaaattcatgagcttattataccgcataagttaagtgtacatgatttttataacgaatacagtgagtccgtaataaaaacaactagatag

SEQ ID NO: 227032 - DNA, 549 bp, Klebsiella pneumoniae
atggttgtccatggcatcaatcccgcgcagaaaaagcagaaagaaaagcttaaacagaaagacccaacgacagtcaaaacattcgccaaacgctggctgaccgatatcgttgaaaaaagtaaccgcgatccgcgcaacatcactcgcgttatcgagaaggacatcattcccatcatcgggaagctggaactcgaagaactcacaactgctcacattcaggtcgtgctcgaccgcatcaagcaacgaggttcggatcacgtcgcgctactgacgcgaaacgtgcttaaactcatgctggcctatacgatttccaagggaatcatcttaaacaatccggcagccgctatcgaggcccgttatatcgcacaagcaacaagccgcgacgtggcgctaacagcaaaagagatcggcatcctgttacgggagatctacacctctaatatgaaccgacgccacaaactggctctgcacctgctgatcatctgcatggtgcgtaaatctgagatgattgaagcgacatggagtgaagttaactttaacgcgctgtaa

SEQ ID NO: 227033 - DNA, 378 bp, Klebsiella pneumoniae
atgaagatggataacccgcatattgttccgctgtcaaagcaggcgctggcgatgttcgaagagctaaaatttcttgccggagattccccttacgttttccccagccgaaacgaccaccgacgcccgatctccaaaacaacgcttaactgcgcggtgcgtacgttggatctgaacgtcagggattttgttattcatgacttccggcgtactgccagcacattgctccataagcaaggctacaactccgactgggtagagaaatgccttgcgcataagatcggcggcgttcgcggtgtctacaatagtgcggagtacctgaatcagcgccgggagatgcttcagtccttggctgattttgttgatgcgcagtttgagtag

SEQ ID NO: 227034 - DNA, 888 bp, Klebsiella pneumoniae
gtgttaaatcctacgcaactctcagcgctatcaaggatgttttcttcatcagtgatttccgagatagcaaaaaaaggtcagtcacctcttttttcaaggttactgtctgaggcatctgttttcgaatttgatgacacagataatgtaactattggtgatgcctttgatacagcattttctttgctcagacgctcaggcttgagaaatgagtatgtctatcgttctgcattaattcgaaatgtattattaggccgtcattctttgcgtaccgccagtatgcttactgaatttagaattggatctagcaaagcagatatggttattcttaacggttgtggaactgtatacgaaataaaatcagatagagattcacttgccagacttgagagccaaattgagaattatagaaaagcattcagtaagatctacgtcattgcagggactgcacatatccaagacatcttggaaaaaacatcggaagacgtaggggtgatgagcttagttagatggaatagaattagtattgtacgagaagcaaaagagaatactgattatatttgcactgcaactatttttgattcactaagacttagcgaagctattgatatcctaaatgaattaaatattgaaatcccagatttacccaacacattgatgcgtaatgcaataagaggtatttttaccaagctaaatccaattgatgtacagagctgcatgattaaaactttaaaaaggacgcgtaatcttgctccattaagtactttaattgcaaacttaccaagtgcattgcaaagtatagccctaatggttcagttacgtagtaaggatcgagatcgcttagttgagacgttgaataaacctcttaatgaagcatttaaatgggtttaa

SEQ ID NO: 227035 - DNA, 933 bp, Klebsiella pneumoniae
atgtactatccatattttagaggtaagcagtttgaattaatagcgattcgtgagacagcagagacaatggctcgggctggtttcattccaattattgaaccagttaaagaaacccttaatggattagaaaaaacactaaaagctatctgtgaagctgaaggtaaagctattgtaatagtaaatccttcatatggtgaccattcaacaaatgggcataatatctctcaattattgaaagatagttttcatggacatgaaaacatttttgcagggatactactaaatgaagggatggatgaaaaagatataatagagttgcttgatgaacatgctgaacatcaaccttgtttcatccactctggattttctgagccccgctctttatcagaaaaaacaaatggtcgagtatccaaacatatcttcttagaactttactgcggtaaactctataggaaacattttaacggctgcgaaagaatattaattcgcgatggttttaaaaagagaaaaaatgctgattatcctcctattgaagagttttcagaccttcatataaccttcggggaagaaggaatggatggatttggtgattttttaatcgttggggatgactatactgaaggtggtggtccggcatatgcggtagcaatacatctcacgttcttagaatctaaaaaagaaaatgttatgtatatttatcactttgtttctacaacaagagatacaccaacagaccctgcagggaaattcggtcaggcacttgaaaaactcattacaacaataaatgagaataattatcctgtactggagacctcagctattctagaatttcgagcgttgcatgcaaaaggccatttccctggattgggaaccgtcaaaaaactctcaatgaggcaccatgttgaaacattagctaattattttaggggctag

SEQ ID NO: 227036 - DNA, 1029 bp, Klebsiella pneumoniae
atgattagaatgtgttgtgctgaatgttttaatgatatcggattgcgaaataatataatccctacattgatgccacaaaaaggaaactgttctttttgtaatagtcaagatattgatattattgatcctaaactcttgttggattattttgaacttctgataaatatctatgaaataaatcctgaagggaaaaatcttgttgaatggttaaaagaagattggtgtttattttcccatccaacaatggacaatgctcatgctaaagagttattgggagaaattcttgatgacggagatatagtacgaaagaacttctctccctccgaaaattataaaagtactggccttgcgcaatgggatacattacgagatgaaattcttcacaaaaacagatacttccttgatgaaaaaattgacactcaaagattacaggaattactcaaccatttaaaagcatttaatatcccgcgaatatggtttagagcaaggataaatcaaactgatactccatataaaattgaagatatgggagcacctccaagtcggtatgctagtcatggacgagcgaacccaacaggcattccatatttatatttaggatcaatgccagatacagcgatctctgagattagaccacatacaggtgaaatagcaacagtagctgagtttgaaataccagaagaactaattattgttgatttaagagagccgagaaaacatgtttctccttttgttctatctgatgcacaagaaataggaaaaatgcgggcagacataccttttctagaaaaactaggagaggaattaactcgtcctgtgttacctcgaagtgctgccattgattatatccccagtcaatatttatgcgaattcattaagaaaattggttttcatggtgtaatttacaggagttctgtaagtgaaggaataaacttagctttattcgatccaacattagcaacccctatttcaatatcacaatatgacgtttctcgcgtaagtgttgaagtacaagcaaagcagttataa

SEQ ID NO: 227037 - DNA, 420 bp, Klebsiella pneumoniae
atgaccgttgaatataccgtgatcgagaaggtgccctccgccgaagcgttttgccacctgcgggtagccgccggcatgtcgccgcgccccctggaaggcgccagagccggactgccgcatagctgttatggcgtacatatcctctggcagaagacgccgatcgcgatgggacgcatcgtcggcgacggcgcgattaatttcgatattgtcgacgtcgccgtcgatccggctcaccagggaaaaggccttggccggctggtgatggagaagctggtcgcctggctggacgctaacgcctttgatggcgcctacgttacgctggtggcggatgtgccggaactgtacgcgaagttcggcttcgaaagcgttcgcccggagagtgaggggatggcccgcgtctggcgaacccgcagtcgttag

SEQ ID NO: 227038 - DNA, 1050 bp, Klebsiella pneumoniae
atggctattcggaaacttgaaacgggcaaatggctctgtgaatgctaccctgccggacgttccgggcgcagggttcgaaagcaatttgcaacaaaaggtgaggcaatggcctttgagcgccacacgatggatgaggccgcggccaaaccgtggctgggcgatgtcgctgatcggcgctctttaaaagatattgttaacctctggtataaactgcacggcatttcgctttctgctggcgaacacgtatacgaaaagctactgctgatcgtggacgcactaggaaatcctctggctacatcgctcaccccaaaaatgtttgctcactaccgcgataaacgcctaacgggagagatatatttcagtgagaaatggaagaatggcgctagccctgtcacggtaaatcttgaacaaagttatttaagcggtgcctttagtgaactgattcgcttgggcgaatggcttcagccaaaccctcttgaaaacatgcgtaagtttactattgctgaaaaggaaatggcctggttgacacatgatcagattgcagaacttctgtatgactgccagcgccaaaataagctgttgacgctggttgtgaagatttgcctcagtactggggcaagatggagagaggcagtcaatctgacaaggtcgcaggtaacgaagtaccgcatcacgttcaccagaacgaagggaaagaaaaacagaagcatccctatcagcaaggagctatatgaagaaatcaccgcgctgaaggggttcaaattttttgatgactactattttcaatttgcatcagtgatggataaaacttctatcatcttgccgcgtggccagctaacgcatgttcttcgccacacctttgcagctcactttatgatgtccgggggaaacatactcgctctgcaaaaaatactgggacaccacgatattaaaatgacaatgcgttatgctcacctcgccccagatcaccttgaaaccgcactaaggtttaacccacttgccacgatgaagaatggcgacaaaatggcggcagcggttgccactccctaa

SEQ ID NO: 227039 - DNA, 621 bp, Klebsiella pneumoniae; identical to SEQ ID NO: 112003

SEQ ID NO: 227040 - DNA, 222 bp, Klebsiella pneumoniae
atgaccactaacatttcaatcaatctgcctgtcccttcaatctctaaagaaaagtacatcgaactcaccgggttatctgaagatactgtggatgccatgctgaaagatggccgcttacctcgccatcgcttacgcaaagataagggtcgtgaaaaagtcatgatcaatatcgcggcaatgacaattgacgcccttgcgggttgcaacatcgtacttaactga

SEQ ID NO: 227041 - DNA, 195 bp, Klebsiella pneumoniae
atgaaagcctttgttacctatttgaagcaccagtcaccacctatgcagctagccagcggttcaactggctggattgagctgccagatggtcagcgctggaatcccagccacgtatataaatttacggcgcatcaaccgcgctgccgttggtggcatcgcctgatgggattagtccgggggcagtatggccattaa

SEQ ID NO: 227042 - DNA, 429 bp, Klebsiella pneumoniae
atggccattaatcaggaacagcaaaagctggggctggcgcagctgcgcaacatacgccgcaaatatttcagtaacagcagtgaagccgctgattggtgggacaagttaacgccggagtggcgcggggttgtcctccatgctgcgggcgtatcttccggatccggggagtttaaagccagtcttagcaagtgttgctggcgtgaacttttcgaacgtctggactatcgcgccatgatccacttgcgccagggcatatccagggcgcgtctgacttttgagggattcggttcgttgcgggactctgatttttcagcccgtacagcacatgacagaccgattaaaaaagcgcatccgattaatagccacaacggggtgcagatgattattgcgcctcatatcgttagcaaaatgcagcaggagaatcactaa

SEQ ID NO: 227043 - DNA, 402 bp, Klebsiella pneumoniae
atgtccattatttcagtagacgctaaagagctggggcgcgagctggccgcatggggcgtaccacacaattacgccattctctttgtggaaaaaagcactgtaaaaaataatcgtgttgccctgcatccgtttttctttaatgacactgagcatatgaccagcaagcgccactggctggcagtcaatgcagcttactggtgctgtgtataccgtgaggcagaaagccagttacagcaggtggaagcgctggccagcatccgttccatgtattacgtcgcaggatcgttgggcgctggtgaaatcaaggcgctgatacaggagtggtggcgcaatacttatgagctgcataaggttcctgcgcctagttataccgccgtacctattaccttttctttccactaa

SEQ ID NO: 227044 - DNA, 234 bp, Klebsiella pneumoniae
atgaatatgacacgtaaccatttgcacgcaataaattccggtactgacctgctggccatgctgaccaaagcaactgcagaaggtaaggccgttgccgccgatctgtgttccactcgcctggataagctggccacccatgccgcaaatgaaggtttaagcgcggctgagattgtcgaactgatccgggaagaggcagcggctatttgcagtaaaggcggtgcagcatggcagtaa

SEQ ID NO: 227045 - DNA, 858 bp, Klebsiella pneumoniae
atggcagtaaaaacaccgttgaaatgggtgggcagtaaagcccgccttatgccgcagctgcttccgcatttacctgaaggtaaacgcctgattgagccgtttgccggttcctgcgccgtaatgatgaatacggattatgacgagtacctgattggtgacattaatcctgatctggtcaatctgtataaggccatggcctatcataccgatgcgttccttgttgagctggaaacgctattttctgccggttcgctgggtgaagaagaaagccgggctgttttctattatgcagtccgggatttgttcaatcagtcagagaaggggggcgcaaattgcgtggaatcggccgcgcgtttcatgtacctgaaccgtcacggctttaatggtctgtgccgctataaccggcgcgggcagttcaatgtaccgtttggtaagtacaagaaaccttattttccgttagatgaaattcatgcatttaaggaaaaggcaaagcgggcaacgtttatcaccgctcactattcggaaacgcttgaattagtccgggatggttatgacgttatttattgtgatccgccatacctgacggaaagcgataattttaccgcttaccatggaagcggttttacgcatatggatcaggggaggctggcgcggaagttgcgccgcctggcacgtaaagggattagtgttgttgcctcaaacagtaatctggagatggtgcattacctgtatgccggttttgaggcggtgcaggtgaatgcgccccgtagcgttagggcatcggctgttagtcagaagatggccagtgagctgatcctgaaatccccacttgattcaattgcaaaggccatcgcatga

SEQ ID NO: 227046 - DNA, 2064 bp, Klebsiella pneumoniae
atgacgttggccttagacaaatattgcgccgccgattcagcgcggcgtgatgctaatcagtctgaagatgcacacgccatcacacactgggcgtattcctggaatgcaccccgtaaggccattgcaagcccgatacccacatacgaagaactacagcgccgagatcgagagaatgcggcgctggcttgcgcccaggatttgctacaaaagcaatctgtgattgttcgtatgtcggtaaatgcgacagccagcaagctggaaaaagaacagggtataaagcgcgcaaatgcttacctggctaaaaccttccttgaacgcatactgccgcgtatcaatattgtttcagagcgttatcacatcggcaaaatgaccgccgataccgtacgccttatgtaccgcttcaaccacctgcctgatatgtcgaaagaggatattgacctgctggcgcaggatgtttcgacgttcatcacaatggaactcagtagcataaacgatgaaatgccggatgccggtgcgcttaagttgctgcatgcactttatgtccgtgctgctgccattactcatgcattccgccagtctgcgccggattatgaaaagttaatgcgtcgttgcttcgaggagtcaaaagccgccgcttctcttgccaaaatgatgtctgatcagtggtgggcgcttcgcctgcgccgccatgcgtcagagtggcgcgagcatttacatatcgccctgaatcacgtcagcaaaaaggtcagcacttacgccagcaaacagcttattcgtgactggaaggagcagaagcgccgtacgcgtgaattcctgaagtcgatggagcttgaggatgaattcggcaaccggattagcctgattgataagtactgggggagcgtggccaatcccgcgatccgccgtacagaaatgatggtgcgtattcgtggatttgaaaacgtttgtaatgagctgggttatgtgggggagttttacaccatcactgcgccgtctaaatatcacgcgactactattcatggccaccgcaaccgtaaatggaatggcagcagtccggctgatacccagggatatctgcgtaaaatctggggacggatcagggcaaagcttcaccgggaagacttgcgcgtgttcggaatcagggttgcggagccgcatcacgatggcacgccacactggcacatgttgctgtttatgcgtcctgaagaggttgaacaggtgcgcggcattctgcgtgattatgcgatggatgaagaccatggcgagctgatcaccgataaagccagaaaggcacgctttcatgctgaaagtatcgatccggaaaaagggtcagcaaccggttatgtagccaaatacatatcaaaaaatattgatggctatgcgctggatgatgaactggacgacgaaagcggcaagccaatgaaagaagccgccgccgcagctgctgcatgggcatcatgctggcgtatccgccagtttcagttcgtaggtggtgcgccggtaacggtatggcgcgaattgcgcaggatggctgatcacgataccgcgatggggttaagcgttgaatttgctgcggtacatgatgctgctgacagcggagactgggcgaaatatatcaatgagcagggcggaccattcgtaaggcgggatgagctgatcgcacgcacatggtatgaaaccagcccggaatttaacgcatatggtgaggaaattgtgcgggttaagggggttttctctcctgccgttggcatggatgtgcccattttaacccggattacaaagtggaagattgttccgaagttagccgccgaacaggcggcagctgttagcggcgcgaatgcgccgcctaggagttctgtcaataactgtacggagggtgaagcccgcaggcggttaaaaagtgatttaaaccagagggggtttgtcggttccgatgaagaaatagccatactgatgcgcggcagcggggtgatgtatggccggggagcgctgattttaaagaatggacggttacaggagaagcagcatgattcgagcagtcagcgctggccgggttggtcgtga

SEQ ID NO: 227047 - DNA, 270 bp, Klebsiella pneumoniae
atgcgcgtgctgaaaatcgaatgcccggaatgcggctcaaaggcggttattcgcaagacaaaccggaagcaccggcagattgctgatatttactgcgcctgcgcggacgtagagtgtgggcatacttttgttatgaacctgaccttttcccacactctcagcccgagcgcaaaaacaggcgatgcgatggttcaggctctgcttaaccacctttcacctgttcagaagcaaatggctcttgacctactgaaagccacacccgcagcgtaa

SEQ ID NO: 227048 - DNA, 1050 bp, Klebsiella pneumoniae
atgacgaaaaaacgatataccgcccgtaacaagcgcggcgataaagccaaaaagatgagcattatttcgttcggcaaacccgagccggtgctgactaccggtacggattaccgggatatctggtacgacaacgccgccgatcactacacccagccaatagaccgcctggcgctggcgcagctgattaacctgaacggccagcacggcggcatcctgcacgcccgcaaaaatatggtgatatcggactacatcagcggtggcctgacccatgacgaacttgacgcggcggtatttgattttctgaccttcggtgatatagccatagcaaaaatccgcaacggctggggtgacgttatcgacctggcaccgctgcctggcctttacatgcgacgccgcaaggacagggagaacgcgcagccggttcctggtgactacgtggtactacaggaaggagaaccgctggtttacccggaagaggacattattttcatcaagatgtacgacccgcagcagcatatctatggattgccggactacatcggcggcgtccactccgcactgctcaacagtgaagcggttattttccgccgtcgctactaccacaacggtgcgcacacgggcggtattctctacacccgcgaccccagcatgacggacgagatggaggaagagattgaacaacaattgcgggacagtaaggggatcggcaacttctccaccattctggtgaatatccctggcggtgaaggcgatgccatcaaattcattgaaatgggcgatatttctgcaaaggatgaatttgccaacgtgaagaacatcagcgcccaggacattctgaatgcgcaccgctttccggccgggctggcaggtatcgttccgcaaaatgcggcgggactgggcgacccggaaaagacagagcgaacctataaacgcaacgaagtacgccctatccagcgccgcctgtctatggccatcaacggcgatcccgaagttcccccacgactgcacctaaatttttcagctgaaacaacggataaggatgcggcatga

SEQ ID NO: 227049 - DNA, 1779 bp, Klebsiella pneumoniae
atggctaaatactcagaagaattaaaaggcgtggcgcgggcgctgtatctgcgccgctatacgccgaaagaaattgcatcagaattaaatctgccgaatgcgcggatcgtttactactgggcgcataaagacggctgggcggatctgctcagttttgaaagcactgaggaagcgattgaacgccgctaccagctgctgaccgcccgcgaaggaaaaaccgatctcgaccttaaagaaatggacatgctcattgcgcacgccgtgaagctgcgggcgcagcgcaataaacataaggagaaactggcctcaagcaagggagcacacgccgatcacgcctgcgataacgagaatgacgacggcgagccgcgtaaaaaacggaagtataagaagaacgatatttcgtccctcacccaggaggacttcgatacctgggccagtgagcatcttttcgactatcaaaaacatctgcgcctgaacattggccagcaggtgcgcaacattctgaaaagccgccagattggcgcgacctggtattttgcctttgaggcgttggaaaacgccgttatgaccggcgacccgcaaatattcctttctgcatcaaaggttcaggcagagtatttccgctcttatattgtcaacatcgctgaacagtatttcggtatcaccctgaccggcaatccgatccggctcagcaacggcgcagaactgcgctttttgtccaccaacaaaaataccgcgcagtcctacagcggccatctgtactgcgatgaatatttctgggtgccgaacttcgccaggcttaacgaagtggccagcgcaatggccacgcatgacaaatggcgcaccacctacttttccaccccgtccgcgaaaacgcaccaggcctacccgttctggacaggcgaagagtggaaaagaggcagtaaaaaacgcgcggccgttaagtttccttcatttgatgaaatgcgcgacggcgggcgactctgcccggatggccagtggcgctatatcatcacgatggaggatgcgatcgcgggcgggttcaacctggccagcatcgaaaaactgcgcaaccgctacaacgataccaccttcaatatgctctatatgtgcgttttcgttgacagcaaagacagtgttttcagcttcaccgacctggaaggctgcgccgtcgaaacggaaacctggcaggatcacgatccgaacgctgcgcggccgttcggcaatcgcccggtatggggcggcttcgacccggcccgcagcggggatttatcctgctttatcatactggcccctccggtactggccgcagaaaaattccgcgtactggccgtctttaactggaaggggatgaacttccgctggcaggcccagcagatagagacgctgtttaagcgctacaacttcacctacctgggtattgacgtgaccggcatcggccagggcgtctttgacaatatccagcactttgccatgcgcgtggctgttcccattcgctacgacatgagcaccaaaaaccagctggtactgaaagccgcagacgtggtggaaagtcagcgcattgagtgggacaaagagctgaaggagatcccggccagctttatggccatccggcgcaccaccacacaaagcggtaacgccatgacctttgttgcagaccgcagcccggagacgggccacgcggaatcattctgggcgatcacccacgccctgcacaacgaaccgctgaactacgaaaataaaccaaaatcccgttggggaatgaagaaggcagcatga

SEQ ID NO: 227050 - DNA, 795 bp, Klebsiella pneumoniae
gtgtcgcatttaaaaacgggttggctgtgcgtcgcgactgaaggcgatacggttgacgggcgggtgattgagcggcagtggattatcgacatgggggaaacctacgacgctaatcattatgccgccctgctgtggccggagcatgagcgcgatttcgggaattttggcgaggtgctggaagcggaatggcatgagggtgaagacgggctggcgagattgtttgtcagtatccgcccgaataagcgcctgatttatgccaatgacgaaggtcagctgttgtttttctccgtagagccggagctgaactggcgaggcggtgagcgcacctatctgatggggctgggtgtcacggataatccggccagcacaggcacaacaagactgcgattcggtcgccgtcgattgaacaggcagggatattacagtggtgtgatctcccgtgatggcaaaattaaacaggatggactgatgaaaaactggcaaaaactttttggtctgaagccgaagtttgaaaacgaaaacccggctgacgatacgccagcgggtgatgataagttgcaggcgctggccagcgcattaaacgatctggaagcgcgtgtgggggctatcgaagcgcagcttaattctgtacaggacgatgttgataccatttctgaagtggtcgataccgaagagtttgccgctattcgtgataatgcggcagaaattgtgacccgctttaatgaactgggtaataacggtaaacgtaaacagcgtcagatcccaggcaaggccggaaaatttaatttcctgtaa

SEQ ID NO: 227051 - DNA, 1023 bp, Klebsiella pneumoniae
atgcaccttaataaccgtgcgcgggaattactggacaaatattcggcggggatggcgcagcagtttggggcgcgtgataccagccgttattttgccctgaatgacccgcaggaaaatgcgttgcgtctggccctgctggaatcggtggagttcctgaacatgatcacctgtctggacgttgaccagctgagtggccaggtgatttccgtagggtcgtcggtactgcataccggccgcagcgaaaatgggcgctttatccgtcaggtcggcgtggacggtaacgattattccctggtggaaaccgacagttgtgccgccctgcgttgggatctgctttccgtctgggcgaatgccgggaaagaagagaatgagttttacaacctggtgcaggcgtttaccacccaggcgtttgcgctggacatgctgcgcattggctttaacggtaagagtcgcgccaaaaccaccgatccgactgcgaatccgaacggtgaagacgtcaacatcggctggcatgagcgcatgaaaacgctgctcaatggcaaccagattatgaccgatccggtcgtgctggatgatgccggagattatcactctctggatgcgatggcgtcagacctgattaacgccaaaattccggcgcagttccgcaatgacccgcgtctggtggtgctggtcggggccgatctggttgcggcggagcaataccggctgtatcaggcggcagaccgtccgactgagaaaattgccgcgcagctgctgggtaacactatcgcgggccgtaaggccattatcccgccgtttatgccgggcaagcgcatggttgttacgccgctcagtaacctgcacatctacacccagcgtaacacccgtcagcgtaaggccgagtttgttgatgaccgtaagcagtttgaaaacaaatacctgcgcaacgaaggttacgccgttgaggtgccggaattgtacgccgcgatcgacgagtccgccgtgaccatcggcaaggtcagtgagcagccggagggctaa

SEQ ID NO: 227052 - DNA, 702 bp, Klebsiella pneumoniae
atggcactttctcccgcacaacggcacagtcagcgcatcgccactgaacgccagttacagcgcagtcaggccgtggacagcagtgagagtatgcacattctggtaaaagcgctggaaaaggacgtggagcaggcacgtagcattcagtttattcccgatcgcattgtgtttaagcgcgatgtgctgctgcctcgctgggtgcccacggtggaagcctatctggtcagcggccaggtatacgcaaacccggttttcgcctggtgcgtgatctggctgtttgatgtgggaaatctggataaggcgctggactgggcggatatcgctatcagccagcagcaggccacgcctgaccgtctgcgcagcaactttcccacattcgtggccgatacgatgctggcatgggcggaagagtctgccggacgcggggaaagtatcgaaccgtatttttcgcgcacctttgagcgcgtcgccaatacctggcgactgcatgagcaggttacggcgaagtggtttaagttcgccgggctggaactgctgcgcaatgaggatggccagaagacggcggcgggcgtggacgatatcgacacgctggaaaaagccgatcggttactggctgttgcggaacagcactatttcaaaattggcgtgaaaacagcccggcagaccatcgccgcacgtctgcgcaaactgacgcaaggctga

SEQ ID NO: 227053 - DNA, 453 bp, Klebsiella pneumoniae
atgttcagtggcaacccgattgattaccaggatgagcaactgagcaataacggattctggccggacttaaacctgaaggattttcaggcacagcgctccctgccaccagatatcgacgcagaaacactcgcgcaggcgttgttgagtgctgtgatggaagttaacgcagagctggaaggggtacaggccggatatctggcaaaagggcatctgacggcagaagctgtgccgggtgtcacgatgaatggcctgaacggtttatgcgcccagtacaccaaagcggtgtttgcgcggggaaaggcggatttgctgggcgagttcgccaccatcgggcggcgtgattcgcacccggggcaggaaagcgcggagacacgcgcggggctgttaactgaagcctcggtggtgatccgcagaatgaaggggctgaagagagcaacggtgaaaaaggtatga

SEQ ID NO: 227054 - DNA, 504 bp, Klebsiella pneumoniae
atgaaaaacacacagctggaatcactgaccgcctttttcagggaaaacgtacccgcccgcgcaatgggggcatttaccagcgtcatggacgaaatgcagtttattcccgctgcaaaggatttggggctggaacagtaccgccaggcggttatccgttacagcgccgtgctttcctgggagcgctttccgtaccggatttgcgatccgcgcctgctgttttcgctgatggccgcgtggcttgacgacacagaccgggaattgttcgacgagttggggattaacgaggccgatcctgagtgggatgtttccgtggacagcgaagagacggccacggtgctggtcagcgtgccgatggtggaagagctggttctgatacctgacgaaaacgggccaattccgtggcagggacaacgctggcgactggctgaccctgagatctggacggcattcagtgcgcagattttcggcgctgacaacaccggtgcgccggtaggggatacctga

SEQ ID NO: 227055 - DNA, 717 bp, Klebsiella pneumoniae
atgattatcggtggcgagctgaacaaatcccagctgactgaactgcgcaggacactggcccgcgcagatcttccaaaagcgaagcggcagcgtctgctgtggcgtctggccaaatacgggctgatcgccgccgcaaagcgaaacgtacgcaatcaggccgatccggacggggaagcctggccggggcgcaggacgaagcgcaaaggcaaaatgctgcgcaacatgccgaagttgctgcatatccgggatatgccggaaatcagcgcggtgcgggtgtatctccagggaggtggctaccgcaacggaacaggggatgtgcctgccggggtggtggcgtacagccagcagaacggtatgagcgtgagggtcaatcgaagcagcgtcaggcgcggcagtcgagccgggcagatggcgacgcctgcgcaggtaaaacgtctgcgggcgctgggctaccgggtcaggaagggtaagcgctggcgcaagcccacggcaaaagagctactggcgtcgatgccctatgaccaggccggtctgctgatccgcaaactgtcgggcaaagcagtaaaggacagctggactgtcgatctgcccgcccgtgagtttctgggcatgagtgacgaggatttcagccaggcgctggcccgtcagttgcaggggattggcttcggctgggatgtaagagcacaggatataaggggacgaaatggcgtggcctaa

SEQ ID NO: 227056 - DNA, 1119 bp, Klebsiella pneumoniae
atggcgtggcctaatgttggggtgaatcagctgaatcagcagcagggcgaaaccacggaagtggaacgcgtgttgctgtttgtcggccggggaaccgtgaatgccggcaaaacgttgccggtgaacagccagagcgatctggatgtgttgctgggtgaggcggacagcgatctcaaacgtcagctgactgcggcccgcgacaatgccgggcaaaactggtgggcatttgtgcgggtgctggatgatgccgggaagtggacagatgccgtgcaggatgcgcagcaggtggcctctgtggaaggtgtggtgctgtgtgatgcggtttcagagaaggctgtgattaatgaagccatcgcgctacgcagcaccctgatcgcgaaatatggccgctgggtgtggtttatcctggccgttcaggcgatgcagggggacgaagcccaggccgattatctgacgcgactgactgcgctacaggcggggatagctgaaaaggctgtttgtctggtgccggtgctgtggggcaatgagccgggcgtactcgccgggcggctctgtaaccgtgccgtgactatcgcagacagcccggcgcgggtgaaaaccggggcgctggtcagcatgggaagtgatgatgtgccggtggatggcgacggcgtatcgcttcagctggccacgcttcaggcgctggaagcccagcgtttcagcgtgccgatgtggtatgcggactatgacgggtattactggtctgactgccgcacactggacgcggaaggcggcgactatcaggcactggagatggtgcggatcgtcgataaggtagcccgtcgcgtgcgactgctggccattgccaaaattgccgatcgggcgctgaacagtacgccgggaagtattgcggcaaaccagctgtattttgcccgtccgctgcgcgaaatgtcgaaatccagcgaaattaacggggtgcagtttccgggggaggtcaaatcaccaaaggacggcgatgtgaccattgtctggaaaacgcgaaagaaagtggaggtttatgtggtgatccgtccgtatgagatgccgctggaaatcaccatcaatctgatgctggatgccagccttgagggggccgcatga

SEQ ID NO: 227057 - DNA, 459 bp, Klebsiella pneumoniae
atgagtaagcgtatttccggggcgtcgtttgacacctactggggaacggatttgatccacgtcgaaaagctgacactggatattacggataacactgcgctggcgcagacgaagggggtgccggatggctatgtggatggggatgtgtccgctgaaggggaaattgaactgtccatcaaggctctggccaccctcaaagcgcaggccagttcagcagggtcgtggcgcggaattccggtcgcggacatgctcttttacggcaaggccggagaggaagaggccaaaattgaagcctttggcgtcaagctggtactgagcagcattctagaccttgatccgaagggcggcgctctgtccacccgcaaaatcaaggtactggtcacagacccgcgctttatcaatatcgacggcattccgtatctggagccggaaaccacgcagagtctgatcgcgtcgtaa

SEQ ID NO: 227058 - DNA, 291 bp, Klebsiella pneumoniae
atgcaggagtatgaaaaggggtttatcacgctggccatcatgggggcgctgattgcgctgggtaagatgctgaccagcaatgagccgattaccgctcgtcttatcctggggcgcgttatcgtcggcagcgcgttgtctctcgccgcaggcgtggcgctgtactttgtgccggatatccacccgctggcgctggccgggattggctccgcgctgggtatcgcgggtctgaacggtgtggaagtgtggctgcggaaaaagggttttgatctgggtaaaggagtcgggaaatga

SEQ ID NO: 227059 - DNA, 342 bp, Klebsiella pneumoniae
atgacgttgagcgaaaaacaacagctgtttgtggtgatggtggccaatttgatccactgggccgaagagcacggcttccgtctgacgtttggtgaaacgtaccgcacgccggagcaggcggcgctgaacgcgaaaaagggcagcgggatttctaacagcctgcatacccaacgtctggcagtggattttaatctgtttgtgaacggccagtataagacccgcaccgaggattaccgccccctgggcgaatactgggagtcgctgggcggcagctggggcgggcgttttaaaaccaacccggacggcaatcacttcagcctggaacataacggggtgcgctga

SEQ ID NO: 227060 - DNA, 333 bp, Klebsiella pneumoniae
atggaaaggcttgtcgcgggtgtgctgctgctttgcgtgctggcatttgtcggagggtggaaagtggccacctggcagcatgacagcatggcgctggcaatcagccaggcggcgacggctaccggcaaccgcctggcggacgcggccagccagtccgggcgcaggctggaagagcaactggaggctttgaaaaatgcgccaccgcgtgagatccgcaccgaagtggttaagccggtgttcactaacgtgtgcatgtctgatgattttgtccgcatgtacaacgacgccgccgccagtaccgaacgtgcgctttcaggaaaacctgaaaactaa

SEQ ID NO: 227061 - DNA, 264 bp, Klebsiella pneumoniae
gtggaaaaacaaattattgaactgaccgtggccggaaaggatattgcttttgagccgaatattgccgcctacaataaattaattaatgacatgtcaatggataataaagtgtctccggcacataactatctggtgcgtattgtgacagcggaaaccaaagataacttggccgacattctgaaattaccgggcgcggcgttgcagctggttaacgaagtgaataagcgctttgcgcctgaactggatattgttgcaaaaaactga

SEQ ID NO: 227062 - DNA, 1884 bp, Klebsiella pneumoniae
atgaacagcctggattttacgttaagtctgattgataaattcacgcgcccgcttaaggctgcgcagaattcggctgttcagtttgcggataagtctgttcaggcgtttaaacgtatcggtatcggtggcgctgcactgtatggcgtggggcagtccatcggcggaatgctggcaccggcatttgatatgtttaatgcgcttcaggagcagtccgccaggggcattgattctggcgtgctgaagactgtccagcgcgacgcgctggccttcagcaccacttacggcacggtggccaccgattttgtccgttccaccgcagagattaacagcgccattgccgggctgaccgggcaggagttgccgaaggtgacgaaggtcgccaacctgatggcatttgaaatgcaatcatccaccgcagaaacggctgagtttatgcgccagatgttcgctaacttccgcacagacgctgattcgctggggaaagtacagtttgcggagcagctggccgggaaaatgacgctgatgcgccagcgcttcgggctggaaattgggatggtcaaagacctgatggaaggtgctcgcggcgcgggcacaaactacggggtcggcatgaatgagcaactggccgtgatgggtgagttgagtcgcaccctgggaacggaagccagcagtgcctacgagggctttatgacctcagctatcgagggtggtaaaaagctgggcctgtcgttcactgacacggccgggaagatgctctccatgccggatattctcactaagctacaggggaaatacggccagagcctggaaggcaatctgaaagcccagaaagagctggatgacgccttcggcgatagttcggcggtggtaaagcagctttacggcaatgtgtccgtgctccagcgcaatatcaccgagttgggcggcgcggacgggcttaaacgcacccaggaggcggcagcaaaactggttaaaccgatggatcggtttatggccattatccgggctattcagattgccatcgggttaacgctggttccggcgcttaaccctctgctggactgggccgcgcagataggtcagacctttgcccgctggatgagcttattcccgaatatcgcccgcgtggtgggctgggtggcaatggcagtactggggtttgctgcggtgggggcgatcctgaatattatcatggggctgtctgctttcatcctgacgggctggggagccgcgctgaaactggtcagtggagcgctgatggtggttcgtacgacagcgatgctgaccggtgccgccattaactttatgagctggccggttttgctggttatcggggccatcgcgctgctggtcgccgggtgttatctgctggttaagcactgggacacggtcaaagccgctgtgatggacacggccgcgtttcaggttgtggcgcaggctgtcagctggctggcgaatctctttgcctccgtgtgggaatatatttcagcgggctggaatagttttattgcgctgctgacgggattttcaccgctcgacgcattaagcggcatggcgtcgggaataatgaaactctttgacggtatatggcaggccattaagaaaagtttcagcgcatcatggagctggattgtggataaattgaacatgatccccggtgtgaatatcagcaccaccacgacaacgccacccgtgacagaaaataaactttcaacgggtgggcaattacgcagcgttgagccgggcggtatcagccgaaccattaataacagcaataataataaagtggataagcgtggtaacagcatcggtacggtgaatatttatccgcaggagccatttacgccaggtaaattgcaggagtggcaggagatgggattatga

SEQ ID NO: 227063 - DNA, 330 bp, Klebsiella pneumoniae
atgagtgatttattgtatatcgacctgctgattacaaatgatgattttgtcctgaataccggtaatgagcctgttttatgtaataaccgccagagtatcggacaggacgtgattcacagcattattgaaagcggactggcaacggaattaattgccgaacgtagcccgacgctgcgtggcgatatttttacccgcatggaattactgattgaagacgatgaacggctgatacccggcacggtatccattacggaagaaacgctgtcgcgcctgtgggtgacggcagatacctatgattttggtgcgctgtcgctgagggtggatctatga

SEQ ID NO: 227064 - DNA, 1185 bp, Klebsiella pneumoniae
atgacggaaaaaccgcaggtggattttgaaactctggtcagtgaaagcggtatgcccgcgacggccgacgaggcccgcagccggtttaatatcatcgccgcagaagaggggattatcaccaatacgtcgaaaatgtcgccgttctggcggctgatcacggccatcgtcaccgcgccggtgatgtggcttcgcgacgtgctaatccataccgtgctggccaatatgttcgtggcgacggcaaccgggcagatgctgcgtttgctggcctggtcggtcaatatcacggttaaaccggcaacggccgcacagggtgttatccgcttctataaagcctcaccggccgcagtcgtcacgattaaagccggaacgctggtgcagaccgagcgtatcaacggcacggtatatcgccttgcggtaacggaagatttcactctcaccgcaggcactgccagcgcactggtgccggtgaaagcggaggggacgggtggcgcgtataacctcgcgccgggatattaccggattttgcctgtggcggtgtcaggtatcagccatgtggtgagtgaagaaaactggctgacggtgccgggtgctgatgaagagagcgatgatgaacttcgtgaacgctgccgtaaccagttcaacctggtgggtaattaccacaccgatgcggtctaccgctccatgattgcgggtatcgccgggttgagcattgaccgtatctattttgagcacgacgccccgcgcggcccaggaaccgctaacgcctatttgttgctggacagcggcgtgatctccgatccgtttgtggcggcggtaaatgactacatcaatacccagggccaccacggacacggcgatgacatgcagtgtttcgctatgccggaaacagcccacgatctggatgttgtcctgtacctgcctgacccggacaacatgctggctgatgaacgcgatgcgctgctgtcgggtgtggaaaacctggtgcgctgtgcatttcgggaaaacacggattatggcgtgaagaagacgtggccgtatggccggttctccttctctaatctgggcagggagatccaccggacgtttacggcggtggattcagtcaccttttccctgcgggatatcgtcagcgatctgaacgtcccacgtctggccagcctgacggtgagtatcgaacatgactga

SEQ ID NO: 227065 - DNA, 639 bp, Klebsiella pneumoniae
atgactgattttgataaaaaactggccgggttaacgctaccttcatggatgaacaaaggcgagccacgcaaattactgaatacagcccggcgctactggaagctggtctgggagtggatcacctggccggttaaccagttcgacccgctgacctgctcggagtcaattttacggctgatggcctatgaccgggatattacccgcttcaacggtgagccgctgtacctgttcagaaagcgcgtggcgtatgcctttgtgaatgcggcggactcaggctccatcgccggttttattgccatctttgaacgcctggggattggctacgtggagttgctggaacgtcagccggaaattgactgggacgtcatcatcgtcagggtatcggacagccagatagcacagaacgccgacctgatgatgcagattatccgccagtacggccgcacctgccgccgctatcggtttgaggtaatgaccacgcttcagctgtatatcaacgccgggtggaatgacggggaattaatctgctattacgccggggaatatatcggtggggaaaaacggctggacggggaatatgtctgtttcccggccagtgatggaatcaatgataacgccatgtttggcgcaaaactgtag

SEQ ID NO: 227066 - DNA, 3153 bp, Klebsiella pneumoniae
atgagtcagacggtgattacttccgcctttgaacagttaaaagcccaggaagcggcaaacggtggcgttgtcattcttgatgaatttgtgtttgcaaatattccaaatctggacattaccagtcctattgatcgtggtgaagggttgccggaagaggcgatgattgtccatcgtcaggcggtgggtaaaaccggcatggtaaacaataacgcggtggtgtattccgtcgtgatgggcgcggatgtcggggattttgaatttaactgggttggcctggttaacaaagcgaataatgtcgtggcgatgattgtccatgcgcccatgcagaagaaaattaaaacggcgactggccagcagggtaacgttttaacccgctctttcctgatggagtataacggcgcgtcagagcagacccagattatcaccccggcagatacctggcagattgatttcacggctcgcctgggtggtgttgatgagcgtatccgctgtgaaaatattgatatctatggtgaagcctcattttttggggatggtttcctggtcagcaaaaacggatcgcagtgcgtcgtaaaaaagggtgttggctacattgccggggttcgtgctgaattattgtttgatcagactgtcaccgttgaccagaagccggtaaaaatttgggctgatgtaagctggaaaggtacgcttaccagcatctgggcatcttcggtaaagctgacaattgctgaatccctttctgattatcatgacaatgatgaacagcattatgtatttgccattgcggccatcaatgctgacggtactgttttagatttgcgtccttccggattttcattgaaagaactgggttctaataataaaggaagtggttcatcatatcttggaatatacccggcaggaactgttcagaatctggtaacttttttgtcatttgatatgttcaacattaaaaatgatgcttctgaagacgttacccaggccattattgatgtttttaattactctaacgacttgggtattcctgttgttcagaaatcaggaagatatcttatttcaggaaacacatttgcaaccagtaccgcaggttttgatctggatggagctacgtttgttccgtctgctaacttcacaggataccttctggggacgcagagtgaattaccagtcacttatgattcatcaagtgcagttgtttcagccattaataatgtcccgatctctcctggtgacagcatcctgaaaggattaaaaaacacctcagtacttaatggccatgctgtttttatacgtggtgctgatcctctgtatgttgctcgcggaaaaactaagtactggtggcataatacccgcatttctaacagagggaaaatggatgacaggatgaagtatggggtgtcatccgtaaatgaggtgatagctctcccggttaaaaagaaaataacagagttccgtttgccagcatgggattttattaatgggccgtctaataatggggtgatgcgttttaataatatcacccgtgccagaatctatggcggggcaatatacaacaggccgttacaggataatgaaaagaatccagttattatatcattgaattattgttatgatattagcgtggaggatctttatgatgagtatccttcatatcctgtcgtggggggacagattgcttatgcctatacgttaaactttaattatgtcaatcgactttcattcaaaaactgctgtgctcaggggtatggttggggggtggttggtgggcagttagcaacaaacctttcatataaagagtgcaacctgaatcgtatcgatatgcatgatccatttatgggcactctgaatgcagaagattgctcggttgggtgttgggggttctctgtatttggtatgggagatatgcatataagccgtattacggttgatcttgatgattctttttatggtggataccgggaaattgccggaatttttaatactcgcccggattttagtggtgtgtttgacggtaatatatatataaacggcctgactattgttggggatgcctccgcatacagggaatctaccgggcacggtgtgtcgctgttttctgcatattcctacaatggtgggttggggtacatcccggaaggttctcccgttgaaccttggggtttccgtgaaattatcgtaaaggggctgaattgtgttgatccgatacaagggcggcgttttgattcaataattaaagcagactccgtacaacaaacaacatatttcccattgagagtgaaaattgaagatgcaagattcaattcgactgagcctgaatgtattgatttgcatggatggagggtgcctgcgtataacaaggaatctgtgaatattacgcatactcttaattataagccaacaaacttcatcgagatgaatgatgtatcgctggcaggcctggaagtgataagaccttatttaaattatgactatcataatattgactttaaaatgaggaatgcaagaaatacagagaatacgaattcgccaatagcattttataccgatcagtgtggcagatatgagttcagtagctgtgcattacgaaaaatatcagacagaacatacagtacgggcaatctcctgaacaggaattcaacctttgttgtcaatggaggtgtttttaactcattgtcaggcctgccctttgatatcactttcaatagtggatataacacgccggttctcgcatcaaatgtgctttttgtcgggctttattctcagacaagtgttacggcgataaatgctaatttagctgagttctctgtgtgtgaaaattgcaagtatttcagcaatgaaactgttgggtatatcagtcccgccttgtggttaggctctgccggtgcgaatggtatttcaacatcatttaacgttgcccgtgaaaacaatctgagcctgacgttcactgtcagtgcgggtggtaattcagaaacattgattaatccagtgaaaatgccaggttctgtagcgccaggaaatgttggggggacttttttttcttctgctaccgggagtcgggtagattttcaattgagcctgaattcacgcggattgaaagcgaatgttgggaaagttatgtcatcaggaacgttaacaggtatttatttacaatag

SEQ ID NO: 227067 - DNA, 723 bp, Klebsiella pneumoniae
atgtggcagtacaaaaatatcagactgaatgagcgattaactgatattaattgctccgtcattccggcacatcaatggatttatggtctggggcagcaaacggaaaacgggagctatctgagtcctggtaacgctgtttcgtatctgtcacagcagctggcaggcgtgggcaatatctcagatgtggtgatattcctgttaaccggtagcggtcatgatgattttgtgcggaacctgggcgacctggctgatgtgcttccgcttccggccatgatgcaggttaaacgactggcaaagtcggcggcagagctggccacagagaggatgctgatcccgtcacctgcaaccgcgtcagttgcggccgtgccgttctctacaccgacaacccgcgctgcgctgaatggacaacgcgttgcggaagcgcagatacaggctgcatccggggtcagtcttgtgggggcaagggaggcattggctgactttatccaggaaagaaacaacattctcagcgaggtggccagtggtctggaatctctgaaggggaaaaccgcccgagcctggacgttcaccgcacagggcgatatcaccaccacgctgcgtaatatggtgaaagatattccggccgtgtcggcggtgcattgcgctgcggtgatgatggtaggggaaaatctggcaggactcagggagatgatacatgaactcgatagcgacgctggcgcttaa

SEQ ID NO: 227068 - DNA, 552 bp, Klebsiella pneumoniae
atgaactcgatagcgacgctggcgcttaacggcgaaggtatccctctgaaaaacatgcgggtcacgctcaccatgcagtttcaggacaaagaacagtcagggcagaccagttccacagctagggcagagcagggaacgaagggtaaagagctgcgcgtatctggtgaagtgccgtttaaaaccccggaggtgctgaagcgcatctttgaactggcaagcgccaccggcgacgatgggcagcgccagaaataccgggttgcgcacgatgtagcccgtgcggtgggatttcgtgaagccacgtttaccgggagtctggacgcgccacagcaggaagggcgcatgtcctggctggtcacgttcacgctgaccgaatttatcagcgtaccggaaaagcgggaagagcgtgcggccggaaaggtctccgcgcagaagcaaacggcgggtacaggcggtgctgcgggcagcggaaccgcctcagccggggaaagtgacgaaaaactgacgtggtttgagagcaaggtgcttaaaccggtaaatgaagcgctggggtaa

SEQ ID NO: 227069 - DNA, 1131 bp, Klebsiella pneumoniae
atgaacaaagaaaacattaataaacacggtcttaaaagatacattgaggctgatattagaagaaagataagacatgatgcaggttatggatgcgtgatttgtgggaatatttttgttgattatgagcatattgagccagaatttaaagatgctaaaaaacacgatccagaaaaaatgacattactgtgcaagggatgtcatgatgatgtgacagacacaagaatttcaaaaaaaagagtttggctagcaaaagaaaatccattttcaaaacgtaataaattagttaagggacttctatacccagaaaatgaaggctttaagatacagattggttctataatttccattggagctccaattttcattaaagtttatggtaaaccattattctggttttctgaaccagatgagaaagaaggaccgataggatttaacgccatattcaaaagcactgatggcatacttgcatttattgaaaaaaacatattccatggagtaacttcgaattatgaccttgatactcacggcgcaacaatcgaaataagattagataaaggtaaaatagttttgataatgatagctaaaggcgatgaaccactcaaaattgaaagattctctatggattacttaggggcaaatatcagctttaacggcgaaggtatacatattaacggggttaataacatttcgacagaacagtcaacatttctaatgaataaaaattcagattcatgtctcttttctatatttggcccaccatgggaaaaagtaaaagatgatattggttatgctaataaagtttgcatagcagtcagagcaacactgggtaatgcattaatctccccaaaaggagatattgtcggatggatatgtggtgattgggtcatatcccctaagtataccaaaattgccataataacccctggaccaaacggaataatgtgcttatgcaatatagtcggggagtttataagtctactaagggaaaccaaatccggatttatatccgtttatccggatgataagtatgaatcaggggagccaatatgggtatcaaatcaaaacatgaaagcaaaaaacgtcttcttacataaagagtatgatttatctcaccgtcttgtttttgactaa

SEQ ID NO: 227070 - DNA, 810 bp, Klebsiella pneumoniae
atgaataaattagttcaaaattgtactaaccgaaacattccagaaccaatgcaacgagaaattcgacggcgctgcgggttcggatgtgtcatttgcggtttaccactatatgaatacgagcacatgcttggctgggcaaatgttaaaagacatgttgctagtgaaatcactcttctctgtaactttcatcaccgagagagatctggaggattgctccctatagaaaatgtaatggccgctgacaaagcaccttttaatttaaaaagtggagtaactaagccatataattttcatttttctggcactgaagcatctgtggaaattggcagcaacacatttataattaacacacaaattaaaaataaaacatctcaattcatccctttaatgattgatggctattctcttatcgaattcagatttgaagatggacaaatgttattaaatttaataatatttgatgagttcaatatacccatattacaaattaaggataatatcctcatgtactcagcatacttgtgggatattgaatttgttgccaagaaaatcacaatcagaactaaatctagagttattctcattgaaattgaattttgtccacctgataaaataaaaattcttcgcggtaaaatgttatgtaatggcgtagaagtagccatcaataaaaatgatgtttcaataaacaaagatctcataatacagggaaatacagttagatgctctcctgttggtatattaataggcttaaatgcaatcaattctcccggcaccatttcttacccttatgtttcacgatacataagataa

SEQ ID NO: 227071 - DNA, 1506 bp, Klebsiella pneumoniae
atgaaacagaccgtggcggcatacattgccaaaacgctggaacaggccggcgtgaaacgtatctggggcgtcaccggagattccctcaatggattgagcgatagccttaaccgcatgggcaccatcgactggatgcccacccggcacgaagaggtcgccgctttcgccgctggcgcggaagcgcagctgaccggcgagctggcggtctgcgccggctcctgcggaccgggcaacctgcatctgattaacggtttgtttgactgtcatcgcaaccatgtcccggtgctggccatcgccgcccacatcccatccagcgaaatcggcagcggctattttcaggaaacccatcctcaggagctgttccgcgagtgcagccattactgcgaactggtctccacgccggagcagatcccgcaggtgctggcagtggcgatgcgtaaggcagtgattaaccgcggcgtctcggtggtggtgctacccggcgatgtggcgctgaaggccgccccggaaagcgccagcagccactggtatcatgcgccgctgccgacggtcaccccggcggaagaagagctgcgcaagctggcgcagcttattcgctactccagcaatatcgcgctcatgtgcggcagcggttgcgccggcgcccaccaggaactggtggagttcgcagccaaaattaaagcccccatcgtccacgccctgcgcggcaaagagcacgtggagtacgacaacccgtacgatgtgggcatgaccgggctgattggcttctcttctggcttccacaccatgatgaacgccgataccctgatcctgctgggcacccagttcccctatcgcgccttctacccaaccgacgcgaaaattatccagatcgacatcaaccccggcagcatcggcgcacacagtaaggtcgacatggcgctggtgggcgatattaaatcgacgctgaaggcgctgctgccgctgctggaagagaaaaccgatcgccacttcctcgataaggcgctggagcactatcgcgacgcgcgaaaagggctcgacgatctggctaaacccagcgataaagccattcacccgcaatatctggcgcagcagatcagtcattttgccgatgaagatgccattttcacctgtgatgtcggcaccccgaccgtctgggcggcacgctatctcaaaatgaatggtaaacgccgcctgctgggctcgttcaaccacggctcaatggctaacgccatgccgcaggctatcggcgccaaggccactgcgccggagcggcaggtagtggccatgtgcggcgacggcgggttcagcatgctgatgggcgattttctgtcgctggcgcagatgaagctgccggtgaagattgtcatctttaacaacagcgtgctgggcttcgtggcgatggaaatgaaggccggggggctatctcaccgacggtacggagctccacgataccaacttcgcccgcatcgccgaggcctgcggtatcaaaggtatacgcgttga

SEQ ID NO: 227072 - DNA, 1014 bp, Klebsiella pneumoniae
atgaacccacgcaaacccagcgtcaccgcccaggatgttgcccggcgagcgggcgtctcccgggcagtggtgtcccgggcgttgagcaacaacggcagcatctctcccgacgcccgggcgcgggtactgcgcgccgccgaagagctggggtatcaggttaacttcctcgcccaggggctgaaccgccagcgcagccacttaatcggcgtgatcgtctcgcgcatcagcgatccttttcgcagtaccctgcttgatgcgctgcttaacgagatccagcgccaaggctttcaggcgctggtgagcgagatccacagcgagcaggatctggcgcagaccttgcgccgtttcgctcagtttcgcgtctccggcgttatcgtcacctccggccagccgccggaggcgctggtgaacgagtgcgtccagcagcatattccggtcgtgggcattaatcgccagccgacgatccccggcgtggattacgtttgttctgacaacgccgccggcgccgaactggccgccgaccagctgctgcgcagcggctgtcagcgctttggctggctcaaccaccatccttccacctgggccggccgcatgcgcggggaagcgttctgccgggcgctgcaaacgcgcggagtggacgtcgaacgccacctggcgatcctcgcctgtcagcaagaaggttacgcgggcgggttacaggctgcggcgctcgccgacgaggcgctggaggggatcttctgcgccaacgcccagcttgcctgtggctttctcgatggaatgcgccagcgcggcagagaggctccggcggattttcagctgattggttttgataacacgccgacgaccgcgcaatatagctatcagctcaccacgctacatcaggatgtggcggcgatcgcccgccaggcgctcgcccggcttctggagcgcgccgccgacccttcgcaaccttcacgcaccacctgggtggaggtaaccttaattcaccggcgcacgtcgccctttgttatctga

SEQ ID NO: 227073 - DNA, 393 bp, Klebsiella pneumoniae
gtgatcacctttgtctggaagcaactggcctttgccacgctgctgatctgcggggcgatggcggcgctggagtcgtcgcagatccttgctgcacgtaatcttggcgcctcccggccgcggatcctgttcgatatcatgctgccgcaggtcctgccgactatcggcgtggcgctggtgctgtcgacggtgaccatgatgtcggtgctgtcggtaccgttgatgatcggcgtggggaccccgacgatgctaaccgtggatatggcgtttcgcgtcaattcctatggtgattacgcggtggcgaatgcgcttggcgtggtgtcgctggcgatctgcggcgcgctgtcgtggttttacctgcgccacagcctgcagcaaaaaggcggtgaatcatga

SEQ ID NO: 227074 - DNA, 720 bp, Klebsiella pneumoniae
atgccgggtggcggctgcgccttacccggcctacttgtccggctccgactgtctgttggcccggcaagcaacggcgccgccgggcgatggcatcaggcacggagctgcgtttataccggatggcggctgcgccttacccggcctactcgtccggctccgactgtctgttggcccggcaagcaacggcgccgccgggcgatggcatcaggcacggagctgcgtttataccggatggcggctgcgccttacccggcctactcgtccggctccgactgtctgttggcccggcaagcaacggcgccgccgggcgatggcatcaggcacggagctgcgtttataccggatggcggctgcgccttacccggcctactcgtccggctccgactgtctgttggcccggcaagcaacggcgccgccgggcgatggcatcaggcacggagctgcgtttataccggatggcggctgcgccttacccggcctactcgtccggctccgactgtctgttggcccggcaagcaacggcgccgccgggcgatggcatcaggcacggagctgcgtttataccggatggcggctgcgccttacccggcctactcgtccggctccgactgtctgttggcccggcaagcaacggcgccgccgggcgatggcatcaggcacggagctgcttttatgccgggtggcggctgcgccttacccggcctactcgtccggctctga

SEQ ID NO: 227075 - DNA, 999 bp, Klebsiella pneumoniae
atgataaaacgtaatttaccattgatgatcacccttgcggtgtttgtgctgggctacctctactgcctgacccagttccccggttttgcctcaacgcgggtgatctgcaatatcctgacggataacgccttcctcgggatcatcgccgtgggcatgacctttgtgatcctctccggcgggatcgatctgtcggtggggtcggtgatcgcctttaccggcgtcttcctcgccaaagcaattggcttttggggaatctcgccgctggtggcctttccgctggtgctggtgatgggctgcgccttcggcgcgtttatggggctgctgattgacgccctgaagatcccggcctttatcatcaccctcgccggcatgttcttcctgcgcggcgtgagctatctggtgtcagaggagtcgattccgattaaccacccagtgtacgacaccctgtccgggctggcatggaccattcccggcggcggtcgtctcagcgccatgggactgctgatgctgctggtggtggtggccggtatttttgtcgcccatcgcacccgctttggcaaccaggtgtatgccatcggcggcaacgccatgtcggcgaatctgatggggatttcgactcgcagcgccacgatccgtatctatatgctctccaccggactggcgacgctggccgggatcgtcttttccatttatacccaggcgggctatgcgctggcgggcgtcggcgtcgagctggatgcgattgcctcggtggtgatcggcggtacgctgctaagcggtggcgtcggtaccgtgctgggaacgctgttcggggtggcgatccaggggctgattcagacctacatcaacttcgacggtaccctcagctcatggtggacgaaaatcgccatcggcattttgctgtttatctttatcgcgctgcagcgtgggctgaccgtgctgtgggaaaatcggcagaatgcggcggtgacgcgggtgagcggggcggggagtcgctaa

SEQ ID NO: 227076 - DNA, 1608 bp, Klebsiella pneumoniae
atgaagagaattgccatcgtcggcgtggggccgacggggatttacaccttttatgaactggtgaagcgcggtgagccgctggccatcactctgtttgaaaaagaggcgcaggccggggtgggtatgccctacagtgacgataatactgcggcgcaaatgctggccaatattgccagcattgagatcccccccatcgacctgacctacctgcaatggctgcagcagcaaagcgatgactggctggcggcgcgcgggcttgaacggcacgccctgcatgagcgccagtttctgccgcgggttatcctcggcgaatactatcgcgaccgttttctttacctcgttgagcgggcccgggacgtcggctttgtgattagcgtttgtgaatcctgtgaagtcacggatattgcggttcagtccaccgggatcgccatccacaccgatagtgcagcagacccggtaatcgtcgacctggtggcgattgccaccggccatctgtggcctgaagaagagcgcgccagccgacagtacttccccagcccgtggaccggcctgatggaggcccgcattgccccctgccgggtggggatccttgggacttcattaagcgcgattgatgccgccgtggcggtagtggcccgccacggcgttttccataccgaggacgacaaaacgacccatttttccctccatccaggcagcgaagcgctggagatcaccctgatgtcacgccacggcgtgctgccggaggccgatttttactgcccgatcccgtgggagccgctggagattgccactcccgccgccctcgaagcggccattgcggagggtagcgacgctctgttagatcggatttttgagctgatcgttaaagagctggaatatgccgcccccgactggagcgaggcgatcgggcttcgtcagctgacgcctgacagtatcgccgacgcctggtttgccgaccgcctcacccatgacccctttcagtgggcgcagcgcaatctgcaggaggtggagcgcaataagcgcgaacaccacacggtgccctggcgctatgccattctgcgcctgcatgaggcgattgaaaccgtggtgccgcagttcaacgacgcggacagccgtcgcttccgccagggcctcgctcgggtatttatcgataactacgccgccattccgccggagtccatacgtcggctgctggccttgcaccgggctggcattctgcggatcctgacgctgggcgaagattatgagctgcagcgggagcctgaccggacgctgattgttcatcatcgtcagcgctgcgaattcgatgtctttatcgatgcccgcggacaaaaagcgctgaaaacccgggatctgcccttcccttcactgcgccagcagctgctggcctgcggcgacgacattccggacgtcggtgatgactacacgctgcaggcgccggagacagtgcgcggccgggtcgccttcggcgcccttccctggctgatgcacgatcgcccctttgtgcaggggctgacggccagcgccgagattggcagcgctatggcccgcgccgtgtcgcagcaggccgccggccgacggcgccgtctctggtatatcgaatag

SEQ ID NO: 227077 - DNA, 333 bp, Klebsiella pneumoniae
atggatatacaggcgccttattatcggcaggttgctctgctaatgcaggttttaccctatgttgctgtcgaacgggaatttgcgctgaaaggtggcactgccatcaatctctttatccgcgatttcccacgattatcggtggatatcgacctcgcctgggtgcccctggaaagcagagccatcgctttacctcatatacgggatgcgcttgcacgtattgccgccaatctgcaacaacaggcaggtatgagcgctgtattacaagctaatcgttcagatgagatgcgtgtcgttgttactaccgatagcgcgcaaataaagatagaggtttga

SEQ ID NO: 227078 - DNA, 1011 bp, Klebsiella pneumoniae
atgtcaaaatggtttgtatgtatttgctgtgtgtgttatttctccgtaagttatgcgcaagaatttaaccttggaattgcggctcatttattgtcaaacaatccttcttctttaaacccaaatacagccaataccaaaataaaagcggcaggtattaggtatgtaagaatggatgctttatggcgcgatgttgaaatcaataaaggccaattagcaatcccgaaaaaatgggatgaagtaataaatgagcaaaaaaaattaggtttagagcctattttaatactagcttatggcaataagaattatcaaaatggagataaaccgacagataaagacagcattgatgcttatgtcagatatgcatcatatgtggtgaatcattttaaaggacgcgttaaatattatcaaatatggaatgaatggaatggtacagccggagcaacttcagtaggtagcgttcgcgattataagatattagttaaagctgcgtatccggtcataaaaaaaataaatcctgcgtctgttatcattacgggtgagttttctaatggtgcctttaataaagagttggggcttacttctgaggatttcttgagagtctttttgtctcaggatatggtcaactatactgatgtaatcggtattcatccttatgttgtatataggaccccaccatataatggctactgggcctatttgtcacaaataaaatatgcatctagtcttgttaaacagagtagaggattctctaataaacctctttttattacagaaataggctggagcacagcaagctctaataaaggtgttagtgaaaaatcacaaagccaatttattactaatgctatttgtgatgcaaagaaaattggtatttctgccgtcattatttatcagatacgggatgggctaccaaataattcacatcctacagaaccggggtttggtatttataagtataattgggatgaaaaaccaattataagttcccttaaaagtaaaggttgctggtaa

SEQ ID NO: 227079 - DNA, 1155 bp, Klebsiella pneumoniae
atgtcacaaaaaccgaatgttggaattgttgcagattggctggtaacttatgcaggtgctgaacgtgtaataaaagaatttctggatatttttccagaatcagaactatactctattgtcgattttttgcaacctgaagctcggaatgaattacatggaaaacacgcagtaacatcattcattcaaaatttaccaaaatccaaaaacaattatcaaaagtatttgccattaatgcctttagcgattgagcaattggatgtttcttcacatgatattattctctctagtagtcatgctgttgctaaaggtattttaaccggtccagatcaattacacataagttatgtccattcaccaatacgttatgcatgggacttacaacaccaatatctacgggaagctggctttaataaaggaattaaagcttctattgtaaaatacttattgcataaaattaggctttgggattatcgaacggcaaatggagttgatcatttcattgcaaactcccagtttatatctaggcgtatcaaaaaagtatataatcgtgagtccacggtcatctaccctcctgtagacgtagaacgatttactcttaatgataaaaaagaagattattactttactgcatcaagaatggtaccatataagcgtatagacttgattgttgaagcgttttctaaaatgcctgaaaaaaaactgattgttataggtgatggcagtgaaataggtaaggtaaagtctaaagcttcaaaaaacgttgaaatcttgggatatcaaccaaatcatattatgttagagcatatgcaaaatgcaaaagctttcgtctttgcagcggaagaagatttcggtataacccccgttgaagctcaggcttgcgggacccctgttattgcatttggaaaaggaggttcactggaaacaatccgtcctttaggagtagacaatccaacaggtttatttttcagtgaacaaaccattgaatcaattattagtcaagtaaatgctttcgaacgaaatgttgaaattttcgaacctgaaaactgtcgtttgaattctcttagattttcatcattacgatttaaaaacgaaatggataatttcattaatgacaagtggttaaaatttcaggaatctaaaaaaatcacttattaa

SEQ ID NO: 227080 - DNA, 1416 bp, Klebsiella pneumoniae
atgttacttcctgtgataatggctggcggtaccggcagtcgtctctggccgatgtctcgcgagctttacccgaaacagttcctccgtctgttcgggcagaactccatgctgcaggaaaccatcacccgactctcgggccttgaaatccatgaaccgatggtcatctgtaacgaagagcaccgcttcctggtggccgaacagctgcgccagcttaacaagctgtccaacaacattattcttgagccggtcgggcgcaacaccgccccggccatcgccctggcggcccttcaggccacccgtcacggcgatgacccgctgatgctggtcctcgccgccgaccatatcatcaataaccagccggtcttccacgacgccatccgcgtcgccgagcagtatgccgatgaaggccatctggtcaccttcggtatcgtgccgaacgccccggaaaccggctacggctacatccagcgcggtgtggccctcaccgacagcgcccatactccgtaccaggtggcccgtttcgtggagaagccggaccgcgagcgcgctgaggcctacctcgcctccggggagtactactggaacagcggcatgtttatgttccgcgccaaaaaatacctctccgagctggccaaattccgcccggatatcctcgaagcctgccaggccgcggtcaatgccgccgataacggcagcgacttcatcagcatcccgcatgacattttctgcgagtgcccggacgagtccgtggactacgcggtgatggagaaaaccgccgacgcggtggtggtcggtctcgatgccgactggagcgacgtcggctcctggtccgccctgtgggaggtcagcccgaaagatgagcagggtaacgtcctcagcggcgacgcgtgggtgcacaacagcgaaaactgctacatcaacagcgacgagaagctggtggcggccatcggcgtggagaatctggtgattgtcagcaccaaggacgccgtgctggtgatgaaccgcgagcgttcccaggacgtgaagaaggcggtcgagttcctcaagcagaaccagcgcagcgagtacaagcgccaccgcgagatttaccgtccctggggccgctgcgacgtggtggtccagaccccgcgcttcaacgtcaaccgcatcaccgtgaaaccgggcggcgccttctcgatgcagatgcaccaccaccgcgccgagcactgggtcattctcgccggcaccggccaggtgacggtcaacggcaagcagttcctgctgaccgagaaccagtccacttttattccgattggcgccgagcacagcctggaaaacccgggccgcattccgctggaagtgctggagatccagtcggggtcgtacctcggcgaggacgacattattcgtattaaagaccagtatggtcgttgctaa

SEQ ID NO: 227081 - DNA, 1110 bp, Klebsiella pneumoniae
atgacatgcccttttattaaagaaactatttcggatcagattatcatgaagattcttgtaacaggtggtgcaggctttatcggttctgctgtagttcgtcatatcattgaaaataccctggatgaagtccgcgtgatggactgcctgacctacgccggcaacctcgaatccctggcaccggtggccgggagcgagcgctactcgttttcccagactgatatcaccgatgctgctgccgtggcggcccagttcagcgaattccgcccggatatcgtgatgcacctggcggcagaaagccatgtggaccgttccattgatggcccggccgcgtttatccagactaacgttattggcaccttcactctgctggaggcggcccgtcactactggtccggacttggagaggagcagatgcaggccttccgcttccatcatatctccaccgatgaggtgtacggcgacctgcacggcaccgatgacctgttcaccgaagaaaccccgtacgcgccgagcagcccgtactccgcctccaaagcgggcagtgaccatctggttcgcgcctggaaccgcacctacggcctgccggtggttgtgaccaactgctccaacaactatggtccgtatcacttcccggagaaactgatcccgctgactatccttaacgccctggcgggtaaaccgctgccggtatatggcaacggggagcagatccgtgactggctgtatgtcgaggatcatgcccgtgcgctgtacaaagtggcgaccgaaggcaagagcggcgagacctacaacatcggcggtcataacgagcgtaaaaatatcgatgtggtgcgcaccatctgcgccattctcgacaaggtggtggcgcagaagccgggcaacatctctcagtttgccgatctgatcacttttgtcaccgaccgtccgggacatgacctgcgctacgctatcgatgccgcgaaaattcagcgcgatctgggctgggtgccgcaggagacgttcgagagcgggattgagaaaaccgtgcactggtacctgaacaatcagacctggtggcagcgcgtgctggacggctcctatgccggtgagcgtctgggtctgaataactaa

SEQ ID NO: 227082 - DNA, 555 bp, Klebsiella pneumoniae
atgaacattattaaaacagagattcctgatgtgctgatttttgaaccgcgcgtgtttggtgatgcgcggggtttcttctttgagagcttcagcagcaaggtgtttaatgaggcggtgggccgccaggtggaattcgtccaggacaaccactcccagtcccagaaaggcgtattgcgcgggctgcactatcagctggatccgcacgctcagggcaaactggtccgctgcgtggaaggtgaggtatttgacgtggcggtggatatccgtcgttcatcgccaacctttggcaaatgggtgggcgcggtgctcagcgcagagaataaacgtcagctgtggatcccggaagggttcgcccacgggtttctggcgctgagcgacacggtgcagtttgtctacaaggcgacgaactactacgcgccgcagtcagagcggagcatcatctggaacgatccggagatagggattgactggccggcgctgggcgactgcgcgctgtcgctgtcggagaaagatctgcaggcacatactctggccactgcagaagtttataaataa

SEQ ID NO: 227083 - DNA, 1008 bp, Klebsiella pneumoniae
atgagagaaacatgggttgactatgccaagggcattgggattatactggtcgtttttggtcacgccaatagagggttgtatagctcagggatctatatttcacctgaaatatatcattatttagataacgttatatattctttccatatgccactttttttctttctttctgggttgttttttgttagctcaataaaaaacaggtctaagaaggtgtttttatggagcaagtttaaaaatgtaatatatccatatgctgtatggtctttaatacagggtggggtagaggtctttttctcgaaatatacgaatgcaaagacaagtatatctgacgtcttgttgtttcctctttatccaagagcccagttttggttcctgtatgctctttttatgatttttattatatgcgcgatcatttatcataaaaagtattttttgaagcttttaccggttttctttctcgtatctttcgtagtgtatgtttgtagtggtgactttggtaatggatttcatttcaactatgtcagtcagaatactgtattctttttcttaggttgtatgttcagtaaatactaccaaatattaatgaaaattatgtcaaataagtcctttgcagtactgacttgtctttttgttttaatggagtatttgtattttatacaatatggaaataactacctacctttgaatttatatactgcgcttatcgctttcatatcaattgcttgggtttcaaatacgtcgatattattatctggctataatttcagatggttagaaaatataggtaagctgagtttgataatctacttggtacatatacttgctgctagtggtacaagaataatacttagtaaaatcttccatgttgaaagttggttgattcatgttttattaggaacattcattggtgttacggccccattgatcttttacaagttggttgtaaggtatcgcttgaattttatttttgaatatccttctcataaaaagataactattgtttaa

SEQ ID NO: 227084 - DNA, 507 bp, Klebsiella pneumoniae
atgacttcatcagtaaccgttccggccgtctacgtgggcacatatcaccagtacaacggcggcagtatttttggcaaatggtttgatttaaccgacttcgacgacgaagacgaattttatgacgcctgccgggcgttgcatgccgccgaggatgaccccgagtttatgtttcaggactgggaagggatcccgtctcagtttgcctctgaatcctctgttaagtgggcgtttatcgaggcattccggcaggcgcaggacgaaggacgcgccgccgcgtttgtggcctgggcggactataccggcgagtgcgactatgacgcctttgatgaggcgtattgtggcgaggctgaaagcgaggcggattttgcttatggctttgtggaggatcacggcctgttaaacgaggtgcctgaatccctgcgcgtctatttcgattatgaggcttatgcgcgggatctgttcagcagcggctatgtcttccatgaaggctatgtattcagcaactga

SEQ ID NO: 227085 - DNA, 315 bp, Klebsiella pneumoniae; identical to SEQ ID NO: 16841

SEQ ID NO: 227086 - DNA, 1089 bp, Klebsiella pneumoniae; identical to SEQ ID NO: 110851

SEQ ID NO: 227087 - DNA, 906 bp, Klebsiella pneumoniae; identical to SEQ ID NO: 110852

SEQ ID NO: 227088 - DNA, 2178 bp, Klebsiella pneumoniae; identical to SEQ ID NO: 159880

SEQ ID NO: 227089 - DNA, 234 bp, Klebsiella pneumoniae; identical to SEQ ID NO: 161827

SEQ ID NO: 227090 - DNA, 828 bp, Klebsiella pneumoniae
gtggtaatggaagctaccggtgtttatcacgaacggctggccactgaattacatgatgccggtttccgggtttctctggccaaccctcaccgtagtcgggagtttgcgcgtggcatgggaatcatgacaaaaacggataaggtggatgcgtatatgctggcctgttacgcattccttaagaagccacaccgctgggagccgccggcacccgaaatcagatatctcggtgcactcctgcgacggcgggatgttctgctgggtgatgccctgcgtgaggagaacaggctggaaaaatacctgtcgacagacacacctgcagatattatcagttcctgcaggcgtatggcgcagcttctgcgcgaggaggtaagtaatatcgagcggcagataaaagcacatatcaaagccagccctgcactgaggcgtgattatacactgctgacctcaattaaatcggttggtccccagctggggatgcatatgctggtcgtgcttcgcagccataactttgtatcggctgagcaggctgccgcctttctgggcgtggtgccgatcgagaaacgctcaggcacatcggtccggcgccggccgcggatgtcgaaaatcggcccccctcagttgagagcgaagctttacatgtccgccctgtgcggaaaaatctacaataagcgaatgcgtaatatttacgatgagatgtgcctgcggggtaaacctaaaatggtggccattggcgcgctgatgcggaaactggtgcactggtgttatggcgtcctgaagaccggaaccgtttttaatgacgaagacctgaaaccggtactgtcaacctga

SEQ ID NO: 227091 - DNA, 732 bp, Klebsiella pneumoniae
atgcattcatacgaggaccggattcgggccgtcgaactctattaccggtacggaaagaatgcctccgttgtcgtcatggagctgggatatccttccacaaaacagctgggccgttgggttcggatttatgaagagaagggcgatttacccagggaattaaaaccaagagaacgctattcacgtacacagaaaattgctgctgttgagcattatcttactcacggtggttgcctgtcgtacactcgccgagccatcggctaccccagtaacgaaattctaaagcgctggattgaagagttttacccaaatgcgcgtcccctggtcattcgctcaggcacaagcaaatgcttcagcccggaagagaggtctcaggccgtccgggagctctgtaaccgacgtggaaccgcgcgtaaagttgcacaaagcataggcgtcagcgtcccggtcctgtacaaatggaagaaagaccttatcagtgacgaggcttatcaatccatgcgcaaacgaaaggcagcccctcaggataaaaatcaggatactttactcgttgaaatccagcgtctcaggaagcaggttcatcagctgcagctcgaacgtgacatactgacaaaggcgaatgaactgataaaaaaagatctgggcatcagctttctgaaactgaaaaacagggagaaaaccctgatagttgatgcccttaagaaaaagggtgatgctgccaacttactgatttag

SEQ ID NO: 227092 - DNA, 351 bp, Klebsiella pneumoniae; identical to SEQ ID NO: 179543

SEQ ID NO: 227093 - DNA, 837 bp, Klebsiella pneumoniae
atggtcagccggaccatgggcgtgtcgcgtgcgcaactgtcactgcggattaaccgttctgccgactggcaggacaggcgctgtaaccggcgtaatgaagaagcagacgcagaaatactgtcggctatcctcaacattatcagcgatatgccgagttatggttatcgacgcgtgtggggcatcctgcgcaagcaacgtcgcacagagggacagccacctgtgaatgccaaacggctttacaggataatgagcgagcataacctgttgttgttgcatcacaaaccagagcgaccgaagcgtgaacataagggcaagatagcggtggcagaaagcgatatgcgctggtgttcagatggcttcgagttcggctgcgacaacggcgaaaaactgcgggtaacgttcgcgctggactgctgcgaccgtgaggccatagactgggcagcaagcacgggaggctatgacagttcgaccgtgcaggatgtgatgctgaggtcggtggaaaagcgcttcggcgacaggctaccggaaacaccagtgcagtggctgacggataacggttcagcgtataccgcgtatgaaacgcggaggttcgcgagagagctgaatctggagccctgcacaacagcggtgagcagcccgcagagtaatggcatggccgaacggttcgtgaaaaagatgaaagaagactatatcgcgttcatgccaaaaccggatgtgagaacagcactgcgaaaccttgcagtagcgttcacgcattacaatgaaaaccacccgcacagcgcgctgggatatcactccccgagggaatatcggcggcagcggacatcgttaacttaa

SEQ ID NO: 227094 - DNA, 396 bp, Klebsiella pneumoniae; identical to SEQ ID NO: 220731

SEQ ID NO: 227095 - DNA, 870 bp, Klebsiella pneumoniae; identical to SEQ ID NO: 146709

SEQ ID NO: 227096 - DNA, 213 bp, Klebsiella pneumoniae; identical to SEQ ID NO: 189772

SEQ ID NO: 227097 - DNA, 1434 bp, Klebsiella pneumoniae
atgataaaaattgcgcgcattgccgtgacgctgggcttgctttccacactgggagctcaggcttacgcggccgggttagtagtaaatgataacgatctgcgtaacgaccttgcctggctttccgatcgcggggtcatccatctgagcctgtcgacctggccgctaagccaggaagagattacccgggcgctaaaaaaggccaaaccttcttattcttctgagcaagtggttctggcacgtatcaaccagagactgtctgctttaaaagccgatttccgggttaccggctacacttcaaccgaccagccgggcaccccgcaagggtttggccagacgcagccggcagataactcattaggcttggcgttcaataacagcggtgagtggtgggatgtccacctccagggtaacgtcgaagggggagagcggatcagcaacggatcgcgctttaatgccaacggcgcctatggcgcggtgaaattctggaaccagtggctctcctttggccaggtaccgcagtggtggggacctgggtatgaaggtagcttgatccgcggggatgcgatgcgtccaatgaccggcttcctgatgcagcgagccgagcaggcggcgccagagacctggtggttacgctgggtggggccatggcagtatcagatctcggccagccagatgaatcaatataccgcggtaccccatgccaaaattatcggcggtcgttttactttctctcctttccagtctttagaattaggcgcatcgcgtattatgcagtggggtggggaaggccgaccgcaatcatttagcagtttctgggatggctttaccgggaaagacaatactgggacagccaacgaacccggaaatcagctggctggttttgattttaaatttaaactcgagccaacacttggctggccagtgagcttctacgggcaaatgatcggtgaggatgagtccggctacctaccatcagcgaatatgtttctaggtggagtggaaggccaccacggttggggtaaggatgcggtaaactggtacattgaagctcatgatacgcgcagcaatatgagtcgaaccaattacagctataaccatcatatctataaggatggctattaccaacaagggtatccgcttggtgatgcgatggggggggatggtcagctcatcgcagggaaagttgagcttattacagaggataaccaacgctggagtacgcgtctggtatatgccaaagttaacccggagaatcaattgatcaacaaagctttcccacatgctgataccttgaaaggtgtacagctgggctggagcggggatgtttatcagtcggtccgactgaacacttctttgtggtacaccaatgcaaaccacagcgacagcgatgacgttggggccagcgcagggatagagataccgtttagtttataa

SEQ ID NO: 227098 - DNA, 1137 bp, Klebsiella pneumoniae
atgaagaaaaaacttgttagattttcggcattagcgttggcaattgggtttttatcgggttgtacaattattccaggtcagggactaaatagtctacgtaagaacgtggttgaactcccggatagcgactacgatctagataagctagtcaatgtttaccctatgactccagggcttatcgatcagcttcgtccagagaccgttcttgctcgtcccaacccacagctggataatttacttcgtagttatgaataccgtattggggtgggtgacgtgctgatggttaccgtatgggaccatccggaactcacaacgcctgcaggtcaatatcgtagcgctagtgacaccggtaactgggtgaactccgacggcaccattttctacccatatatcggtaaggtgcaggtggcggggaaaacactgagccaggtacgccaagatatagcaagccgtttgaccacttatattgaaagtcctcaggtggatgtaagcgttgcggcgtttcgatcccagaaagtttatgttacaggtgaagttgcaaaatcaggacaacaaccgataacaaatattcctttaacagttatggatgcaatcaatgctgctggcggtcttgctcctgatgcggactggcgaaatgttgtattaactcataacggtaaagatactaaagtttctttgtatgcattaatgcaaaaaggtgatttgactgagaaccatttgctgttccctggagatattctatttgttccccgaaatgatgatctgaaagtgtttgtcatgggcgaagtgggtaaacaaagcaccatgaaaatggatcggagtggaatgactttagcggaagcattaggtaacgccgaaggcatgtctcaagcattcagcgacgccacaggggtatttgtcattcgccaactaaaaggtgataagcagggtaaaatagcaaatgtttatcaacttaatgcgcaagatgcttctgctatggttcttggcactgagtttcagttacaaccatatgatattgtgtatgtgacaactgcacctttggttcgttggaatcgcgtaatttcgcaacttgtaccaactatttctggtgtacacgatatgactgaaaccgcaaaattcattaaggattggccataa

SEQ ID NO: 227099 - DNA, 2175 bp, Klebsiella pneumoniae
atgtcatcgggaaataaacaaaccaatacaaaagaagcagatgaaatagatttaggccgtatcatcggtgagttaattgatcatcgtaagctaattatttcaataactgcattatttacgttattagccttagtctatgctattttttcaaccccaatttatcaagctgacgcgttggtccaagtagagcaaaaacaagcgaacgccatattaagtaatttgagtcaaatgttacctgatagtcagccacaatccgctccggagattgcgctgttacaatcacgaatgattttaggtaaaactgtcgatgacttgaatttacaagttcgtgtgcaagagaattattttcctctatttggacgaggttgggcaagaatctctggtaaaaaagagtcagaagttaaaatttccaatctctacataccgaaaaaggacggtgatactcctcaggttaacttgatagttcaggatgaaaaaaattatataattgaaacggatgacttcaagtttaaaggtgttgttggagaattagttgaggagaaaggcatttcgatcaaagttgacagtatatctgctcaacccggcacttcttttacagtatcctatgttagcaaactgaaagcaatttcggatatccaagaacaattaacagtttctgatcaaggaaaagacacggggatattaatattatctttaataggtgataatccaaaactaattgaggatattattgatagtattagtaataattatctagctcagaacatatctagacaagctgcgcaagatgaaaaaagtttagagtttctgagcgctcaattacctaaagttagaaatgaattggataatgcagaagataaattaaatctttacagacgccaaaatgattcagttgatctatccttagaagctaaatcagtattggatcaaattgtaaatgttgataatcaattaaatgaattgacatttagagagtcagaaatatcacaactttacacaaaagagcatcctacatataaggcattgatggaaaaaaggaaaacattacaggatgagaaaggaaaactaaataagcgtgtggctgctatgccagaaacgcaacaggaaatactccgtttaagtcgcgatgtcgagtctggccgagctgtatacatgcagttgttgaacagacagcaagaattaaacattgccaaatccagtgccattggaaatgtgagaattatcgacaatgccgttactcagccaaagccaataaaacctaaaaaagccattattgtgcttcttgggataataggtggtggggttgtgtcaattggactggtctttttacaaatcttccttagaagagggattgagtcaccagagcaactagaagaaatcgggattaatgtctatgctagtattcctgtagcagaagccttttctaaacaagcaatgcaggcagcaaaaactattagtgttaaaaagaaagctaatagtgaatattctgctggatttttagctgtagagaaccctgcagatcttgcaatagaagctataaggggattaagaacaagccttcattttgcaatgttagaatcacgcaacaaaatccttatgatatctggtgctagcccgaacgcaggtaagacttttgttagtactaatttagctgcagtaatcgcgcaaactgggaagaaagtactcttcgtcgatgcggatctacgcaaagggtatacgcataaattatttaatgtatcaaacgacaatgggttgtcaggaatactttcaggtacagtaaccgtcgataaggctgttaaacgattgaaagagcctggttttgattttatatcacgaggtatagtacctccaaatccagctgaattattgatgaactcgaagttcaatgaacttttagattgggctaatcacaattacgacttaatcattattgatacgccgcctattctagcagtaactgatgcagcaataattggcaattatgcggggacaacaatgctaattgcaagatttgaattaaatactgcgaaagagattgaagttagttataaacgttttgaacaaagcggcgtgaaagttaaaggatgtattttaaatggagtagttaaaaaagcaagtagttactatagttacgggtacaatcattacggttatagctatacagataaaaaataa

SEQ ID NO: 227100 - DNA, 1356 bp, Klebsiella pneumoniae
atgttggtgactatgacagacaaagaactttaccggcttggcattattcagcgagtatttgaccgggctttgcttcagcgcgacgcagcagacatacttaagctcagtgttcgtcaggtgcagcgtcttgtgcgcctgtaccggacagatggcgcaaccgcgtttgcatcttcccgccgtggacgtcctgcaaacaaccggatcgatgaagaaacacgctgtaaagccctggatttgatccggtgccactattcagattttggcccaacgctcgcaaccgaaaaactggctgaacgccatcatattcatctctctgttgaaaccgtccgtaactggatgacagccgacggtctctggcgtcctcattcccgccggcgaacccgggtttaccagccacgctatcgtcgcgactgtctcggcgaactggttcagatcgatggctctcaccatgactggttcgaaggcagagccccaaaatgctgtcttctggtcttcatggatgatgccactggtcgcataatgcatcttcgttttggtgaaaccgaatcagcctttgactacatgcttgctacccgtgaatatgttgagaaacatggtaagccgctggcattttacagcgacaaacacggtatttttcgagtaaatcatgccgccggaagcaaatctggaactcaatttggtcgagtcctgcacgatattggtgttgagcttatctgtgcgaacagccctcaggcaaaagatcgtgttgagcgtgccaacaaaacacttcaggacaggctcatcaaagaaatgcgcctcaataaaataagcagtatcgaagaagccaatgcttggctggaaacgtttatcgtaaacttcaaccagcgcttcgccaaaacgcccaaatatccaaaaaaccttcatcgccctgtggcagaaacgattgtggatctggatgatattttctcatggcaggaaacccgtaaactctcgaaatcattaacattccgttatgataagatgatatatctggttgaacccacagaagaaaacacccgaattgccggggagaatattaaggtctttgattaccctgatggcaccctcgccttcaaatacggccaccgcgccctctcctatcaggtattcgataaactggactgtatcgatcaggggcaaattgtcgataataagcgactcggtgcagtgctccgattggctcaggataaaatggatgaattggatcgtaacggcaaacgtgagcgaagcacaaagatgccgaagcggcgtgctcaggctcgtatacaggaacagttacgagcaattaatccagttctggttaatccaaaagaatttcgtgcgagcttgaaaagataa

SEQ ID NO: 227101 - DNA, 921 bp, Klebsiella pneumoniae; identical to SEQ ID NO: 144900

SEQ ID NO: 227102 - DNA, 1263 bp, Klebsiella pneumoniae
atgtcaaacagcaatgattttccgctcgtcgaagcgcccgcctccggacgtaaaggcgtattttcgatctccatggttttgttcagctttactttttttaccggcacgatgttcgcaggcggcaaacttggcgtctccttttctatcgtcaatcttttatggattgcggttatcggtaactttttgctggccctctacgccgcttcgctcggctggattgccgcccgtagcgggctgaataccgtactgatgggccgcttttgcttcggagaaatcggcagcaaactcgccgattttattctcggctttgccgaactgggctggtacgcctgggggaccgcaacggtcgccatctcactggtcaaaatcctcgccctgcccgccgccatgaccatcccgctgatgatcctgttcggcatcctgttctgcgtcactgcgctggtgggttacaaagggctggacgcgctgtctcgcgtgtcggtgccgctgatgtttattctgctggtggtgtcgatgtacctggccgccaatcacgccggtggctggcaggcgatgaccaaaattgaaccgggcgaaaccatgacctggtctgcggctatcaccatggtctttggcaccttcgccagcggcgcgacccaggcaacaaactggacccggttggccaattccagccgcaccgctatcgttgccagtatgagtagctttctcatcggtaacgggctgatgattgttgccggagcgtggtgcgctatcgtctatcagcaggccgatattgtggaagtgctgattttgcaggggttgtcgatcgccgcggtggtaatgctgtgccttaacctgctgactattcaggggccgacgatttacaacgtctcggccgccgcctgccatctgctgcgcagcgagcgccgccgtaccctaaccgtggtcgccgctggcgtcggcattgtgctggcgattggcggtatgtatgaaatgctaatcccattcctcgttctcctgggcagtatcattccgcccattggcggcgtgatccttgccgactactggttttatcgcggcggtcgttatcctctgctgcaaacggcccgtttgccgcgcttcaactggttgggactgggcgcctatgccgtgggcgcagtggtggcgtatctgtcgccgtggatcgccccattggtcggcattaccgtctccgcgctgctctacatcgccctgacgcgtctgagcaaacgtcagcccgccgctgattcggtcgcggagcagtag

SEQ ID NO: 227103 - DNA, 1236 bp, Klebsiella pneumoniae
atgagcctgacggtcagcgaaatcctcgccctggaggaactctcccccatgcgcctgcgtgccggtaaacaggggctgcaactggcggttcgctggtactacgtggcggaaaatgaaaatatcgccgaatggatcatgggcggggagctggtctttatcaccggcatcaaccatccccgcgatgaagacaacctgatccatttactgatggaaggcaaacagcgcgggatagccgggatggtgatcctcaccggcgatgcgtatattcaggcgatcccccctcgcctgatcgcactggccgacgagctgggcattccgctgatcgaacagccctatctgctaaagatggtgattgtcaccgaacgcatcggcactgcgctggtgcgcagtgaaaatgccctgcaatcgcagcgcgatattctgttgcaactgttaaccggcgattttcccgatctgcacatcctgcagcaacgagctatccaccaacaactggattttagccgccccctgcgggtagtggcattgcgtcttgaggggatacaaaacctgtttcgccagtttccacccgggcaggccgaggcctggttacagcaggcgcgacgtaccatccgtcagcgattgcagcagcagctcaatcaacaggagaacccctttccgctggtcgagcgcagcaatatgtttatcttcctgctgccggatgaggacggtgagttttatcagcagaaaaagtggttagcacagtggctgctcgcgctggcggaaggtgacgacaggctgtcgctactgtgtggcctttccgctcgggtgcagcaattacaggactatcagcgcgcgctgtcgcaggcgcgtcaggccctggatcttagcgatactctgcgcccggcccagcgcattaccgactatcaacaactgggatttatcaagctcctctctgccatcggcgaccctgcgctgctgagcgattttatgcacgacacccttggctgcctgatagaacgcgatcgcaaaagtccgtggctattgatggagacgctggaaacactgctccaggagaacgggaacgtggtcagagcagccgagcggcttggcattcaccgcaacacgttacatcaacgcatccaacgtattgaaaagctgaccagctatccgattagccatccgcaattccacctcaacgcctcggtcgcgttaacgatctggcgtatgtcacaaaaccatttacgggaatactcatga

SEQ ID NO: 227104 - DNA, 1239 bp, Klebsiella pneumoniae; identical to SEQ ID NO: 144898

SEQ ID NO: 227105 - DNA, 192 bp, Klebsiella pneumoniae; identical to SEQ ID NO: 217366

SEQ ID NO: 227106 - DNA, 228 bp, Klebsiella pneumoniae; identical to SEQ ID NO: 183974

SEQ ID NO: 227107 - DNA, 264 bp, Klebsiella pneumoniae; identical to SEQ ID NO: 183973

SEQ ID NO: 227108 - DNA, 378 bp, Klebsiella pneumoniae
atggacgcgctggccaccggtcgcaggatcaagtgcctgacctgcgtggacgacttcacgaaggagtgtctgacaattaccgccgtcttcgggatttcaggcgttcaggtcacgcgaattctggacagcattgcactgtttcgcggctatccggcgacgataagaactgaccaggggccggagtttacctgcagagcactcgaccagtgggcttatgagcatggggtggagctacggcttatccagccgggcaggccaacacagaacggatttattgaaagttttaacggacgattcagggatgagtgcctcaatgagcactggttcagcgatatcgttcacgccaggaaaacgattaatgactggcggcaggattag

SEQ ID NO: 227109 - DNA, 882 bp, Klebsiella pneumoniae
ttggctacgctgaaattatatcataacggtcttacggctgggattccgcccattaaaaataatcatacccgcgcaaagcgtggagaggttaagggctggtctaagactgcctctcgcaataacactaaattccttcgctctgtatacgttcctgacctcactggcgctgctgtggcgtttacgctcactatccgcgattgtcctccaacgtctgacgattggaaaaaacttcgcgaggctttcatcgttcgccttcgccgcgctggtctggttcgtcttcactggctcactgaatggcagaaacgaggcgttcctcatttgcatgggattgcgtacttccctgccgcctatgaggcgtcaactgtggtctggaattggattgctgttgcagaaaagtacggtgcaaatatccgttctcagcatgttgtacctgtcacggatatgcagggctggtttatgtacctggctaagcacgctggccgttctgagactcactaccagcgcaaccctgagtttgtccctgctggatgggctaaaacgggtcgtgtatggggctactgtggtgattggcccattgatgagcctatccagatctacgcctctcacgctgcgttctgtgctctcaggcgcatttgtcgtagctggcgtcttgcagatgcccgttcagctaattatggcaaagtgaaggacgctgaaaagaaacgccgtcgccgtattgtctccgcgcggacaatgttgcgctgtaacaagctggggcaatctgcctgccatggtgtctcggagtggatcccgctcgatgtgtctctgacggctgcgtactggtgcatgtctcagcaccccatgccggaggtagacgattcacgccatcagattgaaatctga

SEQ ID NO: 227110 - DNA, 261 bp, Klebsiella pneumoniae
gtggcccaagcatatgatataccaacattgtggattaaacataatgatataaatactgatggtataaaattctatgattattttgattctgtgggcattaaaccatatgatggttttgaggactatgaatctttaataaatgattatgaatcggcatttgtaaaacatgccaacattagtaagatcacgacagatcttaaaaaaatgcaagataacttattatcggttgctcctttcccagtgctcgataaatttaaatga

SEQ ID NO: 227111 - DNA, 231 bp, Klebsiella pneumoniae
gtggcgcggctgcagtgccgcagcggcgagccctgcccgcaaagcggctactggcagccggcgtggcggccccgtgaagggatgagcgaacatgccatccgttacttccgcgagggagacatcatgccggtggagaaggtgaccttcgttcgcccacgtccctggccgctgcgcgacagactggtcgtggaggagcaggagacggtgtggcgccgggtcggcgaggcataa

SEQ ID NO: 227112 - DNA, 351 bp, Klebsiella pneumoniae
atggcgcgcatccgcctgaacctgctgctgagcgccgcgtaccacggattcaaaactggcaaaggcgctgaccatctcatcgtaatgggcgtatccctcagtttgcgcaagcacttccagcgccagccacaggctgtatgccgctttttgctgcgtcggatcgacggtttcgggatagcgcgcccagcagtattcaatagtgtaatcgctgtgttcgcacagcggcgtgccgggggtatataccagtccaatagtggcggcgcctttctgacgcgcgatgcgggcggcttccaccgtttcagcggtgttgccctgctgcgaggcgaggatcactacgctgtttttacctaa

SEQ ID NO: 227113 - DNA, 2154 bp, Klebsiella pneumoniae
atgacatcagtgataaataataaaatggctccgcaagatggcaatgaaatagattttggtcgattagttggagaagtcattgaccatcgaaaattgatagtagcaataacaacaggctttacagtaattgcagtcctctattcattacttgcaactcccatctatcaagcaaatgctttaattcaagtagaacagaaacaagggaatgcaattttaagtagtttaagccaaatacttcctgatgggcaaccacaatctgcaccagaaatatcgctattacaatcaagaatgatattagggaagaccgttgatgagctagcgctacaagctcaaataactcctaaatatttcccattgattgggaaaggcttagctaggattatgggtaaaaaaacaggagagatcgctttatcccagataaatatagccaatgtaaattcgaatgaagctacaaaattcattctaacggttaaagacgagaaaaattatacaattgagggcgatggttttaaattaaatggcactgtcgggactccgttatatggtcagggtatatcattattagtaagtaaaatagatgccgaaaagggaagtcaatttgaaatagagtatattagcaagttgaaagcaattaccttgcttcaggattccttaagtgttgttgaccaaggcaaagatacgggaatgctaagtattacttttaccgatgaaaatccagccttagcagaacgaatcatcgatagcataagtcaaaattatttaacacaaaatatagctagacaagccgcacaagatgctaaaagtctcgagtttttgaatcaacaactaccaattgtacgtaatgatttagataacgctgaagataaattaaatgcatatcgtaagcaaagagattctgttgatttaacaatggaagcaaaaacagtactagatcagatagtaaatgttgataaccaattaaatgaattaacttttcgcgaggccgagatttctcaattatacactaaagaacatcctacctataaggctttgatggaaaaaagacaaactttacaagaagaaaaaaataagcttagcaaacgagtaagcagtatgccagctacccaacaggaagttttacgtctcagccgggatgttgagtctggtagagctgtttatcttcagttacttaatcgtcagcaagaattaaatatcgctaaatcgagcgcgattggaaatgttcggataattgatcaggctgtaactatacctaaaccagttaagcctaagaaaatcattattattgctgtcggatttatccttggcctcttatgctcaattggattaattattttacgcgtttttcttcgtagaggtatcgagtcgccagaagagttggaagagatgggaattaatgtttatgcaagtattcctgtctccgagtggttaatgaaaagaacaacaaaaaccaacaaaaatcaatcagatactttgttggctgtagaaaatccggctgatcttgctattgaggctattcgtggtttaagaactagtttgcattttgcgatgatggaagcaaagaataatgtcttaatgatatcaggtgcgagtccaaatgcaggtaagacttttttaagcacaaacttagcggcaattatttcatctggtgataaaaaggtattgttcatcgatgctgatatgcgtaaaggttatgttcataaaatgctcggtagtaaaaatgaaaaaggactatctgagttattatcaggcttagtaacgattgagaatgttgttgagaaagtaactctaggcggttttgattatataggcagagggcaagtaccaccaaaccctgcggagctactgatgcatcctagatttgaaaacttaatcgaatggtctgctaaacactatgacttagtaattgttgacacaccaccaatccttgcagtaactgatgcagcaattataggtaagtatgcgggtactaccttgttagttgctagattcgagacaaacactgcaaaagaaatatatgttagtaccaaacgttttgaacaaagtggagtcatggtgaaaggatgtattttaaatggtgtcgttagaaaagctagtagctattacggatatggatataatcattacggttattcctatgacgacataaaaaaatag

SEQ ID NO: 227114 - DNA, 1335 bp, Klebsiella pneumoniae
atggggcataatccggggcacttccggttcgatgtaaaatatgcccccaaaatgaacagaaacatccgcgacaaactctcggcacaaacctgtaaaacagccaaacccaaagagaaaagttacaaactctctgacggtggcggcttgtatcttgaagtatccccgacaggttctaaatactggcgtatgaagtatcgtcgtccttctgacagaaaagaagatcgcctcgcttttggagtataccccgatctgaatctggctggtgccagagcaaaacgagatgaagccaaaggtcttctcctccaaggtatcgatccgaaagctaagcagaaagaagaaaaagcaactgcgaatggaacctatacttttgaagctatcgcacgcagctgggcaaatcatcagatgtggagtacagatcatcagaaacgggtattaagcagtttagaacgatacatttttcctgccatcggcgcgttagatatccgcaaactggaaagcttcagcattacaccgctatttcagaaagtgcacgagatgggaaagcacgatactgcggatcgattgaaacagcgggtaaaagatgtggtgcgttacgctcgattgagtggtgccaaaactgagattatccctgatgacctcaatatccgtttaaagaagcgtgatacaaaacatcatgcagcattaaaaacaggtgacctagccctatttttccaaaagttagcagactttaacggaaacctgataacacgtctggctattgagttaaccatgttgacctttgttcgctcaagcgaacttcgctttgctcgctggcatgaatttaatctcgatgaagctcaatgggtaatccccaaaaaaagggaattaatcgagggcgtaaagttttccgatcgtggcactaaaaagggaaaagtcgaacacgttgttttcctcagtcgacaagcggtctctgtaatcgaacgtttaaagaaaatcaccggtaactatgatgtggtctttcccagcgaacgaaatcccaaaggcgtgatgagtgagaatactatcaataaatcacttcgtttgatgggatataacacgcaagaagaggctactgcgcatggctttcgtaccctcgcctgtagtgctctctatgaatctggtttatggcaacaagatgcgatagagcgacaaatgagccatagagaaaaaaatgatgtcaaggcgacttacagtcgcgatgcaacctataacgaagaacgggcaaccatgatgcaatggtgggctgattatcttgatgccaatcgcgaaacacatgtcacaccctatgaatttggaaaactaaatatccatggctaa

SEQ ID NO: 227115 - DNA, 762 bp, Klebsiella pneumoniae
atggctaaaacagcagcaccgcccagaccatatcaggattcgaaggatttgatctatttcgaaaaattgatcaatgagctgtcgactgtttacaaaacagacaaacgtgatgccagcgatatgcttttaagcaattatcggatgagtaaatctgacccgtcagacaagggaattttacgctgttataaatttacgtctaaagatggattcaaaactgacgaattttttgaagagcaatgtgtagaatttttaagccgtattgcagatggatatgaatatagtgaagaccctattccggggcatgaaggatactataacgttaggaaaggtagaaattttctatatccagatgatgaagatgtttggtatgggaactatgagttatttgtctttcgtcgctcagaagtagtgaacttcttccctgcacttgaaatggttttttctgatatctctggtgaaattgatgatgccggggacactgtggatgacacgccagtgagcacagagattgttgcagaaacttggcatggtaaagagactgcatggaaattgattgcggggttagccattgcactgagtaaaacagataaagactatatatggggaacctctccaaatgtgtcgaaaatttgtgcacaggcagcaacctttgcttccgcgtttggggaagatcatgtagatgtaatggaaattgataatttgagaaaattactcagttctgccttaaaacggcatactcccaaactaaaaccaaaatcgtga

SEQ ID NO: 227116 - DNA, 210 bp, Klebsiella pneumoniae
atgaaaaactctcttatccggttgcatgaggtactcaatcgtactggctacagcaaagcatggatctacgctctgatgagcaaaggtgagtttccccagtcggtaaaaataggtactcgtgctatcgctttcattgaacgcgaaatcgatgattgggttgaacaacgcatagccgaatctcgtaatcacgggcagtgccaccacagttaa

SEQ ID NO: 227117 - DNA, 249 bp, Klebsiella pneumoniae; identical to SEQ ID NO: 196674

SEQ ID NO: 227118 - DNA, 1083 bp, Klebsiella pneumoniae
atgaagcgtaccggggaagatgtgacgacatcgagaacgcctgcatcacgcggaaaatcacgagcaggaatgccgggcaagtcaacgaaggtcgacggctggactgaaaagacccttcggggatttaaagattttgttcgaagcattgaccaaagcaacttcattggcggacacgtattagcgattaccctaacgacaggaaaacgcccatctcctgagttgtttaagaaaatgatcgccgccgtaaccaatgagctaaacaaaatgacgggcggaaaatgggtctactgtattgaaaaaaccaagaaccagaaggctccgcacgttcacttaattgccgtgttccctgattcatgcggtgatattgatgcaaagaaagtaattgcagcctggtttaaatgggcgatgaaatcgaatctcgttccgtcgattgaaaatcaagatgcacgggacgcatggtccccagagggctggatgcgctacatggcgaagcgtgatagcaagttgatcatacacggcacaaaggagctttccgtaaccaaaggctgtttgccgggcgtgcgtatgtggggtcatggtgacgggtggtcgctatctcgtgaagatatcgatttaactgacgccgctcaccgcgtcataacgtccatggctgacactgctatcgacatccagttacgtgataaaggtttgcgggataaggttgtatcttcccggaaaaggcttgagagatacggtagcgcggctattgtcgccccacggtctttccgaccgtcggagatgggcgtttccattatcaaagagctggctgcaaatccgggtcttgtttttggggtaaacgggataggctttcgccctgaaagccaccgcgaatgcgaaattctacgcagaatgcttccattgcaaatcgccagggaaattactcaggaagagttcgagtctctgtatggcgaaatttccgaacattacgacgaggagatggaagacatgttggcagacatgcgggaggcagaaatggaggacaggcatcggtccggcgatattcatatctatgatgagcaagcgcatgatgccgagtggatgtga

SEQ ID NO: 227119 - DNA, 231 bp, Klebsiella pneumoniae
atgaaaagtaaaaccggtgattcttgggctgaattttttgctgaagtggaacgtgaaaccgataaagaaattgctgaagtgagtaggcaactggcattaagcgaagaggaagataaggcgcttcttgcttctctcgaagctgaaccgctgccggagttggatttggatttggatttggatttggatttggatttggagctggatcttctggatattgatttcgattggtga

SEQ ID NO: 227120 - DNA, 543 bp, Klebsiella pneumoniae
atggctaatattggttacatccgcgtgtcatccatccagcagaacacagaacgccagttggctggtcttgcacttgataaagtgtttgaagaaaaagcgagcggaaaaaacattgagcgcgaacagttcaaagccatgatggattatgtgcgtgagggcgacaccttgcatgttcacagcatcgatcgtctttgtcgtaaaacttctgatttgctggcaaccgttgaagaacttaccaaacgtggcgtaatcgtccagtttcacaaagagggtttcaaaactggcaaggaaagtgccttcggcaacttcatgctgactgttcttgccggggtagcccagatggaacgcgaatttatgcttgaacgccagcgagaaggctacgaagctgccaagcaagctggacgtatttctgggagaggaaaaagctccacaatcgatcgcagagctgttaaaaacgatctagaaactggaatgtcggtgcgaaaggcagcggagaagcatggtattagtacgcagacagtgatgaaaataaaagtcgaatga

SEQ ID NO: 227121 - DNA, 1542 bp, Klebsiella pneumoniae
atgacattaatcacgaaggctacagcagaagcagcaaggcttttctttttgaagcatagtagctattgcaaattctcacttccaatttattttgactttgaacctttattgtcttctatacaaactgctttaagaacaaaacaaaatggtataaatgacattgggtacaaaaaagcttgtgattatgaaaatgttaactatacattgcaaacaaataaggatggtcagtattcatggagaccctttgaactaatccacccggctatttatgtacaccttgtagagaaaattactgaagaagaaaactggaaattattagtcgataggttcgataaattcaaaagaaatgagagaatcgtttgtgctagcatcccaagagagtcggaaaatgataaaatttcagattctgctaagacagtgacgggatggtggattaatgttgagcaagaatcaataaatcaatcacttaagttcaaatatttattcactacagatatagcgaatttttatccatcaatctatactcattctatcccttgggcaattcatacaaaagatatcgctaaaggcatcggtagaagtgataaaaaattactaggaaatcaaatcgatcttgctttacgtcaaatgagctgggggcaaaccaatggaataccgcaaggctcagccctcatggactttatttctgaaatagtacttggttatgctgatgaaatattaggggataaacttgatactgaaaatatcactgactataaaataattagatttcgtgacgattatcgagtatttacaaatagtaaagaggactctgaagcaatagcaaggcatctaacggttattttacaagaacttggattacaactcaatgcttctaaaacctcactttctgaagatattattcttgactccatgaagcaagataagaaagatgccttgatgacattcggtagtaccattactgctactacaatccaaaaggcattgcttaaactaacaattttctccagaaaacataaaaactctgggcagcttgataaatatcttgcaaagttaaatatacgattagaacggatgtctgaattgaaagaggaagttcagccaatcgttagtatcatcacagacctgatgatcaataacccgaggacatttgcttcctgtgcattagttttaagtaacgtgcttaagtttttagaagacgatagtgagaagataaaaataattgaatcaataaaactaaaattcaatcatatcttgggcacagggattttagatatatggctacagagaatttcataccatataaaacaagatattgagtatgaagaagttctttgttctatagtatcaggactacacaataagccacatgagctggtctggaactccgaatggataacagatgaaaactttaaaactaatgtgatgaatacaaatttcattaataatgatgaacttagaaaatgtaaacctataatttcagatcgcgaggtcgtacttttcccctacggtgcagactttaatgatgaagaggatgagtaa

SEQ ID NO: 227122 - DNA, 900 bp, Klebsiella pneumoniae
atgccgacaattgacctctcgcagttgccgcagccgaccattatcgaggagctggattttgaggaaatcctgatcgaggtgaaagcggtgatggtagccgcttatccggtagaccagcaggccgctgttattgccgccctggcgctggagtctgaaccattaaatgtgctcgcccaggcgctggcatatcgtgagatgttgctgcgccagcgtattaacgaaggggcggccgcctgcatgctgagtcattcgaccggcgacgatctggataatatcgcggcgaatctcgataccgaacgcctgatcaagaccgaagcaaccgagacaactgatgccgaaatggaaagtgacgaggcactacgcctgcgggcgcaggctgcttttgagggaatgagtgtcgccgggccatctggagcctatgaatactttacccgcagcgccagcggaaaagttgccgatgccagggcttccagcccggaaccggctgaagtgattattgcggtgctgtccaccgagggcgacggtaccgcgtcgccagaactgctggccgctgttgccgaagcggtaaacgatgaagaggttcgcccgttgggtgatcgcgtgacggtgcgcagcgctgagattgtcgattacgagattgacgccacactgtacctgtatccggggccggagtcagagccgatcatcaatgcagctgatgcatcgttgcaaaagttcctgagacagaatgataaaaaaatcagcagagacgtggcgcgctccgcaatttcagcagcgctacatgtccagggcgtacagcgtgtcgtgctgaattcaccggcagacgatatcaggatcagcgatatccaggcggccaggaatactggctacaacctggagaacggcggaaccgatgaataa

SEQ ID NO: 227123 - DNA, 369 bp, Klebsiella pneumoniae
atgagcgagcgatatcgcggtatgaatgcgaacggtgccgggacgctgacggatgaagatcatgtgtggcagtccgtgggcgatattctgctgacgccggttaatacgcgcattatgcgccgcaattacggctcgctatgcccggatttgctcgacagcccacagaacgacgttacgcgcctgcaactgatgagcgccgccgttatcgcgctggcggcatgggaaccccggatcgcgctggacgctatcaatattcactattctgcttcgggcgcagtaacggcggagttatccggaatgctgactgaaagcatggaaaagagcaccagatcggtaacgttaaggagtgccaaaaatgccgacaattga

SEQ ID NO: 227124 - DNA, 585 bp, Klebsiella pneumoniae
atggatattgccgaattgatccgcctgctggagaacatcggccgcaccggtacggtgacggagatcgacgaggaaaactggcgcgtccgggtacaaagcggcggactggaaacgagctggctgcgctggaacgcgcagcgggccggggcatttaaggtctgggtgccgccgtccattggcgagcaggtctggctcttgtgtctcggcggtaacacggatactgccatcattggcggcagcctgtacagcaatgacaatccggcgccgggagcgacacgtaatgaaatggttgtcacggctcctgatggtgcgcgttttcgttatgacgccgaggcgggcgccttacaggtgacgggtattaaatcggcagtgatcgaggcgtcggtgatcgtcactctggatgcgccggaggtgaactgcaccaacctgttgcgcgcgaagaatcttgatatcaccgaaggcggagaaatgagcggcaactttaaccataaaggtggaaagttcatctccaacggcgtgcaggtggatgaccatgatcacggcaatgttgaacgcggtggtgactggacggaaggcacccgatga

SEQ ID NO: 227125 - DNA, 642 bp, Klebsiella pneumoniae
gtgagcaacgatgctgcgctgtttcaacagcttgatcaggtcttcgctgaaatcctttcagctatgacgccagcacgtcgcctgcgcacggcaagaggcattgccaccacgctgcgccgcactcagagccagcggatcggcaagcaggttgcgctggacggcacaccgtaccagaagcggcaccgtcgggtactgcgttcgcaggccgggatcgggtttatctggcagggggaagagcgccgtctgcgtaactggcgggcgacgcgtggtagtcgtggccgcatgttgaccggatttgatgaagggcgaggcgcagtgcggtcgttttaccgtgctgatatcgagcgttatctcgatatcagcttcaacgagacccgccgcgatacgacgaaagccgatcccatgttcggccgcctgcgcaccgcgcgctttctgaaagcccgtgcgacctctgaaggggcaagcgtgggatttactggcgtggcggcccgtattgcccgcgttcaccagtatggtttgcgtgaccgggtgaatgacagcggcgcgatggcgagctatccccgccgtgaactgctgggcctgagtaagacggatcgaatgatgattgcccggcagatgattgattcgctgggagtgcactga

SEQ ID NO: 227126 - DNA, 459 bp, Klebsiella pneumoniae
gtgaaaaaagccgaattgttacgcgaggcgctgatcgccgcaaacacctggtgtaaagccaaccctgaactgatcaccgtctgggtggagaaggggagcattgagacgcaggcgaccggcgaatcctcgtttatgtatcgctacaccatccaggtgctggccgtggactttccggggcaggtggatgatctcatgctgccgattatggcgtgggtatggcattaccagcctgatttgctgctcaacccggacaataaccgcaaagttgagtttgacgcggacattatcagcgatgacatggctgatgtgctgtttaaggtgccggtctgggaacgcgtcatggtggagaacgtcaacggaaaacccgttgctacgcacctggcggaagaccgcccgcgtattaatggcggtgagtgggaagtggtctttgatccgggctatgagggggagatgacgtga

SEQ ID NO: 227127 - DNA, 396 bp, Klebsiella pneumoniae
atgaaagggttgcttgccgttatcacggcgatcggtgtccttctggcggtggcctgcatccgcctaaccacggaaaccaacaagcgcgaagccgcagaaagagcgctggcagacgctacccaaaaactgaaccagaccggcgatgtgctggccgaagtgcgggcgctgcgccaggacgtcagcgagattgaagccagtgtgaaagcgctgggacaaaagcgtaacgaagccggggagaagcgtcgtgaaaatatcaaaagtgaactggccggtgatccctgcgctgctgctcttgtgcctgacgctgtcgctgacagcctgtaccagcgcgccgccgaagtcgccgccggtgatcattcaggagcctttgccagaaagcctgacggcaaaaactga

SEQ ID NO: 227128 - DNA, 552 bp, Klebsiella pneumoniae
atgaaaaagggcgttattgcctgctcggtcgccgcgattatctcgctggccgccgtgctctggccgcagtcactgcgtaccagcccggaggcgcaactgaagatggcgaaatatgaggattgtcgcaagaccccgtattactgcccggcaggcgtattaaccgtggggatcggctcgaccgggaaagtgcagaaccgggagcatgccgagcaggagatcgcagagcgctgggtgaatgatctgatgcgcgcggaacggtgtgttaaccgcgagtttaacggcgcagctgcaccgcagaaggttttcgaaggcatgaccgacggcacgtttaacgtcggctgtaccggattgggttggtacaccaacagcaagggccaaagggttcgcaccaccctctggcgtgatgcgcaggcgggaaactggaaaggcgtctgcgaaaggcttacggactttgttaactcaggcggcaggcgtttgcagggactggtaaaccgtcgggaagagttccgggaatggtgtttgtcagatccggcgctcaagggggcgaaatga

SEQ ID NO: 227129 - DNA, 282 bp, Klebsiella pneumoniae
atggagttaataaaccgcgcctggaattgggccgcatacctctggtcggtgttcctcggcagcgtcggcatgatgacgcaaaaggactggctgacggctattgcggcagtaacaggggtagtggtggcggtgttaggtgaaatgcatcgccgccggatggcccgtatccatgaaaccaataacgtgctgctgaacgatttgatcgacgccattcgcgacgacacggaaaaccggcaggacgtgaaagagctgatccgcactatcagggaggcgccacgatga

SEQ ID NO: 227130 - DNA, 201 bp, Klebsiella pneumoniae
atgaaagtgaaggccttacagggcgatacggtggatttgctttgccagcgttattacggcaccacccagggcgttaccgagattgtgcttgctgcgaacaagtcactggccgatcagatcttcatggaggccgggcaggtggtggaactgccggaggtgaacgcctcggcgacaaaggagacggtgcagctatggagttaa

SEQ ID NO: 227131 - DNA, 498 bp, Klebsiella pneumoniae
atgagccttgtagccccccgcacaataaccacctcagcagaagatgtgccggatgtggacgacggcggcgagaaagtcaccgccggtgtgttctggcccgagattgtgttgagcgatgcccgtaaagagatgcgcatcaccggcacggtgacaacttcgcggctgaagcatgttgttatcgaggcggtgggccataccgctgatcagctcgatacctggcggatcgaacagcagaacgccggatttgcatcactggataccgtgccagcaatggaaattaacgggcagagcgcgaaggtttaccgctggcgccgtgcggtttacagcatagcccgcgccttgctgatcgaaacgttccgtgatgtggatacgaccggcgacgccggggagaagaaagccgctgcgctggcaagccaggcaaacgatcactggcgtgatgcgcgctgggctatctccgatattcgcggcgaagttcgcaattcagcggaggcattctga

SEQ ID NO: 227132 - DNA, 861 bp, Klebsiella pneumoniae
atgctgacaccggcacaacgacattttcaacgcgtcatggctgaacgtcatggcaaggctgaggatttgtccgatacggcgcgcactgcgcatgagcagatcctgcaccgcatgcgcatggatatggccgcgcttaaaaaaattcagggcgagcaggcgaaagccgcgcttaagcgccagatgctacccaattacgaggggtggattgagggaacgctcgaaggtaatagcggccgccaggatgaagtgatcacgcgcctgatgatttgggcgatagatgttcgtgattacccactggcggcgcgaatcgggcgatacgtcatcgcgcataacctggcgatgccagaccgctttaaccgcacggcggcgacggctctggtcgatgaaatttgtgatccgatcctggttcaggttaaggccgacgacagcaccgacgtatcgccatatctggcggtgctcgatgaagtagccgagtttaccgccgccagcgatatgccagacatggtgcgcgccaaactccacaaagcacgcgcttttgccctgcgcaacgggacgcctgccgagcaggaaaccgcgttagagctgctgcgcactgcactgatcatggatcctggcgcaggcgtgaaaaagctgatcgacaaactcgccagtcaactgaagaaaaccgctgctgcgactatttccgggggtgagtctgctggcgacgatggcaaagaggggctgagtgatagccctgcagcaccaccggttccggcggtggcggccggaatgtctgcgcccaaagccgcccgtaaaagcacaaccaaaaaaccagcggtgcgcaaaaccacaacgaaaaaagcgcctgccgccaaaaaataa

SEQ ID NO: 227133 - DNA, 1050 bp, Klebsiella pneumoniae
atggaaaacaatacccgccagctgtttgaccagtacattttgcgccaggcgcagttaaacggcgtatcgcctgcggcagttgctgcgaaatttgcggttgatcccacccgtcagcaaaagctggagcaggcagcgcaggagagcgattctttcctgagcaaaattaacgtgtttggcgttaatcagcagattggtcagaaagtgttgattggtagcaaaggcccgatggctggcgtcaacaacagcaccactacccgccgtaatccaggcgcaaatcatgcgatggagtcgtttgattatatgtgccgtaaggtcaattacgactacgggatcagctacgaacagcttgatgcctgggcgcacatgccggacttccagccgttgattagtaaggcgatggcgcgtcagatgtcgctggatcgcatcatgattggctttaacggtaccaaatacagcgacccgtcagatcgtgccgctaacccactgttgcaggattgcggcattggctggctggagaaaatccgcactgaagccgccaaccgcgtgatttccggcgtcaccatcacctcacgcgatgaagataacaaagtcattgcgaaaggtacctacggcaacctcggcgccgcggtctatgacgcgaaaaacagccttatggatgaatggcacaagcgcaatccagataacgtggtgatcctggcgggcgacctgctgactaccggtaatttcccggccattaacgccatgagccagaccaacccgaacaccgaaatgctggccggtcagctgattgttgcgcaggaacgcgttggcaacatgccgaccttcatcgcgccttacttcccggtaaatggcgtattgatcacgccgtttaaaaacctgtcggtgtactaccagcgcggcggtctgcgccggacgattaaggaagagccggagtacaaccgcatcgcgacataccagtcctcaaacgatgactttgtgatcgaggactacggcaacgtcgcatttatcgacggcatcacctttgccgaggcgccggaaggcggcgcgtaa

SEQ ID NO: 227134 - DNA, 834 bp, Klebsiella pneumoniae
atggcaggcacagcaaaaccacgtaagaaattccgcgttgccgtctccggaaataccgttgatggccgcgaaattcaaccgcagcaccttcgcgatgcggcagcgaattacaacccggaggtgtacggcgcacgcgtcaacattgagcactatctctctatgttcccgaacagcgattttggcgcgatgggggatgtggtggcactcagcactgaagacattaccgacggcccgttagcagggcgaaccgccctttatgccgagatcgaaccatcagatcgcatggtgcagatgaccgacaaaggccagaaagtctactcaagcatcgagctgcatcctcagtttgccctcaacggaaaagcctatgtggtggggctggcgatgaccgataccccggcgagcctgggtaccgatcgcctgaagtttgccgcgcagcaacgtgcatcggtgatggccttcaacaaccagcagggcgaagcgccaatgtttaccgaagccctggaagcagaggtgatcgagctggccgcccagcgcagtgatgaaggggttaagtggtttaaccgggtgatgggcatcatcggcaaaggccagaaaaccgacgatcagcgcttcagccagatgcaccaggtcgttgaagccgtggcgcaatcgcagtcagagcagattgaccgctttaacaccgccgagcaggagcgccagcaggacaaagttgccattgagaaactcaccagtgagctggccgaactgcggcaaaagttgagcaccaccgatgccagctttagccagcgaccaccggcgggcggcggcgcgaacgcgcagctggctgattactga

SEQ ID NO: 227135 - DNA, 1722 bp, Klebsiella pneumoniae
atggcgattgaagaagcattcatcatgcagcgggcgcggcagctttactggcaggggtacccgccagctgagattgcacgcctgatgggtattaatcagaacacggtttactcatggaaaaagcgtgatgaatgggacgccacgccaccgatccagcgcgtgacgacgtccattgatgcacggttgatacagctcaccaccaaagacaaaaagactggcggcgacttcaaagagattgaccttctcacgcgtcaactgaagaagctggataacggcacggcggccacccagccaaagaagaagatccgcaagaaacaaaactatttctcagagtcgcagattgcagcgctgcgcgagaatattctcggctcactgcactggcatcaaagaggctggtacgacaaccaccactggcgcaaccgcatgatcctgaaaagccgtcaggttggcgcgacatggtactttgcgcgcgaagccctggtgcgcgccctttccgacgatgtgaagtacaagcatcaacgtaaccagatctttctgtcggcgagccgccgccaggcgtatcagttccgcagctttattcgctctgctgccgctgaggttgatgttgaactgaaaggcggcgacatgatccagctgtttaacggcgccgagctgcatttcctcggcacatccgcagcgacggcgcagtcgtacactggcaatctgtattttgatgagtttttttgggtcggccagtttgccaacctgaagaaagtggccggtgcgatggcgacgttaaaagggctgacgcgtacctatttctccaccccgtcagcagaaagccatgaggcttaccctttctggactggtgaggcattcaacaaagggcgcagccacggaaagcgggttgagtttgatacgtcctggaagacgctaaacagcgggctgatgtgcccggacaaaatctggcgccagattgtcacattgcaggacgctatcgatcacggctgggatctgaccgacattgacgaaatccgcgacgaaaacagcccggaggaatacgacaacctgtacgggtgccagttcatcaaaagcggtgaaagcgcctttgactataaccggttgctggcatgcggcgcagacggctacgacgactggcccgactggcgcccgtatgcctcccgcccgatggccgatcgcccggtctggattggctacgatcccaacggtgccagcggtaaaggcgacagcggcgccatttcagtcaatgccgtgccaatggtcgccggtggcaagttccgcaccgtcgagacgctacgtatacgcgggatggagttcgaagagcaagccaatctcattatcggcatgctgagtcgctataacgtgcaacacatcgggattgatggtaccggcatcggtgaagccgtttatcagctggttaaaaagcacttcccggcagcggtctgttaccagttctcaccggccagcaaacgcatgcttgtgctgaagatgcagcagctcgttcgcggtggccgctgggaatatgaccggggagagcttgatctcgttggcgcgttcaactctgttcgcaagattgtcacccccggcggcgttatcacttacgacactgaccgctcgcgcggcgtcagtcacggcgatctcgcctgggcgacgatgcttgccaccattaacgagccgctgggacaggaaggcggcagcagtatgacagttacggagtattaa

SEQ ID NO: 227136 - DNA, 1035 bp, Klebsiella pneumoniae
atgcgcggcaggcagtatgccagggagcaggccgatctcgccgtctcgctaaaagctgcacccgagctgaactcgttcacattcgatggcccctggccggttagtggcgcgtatgacctgctcgataacatgtactgcgccgacaacgggcgatactacgaaacgccggttgactggtacgggctggcgcgccagttcggctatgccagctggcaccagtcggcgctgtatttcaaacgcaacgtgctggccgggtgctttattccgcacaaactgctttcacgccaggtattctcatccttcgcgctggactggttcgtattcgggaacggctatctggagatgaggaaaaaccggcttggcggttccctcggcttccgtaactcgctggctaaatatacccgccgcggctccgacctggacacctactggtttattcaatccgggctacaggatcaccagtttacaactggctctgtctgccacgttcttagtccggatattcaccaggagatctacggtatgccggagtatttcgccgggttgctgtcggcgaacctggcacattctgccgataagttccgcaaactctattacgacaatggttcgcatgccgggtgtatcgtctacgtgaacagcgcaatggccgatcaggagagcctcgacaagctgaagaagacgctaacagatacccgacgcggcggggcattcaaaaacattcttcttcacgcccctaacggcggcaaagactccgtgcagatcctgccattcagccagatatcggcgaaggacgaattcgtaggggtgaagtcctccacccgcgatgacatgttagccgcgcatcgggtgccgcctcaattaatgggtgccattccggaaggcaacggatcatttggcgatatcgagaaggcggcacgcgtcttcgccgtcaacgagctgacgccatacatggaagccatgaagcatgttaacgactggctgggcgaagaggtgatccgctttaatccttacgcactgctcgaaagcacgaagtaa

SEQ ID NO: 227137 - DNA, 1203 bp, Klebsiella pneumoniae
atgaatttaaatgaattttcttcaatatgtaaaaaaaaattggattctcatttcaaaagtgtagaaatgaaagttaagcagggtggtgttcgattcaatggaggagatgtagtaaatcatgttttttatcctacgatgattttatgtattgaatcagataagcgaatattctctatggagctaatcggcgtatctcgtgagagaaaaccacttagaattaaaaaaagaaataacgtttcagtacgggagttaacctcactaagtagagatgatatagctgaagtttttgcatttaaaatgacagggagaaacacatttaatggccttattttttatgatcataacgcatatcaattccatgattcccaaaatcacccgttgcttgagcgctatgatgcaagaatagcattttcacgccatacaacccacttaattgattttcatgttgattttacaacctgcatgctatcggattgtatgattgcatatgttaataatggtttttttagatcaagatatatatatgagatgttcttttcgagtgtaagaactaatgaggatgaacttaggaaagaacttgattattatatgaatagggatgctggcattatttttggggttagatgtttccctagtgatgaagatatatcttgggttaaagcttctcatttaataaatcttgttcttaatgataaaattcatgagaccacaataggtgattatttgaatgatcatcctgaaataatatgcagagcgttagggtatgattccattgtatatgagccaagtttaaagtgggtggagaaaacaaaagataatactgatgtatatataaaccccgacgcgttactcaagcgccctgacggcaattatgatatttgtgattttaaaaaaggtttacttaaaagaaaaaaaatcactaaagatgagcgtcgaagacgtcgcttcattgacgatgttgatgaagggattgctcagcttgataattatgaagagtattttacatatgatggaaataagaagtatgctcttgataagtacaatgtttcaataagtgaaccgcgaaagatattaattatagggaatgttgagaatacggttttaatcgaggttgaacaagctctgagagggcggaaagataatttggttattgattatgattcattaatttcttattacgtgggttcgattggtctcaagtga

SEQ ID NO: 227138 - DNA, 699 bp, Klebsiella pneumoniae
atgagttatctgggaagcaaagcggccagcggtgtttatcaaaaaatcatcgccgaaatgccgccgcatgacacctacattgaaacgcacctgggcggcggcgcggtgatgctgcgaaagcccccggcgcggcataactgggggattgatatcgatccggaaaccgtcgaggcgtttaaccagggtaaccctgattttctggatagtctgacggataatttgtttattgaggttggcgacgcggtgacattcttagagcgctttgatttttcttcctccggtcgaatacttatctatgccgatccgccgtaccttcatgaaacgcgcagcagttccgcgcgctatcgccatgaatattccgttgaagaccatgaacgattgctgatgcgtttgcgcgatctccccgataacgtcagcgtgattttatcgggctatccatcagatttgtatgatcaccagttggccagctggcgtagcaaggaatttcaggctatgacgcgcggcggtgtgcgaacagagaaaatatggatgaactacccggagggccgagcctactctcacgcatttgcaggtaaggactacaatgatcgctaccgcattaaacgaaaggcgcaaaggtggaaagacaaattttcgaatcttcctgtcgctgagcgtttggcgataatgcaagcactttgcgaaactgatgtcgattga

SEQ ID NO: 227139 - DNA, 558 bp, Klebsiella pneumoniae
atgaagcatttcagcactaaagccatcgggtcagtcatcgccgaaatgaaccggcaggatgaaaagtggggcgcagaccgcgatctgcatccgttcgtctggcaaacgatccttagcgaagaggtcggcgagtttagccaggcaattttgcatgatgaatttggcggccataaattgggaacggcgcgcgaagagatggtgcaggttgctgccgtcgctctccagattatcgaacactacgatcgcctttgcgccccagaggcagaatctgaacaagtgcagccagcgcttgcgctgccggccatcccggtgggacgtgaaaaaatctgcggttgtgactggctggactggaatcagctgtcagcgcttggtcttattgtccgcattaacgctgaaattcttcacccgcttgggttggcaattttccgcgatccggcttccggcatctcagcgggcgtcatgattgcgccagatggaaaatgggagtatacgcccgatgttattgaagggcttcgggtaagactctccgatcactccgtcaatcacggtcacttttga

SEQ ID NO: 227140 - DNA, 153 bp, Klebsiella pneumoniae
atgaacgaagaaaccaattaccgccggttctggcgaaaccttgtgatctgctgtgctctttgctcgctgttgttctggatcccgatgggctatctcgcctttcgtgttggctctgtggtctgggatgtgctgtggtctcttataaaaatgtag

SEQ ID NO: 227141 - DNA, 579 bp, Klebsiella pneumoniae; identical to SEQ ID NO: 218148

SEQ ID NO: 227142 - DNA, 1383 bp, Klebsiella pneumoniae
atgattaaactaacaaacacgcttggtatgcaaaaggagctattagttccggttaaagagagcaaaatcggcatgtatgtatgcggcgtgacggtttatgacctttgccatcttgggcacgccagaacctttgtagcttttgatatgattgtccgctatctgcgttttcgcggatacgatgtgactttcgtgcgtaacattactgatatagatgataaaattattcagcgcgcccgtgatacgggagaggactggcgcagcctgacagagcggatggtgcatgaaatgcacattgattttgcaaagttaggcatcctgccgccaaacatcgaacctcgtcccacagagcacatcccacaaatcatcagtatgatcgaacgacttctgcatcgacaatttgcttacattgcagagaatggtgacgtcatgttctccactgcatcggcaaaaggctatggaaagctttcgggacaggatattaccatgcttcgtgccgggacccgcatcgaagtgaatgagtataaacgcgatccgctggattttgttctctggaagcgggcaaaacccggcgagcccgtctggccatcaccctggggtgaagggagacctggctggcatattgaatgttccgcaatgaactgccattaccttggtacccatttcgacattcatggcggtggttctgacctgatatttccccatcatgaaaatgagattgcccaatccacctccgccaatgatggcccttacgtaaattactggcttcacaccggcatggtgacggtgaataaagagaagatgtcgaaatcgctgaatagcttttttaccctgcgcgatattctgaatcggttcgatgcccagagtgtgcgcttcttcctgctaagcgcacattatcgtaagccgctgaattatagcgaggagaatattcacctcgcgcgcgcctcgctgacacggctctacaccgcatgccagttcgctgacgggtctcgatctgaacagcacgatgcatggcgggccagattctgtgaggcaatggatgatgatttcaatacaccccaggcgcttgccattttatttgaactgacaagagagattaacaggctttgcggaacgaatgatgatgaagccgcagcacttgccaccacgctgaaagacctggggaatgtgctgggtttgcttgaacaatcagcggatgcctttttgaaaaaccgcagtgatcttcatcctgcagaactgcaacttattgaaaagttaattcaccaacgcagtgaggcacgacgtatgggcaaatgggacaaggccgatcgtttaagaaatgaattagcggagcaaggcattgatcttgaagatgtcggcgaaaatacctcatggcgtatccgataa

SEQ ID NO: 227143 - DNA, 1200 bp, Klebsiella pneumoniae; identical to SEQ ID NO: 74987

SEQ ID NO: 227144 - DNA, 1284 bp, Klebsiella pneumoniae
atgagcagcccccttaaatcggtgtttaaaaaggagcacagcgatgagatcagtaaccacagcgtgaaccccgtcttttctgaggtagtcagcgcttttatgtcccgtcgccgctttctgcaaatgggaatggtggcgggcgctgccgtctcctttccttatctagtcaagccagaaaacgccttcgcggcgaaggcaaatccctcagcattatctaaagcggtgtcactgggcttcaccagcattcccgtttcgacagcagacactgtcaccgtgccggaaggctatatagcccgtccgttttatcgctggggcgatgctgtgggcataaagggtaatctgccggaatttaaattcgacgctagcaacaccaccgacgaacaggcggcgcaggccggtatgcaccatgacggcatggcctggtttagcctgccgcagggcaaagagaacccggcacacggtctgctggcgctcaaccatgagtacattgataacggcatgctgtttaaagacggtaccgccaactgggatcttgataaggcccgtaagggtcagaatgcgatgggtatatcagttatcgaggtgaaaaaagataacgtgggctggcaggtagtccgtccctccagctttgctcgtcgcattaccgttaatacaccaatgcaactgagcggtccggcgcgtcatcaggcgttgatgaaaaccgccgccgatccgcaaggcgaagtggtactgggcaccatgcaaaactgcgccaatggtaaaaccccgtgggggacgtacctgacctgtgaagagaactggtcggatatttttgttaaaaaagcgccgcgtaacgtgctggagaagcgctacggcattagcgatagcgatgaatcctaccgctggaacgaggttgacgaacgtttcagcgtcgataaaacgcccaacgagccgaaccgctttggctgggtggtggagattgacccctacgatccgacctccacaccgcgcaaacataccgcattaggtcgctttaagcatgaaggtgccgccgtgacgctggcgggggataatcgcgttgtggtctatatgggcgacgatcagaaatttgaatacatctataaattcatctccgagaacaaatatgaccctggcgatcgcaaggcaaatatgcagttgctggagtcaggcacgctctatgtcgccagattcaatgacgacggttccggcgactggctgccgctaatcttcggtgaaaatggccttgatcaagcaagggtttcgacaatcagggcgatctgctga

SEQ ID NO: 227145 - DNA, 1077 bp, Klebsiella pneumoniae
atgcttgaatgtcatttctatgcgctacctgctggccaaggggattgtttagtaattcaattccagggagacgatggtggatatcacaatattctcattgatggtgggaatagaaatcaattagaatttaacatacagaaaagaatgttaatttcgataattgataatggtaataaaggaatctttgatcttgtaattgtaacgcatagtgatgatgatcacatttcaggtattcttaaaattatgggagacagcgatttagagccacttgtaaaggagttatggtttaattctgaaaaaacaataaattctttttttaatactaaatgtaaaaatacacaaaaatataaccttgaagggaaaatcatcggtagtaataagtcatcaagggcgcaggataataatttatacactcttttagataaaggtaataagtggaataaaaggattatattgtcagggatgtcagaaaaaatagctaatttgactattaatatattatcacctactaaagataaattatctgctcttaataaatattggcctaaacaaaagttaggcccagttaaatccagtggagaatatagatatgattataagacttcattgcgagagttttatgagaaaattgataattttacagaggacgatagtgttgtcaatggagctagtatagcattaagtattgaatggaaagaaagacgattcctgcttctttccgatgctcatcctactattgtcgcagcaagtataaaagatttatacggcgtagagaaaacaacatttgatatagtcaaaatgtcccatcatgggagtgcgaaaaatatcaataacgatttgctctctttgatcagttgtcgtgactttgtagtttcagctgacgcaaataaacggcattttcatccgaataaagaagcgttaagtcgtgtgttatttagtaatggtatagaaaacactatatttcattttacttacgacaaggaagagttaagaaatatatttttatcggagccagatgttatggtgaggtttccatgcaacaaaaatgatggagttcatctctcttatgagtattga

SEQ ID NO: 227146 - DNA, 1587 bp, Klebsiella pneumoniae
atgagtattgatatagcagataagctgggagtaaaaataagctataacaataaaaatagtagtggttttatttgccatggtgatgattattcttatgtattaacagcaaagcattcaatatgtaaatccagtcctaacgattgtaaatttaaacataagaaatgtgatacctgtgtttttagtggtgtggcaaaaactaaagtaagcatttgcaaacctgatactgatacttttcccctatgcaaagtaaaggatgttttactttctccaaagaaagatgttgctattttggtcttaaataaaaaatcccatattgatttaaaaacaaaagaattaccaagtacaaaaatcattaatactgctaattataattcatcacataaatttgtttcttgcggttatcctgcaattaatgaacatcaatctgttcaacctttgcactataataattttagtttatttagaaatgaaaaaatttgccttcaaattattaatgatacattgactgcattagaagatcctaaaaatggtctttcaggaaactctggtgcagggatcattttaaattcatctagttgtgtgggattactagggctttataccgatactggtgattatggtatttgttatggtgatatagtcgatttttctataaatgaacttcttacatcttctggatacgtccctttagaaatggaagaggatctgtctaataattttaaagcactaattcagtctgattttatggagtgctttgttcgaatggaatgtgatttaaatttagacaaaaatcggattgttaacctttataggctctgtttagatggtaaaaaatataactatgttaagattggtgagcggttaattgattgtattccatcattttctctttcccgtaagcaattaatgaggtgtcgcgagagaaatgcatttggaaaagctacgctatccgcgatacgtaattttttgaaaatagaaaggaagactaagatatccgaaatgttattacaaggatttcttgaatcgtacctgcatgcgcctaaactttattcatttgatgaaataaataatgcaggttttcatggcgcccatgttaaattcaataagaataggaatgttgagttaatccattcggctgcatttatatctaattcgttatcggatggcgtttcatatgcgatagatgttattcttaaagcatttcctgagttaagatcgttggatggtttgcttggtaatacatttttagaaacaaactttactgaagatgagtgccaaatcctagccagtcttcttatcccgggagagtcttcgtactcgcagggttatgaagacagattggctatatttattggctataaccataagattgaagagtcactcatatatgagaatgcatctaggtttccgtctttgcttgaacaaaaaattattctcaatgttcagcaggcactagaatatcggaaagaggaaatcaataagttatcaatagttaatgcaactattgattgtttttttgttccgttcgatgatgtgaataaatttaatgacgagttcattgagagtctgaaaaatgaagaagattga

SEQ ID NO: 227147 - DNA, 2562 bp, Klebsiella pneumoniae
atgaagaagattgattctttcattatagaaaaaatatttaacagcgcatattttaaaaagctttataaaaaaataataaaagcatattctgcgttgactatagaatctgagaaccatttcaatatttccaatacagaattgagagacatatttagatttattgatttgttggcgaactcatctaatcaaaatgctaggatgtgtgcatatcactggattagtttgcttgaaccattttctgataaatgggggaaattctcacttatctcttctttagtctactctaaacttggtttatacgcattagattttaatgatcatgctcttccattttcgcagcgacttgagaatgaagcgaagaaatctgcccaaacatttagtaatacatatatattcaccgatgcacagtttgatatttatacggatatgctgaaatcaccttactatagtttttcaggtccaacgtcattggggaaatcatttattctaaaacgctatattgaagagattattcaaaattctacatcaaacattgtcatcttagtcccaacaagagcattgataagccagttttctttggagattaaaaatgaattacatgaacttattgaaaatttcaattataaaatagtgactcacggatcattagcaagtaaatcagatgccgtaatcattaagcatatttttatattgacgccggaacgattgcttaatttgttctcgcaaggcaaggttgttagtatagattatttgtttgtagatgaagcacataaattatcaaataatgatgactcggatgtgcggagccttacagagtataatgctatcgatagtgcattattcaacaatccaaatatgaaaattgttttttcttccccaaatattgaaaatcctgaggtttttttaaatctttttgggcgtgaaaaaatttatgcaagtaggattattgaatcaccagtgtcacaaaatctttatcttattgattttcataaaaaagaaattaaatatttttctaattcagaatgcatcgatattgaaagtggttctttatatacactcaataaaaaaagtgatttcatttataatatagggagccgacatggatcaaatatgatatattgctctagtcgggctaaagctgttgattctgcacttgaattttatcaaataaggctctcggaaaatattgttttatctcctttgttgattgattccataaaaaagataagtaattatattcatcctgagtattatttagctatgtttctaatgaagcgaattgcttatcatcatggacaattaccacaagcaataagaaatatagttgaagaattattccgaaaaggagatattgattttatcttttgtacacctactttggttgaaggcgttaatatgccaactcggaatatatttatcaattgtgatgataaaattagattaatcgctgatgcgaaaaagaatcctaataagacacttgccttttggaatctggctggccgggcaggtagatattgcaaggagttatctgggaatattttttgtttacaggatgaatcaaatcgatgggataatactgatatttttttagagaaaacagcgcatttaactacaactatagatgcccggatagaaagtaaatctgggttaagagaaatagagcgctatctttctgatacggagactgatatttataaaaggaaccaggcgatagagtatctcgctaatattatggctgtagacactattagatttaaaaataatctaaaagatagctttgtcctgcggaaattttatgatatacatcgagaagaattgttatctcttgctaaactaaaagcaaatgatattttagatattcctatagatattatcaattcctataaatctcttaattttaaaatacaacgaaaagtatttgattacgttagcgtatctcctgtaaacaaaaaactcccatcgctcgactatgcaaatattttgtcggtattggagttgttttatgatctttatagatggggtgaaacagaaactaaatatgtaaagtccaaaggacaattgacttattttgctactttaatgaatcagtggaccaatgattattcaataaacagaattataaacgaaaatattgatataaaaagaaccattgtcattgaacgtggacaacaaccaataccttttgacaagaatgatattaatcatgttaataaagtgatcgatgacattctttataacatagaaagaattttatcgttcttttttgaaaaatacttcaatcattactataaatgtctggctgcaattttaggggaggacaatgcgggacataattgggctacatttcttgagtatggttctaagaatccgttatgtattagcttacaaacattaggtatttcaaggcatgctgcaaatataattgcctcttccaaagaactcaggaaatatttaaagttcaatgaggattcatatgagataattagtgttaacaagcaagggttgttgaattctttacaaaaagattctgttgaatatggagaggttaaaatatttctttga

SEQ ID NO: 227148 - DNA, 309 bp, Klebsiella pneumoniae
gtgattgaccgggaagccgttcgccaggctgtgaaagaggcgctgaacattgccgggaagcgtgacgggcatctgatcgacaaaccggatctgaaatccgcgatggactactggcacaaccatctccgcgatgccgggctgacgggcgaatactctccccactctctgcgctatgcctgggcgcaggacgcgatccagcattaccaagagcagggtctgagccacaaagaggcgctggcggtaacctcaacggatctaggacatggagatggtagaggtaaatatattgagcaagtatataatcgttaa

SEQ ID NO: 227149 - DNA, 219 bp, Klebsiella pneumoniae
atgatctctaaatatgaatggcacgattatgcgggatacttacaaaccgccccaggcctcgcggccagcctgcaactggcgcgggtgatgggtctgcgtggtcaggaagcggtacagtgctgccagtcgctgaaaacctgggataaacagctggaaaaaggggctgaacgtctgtcggtgatctttggcaccaaaggcggacgaccgcgcatagcgtag

SEQ ID NO: 227150 - DNA, 267 bp, Klebsiella pneumoniae
atgcgtaaagcccgttttactgagaatcagatcatcgctgtgattaagtcggttgaagccggacgaaccgttaaagatgtctgccgggaggctggtatctctgaagccacctactacaactggaagtccagatacggcggcatggaggcttctgatattaaaaagataaaggaccttgaggacgagaaccggcgtctcaaacagatgtttgccgacctgagccttgagaaccgggcgctgaaagacgttatcgaaaaaaagctttaa

SEQ ID NO: 227151 - DNA, 396 bp, Klebsiella pneumoniae
ttgccggtgcgtaatccctcgccactggccacaccggaagcgctgaaccagagctggtctgtcgactttatgcatgatgccctggtctgtggacgtcgttttcgcacgttcaatgtcgttgatgactttaaccgtgaggcgttatcgattgaaatcgatctgaatctgccagctctgcgcgtggtccgtgtgcttgacaggatcgcggcaaatcgcggctatcctgtcatgctacgcatggataatggtccggaatttatctcgcttgcactggctgaatgggcagagcaacatgcagtaaaactggagtttatccagccgggtaagccgacacagaacgctttaaccgaacataccgtacagaaatactcgatttttatctgttcagaacgctga

SEQ ID NO: 227152 - DNA, 630 bp, Klebsiella pneumoniae
atgagagagatacgaaaaggatctgagccgcgcttactcacagaatatcgttccagagggggagaatatgatggacctaattttacacctgtaaaaaatgccatcagatcatctttgttgacagagcagggatatctctgcgcctattgtatgactcgcataacggccgaaacaatgaaagtggaacattgggcatgccaatcaaacaacccgcgactccagcttgattattcaaatctgttaggttgctgcatgggatctgaaggagaaaagttcactagtcaaacttgtgatacaaaaaaaggtgataaaccattaaaatataaccccagcaaacaacaagatcaaattaataacatcataaaatatgatgggcaaggaaagatattttcaacagatagagagttctcggcacaaattaatactgtactcaaccttaacaaggtcaggctagtacaaaacagatcatatatacttacatctgtacgccaaaaactttccagtaaaacgggtaagcgcagcagaacagaaatcaggcgttttttagatgattacctgactctcaatcaagatgggcaattgagagaatattgcgggcttgttgaatactacctcttatcaaaaatatga

SEQ ID NO: 227153 - DNA, 1593 bp, Klebsiella pneumoniae
atgaagcctatagaaaacaataaattcattaaacttgcctctaaatcaagaaaaggggatattgactcctcctacgagttatatacactttatcagaccggaaaatttttagagcaagatattcataaagcacaggaatatcttgatttggcacttaaacaatttagccaacaaaaaataagattcacacaactgtctcttctgaattttaggattatagatcgccttaatctagatatgacaaaaagtcaaattcaagtacttgttggaaacaatggtgcgggaaaaacaactgtactggatgcaatttcttatagtctgagttggcttatacaacgcattgtacacaaaggtggaagagccagagacatagaaaaatcggatatcagtataggtaataatgatggttatagttctattatagccaagattggtctcaaacataattataactcaacacttgagttatgtgaagttgaagaaggaagtattgtaaacaaaaagagttattattcatctttcactaggttaggtaatttgtataaactagcttgcgataaagatgaacgttttgaactgccacttctagcgtactatggagtgatgcgctctacagatatcaattcaaaagatgtatctgactttgatgaaacatcagccatagaaattagcaatcgttttgacggatataataatgctcttactgggaaagcagactttaaagctttctttcgttggtataaacgtcttgatgacgtagttaaacacgaagcaacttcagcatttcaaactgatcccaaaatactcgcatcactggaaacattagcattaacggattcaaagtctcgtaaactactagatgatcttatccttagtcttaaggaacgccaagagtacgaaggaagcagtagcgctaaaagaaaacaaacaatcataaataatgctgtttcgttatttatggaggattttagtaacctaaatgtagagttgaaaccaacactacatctttcaattgaaaaaaataataaaaaaataaatgttcttcaactatctcaaggtgaaaaatcacttttggccttagtccttgatatatgtagaagaatgatggtactcaacccattatcagaaaacccgctactcactgcaggtattattcttattgatgaggtggatttgcatctacacccggaatggcaacgtaatatcttgaaaaacttcagtagagttttcccaaattgtcaattcattgtttcgactcattcacctcaagtgataagcgaagtaaaacatcatcaaatttgtatactgggtaaagatagcaatggaaactttaatgcatccaaacctgaacaatcatatggactgacatcaaatgaagttcttaatgaaataatgaacactggctttcaaaaactagatcgttcacctgaagtacagaaagaaattgatgatgtattcatgcttatagaggaaggtaaaatagaagaagcgaaaaataaaattaataaaatagaattagacctcaatggagaaatacctgaattagttagtgctaaatttgacatcgaacttcagggatgggacaaagaatga

SEQ ID NO: 227154 - DNA, 966 bp, Klebsiella pneumoniae
atgcgccttaacctctatgcgaaactggtcaaaattcagccgagaaaccgtcggcaaattgacagcttcctttttaatgcacctaatcgatataaggtttacaccatacctaaacgaaatggtggagagaggattatcgcgcatccctcgcgtgaacttaagactttccaatatggtcttataactattttggaaactcatttccgtatccatgaaagtgcagttgcttataaaaaaggcttgggtattaaacaaaacgcaactctacactctaataatccttatattctaaagatggatttttctgattttttcaatagcattactcctgatttactcttcatggcatgtgaatggaatgattatgagttatcttctgcagagaagagagttcttacaaaaggtttattctggaataaagctaaaaatcagtctggtaggctttcattaagcgtcggagcgcccagttctccgcttatttcaaatgtaattatgtatctctttgatgattcattcaccaacttttgtcaacagcgagagatcacctattcacgttatgctgatgatcttacattttcgacccatcataaaaatgctttatttgatttacctaatgaagtcagacattttctcaataaagagtatcagaacagaataacattaaatgaacgaaaaacggtttttacttcgcgagctcataatcggcatataactggcgtaacgctgacaacacaagggtcgctttcaatagggcgagaacgtaaaagattcatttcctccttaattcataaatataaacttggcttacttgatcctgacacctcttattatctacaaggactactatcatttgcaatttatatcgagcctgatttcagagtcagaatgtctaaaaaatactcaaccaataccgttacagaaataataaaactgaggaaagaagatgaagcctatagaaaacaataa

SEQ ID NO: 227155 - DNA, 423 bp, Klebsiella pneumoniae
atgaagatgaaccgctcacacacggtgccgcttagcaaacaagcgctgcgcgtttctcaggttatggaacccgtcagccgccatcgcccgtgggttttccccagcatccgcaaccccctggagcatatgcaccagcagaccgcgaacgccgcgcttatccgtatggggttcggtggtaaactggtcgcccacagcatgcgcagcatcgccagaacggcgggggcaggtcatttcccccgtgaagtactggaatctgcgctggcacaccagaaagaagacgagatcgaagcagcctacaaccgcagcgattacctggaacaaaggcgaccgctcatgcagtggtggggaaactatgttgatgccgccagacggcagactttgctcggcgaagaagaaccgctgcggatcgtggaaggagaataa

SEQ ID NO: 227156 - DNA, 1350 bp, Klebsiella pneumoniae
gtgtcaaatttgagagatatggaagaacttataagtgatattgttgatgtagaacttaaggaatatatgcgtgaagctctaacatgttacatgactggagcgcatcgtgcttgtgtagtactatcattcattgctatttttgaggatttattaaagaaattagatgggatggcaacaacaaataaaacagcaagagccatatttactgagattagtaaaaaaagagatgagcagaaagtctatgaaaatgatctgctcaacaaattgaagtctgagaaaataataacagaaattgatgcggattttttgacggtattaaaaactctaaggaataaagctgcacatccttcaggacacaaacctactgcagaggaagcgagatatgtttattctgaaacaattaatcgatttctttctaaaccagtactttcaactacgcaggttgcagaccaaatcctttctaagttaacaaatgcctatctattccctacaactaatattactgatcattcagcggttgtaaatgatggggttaaaaacctacatagtgacggctactcatatcttttattaaaattgattgaatctttagatcatgctaatgaacagataaaaacaaatgctaagcggtatctactaggtttagcgtttaagcccttgaatcatgatgttttacaacagattaaaaaacatataataattgactgttgttccgataataacaaggcccagcttataatggagtgcatagctaccaactaccgattgctggatgggttagatgaaatagtatacttaagacttaataaaatatttgaggatagtattatgtcctcaaagacatctgatcaacatacatatttaaaacatcctattcaaatttctaagagtttactaaagttagatgaagagataattaataagttctttaagaaaagtgttgatgatgttttagaaaaatataaactaagtccgttgttaatgaacatagtaaaaaataaagattgggctaaaagaaaagtcatcaactcaatatttgaaaaagcaggttcttcaacctttgacgaagctaattcattcgcaagaagtgcaagtgcttatgatgaagatttgtcccatctgatgagcaatatggaatgcttagagttaattgtcagagtatgtgacgcagggatttggggagcatatggagctgaaggtatgatgaaaggcaaatttaataacataccaaaggttaaagagaaagctctaaaagctcttatggaggatgaaactgccagccaagagttaatagaaagaataaggccagagctcgggagtgctgtagatttcgaaaagaattacttttga

SEQ ID NO: 227157 - DNA, 627 bp, Klebsiella pneumoniae
atgaacatgtcaacacgcaaattaacgaatgaagatgacatcaacctgattcgagaatgcatatcacaaaacagaggtgggaaagaggtcattgctcgtatccttgaagcctatggttttaacacccgtatttccctctgcaaccagcttggcgtctcacaaagcaccatggctaacaggtatgcgcgcgacacctttccggctgactgggtgattgtctgccatcttgaaacgggagcatcattaatctggctgagtacaggcgttggaagtaagttcgttgatggtcgtgacgataaaaccataaaccttaaacgcatagacatcacaaatgggatcattaaaacccaaaacgacttaattgcagatgtttcaataatccctgaaggtctatcgtcaccgttcatattgaccgcagacaaaacaacctatctggctgatcgctatgacggggagttagttgatggtttttggtttattgaaattgatgggattgtgagtgtacgtgaactttatagattccctggggggcgcgtgcgaattgaaaatggcaaagcctctttcgaatgcccgctcgatgacatcaaaatcctaggcaaaattatcaatcgtactcagagtctctaa

SEQ ID NO: 227158 - DNA, 201 bp, Klebsiella pneumoniae
atgctgactaaagaaccgtcattcgcatcgcttttggttaaacaaagccagggtatgcactgcggccatggctggattatcgggaaagatggcaagcgctggcacccgtgccgctctcaggaagaactgctggcagggctgaccactaccaaaaaggtgaatccatggctattgaaggcacttctgcgactgttccactaa

SEQ ID NO: 227159 - DNA, 228 bp, Klebsiella pneumoniae
atgcagaaagaattacgaaaaatgtttgtagccgaaaccgacccacttatgacggtgatcgatattgccaaacgtgaggagcgcaaaggccgcgcgctcgtagtttcaatccgccttgaggcgctggcaacccacatcaccaacaaagggttaaacggtgttgaagcagatgaactactgcgctgcgaagcaacccgctacgaaaacgaatctcaggagctccactaa

SEQ ID NO: 227160 - DNA, 1104 bp, Klebsiella pneumoniae
gtgtcatacgatgctatagttttagatacacaaactattgataattatcactggcgttttaacgaaggtatgctttcacgaatgaagcagttttgtcatagtcaagtagactttcttatgcctgacatcgtgaaaaatgaagtgcaaagtcatctatcaaaaaaaattaaagaatcacaagacgcattggataaatctcttaaagatgcacttgcacattctttgctaacagcaaaagaaacagatcctgtttacgatagtgctattaaaatggtcagttctgatgcgttggcatcttcgattatagaagagtatttgacaaattgcggtgcggtcgaatttaagtgtagtgacttaacaacacttgatgaagtatttgaggcgtattttaatttaactccgcccttcgctgatagaaagaaaaggaaggaggagtttccagacgctacagttttatttgcaattgaggcttatgctaaaaaatttgataaaaaaattatagcaatttcaagagatcaaggatggattgaatactgtggtggctcagattatgtaacctgcattcaggatttaggcgaagcattaacgcattttcaacctaaaacagccccatatgaatttgctcagcgtttaatgttcgatatagaggcaggaaaatctaataccctattggactctattaaaagtgcagttattagccgttatgatgatgtgagttttatggcagaggctgattcctaccttagttttgagccggaggctaactattgtcatgtatcagacgttgaatttgaaccttttattaatgttatagatgttggtcaagattatgcgacttttgagattaaagccacagtaacatattatgccgagtgtgattttaatttttatcattacgattccatagataaagataatgtttacttggctgctacaacggagtctacagaagttaatgatactaccagtgtgatatttaccatatttaatgatttcgagagggattatgataatatggacgctgaggatgtagaattaacgtcgattatcaagtatgttgattttggcagtattgaaccacattatgagcctgaacaagattaa

SEQ ID NO: 227161 - DNA, 792 bp, Klebsiella pneumoniae
gtgaacactcttttatccgatcttaaaaatgctgttgaaaccatgtctacatcagcttttgataatttcctaattgagatgatcaaaaattttgaaattgaattactcaattcaagcaaccatcaagacatggaaaaaaaaatactttttgacaacctttatctctttagtttgcgcacaaaaaatttagactttagttttagtgaatgcaggcaaaagaaaattgaaataaaaacccaaatagaacaactaaaaaacgaaatacaatgcaagccccatattggaaaagatactttatacaatcatataagtgaaatcaaaaaaactttgacagacgggagcctacttccacacctcaataacgatgaaatctccaagatactagaaaaaattaaaaatgatgatattgatatcacttacattgaatacattaaaagagtcatatcaacattaaagtacaaagcgacttcaaagctggaccttattagcctcgaccgcacagtaaggatcgaagcaggccaggtaaaaaactatatagaaagtaaacaaaaaacaatatcatacatcgatacaattttaacccaccttctttcaaagaataaagtgatagaaaaaaagattgaagaaaaaaggcttgaaaacgacaaattcattgagctagaaaatatttggaaagaacatttaaatcatttctttaactttggatataagttagacacaacccttacaaacgtgttatcccgacgatataaaggacctcaacaatattttgactatgactcagacttttaa

SEQ ID NO: 227162 - DNA, 489 bp, Klebsiella pneumoniae
gtgtccgtgaataataaaacctgcctgcgcaccgtccacatcgccgacgttatacacacccggcaccggtggaaaatacagcgcggtctttccggctttaatcgcatcttcaagcgcgcgggacacatccacatccaccccggcggcgtatttcagggtctgaatatccgtttcatttttaataaaatcaaaaatggtcgcctgctcctgaaagcggctttccatactctgataaccagcggaaatagtctccccccaacctgccgggcttttcaggtcgccgcgcagcgagtcgatggcaccatctatattttccccctgcagctccaaaagcgctttcaggtattgcgtacggttggcaagctgtcgcgcctgcatattggcgacaccatcaacaccgcccagcacccggtcatttcgtcgcaggagataaatttctccttcccactgggaaatctcgttaattttcatcgctggcattcccggtaa

SEQ ID NO: 227163 - DNA, 180 bp, Klebsiella pneumoniae
atggaaagctttgatagctatgaaaactttaacgactggtatgaggcgttgattaaagtcggggaggctgcggataaatcgttttcctacaaactgatgttcctggaattttatgaccggggcatgacgccggaagaaacgctgactcaccttatcgaaaacggcattgtgacggaataa

SEQ ID NO: 227164 - DNA, 387 bp, Klebsiella pneumoniae
atgaaaaaacctttattaattcttttgctcttcgcctctcagaccgctttcgcagacaagatcccaacctccatcgaaaatttgattgctgcaaatgacaccagaacacacagtctggaaaacggggagttaatcgtaagatatggcagaccagaggttacgctcacaatggttggatcaatgcttaatgacatatgcggcgattactttatgaataagtggaaacctacgacgattaaaaagataacgctacttaacattacccgtgaccagggctacacaatcaatgcaggcggggaggagtgtcaaaaaactggctctatgacctatgagcaagataaagcatataaagccagcattatagaaagcgcaaagaaattcgagtga

SEQ ID NO: 227165 - DNA, 633 bp, Klebsiella pneumoniae
gtgattgccaccgcggaagacgtaagccgcgccgaagataacgctaaagactacaccgatgagcagttgcaggcgctggacaccgctacgcaggaggcaatacggcaggtgttgcgggatgcctgggagcaggataatccgccaggaacggtgcgcttctttgctcaaaatatcaatccgaacgaaaagtggccgtggtcgcaatggacttatactggcgagaataaaacaattcgcatcggtaaggccgatggctcaaatgtgggttccactggtggtagtgacaccgccaccattcagcaagccaatctcccagctgtacagattaatgtaaacggatcaaccggtgaacatccgggaagctatcaggagacgaccgacaatggcgcgcacaatcaccagggcggggatggtgcgccgggggcggtatggcaaaatgcgacccacggaacagacaaccagaaaagcacaacctttaacaacacaagcgacgcaccagcgcataagcatggtttaactatcccgcctcatagccacaccgttaccggcaaaaccgaccgcctcggtaacgggaatgcaattaacgtcgttgaagcacacaccttgctgatgtgctgggcgcgggtggcatag

SEQ ID NO: 227166 - DNA, 489 bp, Klebsiella pneumoniae
atgatgatggttttcgggatgtttgtttttacgctgcgcacggccccttatcagcagctccagcacacgcaggaatggcggcacgttaaaaacgaccgggttaatcagtccgccgcgtggcagtacattgggccgggtgaggacaatattaccctgtccggggtgctctacccggaaattaccggcggcaacctgtcgctttctgcgctggagacgatcggatattccggccgcccctggccgctgattgaaggtgatggcaggatttacgggatgtacgtcatgacgcggctggagcgaggcaaaacagagtttgatcagtttggtggcgcaaagaaaattgaatttacgttaagcctcagtcgggcggatgcagattttcgcgagaagctgcaatcatcctccatcagcgatgccctggcagaccttcagagcagcgccaccaaagccattaacgcaacaaccaactcacttaatcgcctgttttaa

SEQ ID NO: 227167 - DNA, 2736 bp, Klebsiella pneumoniae
atggatcttagtattcgcgttgcgttcagcgccattgataaactcacccgtccggtcaacgccgccagtaaagctattggcggcctttctgactccctcaagaaaacgcagtcgtcgatcaaagatctggagaaaagcgcagcggcattcgacaagctacgctcgcaggccaatgaaacggcgcagaaacttaaaacaacccagcgggcctttgacggcctcaaccagaaacagcgcgaaggcggccagcttaccgaagcacaggcggctcgtcttgaatcgctgcgcggcaagctctcgcggctgacggatacctataacaaacagaccacgcagctgcgcacggcggcgcaggcggtacgccagcacggcgttaacctctcatccggcagcggtgcaattcagagcgcaatccggcgcacagagcaatataaccagattctggagcgcgaacgtcgccagctggcggcaacgacgcgcgcacaggcaagctatgagcgtgccaaagaaaccgcaggaaaactccgtggcactggaatggggatgacacttggcgcagcggctacaggctatgccgcggggtcgttcctggcgcccgcggtgggttttgatgaggaaatgtcacgcgtacaggcgttaacccgcctcagcaaaaactcatcccagttggccgaccttcgcgcgcaggcaaaaaaactcggtgcagaaacggcctttactacccgcgacgccgcgagcggtcaggcattcctcgcgatggccggcttcacccctgaagctattcaggcggccttacccggcgtgcttaacatggcgctggccggtggcatggatcttggcgaaagtgccgatatcagctctaacatcctgtcgcaattccgtctcgatccaaaggaaatggatcgcgtcagcgatgtgctgaccgccgcctttacccgcaccaacaccgatttaaccaacatcggtgaagcaatgaaatacgcgggtaccggcatggccggtctgggcgttgatgttgaacgtaccaccgccatgatcggcgtaatggcgaacgtggggctacgtggcagtatcgcgggtacaggtttgcaaacgaccttttcccgactagcagcacccacgaccaaagcacaggccgccttgaaacagcttggcgttaccgtggctgacgctactggcaagatgcgcccggcagaagccatcctctcggatatccataaatccgtctcgaagtacggcgccacagatcagctgtccttcttcaaagatatcgcaggggaagaggcggccaaatcattccaggcactggtgagatctgcaggtagcggtgagctacaaaagctactggcggatttacgcggatcacagggtgaagcgcagaaagcggcaaaagtgatggccgacaacctcagcggcgatctaaaaaatctggatagtgcatgggaaggcttccgcatccaggtggaagaaaccaccgacgggccattacgtaaactgactcaggggttaagtgacttaatcacgtcagccagtgaatgggtaaaagaaaacccgcggctgacgcaaacgctgatccttgtcggtggagcgctgactgtctttgccggggcggtgggtattgccagcattggcgccagcttcatccttggcccactggcaaaactccgcctgatgctcagcatgatcggcatctcatcaatcaccgcgaccggcggtatttcgacgctcggcgtggcgttctcaggcttaagagccattctcgcttcactgctggggctccccggactgattctggcggcgttcattaccgcaggcctgctcatctggcgatactgggagccgattaaggcgtttttctccgggctgtttaccggcatcagccaggggctttccccgctgattcagtcgttttctttcctggtgccgctgtttgatgccatcagcgcaggggtggcgaaactctggggctggttcagtcagctatttacaccgattgatttttcccgcgatgcgctggataagtgcgccagcgccgggaaaacatttggcgaggtgctgggtaccgccctgaatctgctttttaccccgctccgcttgctgactgagggggtcagcttgttgcttgaaaagctggggttaatcccttccggaattgacgctgcacgggctaaggccaacaacctcgaacccaaaaagccgacatcgtgggagtgggatccgaagcaaaagaaaatggttcaaaaggcatgggactggtcacctaaaaaatcagattcacccgttaccgcaggcgcgccgccagctccctcgccgctatccggcaacaccggcacaatgcgccgcttgaatagcattgcggataacacgaaggcgaccgccgacaacacgaaggaagcacgcaaaaagattggccctggcgacattatttttaaaaacctgcctagtgcgttggctctgcgcggcgcctatcaggaggcgcggatctcaccgcaggcagtaccgcgcgttgcagctccggcggcaggcggcattctctccgttccttcagcgacacaaggcccgctgtcggcgcccgtttccgccccgacaagtggtgcgccagtgtttaacctggtctttaacgaagtcggccagcattcggcgcgggatctggaaagaatggtcaggaatgccgttcgcgatgcaatggccagcacaaccagaagtaaccgtggttcgttccgcgacagagattag

SEQ ID NO: 227168 - DNA, 300 bp, Klebsiella pneumoniae
atgtctgttactttaagcaagcctatcaaacgcggtgatcaggaaattaaaaccatcattatcaccgacactattaagcaggctggctcgctgcgcggcctaaaactggttgatgtgctcaacttcgactatgacgccgtttccacgctgctgacgcgcacaaccagcccgcaactgacagctgtcgagattgccacgatggcgaccggcgactttactgcgctgtgtgaagagatcacgccttttttgacgaaagcggagccgtccgcagtcaccgaagcggcgacggcgagcaagtaa

SEQ ID NO: 227169 - DNA, 1155 bp, Klebsiella pneumoniae
atggcactgaacacagacacaatcgacaatgcaaaaagcctgctgaatgcaggcactcaggacttcaaaaattaccaggatgagttgtcacgcatcccggcgtttaatgtcctgattggcggtaaggcgctgaccgtgctggatgaaaaaatgatttctctggagctgacggataatcgcggatttaacgccgacgagctgacgatcaccgttgatgacagccagggcgatattgagctgccgcctcgtggtgccgagttgtcgttatcgctcggctggcagggggagccgctaatctacaaggggatttacattgttgatgagatcgcgcattcagggccgccagaccgcatcgagataaccgcccgtagcgctgattttcgtgatgaattcaatatcaagcgcgaggtatcgtggcatgacgtgacggtagagcgaatcgtgtcggctatcgctcaccgttacaagctgacgccggtcatttctgagcaactgatgagcgccgaaatagatcatgccgaccagacacaggagagcgacatgtcattcctgacacgcatggcggatattctcggtgccatcgccacggtgaaaaacggttgcctgttgttcattctgccgggtggtggcgttagtgcgaacggcaaagcgttgccggagttcgccattacgcgcggtagtgcagaccgccattcgttccgtattgcagaccgcgacgcttacaccggcgtgcaggcttactggctggatctgaatttcggcaaaaagaaaaaagtcacggtgaagaagcgcaagaaaacctcggagaagaagccacgcagcagccgccgggagggcgattatatcgccggggaagatggtaatgtttttgtactccgcacaacatacagcagcgaaatggcggcacagcgcgcggccgccgcaaagtggcagcagcttcagcgcggtgcagctgaattttcgttaaccctggcttatgggcgcgcggatctttatccggagatgcacggaaccgtaacgggatttaaagatgcgatagacaagcaggactggataatcgcgaaggtggggcatacggtagacgatagcggattcaaaacccggctggagcttgaagcgaaaatacctgaatggattgcagaaagtgagagttag

SEQ ID NO: 227170 - DNA, 204 bp, Klebsiella pneumoniae
atgaaaaagccccgccgatgcggggctttgttattcgtcttttttgtggcggattactaccgcaccaagcttatcaatgagccgctcacaggcctcaacatccttaacattccggagtttgacgatagccgacttaggttcctcatcacgagtaccaagatgcaattctatttcaatgtcgtttcgattaagcaaacccattag

SEQ ID NO: 227171 - DNA, 1212 bp, Klebsiella pneumoniae
atggtgacttcaagagtgaaagggcaacctcagactaggcgtaagactgaggttccaggtcaggcactaggctacagccttcaattcacacgactcacgcacatgctgcttcaagcgccggagggaagtgtgtgcagtttagaacttcttgatgatgtagctcaagaggatggaattggcggtgttaaactcgttcaaagtaaaagtgccctaactgctaatcctgtggctgatcgagcaaaatcactttggaaaacgctctcaaattgggttgagcttattgcatcgccagggttcgatgtgaataaagccattttcgagctttatgtttctcgtcctgttgaagggccaatcgttaatagtttcgccaacgcgaacactcaggaaagcgctcgggtagctatcgcacaagctcgcactgcattatggggtaatgctcctcactttgattttagaaaagatatctcagcagaaattgcgccatatattgaaaaagtatttacagcagaccctgatcttgtagaacgactcatttgcaattttcaattgacgcatggtagtggcagtcctcaggcagaccttgaggcgctagttcgaagtcatccagtatccccatctaaggtctgcgatatttgcaatcacctttgcgggcaggtcaagcgtcatattgatatgctattagaggccggtcagccagcagttattgcacgtaatgactttcatatctggtatacatcgttcgtccaaaaaattgatcgacaaacggtcctttcgagtcgcgctcaggcaccatcagaggaggtctcacgagaatatcttcccgataacttcgttaaacaaatggacatcattggattgtcatacgaggagatgctcggagctgtcaacgattatttaatggcctcatttgaccgcaccgattgggctgtaagaggtgaagttgatgaaagttcttttgacgatcttgatgagattctgacacgctcatggaagaataaacagagagcctgtcggttgaatcatagagaaaagtctgaacaggaccaaggccaaattttatattcagactgcatgcagtttgctgtgccggttcagtcaatgtcacctcctggatacttcatcccaggctgtttccacatgctggccgatgatttcgtcgtaggatggcatcctggctatgagactaagctaaagggcaaaaaggtggcgtaa

SEQ ID NO: 227172 - DNA, 495 bp, Klebsiella pneumoniae
atgctggctagagaagtccaaaatgttcagaatcctgcattaggtgctacgctcgtctggcgtttttgttgtggctatgtcgaggctcatcgcgtagatgcttcaccgcctcttcctttactctttttcgtgctccctatcattttgcatcaagcaacctcagagtttgtgaagcgcacttataaaagctcgggtctacgggcatttgcggcaaagtttggggattcctcagtgtccaaacaggatttattgcttcaagtgcaagaacgatcaattcgttggcgtaagctcagcttgcaatccattgaacttgcagtcgctggacaactgatcattctccaagatacaggcgaggtaattccactttcgagaaccaaggcaaggggtttgcccgacgaggtgaagcaacttatagatttggcggaaaaacttggtgcatggtgcggtgaacttaccatgcatgaggttttgacaacgttgaaggtgaaactctaa

SEQ ID NO: 227173 - DNA, 1986 bp, Klebsiella pneumoniae
atgtatttccaaattcgaggtattgtgctttggccgcgaaacaaaaaattcaaacctcgcacgttgcggtttgagcttggtaaggtcaacgtcattagtggggcttcgcgcacgggtaaatcagctgttattcccatcatagattattgtctcggtgccagtacttgctcaattcctgtgaataccattcgtaaatactgtgaatggtttggcattgttgtggcgactgagcagggtgataagctcttggctcgaaaggaaccaggagctcagcgtagcaccaatgatatgttcctgctggaagcaaaggaaataaataagatcccccaccatcttagtaaaaatactaatgtagtagcagttaagagactacttgatgacctcgccaatttgcctaatcttgacttttctggtggagaagactcctcggggttcgatggtcgtcccgcgttccgagatttagctgcattcacattccagccgcagaatgtagttgccaacccggatgttctattttttaaggctaacacttacgagcaccgagagaagttaaggaagatcttcccctacatacttggcgcaatcacatcggctttgatggccaagcagttcgagttgaacagaactcgccagcttctacgccgcaaagagcgagaactcagaaatgctcaggatgtctccgcacggtggcttgccgatttaagatctaagtacagtgaagcacaggagcttggtttggtccccaggctggagggagagatatcacgaaaccaaatgattgaacatcttgaagaaataatcgtccgcacagacctaactttggctgttagcacattaacgatttcggatgcgctacgcgagttaaataatctagaaagtgaagagcgggttgtttcgcgtgaactcactacgcttcgtcatcgtctggaagaaatgaatcgaatgcgagcgggtgttcagcagtatcattcggcattatcaatgcagagagatcgtcttcaactgtcgagttggctggtttcacattcaagcgatgagatggactgccccatgtgcggcagccacactgactcagcgaaacgaaaattgcaggttctggctcagcgactggaagaggtagagagtgctgcgaatgtcgacaaggacaaggaagtgccagcagccttcgatcgggagttgcagcgcgtcacattagaagttgatagcaccaccgaacgattgagatccgtgcaggtccgtaaaagagcgttgacgagtagatcgaaggaagccagtgatcagcaattttctgtgaaacgtaccgagcgttttataggcaacatcgaatcgtcattggatctacatcgtaaactgggcaatgacagtgaacttgtcgaagaagtgcgagtgctcaagcaagctgtgcagacattagaagttgaactccacgagcaagatattgaaactcgtaaacataaagcactgcgagttatcaacaaaaatgctgggaaacttctaccctttcttgatgtagagaatccccatgatccaatctcattagaaatcaacgatttaactattaaagttcatggagttgagcgcgatgattatctttcagagataggaagtggctcgaattggctttcctatcacttggcagtgttgctctcacttcatcaattctttctaggacaattaggcagtcctgtaccgggatttcttgtgcttgatcaacctagccaagtttacttccccaagcccatatcacatcaggatatagttttagaagaagaacccaaggttcgtgatgaagacgtggaagctatacgcaaggctttcgaagttatgggcagtgttgtacttcaggggaatggaaatcttcaacttttagtcctggatcatgcatcgcgagcagtgtggggaaatattgatggggttgttggcctgcccgagtggcgtgatggagtcaagcttgttccaatggaatggctttcagagaataaatga

SEQ ID NO: 227174 - DNA, 1242 bp, Klebsiella pneumoniae
atgtttgaattgtgtatttttgatttagataatactttgatacatacagatgatttgaaagaaataagagagagccttgctaataatgatgatgagggtattctagacgatttatcagaagcccttgaggaagatgtggatagaattatatattctcaggatcttatacaagaaataatttctagacatcctaacatcttcttgattatttttactaggtcaccacgtagttataccgaagcagttttagcgtgggcataccctgatatagaatgggatatgctggtttgctacgaggatgtgaggccaacgaaaccatatgggaaaggaattcattatgctatgaaggaatttgatattgacgatcttgagcgagttataatgattggtgatacagatgtcgatataaaagctgcttacaatgccggttgttttgcagtgcttgataaaagtggttggccatacaagtatgcacaaggacattggaatgcactcggtttaattcctgatgcaattataaatagtcctgagataatattagatgttttagatgaaccatgtaaattcttaccaagtttagaatgtttattatcttctgattacatcatttctaaaagatttgacaaacttaatcattttataccaaaagctattggtggggatacaaccactttccctatatattcagctggcagaaatttttcaaattatgaatcgcttagttacaaaaggtatgaacattcacttactaattcgatagagaataacaaaagctctaccaactttcctgctcagtggatcagtagtctcagagaatttcttcgtactgaatgtgcaggcttttttggggcgacaacgacaataattacctgtgttcctcatcggcctgggcgtgttcctcgcttagagcacctacttaatcaattaatgatttcactagcaaatgatccaattgaacactgtaatgttatactggtaccagatctattagcctaccgtgatggagttcgttcgcagcatggtgagcatttgagccacggggaccgatttatgaacgtcagagatcatttgattactggtaatgtatctaaactggctttggctgataaagtgcttgtagttgacgatgtggtcacaacaggagcatcgttaatatatgcatctaaatatctaaaagatgcaggggctaggaatgttatactatttgctttagctaaaaatataagtgacatcttaagatga

SEQ ID NO: 227175 - DNA, 1605 bp, Klebsiella pneumoniae
atgaacaacaatttaacaggaatcattactccttctacaaagttattacttacactctcgatgattaaaggagtaggtccagttctacttaaaaaagcagcatctttattttcattttcaaatatttcatcaatagatgaactgtcaagaactgatccgaaattttcgtcgttggtcaacaatgcagaaaattttttgttggcaaaggaaaaggctgaaaagcaaattgaatatgctgacaaatattcttttcgaataatatctgtattggatgatgattatccaaagttattgtccgaaacaaaggatgatccttgcttattgtatgttaagggacgtttatttaattatcctgataattccgttgctatcatcggaactagagagccgactcatcatggaaagctgattacggaaaggataacgaaattctttgtagaaaagaattggagtattgtgagtggattagcattaggctgcgatggtattgcccatgaaactgcattaaattgtaatgggcatactattgctgtcttggctcatggtttacaaactatcgcaccttctcgccataaaaaattggcctatagaatagttgaagaaggaggtgcgttgataactgaatatccatttgggcaagacatacaaagacaacaatacgtaaagcgagatcgcattcaggcaggcatggctcgtggcgttgttatgattcagtctgacataaaggggggaagcttacatgcctcaagagcatctttggattataaccgatggcttgcagtaccatatccaacaaaagatgatgtcgaaagaaatgaacctaaaactcaagctaacttactaatagcaaatgggtccgattctgataaagtcaaaattcttaattttgataaaactaagttggaaaatattatcgttttgaatagaaattccagaaatgctccatctgtaattgatatgtttgattctcttattaaatcagatgaatctcaattcgacgcagataatggttacgttttacaggaaagtaaccggcccgataataagacaatgaccctcgatatggcatcagatatttccattcaaacaggaaaatcatctcagaataactctgtagaaacagacgagatgaagaattcaaaagttgggaaactgatggtatccagtgattttacttttgattttaattcggcattgaaaaaaataaccgttaaaaatgaaaagttaatgacaaagttagataagcaagatgaaaaattacagcttattaaactacggttgaaaatcattgtcaggaatttaaagttgttgcatggaaataaattccatgaggaaaaagaaactgttaacattctaaaaaacaaattgataatcgaaagtgttcttgtccatatgctaaaggttataattctttgtaattttgaaggttctgaagctgacgacatagttccgttaaaaggtaaaattgaaaatattttgttcaattttccagattcaattgttttctgtgatgttaattttcagtcagatgatagttgtaacctttttgataatcatagattagttaaagtgttagaagaatttaatcggttagtcttatcatga

SEQ ID NO: 227176 - DNA, 960 bp, Klebsiella pneumoniae
atgactcctgaaattcttaagcgtgaagtttctgatatcttcgataattttactggcatcagaattattttcgttgtgaagattgaggatagttattctttaaaattatcaaaaattgaagcaggggctctgccgaaaattgttgaaggatttaaaagaaaaattgaagaggatatgatagaaaatgatgatttgaccatacctcttttatcaaattttgatgatagaaagaatgctctatttaaatttgattatgaggaacaacctaaagaatttggatttattaaaagtgctacagccatcccccctaactcgcaggatttttatgatttgaggaataaatttaccgatgttaaagggataataattcaattacgtggaaataataagtgtctatctttgtataaaaacaaaaccaaccttaccgtgtttgaacaaagccgtaaattattcaacttgatacctgattcggatggttacttgaaagagttaccaaatcaagtatttagattggattacaactacgaccttgctctcctggaaaatgattttttaataaaaaaccagaaaactctcgaagttacaatgcaattccaccaagtaattgaagctcaggcgactgtcgctctggaatctttaaggtcgtcatcattaattgatgacctttctcaccttgaaaaaagcgcaaaagaaatctctttctcaagaaaacttgccaaaatctcaaaacattcccctgttttaggaaaaattgatgtcccagtaatcatccattatgttagtcatcatacttacttatctacagtattaattgttagtgaggatggtagaaagctaattatcaagactaaagaatctcaaaaacatttcataaaattattaagtgatgactatcttgagtctcctctaacgaaaattctctacgactcactagctaaagatgaattaaaaacaaattaa

SEQ ID NO: 227177 - DNA, 591 bp, Klebsiella pneumoniae
atgaaaagcaaaggcacatttaataagatagggttgtacatactatctttaatgctgttgtttgtttttattatcatcttaagtgcaaaaattccgatgtgttatggtgactcatgtgaatttataggtttttataaattagccatcgacaatgtaataccaataatatgtttcttctttatttttttagcatgctatttttataagaggtttcgctcattaattaaaatcaacaatgctgacactgttacaataacatcctgccaaagtgagagttatgaaagtttaacttttttagctacgtatatagttccttttatgggtttcagtttcgatgacattcagaaaaatattgcttatcttttgttagtaataatcattggtttaatcttcatcaaaacggataaatattatgcaaaccctacgctagccctttttggatacaaattatatagagttaatgtttcttatacaggaagcgttgaagttaaaaatgttattgcaatatccactgatattttggctgttaacgacaaagtcttttacagttttttagatgattatgttttcatagcaaggaaaaaacaatga

SEQ ID NO: 227178 - DNA, 1224 bp, Klebsiella pneumoniae; identical to SEQ ID NO: 74993

SEQ ID NO: 227179 - DNA, 1650 bp, Klebsiella pneumoniae
atgcaatcattcgttttaatgggattagaaagtgcaggaaaatctaccctgtttaatatcctgacggaaagtgctgccagtgatgagcgtaatttcaggggatcgaccgttgtatgtcgggaaggtctcattaatgatgcagggatctgcctggttgatacgccaggcatacgttttcagagcgacagtgaaaccacaaaactcgcccttgatgcgctaaatcagcatgatggcattctggtggttctgcgggccacgcacgctcagcaggagtggcaaacgctctgtcacctcataccgccacaggcaaaacacgttgttatactcctgacctttgctgataagatcagaaagggccttctggaagtgactgaatacctgagtgaaacatcaggtgcgccggtactggcagtcaatgcccgggaagctggcagcaatgttcgccagggaatagtgcagttgctgttgcaggataaacctgcaccctccgctgtctctttaccccgtcaaaagataccggtaattaatctgctggctgaatttcctcaacaaacgatatttgaacatcgttggtgtggaaaagttgctgcaatagtatgccttttcctgctgtttgccgttccggtatggggggcatggctgctgtcagattttattcagcctgtcattgacagtgcggttattcagccgcttaagaatataacgacgagctggcccgacgttctgaagacactatttgtcggcaattacggtctttttagtctgggactttattcgtttgtatgggcatttcctgtggtggtactgatagggttgtctctttcgctgactgacgacagtggacttaaggaaagaattacagcgacgctggatccctggttgagaaaactcggcctcagcggtcaggaccttattcctgtattaagcggtttcggctgtaatgtcgtggcggtttttcagagccgttcgtgttcgcgatgcacccggcatgcttgtataagtatgattagctttgggtccgcttgcagctatcagacgggggcgacgctttctctttttaatgccgcccatcaaccatggctctttatcccctatctcagtctgctgtttttcacaggcgcaatacatacgcgcctctggaacgggtcgttgaagcctggccaaaaccagcgtctgacagagctcacctggctacaatggccacgctggcgaaatgtgacatggatgctgaaaaatatcctccgtcagttcattacgcaagccatgccgttattcctgattatctgcattgttgcggggatgcttgattacgcagggatcactcgctggctgagtgaaacgacggcacctttacttcatctttttaaactgccagcagaactgatgcccgggatcattttttcactgctaaggaaagatggtttgatggtgctcaatcaggatggcggcagcttaatacagtctctcagcacatctcagttactgctacttgtctggctcgcctctacgttgatggcctgccttgtcacggtatttaccatcgcccgggaaataaactggcggtttgcagcagcagtggcgggaaaacaggtattaagttctctggtggtggctctggtgatatcccagttatttattcatgaggcataa

SEQ ID NO: 227180 - DNA, 123 bp, Klebsiella pneumoniae; identical to SEQ ID NO: 139242

SEQ ID NO: 227181 - DNA, 711 bp, Klebsiella pneumoniae
gtgatctttgccgtctggttaatgtgcctgctggagaaaccagtacgtcgatttgttcctgatattgtcgatgttgtcgtcacgccaacgctggtgctgttggtcatggcggcagccctcctttttattattatgcccgcggccggtattgtgtctaacgggatactcagcggtctgaacggcctactggagcatggcggtattgtcgctggctttgtgctttcggcgctgttccccttcctgatatcgctaggtttgcatcatggtttgttcccgatccacctcgagatgattaacgccactggccatgcccctctgtttgctattcaaatcatgtctaatgccgggatggtcggcgcggcgacagcggttctcttgctgacgcgcgatccggtgatgaagaagattgccaggggggcgatcccaacctccattctggcggtgggtgaaccgacaatatttggcgtcaatatccccgcaggatttgcgtttattaccggctctattggcgccggtttcggtggggtaatggtggtactgcttggcgtatccacaaacggggtcggcgcggcggggctgtcagcacttccgctgattgctgatgggaaatatcttcagtacatcctggcatggctggttggctgtgcagcggcttttgctttgacttacatcgtcggcaaagttcgcggttacgataaagaaacggtgtga

SEQ ID NO: 227182 - DNA, 1512 bp, Klebsiella pneumoniae
atggtttaccggaacgcctcacctctggccagaatcattcgctcctcgatttttgaatatcttactgaagctgatcagcaagcgttgctcacaactcctggtgttaatgttattgctgactatgcgttaaaagacgctgtagctgatggagtgatggtactggatattccgtggaatgtcggtgcgttaaatttcgggcttgaccccgcaacgcttccattaggttttcaatttatagggtggggttgccgacgcccatatacaattgatgacgataacagttttctgaattgcggagtcgtcatccgcgtagcagctggtgcaagttttccattttattcaacaggcaggcatgtattccgggatattgtttttgatggccgagataaaacaacgtaccttttttattcgccaggtactgcaacccagttcaacggcacccgacttgaggggtgcggattttatcggtttgcgatcggggttggctgggcttcaggaggagcagcccggtacatcggaacagtgaaagcatatttctgttcaatatccggaaatggggatggagtaaggaatttgatagactccatgatgtttggttgcacaataaatgctaatgatcgaggagtggctcttaccggtggggcaaacaataattgtttcatcgggtgtcgaaatgaatggaacaccggggataactggtattcgttccagtcggtcgagaaccagattttcggtgagctttgcgacagggccggaaggggaggtgtggttgccgctgggcaatcttcatggattctaaacggcgttaacgtccggcgcagtggggctaatcagcccgtgggaaatgactattccgcaaactttattattattgatgacggtaaaattgaactctcaggggtaagaactggtgtcggtgcgaatgacagcggtgacggagggacaatctcgccatcctacaacgtatcggctcttggctctggcgggggtactttgctggtttccggaagtgatatgactggttttgttacttcagcaattaaccagaaggctgccacgttaaataagtcgataaccggctgccttggtattgacgacgatgtaaatatcggtatgacccaggttgttaaaggaaggcgaattattggttcacagtcatcaggtacgttagcaggttctgtgggcgcaacgttatctctgaccaagaccaacatattccagaattctttcgatacatatattacccgttcaatcctaattgaatgtcgaattggtagccagtcacttggtgatgatattaaaattccagtcagattcagaagggagaatctttattatctggatatcctgacctcgggaattgttgccagctctgcacgcattgggctttcagggactggcgtaacggtatcattgtccattaacagctcaaccggtctggttactgttcaattgacaaatgttgatggtctggaaagaaccgttaatgtatcaatgttgccctcaatgtag

SEQ ID NO: 227183 - DNA, 684 bp, Klebsiella pneumoniae
atgttaactgaactaaatataaaaaatttcaaatcaataaaaatgagccaaccaattgatttgaatagattttctatactttgtggttcgaatagtagcggtaaaagttctcttatacaggttattttgttgatttgtcagagcttttcaaacagatatcaaaatgattcaattattctcaatggtcatcttgtgcgccttggtgcattcttggatataaaaaatcatttttcagatgatgacgtaattaatatttcttttacgctccctattaaaaccactacttataaaggtcaggattctaagatctttaagtgtgatctttgcatagggctcgatagcgggaaaacaggagcggatgaatatcaccctttaatcttatcgaataaggtttcaattcatgtgtcagatggtgaaggggggtatattgaaacggataatattcaagttgagtataataataatgcttacgcaaaagattggccatactctgttatttcgtttaaatcatctgaaatgaatagaattgaggttgaatatccagattttgaagtgttaggaacatatcgcggagaacttctcccacattatattgcattaaaatttaattatgttaaaaaaattagttcgaatatactggattttgtaacaaatactttaagcagcaataatattaaaagttag

SEQ ID NO: 227184 - DNA, 1128 bp, Klebsiella pneumoniae
atgcatgaaattagtttgaatctcgaagagaatgaatttatatctaaattaaaagaagatatagtgagagcaaactttaatctgagtgctgatgtatttcctgatgctttttttaatagagataagatttctatagttgactggcgtgaatttataagcgaacttgatgataaagcgagaaagtcattaattgatttaattactaggaatcgacttgtcttacaagatatttggtgtgatgcgatgcctaataaaactgacgttgctgtctataatgcaaaggaattcttagatgctgaatacagcttaaatatgtatttctctcgctcagttaaataccttggtccattacgaatggaacctcaagcattatatacttcatttgggcatttagatcctaatactgtaggacttaaaggagagtataccgctgcagttttacataaaaatcgcgataaacatatcgaatatttatcaccgagcatagttaatggtagtttggctttaaaacctaaaagtgaattatttaaatatgcgtgtttggaatggttgtcttatcttggtgtaattcaagattttaagacaagtgataagggtaaattaggttacgaattaaatgttaaaattaataaagatgaggagtggcaagatttaacacatgtcggtgttggagttagtcaagtgttgccaatagttattatgttcttgttatctgatgaagatgatatccttattttcgaacagcctgagcttcatttgcatccgcaggttcaatcgagattgtgtgatttatttattgctatagctagggcggaaagacaatgtataattgaaactcatagtgaataccttattaataggctaagattacggatagcacaggagatagatgaaacaattaaaaatgacgtgtcgatgttttttatcaataaagaacatggcgtttctgattttaaaatggttgaaattaataagtatggtagtgtcattgactggcctgttgatttctttgatcagacggacagagaaatagaacgtattctatttgaagctagcttgaaaagaaaaaaagagaaaaaacaaatcaaaagtttcagcttcgaggtcaaaaatgaacgccgtgattaa

SEQ ID NO: 227185 - DNA, 1017 bp, Klebsiella pneumoniae; identical to SEQ ID NO: 194672

SEQ ID NO: 227186 - DNA, 747 bp, Klebsiella pneumoniae; identical to SEQ ID NO: 194671

SEQ ID NO: 227187 - DNA, 1533 bp, Klebsiella pneumoniae
atggatatagaaaatgagttaacaagaaaaatccttgacccaattcatggtattatccgtttgactgctttagagatagagtttatcaatcacccactttaccagcgcttacgtaatatcaaacaaaattcttttttatataaagtatttccttcggcggttcatagccgatttgagcattccttaggagtgcttcatttatctaatgagatacttaagaatttgcatcttaatactattcgttatggaaaaaaatatgatgatgggcatgtttttaatgcggtaagtcttattccaaagcacaatgttcaggagttgagacttgcggctttgatgcatgatataggtcatggaccgatgtcccatcaatttgatatttttatgcccacaaaaaaagaactaattgagttcttggataagaaatatcataaggttcttgatgttttaacccaagaaaatgatcaggttgaacatgagcacttatctttgatattttgtcttgttatatttaatgatctaaaaaaacgatcgcaagtaagcgaagaaatagatgtggaaaatatatttaagataatagataaaaaatatggtaatcaacagattctgacaaaggtctgtaataaagaagttgacattcttccgttgatgacatctataatatcatcatgtccaatagatgcagacagaatggattacttgctcagagatagttatttttctggtgtaaaatgcggtctatatgattataatcgtttgttcatgtccattgtgcctgtagaagaaaatgacaagatatatcttgcctataaagaaagtgggcttgattctatcgctgaatttattggtgcgcgctccagtttattctctcaggtctactttcacaaaaccaacagagcattttcctctatgctaaataaattatgtgaggttatgataggtaagtccaataaaaatttaataatctcagatatttatgagggttctgcatccgtaccgggtcctgatgatggtattaaaccactaacagatttttatatagattgtagtgatgactatttcttaaatgaaaaggttgcaaagtgggtcgacgaaaccaaaactgtagacataaataaaaaaatattaggcgatattattaatagacatccgtggtcaaagatttatgaggctaagcattcacttaaaaatgcaagtattacggataaagacaatggagagttaaggaggaaaatacaggctagattacagcctattttgggagcccattttcaatcacatgaatactttattgatgttgtatctgatacagcattcaaagatattgataagaccgagattaaacttctaattaaaaatgttgataatacatataaaataaaatcattgagtgaatgtggtgataagttagaccagtatcaaagtataaagtactttattcgtgtattcattgatcgtgatttgaaagggaaagtatcctctaatataatcaaagagattaataatgccgtcatggaagaagtgacgccttcctaa

SEQ ID NO: 227188 - DNA, 234 bp, Klebsiella pneumoniae
atgagaataaccgctctggatgatgatcctggaaggaagataaatcctggaatggagcaatacgctgtctttctttatggcgtagaagttaagcatgtcttcacagctgatagcgataaaggcgaagtgattgccgcagtgcttgatagccagggtgacctcactgccgagaatggcgaggttaagcgcgagaccctttttagtcatgtgagaatcgagcgatgcccgcgctga

SEQ ID NO: 227189 - DNA, 267 bp, Klebsiella pneumoniae
atgaataaatttatttcaagcacttttaataatactgtcgtcgaactggatggcaaccatttcgaaaagtgcgtttttgaaaattgcgaaattgtatataaaggattgcagccttttaatttaattaattgtaattttattgcatgtaaatggaaattggaaggtgcagcgtcaaacacaattaactttttaaagattatgtataaagatatgggtgagtttggaaagaaaatggtagaagccactttcgaaaacataaaaaaatag

SEQ ID NO: 227190 - DNA, 360 bp, Klebsiella pneumoniae
atgtcttcatgcatggcggtagttttaaacggtattactgaagttaaatatttccctttccacgattgtgctagcgctgaagtagcaaccgatatggccgacgaatggcgttatgccgcgattgaggctatcggctgggatgaagcacatcgattccacctgcgtgccgtccgtccggtagttgtgttccgcactgtcaatggctctatcgtcgaatgtgacccgtttgacgtggacatagacccggctgtatctgcggatcgggattatcacctttgcgcttttgggtttgacagggagcgccgctattcaggttactgggacttagacggcgctgaaattatcgaatacatcgcataa

SEQ ID NO: 227191 - DNA, 678 bp, Klebsiella pneumoniae
atgacaactgatatcaccgaactggcgcagagcctgaaagcggcagcagagaaggctactccgggtgaatgggtttattttccgaaaaataccagcattgagtatgacgtaggcagtgatgaatctcagggctcaatcctctatgtcgatagtggtgatttcacccaagttcagacagacaggaatggggagttcatcgccctggctaaccccgccaacgttctcgcgctggtagaggcgctggagaaggcgcagcaggagagggaaaactggcgcaccagctttgataacgagcggttccgcgctgataaactcaaagcgtatatcgatgatatggaacccatccgcgcagcagctgaaaaactggtccgctgcaaaggtcgctatcacagcgaacagaactaccgagcactggcggcactgtttggcgtgaaaaccccggacctgccgccgctggagaatgaaaacgtccattatgccgatgctgcagagatggagatcgcagcactgcgccagcgcatcgccgagctggagtcacacaccgtgaagctgccgaagcctattagcgttttgcatcgccgagagttcactgcggcgcactgcgcaatatacgcataccccgaggcagaagttaacgcggcgttggccgccgctggcatcaagtgggaggttgagtga

SEQ ID NO: 227192 - DNA, 1278 bp, Klebsiella pneumoniae
atgggttcgtcgttttatcgttcatttgaagaacgacacagaggttcggttgaagatatcaagagccgcctgagtttttatttaccttttctctcacgtctgaaggaaatttatcctgatggtgtgattgcggatattggttgcgggcgtggcgaatggctggagatcctgactgaaaatggcattgcaaacatcggcgtcgatcttgatgatggcatgctagcgcgcgctcaggaagctgggctgaatgtgcagaaaatggattgtctgcagtttctgcaaaatcaggcggatcagagcctgatagcgttgaccggttttcatattgcagagcatttgccttttgaggtactgcagcagctcgtcatgcataccttgcgggtgctgaaacctggtggtttactaatcctcgaaacgccgaacccggagaatgtaagcgtcggcacctgttcattttatatggatccaacgcataatcatcctctgccgccaccattgcttgagtttttacctattcattatggttttaaccgggcaattaccgttcgtctccaggaaaaagagattcttaaatctccggatgccgccgtcaatttggtcgatgtactaaaaggggttagcccagactacagcatcattgctcagaaaaccgcacctgaagatattcttgaacgctttgaaatcctgtttactcaacagtacggcctgacgctagatgccctgagcaaccgttacgatgagattttgcgcgaacagttttcgtcctatgcctcacagctggagacgttgaaccatacctatacgcgccagataagcaaaatgtcggagactattcagacgttgcaaggtcaggttgacgaactgagccatgtcatcggtcagaatcatcagcttcatcagcaaatggcggacttacataacagtcgttcatggcgtatcactcaaccactacgctggttgtctttgcaacgtcaattattacgtcaggaaggggcaaaagtgagagcccgtagggcggcgaaaaaaatattgcgcaaaggaatggcgctctcgctggtctttttccatcgctatcctaagtcaaaggtttatctgtttaaggttttgagaaaaacaggctgctacaaattgctacaacgtttgttccagcgggtcatgctggtgcactctgacacgatgatgatgcagtccagaagatatgatgtgggtactgaagaaatgacaagccgcgcgttgagtatttataacgaattaaaaaataaaaatacggagaaataa

SEQ ID NO: 227193 - DNA, 204 bp, Klebsiella pneumoniae; identical to SEQ ID NO: 104963

SEQ ID NO: 227194 - DNA, 522 bp, Klebsiella pneumoniae
atgatagcgcccggacaacatggcaagaatctgcgggacattcctgagcagtgttttgattacgggtttgatcgggaagatcgctggccggggctggttctggcctctacggtaactgtgccgaacggtaacaccgatggctggcgactggcgacgcagagttgcggtggattcagctgtaacgaatttcaggccgcggttctgcccctgccagttcgcccggagatgctacggtttcttgaaaccgtcgcggaggaggaattttcgccggcgcctctggattacttcaatatgatggatgccgccgatgccgcagcagttaaaaaagggtacctgtcatgtcttcaccgcgcggggctttcctgcagtgagcataatctgtcactcctgacacaggcgctttatccggtggatgccacagcggaaaacatgaagatcctggccgggaattgtactgaactggccgcaatgaaggttcccgggggactgacgatatttatcgtgggtcagaactgtgattaa

SEQ ID NO: 227195 - DNA, 393 bp, Klebsiella pneumoniae; identical to SEQ ID NO: 104961

SEQ ID NO: 227196 - DNA, 945 bp, Klebsiella pneumoniae
atggcgaagatccaggccagaaatgttgacgatgcgctgtttgcacgcattgagcagtcagcgatgaaaaatgaacgttcactcgaaggggagatccgcctggcgctggccagacagtatcctgccgggaccacctctccggaaatcctctccagccggcaacagtggcagaaggaatgtggcgggcgtctgcgcgccctgtttgaccgtctgtccgctgacggctttttcccgggggccgggcaacccgggccgacgcggatcgccgaccaggtacggatagctcaccggttacatgtttccccgggactgctcctggactgtatcgatggcgccggtgagttaacccgtgagctggctgaacggattgaaagccggttcggcgccagtgcagactggctgaccaccggtgacgggaagatgttcccgctggtgatcctggggacgtattttggtgtcagctgggaggagtttttcttcccggatgatgatgaaaggtatgtctttgagttcatccgcatcgccggtgggcgccatgatggcaccctgatgatcctgcgccagcatgagcagaacggccgtatcactgccggcgtggtaacagaggcgtttttccttggtgccggtatggggccgggggggtatgtaaacctgaaagaatttttgttgttcctcagacaacacggcgggaatctggtcatgaatgcgtatgtgttctcccccccggagccggattttgatttctggtcagtcatgggtcagcaccatccggtctggttccgtgacgccagacgtcgctccccttcccgctggctgcagcaggtactcagtggtgaagatccgggcgaatggtttgccgggggatggtcatcaatactgaaagaagtggccgaagctacccctccggataacgctactgaacatacagaaaaaaatgatgaatga

SEQ ID NO: 227197 - DNA, 168 bp, Klebsiella pneumoniae
atgttccgctccattgcagataagattgtgtttgagggtgtagagactcaggagcaggtgaactatctgaagacgttctggccacagagttatgctcagggctggtattactccagagcgcttccgctggaagaagcgagaaaacttaccatccgggaattgaactga

SEQ ID NO: 227198 - DNA, 543 bp, Klebsiella pneumoniae
atgaataacaaactctttgaaacgattattgcaaagttaaatttttcgctaattaagaaaacaccggtaattttacaatcagaatcagcggaatgtggtatcgccagcctggcaatgatctgcggacactatggattagatatagacttattcaatttccgccaacgcttcggcagtccatcgcaaggtgcttcactgctgcatttgagcaaaaccgccgagcgtgctggccttaaaaatcgcgcgctttcattagatttagatgaaataaaacagcttaagctcccttgtattctccactggggaatgaatcattatgtcgttctaacgaaagtacgaaaatctagctatgttgtgcatgatcctgctttgggtaaacgtataattggtttgcaggagatgtctaataatttcaccggcgtggctctggaactttggcccgatcagaactttcagcaagaaaaggcaaaagcacgcttacgtttattagacctgatgcgaaacattgtcggggctttgttgaataaatcgaacttttgctga

SEQ ID NO: 227199 - DNA, 873 bp, Klebsiella pneumoniae; identical to SEQ ID NO: 101771

SEQ ID NO: 227200 - DNA, 717 bp, Klebsiella pneumoniae
atgaaaaaatttaatttcgctgctctgcttccgggatttttagcactcaataattctgtatgggcaagtgattcttccactggagcgagtgatttgccaggcatgactcttaatgagcatgatttagtcatagctccacttaacacggaagtacctttctacattgcagggcaccgtagtcatagctcccatcgaagccatagttctcatagatcttcgtctggtggtgggtactatggtggaagcactccttattatcctaaaacatacagttcaccaagctcatcaggttcatccagttcagggacaagttcgtcatcgtcttcttcatctattcgttcgcttcgctctaatgacatggatacctctacgaccacaaactctaatggaacgaatggaacgaatggaacgaatggaacgaatggaacgaatggaacgaatggaacgaatggaacgaatggaacgaatggaacgaatggaaataaccgttcaagtagtggggtggcttctgatactgaaaagcgtaaacgtttaatcatgcgagtacagtttgcgttactcgataaggggttctataacggcaatatagacggaagcatgggacctgcgacacgaactgctatcaagaattacagaattgcaaacggactccccacaccggcaagggaaaccttggatacacagttgctaaattcattgaatatattggctcgataa

SEQ ID NO: 227201 - DNA, 1650 bp, Klebsiella pneumoniae
atgtcagtgagttataatatttacaggatgccatgtaagctcttgactgagttgacaaagaaaataactaaagaaggacttgttgagcaaaaaactatatcgcataaggcttatcaacttaagttttatttctctgataaattaaaagggaatgaagtttggtggtgggaagtttttagtgatttctttaacgaaaaaactaaaaagccacataatatattttattttggtctgctaataggatttaaagaaaaagaccctgaaaattgttatcttattagtcttggtaagtcgcatttttatcttagcaaatttatagaagctgacttcggactaaatgtagcaatgcgtatagctaatgatgagaacatcttgctgaagaaaagcagattcttttgtggaggtaagagtcaggaggcgtcatcatattcaaaatttgtgcaaggatcatattttcctggtgaatcaattgaacatcttaaaacgaaggcgaaagagactgataagtggggaagtaataacattactttttcagactcaatccaactaagtttagatggagatcctactgcattggttgatgtattcgacgatatagattcttcattagcaactaaggaaataattgaatttcctaaatccgaaaaaataactgacgaattaaaaatagaagagcttgacaagtgccttctgaattcaattctcacaggtgacgcaaatgttattatagatgaaattcagtcttttggtgcctctattataataaataacgctttgacacactttaaattgcacacaaaaattgagggaagtagcaagtatgatcaatcaacaaataaagtaaatgatataaaaataacagatataaaggagtttttcgataaaaatgccataaaagatattaataaagtttatgttaaaataaccaatgatgctaataatggacacactgcatccctgaaagaaattcttagcattacttacactgaaggcagcgagcactacttccttaaaagaggtaattggaataaatttaatgctgcttttatgaaatacctttctaattccttaaaaaacataacttttgaaattaaagatgatcttaaggaagttgaattcaatacatggcaatcaattaaagcacagcaaatcactcaaggtaattctaaagataaattggattacagggagtattggttcaatgagaaaatggccaatgagcaaggctataagctattagacagacagcttacaaaaatcacttcaataagtgaggtagggaaagattataatgtcgaggttgcagacctatataaaaatggggagttaattgccgtaaaaatatccgataaacctcatgatctaatatataatattcagcagtctataacaaccatccaaactatacaaaggggggcaatagaatttaaaagctccattaccgatgttgtgttatggatttccactacaaaaaaagttaaaaatttaatagatattaattctattcagtttttattagctatacaaacttggaaagaaattattgaagggtttaatttaaagccaaaaatatattactcccatcacgaaaaacccaaacctccccaaaaaaaccaaaaagcaaagaaaaagacaggggggaaagcatag

SEQ ID NO: 227202 - DNA, 1134 bp, Klebsiella pneumoniae
atgtaccctaaatatatgccgattttaaaagctaagaaaggtgagttagatgccattgagtctatgcttccttatccccacgttataagggacatgcttccgatttttgaaatcccatatctgtcgaaaaaacagagagcaaataaaaaatattctaacataggtaatcctgttgaattttttctaaacaatacaattaaaacattgtccgaaagaatgcaaaagctccctatggggattgacataagcagatggcctccaaactcttctcttgaaacaggggagcatattttaagtcatctcaccagtgccttaagaaatgcggggtgcaatatcattcctgtcgtcggttatgaccgatgggaagatgatgagtatgcaactactttgcaacaattaggtacaagctatactgactttgtaattcggttaaactcttttgcttttgaagatatgatcgaagaagaaccgtttattgaaacaatagaaggtattttaacctcgctgggtgcaatgccagaaaattgctctgtcatgatagatttagaagatattactaaaacatcaatagttgatctaaatgaaacagtacagagagcactggattcattgtacaagtataattttaaatttatttcaattgcgggaagttcaataacaagtgatattaatggaatggttcctacccacaattcagaaggtatagttattcgtaaagaagctaaggtatggaaagcattcaaaaaattccaacctgatttaaatttagtatttggagattatggtatcgtcaatccctctatcggagatgacatcattgcacctgatgctaacggtaagattagatatacgatagacgatagccttttcgttgtaagaggctattctcgtgctaccggtaaaaagggagcacaaatgcaagatttatgtaaaatactggtttcatccccccattataaaggtgagcaatttagctggggtgataaaaagatttatgaatgtgccaatgaagaatttgttggtaatactacgaattgggtatcaattgatactacacatcatgtaactcatgtagttgcagaagttagagagttcgaattgattatccagtatcaaagagagcatcaaaattaa

SEQ ID NO: 227203 - DNA, 1230 bp, Klebsiella pneumoniae
atgagtaaacttactgaagttcgggttattcgaactgaagaacaatatcatgcggccctttcagaagttgagagattactcagattggaacttcctgcaggttctgaagaatcagaacgtcttgatttacttacagttgttattgaaaattatgaaaatgctaactatccagtaacaccggtagatccaatcgaggcaatcaaattccgaatggacgaacagggcttacgccaagcggatctgaccccatattttggaacaaaaagtcgtgtatcagaggtgttatcgggaaaacgtcctttaaccgttgctatgatcaaagccttatcaataggtttaggtatgtctcctcaaacgttattgggcttagaaacagaaactggatatgcaaatcgttctccagttgaggaggttaattggtcaaaatttcctataaaagaaatgctttccaaaggttggatagaaaatgttgtctcgcaaacaaagacgacaacagaagaaaaagtcaaaaatttcattgagggtttgggagcgaatttttctacagcagccttcaagcgaacacttaacggagagtcttactcacctacaactgtttataaattacatgcatggattgcaagagttgtccagaaagctagggaaaaaaacctcgctactaaatttaggcaagatggcataactaaagattttttaaaagagatcgcacatttaagttggtccgaatatgggcctctattagcggtggagttcttagaaaaaaatgggatttgtgtgatcattgaaccttgtctgactggtactgctgttgatggggctgctctgagggatattgacggtagaccaattattgcactcactttaagacaagatcgtttagataatttctggtttacacttttacatgagttagtccatatctggaaacatgcagattctactaacacatttatcgatgatattgaaacactcaagaatagtacagacaaaatggaagcagaggctaatcggatagccagagatactctcattcctcgcgtcatttggaaacggagttcagcttacttaaatcccagcacaatcacgatagatgagctttcaagagaattaagaattcatcctgcaataatagcaggaagaattagaagagaaactggaaaatacaatcaattttctgatttagttggtcaaggtgaagtaagaaagcatttccctaatcatatttggtag

SEQ ID NO: 227204 - DNA, 264 bp, Klebsiella pneumoniae; identical to SEQ ID NO: 91785

SEQ ID NO: 227205 - DNA, 1077 bp, Klebsiella pneumoniae
atggttgataaagttaccgaagctgccgttgtgggtggcgtggatacacataaagatttgcacgttgccgctgtcgtagatcagaacaataaagtccttgggactcagtatttctccacaacacgacaaggttaccggcagatgctggcatggatgacctcgtttgggacattaaagcgaattggtgttgagtgcacaggtacctatggttccggtttgcttcgttattttcagaacgccgggttagaagttcttgaggtgactgctccagaccggatggagcgacgcaaacggggtaagagtgacacaattgatgctgaatgtgccgctcatgcagcattctcaggcatcaggacagttactcccaaaacgcgtgatggcatgattgagtccctgcgggtattaaaaacttgccgaaaaacagcaatatcagcccgcagagtcgctctccagattatccattcaaatattatctctgccccggatgaattacgtgaacagctcagaaatatgacgcgcatgcagctcatcaggaccctgggttcctggagacctgatgccagtgaataccgcaatgtaaccaacgtttatcgcatttcattaaagtcccttgcccgacgctatctcgagttacatgacgaaatcgctgatctggatgtcatgattgcggcaattgtcgacgagttggcacctgagctgattaaacgtaatgctatcggatacgaaagcgcttcacagttgctgatcactgccggagacaatcctcaacggttaagatcagaatcaggatttgcggcactgtgtggtgtcagcccggtccccgtttcttctggaaaaacgaaccgttaccgacttaatcgtggtggagatcgtgctgcaaatagtgcacttcacatcatcgccatcggacgcttacgaactgacgcaaaaacaaaggaatatgtcgccaggcgtgtagccgaaggacatacaaaaatggaagcgatacgctgtctaaagcgatatatctcccgcgaagtttacacgttactgcgcaatcaaaacaggcggatcaacagtatcccgataacagcttga

SEQ ID NO: 227206 - DNA, 1104 bp, Klebsiella pneumoniae
atggagagtcttatccgtaaactatctcctactcatattgatgataaggttctaattgaatatcaaaataagaaattatcaaaagcctcagcatcatttcgcgttttacgaccatttttgattaaatggtttgagttaggatatccgggaatagatgaaagtgcggtagaactgttaaagcatttggacctaaaaataaaaaaatctggtcagtctgtgcttcaagatgatccaacagagggaccattaaataaagaagaacatacttctttgattaaggctatgaatcatgcatatagaaaaggtgaactgtcactgccacattatgcaatatcactattgatcagtcttacaggtagaagacctcagcagttagttatgttgaaatataaagaccttcttcaaaagaacttagataatggcaaagtagaatatgtaatttcagtgccacgagtaaaacaacggggtaaagaactacgatatcgagaacttgcaataatatcagaggttgcatcaattgttcaattgcaagctaatcaatcagtgaaacttgttgagcaagctcttggaaaaactcttgatgattattctaaacgagaagttcctattttcttaaatgaggaaaaactctcagatttatccataacaggttcaattcttctggaatataataaattatatgcgaagcctacaattgctaatgtagcattgaaaagtattgttaataatgggaatgtaatatccaaccgtaccggttcgatactaaatattactcctcgtaggcttcgttatacaatagcaactatgctggctaagaatgggcataatgttaatactatatctgaattattggatcattcatctacttcaagtgcggggatttatattaaaaatcatgctgacagtgttgaaaggattgattccgctgtttcagaacaattgtcatttgtcgctgatatttttatgaacggaatcaaatcgaaaaagagtagtcatttcaaatttttttcttcaagtagatgccagagtcagaattcaggatttccttgcaatcaatgtatattttttattccgatagatcgcagtgaggtgaatcaactatga

SEQ ID NO: 227207 - DNA, 273 bp, Klebsiella pneumoniae; identical to SEQ ID NO: 90094

SEQ ID NO: 227208 - DNA, 1182 bp, Klebsiella pneumoniae
gtgaagggtatgcggaagatcaagaggggtaagagattcgctggtgttgttcgttatgtattgcaaccgggagcacatcataaaagcgatccagtcgtaattggcggtaacatgttaagtggatctgttcttgaactgattttcgaattcaatgacacaaaacagcttcggccagatgttcagaaaccggtttggcacaactcacttcgcttacctgatggtgaatcattatcgaatgaccaatgggtaaccatagctgacgactatatgaagaggatggggttcagtgatactcatcttcgttgctatgtgcttcatgacgacggaggccagcatatccacattatcgcaagcagaatcgacatgctcggtggtaagctttaccttggcaggaatgagaaccttatcagtactaggatcatcactgaactcgaaatcgatcatgctcttacagtgaccaaggcagcatcatccctctcaaatacaaaaccaaagcggaagagaatctctcgcaatgaacagatgttatcagaacgaactggccttccctcccccaaagaagctctccaacagataattgataaaagtttggcagatacacctgatcttttaacttttatcaagaggctggaagaagcagaagtcggctggacggcgaatgtcgcttctaccgggaaaatgaacggcttctcattttcttaccgcgatattgctttcaaagcttcgcaattgggtaaaagctattcttgggcaaatctcagtaatcggcttaactacgaccccgaccacttagaagctatgcgaaccggcataccaccaaaagacccccttgctcctgctcctgctcctgctcctgctcctgctcctgctcctgctcctgctcctgctcctgcaacagttttgaaaaacactgagagaaaggaaagtatcagtgaaaaaattgctgaactcgaactacgactcaaagaagacagaagaaacgaaatcgtagaaaagattcttcaaaaaaactcagtacaacagcaaaagcatctcaggcttatcggctggattccatttctcagaaggctcgcagagcttctcagaagctatgggaagagcattcttcacaaaacccatatgaccttctcaaatatctccgcaatgaaacctttaaacaaggcgagaaaaatccgtttatag

SEQ ID NO: 227209 - DNA, 438 bp, Klebsiella pneumoniae
atgagacaagataaaaataataaaagcagtaatggaaaatttcactttgataaaaaagataaggatattgagactaaaagcattacaagtttgagaactcactgtattagtgtaaggttgaatgaaaaagaattagatatactcaactctcagcgtaaaatatacagtaaaggtgaatggctccgtatggtattacttcaaaaatcacctcctgttataccaactatcaataccgaagcctggaaagctttaactgacatatcacaaaagctaaatcgagttgcgatccatatcgatggtaagagcaaagatagccagcttactcatacagagcttttcgcagtgaagcgactactcgtagagcttcgcaataaccttctaagaactgatgttgggagtatatatcgtgaagggtatgcggaagatcaagaggggtaa

SEQ ID NO: 227210 - DNA, 300 bp, Klebsiella pneumoniae
atgaatatcgaagaatttgtgagtgaagataaccatatgtgcaatttatgcggagatcggttttacaagatctttgaccaagaagtgatttatgacttacccaataacgagtttaataaagaaataatttactggctcagtcagtaccttgtaggaaatttgagagaacctttagactcgatctctgatcttaatgcttccaaacagatatatgtttacgagacctggttctcgctaattaaatgccctgatgaaatgaaactcttggcgaagcggataattctatatctgttggattaa

SEQ ID NO: 227211 - DNA, 210 bp, Klebsiella pneumoniae
atgaggtactggttgctcgttatcttaatgaacgtgctgttctggttgatcgtgaagcatgttgctccggaatggtatggttcccctggttattatgcaggccaaatcatctgcacactaatagctgcggtcatcacatggcgtgatccgcctgactggttagggaaggtgcgaataagcaggtcatttcttcccaagctgactcgctga

SEQ ID NO: 227212 - DNA, 249 bp, Klebsiella pneumoniae; identical to SEQ ID NO: 135567

SEQ ID NO: 227213 - DNA, 873 bp, Klebsiella pneumoniae
atgaaaaattcaaaagcgatattaaaaaccccgggtacgatgaaaattattgccgccgatatcccggtacccaaagagcatgaagtgctgatcaaagttgaatacgttggtatttgcggttcagatgttcacgggtttgaatcgggcccttttattccgccgaaagacccaaaccaggaaattggtctcgggcatgaatgtgccggtacggtggtggcggtgggaagtcgcgtcagtaaatttaaaccgggcgaccgggtgaacattgaacccggcgtgccgtgcggccactgccgctactgtctggaggggaaatacaacatctgccctgatgtcgactttatggccacgcagcctaactatcgcggcgcgctaacccactatctatgccatccggaaagcttcacttacaagctacccgataacatgggcaccatggaaggcgcgctggtagagcctgcggcggtagggatgcatgccgcaatgctggctgacgtgaagcctggcaagaaaatcgtcatcctgggggccggctgtattggcttaatgaccctgcaagcctgtaagtgtttaggggcaaccgacatcgccgttgtcgatgttctggaaaagcgtctggccatggccgggaagcttggggcgacgaccgtcatcaacggtgcgaaagaggacaccgtcgcccgctgtcagcaattctccggcgatatcggggcagacattgtttttgaaacggccggctcggcgatcaccgtgaagcaggctccgtatctggtgatgcgcggcgggaaaatcatgatcgttggtacggttcccggagattcggcgattaattttctcaaaattaaccgtgaagtggctttgttgaataaataa

SEQ ID NO: 227214 - DNA, 276 bp, Klebsiella pneumoniae; identical to SEQ ID NO: 91793

SEQ ID NO: 227215 - DNA, 1389 bp, Klebsiella pneumoniae
atgagactcatgccttttaacttcgacaggatgcctgacggccgggtattcatcagcaacctcgctggctttcatcattttgtaggtgagcaagaatttttcgatctcgtaaacggtcatatcagcctggagcagtcctcatcgcttgaaagcaaacttttcgtttgcggagaggaatcttcatctgttacccctcatgcactaagttcggcttttgccaaacgactcatgaatgaactggcggtcaggccaatcttcatgattgtacctactcttcgttgtgatcatacttgcaaatattgccaggtcagtagggcatcggtcacagcttatggttatgatctcaatcctgaactgataccgcaaattgtcaacactataaagaaactgggtacacctccctataaaatagaagtacagggcggtgaaccacttctccggttcgatcttgtccagtcaatctatcacgagtgcgagatttcattgggtagtggtgctttcgaaatggtaatagctacaagtctgtcattactcgatgaaagcatcctctcatgggttaaagagcggaatatcaccttctctgtctctcttgatgggaatgaagccgtccataacaagaatcgccttcttactgactttcaggctcacaacaaagcagtaacaggtattcggaaaatcacagaagagcttggagcaaaccgggttgcaactgtcaccactgttactaaggaactgacaaaggagccagcttccatagtagatgctcatctgtctctgggtcttacagacatgtttatcaggcctgttagcccttatgggtttgctcagaagcagagcttcactttttcaatgccagagtattttgctttttataaagagttgatgcaggaagtgttgattcagaatgaaaagggaatacctgtcattgagcactcggctgctattcatctcaagcgaattttcaatccaggcttcagtggttatgctgatctaaaatcgccaagcggagtcgtgctgaactgcatcctgttcaattatgacggtaaagtctacggtagtgatgaaagtcgtatgcttcagaaagtaaacccggaagcagatttcagtgcaggagagtttgcctcactctcatttattagcaacgaattctaccgttccgctctctcatcttcatttaacttcgccatgccaggttgtgacacctgtgcataccagcctttctgtggagcagatccttgccagaacattagtgttcatggcgaacctgttggtgacaagagtcgttctactttctgccagtatcacaaaggtatgttccgcttccttctgaatgaaatctctcaggatggaccgatggcaaagatgcttaaagggtgggtttatgtctga

SEQ ID NO: 227216 - DNA, 429 bp, Klebsiella pneumoniae
atgccggagacagagcgtctggcggccagacagtcgcggagtgcgccgctgctggcgtcactgcatgagtggatggtggagaaaagtgcgacactgtcgaaaaaatcccggctgggagaggcgttcacgtatgccctgaaccagtgggatgccctgtgttactactgccgtgacggtctggcggaacccgacaataacgccgcggagcgggcgcttcgcgccgtctgcctgggaaagaaaaactacatcttcttcgggagcgatcatggtggcgaacgtggtgcactgctgtacggactgatcggaacgtgccgtctgaacggtatcgatccagaagcgtatctgcgccacatcctgagcgttctgcctgagtggccttccaacagggttggtgaacttctgccgtggaacgtggctatacctgcctga

SEQ ID NO: 227217 - DNA, 1074 bp, Klebsiella pneumoniae; identical to SEQ ID NO: 101378

SEQ ID NO: 227218 - DNA, 429 bp, Klebsiella pneumoniae
atgttccggaagcggacgacggtgccgggactgacggagctggcggggaacctgcgggtcgtcttcccgcccactgtaacgatcgctcgcctgttcgcgctgtttcagcagcgcttcggcctgtgccacctcgcggcgcagtttttcagaacgggtgccgaacatcatacggcgcagtttttctatctgagacctcaggtgttctatctcccgttcgtcttcctcgatcttttcttcagcgcgggtcagcgcagagcgcaggaaggcctcagtctcggcaacgagactgagctggctgtctttccggcgaagttcttcttccagcgcggtgatacgggcgagatagtcctgactcatgacccatttataatgcggccatgctttttttacaacattgtcagtgagttaagacggggtgttttgggctga

SEQ ID NO: 227219 - DNA, 1425 bp, Klebsiella pneumoniae
  misc_feature (220)..(255): n is a, c, g, or t
  misc_feature (1105)..(1114): n is a, c, g, or t
atgtgtataagagacagacactatatttataagagcctatggaaattagtaattgattctctttatgatttttatttacctgaatacaactatgaatttacttggcatatagaaacaactccctattctttctttctttggttaagttcaggtcaggaaaaaaatgaaagagatgttgagctattacaagaaaaatataacattaataattccattctannnnnnnnnnnnnnnnnnnnnnnnnnnnnnnnnnnngatcttgacaaggttattgagaaacttgcaccagaatcaaatcaaatcatagttaaagcaatacaaatgattcctgtaagtttaagaccccaaaaaaataaagaaatactgggcctcatatttaacataataaatataccaccattggaagaattatttattttctttgaccgatatcaaaagaaaatagagatggaactgatggaattgaacggtattttaaacccgaagtttagtgaaactctgaacctaataaatatcccaccaatacttaataatggattttattacatagaccatcatttattacaaggtataggatcgaataaaacattcgaaaatgaatacttcaaaactcatagagatgaaatttctaaaatagaaatagattctgaaaagtacgaaggggaattaaatgacacattcatttgtccgtgttgcggggagttaagcgatgttaaaataccaaaggatgctgtcagaataaaacttctttgcgagaacaaagaacttcataaaattgttggtcttttctatttcgagcagtatgttagctcgtttatggaaaatgtaatagaagaaataaacaatttcgaaaaaacaataaatagtgcaaatagaccagattgtctaattcttgtagaaggtgagagcgaggaaatatttatacctataatagcattaagagctgacataaaccttaaagcaaaaaaaataaaagtatataattgtaaatcgaaacaaaaagtacttagtgactttttatcatttaaggaaaaatatccagatcttaaaatggtttgcttacttgactctgatgcagttaaagaaaaagaagaaatccagaggnnnnnnnnnnaatatagattaatttatattgcgcatggtgcattcgaggatttatttgatctagagacatcgctgacggtcttaaatgcattacaccctaacggtgaagatattatcaaagatgatatagagcagtctaaggattttgcaagaagcataagcaaagtattattttcaaagaaaaaagagaaatttgataaggttaagtttgctaaaatgatggcatttaaattacctattgataaaatccctcacgaaattaaggatgtttttgataaagccctactgctttgcagcaaaagcaaatatataaaaaaataa

SEQ ID NO: 227220 - DNA, 909 bp, Klebsiella pneumoniae; identical to SEQ ID NO: 85078

SEQ ID NO: 227221 - DNA, 555 bp, Klebsiella pneumoniae
atggttattgcgtttttcttttctatagagaaaaaaatatcaatcaaaacactgttgatttatatcatatctccaattatggtaattgctgtattgattctttttcaagatagaatcgcaactattgatggcggtattgaacaaatagatagggtcaaattttttaatgaatttctctattcaacagcagattggccttggtggcagttctttactggtgcaaaagcacttacccctctcttaccagcttcttgtgctgatctgtcatattatcaaactttatttagttatgctggcgatggaagatgctattcggtgattcttcattcttttatcatgcgagtaatctatgatcacggcataataggttttgctttccttattttttgtttattcatttatcttgataaatattcaattaaggaaaaaatagctattctattagtgttaattgctactggactatcggtatcatctctcaataatgtgtatgtatctttagcgcttgttatttttgttggggcaaattatagtaggagaaggttgaatgaataa

SEQ ID NO: 227222 - DNA, 1125 bp, Klebsiella pneumoniae
atgagaaatattgattttaaaaagcgcacattcttaaaatatgcaatttatgggttcccgattttaccagtattgttcaaagcaaaagtggctgttggtagcgagagttttccttcaaatgatggctttataagtatcagacctttcttagatcctaaagattggcttgattgtaattcaaaaaaaccattaaaggatcactcgtatgcattaattaatgccctcaaagaaagtaataaaatttatttgcctcctgttaaagggtattatctttttcaaaatgtagttctcccaaaagggactattcttaaaggtgaatcagagctaccctatgtagcaaatgatattaaagatataattggtaatgggtctgctgtttcaaattttgattctaaatgtcctatatttaaatttaacaatcatgtgtcgcttaagggacttgctctttatggtaataaaaatattgatggcctgatttctgcgacaggttctaaagtttcaaatattcgactttctaaatgtggtttttataatttcagaatcggtataggaagtttatcaaattatataaaagttgatgtagaagattgcaatgtttcttcaaataacattgggattgcaaacgttgttgattcaaagcttaccttatccacgataaacgcaaatgtaatgtatggtattaagttaagtgatggtgcaaatgacaatatcttttcagctctcaagattgagtggaatggcgaaaacaatctttatgtaaaaaatgctgtcaataatgttatttccacatccatacttgatcgatccggtaaggctggtatctatctcgaaaactccgaaattattttaaatgaaatcataataaggcgaagcggtggaagttcaaatataccgaaagaatcaacccatatttatatcaaaggtggtaatgcaattattaacaatattataaccaagtctgggcgtaatgatgacggtaaaggaaaattatctccagattttagtatttatgctgaaaatgacgctagtttaataatctctgattctgatctaactggtcgtagtgtagattcagtatatgaaatgagtggaaatgatatgaaaattcgcaattcaaaaaaataa

SEQ ID NO: 227223 - DNA, 981 bp, Klebsiella pneumoniae
atgagccatcaactcaccttcgccgatagtgaattcagcactaagcgccgtcagacccgaaaagagattttcctctcccgcatggagcagattctgccatggcagaatatgaccgctgtcatcgagccgttttatcccaaggcgggcaatggccgacggccctatccgctggagaccatgctgcgtattcactgcatgcagcattggtacaacctgagcgacggtgccatggaagatgccctgtacgaaatcgcctccatgcgcctgtttgcccgattatccctggatagcgccctgccggatcgcaccaccatcatgaatttccgccacctgctcgagcagcatcaactggcccgtcaattgttcaagaccatcaatcgctggctggccgaagcaggcgtcatgatgacccaaggcactttggtggatgccaccatcattgaggcacccagctctaccaagaacaaagagcagcaacgcgatccggagatgcatcagaccaagaaaggcaatcagtggcactttggcatgaaggcccacattggtgtcgatgccaagagtggcctgacccacagcctggtcaccaccgcggccaacgagcatgacctcaatcagctgggtaatctgcttcatggagaggagcaatttgtctcagccgatgccggctaccaaggagcgccacagcgcgaggagctggccgaggtggatgtggactggctgatcgccgagcgtcccggcaaggtaaaaaccttgaagcagcatccgcgcaagaacaaaacggccatcaacatcgaatatatgaaagccagcatccgtgccagggtggagcacccgtttcgcatcatcaagcggcagttcggcttcgtgaaagccagatacagggggctgctgaaaaacgataaccaactggcgatgttattcaccctggccaacctgtttcgggtggaccaaatgatacgtcagtgggagagatctcagtaa

SEQ ID NO: 227224 - DNA, 429 bp, Klebsiella pneumoniae; identical to SEQ ID NO: 227216

SEQ ID NO: 227225 - DNA, 1872 bp, Klebsiella pneumoniae
atgactcaggaagacattattaccccgattgccacggttgccacccgtcaatgtatgatcacctctccctggtttgtgcagaatacagaatactcaccgatgccggcgacctataagccgctggtaaacggggaagaggcgtttgctgccgtttatcatgccatcatgaatgcacagaaaacggtggatattatttgctggggatttcagccttcgatgtactttatccgtgatggtcagtcgttgtgtatcggcgaattactttgcaagattgcggaaacaaaaaaagtccaggtgcgtattctgggctgggaaatgccctgtaatgccgcaggtgtgggaggagaggccaatttaccggggaagggagtcattcgttataaggaccggcaaggccagagtactacggatgaacgttatgcctatgaccgacaatggttccgtcagtattctctgtcaggggaatggtccgatcatcagttaaaaaagggacaggcggggatagcggaaattgctgccgcacccatagcgcaacgacaagaaaaattaagctcactttctcctttgtttgtcgggcgtgggtttaatttcctggagagagctgaaattgcctatcgcgctgcgaatatggcgcttgatccggatatcagccctgacacgatgcttactcttgcgggtaccgtgacccatcatcaaaaaacggtgctggttgactacgaactgccggagtctgcggttggttttgttatgggtcacaacatgcttgatgagtactgggatacggataaacattcagcactgtttcgcccgggcaacaatatggatccccgcttaggcgctaacggtaagctgccgcggcaggatatttccagtcgggtaaccggcccgattctggagcatctgcatcataattttgccatggcgtgggagaaggaaaccggtcaggatctgctgactatccgtgatagcgtgtccatcgcgaaaaagctgaaactgcgtgcgctacacggcacgccggtgatggcgcaactgttgcgcactcaggcgcaggcaggaaagcatgatattgaaacgctttatctgcaggccgtaaataatgcaacgcagtttatctatatcgaaaatcagtattttcgcttgccgccgctggcagagttaataaatcaggttgcggaaagacagagtaaagtggggcgagaactgcatctgtttgttgtgactaacgtaaccgatgaaggcattggggcgggtacggtgaatacccagcggatgcttgaggtgctgggtcaggcaaacattatccctgaagtgactaaactgcgtaaggtcggacaactcagcaacgcaacgttcggtggttctgtgggttatatcgaccccggagatatcaataaacgtaaccgcgagatgagtgagaaaattgctgattttaaaaagaaggccgatgaaattcagagcagtgaaatcctgccggaggaacgccccggactgaaggttcatatctgctcgctggtggctccggactcaccaccggaggaatgggtgccggtatatattcactcgaagctgatgattgtgaatgatgtatttaccacccacggttcagcgaatatcaacacgcgcagtatgcaggtggacagtgaaatgaatattgcccatgaatgggccagcgtgacgcgggatttacgacggcggttatggaatatgcatactaacggacgaggggggcaggatgatgcgaaggatgcttttaaggcctggggtgacctactggataaaaacgagagccatcaggattccaagaaagaacaacctgaggcttctctgattaagttttattataacaagtcaacgatgagcgatctggactga

SEQ ID NO: 227226 - DNA, 1674 bp, Klebsiella pneumoniae
atgttgagtaagcactggaatgttcctgaagaacgtcatgtaattttaaattgcgagccatttcaagggtttgtgacgagagatgatgttacagttaaaataaatgaaaagccagcttctggcgttgagcttgtatttttcggccgccttgaaacccgtaaaggacttgacatattcctgcgtgcattaagaaaactatctgatgaagataaagagagcatttctggagtaaccttcctcggaaaaaatgtcactatggggaaaactgattcatttacttatattatgaatcagactaaaaatttgggactcgcagttaatgtcatcagcgactatgatcgtaccaacgctaatgaatatataaaaagaaaaaatgtattagtcatcattccatcacttgtagaaaactcaccctatactgtttatgaatgcttgattaataacgttaatttcctcgcttcaaacgttggtggaattccagagcttattccgcaggagcatcatgcggaagttctatttattcctacacctgtcgatttatacgggaaaatccactatcgcttaaaaaatataaatataaaaccagggcttgctgaatcacaagacaatattaaagaagcttggtttgtcgcagttgaacgaaaaaacaaccgcgcattcaagaaaatcgatgaagctaacagcccgttagttagcgtgtgtataactcacttcgaacgtcaccatttgcttcagcaagcactcgcatcaataaaatctcagacgtaccaaaatattgaggtcatcttggttgatgatggaagtacgacagaagattctcatcgttatttgaatctcatcgagaatgattttaactctcgaggctggaaaattgtccgtagttctaataactatctgggtgctgcaaggaatttggctgcgcgacacgcctctggcgaatatctgatgtttatggacgatgataatgttgctaagccttttgaggtagaaacgtttgttactgcagcattaaactctggggccgatgtgttaaccacaccaagcgatcttatttttggtgaggagttcccttctccgttccgtaaaatgacgcactgctggcttccgttagggcctgatttaaatatcgccagctttagtaactgctttggcgatgctaatgcgctgatcagaaaagaggttttcgaaaaagtaggcggatttactgaagattacggtttaggtcatgaagactgggagttttttgccaaaatatcattacagggatataaattgcaaatcgtcccggaacctctattttggtatagagttgcaaactccggcatgttgttaagtggaaataagagtaaaaataactaccgcagtttccgtccttttatggatgagaatgttaaatataactatgcaatggggttgataccttcctacctcgagaagattcaagaacttgagagtgaagtgaatcgattacggagcatcaatggtggtcattctgtcagtaacgagttacaacttttaaataataaggttgatggtcttatttctcagcaaagagatggctgggcccatgaccgttttaatgctctgtatgaagcaattcatgtccaaggcgcaaaacgaggcaccagcctggttcgccgggttgcccggaaagtgaaatcaatgttaaaataa

SEQ ID NO: 227227 - DNA, 1386 bp, Klebsiella pneumoniae
atggatattgtcagtcgggttgagcgtttaaggacaaaagctttttatcagttgcttgtggacaggcttggaactaaggcctgggctgctcgcaaagctgcatatttgaagcgcatacgagagaaggagtctaagttcaacatcaatctgccaatagagtcccagctcttcttaccagcagaagatgatatcgactggtacattctggcgtcgtacctggctcatgattttccatatagtgatgctacttacagcagcaggcggatctacccctatgctatggccataggagctgttgcagaccaacttcgcaaagttccatacgtcaatgatattctggacaaaatgctagcaaataacaacaaaccagaaactcaaatttttgagctgctgacggcatcgttctacctaaagaacggctatgaggttgccttcattccggaaaacagcattgtctggcccgatggaaagaccaaaaaatcaccggatatgctcgtcaagttaggtgagctggagttctacgttgagtgcaaaaggccggataagcaaaccaagtactcaaagaccgaagagcaagcctgggccaacatctggtatgaattgagccaacatatgctcaaagtcgcaccgtggaacattgtcgatataattttccatgagcagctcgccagtgtgactccggcagacattattaaagcggtgaatctagcccttaaaggagggacgggaaaagctaatgagggttcaatcagtgtaggaatacgagccatcgacaaattagggctcaaacgtcactaccgaaaattttcagtcagagccaatagcccacagcatgaattactggtatttggggacctagatagcaatgagaaacgaagcatctcgactatcgctcagcgagttattcgccctggcaccaataacgacattctcaacatttttgtaaaggatgttgcgaagtgcgttggagctcagtggcgctgcgatcatgagatttctctcggccttagatccaagcatttcaagagcttgctcaataatggagtcatgcagattcctcccgatcgtgctggcgtgttgcacatttggtatgagacttgcgaaggcatagatatcgaagaactacgtagggacaaaaatatggaaaatatctcggcctacgatgcctctaaaacaaccgtgttgggtgctttcctgcatgccgtgaattattacccgttagaggaaaactatgagtgggctgagaccgtgcaagacttttcccgcgtgccgcatttgatggggctcttccctagacagccattgatgcttacatctgactcgacgcgtggggtcgaaggcgtcacacattgggagcaagataaggccgcaaaaaacacgcgttga

SEQ ID NO: 227228 - DNA, 864 bp, Klebsiella pneumoniae
gtgacatcattcgaatatctggaaatgcaaaaatctttggtgaaagacattaactcgatacttagtaagcatggtgtcaagaatgaaattaatttatcagatattacgataactgacaaattagtttctgatcttgtaaaagatgataaggttttatcaaattcaatcgtagaatctatctggccatctgtagatagcttaacggtttatcactacacatctaaaaatgctgctgaatcaatcctgaattctggtgagttccgattatatagtttgctcaagagatttgatgagcaggaaataaaatcattttgtgaaaatcataaactcagtggatatttagaatataccaatggagacccgaagtataaaacactaataatgagcaatatgtactatgcatcttttactgatactaacctgacagtcgatcaagaacagtacttttggaatatatttgctcctattgatggtgtaaggctcaaacttaaagtgacggcatcaaatccaaatttccgtaaaatggtttatgaaaaaacaaaaggaaagccgttagatttattaagcgatctttcgcagtgtattaaaagtaaatatgataagaactttgtgttggctggaatatctagactatgtgcattttatctagcaaaagaatttgatattgaaaacgaatatcgtgccttgtacagagcgtgggatgggtttggtccagcacccaaacatgatgggaatcatgaatatatagatatccctatcggtataatgagtgacactggttatcaaattgatattgaggaaatacaatccaatgaaaacctcgctattccaagtcagtacagcgttgtgccaagaaatacataa

SEQ ID NO: 227229 - DNA, 2028 bp, Klebsiella pneumoniae
atgagtgatcagtttattagcaaaattattaagggaaaaatcaaatcaccaacacgtgctgattttaatcttgaaaaatggaatgaggagtgggctaaggttgaattaaattcttcagcgagagataaaaaagtctatacaatgggtataatcacggatagtgtgctgaaggatattagagcgaaattagcagatttgtatgggcgggcacctaaaacaaaccatgaaaaactaatgatctcttatattgcaagttccaataggacatcagctgttgctcttaaacttgcaaaaaaagcgccaactacaaatgttcatgacataatgcttaaagcaaatagactagggaataagcaaagcttaggagagatcgttcatggagctgtcgatggtttccaacttgccataagagaatgcctaagaggcatagaaaaaaatagccaaataataatttctgctgatccaatagatgagatggatttcatccaacaagaaagctggttatctcagctatataatacttacatccatctttggcaatgtattctatggagtgactataatctaatagacgttgattctgaaaataaaatattcaaaatagaacagccaaatacaccatttgaaattgcatttaataacagcagtcaacgaaaagaaagcctttctgtccaactgacacttatcgcatcacaacctaatatagctcagttctttagtagtgataaatatatttttattactcgtggaaataaaaaaagagtagcaaacgttgcatctattagtaatgcaactaaagaattaataacgaccaatgcacattggagagtggaggagaataatcttgaagactattttcccaaagaatggttaagcaacgattttggtaaagggttttgcttatcagaagtattgaatgtaatgagaatattgatgctcatcgcaaatattgagactgaaaaatatccagaagatgatagtgcatttaatgttaataaattaagggaattttgcccaaccgttcaagcaagctcattagaacgtgccttgtgtgaagcaacagaaatgagtatagttaaagttattaatattcttaattttctgacattcaactcatctccaactggagatatctggtgtcagcctttagtaaaattaaagaaaaataagtatgcattattgactagtgcattaaacgcaccggtgatgtttaggcttattgaacgttgggcatttctttttaatattgatcttgctgaaaaaggaacgacttacgaaacaagaattgtagatgaaattaacagtgctcttggaaccaatgcttttataactgactatgacaaagcggtatctaaaagaatcaagatagaatccattgaggaagagattgacttattggcaaggatagatgacttgattttgattggtgaagcaaagtctatagttacgactgattcagaaatatctaagcaccggacgtctgaagtacttcagcatgcgggagaacaggttgtaaggaaaacagagtttataaaagctaatttagaaactgtttttgaccgattaaactggagttatgatgcaaataaaaattataaattcgcaggatttataattaacagtagtcggatatttgttggatatgcttttaattcaataccagtgattgatgagaaaatacttcgagcctacttctcctcaaatgagataaatttattaaccgtgatttcacaaggtgagtttaaacctgttgcctggtacagattatatgataacattaatgaattaaaagataatttcggtaaatatataacaaccccaccacaactgcatgccaatactaagagttatgagtataatgaaataggctttccgtatttaaatagtgattcttataaaatctctaaaaaatatcttgtatttaaatcaggtgacctgcttgcacccatggagcaggaacatagtttcccagtgatcaaatcagcagattacgattcggaggttgaaactattaacgtggctctttga

SEQ ID NO: 227230 - DNA, 909 bp, Klebsiella pneumoniae
atgaaacgactccccacatgcgcagaagcaaaagcccacgctaaatacctttcacggtcgctcaatatcaatctaagctacgcccgggatgcagtggcattacgttataactgccataactggtcggaactcagcacagtatttggtcagcttagcgataagtacatgtcgtgctatggccttgccagccatgaagaaaagcgtgtttttagccagtttctggcaccgtatatcgcagaattgcaaaatgccattcatcctgaccgccatgtgccggaaagcttgatacgtaagattgctgaaggccatatttcccgggtatccggtaaagtcatgtcgactgtaatacgtgaatgcgaggattttcctcccacgacagttaaagacatcattgaactgcttgaattttatgatgatacggccagccgggtattagcaggacaccacagacagatcccgaccaataatccctggctggaaccttgggtatttggtgtgcgcttttatgcctattaccactttaatggcaagcaggtcaccatcttaagccgggagtgggatttagatattcatgatgcctacctgccacattcacgtgacagagtattttcacgcccatggtttcaagactatatgatcggctatctggcctacctcgtgaagcaatttatcggattgggttacgacggcaccgttaagatttgttgcattaataattatagcgcgctggattaccatcagaaaaaagcagcccccaacggtcgtgtggggctcaatcacttatacagagagttacttaatcgcgggggagaagaaaagtggtcgtttggtcaaaatggtcataaacatgattttggtatcgagctcccgtttaccgcattgacctcattgaagaaaggaagaaaatga

SEQ ID NO: 227231 - DNA, 807 bp, Klebsiella pneumoniae
atgaacaaagccggaaaaatagcgtattcatggctaaaggcacagagcgatagcgaaaaaattcgatttattgcacaagcgctggggagtgtcgaatatcaggcgtttataaaacaacatcagcctgaaaagcagcatgcccacaatctacctttaagttttttgaaatggcatttgcctcagaaactagtggcctcctatcacggcaaggagatcgacctaagaagtgtgccggagatggttggcgataagctggaaattcggcatacctggatgccaacaggacagtttgctccttcgcgtcatggatcttacataccgctgggaacccactttgcttgtactgctctgatgcaaccctttttgcaaaaacagcaggaaaaatgtctggagcaggcctggcaggcagcacttcccctgcttctgtcacctgacatcagtaataacaatgaattcactgctccatggctggattacgagccctatctcaatggtgaaacggatgtgtactttttactggatgaacctcaggaaagagtcaagattggaatatcaggtaatctcaggcaacgcgtggataccttgaagcaacaacataataccagcctgagtcttatctccataatacccgcagggggtattgagacagaatccgcattacatcttttctttaaaaaatacaggttagatcagaagggacttggtagagagtggttttcttacacggatgaattatgcgaatttatcaatactctgaacacctatgcaatcaggagccactgcctaagagcttacggcattatctga

SEQ ID NO: 227232 - DNA, 798 bp, Klebsiella pneumoniae
atgtcagaacgaatcactttcaatataaccaattctgagactctgcgcgttgtagatgaatacagcaaaaaacagaagatctcacgatcgcaggttatttccacattgctggatgccaccgttccggtactgaaagatattaatcgctattatcagcttgcggacgaacttaaggcccggctactgtctggtgtctaccagcaggatttgcctcgccgaagaaatgttgtagctgctgaaaagtattgtatggagatctgggagagtaagcttcaggttggaaaagggtatgactttgacagtgtcaatggcaaggtgcatgttcgcgaacataagcgacaccaccgccgggataatgcagttggcagggtcgaaaatcgacatattaaagagttctgtcagtcgctcctggaaaggtcagaacaggatgcccgctatgcttgttttatctataccgaaaggattgtttttgctgatctagaaacctctgaacactcttcatcgccagtaaaacttgcggcaggtgacgctgtaattttgctggcaaaagatgtggtttttaacgagtttttctttgatataggtaaggcgctttttatcaatgtggttgatcttatggcatacggtacaagtggtattccggagacgacaggagacccacgtgttcactgctgggtgccaatcctggttagtgggaaaaatgccgtgatagtcccagtgtacctgattgacccagcaacggcaccgacgttaagaaaaccagacaacatcacagtggtctaccagggcaaaaagtaa

SEQ ID NO: 227233 - DNA, 582 bp, Klebsiella pneumoniae
atggactttccctggccctggaaccgaaaatatacgatgaactggttcctgctgtcgttactgaaccaccatcttgatcagctactggaacgttactcccgccttcagcccctcagactcgatttgttctatcagaatgacacatggcgttataatcatcacggatggtacgagacagaaagggaggtacgccagttaacagaacatctgatgttagagagcaacatcgtgggtcacttctgggtgctggagtgtacttcccgacacaaatgccatgcccatatcgtgatgtatcttgatggtcaccataaccaggccacctttccggtagctgaacaggcggggactgcctggcagaagattacacagggtgaggggtaccacaatcgctgtgatcgtaagaaatgctacgaagccgatatcacccgccccgtcaattacgatgatgctgcagccatcgacaacctgcgctacatcatcagctatctcgctaaggagaaatcaaaacacgggcagacttactacggggccagcgaggttccacccgcgagtggactgggcagaccgcgagggcttcgataa

SEQ ID NO: 227234 - DNA, 213 bp, Klebsiella pneumoniae
atgaccattaaaccttccctgtctgaagaccaattcgtcaatatggctttcattacccatctcaccggactaaccgataaatggttctacaagctcatcaaagacggtgagtttccggcccccatcaagtttggtcgcagttctcgctggcggcagagtgaagtagaagcctggctgcaggcccgtatcgatgcatcacgctcacagcgctaa

SEQ ID NO: 227235 - DNA, 534 bp, Klebsiella pneumoniae
atgatccattcaattttactcaaccactatcagacctggctggatgattttacccgcgtcagtctgtcccatggtttatgccagcagcacataacgcaatggcaccgactggcgataaccaccagctcaacattggacggaagcgtaatagaaatcgtcattccacagcgcctgctaccgatcacccgtaccgctcgactggaatcctgtactgtcgaccccggactaactaaaaacacagactatacccttctacccggcgtgctgctcagcgagtgttaccggctggggaagagccggttggcagatcagttacaaatgttattccggcttcatgtacagcccggtatgcgacagacgctgaccctactgtgctggtgtgaacttgcaacaggaaaggatatgagggaatggtatgcgctgcatctgccgctacctgaaatgctgaggcaatggcttacgataaaacaacgggcataccggggtctgaagacgctgacggaggattacattcgtgccacccggccactatga

SEQ ID NO: 227236 - DNA, 3063 bp, Klebsiella pneumoniae
atgtttaacgaacaaaccgtcacagaaaatggaattatcgaacgtttaaaaggtttaaacggggtcaagtggacatattgccatggcgaaaacttgcctaaacaagcgcaagatatctttgttgatgagtggctaaaagacgcgctttgttcgttaaacccctacataggtagacaatctgactatgccgatgaggtcatctataaactgcggggagtgattttggaggcccgccataccggtttggtaaaagccaatgaaaatttccaggaatggttgatggccgacaaaaccttgccttttggcgaaaatggcgaccatatcaccatcaatctgattgattttgacaatatagagaacaaccactttgtggtggcacagcaggtccactatatcgcggccactgaagtctattttgatattgtcctgtatgtgaacggtataccactggtggtgggcgaagttaaaaccgcaacgcggcctagcgtgacttggcaagacggtgctgccgatttcatgggcggcaaaaagtactattggaaaaacgttgaatctttctttgtacctaacttgctgtgctttgccagtgaaggaaaaacttttgcctatggcgcaattaatgcccgagttaaagactgggggccctggcataatactgagcttcgtgatgagattctgccgggattagcatcggtactcaacagctgtgagagtttgttaaatccgcaaaccttattgcagttactggaatcttttgcattattttcaactgtcaaaacgggcaaaaatactccacctaaacgcgttaaaatcctgccgcgttatccacaatttgaagcagcaaaacaaatcgttgagcgtgttcgcagaggctatccaaagaaaggtctaatttggcatttccagggatcgggtaaatccttgctgatgctttacgccgctaaaatgctgcgtgccgacaatgcgttaaaaaacccgacggtacttatcgttgtggaccggcgagatctggacagccaaattaacgaaacttttggtggagccgacgttaagaatctgattaaagtgcaaagctgcaaaaagttgggcgaatacattgagcaagacagccgtggcattttgatcaccaccatctttaaatttaaagatatcgaaattgatgatagcaatcccaatggcctgaacaaccgtgacaacatcattgtgttggttgacgaagcccaccgtacccaggaaggtgggttaggcgagaaaatgcgctgggcgttgcccaatgcccacttctatggcctgactggcacaccgatttctggcattgatcgtaatacattcaagttgttcggtgccgaagaagatccgggtcgctatatgagccgctatagctacaagcagtcgatccgtgacggcgcgactaacccggtgaagttcgaacctcggctggccgaactccgagtggatcgtgatgctatcaacgaagagttcgagcaactggccaccgaaaacaacctggatgaagaagaaaaagcagcattgtccagacgcgctggcaagctggctattatgctgaaatctccgagacgcatggctgcggtgagtaatgatatcgttgagcattttaccagccatgttatgccgaaaaagatgaaaggcatggttgtggtatacgatcgcgaagcctgcgtgcagatgtattatttgctcggtgaaaagctcggttttgatgcggttgaagtggtcatgaacgttgaccaggctccggttaaagctgaagagggtagtaaaaaagataagctcaacaaggactggctcaaatggcatggcgaattggagctacctgttaaacaagtcgatttcgaacgctggcagcacatcgatgcggaagagcaggtacagaaggatctgattgaatgttttaaagatcctgagcatccattacagcttatcatcgttaccgccaagctgcttacgggctttgatgcgccaatttgctactgcatgtacctcgataagcctctacgcgatcatacccttcttcaggccatgtgccgaaccaaccggttgtatgaaaccgatgatgtacgcaaggacatgggattaattatcgactacctcggcgttttcgaaaatctgcgtaccgctctggcctacaaccctgaagaaattgaaggggttgtagagggaatcgaggcatttaaagagctattgccgttacaactgaataaatgtctggccttcttccctggtgtggatcgttccatagaaggttttgaaggtattatggccgcacaagaatgcctgccaactaacgagaagcgtgatgaattcgcagctagctttggagtgttatccaagttatggtcagctatcaacccagatccttttttgaccccttatcgtcaggactataaatggctggcgcaaatttatgaatcggtgcgtccggtgggacagacaggtgcgcttgtttgggctgcgcttggtcctgaaaccatcaaaatgatccatgagcatactgacatcaatcgtattcgcgatgatattgacgagttgatcatggacgagcacgctatctttaccctgacagctaaagaacaggaacaacgcgccaaacgcctggagattgatcttatggggcgtttgcgcggcagtcatgatcctaaatttgtggcattgggcgagcgcctggaaaaacttcgtcaggattatgaagctggtgttattaaggctatcgactggttgaaaggcctattggatgctgcgaaagatacagtacaagccgagcgcgaaacgggcgagcgcccagtaactgaagctgataataaacaggctttgaccaagcttttcctcgaaacacgcccagaaactacccctaagttaatcggtgatgttgtagagcaaattgataaaatcgtgaaagcgacccgctttgatggctggcaaaattccaacagtggcccgcgagaaatccaaaaggcgcttttgttgactctggctcagtttggactagggaaagataaagagttgttccggaaagcgtatgggtacattgagggacattattga

SEQ ID NO: 227237 - DNA, 1134 bp, Klebsiella pneumoniae
atgactaataagaaaatcattaaattttcggatatttgtcgggaggttaaaatcactactcaaaccccgattattgatggctatgaacgttacgtgggattagagcatctagattctggctcgcttaatatcaagcgttggggaatgatttccgaggataatccaagttttacccgtgtttttaaaaaaggacatattttatttggtaagcggcgcccgtatttaagaaaggcagcaattgcagagtttgacggaatttgctctggtgatattatcgtaatggaagcaaaaggtgagcactatctccatgccttgattccgtatatatgtcaatcagatgatttttgggaatatgcaataaaaaattcatcgggttctctttcccctagaactaagttttcttttttaaaaaattatcaattgcgccacatgtcagcctcagagcagggcagatgtttggcgaaaatacataagattgataatgttctagggaaattagacggtgtattaacatctcttcaaaatttaaaagaaaaaactcttaatcagttatttaccattgatacagttgacagaaatgaaaccgttggtacagagctatttaaaatttggggggggtatgcgccatcaaaaataaattttaatccggatggaaatgttggatatttcaaagttgatgactttaataaaaatgaaaatcacagaaacttaattattagctctgagagatttaatgttgaagagcaagctaacaatatttctattctaaatgagggtttcttaatttttcctaaaagaggcgctgctatttttaaaaacagagtcggtatacttggtaaaaaagcaactgttgactctaatttaatggcgttggagtgttttaatattgaatcaaaatatctgagggtatatttagagtggtttggtcttcataatatttcagataattcgggcattcctcaaattaacaataaacatgtttatcctttattgattcccgtatttaataaagagtatagaaatggtgtaattgagtttgatgattatgtttcatcgatttttgatttcattgccgaaaaaaagaaagagttaatttttctaatgaggcagctaacaaaaatttttaaggtttaa

SEQ ID NO: 227238 - DNA, 1494 bp, Klebsiella pneumoniae
atgagtactatgagtaataaaaagctggaagagctgctctggggagctgccgaatttcttcgtggccaaattgacgcatcagactacaagcagtatgtcttcccgttgctgttttacaaacgcctgtcagatgtctatctggaagaatataacgaagcactggaactccatgaaggtgatgcagaatacgccgccatgccgatgtttcaccgtttcaacattccctcagaggcagcttgggaaaaggtccgtaataccagtaaaaacattggtgaagctatccagaatgcgcttcgactaatcgaagccaataacccgcgtttacatggcgtcttcggtgatgcacagtggaccaataaagagcgcctgcccgatcatctgctggctgatcttatcgagcatttcagtaaaattcctcttggcattaaatctgttgcccaggatgatctcggtgaagcctacgaatacctgattaaaaagttcgctgacgattccggccacacggcggcagagttctacaccaaccgaacagtggtgcatttaatgacgcgcattatgggcttaaaacctggtgaaacggcctatgatccaacatgcggcactggcgggatgttgctaaatgcagtgatggatctccgcgcaagaggggaagagtggcgctcggtacacctctatggccaggaagtgaacctgctgacctccgctatcgcgcgtatgaatatgttcctgcacgatatcgaagaatttgatgtgctgcgtggcgacaccttggctgagccaaagtttattgaaaacgatcggcttaagcagtttgatgtaatttttgccaacccgccgtactccatcaaaaaatggaatcgtgacaagtttgccgccgatccatatggtcgtaatctttatggtgtaccaccacagggctgcgctgattatgcgttttacacccatatcattaaaagcctgaagccagatactggtcgtgccgctatgctctggccacacggtgttctgttccgcgattctgagcaagccattcgtaaacaggtgattgaatccgacatcatcgaagcggtgattggtttggggccgaacctattttacaactcgccaatggaatcttgtgtagttgtgcttaattgcaataaacctgttgagcgcaaaaacaaagtgttatttatcaacggggttgagtatgttacccgtgaacgtgcccatagccgcctgtctgcagataatttagctgtattatatgaagcttattttagccctgaaaatcaggagcacatcactgcactggtggatttcgccgttattaaagaaaatctctacaatttgtctattccattgtatgttcaagcaagtaattatactgaagagaaggatgcagaggatgcattagaaacttggaaaataaaccgtataaaattaaaaaaacaatgtaataatttatttattaacctcgcaaagttgggttatgaggtgagggaaaatgactaa

SEQ ID NO: 227239 - DNA, 1500 bp, Klebsiella pneumoniae
atgacactgattaacctaaaagatctcgaagcccatctttggcatgctgcccatattatcaccgggcctatcgatgcatcagattacaaaacgtacattttcccaatcctgttcttcaagcgcatttgtgacgtatatgacgaagaatttgccgatgcgatggagagcgttggggatgcagagcttgccaagggtaagatgtttcaccgcattcagataccagagaattgtcattggcgcgatgttttcgctgagaccaaagacatcggtcaggccttaaaagactccttccgtggtatagaactggcaaactctaaactgcatggtatttttggcgatgccagctggaccaataaagaacgcctttctgatgagttactggctacgttacttaatcacttcaataaggtgaatctcggcgttgccagtgtccgtgatgatgatatggggcgcgcatacgagtacctgatcaaacgttttgctgataaagctaacaagaaagctggtgagttctacaccccacgtactattgttcgcttgatggttaacattcttgatccaaaagctggtgagagtgtctacgatcccgcctgtggtactggtggtatgctgcttgaaactatccaccatgtaaaagaaaacggtggcgatccgcgcttgctaaaaattaaaggtcaggaaaaaaacctgactaccgaagccatcgcgcgaatgaacttgttcctgcacggtcaggaagatttcgatattgtccgcggggatacattacgggaacctaagtttttacaaagcgatcgtttagaaaccttcgattgcgttgttgccaacccaccatttagcttaaaggagtggggatacgatctgtggtcgaacgatccctatggccgtaagcaatatggtctggcgcctaaaacaaatggtgattttgcctgggtgcagcatatgtttgcctcacttaacgacaatgggcgtatggctgtcgtgttacctcatggtgttctatttcgtggcggagctgagggcgtaattcgaaccaaattgctgcaagaaaatcgcattgtggcgattattggtgtcgcttccaatctattctatgggactggtattcctgcgtgtattttggtgctgcgaaaatcacgtccgacaacacataaagatcatgtattgatcatcaatgctgaagaaatctataccaaggggcgtgcgcagaatacgctgtccaacaaacaggctgatgacatataccaaatttaccatggctttgctcaacaggggccggatgcaaaagacatcgaaggcgttgcgcgctgggtacctctgaaggagattgaagaaaatgacttcaatctaaatattgcgcgttatgtgcaaaaaaaactcgcagaagaaaccatcactgtggaagaggcgctcaaagattttcaacggaagctggctgagctggaaaaagcagaagaggagctggaagccctgcttatcaaagaagggttcgagatatga

SEQ ID NO: 227240 - DNA, 228 bp, Klebsiella pneumoniae
atgatccgctgccatcttgctcggctcatgggcgaacagaagatgcgaatagccgatgttgtcagggaaactggcctgagtcgcaacactatcactttgctttacaaagagacggctcagaaggttgacctagatacattagaaaggctttgcgtgctttttgactgtgaaatacacgatttactgcaaaaggttcctgcttcgcataatcgtacagagaaaaattaa

SEQ ID NO: 227241 - DNA, 663 bp, Klebsiella pneumoniae
atggcgctgccggtggtggtggcggtgggagatgaaaccgccgacaaactgatcgcccgcctgaagccgctggtggaagcgctgaaagtaggtccgggctgcatgcgtggccaggaagagaacgagatgggaccggtggtgtctgatacccatcagaaaaaagtgctcggctatattgataaaggcgaaagcgaaggggcaaaactggtggtcgatggccgcaaactgcgcgtgccgggttacgacgcgggctactatgtcggcggcacccttttcgatcacgtcaccccggagatgaccatctggcgcgaagagatctttggcccggtgctggggattgtgcgcgcggcggactatgacagcgcccttgagctggtcaacagccacgagtttggcaacggcagcgccgttttcaccagcaacggccacaccgcgcgtgaattcgtccacgacgtgcaggcggggatggtcggggtgaacgtgccggtcccggtgccgatggcgttccacagcttcggcggctggaagcgctcggtgtttggcgcgttgaacgtccacgggccggacggcgtgcgcttctacacgcgtatgaagaccgccaccgtacgctggccggcagggcagcagaccgtatctgaattcagcatgccgacgttaggttaa

SEQ ID NO: 227242 - DNA, 2178 bp, Klebsiella pneumoniae
atgagcacgtctaacgacccatccaacaatgcatccgccgggaagtgccctttccacgccgagacgccaaaacagagcgccggcagcggcaccgccaaccgcgactggtggccgaaccagctgcgtgtcgatctgttaaaccagcactccaatcgctccaacccgttgggtgagaattttaactacagggaagagtttaaaaagctcgattactccgcgctgaaggctgatctcagagcgctgctgaccgattcgcaagagtggtggccggcagactggggtagctatattggcttgtttattcgtatggcctggcacggcgccggcacctaccgcaccgttgacggtcgcggcggcgcaggtcgtggacagcagcgctttgccccactgaactcctggcctgacaacgtcagcctcgataaggcccgccgtctgctgtggccggtgaaacagaaatatggccagaaaatctcctgggccgacctttacatgctggcgggtaacgtcgctctggaaaacgccggcttccgcacctttggctttggcgccggtcgcgaagacgtctgggaaccggatctcgacgtcgactggggcgatgagaaagagtggctggcccaccgtcatccggaaagcctggcgaaacaggccatcggcgccaccgaaatgggtctgatttatgtcaacccggaaggtccgaacgccagcggcgagccgctgtccgccgcggcggccattcgcgccaccttcggcaatatggcgatggacgatgaagagatcgtcgcgctgatcgccggcggccatacgctgggcaaaacccacggcgccgcagaaaccagccacgtcggctccgagccggaagccgcgccgctggaagcgcagggtctgggctggcactccagctacggcagcggcgcaggcgcggacgccatcacctccggtctggaagtggtctggacgcagacgcccacccagtggagcaactactttttcgaaaacctgttcaaatacgaatgggtgcagacccgcagcccggctggcgcgatccagttcgaagccaaagacgcgccggagattatcccggatccgtttaacccggagaaaaagcgcaaaccgaccatgctggtcaccgacctgaccctgcgcttcgacccggagtttgaaaaaatctcccgccgcttcctcaacgatccgcaggcctttaacgaggcgttcgcccgggcgtggttcaagctgacccaccgtgatatggggccaaaatcccgttacctcgggccggaagtgccgaaagaagatctgatttggcaggatccgctgccggcagcgacccatcagccgagcgcggaagatatcgccagcctgaaaagcgccatcgccggcgccggcctgtcggtcagtgagctggtctcggttgcctgggcgtccgcctccaccttccgcggcggcgataaacgcggcggcgctaacggcgcgcgtctggcgctggccccgcagaaagactggccggttaacgccatcgccagccgggtgctgccgaccctgcaggcgatccagcgcgcctccggcaaagcgtcgctggccgatattatcgtgctggccggcgtggtcggcgttgagcaggcggccgctgccgccggcgtcagcgtcaatgtgccgtttaccccaggccgcgtcgacgctctgcctgagcagaccgacgtcgagtcgtttgatctgctgcagccgctggcggatggcttccgcaactatcgccgtatcgaaggcggtgtctcgacggaaaccctgctgatcgataaagcgcagcagctgacgctaaccgccccggaaatgaccgtgctggtcggtggcttgcgcgtactgggcgcgaactacgacggcagcaaacacggggtgtttaccgaccgcgtcggcgtgctcagcaatgacttcttcgtcaatctgctggatatggctaccgtctggaaagcggccgatgataacgcggagctgtttaccggcagcgaccgtaaaaccggcgaagcgaagtacagcgccacccgcgtggatctggtgtttggctccaactcggtactgcgcgccctggcggaagtgtacgcctgcgccgacgggcagcagaagctggtgcatgacttcgttgccgcctggaccaaggtgatgaacctcgaccgcttcgatctgtaa

SEQ ID NO: 227243 - DNA, 369 bp, Klebsiella pneumoniae
atgggttggcacccattcgctgaggtaagtatcaatggtcaccagctcaatgccgaggccgatccccaccagaaagcggaagaagatcaccccttccgcgctactctgcgtcgccatcagcagcgaaaaaagaccgtaccaggcgagcgccaccataaaggtcaggcggcggcccagtttgtccgccagcggcgccagcagactggcgccgataaacagccccataaaggtggcggaggcgaaggccgcctggtcggcgatgccgaagatgcccgcctgtccggtgtggaaaatgccctccgccagcaggcccgcgctgatatacccggtctggaagagatcgtagagctcaaagaagccgccaagtga

SEQ ID NO: 227244 - DNA, 333 bp, Klebsiella pneumoniae; identical to SEQ ID NO: 227077

SEQ ID NO: 227245 - DNA, 411 bp, Klebsiella pneumoniae; identical to SEQ ID NO: 110847

SEQ ID NO: 227246 - DNA, 417 bp, Klebsiella pneumoniae; identical to SEQ ID NO: 161837

SEQ ID NO: 227247 - DNA, 756 bp, Klebsiella pneumoniae
atgcgtatgcgcatgattaagtctgccgaagagattgcgctgattaaaattggtgctcaggtcgccgacctcggcggcgcggcatgcgtcgcagcgattgccgaagatgttccggagtatgacgttgccctggcagccacctcggcgatgacccgggaaatcgcgaaacgcttgccgcatattgaattgcgcgatacctggacgtggtttcagtctggcctgaataccgacggtgctcaccatccggtgacgacccgtcgcctcaagcaaggggatattttatcactgaactgttttcccatgattgccggctactataccgcgctggagcgtacactgttcctcggtcagcctagcgatgagcaattgcgtcactgggagatcaactgtgaggtgcaccgccgtgggcaggcgctcattcgccctggcgcccgttgttgcgatatcgccgcctcgctcaatgaaatttatcgcgagcatgacctgctgcagtatcggacttttggctatggtcactccttcggcgtactgagccactattatggccgcgaagccggtttagaattacgcgaggatattgaaaccgttttagcgccgggaatggtagtctcaatggaaccgatgatcatgctgccagagaacatgccgggacacggcggttatcgcgaacacgatatcctggtagtcaccgaaaatgcagcagagaacattacccatttcccttatggtcctgagcataacattatagaaaaatag

SEQ ID NO: 227248 - DNA, 747 bp, Klebsiella pneumoniae
atgaagcatgtgcacaagctggcctggataggcctgttcgtcaatattattatctgttttgtcgcgcgtaatttattactcgatgaaggacaactgaatttccatcgtggggtggacagcatgtggtcctggctggtgctggccctgtttattgccgtggtggttcaggcgatcagcataatgctgtcaggccgctacccttatctggccatcgtcctggcgtttgttggcggtatcgtgatggtgcccgccagcgtgatctttctggtgggtagtctgttcagcttgcaaacgcggattaacgccggatttacgccctggcgatcaaccacggcagtgggcgaggctgataaccagcagctattaacctttaatgcctcaggcttttatccccaaggggcgctggcgctcatcgccgggatcattattttaatgattggcatggggataggcggagtatttattgccgctggtattgttgcgctgtgcaatggctatcgtctgcaaaatcgggtggtgattggcgtgagcggcgagtcgatgatatttacgccggggctctatgccgatacctacgttattcccttgcgggatgttgccgtagttgaacgcagcaataatgatgcgaaagtccgactgctgatccgttccagcggcagaagcttcacgttgcgtaaaaaactgctcgccggcgataaggttaatgacgccttcgccgccattctggcaaaactgactaccgtttaa

SEQ ID NO: 227249 - DNA, 1380 bp, Klebsiella pneumoniae
atgacaacgcagcaagagcatcagttaaaacgcgggttaaaaaaccgccacatccagttgatcgccctcgggggggcggtcggcaccggactgtttttaggtatcgcgcaaacgatccgtatggcaggcccgtcggtcctgctggggtacgccatcgccggggttatcgctttctttatcatgcgtcagcttggcgaaatggtggtagaggagccggtggcggggtcgttcagccatttcgccaaccgttactgggggcccttcgccgggtttatgtccggctggaattactgggtgttgtacgtgctggtaagcatggcggagctgacggcggtggggatctatattcagtactggtggccggaggtacccacctggctgtcggcggcgatcttcttcgtggcgatcaacgccatcaacctgacgcacgtcaaagtgtatggcgagctggagttctggttctcgattgtcaaagtggccgccatcatcagcatgatcgcctttggctgctatctgttatttagcggtcacggcggcccggcggcgacggtggccaacctgtggcaggacgggggatttttccctaacggcatcacgggcttggtgatggccatggcggtgatcatgttctccttcggcgggcttgagctggtggggatcaccgcggcggaagccgacgaaccgcataaaaccattcccaaagccaccaaccaggtgatctaccgtattctgctgttttacgtggggtcgctggcggtcctgctgtcactctacccgtggcggaacgtcgtggaagggggaagcccctttgtgctgatctttcacgccattgacagcaatattgtggccaacgccctcaatctggtggtgctcaccgccgcgctgtcggtctacaacagctgcgtctactgcaacagccggatgctgttcggcctggctcagcagggcaacgccccgcgtgcgctgctgcgggtgaaccaccgcgggatcccattgaccgccctggcggtatccgccgtcgccacggcgctttgcgtggtgattaactatgtgatgcccgggaaagcctttgccctgctgatggccctggtggtggccgccctggtcatcaactgggcgatgatctgcatcactcatcttaagttccgccgcgccatgcagcgggcggggaaggtaacggctttccagagtttcgcctatcccctgacaaactggctgtgtctgctgtttctcgccgcgatcctcggggtgatgtatctgatcccggacatccgcatctccgtctgcctgatcccggtatggctgctgatccttgctgcaggctatctgctgcgcaggaaaagcgcgccggcgccggtggcggcgcttgaggagcgttaa

SEQ ID NO: 227250 - DNA, 615 bp, Klebsiella pneumoniae
atggataacgtcctttcccctgaaaaactgacccacacctggctggaggatgccctggcgctgctgttcggcacgctgatgatctcctttggcattatcctctttcgccaggctggcgccctgaccggcgggacggcgggcatggcctttctgatccactacgccacccacttgccgttcggcgtggttttcttcgccattaatctgcccttctactggctctccgtccggcggatgggcgccgccttcacgctgaaaaccttctgcgcggtcggactggtgtcgctgttctccgacctgcacggctactttatccatgtcgatcgcctgaacccctattacgccaccctcttcggcaacatcatggtcggcatcggctttgtggtgctgttccgccataaagcgagtctcggcggcgtcaatattctggccctctatctgcaggataaaagcggcatccgcgccggtaaattccagatggtagtggacgcctgcatcgtcaccgcctcgctgtgggtggttagcctgccgatgctgctggtctctgtcctcggcgccgtgattttgaattcgattatcgccatgaaccaccgccccggacgctatgcggtgtaa

SEQ ID NO: 227251 - DNA, 1071 bp, Klebsiella pneumoniae
gtgcgtggaactaaaacgggtgcgcttacaccaggagattctctatcaaaaattgccaaacgttataagacaagcactgatgaaattgccaaaaacaataatataaaagatgtgagtaagatcttccctggtcaacacttgacgatttatggtgctaaaactaatagccccttaatctatatcgttgtacctggtgacacgctggcgaagatcgcagaaaaaaatggtgcgaatgttgacgatattgcgcgtcagaataatatatcagaccctaataaaatatatctagggcaatcaatttctataagaaaaaatggtaacaatactgcggtcgagtccgataactcagcaattaatcctccaacctcaaaaacagtgagtaaaaaacaactgcaaaacaaagaagtaaattccaataaaaaaacgctggaatcagtcggaggaaaaaattccggtaatccgattgcgttacttcctcatgatcagcgagaggctccgtggatggcggttgcattcgaggagggagatactcgatggaaatgggggcgtgtaaaggaaggcgatggcggaataaactaccataagaagacaggcattaatatgtcatcaatggttggtgactctaatccgtggtgtgcttcttttgtaaattattgccttaaagaatctgggtattcaacatctggtagcgccagttctcaatctttctcgaaaaataaaagttttataaaagtgtctcaacctatatacggcgcaatagtcgttttgcggaaaaaaggatcttggaaagggcacgttgcttttatatactgtctttttgaggatggagaaataggtgtgcttggcggaaatcagggagatagtgtaacaataaacccgttatatcaagtttatatcaatggacggttacattatgagttgatagggttctatgtacctaattcatattattcttatgcacaaaaaataataaattcgggctcgagagaagcagcgatttctaatattgcagagttgcgtgaaagccttggagccaatctactctcgaaagaggatggaagaacaaggtga

SEQ ID NO: 227252 - DNA, 705 bp, Klebsiella pneumoniae
atggcgctgaccgtggcggctgaacgctatccgcgatacggatttgaaaagctttttcatgtgctgcgcaggcagggcaaaagctggaaccataagcgcgttcaccggatttactgcctgctgaaactgaattttcgccgtaagggaaaacagcgcctgccagtgcgcaatccggttccgctggtgacgccagaggcgatgaaccagagcaggtccatcgattttatgcacgatgcgctggtgtgcggcagacgcttccggaccttcaacgtggtggatgattttaaccgcgaagcactggcgctcgaaattgacctgaatatcccggcgcagcgggtcgtgagagtgctggacaggatcgtggcaaaccgcggatatccgctaaagatgcggatggataacggtccggaactggtctcgctgacgctggcacaatgggcagaagagcatggtgtgatgctggattttatcaggcccggcaagccaacgcagaatgcctttatcgaacggttcaaccggacatacagaacagaaatactggatttttatctgttcagaacactgaataaagcacgggaaattacagagcgctggctggctgaatataacggcgagcgcccccacgaatccctgaataacctgacgccggaagaataccggctgatggctgaaaccccggaaatctcaaaaagtgcgtggaactaa

SEQ ID NO: 227253 - DNA, 192 bp, Klebsiella pneumoniae
atgtgtgccgcgaagccggggatttctgaggcctcgtactacaactggaaagcgaagttcggcggtatggaagcctctgatatcaaaaagatgaaggacctcgaagatgaaaaccgccggttgaaacagatgtttgcggacctgagcctcgagtgccgcgcattgaaagacgttattgaaaaaaagctttaa

SEQ ID NO: 227254 - DNA, 1923 bp, Klebsiella pneumoniae
atgagatttataaaagcgacataccatcttgaaaccaagacggttgagtacgaagctggtgatgggactcgtttgctaaaaactgcagggacattaaactggagatttaacaaccccggaaatattatggcattgcctgatgcaagtaagcaaaaagggcgaataggtgccggcactgtatataatccgaaagaaaatacatttgcgattttttccagtattgaagctggggagcgtgagaaatgtgcattattgaggcgaaaataccgaaatgacaccatatctgagatgatgtcgcagtatgctcctgaaaccgcaggtaatgatcccgtagcttatgctaactttataagttcagagagtggcgttgcaaaagataaaaaaatatctgacttgaatgataaagaattcggcaaagttgtggatgcgatcagtaaaaaagaaggtggcctgaaggctggtactgaaaaatgggtatatgtgacaaacttgacggtttcagacggctctcgcccaattgctaatgtgccatttaaggtaacactaggaagtactagctacgagtggaaaacagacgtttacggcaagctaaagacaattattcataccaaacaaggaatggttattgtcgtcaaatatactaattctgctggaaaagaggatgttgtttattcagctgttgctggggatgaaacgaagaatatactgctcacgcgaaacttttctcaattctctgcaaaaacacttgccgagactcccaaagtgccacgtgagaagagcgctctgaaaccgatagattatatagtcatgccaggagattctctatcaaaaattgccaaacgttataagacaagcactgatgaaattgccaaaaacaataatataaaagatgtgagtaagatcttccctggtcaacacttgacgatttatggtgccaaaactaatagccccttaatctatatcgttgtacctggtgacacgctggcgaagatcgcagcacaatatggcgtaactgttgatgaactcgctcgttggaacaatatcgtagatctaaacaaaatctatccaggtcagtcgatattgatttcaaatgatgcaaactgctcaaaaggtagcagccctgtcttagtctctgacaaacaggcacccaaacctcagcccccagttagtagaacttcacccaatgtgcaatcggtcaatttagataaaaaaacactggaatcagtaggttctaaaaaatcggataaaccgatagccttgcttccccatgatcagagagaggcaccatggatggcgattgcaatccgcgaggttacggaatggcatggaacaggagagaagaaaatcactgataattatcataatcttacgggttctaaagggtcattgggtagtacggcatggtgtgcttcgtttgcaaattattgcttgaaagaaacagggtatgactactccaggagttttacaaagtcttctcaatttccagtttatgataaaactaagtttatcgagataaaaaatcctgtatatggtgcattgatggtctttcgtacttatgtcgaatcaagtgatgaatttacaggcaatggacatgtaacatttgtgtatggaaaaacgagtaacggtgatattgctggcttaggcggaaatcaaggaggtaaagcatatggtggaggtactattaagttatcgatgtatagtaccacgaaaccaacatctagattcagcatgactgttagaaaaaaaaaggaaactcctgtgtatcaaaaattttataaatattatatacctgtcgcgtataaagaatattattcaaaaaattcagcggaattacctatagttgatgttgacgatgtaaacaataatttattcgggtttgatagcaaaactaaatctgtgaaagatgaaggtggcggtcgatga

SEQ ID NO: 227255 - DNA, 411 bp, Klebsiella pneumoniae
gtgttaagtatgcttatgaaacttatgttgagtctggttatcttattttatagcttcggtgtatatgctgcatgcctgaaagagggggataagattgtactcacaggagtaatgaaagaagaaatattttacggccccccaaattggggggaagatagggcgcatgacgaaaaattactctactggatcctgcatataaatagtccgctaaagtgcgtggttgatgctaatactgagcaaaaaggttggaacagcaatattcagctcattgttagtggtgatgattataaaactaaacgcaatctacttaatcaccatgtcactgtagatggaaaaattatgcttgctgtcacaggctatcatatgacttccgtcttattaaacgacaccagctttcagccaacagaataa

SEQ ID NO: 227256 - DNA, 174 bp, Klebsiella pneumoniae
atgccaacgacgctgttggcaatgctgcaggataaatatcccggtcagtcccccaacagtctccgctggataatgcaacggcggggccgcgaacggacgttgcagtacggtgcagagcaggagtttatgttccgccagcggcatcagggcctgtgtggcctgggtcggaaatga

SEQ ID NO: 227257 - DNA, 441 bp, Klebsiella pneumoniae
atgggatggtctctgccggaagtgcctgaaaaagatcaggcaccatcctggtcaccgtggatctgtctgttgattattattctcggacttttcactgggctgcttattgcggtgctgaaatcactaacgacagggttactttcattgagcagtggggcttggttaccactgacgatcaagacctttgcgggaatttcggcagccatcgcggtctatactttcagccaggaaatgctagcaattcgtgtctggaactggaatgagtggtgcaggaacatgcgcctgaagtggcgtttacgtgcacaacagcatcttgtcattctcagccatgttttcatcactgccgatacgggattgttaggtcggcttgcaaatacgcaggaagggggagagacctggaacgcgacggcacggaatttctccctgaaggacgcgggctga

SEQ ID NO: 227258 - DNA, 483 bp, Klebsiella pneumoniae
atgaacagtgattctgaacccatccgggaacttgaatgtaaatttgatgataattggcatccgtcctggtactcatttccatctcataaaaattgccagatcaaaggcgattgtgatttaccaccacattttcctggtattattatacttgtacacgctgtaaactcgacaggagagtggttttcaattgcggagaataaactttgcgaaggcctgaataagaggcttggattaaacggggcagattataaactggaggccaaaaaatatctttctgacgataaaataaattctgaacctctagtgttccgagatttacctgaagttgataaaataagtctccagttattcgtttttactgggggtattcctcacctaaataaaggattaacaaatggggaagtttgtcgtcgttttaggggacgtgacttcgcacggtggcaaagtcacatcagcctcatccagcttcgatatattcggtaa

SEQ ID NO: 227259 - DNA, 1050 bp, Klebsiella pneumoniae
atgagatggaatcagtcagacagaaaagtgcttacaattatagccattgtcggtgtgctcctctatgtcatttataaaggcatgcagttcctggcaggggccagtatgggggccagttttggagtgggcctgggaggaatgagtggttctcaaaaggttgaagtgtcgcggaaagttgaaacggatgctccgccacaaattatttatcgcatagataaaaatcgatacttgacgctggaaaactacatatcctgtgataagggtggacaggtatattacaatgactctcagcggggaataaaaacacacctgggatgggatatcgaattttatgatttttcctatcgccggggaaataatttagtagcttataaaggctctgttattaatggggcagataatggttatctggcactccccggcgcatctaccagacaatattgtggtagtggaaggtcagagcgaggttgtcctttgtttttcttcttttcagcagatcatggaaaaacctttatctataaaattatagctgaggagtatagtacccctgaacggttcagtaagcttaaagtggtagtggctaatgatggggtttatttaaaagatgagtctcaaacagagagtgtattttctcaccctataggtcttcgcgatcttcattcagtgaataaattaatattttcagacggaaaattaatcagtgtttatgatgattggcagaaaaaagttcatgagttagtgagaaaagaactgataagaaaaaaaatgccttatgcaaatgattatggacccacatttcatatattcgactatatcagaaaattaacacctcctaaaactcatgaggagagaaatttgatggcaaatgaattgtcagatattcgaatcaggattgaggatgaggtttatagtcacaggattgattttccgaaactttcaacgaaaagtatcgatgctaaatatctatgtaataaaagcattgaagctaaaatcatcacatataccaatgagtcaaatgggaaaaaggaggtggtaaaaaatgaacagtga

SEQ ID NO: 227260 - DNA, 606 bp, Klebsiella pneumoniae
atggtactagtgagcggcgaagatatgcagctatcagccagtgataatatgacgctgacggcgggtaaacagctagatgtcggtgtgcagaaggactttacgctggcggccggtaaacaactcagcctgtacagccgtgaaggggcaaaaccgttcagctcgcaaaacgatattgatattcaggctcagggtgaaaatatcaccacttggtcgacacaggacacgcatatttcgagtggcaagaaactggtcgttacggcacaggatgaactgacgctggtctgtggaggctgctatatcaaaatcaaaggcgggaatgttgagattggtggaccgggtaaactgctgtttaagaatacgggcatcaggaaagcgggcactggcaatatgcagggggggatgaagtcgtttgagccttcaacatttgatgagaaatttataatcagaaatgcgctaacaaaagaacccatgcctggcagggcatacaaaatcactatgccagatggttctgttatttccggtgtgacagatgattctggagcgacgtcactcaattcatctgatgttatcgacaatatgattatcagcttggttaaggcgaattaa

SEQ ID NO: 227261 - DNA, 492 bp, Klebsiella pneumoniae
atggctgttacgttccagaacgaagtgcccaaagcgcgtattaatctcaaattatcacttcataccggcggagcgcaaaagaaggttgaactaccactaaagctgcttaccatcggcgattttagtcatgggaaggagaaccggcctttatcggaaagagaaaaaatccaagtcaataaaaatacttttaacagcgtactttcggaatttagcccggaagtaaacctctcggtgccgaatacgctggccggcaatggtgaagaggagaacgtcagactgcgttttaccgatatcaaagattttgaaccggagcagattgcccggcaatttccgcagctccgcgccatgctggcgacgcgtaacttattacgtgatctcaaatccaatctgctcgataacgccactttcagaaaagagctcgagacaatcctgaaagatccggcgctgtcccaggaattacgcggcgaaatgagtgcgcttgctccgaaataa

SEQ ID NO: 227262 - DNA, 195 bp, Klebsiella pneumoniae
atgacaacctcaacgccccctgcgccgtactttaccctgcaaattaacggtctggactatctccgccgcatccgcgacgtgcaccctaaaaaaggcgacagcttccttgcgtgcgccatcgcggcactgaacggtcctaccaccaaaccggaatatcgctattttgatattcgggtttcaggcgatgaggcgtaa

SEQ ID NO: 227263 - DNA, 180 bp, Klebsiella pneumoniae
atgaagaatgacgctctgtgtttactgtatgttttcgccctgtttattagccactgcgctctacgccagaaaccgttgcctgtttccgccaataccggtgtagccccctttacgccgcaatttaccgagcgccagcagcgctacactctagtagaactcaaaccgaaaccggccggatga

SEQ ID NO: 227264 - DNA, 258 bp, Klebsiella pneumoniae
atgagcctgctgctacagcccgtcgaaattaaccttcccgatacggttggcgccgcaatgcgccagacgggctttagtctgtgtaccgccgccgaacgttcatcgctctatatgcttccgctgcccgccccccaccgacacagcaggcgaataccgctgcgcgacgccctacagaaggagaaactggcgcggcaagacgcgccagctctgggtttatacgtggttaccttgcgttatcaggcaaccagtaccggttag

SEQ ID NO: 227265 - DNA, 1113 bp, Klebsiella pneumoniae
atggttaggaaaagtagaagtaaaaatacaaatatagaactaactcaacatgaccatttattaataagtcaaataaaaaagcttaaaacacaaaccacttgcttttttaataataaaggaggggttgggaagactacattagtagcaaatttaggagcagagctatcaataaactttagtgcaaaagtacttattgtggatgccgaccctcaatgtaatctcacgcagtatgtattaagtgatgaagaaactcaggaattatatgggcaagaaaatccagatagtatttatacagtaataagaccactatcctttggtaaaggatatgaaagtgacctgcctataaggcatgtagagaatttcggttttgacataattgtcggtgaccctagactcgctttacaggaagaccttttagctggagactggcgagatgccaaaggcggagggatgcgaggaattaggacaacttttgtatttgcagagttaattaagaaagctcgtgagctaaattatgattttgttttctttgacatgggaccatcattaggcgcaatcaacagggcagtattactggcaatggaattttttgtcgtcccaatgtcaatcgatgtattttcactatgggctattaaaaatattggctccacggtttcaatatggaaaaaagaattagacacagggattcggctctcagaggaacctagcgaattatcacaattatcacctcaaggaaaactaaagtttctcggttacgtcacccaacaacataaagaacgctctggatacgatacaattcagcttgagaatactgaagaagaaataaaatcgaagcgtcgggtaaaggcgtatgaagacattggagaggtgtttccttctaaaattactgaacatctttctaaactttatgcatcaaaagatatgaacccacaccttggagatatacgtcatttaggtagtttagctccgaaatcacaatcacaacacgttccgatgatatcagtgtctggtacaggaaattacaccagacttagaaaaagcgcgcgtgaactttatcgagatattgcaagaagatacttagagaacattcagactgctaatggcgagaaatag

SEQ ID NO: 227266 - DNA, 897 bp, Klebsiella pneumoniae
atgactatatataatgaggatttaataaacgatcttgcacagcaaaaagtagttttatttttaggggcaggggtgtcttcaagcgttaaccttgatgccgataatagatttaaaggttggccaacatttttagaagatgcatctaaagatagagagccatctttaaagaaacaaatcaaaaaattactgtcctccaaagattatcttcttgcatgtgaattattacaagcagattatggagagtcgtgggaacgtaaaataacagaagagtatggtcgcgcagctcaaccctcaagtcttcatagggccttgatatcactaggccaaagaataatacttaccactaactttgataagctaatagaaagtgcatggacttcttcattagcagatggtgatcgccattttaaagttatttctaaagtagacaatgatatttttaaagttttaaaagagcatgatacttcttatataataaaaatacacggttcaatagatgatgtaagcaatattgtattctctcgttcgcaatacattagacttgcttttggtaacgagaattactcactattccttgattcattattactaaactacacattcctttttgtaggtttttcaatggatgatcctgcaatcacctcattaatggaattatacgcttatcgctatcctagatcacggccacattatattattaccagcagtaacatacctcaaaacataagagagatacataggagattaagaaaattaatcgtaataccttacaacgcaagaaataaccatgcagaattaccagaattgatagaagagatggcggaaaaagtagagataaaaatgcgaactaatatagcctcaatgttggcaaaaacaacagcatccgaaaacacttga

SEQ ID NO: 227267 - DNA, 207 bp, Klebsiella pneumoniae
atgcctattgtcaaggatgtctgccgcgaggccgggatctctgaggcctcgtataacaactggagagagaagtttggcggtatggaagcctgtgatatcaaaaagatgaaagactttgaggatgaaaaccgccggctgaaacagatgtttgcggagctgagtctcgagtgccgtgcactgaaagacattattgaaaaaaagctttaa

SEQ ID NO: 227268 - DNA, 639 bp, Klebsiella pneumoniae
gtgctgcgcaggcagggcaatagctggaaccataaaagagttcaccgcatttactgcctgctgaaactgaattttcgtcgtaagggaaaacagcgcctgccggtacgtaagccggctccgctggcgacgccagaggcgatgaaccagagctggtccatcgattttatgcacgatgcgctggtatgcggcagacgcttctggaccttcaacgtggtggatgattttaaccgcgaagcactggcgatcgaaattgacctgaatatcccggctcagcgggtgatcagggtgctggacaggatcgtggcaaaccggggttatccgctgaaattgcggatggatgacgggcctgaactggtctcgctgacgctggcgcagtgggctgaagagcatggtgtgatactggaatttatcaaaccagggaaaccaacgcagaatgcctttattgaacgttttaaccggacgtaccggacagaaatactggatttttatctgttcaggaccctgaatgaagcacgggaaatcacggagagctcgctggctgaatattacagcgaacggccccatgaatccctgaataacctgacaccggaagagtaccggctgatggccgaaaagccgaaactctcaaaaagtgcgtag

SEQ ID NO: 227269 - DNA, 1050 bp, Klebsiella pneumoniae
ttgagactttatgatgtaattactgactgcatccagcttaaattaagtggagctgcaacagataatgttattcaatgcttcggtggcaatatactgacaaaagaaaagccagttttggcaatcgaagtttcgagcaaagaaatattgctttggatgatgcaaggagcaacgaatgtacatgtttatatcagcgcaggtacttttcatgtaaatgcattgtatgcaccaactgtccgctttccagcagccagaatttattttatgaaatcaaaagaccttttctggtttggccatattggtgtttatctcgtacaacacggaatcaaacttactccagtagatgatgccagcttctcaaagctcattgatgatacggggtatgtacaacgttataagtcgtggtgcgaaaaaaggaaagctgactcgagattattcgatggtctactaggagggcggtttaagaatactgctgtagatcaagctatatggctatcctccgatggaaagtgcttggtttgcggtgaaaaagccgatcgcatggcgaccagtactgtttggggaaagtcagggatgatgattggtatgcagttgtgtttgacacatgaagaggaatctcagaagcaatcaattcttctcaactatctctcgaatcatttgggtggaatagttatgttctcaaatatgcgtccactgactactgaggaaatgcttgagcagacctgcgaaatacttaaagtaaatttcaaatgcactatcatgaaagtcgtaggggaaactgtaaccgcccgaagacagtcagggatcaccgtagtaatcagacaccaatctccgtcgaattatgcccatataataataacccctgaaggaaaacagttgtctagggtcgattcagccgatcatcacaaaataccttacggccctgatcatgtacattctgatctgcgtaaatctacaaaaaatatcgtcgagacaagctttacatacggacatattggtctagatatgaaactacttttaaagctgatccaagaggctgaagataaattataa

SEQ ID NO: 227270 - DNA, 1284 bp, Klebsiella pneumoniae
atgacgctcccctcctcttgcgcgccgctcaccggtatcagccgcgcccgactcccggcctgggcgctgcccgacggctggccgacgcgggccaacggtgagccgctgctggcggacctggcctttcgcgacggccggattgccgcattgaccccaaccgaccagccgactcccggcctgtgggacctggcgggagccctgacgctccccggcctggtggaaccccatgcccatctggacaagacattcaccattaaacgctgccgtccgacgcaggccggactgctggcggcgatccacgccatgcacgaggatcgccgacactggaccagggcagatattcaacgtcgggcgtccgccgcgctggcccgggcggcagcgaatggcgtgacccatttgcgcagccatgtcgactggtttaccgccgacgcgccggacgcctggcaggagatcgcccgcctcgataccggcggcatcaccctggagcgggtggcgctggtcccgctgcccctgtttcaggatccggtggaagccgaggccattgcccgcgcggtcgccaacagcggagagcgctgcctgctgggcggcttcatccactcctccaactgggacgccgccgccatggaaaatctgctgtgcagcgcggcccgctgggatctggatctggatttgcatattgatgaggagctcagcgaagtgtctcaggggctgacctggctggcggatcatctctcccgccacccttttcccggacatatctgctgcagccacggctgcgcgctggccgccggcagcgacgaacaggcggcgccgatcctgcgccagctggcggcgcacggcgtcacccttatcgctctgccgatgaccaacctgctgctgcaggatgcgacgttcggccgcacgccgcgccagcgagggatcaccctgctgcacgaggcgcaggccgccggcgtggccaccctgctcggctgcgacaacgtgcaggatgccttctgcccggcggggagctatgacccgctggacaccctggcctgcggtctgttcagcgctcagctcagcgacctgttcgaccagcagtcgcggctgatctgcgatcgcgcggcgctaaccggttcgccggcagacgcggcgccctttgccgtcggggcgacggccagcgtggtgattttcccgggtagtgaccgttttatctggcctttaaacagcgccgcccgtctggtggttaaccacggcaggttaacccaccggcgcgtgtggcaggaggagatggcacatgagtcttga

SEQ ID NO: 227271 - DNA, 252 bp, Klebsiella pneumoniae
atgcaaaaaacgctctcgacgctcaaagacaaaatcaataatgccttagttgtcgaccgtgaaaatcatatttaccgttgccaccgctctatatttaccgaccagcagttatttgattttgaaatgaaacatatcttcgaaggaaattgggtttttcttgcccatgaaagccagattgccgagccgggagattattataccctgacgctgggacggcagccggttattattactcgcgataaaaagaattag

SEQ ID NO: 227272 - DNA, 486 bp, Klebsiella pneumoniae
atgcttaacctcgaacaggttcgccagtttctctactacgaagcccgtctgctggacgatcgtcagtgggacgaatggctcagctgctacagcccgcaggtggtctactggatgccggcgtggggcgacgatgaccagctgacccgcgacccgcaaaaagagatttcgcttatctactaccccaaccgcgaagggctggaggatcgcgtctaccgcattaaaaccgagcgctccggggccagcacgccagagccgcggaccacccatatcatcagcaacgttgagctgctgggcgaaagcgacgagggtctggaggtgcgctacaactgggtcacctggagccatcgctatcagcacacggatgcctattttggctctacctgctgcacgctaatcgaacaggacggcagaccgcagatcgtccgcaaaaccgtgcgcctgaataacgattatatccgtcaggtgattgacgtttaccacatttaa

SEQ ID NO: 227273 - DNA, 879 bp, Klebsiella pneumoniae
atggagaaaaagagagccacgaccatcggcttcgccgccattatcttatggagcacgatggtcggattgattcgcggcgtcagcgaaggactgggagcggtcggcggcgcggcgatgatttacagccttagcggcctgctgctgatctttaccatcggctttcccaacctgcgccagatcccgcgtcgctatctgctggccggcagcgtgctgtttgtcagctatgaaatctgcctcgcgctgtcgctgggctatgccgccagccgccagcaggccattgaggtggggatggtcaattacctgtggcccagcctgacgattttattcgccattctctttaatggccagaaaagcagctggctggtgatccccggcctgattctcgccctgctgggcgttggctgggtgttgggcggtgagcatgggctacagcccgatgagattatcagtaacgtcatttccagcccgcttagctatctgctggcctttgtcggggcgttcatctgggctgcctactgcacggtgacggccaaatatgcccgcggtaaaaacgccattacgctgttcgtcctgttaaccgccctgacgctatggctgaaatttctcgccagcgaccagccgccgatgctgtttagctggccggtggtcattaagctgatgacggtctccgtggcgctggggctggcctacgcggcgtggaacgttggcatcctgcacggcaacgtcagcctgctggcggcggcctcctacttcacgccggtgctctcctctgcgctggcggcgatcctgctgagtgcgaccctgtcgtggtccttctggcagggggccgggatggtatgtctcggctccctgctctgctggtacgccacccgccgttag

SEQ ID NO: 227274 - DNA, 1353 bp, Klebsiella pneumoniae
atgctgcctgcgctgctgatattaaccccgctgctattttctccggccgccgcggaggaattttccgccagttttaaaggcaccgatatccaggaatttatcaataccgtcagcaaaaacctgaataaaacggtgattatcgatcccagcgtacgcggtactatcaccgtgcgcagttacgatatgctcaatgaagaacaatattatcaattcttcctcagcgtgctggatgtatatggcttcgccgtgatcaatatgaataacggcgtgctaaaagtggtccgcgccaaagacgccaagacctcggccgtgccggtcgccagcgcggccgcgccgggcgaaggcgatgaagtggtcacccgggtggtgcccctgaccaacgtcgccgcccgcgatctcgccccgctgctccgccagctgaacgataacgctggcgccggcagcgtggtccattatgagccctccaacgtactgctgatgaccggccgcgcggcggttatcaaacgcctgctgaccattgtcgagcgcgtcgacaacgccggggatcgcagcgtggtgaccgtgcccctttcctgggcctccgccgcggaagtagtcaaactggttaccgagcttaataaagataccagcaagtcggcgctgccgggctcgatggtggcgaacgtggtggccgatgagcgcaccaacgcggtactggtgagcggcgaaccaaactcgcgccagcgcattatcgccatgatcaaacagctcgaccgccagcaggcggtacagggtaacaccaaagtgatctacctgaagtacgccaaagccgccgatctggtggaagttctgaccgggatcagcagctcgctgcagagcgacaagcaaagcgccaggccagtggccgcgatcgacaaaaatattattatcaaagcccacggccagaccaacgccctgatcgtcaccgcggcgccagacgtgatgaacgatcttgagcgggtgatcgcccagctcgatatccgccgcccgcaggtgctggtggaggcgattattgccgaagtgcaggatgccgatggccttaatctcggtatccagtgggcaaacaaaaacgccggcatgacgcagttcaccaatagcggtttgccgatatcgacggctatcgccggcgccaaccagtacaacaaagacggtaccatcagcagctcgctggccagcgccctcggctcgtttaatggtatcgccgccggcttctatcaggggaactgggcgatgctgctcaccgccctctccagcagtaccaagaacgatattctggccacccccagcatcgtcaccctcgataacatgcaagccacttttaacgtcggccagtaa

SEQ ID NO: 227275 - DNA, 1035 bp, Klebsiella pneumoniae
atgcgaaatgtagccactactctcctggccgttgcttcaatcctagcagtatgccaatcatccgtatcagcacggatgacatgttctatcaatgtcgacatgaaatacgtcaagcctccaatttcaagaattaaagatgatacaggcaatcttcgtcctccatcaccgatgcagcaggttcatacggaaagcatgttagctgggcaagatatttatattcaaagcattaaatcggaaaaagatctgcgcctaatgttagtaagtgcgatcgcatggaaaaatggattgggaaatgagtggtttgaagcatcgaaagaatatcttctagcttggattaacacttatgagccggaatatcaccccataaatgaaactgtttttgatcaattaattcaaacgtacgtaattattaagtcaaatctatcaccccaagagcgcagcgatataaacaaatatttatatagttgggcaaatggatacataactcgaatgaataatgcaccaaaaggaatatcttggtatagtaactggcaaagccacagaattaaactcattacattaatagctgttgcaacagataatgatcacctttttaacgaatcaagaagattatttaaaaagcaaattgaagaaaacatgaatagtgagggggaggttgttgacttcaaacaacgagatgctattcattatgttgtatacgacctccagccgctactacaggctgcacttgccgcaatgtcacgcggtgaagattggtaccattggactgctccaaataatgcgtcacttgaaaaaggaataaactggctgaccccctatgtcacaggagaaaaaacgcataatgaatttataaattcaaaaataaaacttgacgccataagaaagcagcgcggtctaaaaaatttcaatggtatatttcggcctgaggaagctaaatcagtttactggttagcatctgcattcaatgcatcatatgagccactagccttgaagctcttggctaaacctcctttgattatggattggtgcaattaa

SEQ ID NO: 227276 - DNA, 2154 bp, Klebsiella pneumoniae
atgactgataaacttaattcaatgtctacaggaagccaagaaagtgacgggatcgatctaggtcgtttaattggtgaagttattgatcataaaggattgataatttctgtaactttcttttttatggggctaggttttttatatgcatttttagctccacccgtatatgaagcagattcattagtgcaggttgaacaaaatgcaggaaataattttttatcgagcctttctgacgttcttccaacaacaccgcctcaatcagcagctgaaattgaactaattaaatctaggatggtgcttggtaaaactatcaatgatttaaatctgagcgtagtaattgaagagaaaactacgcctattataggtcagtttttaaagaaaatacgtggtgatgacggcagtaaaataaatgtaaaatattttaatgtccctcatgatgcgttagacacgaagtttacaatcaaaataactggtaaagacagctataccattaatcttgatgatgccggcgaattgaaaggtcaagttaatgagcccgtatcgaaaaatggattcgaaatattgctgacgcaaattgagtctccgccaggtactgaatttagtataaaacgcaaagatactcttcaagtactcagtgatcttaatgacgcattcactgtcgcagatactggaaaagatacaggtgtattgtcgctatcattaacaggaaatgatcctgaaaaaataaagacgatacttcaaagtattactgataattatttgttacagaatattgagagaaaatcggaagaggcagcaaaaagtttaaactttttggatcgaaaaatccctgatgtaaaaaatgagcttaatgctgcagaaaataagctaaattattacagacagcaaaatagttctgttgatttaactatggaggcaaaatctcttctggatacaatggttcaattagatgcgcagattaatcaactaacattttctgaggccgaagtatccaaactatatacaaaagagcatccaacatatagagctcttttagaaaaaagaaaaactctggaagaagaaaaaaataatcttaagaaaaagattaataatcttccagaaacacaacaagaagtattacgtttaactcgtgatgtccaggttgggcaagatgtctatttacaactattaaacaaagaacaagaattgagcattactaaagcaagtacagtgggtaatgttcgaataattgataatgccgtaacacagcccgatccaatcaaacctaaaaagctgcttgtaatagtcgttctaacggtgtttggaacaatgctgtccttgatgtatgtcatagttaaggttgcgttccataaaggtgttcaaagtgccgaacaacttgaagaaaatggtttgaatgtgtacgcgagtatccctttatctgactggcagttgaaaaatgtaaacaacagcaggaaaaaggataagaaaaaatttgatgtattaattaaggagaatggtgcagatttagctattgaagctattagagggttacggacgcgtttatatttcgcaatgttagaagcgaaaaataatattttaatgatatcaggtccaagtcctgaaataggcaaaaccttcgtcagtactaaccttgcaggggtagttgctcaggcaggacaaaaagttttattaattgatgcagatatgcgacgaggatatatgcatcactactttggcggtttgcccaacaatggcttgtcagagatactcacaggtagggtagattacgagaaggctgttgttcatactgatatagctggcttagattacattggtcgtggtgaaataccaccaaatccagcggagctattaatggggagtcgcattgaaaagttccttgagtgggcaagtggaaagtatgatcttgtattagtagacactccgccaattttagcagtgaccgatgctgcaataattggtcgccatgtaggaaccacattattagttgctcgctttgaaaaaaacactgtcaaagaaatcgatgttgctaaaaatagattggaacatagcggtgttatagttaaaggcgtaatattaaatgctgtgaccagaaaagctagtaataaatatggtgaatatgcgtattatgaatacgagtataaatcgaaagaatag

SEQ ID NO: 227277 - DNA, 675 bp, Klebsiella pneumoniae
atgtgcggacgttttgcgcaagcgcaaagccgggaagaatacctggcgcatctcgtggaagcggccgaacgagatattgcctgggactcggcgcctatcgggcgctataacgtcgcgcccgggacaaaagttttactcctcaatgaacgcgatgagcaactccatctcgatgccgtttactggggctatgcgccaggatggtgggataaaccgccgctgattaatgcccgggttgagactgcagcctccagcaggatgttcaagccgctgtgggagcacggacgggcgatctgcttcgccgacggctggtttgagtggaaaaaggaaggaaataaaaagcagccatactttatccagcgtaaggatgaccagccaatttttatggccgcgattggtcggactccgttcgaacgtggggaccatgccgaaggattcttgatcgtgacggccgccgccgatcgcggtcttgtcgatattcatgaccgtcggccgttggtcctgacgcctgaagccgcccgcgaatggatgaggcaggatgtcaccggcgcggaagcggcggagattgccagcgacggagccgtttccgccgacgattttacctggcacccggtaacgcgggcggtcggcaatgtgaaaaatcaggggcccgaattacttgcccctctcagcccatga

SEQ ID NO: 227278 - DNA, 795 bp, Klebsiella pneumoniae
atgaagattgatttagcgggaaaagtcgcgctggtcaccgcctccacggcgggtattggcttcgccatcgccaaaggcctggcggagagcggcgcagaggtcatccttaacgggcgcagcgagcagagcgtgaacgccgcgatcgcccggctgcaaaatgaggtgccgggcgcgaaggcgcgccccgccatcgccgacctcagcgacgccgacggcgcagcgcagctgctgcgggccgtgaccggcgtcgatattctggtcaataacgccgggatctatggcccgcaggatttctacgccaccgacgacgcgacctgggacaactactggcagaccaacgtcatgtccggcgtgcgcctgtcgcgagggctgctcccggcgatggtcaacaaaggctgggggcgggtggtgtttatctcctcggaatcggcgcgcaatatcccggcggacatgatccactatggcgtcaccaagaccgcgcagctgtcgctggcccgcggcctggcgaaatatgtcgcaggcagcggagtgaccgttaacagcgttctgccagggccaacgatttccgacggctttgccgaaatgctgaaagacgacgtggcgaaaaccggtcagtcgctggaggaactggcgaaagcgtttgtcatgacccatcgtccgagctcggtgatccagcgggcggcctcggtggcagaggtcgccaatatggtggtctacgtctgctcgccgcaggcgtcagccacctccggcgccgcgctgcgcgtcgatggcggcgtggtggatgatattctctga

SEQ ID NO: 227279 - DNA, 624 bp, Klebsiella pneumoniae
atgaatattctctcggcagagtttttcaaatatgcgatagcgattatcacgttgattattcagattgtcgccgtgcgttcaggttgggtatttcccaaagataaaatattcacctcgcgcaaaaatatcagtgaattcgccgccgcactgcacaaaaatagtgacgaccccgatctgcaacggatcgcatacgaatatggtatcgccgcgctgaccaaagataaaaacctgaccatggcgcaaagaaagatattgttgaaatgcaaaaatccggtcagcgatattgataactacagtaaatgccagcatctgatttcggtcaatgatgagaaaagcatattcaaatggaaaaaatggggttaccgcttctggttataccgtaaggctgtcgaagtcgttagtctggtgctctattttattggcggcttcttaacggcgctgcctttcctgtatgaaggcctcgccagcccggcggtgattgacagaattaatcatttatcgcgtctgcaaaaattgagtatggcgagttatctgtttgcctgcgggatttgtctggcgctgatctgcctgcacaaactctccaccatcgcgattgcggaaaaaaccattaaagcgaatcgctaa

SEQ ID NO: 227280 - DNA, 933 bp, Klebsiella pneumoniae
atgtcgcagactaatccgtttaccgccctgcttgccgcccagcctttcgtgctgctggacggcgccatggccaccgagctggaggcccgcggctgcgatctggccgacagcctgtggtcggcgaaagtgctgctggagaacccgcagctgatccgcgatgtgcatctcgactactttcgcgccggggcgcaggtggcgatcaccgccagctatcaggccactccggcgggctttgccgcgcgcgggctggatgaggcgcagtcccgggcgctaatcggcaaaagcgtcgagctggcgcgcaaagcgcgcgaggcgtacctcgccgagaacccgcaggccggtacgctgctggtggccggttcggtggggccgtatggcgcgtttctcgccgacggctcggagtatcgcggcgattatcagcgcagcgcggcagagttccaggccttccaccgcccgcgcgtcgaagcgctgctggatgccggcgccgacctgctggcctgtgaaaccctgccgtcattcgctgagatccaggccctggcggccctgctgcaggagtatccccgcgcccgcgcctggtactccttcacgctgcgcgacgccgaacatctcagcgacggcacgccgctgcgcgaggtgatggccgccctggcggataacccgcaggtggtggcggtggggatcaactgtatcgccctggaaaatacgcccgcggcgctggcgcatctgcacagcctgacggccctgccgctggtggtctatcctaactccggcgaacattatgatgcggtgagcaagacctggcaccatcatggcgaagcctgcgccagcctggcggattatctgccgcagtggctggccgccggggcgaagctgatcggcggctgctgccgcaccacgccgaaggacatcgccgcgcttaacgcgaagcgctaa

SEQ ID NO: 227281 - DNA, 1410 bp, Klebsiella pneumoniae
atgcaaagcacaacacaacaacaaggtgggcagctgaagcgcaccatgaaaacgcgccatctgatcatgctgtcgctcggcggcgtgattggcaccggcttattctttaataccggctatatcatctccaccaccggcgcggccgggacgctgctggcgtatctgattggcgccctggtggtctggctggtgatgcagtgccttggcgaactgtcggtggcgatgccagagaccggcgccttccacgtttacgcggcgcgctatcttggcccggcgacgggctataccgtggcgtggctctactggctaacgtggacggtggcgctggggtcgagcttcaccgcggcgggattctgcatgcagtactggttcccgcaggtgccggtctggatctggtgcgtggtgttctgcacagtgatcttcggccttaacatcatttcgacgcgcttcttcgccgaaggcgagttctggttctcgctggtgaaagtggtcaccatcgtcgcgtttattattctcggcggcgcggccattttcggcatcattccgatgcaggatggctcgccggcgccgggcctgcgcaatatcaccgccgaaggttggttcccgcacggcggcctgccgatcctgatgaccatggtggcggtgaacttcgccttctccgggacggagcttatcggcattgccgccggagagacggaaaacccgcataaggttattccggttgccatccgcaccaccatcgcccggctgattattttctttatcggcaccgtgtttgtgctggcggcgctgatcccgatgcagcaggcgggagtggagaaaagccccttcgtgctggtgtttgagaaggtgggcatcccttatgcggcggacatgttcaacttcgtgatcctgacggcgatcctgtcggcggctaactccggcctgtacgcttccgggcggatgctgtggtcgctgtcgaacgagaagacgctgccggcctgctttgccaaagtcaataaacggggcgtgccggtgaccgccctgtcggtgagtatgctgggcggcgtgctggcgctgttctccagcgtggtggcgccagatacggtgtttgtcgcgctgtcggcgatctccggttttgcggtggtggcggtgtggttgagcatctgcgcctcgcactttatgttccgccgccgccatctgcagcagggtaaggctctgagcgatctgcagtatcgcgctccctggtatccggtagtgcccgttctgggctttgtgctgtgcctggtggcctgcgtgggcctcgcttttgacccgagccagagaattgcgctgtggtgcgggatcccctttgtggccctgtgctatggtgcctggtatcttactcgttcacggaatatgactcaggagccccaacatgtcgcagactaa

SEQ ID NO: 227282 - DNA, 363 bp, Klebsiella pneumoniae
atgacagagcacaccaccaccttaaaaagaacgctcggcagttttcgtttatgggggatcgccgtcggactggtgatatccggggagtacttcggctggagctacggctggtcgcaggcgggcacgatggggtttatggtcgtcgccctggcggtcgccgcgatgtactgcgcctttattttcagctttaccgagctgaccaccgccatcccgcacgctggcggccctttcgcctatgcctaccgcgccttcgggcccaccggcggctttatcgctggttttgccaccctgattgaattcgtcttcgccccgccggccatcgccatgtggactgaccccataaagttggatggttcatattaa

SEQ ID NO: 227283 - DNA, 480 bp, Klebsiella pneumoniae
atgagtgagttaccctggattacagaagcacgtaaacatattggccaggtggaaattaaaggaccacgtcataacccactgattattcaattctggaaagacattaagcgtggtgggattaaagatgatgaaacgccatggtgcgccgcattcgtaggtgcaatgctcgaacgaagtggaattaaatcaacacgcttcgaatctgcaaaatcctatctcaactggggggttcagattagagaaccagcttatggttgtgtggtggtattcagccgtgacggcggaggccatgtcggatttgttgtcggtaagaaaaaaaatggcgacctgatggttcttggcgggaaccagtctgatgcaattaacattcgttcattttccagggaaagggttaccggataccgttggccggttaatgtggcgaaggatggtagagaattaccgttaatgaccggttccgcgtcggtaaatgaatcatga

SEQ ID NO: 227284 - DNA, 408 bp, Klebsiella pneumoniae
atgtcagcatcttctttaactggcgactctctgacacagatgctgagtttcagttctatggcagctgttgtcgccggagttccgccagaagtggctcttggctcgctcgctggggcggtaattttcgttacctccgcagttgagtaccctgtcaggcgccgagttctgctatcgattctgagttttctctgcggacttctcttctacaaacccacagcatcaattctgatcggcgttgcgagcatgatccccaccatcacacaggactcgttcgagcggggcattgtgtactctgccggcgcgttcgttgcggcaattgtcgcggtgcgggtcgggatatggctgtatcaccgctctgataatccgcgcgatttaatcccgggaggaaaagacgatgacaggtcatga

SEQ ID NO: 227285 - DNA, 546 bp, Klebsiella pneumoniae
atgctgccggaacaccaaaatcaagttccccaagatacgacaaatacgccagactttactggcaaacaaagcgataaccccgaatttgaagaagtcgaggaagatctaagtaaagagatcattgaacatccggatgctttttcgcgtgtgctcgacaggcctgaaattcaagaaatcgttgttgctcaccacgcatttcaaggcccgctacctcctccatatcttttacgtgggtatcaggaaatcttacctgatgcccccgagcgtatctttcaactaacggagagagaatttgctcacaggcataagatggaggaaaaagcacttgatggcgccatcaacagggataaaagaggacagcactacggtctaggcgctacaatctttaccgtcggttgtgccaccgtcttaggcctgaccgggcatgaagtgttggcaggaacggtcatcggcatagtagttgcagtagcttgtatttttgttctcaggcaaaaaccaatcatcaaaaagaagccagagaataacgaaaaacctgatgaagaatag

SEQ ID NO: 227286 - DNA, 246 bp, Klebsiella pneumoniae
atgaatattgacctcggatatttccaaaacgtgttcttcaacgtggcctctgactttcagattacttctgaatgcatgcgtgaaccgagtgttttgtacagaccgacacttagtcaggatggagataaatggcttgcgatatatggcgacctgccaaccggagttgtcggcgtaggtagcaccccagaagaagccatgcgggaattcaacaaagcatggttagcgccggcaacaaaagccgcctaa

SEQ ID NO: 227287 - DNA, 168 bp, Klebsiella pneumoniae
atggtagctctcagtcaccaggcaaaaaaatgcccggacgaaccgggcgaaacagggatgatggaaagtgccgtccttggctgggtgtcacagggtttacagcatgaagtcatcgcaatggcgtcatggtgtaaagccgcattaggcggcttttgttgccggcgctaa

SEQ ID NO: 227288 - DNA, 792 bp, Klebsiella pneumoniae
atgttagaatcacttaaagaattcacgacatcgacattcaacacagcaatgaatcgcgttaagaaccctgcattcggtgctttcgcaatttcatggtgcgcatttaactggaagcaaatactttatttgttttttgctgataacggaatttattacaaaatagaatatatttctcaaaatagcagttggtggagcgtaattattttacctgcattctcgtcacttgttttatgtgttggtttaccatgggttaataatgctataacgaaatggcaaagcaagcctcttgacaatgcagattcaattgagaatttcaagcaggcgcgcatgattcaacgctccacgcgattgcagcgcctgaaggccaagcatgacgtgacttacgacagagttaaaactggcgctgaaaaagatatccaatcaatgaaagaacaaataactgaatctcaggcaagaatgggcgagcttaccagtgaacgagacgagttacgtaaaaaaataaattttttaaataaagaaattcaaaaccttaaatcaaatattgaggacgcaaattcaattatcactgagaagaatgagcgcattagccagcttgaaaactcaagagaatctttattggcacaatttaatcttgacaatgcatcacaacgcactccgcttgcaacggctcgaatatctccaacaggtagcaatatcgatatcttaaatagaaaaattgactctttatcaagaaatggctacgacttaaataaagagcttgcgataaaaaattcggaaaacaaaaaaaattag

SEQ ID NO: 227289 - DNA, 192 bp, Klebsiella pneumoniae
atgatgccgtacttcttcctgattttcgtcatcagcagccaatcatcgaatatgcaggtggttcccatgcagagtatggagcagtgcaaagcagccattaaggcgatgaaagttgcagatgataagaggtcctgggatgacgtttcgccaagcgtagataatgttcaatgcgtagaggtgaaaggtgcctaa

SEQ ID NO: 227290 - DNA, 696 bp, Klebsiella pneumoniae
atgagttggctcttttcgcaggcgctggcggaggaatactcggcggacacctccttggctggcgaacagtttgcgcagttgaacgtgatgcctacgccgcacaagttctcgcgcaacgacaaaacgatggaattctccagcctttcccgatttggtctgacgtgtgcagttttgacggaaagccatggagaggaattgttgacatcgtatctggcggatttccatgccaggcatttagcaaagcatcaagaggaagaattactgcaaaaagcatgtggccagaaatgcgtcgaatcgttagtgaagttaagccaggtcttgtctttgcagaaaacgtcactaaagacgctatcaccatcgccgcaaccgacctcattgcaatgggttacaaaaccagggcggttcaactttccgcgaaagacatgggtgctgaccacatacgggaaagattttggctacttgcatacaccgaccacgaaagcgaattactcggcagagtcaatgcagaagtgggaatcagcaagaaatttcaccatagcgtttgggatacctactccccagaatcaatcttggttgatggggttccctttagggtggataggtacagagccattggaaatgcacaagttccaatcgtggctgcaactgcattctgccttctcgcaaataacatctaatcaggagcgtgcagcatga

SEQ ID NO: 227291 - DNA, 462 bp, Klebsiella pneumoniae
atgaacatcgaaacagtaaacgagctcatcgcttccctggagagcgcaggcgagctgtcgatcagagagcagaagttcctgaagctggcgaaagcgtttaagcagctggctgaggagaatgcggcgctgaaaagtagcagagcaattcttgccgaaaacgcgcttgaaacctgcaacgaggtttatacagccggatttcgcaacacagcattacacgatgggctgatggagagcacaggtaatcgtaacaaatacccgaatccaattagaactctcgtcgatgaggctaagcggaatatcgaaacccccgccaccgatcgcatcgtagccgggattaaggctgaaggtgcagaggcctgcgttagagcgctagtgacttcggatgatgacgacttcaccgacgcgccgaacatctgcgcaatggtggcgtatcagctgcgcgacggaggtaacggtgaatga

SEQ ID NO: 227292 - DNA, 762 bp, Klebsiella pneumoniae
atggccggcgactggatcaagatgcgtgcagaccttcacacacatcctaaagttgtccgcatggcgtccgcattgaaagcggacagacttcggatagttggcggactacattccgcatggtgtctttttgatgtccattctgttgatggttttcttgacggttacagccctgagacgctcgatgacctcatcggatttccaggatttgcccgggcgatgatggccgttggatggcttgaagaagatggcgaaagcctagtaatgccgcgctttgaagcccataacggtcagtctgcgaagcgccgcgcacaggacgctgacaggaaaagagttaagagaaatgtcgtcaaaatgtccgcttctgatgcggacgaaatgcggaccagagaagagaagagaagagaagaagtaaaagataagatcccccctaaccccccaagggggagggagccaaaaaaatcttatccgtatcctgaacagctcaatgccgaagcctgggatgagtggaaggcctacaggtcagaaatgcggtttaaagcctatgcgccaactgaacggagcgagggggcagcaatcaccgaactgattaacctgtctggtggcaaccacacaaggcagatgcagattgtgaagcagagcatggcgaagggttggaaagggctgttcgagctgaaaggcggctctgggcagcgagatgtgaacaccatatccaggccggataccgagatcccgccgggattccggggaggcccggcaccctga

SEQ ID NO: 227293 - DNA, 663 bp, Klebsiella pneumoniae
atgaaaatctatcagcgtataaatggcgaagaatggcgccgggttttggtttgcggtgacctgcatggctgctacaccaacctgatgagcagtctagataaagcaggtttcgacccggtgcaggatctgctggtttctgtcggagacctgatcgaccgtgggcaggaaagcttcgagtgcctggacttgataaatcagccatggttccgggcagtacgcggaaaccatgagcagatgatgctggatgccataaccggcactggtagctttgggcactggatgtcaaatggtggaggatggtggcacagtctggactacgagcaggatatgcgcctgaaatccctgctacccaaggtcgcagagttgccgctcatcatcgaggtggagaagggcggtaagaagtttgtcatctgccatgcagactatcctcacgacgaatatgagtacggtaagccggtagattcacagcaagctatctggagtcgtgagcgaatcagtttatccattgatggctttagctccagtatttctggggctgacttattcattttcggacacactccagcgcttcagccaatgcgtaacaaaaaccagctctacatcgatactggtgctgtttttaacggtaatttgaccctttatgaattatccgggggtgaataa

SEQ ID NO: 227294 - DNA, 204 bp, Klebsiella pneumoniae
atgaagattattaccaggactgaagcagctaccagtggcctgaagcggtactacaccgggaaatcgtgtaagcatggccatgatagcgaacgttgggtgcataacggtcactgcgtgcagtgcactatggaaacaaacaaacgccgccaggctgagataaaacgcctcatgctgcaggccggcagttctacggtggcagcatga

SEQ ID NO: 227295 - DNA, 255 bp, Klebsiella pneumoniae
atgagcaaacaaacaggtggaccagccttcccggtttccgatggtgccgcgcatcggatagcaatgcaggtggccggtgacaatgaagctaaatacattgccgaatcagcaaaagcactcgccggaatgactctccgcgattacttcgcagccaaggctatgcaagcaatgatagcagcacatgagcccgatgacgcgattcctggatgggcatatggaatggcagacgagatgctgaaggctcgggaggagtga

SEQ ID NO: 227296 - DNA, 576 bp, Klebsiella pneumoniae
atgcagcgtactggctttaataacgcccgggtccggcaggccaataagtcgatttttctttcccatctgtggcgggaaaagcagctcagtaaatcacagctctctcaactcaccggtctctccattccggcggtgagcaatattctggccgagctgcttagcgagggattgatcggtcactcaacggaacacatgagcaaacggggcgtgaacagcggcagctaccagatccccgagcacggcgcctggacactgtgcatgaatatcaccccgaccagcattgaatatcagcttgccgacgcccgcctgctggcagtggatggccatcagcatttgccggtcaacgcgcccactcctcaggccctgcttgaggccatcgttgaatgctggcggcatatccaccgccgctacccgcagcacagcatcaatctcgcccttggcgtgcatggacaggttgatccgattaccggcgtttcacaaaccatgccccaggcacgctggaaaacaccgatcgaaataaagtatctgcttgaggagcggcttggcgtgcaggttcgggtggataagactgcgtga

SEQ ID NO: 227297 - DNA, 864 bp, Klebsiella pneumoniae; identical to SEQ ID NO: 139298

SEQ ID NO: 227298 - DNA, 1374 bp, Klebsiella pneumoniae
atgagtgcaagtttagatgatgtaaaagattttgactttgtgatctcagaagcatttagaatagatgttggattagattcacctaattttagagagttttataatcaagagtacaatagagattttggttcaatcggaatgacaataaatgcaccgattgagttaatctcaaagaatagaacaattccacaaaggcaaatacatctttcatacgcttcaaatgagagattgcatttaatatccgcaaggttcataaaatcaaataggctagaaatgttagtcacagttgatgagtttgttgaaaatataaagaaaagtctttatgttcatactttcattgatgacggtgacgatggcataaaaggatatacccaacttctcaataaagcactaaaaaaaacaaagagagaaatgatacaagaagatttctttttccctatcttggcccatggccttgataaagagaagatatgcattggtcgcgctgagattatatcagcacagcatatgtactcaatgattaacgataaccttacagaagaacaaatattattatccagaagattttgctctgcacataaatatcactacggacatttcttaagaattccagttagcaagcgctctaagaaaagccgagagagaatagctaaaaacattgcagggtttgtagttggaatactccaattattcagtgaacattatcacatatcacctgatttcttgagcctttcaacgagtccatatcctaattatgaaggtttttacttcacaagaacatcaaataatgatttcaactataatcactcatccaagggaagaataacttggagcgacaaattctgggataaatttgaaagtgattataattcagacttaggggaggtactgtctcgtctaatagatctagccatagaacccaatgagagaacaataattgctgatcgattgattgatgccatttatttgtttagcagcgctcaacaggataaagatgatagttcacgcatagtaaaattagcaacagccctagaacgattggtaagccttccaagcgagaaaaaggatgagtctacaactaaaaacttcgtaagccgagtatcgtcattggtttccatttattatcctgatgaaaaagactgggctaaggtttcaaaagaaatgtatgaaatcagatctaatattactcacggcgcatggtctttatatcgtggggtagatccattatattcatctagatatagcgaattaacaagcagagccattttctctgcgtgcatagggttttataaacgaagttttactagcgataacaatgatcgattagtaaaagaattcttcgattttttagaaaatgccataaaagaaaaataa

SEQ ID NO: 227299 - DNA, 837 bp, Klebsiella pneumoniae
atggcatttgtcaccacccaagacggcgtcaatatttactttaaagactggggtccaaaggaagctcagccgattgtttttcatcacggctggccgttaagcgctgacgactgggataaccagatgttatttttccttgccgaagggttccgggtcatcgctatcgatcgtcggggtcatggccgctccgatcaggttagcgaggggcacgatatggaccattacgcggcggacgtctcggcggtggtggagcatctggatctgcacaatgcggtccacgtcgggcactccaccggcggcggccaggtcgcacgctacgtcgcccgctatggtcagccgcaggggcgggtggcgaaggcggtgttaattagcgccgtcccgccgctaatggtgaaaaccgagcagaatccgggcgggacgccgatcgaggtgtttgacggtttccgcaaagcgctggcggcgaaccgcgcccagttctatctcgacgtcgcctctggcccgttctatggcttcaatcgtgatggagcagagatatcccaggggacgatccagaactggtggcgacaggggatgatcggcagcgccaaagcccattatgaaggcattaaggcgttttcagagaccgaccagacggaagaccttaagtcgatcaccttgccggtgctggtgatgcagggagatgacgaccaggtggtgccctataaaaatgcggccatcctgcaggacaagctgctgccgaacagccagctgaaaatttatcctggcttcccgcacgggatgcacacctcccacgccgataccatcaacgccgatctgctggcgtttatccgcgcctga

SEQ ID NO: 227300 - DNA, 9621 bp, Klebsiella pneumoniae
atggataatacctctggagattttccatgtaataagatggacacgcgtaagcagttaccgctaacaccaagtcaacaggggtttttattccattccttaaaggataagaaaaggagtaactaccatgagcattttacatgcattttttctcagcatgtagatagcgcccacttcaagtgggcgctggaaacgttatttcgaaagcatgagtgttttcgcactgattataactgggagattgatgagcgcccttgtcaggtggtgaagaccgatgtgttgccggatatatatgtgttagactgtgagcaagaggaaatacgttttctactagctaatgatgacattatcattcctgtcccgcaggatgacggtattgatgctataattcctcaactgctacaggctgatttaaaatacccattttccttgaaaacgatcccagtccgggcctaccttattcagtcaacgaaagaaagtgcttttatactatcataccatcatattgtgatggatggctggagcttatcccttttcattaaacagttgctccaactctatggagcggctgtggtcagtggtgtgagggatgatagcgccattatcccctcatctctgaaaccccttgtagacacactgtcggcccgacgtcacacctttcagcacgactattgggctgcatatcttcgggagggaacaccaacttgtatcgtgccgctgtcacaatatcacacagatactgaagccgagaacaattcttacgttaatcaaacaaatcatgtggagatcaatttgtctccggatgtgtgtcagaaaatacagacgctatgcagcgattatcgtatcacccccgcagtaatcttctatgtggcctggggcatcctgctacaacgttggtgctatgctgacgatgtgttattcggcgcgacaatatcagggcgaaatataccaattgatggtatagaagaaacactagggctatttattaacacgttgccgctgcgtctgcgtgatgatggggcgacactgttgcaacacttacaacgtatgcaccaaacactaatagctcactacagcaatgaacatgatgccttagccagcatacaacggttggtacataaagaaggtcatgctggggatctttttaataccttagtggtgttggagaattatcccgttgatatgacattattgtcatgcgcgtcgcccgtggcaattcgccatctcagtgtacatgaacaaacgcactatccgctgaccttgaccatcactcaacagaagggattccgtttcagtattgcatatgcccttaactacctgaccaacaacatggcgcaagcgttgctgatgcacctgagttatctgcttgaacaactggtggacaatccgcagcgccccattgctgcgttggtaaacttgtccccatgccagcaggcgcaggtacttcaaccctatctggaacgcatggcatgccgggattgggatagtcaatccaacgtcatcgaacaatttcatcaagttgctgcgacttcgccagcacaggtcgcagtggttgatgaattgtgcgcgttgacctattcggagttggcagcacaagctgagcagctcgcggcttatttggtacagcagcgtgttatggttggcgatactgtaggcataattagcgaacgccgggtaaacaccgtggttgccatcatcgccatcatgttgatcggggctgcttatgtgcccatcagccccgactacccagtgggtaggatgcaggaaattattgatgacagcggcttggcgctgttgctggtacatggcaaaccgctagatgcattaaacgttgcgcagagtgacctctgtgcatttcccgtcgcgccctcggtggtatttccggttatcacaccagattctcgcgcttatgtgatttattcatcggggtcgacgggtaagccaaaaggtatcgcggtggcgcaccgcggtttattgcgcctgatacaaggcgacagcccgctgaaggtggagagcggtgagacaacgctgctgacctgcccatttgagtttgatgtttcggtgtttgagatgtggtctaccttgctcaaccacggcaaactagtattactcagcaaacaggcattacttgatatcaatcacattcgccgcacgatcgctgatgaacaggtggcgcgcgcctggtttacctcatccttgtttaactcctatgtggcagaaggtgccgatttcttcggtatgttacaacacattacggtgggcggcgaagcagtatctgcgtggcatgtcaacgacgtgatgcaaaaatacccgcatctggtggtgacaaacggttatgggccgacggaaaacactatttttaccaccgcatatcgtttcaacgggttgcaacccgcccgagtcccgataggatacgcggtaccgggcacctcgctctacattaccgatctccatgggcatttgttgcctatcggtgccaccggtgaactagtggcgggtggagtgggggtcgccatcggctatcagaacaacccggcgctaagtgcgacggtttttgtccctgatccttttattcccggcggtatgatgtacaaaactggcgattatgcccggttgctggatgatggctgtgttgactgttttgggcgtaaagacggtcaaattaagatcaatggacaacgaattgaaaccggagagatcgagcagcgcctgctggagtgctccggcattatcgaggcggtagtggttccttaccgcgtacgtgaaacgctgcatattgcggcagtggtctgcgtcaatgatagctatgatgaggtggaagttcgagggcaattggctgacagattgccgccattcgctattccggaatccttggtggtggtgacggagattgcaaaaagccatagtggcaaggccgacttggcgcagttgcggtatctcctgcccgcaactcagtgcaacgccgtgtccaccacgatatcagaggtgcatagtgacatggaacatgcgctgcatgctatctggcaacgcgtacttgatagacaagacattgatagcaatgcctcctttttcgccctcggtggcacctcattggataccatcagggttaaaggggatattaagcggcaacttggcttggagattgatattaccgatctctttaagtacccaacgctcacggcgttagcacattttctcgatactgccgtatcgccggaggatgcaattccaacgcgtgctgttgtctacagcgacatgccggtggcgattgtcggtatggcgggacgtttccccggtgcggcgaatattgcagcgttgtggacgctggttgtaggaggggaatcgggattaacactgttcagtgatgaagagttgcgcgcgcatggtgtgacacctgacacgcttaaacaagcgaattatataaaaaccaaagggattgttgatgatcacgaatggtttgatgcggatttctttggttatactcccaacgaggcggaatgtatggatccgcaaattcgcttattgcatcagtgctgctggcaaactctggaacacgctgggtgcgatcctgccacctttactggtgcgattggcatttatgccggactgctgacatccccccactggcttaatgcggtaatgcaagacactaccgactctaccgccctgtacaaggccagtatcctgaatatccattccgtcacagcattgattgcccatgcgcttaacctcaccggccctgccgtgacgcttgacaccgcctgctccacttcggcagtggctatccaccaggcctgcatcgcactacgtaaccgggattgcgatgcggcattggcgggcggcgtttctatcgagatgcctgcgtaccggggctatgaatatcatgaaggcatgatcaatgcgcgagatggtgtctgtcgtcctttcgatagccaagcctctggcacagtcaccggtgatggcttaggaatgctgctgctaaaacgtctggacgacgcgctggcggatcgggactgcatctatggtgtgatcaaaggttcggcggtcaataatgatggcaataacaaaatcggctataccgcgccgagtgtgatcgggcaatcaacggtaatccgcaccagtttgcgccgtgccggttttgatagcgacagtatcggattggtggaagcgcacggcaccggtacggtgctgggtgatcctattgagttacgtgcgcttaatgaggtgtttggcccaacacctgttccgttttgtgtggtttcagcgctgaaaagtaatattggccacctcaactccgctgcgggagtggcgggcgtcatcaaaacaacgctcgccctgcatcatcaagtgttgccaccaacagcgcactttcgccaactcaatcctgctatagatctatcgcgttctgcattgtacgttaaccagcaagtccaaccgtggccgtcgacgcgtcctcgtcgtgcactggtgagctccttcggcatcggcggcaccaatgccagcatcgcactagaagcacatcaacatgaggacgacccttcagcgacgggggtacgcgacagctatctgttgttgttctccgctaaaacacccgctgcgttagagttgcgcgtggcctccacactggaatatgtcaagcatggagtaggggtgcgcctgccggatgtggcttatacattgcaaactggacgcacagcctttgaccatcggcgggcttatttggtgagtcgtgggtcgaaaatcgatctctcctgtgccacgatattgcaagcggaaatcttcaatggtcagcgcacgacagcggagatctgcttcatgtttcctggtcaaggtagccaatatcacggcatggccagcgcgctctatgctcatcaacccatgtttcgccagcacatggatcgctgctttgctgcattccaacgctattcgacggtcgatctcaaggcgttgttgtttgacgatgaggatacgcgggatattgatcaaacgcagttcacacaaccggcgttgttctgtgtcgaatacagcctagcgcgcaccttgattgatctggggattacgccggacagtatgatcgggcacagtctgggcgagtatgttgcggcctgtattgctggcgtatttactcttgaggatgcgctgcacgtcattgaggcgcgcggacgtttgatgcagtccatgcgtcccggtagcatgatggcggtctaccttagtcgcgaacagttgaccccatggctagctgcagaacggggtattgaactggcagctaataatagcgcgcatttttgcgtagtcgcgggcgagcaggcggccatttcccgtttgagcacacgcttagtcgagggcgggatacagcacaggcgcctgaaaacctctcacgcattccactcggccatgatgacgccgatgctgcacgattttgcacagttgctggggcaaatcccgatgcacgcgccgcacaagcgctttatatctaatgtaagcggtacatggattactgaggagcaagctacctcgccggattactgggtgcagcaagtgcgcaacgcggtgctgtttagcgaaggtgcggcgcaactgttggtacaacccacgctgtttatcgaatgtgggccgggtaatacgctctctacctttattcaaggacataaccaatacagcgatcagccgaccctgttgacgctacgcaaagccaacgcggcgatcgatgatgagcacatgttgcatcgtacgctggcggcgctgtgggtcaggggggagaatattgattggagacgctttaaccagacggcactcggcaagcacattccattgccggattaccccttcgaacagacttattactatcgctatggtgctgcactttccggttatcgccagtatccaaatcctctgcgccgtccgcaagatgagtggctccagcgtgtgctgtggcggatgcacgacacatccttgcgggaggcgttctatgcgccgggcgaattgatcatcattattagtgctgacggcgacaagttacagcagacgctgatgagtagtggtgtcgacagcatcacaatgccgctgccgatatcgtcagaggacgacgtgtgggataatgaccgtattctgacgcatttccacgacatctgcgcacttttagcacacaaaacctaccgacagttacattgcttgtatgctcccggtgcggaggcaggatcatcgttgacacagtcgctctcgggactttatcgtgttgctcgctggtgtatgcacagcaccacgccgctggcgtccttaacagtattgacccatggtgcgtttcgcgtacaggaagaggataatcccgaaccgacgctggcagcgttgtcgggcgcagtaaacgtgtttgcccaagagctgcacccgaccgaagtacgattgatcgatatcgatgcgcagagcagtgatgagaatctgaacttgctaacccagcgtctggccccgaaacaagaaacggtaatggcgctcaggcaggggatgctttacctgcgacgctttatcccgacacggctgttggcgcacttaccccctcaaacagggtgtataccgggcaacgtactgtggattatcggcggtgaaaaggggattggccgcatgatcggcgaagcgcttgctcagcgtgagggagtccgtgtggtactgagcagccgcacaggttatcaccatgaagcggtgcagcaggacgcattagacgttatccactgcgacgtgacgcaggcggaggcggttagagcttgtctggcaactctgctcgaacgctatggacggttggatggcgtgatttttgctgccgacgctaccaccacattgacactgcatcaattgagcgaatctgcgctacgcgacacgctaacggtgaaagaacggggtactgctaatgtgctgcatgcgttagcgcaacggaatctgctggatgagcgtctgctactgctgttctgtaactcgttggctgccgtgaatgcggagattggccagacaggctatgctaccgccagcgcctatttggatgcactggcacagcaactgcgtacccgctacaaggtgaatgcgctcagtatcgggttggatgcattgcgtgagcagggcatgttgttggatgctataaacggcagtgaatacgatgtcttgcgtggactgcgcccattgatgacgggaacgttgctacaggcttataaacaacaaggggctgacaccagctactacgcgcgattatcccccgagtccgattggctgctggatgagcaccggatatccggtatcgccacgctgccgggaaccggctatctggcgctggcgtatgaagctctgcgccattactttgtgcaagaccaaatctgcattgatgaattggtctttttggcaccgttgactgtgatggacaactgcagtgttgacgtttttgttgacatttcacctaacgggcaaggagttagtgtcgaggtgaaatcaatgacggagcgctttagtggcacgttaacaacccatgccagaggcagggcgacgcgtctgatggtagacgataatgttgtgtgcgatctcacggggctgatgcgcgagatgcacactatcactcctccaacaaaggaattatcgagcacgcacttccactatgggccgcgctggcacagcgtacaacaactgtatggcaataccgcccagactcaggttttcgcaacgctggccctgcccaccgttgccgctaatgatacgatcgcactgcaccctgcgctgttggacatcgccagcagtgttgtcgaacaactgcctggttttcatactgattcggtacctttcctttatcaggatttacgcctgtaccgcccgttgccgaacaccttacatgtggcgctgactgtcaatcggcacgatgaggagggtgacagctacgctttcacgctctacgacatggcaggcgagatggttgcccgctgtgcggcaatggtgaagcgcaaggtacagctccacatacaagatgtcgatgacgacacgcgactgcgcgtgcccagtgccgataactaccaactgcggctggccgctgagggggagggggcaggaaagctagcgttgtgccctacgccgcgcttagcgctgggggattcacaagtagagattgaggtactggccaccggactgaactttaaggatgtgctgttcaccacgggattgctccggcagcagccgggtgaggctccgctgcaattgggactggagtgcgccggacgcattactcgcgtgggtaaaaatgtcactgaatttgccccgggagaggatgttatggcggtgctaaacggtggttttgtccagtacgcacgggtagaaagcgattgcgtagtgagaaaaccagcccattgtcgcatcgaacaggcggctgcgctgcctatcgcatacctcaccgcctattacgcactggtggtgcgcgctaatttgcaacccggagaacgagtattgatccacagtgcggcggggggcgttggcttggctgcgctacatattgccaaacgctgcggagcacagattttcgccacagcaggtagcgagcagaaacgcgattacttgctttcgctaggcgtacatgccgtagctgattcacacgacgaacagttcgctgccactctgctgaccgcatcggacggacaggggatggatgtgatccttaactccctcacaggccgtctgcttgacgctagcctcgcgctgctggcaccgctgggccgttttcttgagctgggcagcaaggacattgtggaagacaaagcgctaccgatgcgtttcttcgcccaaggcggcacctttattccgattaattttcacgcggcgcatggtgcgtttagtcgctacctgcaacagattgtcgcttggatagatgataacacgctaccgctccttccatgcaaatccgtaccattgcccgaggttgcacgcgccttcgccaccctgaccacgccgcagcatattggcaaggtggtggtaacgcatcgcactgcggcaggcatggaccggctgaacgccatgatagcagaaaggcgcctcggcggctatgcgctcagcatgagcaatgccgaggtgatgcgccaattgtggccgatactgaacactcgcagtccgtgggcgcaactgctgctctcacctcgggcgatcgatagattagcgcggggcaaccgggtggatcgcggtgtaccgtctgccgctaacgatacgattactcagcagacagtgaaaaagcggccccgtccggaaattggcgtgccttacagccccgcgacacgtgaagtggaacgcgtgctctgccaaatcctggaagagtatctgggtctggatagagtaggcattgacgacaactatgccgaattaggggcaacctcactcgatatggtgcaactgagtgggcaaatggcgcgtcactatccgcaagtgagcgtggtgtcgctgtacaaccacgccaccgtgcgccagctggcgacgttttgccagcccccggagggcgagtcaaatgcgccatcaccacagcctgcagtacagacgaatacgcgcgcgaatcagatagcaaaacgtgctttgcaaattgcgaaaaatactgcgcgcagtcacacgtctttgcattaa

SEQ ID NO: 227301 - DNA, 225 bp, Klebsiella pneumoniae
atgctttctctgacctggaacgcgccgatggaagccttcaccgacaaagaccagttcttccacggcgtcggcgttgacggcgtttacctgccgttccataaagccaatcagttcctcggcatggaggcattgccgacctttatcgccaacgacgtgattaaaatgcctgatgtcccacggtatatcgcagaatatcgcaagcatctggcggaaatttttggttaa

SEQ ID NO: 227302 - DNA, 234 bp, Klebsiella pneumoniae
atggcttacggtagcccacgtcagcagagtggatttccccggaccgcctggtcagaagcctcggttaagcagtcagctgccgctgccattactgcgcgatatattcaatcggggttatttaataaagctcacgtgtttgcagatttcatcggcgacaatttctttgcgctgattaaagatcactttattctgctcaaacaggttattgccgtgagtatcgatcgatacaattaa

SEQ ID NO: 227303 - DNA, 228 bp, Klebsiella pneumoniae
gtgacccattttaaatgcgataaacggcgcatcagcgattacctcaatctgtacggtttcctgcgcgacatctaccagatgccgggtatcgccgagacggtgagttttccgcatatccgtcaccactattaccgcagccataaaaccattaaccctaccggtattatttccattgggccgcagcaggatctcaacgaaccgcacggtcgcgatcagcgcttccgttga

SEQ ID NO: 227304 - DNA, 1044 bp, Klebsiella pneumoniae
atgaagaaacctgaaaacaagaaggatacaataatcaaatcaacactatctaaaacagcggatatcggtgcaaatctagtgctcagttttgttccgggaggaaatgcagcttatgagctggcaaaattgggtgttgaacaagctaaaagatatgtaacagaacggcaagaaaaaagaattgctgattttcatactatgctcctaaaacccaatgctgacgaggagcgtggacttgatgatgcatgtattcaagccgttgactatcatgcgttgttaaacgcatgcctacaggacatcgaagatgaaaaaactgaactgtatgctaccttaacccgaaatgctgctttcagaaaacttcactccagagatcttcgtttcttttgtgtgtcactcagcgaaatgaccttcaatgatctcgaagaaatgcgtgttgcatatattgcttcgaagtttaagcttgttccatcggagggggcgggtagatttgaaaaatcactttcaccagagcggtcaccatcggagcttgtttatggccgcaagctgatggagttaagaggctttgtcgaaaatggaaaaatgaaccagtatggtgaaaaatttgttcaagcatgctatccaactgaaaaattgttgcctgagtcgataaaaatgtcggaatggaaaaatgctgactcgccaatatttatgctgtcctatgagcttgatgatccgtatattactcgtttacacatgcatttaagtagtatgctaagaacacatggatttaaaactactccgctgtctgctcctactggaaaacttactcattttacaccggtcaaagccagtatattaatatttaaaaataatcctgaaagaatcatcaataacatgaattatattagtagcctgatgggggaaggctgcatagcggtccaaatatgtgatgagtatccgacaatacttgaaccattacgagaaaagtttgagataattattaatattagcagtgatgatccattttcaggtgcaacccaagtagtaaattctattcattcaaagtaa

SEQ ID NO: 227305 - DNA, 1038 bp, Klebsiella pneumoniae
atggcattctccccattgtttattaaacctgttcattatcgcgataaaagtccagttttttcctctggaaaagtacataaaaacagaagaaaaggattggagactagtgttgtcatcgatctaaatataatatcgaaaatgaaagatgttattttgggaaagactggctatgaggaatcaggtttgcaatatgctgttaaggaatttaataagtcaccattatatctttctcccggattttcatttaacgaagccgatcgtgactattatgaagagctatatacttcatttgagctatttttaaaaaaatattgccctacttatattgatgctccaaactctttagcattaccaccacctaaagaatctaaacgtacttttaaagagttatcaacgggtgaaagatatatgcattcaatatcatatctttctatgctgttaattcaaataatcatgaggaattttagaggttactcaccgatacaaaaatttgaaaaatatgttgaatatatggtttcaaaagttgattttttaactgtaattgaagcagaaatagccagatattgttttttcgaatcaaatgaatgcaaggatatacttttcaagaaattttgcgataaaatacacgataatttccttaaaaaaggaaacaaaaaatacatattaaaaaacgcactaaattcagcatcggatattatatattatagagtggttgcgattcaatcaaatgaggagctggatggagtaattcaagatacttggttactaacagctgatgaaggtttaaaatacatagcacagtcaatttattttatcccttcctttgatggatgtgatcacaaagcggtacgattagtaagaaataattttcagcgacaatcttcatactggcgcagttgtgatgagttatttgaatcctataattttcaacgcaattttattaacttcgcaagatttacttctcaagagtgcgagtcaaaattcaagcttataactaattgtatattatctttagagaatgaattggttgaagattaa

SEQ ID NO: 227306 - DNA, 417 bp, Klebsiella pneumoniae
atgaaaaaattaatcaaggttgcaatactgactctggttgctttgttttccgctgcttcctttgccaaatggcatggatgtcaagagcaaaaccttattttctttgcttataacataaaacatactaaagcggtagaactctgccaaacggaggaaggttatagatacacttttggacctattggaaaaccagaaattattctagaaaaagatagcaacgatgttactcgcggaggaggtatggctggaggatttgatattaaaaatggtgatattatttacggagtaatggaagataaatttggtaattctgctctcatcgtacagaggtctgattatagtaaagtcttggcgaaaattgaacttgatagtgtaagcaagagctatgttaataaaacctttgaatatcttcattga

SEQ ID NO: 227307 - DNA, 1389 bp, Klebsiella pneumoniae
atgtataaaaccacgctatcgggccaggtatggcgctttgatagtctgaaaacgttgatggcgaaagcgtcgccagcccgctccggcgacgccctcgcaggggttatcgccacctcagccgaagagcggatggcggcgaaaatggccctcgccgaggtgccgctgaccgacattctcgacaacccgcttatcccttacgagcaggacgaagtgactcgcctgatcctcgacacccatgatgcgcagggctttgccgccctgcgtcacctgacggtcggcgattttcgcgactggctgctggatgatgctaccgataccgccacgctgcagcgggtcgcccgcgccatcaccccggagatggcggcggcggtcagtaagctgatgcgcaatcaggatctgatccttgccgccagcaaatgccaggtggtgacgcgctttcgcaacaccatcggcctgcccggccacctcagcgtacgcctgcagcccaaccatcctaccgacgacctgaaaggcatcgccgccagtatgctcgacgggctgctgtacggcgccggggacgcggtgatcggcatcaacccggccagcgacagcttaccggtgctggcgcagctgaacgtcatgctggacgatattattcagcgcttcgccatccctacccagtcctgcattctgacccatgtgaccaatacgctgcagctgattgagcgcggcgcgccggtggatctggtgttccagtcggtggccggtaccgaagcggccaacagcggcttcggcatcaatcttgccatgctgcaggaggcccgcgaggcggccctgagcctcaggcgcggtaccctcggcagcaatgtgatgtattttgagaccggccagggaagctgcctgtcggccaacgcccaccacggcgtcgatcagcaaacctgtgaggcgcgggcctacgccgtcgcccgccactttgaaccgctactggtcaataccgtggtcggttttatcggtccggagtatctctacgacggcaagcagattattcgcgccgggctggaggatcatttctgcggcaagctgatgggcctgccgatcggctgcgacgtctgctataccaaccacgcggaagcggatcaggatgatatggacaccctgctgaccttgctgtgcgctgccgggctcactttcctgatcggcgtgcccggagcggacgatatcatgctcaattaccagagcacctcgttccatgacgcgctgtacgcccgtcgtctgctgggcttaaagcatgccccggagttcgccgactggctggcgaagatgcagattatcgatccgcacggcgcgctgcggctcaccgacgcccgccatccgctgctgtccgtcctgccgcaaggagcctccgtatga

SEQ ID NO: 227308 - DNA, 762 bp, Klebsiella pneumoniae
atggatgatcttctggacgctattacagcgctgagctctctaatatcatctgaaaaaataagagctatcgctgaaaatattagccatattgatgataataaatctatggccacattatacaatgtggtcaatactccaatagctgtaacaatagtcaaacaactcactatggcctggcaaaaaacgtctgtcagttctagtgagttggctgcaatgctccttactgccagccatgtctattcaaaagccacttcagagcaatctaccgagttagtgtggacgggccccacaacaccatttgtttcagcacgtcgtactgaacaggctttgcttcaagttattagtaccgctgagcgcactctgtttataaccagcttcgtcgcttatgatgtttcaacgatagtgaaagcattaaatgctgcaaatgaacgcggagttatgatctcaattttacttgaattatcacaagagaaaggtggtagtttaaattttgataccattgagaagatgagaatacaggtcccttcagccaaactttatgtatggaataataaagataatgaatattatggcggatgtgttcatgcaaaagttgctgttgctgatgctcgggagtgctttatcactagtgcaaaccttactgggtatgctatggaaaaaaatattgaagctggggtgcttatttctggcggaagtattccaaggcaacttaatgagcatcttttttcccttattaaaactaaaattatctgcttggtttga

SEQ ID NO: 227309 - DNA, 1872 bp, Klebsiella pneumoniae
atgaacattaatgagaaaacacccgttggtgaagttcgcccgagccaattgctttggacatatggtcctggagccctaattgatttgcccaacttgtcagttgtaacacttgggatcgacaggtgggaaaagaactgttgtcagccaattcaggaaacccggttactagctgccgttagaaaggtattaggtgatcaggttgaaagcttgcgaatgccaccatttcaaaaaagcgaagtcacagatatgtggtctgctgaagcaaatataggggtacctgtacgtcctttccctagatggttgcgatgcgttaaatgtgggttactttcaccttacgatgccgggcttttcgaaataaaagaaaatcgatttaggcctgaacgaactcgctttgttcataaagactgccggggttctaagggcgatcaacctgcaagggatgctgatgcagttccagcccgttttctcttggcttgccgtgatggtcatcttgatgattttccgtggcactattttgttcatggtggtaacaatccatgcaaaggaacgctgcgattttttgaaagtggcgcttcattgcagacagaaaatctttgggtaaaatgcgattcctgtgaattatcaagaagtatggcgcatgcatttggtaaggccggtaaagaaaatcttcccgcatgtagaggacgtcatcctcatctggattactttgatgctgaatgtgacgaagaacctcgtgcagtactgcttggggctacgaatagctggtttcctgtaacgctatcagcactagcgatcccattatcaaatgttactccattacatcagataatcattgattactgggatgatttttctgatgtagaagatctttctgaacttaaagggatactaaaaatcctcaacaaacgtggtgaagctcaaggtattgaaaagcatgctgcagaggaaatatggtctgcaattgaaactcatcgctcacaagatggcgaggattttgtcggtgaggctgatattaaagatcctgaatggaatgtactaatagaacctactccccccactgattatcctcattttatgagtaaaaaaacccgtactcctacgcggtttgcgccatatattgagcgagttttactcttagaacgattacgtgaggttaatgctttacttggttttacccgggtcgaggctcctgaagaatctgaagatctcaacgaaagaccgcaaatggccagcctgtcacggagcaaacctgattgggtacccgccaatcaggtccatggtgaagggatattcctgcagttcaatgaacaagcgcttgtggcatgggaatctctggacgctgtaaaacaatcggacaaaatgcttcgcggtgggcatacaggttggagaaatgctcgtcacttggatccagaagaaggttatcccggcattcgctatgctatgttgcatacactttcccatttactgattcgagaattggctctggaatgtggatataatgccgcgagtattcgtgagcgtatctatgcaaatacaaccaatggtactcctcaggcgggtatccttatttataccgctgccgctgattcagacggtactttagggggactggttgatcttggcaaaccagaaaatcttggacgtttacttgaacaagcattaaatcgctcaaggatctgctcatcagacccattatgttcagagcatgatccagagaaggatcgttcgctgcatggagctgcttgccatgcctgtagcttagttgcagaaacctcttgcgagaaagggaatcgctatttagatagagccctgcttgtaccaacactggagcatactgaagcagctttcttcaaggatttattaaatggatga

SEQ ID NO: 227310 - DNA, 3999 bp, Klebsiella pneumoniae
atgacagagaacaataagctagctgtatcacctaatgcatggttcgctattgatcgtggccaatctaaaaatcctactttggcccttcatacagtacagctaaaaagtgaacaagctctcaagcacggtattgctgatagcgattgggtcgtcgtctttgacactacaggtcatatcacgcgaatcggacgtattctgcgcattcgctctgatctcgaaactaccaccttatgtttcgaccgaattttgcaggttgaaccactcattcccgttggcatgacttcacttactctgcctgcaaaaggaagctttggcagaattcagtggaaagaattcattgaaatgcttccaaatacactaaatacaagcattgctgaaataccaacgatcgaagatcaaacttacattcgcgaattactgcaattagcagttatggatgatttactcgggccggcagctggccctaatgagcttatcgtcgatatgggcgtaagggatcgctatcttgttggtaagcttgctccacgtgaagcagccgagcgcagctctgagtttccagtggatccagagaatgctgatgatgatgttggtgaccaaatagttaagtctcagacaacaaaagtgcattctccaaaagtgtctggccgaggagaacccgatgtcccggaagaaattgatgccgccagcaaccaatcattggtaccaagtagtctgggaatgactttttgtgtcgatggcgatattgatcaaatagaactagaagttcgttggggacgttatgagcgtagcaatgaccatgagatctatcgaatccgcaagaacaaggagactggggtcgaagaacagaccaaagtcaaagcttggcagcgttttcctagtggcgggaagataacattatcactagtagagggggctatttcccctcaatctttagatagttcatctcctgaagtactaatacagggcaccattcgtcccaagaatgaaaatggtgatcgtctggtcactatatttcttgtaaatactcagaaagagccagaaaccaaccgagatgcagcatgggtattccaaccagaaatcattgctcgcccagtgaaggacgcagtcgaaagatctatttttaggcgcaagccagttttggattgtgacggtatggatcctgaacgcgaagcgctggaaatgatttaccgtaaccatgttgaatttgcagtcgggcatggtgttgcagtacatgctgaacctgcagataacactgaacttgcgactgaaattcgtacaactgtcatgccacagtatgaagttcagagaacagagacccccggccttgatccatcagatcgtccggcgatgcaagaaatggtcaaaagtggtttacttgacatgcagaaactggccactttggaggtggaaccactgatcgatgcattgaatgtactaaccaaggactatctggattggattagtgaacaacgtgccagtgtaggtattaaaattacaggttttgaaacccaatctcagatcgcaatggatcgttgtaaggagatccattctcgcctgcaaaagggtattgatacacttaagcttaatgaaaaagcgctggcagcatttcgtttcgccaacaaagcaatggcaacgcagcgagtacgaagtttatacgcgttggctaaacgccgtggtgaagatacgactatcgaatcatttgatattgaaaagaatcgtagctggcgtccttttcagttggcattcttgttgctctctataccttcgttggcagacccaaaccattccgatcgtgtgcagcctgtaaatgcatatgctgatcttttatggttccccacgggtggtggtaaaactgaagcttatttaggcgttgcggcttttacaatggccatacgccgcatgcagggtaatttgggggggtatgatagttcgcgcggtttggcggtaataatgcgatatacattgcgcctgctaacattacaacaattccagcgtgcgacagccttaatttgtgctatggaagttttgcggcgagaagcactcaataatggcgacgtgtctctcggattagaaccatttactattggtctttgggttggcaacaaagtaacgcctggttcgactgaagagagtcatcgagctattgaagatgcccgtaatccgggaaaaaaccatgcgggaacggcctcacctgcacaattaactagttgtccatggtgtggttcatcaattatccccggacaggatgttgaagttaaaaaggataaattggggggaaggacgtttgttttttgcggtgataaaaaggggcgttgtgacttttccaaaggaaaatcaagtaaacaagcccatccaggattgcctgtattagtagtggatgaagagatctatcatcgccctcccacaatgatgattgctactgtagataagtttgccatgatggcatggcgtggccaggtgagaacgcttttcggccgtgtaggattggaatgtgaacgacatggtttgctctggcagggggctagctgcacaggaaatcatcccgcagccaaaggacaaccttcaactaaagttagggttatcaatccaatacgaccaccggaccttatcattcaggatgaattccacttaattagtggacctttgggcactatggttggattgtatgagactgctgttgatgaattatgtagttggaatcttgacgggaagtcggtcagaccaaagatcattgcttcaactgcaacagtccgtaaagctaaggaacaggtaaataatgtttttatgcgccaagtggcagtatttccaccacatgggatagacgttgaggataactttttctcagtacaacgacctataaaagaaaagtatggacgtcgttatcttggggtatgctcgcctggcagttcaaggcccgcaatgctgatccgtgtttacactgcattcctgaccgcagcacaggaattattcaaccactttggtgagcctgctgacccttatatgacaatggttggctatttcaactcgctacgcgaattaggcgggatgaagcgacttgcagaggatgacgtacaaacacgttcttaccgggtgcgaatgagcatggtggaaagaccggcattggcacaacgtagtataagtaatgttcgtgaattaacttcccgagtatccagtcaggatatccctaaatatcttgataatttagaggttaagtttaaatctgaatttgatactactactggtaagtatgtgactaaatggcaggagggggatactcgggctatagatatcgtccttgctactaatatgttgtctgtcggcgtcgatgttaaccgacttggtcttatggcagtaaatggtcagcctaaaggaacggccgaatatatccaggctaccagtcgtgtagggcgttcatttcctggtttagtttgtaccgtactaacttgggctcgtccaagagacctttctcattacgaaacattcgaacattaccatgccaccttctacaagcatgtagaggcccaatctgttactcctttttctcctcgagcgatggaccgtggtttaacaggtgcgttattaagtcttgttcgtctggaaaacgacgaattcagtcctaacgatggggctggtaagttgaatatgtctaatcaagccgagatcagtaatgcgattaaagcactggcgaatcgcgctggcaatgttgcagaagataattctcgcaaaaaattggcagagaatgaactgaaagaacgtgccgacgaatgggcaaaaaaagcgtcaatgggcggacggattctggcatatgaaaagcgcgggcctgaaaaagataagactgtcagcttattagactctccaggcctgaagccttgggacaactggacagtgcctatgtcaatgcgagaagttgaaccaggtgtgagacttataatgaacaccaaccatatagcggacgatcacgattggaagcctcgtcccgcaactaaggatgaggactga

SEQ ID NO: 227311 - DNA, 4032 bp, Klebsiella pneumoniae
atgagtttaaataacattcacgctgaatggctttctctggtagatatttcgggaccttttctcgctatcccagtattaacgcatacatttcctcagggactagaggtgcttagtagcttcaagcgtaggcggttgcgccaagcctatgatgaatggcgggaggcattagaactggaagatcctcagctagaagaattgcactctgcatggatagacgaagtgctgtcacgagtgttggaatttgatgatgatggtaaaggtgatgtgctgaaacgtgaagagtggtgtagaagccacttgaaatcagtattgccagatcagggagtggttgaatatcccgatttggcagttgttgatgaacagcaagataacaagccattgttactcatacatacctataaaccaaatgtagaactagaatcaacagtaaaatatgagggatggataaccaccccggcagatcgtatggttcagttatgtcgctcacttggttgccgtctcggattgctaaccaacggcgaatgctggatgttagtagatgcaccagtgggtgctgtaacgtctttctcaagctggtacgcacgtctttggagtcaagagccaatcacactgcaagcattcgtgcatttactaggaatccgccgtttcttcgttgacgagtctgagcagctacctgcattgtttgatgcttcgctgaagtaccaggatgaagtgactgacgctttaggtgaacaagtttgccgtgctgtagaagtgttaattcagtcgctggacaaagccgatcaggatcgaaatcgtgaattattgcacgatgtcaatgaaacagagctctatgaagctgcgttggcagtgatgatgcgattggtattcctgctctcagctgaggaacagggcctactgctcttaggtgacgaatgctatgagtctaattacgcaatttccactttgcgtatgcaactacggcaagaaccttcagagctccttgagcgacgttgggatgcctggacacgattgctttctaccttccgtgcagtttatggcggggtggagcatgaagagctgcgcctaccggcgttagggagttcattgtttgatcctgaccattttccttttcttgaaggaagaactaaaggctcaaactggaaaatcgatacagctgtacccttaccaataaataatcgaacggttctcctattactggaatctatccaactatttcaggggcgtactctttcttaccgcgcattagacgttgagcagatcggctatgtctatgaaggtttactggaacgtactgtcaaacgtgccgctgaagtgacgttagaactgaatgctaccaaaaaagctcaatcgccttgggttacgttagctgaactagattcagtaagtatggacggtactgagcagctgattgagctactgcatgaacgttctggtagttcgatcagtaagatacgtaatgatctatccaaactaattgatgatagtctgattgaacgcctcttgattacctgtcagggggataccaaattacgtgatcgaattaaaccttatgtacatttgcttcgtacagatccttggggctatccgctggtttatccagcaggatcttttattgtaactagtggttccaatcgtcgtgaaacaggtactcattacacacctaagtcacttaccgaggcgattgttgctgaaacactaacaccactgacttatattggcccaacagagggtattccacgtgaaaagtggcaactaaaatcctcttctgaactactcactctcaagatttgtgatcctgcaatgggttcgggagcctttttagttcaaacttgccgctggctggccgatcgacttgttgaatcttggactttagctgaagagtcaggaaaaaaaatcagtgttgatggctacattctaggtacttcgagtactcaagaatatctaccacatgatacagacgctcgaatagttattgctcgtcggttaattgccgaacgctgtctttacggtgttgacttaaatccattggctgttgagctagctaaactttccatttggttggtaacactcgctaaagatcgaccatttggttttcttgagcacaatttacggtgtggtgacagcttacttggtattgaacgaatagatcagcttacccagttttcgatgaatcctacagcccaaggacaaaagcatctttttagcgacgaaattgaatgtgcggtagatgaagcagttgtgctacgtcagcagttgcgcaaaatgacaattcgcgacatacatgatgtggaatcaatgggagaattgaactcgcttgcagaagttaggctgaaaataactagatgtattgcagatgcgtatatcggagaagtccttatggcgcaaggcaatggtacggatctcgaaaaggctttagctcatctttccattcaagttagagatgttatacaaggcaatacagaacaacttgagttgataaaacaaagagcactcacagctttgtcttttgaactatccgtaggaaaagcttctcggagacctttccattggccgttagaatttccggaggtatttagtcttgatggtggttttgattgtattgtcggaaatccaccattcctgggcgggcaaaaaattacaggtgccatgggcgattgttatcgcgaatatttggtaaatacaatcgcatgtggtaagcgaggttctgctgacttagttgcgtacttttttattaaagccaatgctttactttgctctagtggtttctttggattgatagcggttaatacgatatcagaagggaacactagagaaattggacttgattcgatacttcgttgtggttcggtgatatatagggcaaacccaaacctagtatggcctggaaaagcaaatgtagtcacaagtagtgtttttgtttctaaatcaaattggaatgctcctttttatatctcaggtcaacaagttcctgtaattagttccgcgctaacacaacgggaaaactggcaacccgttaagttaaaagacagttgtggtcttgtatttcaaggggttattacgcttggtgatggatttttgatagataacgatacctatgaaaaatgggtggacgaaaatgatgaatcctgcaaagtagtattcgattatttgattggtaaagaagtcaatcagtcaccaaggcacctgcccgcacggaaagtgatcaatttttttgactggagtatggatactagctctaaattcacaagtgcttttaactatgtaatagatcatgttaaagaaaatagagaaaatgataaagataaaggagcaagggaggcttggtggcgatttcttcggccgcggcctgaactttttcatcttcttggacgaggaggttcttttgaaaaacatccgaaaggatgggataaggacaaaaaagcacttgaccgtgtaattgtttttgcaactggcgcgacaaaatacccctgcttcacgttagtcccaaacacttatatttatgcacattctctatgtgtaattgccagtgacagctattcattattttcgtgtttatcatcagatatccatggaatatgggcgttcgagcatggttcacggttgcatgaacgtcttagatatacccatggagatatctttgaaacattccctttgccaggtgagaaaaatcatgaaatattatcaaatcttggggcagagtttttcgaagaaagggcgggatatatggtgaataaaaatgttggtatgaccaagttttacaacgaattccataatccggcgataaattcaccatcactcagcaaattacgtgaattgcaggtgagtataaaccatgctgtgctgcgtgcgtatggttttgatgatatagatttaaatcatgattttcatgaggttgcataccttcctgaaggaaagaatattcgttacacgatttgtgagtctgcacgggaaaaattactctatcggttggcctcattgaataaaattcgttatgaagaagggcagaaaggtgggattaacgatctctag

SEQ ID NO: 227312 - DNA, 3141 bp, Klebsiella pneumoniae
atggatatttcgaatcaaaaaaatcatcctcaacaaattattccagagccagggcaacttgttgaagttcgtcgacgccagtggatcgttgttgaggtttcatcttcccagttaccaccgccttcgtctcagcagcatctcataactctttcatccatagatgaagatggtttaggagaactacttgaagttatctgggaaattgaacctggcgctcaagtaattgaacgagctggtttaccttcgattactggcctggatgactctgacactcttgaggcttttcttgatgcagtgcgttggggagctgtcactaaagctgaccatcgtaacttcttacaagcaccttttcgtagtggcgtaagcattgaagacttccagcttgatccgttggtgcgtgcaattgatatggcccgtgtcaacctgcttatcgccgatgatgttggacttggtaagaccattgaagctgggctaatcatccaggaaatgttacttcggcatcgagctcgcacagttttgattgtttgccctgcgtcgctgcaagagaagtggcgtgttgagatgttagaaaaattcggtcttgaatttcaaatcgtcgacaccgcttatattaagcgattaagacgagaacgtggcattcatgccaatccgtggacatcgcatccacggttaatcacttcaatggattgggccaaaagtggggaaggtttgcgttctatgcgtgacgtccttcccttaaagcctagttatccacgaaagtttgacatgcttgtcattgatgaggcacacaatatagccccagtgggtagagctaactatgcaatggaaagccagcgtactaggtttattcgttcgataagcccacacttccaacaccgtttgtttttgacagcgactccacataatggctataccgagtctttcacttcgttgcttgagttgctggatgatcaacgttttgccagaaatgtacttccagatgagaagttgttgaatcaggtgatgatacgccgcctcaaaagtgatctggtcgattcagagggcaatccactttacgctcaacgtaagctcaaagccttatccgtcgaatattcggctcaagagcgttctatccacaaaaaactggatgaatattgccatagccgggagcaaggagcagagaaagccagcaatacttttgggacgacctttgtcaaccagctacttaaaaaaagacttttttcatcaccagcagcctttgcatctactcttgaaaggcacatatcaactttgatgcatggcaaacggcctaatgataaaaatgccatggctgatcgtatccttcataaagcaatccttcgtctagaagaagattacgccgacgatcaagagatagagaatgcccaatctgaagcggtggaagaagcaacacattacacccaaccgctgacgaatgaacagaaacaaatactcgatgtattgcgtcaatgggcgcaagtagctaagaatcaggtagactctaaagccaaggcaatacttgattggattaatacgaatcttaaaacaaataatcagtggaatgagtaccgggtaattctgtttactgaatatcgaacgacacatcaatggatgcatgagattctggccagccacggacttgctggtgagcgcttagctgttttacatggtagcatgccgcaagaagaacgagaaaaagttaaagccgccttccagacatcaccaaaggcttctgctgttcgcatactcctcgcaactgatgccgcctcagaaggcatcgacttgcaaaactattgtaactaccttatccatttagaaattccatataaccccaatgtaatggaacaacgtaacggtcgtatagaccgccacggacaacgccaaaaagaagttgtaatttggcacccagttgatggtgtggataaggtgaatgctcgtatcggtggtcacggtgacgatatcctacgagcattacgcaaacttgaatcaatgcgggctgacatgggtagcgtcaatccagtcatcgcacctcaaatgtcaggactgattgaaggcactatcaaagattttgatacacgtctggctgaagccagaattgcaaaaacgaaacgttttattggtgttgagcgcgaactaaaagagagaattgcgaagctacatgagcgactcctttcagccagacaggagcttcatctcacacctgagcatatacaaatagccgtcaatacagctctcatgttagctggtcgtacaactcttgaaccttttgagttacacgatgctccctcaggttctgtattcaggatacctgctctctcaggtacatgggcacgttgtcttgaaggacttcgtcatccccatacacaggagattcgtcctgtcacttttgatcacagcgtggcgaaaggacgtgatgatgtcgtactcgtccatttaaatcacctgttagtgcagatgtgtctacgtctattacgagcagaaatatgggcgcgcgatgatataaaaaaattacatcgagttacggtgcgctcagtaccagacatgttacttgaaagccctgcggtcgctgttgtttcacgattggtgattactggaggtaatcaccatcgacttcatgaagaattgacaatagctggtggctatcttggcgacaaaaattttaggcgcgaggatggtgttaataaactacagcaatggtttgagcaggcgaaacctgttactactgaattttcgcttttggatgcctttcgcatgcgttttgagcgagcacaaaacagtattctccagtccgttgaagctagatcaaaagatcgcctgcaatatctgactaatacccttcagacccgcaaagagcgtgaattgtctgatatcaataacatactcaatgaacttgaaataactatcaaatctgagttagctaaagatcaacaacctatgcagttttcattgttttcagaagatgaacgcgctcaaatcaagcgtgataatgcagcgctcgaagcccgtctcgctcgcattcccgcagagcgggaacaggaagtacaaacaatcgaacttcgctataccaacattgatgatcgcacattccctgtcgccgtcatttttctcgtcccagaatctactattcagagaggtgcagcatga

SEQ ID NO: 227313 - DNA, 1053 bp, Klebsiella pneumoniae
atgaaaaaagtatcttgtgttgatttattttgtggtgcaggtgggttaacacatggtcttgtgcttgaaggagtacctgttgtcgcaggtattgatattgatcctgcctgcaagtttccctatgagactaataataaagcaaaatttattgagaaaagcgtaagcgattttacatcttcagacttgaatgagctctacgctgattcagatgtaaggattcttgctggctgcgcaccttgccaaccgttctcaagctatgcaaggcgttatgagcatggtggtaaggatggtaagtgggggctgttgtacgagttttctcgcttggctgaggaaactcgccctgatctgatcactatggagaatgtaccttccgtggcaagacatgaagttttcagcgactttgtcgataccttaaaacgtattggctatcacgtttggtttaatgtcattgattgcactcactatgacgtcccccagatgcgtaagcgcatggtactgcttgcttctttacacggtgagataaaactcgccgagtcaacgtgcactcagccaattacagtgagacaagccataagcgatctgccagctttaaaagcaggcgaaactagttctggggataagctacatgtgacttcaacgttgtcggaaaaaaatctgcaacgtattaaagcttcaaaacccggtggaacgtggcgtgactggcctgaacatttagttgctgattgccatcgtacagatagaggaaaaacatactctagtgtctatggtcgaatggaatgggataaacctgctccgactatgactactcagtgttatggtttcgggaatggccgctttggtcacccagagcaagatcgtgcaatctcattgagagaagctgctattcttcagagttttccgcaggactacgtatttatccccgatgatagcaatgtcaatcttagagttctgggccgaatgattggaaatgcagttccggtaaagctgggtcaggcaatcgctcgcagtataaattcacaccttgacgatttgaacttggtcgcaacaaagtga

SEQ ID NO: 227314 - DNA, 891 bp, Klebsiella pneumoniae
atgcccccacataaaatccgccaggagtggctgacgctggacgaggccgcagaagtcatacggcagcacaacatcacgttgctgcccgccgacctgatccgccatgccctgcacggcgatctgtcgctctcggtctacttcccttcgcccgttctgctgagaccactcaatcctccttgccgctttgcctgccgattcagcaagcctccctttccgccttcgcagtgcaacaaacccggcaaccgcaagataatggcgaactctccgccatgcagacgcgacccgactctgcaactgaccaccagccatctgtggaatttgccgttaatcggccttgagcgtctgctgctccaccagcaactggcgaaaacgttgaatcgcccttgtcccaaagatacccattgctgcaatcaaattggcattgtggtctgcgatgagaacgacagttactaccaactctgttgccgcaaatcgttgcgggagcttttactggaactgctcgccacgcaaaacaaccttcaggaagaactacatctgctgattggccagttatatggtaatggtcgcaatgaccttaagtcccggctcagtctgtccgtctgctacctgcaggatacattgcctcctgacgcactgttcgtcatccgccgcactcatctcaaggccttcctgacccgccatcagccggaatcaaaggagcggatcacctccgcgctttcccgtttgctgtggctggcctgcaagcacaacccgcaactggacgacgaaatgctggagcatccctacaaactgctgaacattttcgaatgctgggcgcgtgaggaaggtatgcacctgccgctgagccccgagacgttgaaaaccgcactccagcgcggcgcaccgccgtaa

SEQ ID NO: 227315 - DNA, 195 bp, Klebsiella pneumoniae
atgaatagcgacagatttttacgcttacgccaggtggaagacaaaatcggcttcggtaaatcgtggatttaccggcaaatccagctgcaacagtttccgccatccatccgactcaacagccgccacgtcgcctggctggaaagcgaggtggatgcctggatccaccagcgcatccgacttacccgcgatgtctga

SEQ ID NO: 227316 - DNA, 1251 bp, Klebsiella pneumoniae
atgtgtgcttcacacctgctcaaccgctggcttcacggtgccagcaataccggagaacaggaaatggtccaggtcagcctggagcaaatccagcccttctctctcaatccccgcgtcacccgcaaccccggctatgatgcgctgaaagcgtcaattctcgcccgtgggctagataacccgccggtgttgacccgtcgccccggtgatgaaaaatacatgctcgccagcggcgggaatacgcacctcgccatcctcaatgaactgtggcaggagacacaggatgagcgttaccaccgcgtctgctggccgttcagaccatggccggaaacgctgtcaccgcagcaaggcgaagtccagtgcctgatcggccatctggcggaaagcgacctgcataacggattgatgtttatcgaacgggcggaaggtattctgcatctgcgcgatctttacctcgaggcaggtattgaatgcccgacgcagctggcgctggcggagcaactgacccgcgacggttatcccgtcagccagtcgcaaatcagccggatgctacagaccgtggactggctgttgccctgcatccctaacgcgctatacggcggccttacccgaaaggttatcgatcgcctgctggcactacgcagcgcggcggaacaggtctgggtaaagctgatgccgctggaacgccagccggaatttgccgacctgttcagcaccgccctcgccaccttcaacggcgagccggaagctgtggtaccgcaactggtgcaggacgaactgctcggcgagatgagctgtcgcagcggcataagctggaatacattgctggcggaactgaccgatggtcagagcaagcggcaggttctgctggggcctccggtcgaaaaggtcctctggccgccaccgccggaagtggaaaaagcaccactaccagagcctgagccaccgactgaacccgccgcgcccgatgagccaaagccctcaccgctggtgcatacgacacagtcgctgtttgcctgctggggactggatgcctgtatccagccggacgacagcgctccggccgatttcaccctcgcgccttgccacgattttccccatccggcggcacggcgctgctatcaggtgctggccgccctcgaattgctgttgtcgccggactacgacaacgctcagatccagcaactgatgcagcttatcagcctgtgccgccagcggcggctgcgggaggttcgccatgacgccctcagttaa

SEQ ID NO: 227317 - DNA, 558 bp, Klebsiella pneumoniae
atgacgccctcagttaaccaggcagtgctcacccacatcgtccaggcgctgaaggatggacagatccgctactgcgaatcgctgggcttcagcccgcaggagctgtgcgaactgacgcgccttaccgccgacgacatcctgtttctcagcaacagtgcggtgcagttcatcaccacccacattgaccacgagatgctgggccggatgctggcgaggatggagcaggagcggctgttccagcagcgtctggaggaagccctgtcgctgggcgcgtccatcgaattcatcaaccactattttggcctttccacgccggaggtctgcgcccggcggcggctgattggcttgtttgtccggcaagggcgcaacaatgctcccgatgagcaggtggaaacgctggtgtggaacgagtggcagaaaacgggcgtgaaaaagttcgactcacccgaagcgctgaccgccatgatggcgatggcccgcgaacacgatctgtcgctgacggtcatctggaacctgctgcgccagtggactcaggagaagctgctgtatgaagagtga

SEQ ID NO: 227318 - DNA, 873 bp, Klebsiella pneumoniae
atgaagagtgacgataggctgctgtttctcggcaacccgcagcagagcgtgccgaagcgcctgctgctggcgcgcaacctctccccgcgcgacaagttcacgtggcaactgctgcgcctgcacgcgcgcgacgacggcagcggcgtcttcccgtcatacaacgaactccagggctggctctccgaccagcctgagggcgagaaggcctcacgtagtaccgtcagcaacgcgctgatgatgctgcggatcactcgctggctgagcctgtgccagcggctgcgcgacgagccaagcggcaggatcaccggtaacctctacgccctgcatgatgcgcctttatcccatgccgatgcctgtaggatggacagcgaatatctggcgctgctcacggcctgctcccatcaccgcaaccggcgtatccgcaacatcgccatcgggttactgctcaccctgcaacaacctgtggacagtggacgaacctgcactgagtctccattgaagaccgcccctggtcttaatcgaggactcagtaaaaaatgcccgagtcttcaattaagactcagtgatgtggcgggggctggcgggcagccggagccgcattgcgtacatactggtacagatttaaacaataaacatcaaaagcgtacgcaactgctgcactggcctgtggataatcccttcagcgccagcgagcgccgcgccgccgaacgcgccatgcgcaatctggagcccgctctctgccagcaggtgctggacgactgtctgtggcggatcgccgcccacgatatccaccgccccctcgcctatcttatggcaacactggagaaggccagacggggcgagttcaatcagcttcggcgcaggcgcagatag

SEQ ID NO: 227319 - DNA, 612 bp, Klebsiella pneumoniae
atgcctggcacaaccctgttcagcgatatctgcatcaccctgcacacccgcgtcgccgcccggctgtggcaggcgcatcccactggcatgctgctctgtctggcgttactcaggcgtctgctgcgcgccgaagaggccgacgatccgtgggccgcccactggctgaagcaactgcgcatccgcctgaacctgatcgcgcacctgctgaagcaaaaaaatcgtcggctggaccaggccttcgccagcctgccgggcgctatccacaccacgcaggtcagtaacccgtccccgaccgaattcatcctgccgctggcgctgttctcgccacccggttcgcgcctgctgcaacagttgattgattacgatctgctggtccgccgcaccctgcttgcctggcacctcggccttatcacccaagcggagaagcgcgatttcattgccaccatcccacggctaatgctccaggtgttcagcttcgtgaaccgctttcgcaccactggcgtgacccgcgccgacgtgagggcgaacagtccgctggcgcagtcgatggcgcataagctcgggaatttgcccaaaaagatgcttgcggagatcctgcgtgatgaacaatga

SEQ ID NO: 227320 - DNA, 426 bp, Klebsiella pneumoniae
atgaacaatgacgacgacgaagaaagcgccgcccgcaaaagctcgctaaagggccttttaaaggcctttaagggtaagggagagctgcgagcgctggtgcgggaattacagacgctgcgcatacagttgcaactacgccagccggtgctgaaacaggcggtgtatgaattgccggggcgtaacgtaccgctgatcctgtgcagcaacccggcgcgctccggcgtcagctatctgcgctggcgtaatctggacaacaaccgttcgggaggcgtggcgttgcaggaggccattcaacagcctgacgtaagcgatgaactgcgcgatgcgctgatggcgctcgaatggcggcggcaggtgctgaatacgcagctttcggtggtgatgtttatgctgcggcggatacagctgttaaccacgctggtttaa

SEQ ID NO: 227321 - DNA, 1827 bp, Klebsiella pneumoniae
atgcaactttacctgtgcgaaaaaccctctcaggcgcgcgatatcgcccgtgttcttgacgcccgtaaccgcagcgacggctacctgcataacgccaccgtgaccatcacctggtgcttcggccatctgctgagcatggccgcgccggaggattacgatccggcgctgaaacactggcgggcagagcatctgccgtttattcccccggcatggcggctggtgatccgcccggaggtgcgcaagcagttccgtatcatcgaaaagctgctgaaacaggcggatgcagtggtgattgccaccgatgccgaccgcgaaggcgaaaccatcgcccgtgaaattctggagcaatgtcgctggcgcggtccggtccagcggctgtggctgtcggcactggatgacgccagtatccacaaggcgcttgctgcgatgcgatccggtgacagtacgtatccgctgtatcaggctggactggcgcgcgcccgcgccgactggctggtcggcatcaacatgacccgcgcctgcacgctgatgaaccggcggcacaaaggcgtgctctccgtgggccgggtgcagacgccgaccttacgcctggtggtggaacgcgaccgggagatatcccgcttcacgccccgcccctggtggcgggtggacgcccggttgcatgctgagggcactacctttctggcgcagtggcaacccgatggggtgtactgtgacgacgaaggccgctgtatccgtgaatccgccgcccgtgaggccactgcgagcctgcaacaggccgggaccacgctggtactggatgtgaccacccggcgggagaaaacgccgccaccgctggccttcaccctcagcgccctgcagcaggtctgctcaaaacagtggggcatgggcgcgcaggaggtactggatatcgcccagcgcctgtatgaaacccataaggccaccacctatccgcgcaccgactgcggctggctgccgctctccatgcacactgaagcaccgcaggttctggcggcgctggtcgccagcgacatctcactgcagcccctcgccacgcaactgaatttgcaacaacactcccggctatgggacgacagcaaaatcaccgcccaccatggcatcatcccgacccgtaaaacggtagatctgacgcagatgaatgacagcgagcgcaaggtttacggcctggtacgcagccattttctggcgcagtttctgtcggaccatgaggtggataaaaccgacctgcgcctgaactgcgctggggaaacgctggctgcccgaggctcagtcgtgattgtcagcggctggcaacaactgtttttacgcgagatggcaacacattcaccggaagaaacgcagtcacttcccgtcctgcaacagggacaaacctgccaggtggaacaggtagacgttcgcgcccgtcagactcaaccgccggagcactacaccgaagggacgctgattgccgcgatgaaaaacgccgcccgttttgtcagcgatgagcgcttgaaacagcggctgaaagagaacgccggtattggcaccgaagccacccgcgccgggattatccagacgctgcttaagcgtggttatctgattaagcaacgccgctttctgttggcaacggataccgccagcgcgctgattgacgccctgccggaaaagctgaaagatccgggcaccactgcactgtgggagcagatgctggatgacatcgcgacggggaaaatggggctggaggcgttcctggtgcagcagcaagaaaccgttacagcgctcacggctcaaatagtcagaggccagaaaagtggctcatcaggttag

SEQ ID NO: 227322 - DNA, 468 bp, Klebsiella pneumoniae
atgactctcagaacttttcccatgttgcacgatctctccgactctctgtttgcggaccgttttaaccgcatcgatcgcctttttagccagctaaccggcagtacaccgttgccctccacgccttcttacaatatccggcggatgggtgataaccgctatgaactgacgctcagtgtgccgggctggaaagagagcgaactggaaattgaaaccgtcggcggtcagctgaacattagcggtaaacgtgaagaggagaaaaccgaaaacggcgaagaaggatggatccatcggggtatcagccgcagcgacttccgggccagctatagtctgccggagcatgtgaaagtgaccggcgcttcgctggaaaacggcttgctggcgattgaattacaccaggatatcccggaagaagagaaaccgcagcgcatcgccatcaacaacaacccggcgattgaacacaagccgtaa

SEQ ID NO: 227323 - DNA, 444 bp, Klebsiella pneumoniae
atgaacgatacccattacttcaacctgtataccagcggtctgggctacctcaaccgcatccgggaagtgaccccgaaaaaaggcgaaccgttcctgtgctgcgacattgccgcactgcggggcgaagccagcaacgcggagcacacctggttcgactgccgcgtcagcggcaaggaagcgcagaaactggtgcgccgctgtattgacgcctgtgagcagaagcgcaaggtactgatccagttccgcctcggcgatctgtatgccgacacctttgtctacagcaaaggcgaccgtaaaggcgaaaccggcgtcagcctgaaagcccatctgctgcacatcgggctcataaaaattgatggtgaagaggtttaccgggcagagcgcgaagcggaatcccagccagcgccagccgcaccgccagcagtgcctgtaccgcagttctga

SEQ ID NO: 227324 - DNA, 384 bp, Klebsiella pneumoniae
atgatgaataccgtattgaactcacgcgaagaagcccttaaccggggcaaactgattaaccttgatgacgaggcgctggacgctggcttaccgctggatctggccattacccttccggcccacaagcactgtcttgaagaccgggatgacaacaccatcatggagttgctgaaaggtgttgagatggcagcggtagtggcctttatctcccaccaaccgccgcaacgcaccattcgtatcgattaccgctcggtgctgacgcaaaaaaccaacggcagcacacagcagcaaaccgtcaggctgacgttacgcgttcatttttctgagcaaggcatccccatcgccgccacgctggggctgaggggggaaagattcccttactga

SEQ ID NO: 227325 - DNA, 660 bp, Klebsiella pneumoniae
atgaaacgactgctgccagccctgatactgtccattttcaacgccgtggccgctgcctctccagacgcgccagaagtcgtccgctacgaccgctatctgctggtcagcccgtcaccgcaacagccgccactcgaacagcttaccgccctgtccattccgcccggttttcacccgacggtaggggaagcgttgcagtacctgctgcgtggcagcggctggtccttgtgtcttgccgatgcgcgccgggcgcagctttatggcctcccgttaccgttgagccagtaccacaccggcccgctgcgcctgaaggccgccctgcaactgctggcgagcccggcatggcggatgaccaccgacgaaaaccgccgtgaagtctgttttaccagcgaccgttccctccccccgacggtggcttaccgtcatcccgtgtccctccgccctttggggccgttaacggccccgttttttttcgccgggaccgtacagcgcggtgatatccgcctggcagtgattgtgccgcccgaagccgtttacctccatcaggtggtatggctgcgcaggggagaacagtggcatggctggcgtctggagcggtttgatgagcgccgggcagtgttccgtcacggcaagcgccagctaacgctgaaagtgccggagtaa

SEQ ID NO: 227326 - DNA, 675 bp, Klebsiella pneumoniae
atgaaacgcctgattctcctggtactactcatcgccagtgtgggggcgcaaccgcttcaggtgcagaccagccagaacgcggactcagccctgcaacccctgaccatgcaacaacaggctgcaatctggggcgtcacgccggaagagtggcagcgctatctcacgctgaagcagcaggcgcgcggcgtctggtcgccggggctcgatccgctaaccatgctgggtgtggaggccgaaaacgaccatgagcgccagcgcttcgccgaactgctggtcagacaggaataccagcggctggagaaggaactcgccttccagcgcgcctatgatgccgcctggcaacgcctctatccgggcctgacgccgctgaaaaccacgtccgccagcactgcccgggtttcgctgtttgtccaggataactgcccgccctgcgacagcctgctgcgtaccctgctggcgcaacagcgctcgctggatatctggctggtcggaagcgaaggcgatgataaccgggtgcgccgctgggcgatggcgcatggcattgatgcaaaactggtgagtgaacacagcatcacacttaaccacgacgcgggacgctggctccttttagggcagagcaaaatcccggtggcgctggagcgtaagggggagcaatggcgcgaggtccagccctga

SEQ ID NO: 227327 - DNA, 519 bp, Klebsiella pneumoniae
atggcgcgaggtccagccctgatcctgctgctgccctgcctggcgctggcacagcctctgccggaagcgtacctgcgcgccgcagagcatttccgcgtgccgccggagctactatgggccgtcacgcagaccgaaagcggcgcgaacctgaacggcagacatcttccgtggccgtggacgctcaatatcaaagggaccggctaccgctacgccagccgggagcaggcctgtcaggcgctgctggccgctatccgccgcatcagcccgaagcgcattgacgtggggctcgggcaaatcaatatcggctggcaccgggcgtattttgactctccctgcgatgccttgcatccgctgcagaacctgtcgctcaccgcccgcctgctgcgtaagcgctacgatgaacgtcccggaagctggctcaatgctgccgcccgttatcaccgtcctgctggcggcgcgcctgccgcacgctaccgcaagctggtcagccgccatctgcaacgggcaacaccgccatga

SEQ ID NO: 227328 - DNA, 2019 bp, Klebsiella pneumoniae
atgagccgctacgccctggaggcgctgctgcgcccacccgtggagttttacagcaccgtcaccgctggctgtggcgcattaatctgcctgacgcaggccccactgctgatgctgacgctatggcaggcccgcctgatggccagcgccctgatgctgctggccctccgacgcggctggcagggctggcacatcgtgcgctaccaccgcaacctcctgtgcctgccgcgctacgcgctcaccagccggaaaatcccggtcagccgccagcggctgtttctcggtaaaggctttcgctggctgcccatccacacccaacggctgtacgactgcctgcaaccggaagccgcacgctggctgcgccccggagggtgttatcgcctggcaaggcatatcgaaaaacgcgccgaacatactcttccccgtcttacccggctgctcagcgccgatcgctggctgaatccggtgcgcccactgccgcccgttggcggcaatccgtggctgcacggggtggagctgaaagagtgcgacgtcaccctgccgctcagtgaacgccccggccacacgctggtgctcggcaccacccgcgtcggcaaaacccggctggcggaactgcttgccactcaggacatccgccgtggtgaggtggtaatcgttttcgatccgaaaggcgacgcggatctactgaagcgtctgtggacagaggcgcagcgcgccggacgcggcgaccgctttatcctgttccatctggcctacccaaagatctccgcccgctacaacgcgatagggcgctttggccgcatctcggaagtggcatcgcgcctcaccggacagctttccggcgaaggtaactcggcagccttccgcgagttcgcctggcgctttgtcaacatcatcgcccgcgccctggtggcgctcggacagcgccccgactatcagttaatttcccgccacgtggtcaatatcgacgccctgtttatcgactatgcccgcatcgtgctgccgcgccacaacgctcgggcgtgggaagtggtggcgcaactggcggagcgcgttaacgacaaaaacacgccgcgccatatgctgggacgcgatcctcacgtagtggcgctggaacagtacctcaacgcggagaaattctacgatccgatcctcgacggtctgctctcggcggtgcgctatgacaaaacctacttcgacaagattgtcgcttcgctgctgccgctgctggaaaagctgaccaccggtacgctcgccgccctgctcgccccggactaccacgatctggatgatgcacgcccgatcctcgactggcagcaggcgatccgtcagaaagcagtggtgtatgtcggactggatgcgctgtctgatgcggtggttgctgccgccgccggcaattccatgtttgccgacctggtgagcgttgccgggcatctctataaatttggcctcaatgatggactgcccggcaatagcgaaaaaccgtcgcctgtcaacctgcactgcgatgagtttaatgaactgatgggggaggagtttatcccgctggtcaacaagggtggcggcgcgggcattcaggtcaccgcctacacccagacgctgagtgatattcaggcccgcatcggcagcgcccccaaggcaggccaggtggtgggtaactttaataacctgattatgctgcgggtgtgcgaaaccgccaccgccgaactgctgacgaagcaactgccgcaggtggaagtgcgcagccgtcaggttagctccggcgtcaccgacacgccgggcggcatcaacagcttcagcagcaacacacgcgagcaggtagttacccgcaatgtaccgctgctggataccgccgcgctgatccagcttcccaaaggtcaggcttttgctctacttgagggtggacagttgtggaaaattcgtctgccactgcccgtggcggataaaccctgcccactaccggagtccgtcgcacaactggcggcctggatgcagacgcgccagcagggacaggcggaatga

SEQ ID NO: 227329 - DNA, 633 bp, Klebsiella pneumoniae
atgagtgagcagcgaacgcctccgtcacgcccaccacagggaccaattggctggctgctgtcgctgaccgggcggctcatcgggctggttattggtgcgctggtgctgcggattgtattggaactggcggggctgtatttctggtggcctcaggaagggagcaggcatgtttttcaggtgatgaaccgggagcgggtggagctggttattgcgttacagccacatccactgaaggatgaaattgtcatgctgctggagaacggggcaactcgcgtgcttatgcccaactggcttctgaagaaaccgttcaccggcctggcctatacgctggtgagttttatgcagcgcctgatatggcttgccgccatgctccccctgctctgcctgtgtgttttaatcggactgatagaaggtctagtacaacgggacttgaggcggtttggctccgggctgaaatcggtttttctccaccgctacgtcatcaggtccggcagttcagtcgccaccacgctgtgggtgttttatctggcacagccgctgtttctgccctctatgctgattttactgcctgccaccttatggtttggagtaacggtatggatagtggctggtagctttaagcgctggttataa

SEQ ID NO: 227330 - DNA, 4956 bp, Klebsiella pneumoniae
atgaaactacatatcgcggcaacgcaagggttacaccaaaacgagcacaatgccattcttgccattgagaaagcccttcctgcacactgggttgggtatgcgggtatcttgttgctcgacaaaaatcgtaaaagtctagaatttgatgtattgatcttcgccgaggatcgcatcttgatgatagaacttaagaacttccacggccaaattcatatggaagacgaccagtggatccagaccacgcctagtgggcgtaaaatcaagcatggctctcccatcgaccgcaagcgtgagcacgcccaacgaatcaagtccatgttcgatgaagagctgcgcgcgctgtgggggaatactttctacgaaatccaagcgttggtagttctctctggcgatgcaaagattacacagctatcgccaaaggataaaggctttgtgctaacgcttgatgagttcttgaccatcgcgaatctagatacctattttgacaaaatgccctacaccaaggctgaagggtattttcgccgctatcctgaaaagcgcccatgtgcccccgggcaaattgccatttttgagaagtggaaacgtggagggagttatgtccagatccgccagaagctcgaagcaggctatgtaatcacggagaagaccccacatctagagggcccccacgattactacaatgagtttgacggcgaacatgagcgtgattcggacgacaaaagccagatacgaatatgggacttcactaagatggcccatgtcggcacagatatgtctgtgcgcgttttttttggcttacgtgaggaccgaacgcagcggcatatacgtcgaaccgatagtcaactaggcaaagactatttattggaacccaagcacaaccttcaagaagacacacttaccgtggacatggccgaagtctaccaacttcctaggctagccgagcgtttggacgaatacctagtatctacaccgttgtcgattgaaaaacgtacattattattaagagctctgctaactcccttggccggtatgcatgccatgggagtatatcaccgcgatttgagtgctaaacgcttgtggtgggaccgggaacgcaatgccatcatcgtcagtggcctgacaagtgccaaatttccggatttggggcataaaagcatcagcgatatgcgtcaggagttggatacaacgggtatcgtgctgccagaagatgcctttggtgagaccgaggtattgggtcaagcggtggatgtgttccaactgggagtactgtgttaccaaattgcctatggagagcatctaaccttatcccaagatgagcccccccaatggaagcagcctctaaatgaccccttcgaaggtaaactagacagatttatccagcgtagcctagagcacgatgcatcagagcgccacacagatgcgggtgcaatgctggaggcgcttacgcgaaccctgaattttcaaaacctcgatactaacgaagataaggttagggtgctcaatgcgttagctgcattcaatactgatgctatgccgataacgcaatatcctcaggtggaagcaccgagtactgatcctctgcgccaacgtatgactttccgctccacaactgttgatgggcagccctgtactgtgcgtatatatttgaatgcacgccccaacaaggataaccatggtcagtcccagcggcttctgcactttcttgaacgctgtgccgtcgcctccaataatgttttgccgattccgccattaattgaattcggctgcggcatgatgggaacacatgtcgttcagtcttatgccctaggggagagcttggaacaatggatggtgctgtccaaccatagttatgaggagcgcttccaattagctgatgcactgattcgtgcagtgcataacctacacgatctggatctaagtcatggtgatctgaaaccggaaaatttattggtccaggcggaaggaggcaagctgggcattctgctgcttgatatgtttgacttagagctggatggccttgctccggcaaattctgaatactccccaaccaccgacgtcagcgccacggcgcgtgaccgctatgccgtatacatgattgtagatgagatatttgctgcctgcattcatcctggcgccaataaaatacgtagggagatccgtaatgcgttgggagataataacgctgtacctcgtaacctagacatgttacggcgcacaatgatacatgcaaatgaacccgagttggttgaggctacgcccttggtgatcgagagtttgtatttccccaacgagcagggcgaactgttcgagatggactcaggcatctaccacctgacggtcaattatactaagggtaatattctaaaattattcttcttgggtgtgtcccataaattgacactgaatctcaaagtagatgggccgagtctaaccgtgcatcgtatgttctatgaccggttaggtacgggggagatggtgtatgacacccgtaataaccgcaagaatgataatcgtgccatgtcggtcgggcagccctttttacttaaaaaaggttcttatggtgcgacaaatactgaactactaaactttgtcagaacattacacgtagtgcaacatgtcctggacatcaagcccgcagaagaaccaccgacggcagttgccgatgctccaggggaaagtcttaagcgcctctggctgcgcctagtagaagtagagcgcgaaacactgcccaccgtcaaagtgattgcaagccctaaggagcgagatggcatcgttcatgtacaggttaatgagaatatcgacgctttagagtttgctgatgatgacgtgatcaacgtgacagcagatgatcatgaaactcacttcggccaactggatgttactaagtccggcaatggtgtgctggtgctctcggatgacaaccgcgggaataacttccgcctgcaaaacattcgagaagatacaatcctgactctgtctaattcgggtagtgatgttagctgggagcgacgagaccgggcactatcacgcattattgctggtgatgcagtgatgggggatctaatcgaccgcttcgtaattggccctcgaggttgccagcctccagcattacctatgccgaccgacgaacaaatcagccgctatggactggatgagtctaaacgcgccgcattcctgtatttgctacaaaatccactcagtgtgttgatgggcccgccgggtacgggaaaaacaacactacttagcgcaacactagattatctgctgaatgatgctgacgtacgccgcgtactggtggtgagtcaatcgcatactgcggtcgacgaagtggctaaccgtgtgcgtgagttgagctttaagcgccaggaacaatccccggatttcaaactgccaagcattgtacgcttaggtgagcgccgccgggtcagcgaaggtatgctggatgttcacactaatgctctacaagctcaagcccgtacggcctttcaccgcgatcttgaagtccggctgctagcactgtcagcacgcctgaaattgcctgaggcatttgtgctggaatctgccgctctgtatcgttcctgcggtcgtgaattgttcgagttcacccctgcccgaaatgaagtaagggaattccagcaagatagtgtcgatatggataacctgccaaataatgaacgaatagttcgcttggcggctgagcgtcgcctagataatttgacgaacgctttaactggcaggttgtcagcctttaccgatatgcccgaccaagtattgcatcacaataaaccgctgctcgcggtacttaatatgattgccgagcgacaccagattaataatccgcagcgcattgaacggatggctgaggtaattaaggtcgcccaccactggtatcagcgattagccacagacgaaaccggctatgccgcctttgctgctcgtacccgtcaattggttgttggcacattggttggcatcgggcatggcggatatcaactggataaaaatgcctttgacttggtggtaattgatgaggctgcgcgcgctacgttttccgagctagccatagctatgcagagtgcgaagcgagtgctattagtgggggactacaaccaattggcacctagctatgatgtggctcatgtacgccaagtcgcccgtgatctaggcctgaatgaggtcgatgtaaaacgaacggattttgagcgagcttacgtcttgaatgatggtcacatgttgttgaagcaatatcggatggcacccgcgataggtgacattattagccactgcttctatgacggcacacttgcgaccggtcggccttctgctcccgagtggatgtcctccctgcccaccccgtggaatcgcacggtgtcttggatcgatacctctgacagtaagttgcaagaaacgaatatcggcaagggaattgccaatgaagttgaagttaacctgttgtgcagcttgctgcggcaattggtcgacgatgagcaggcgatggggcagctacgtcagtggaatgacaacgatactacgccagccatcggggttattaccggttaccgcaagcaggtggaactcctgcagatgcggctggaatctgaatcttgggcagcgccgatccgctcaatgataaaggttgataccattgattcctatcagggctctgaaaatcgtatcatcttattaagtttagtacgccataactctgagcaaaagggcggattcatgaccgataatgcccgagttaacgtggccctgtctcgggcaaaagagcgtctgttaatcatcggtgcagggagtatgtggcaacaggcgaatgcatgtcagccgctggcccgtgtcttcgactatatccaccaacagtactcataccataatagtgagtaccaaatcattcgttcagctgacctgatccataatgcttgcgccgaggtgcaggagagtgactatgtgtaa

SEQ ID NO: 227331 - DNA, 1587 bp, Klebsiella pneumoniae
atgtgtaacaagacccttaccttgaacagaacagcgcagcaacctgtggaactgccggctgattatgaccgcttgctacaaagtattaccgtgctggcaccagtacagaagatcagtctggacattgatgtgacgcataaagcagcgctaccagcggttcttgagtcagctcttctactagtggcgcaactcgaaatcgtgtctccttctgagttaggaggctttttcggactcgctgaccatgagcgtcaggttctggttgatgaaatgatcgacactggcctcgtgcgatacaatgatgaaggcgatatcgcgactacagtcaagctgacaatgcagcgccgagaaggcgcatcggatgagggcattgcaattgaggacgtggaaaatcaccgtgacttcaccttcatcgacctttgcactgggcacattcagcctaagtgtaatgcggacctgcagaaaggtttgcccgagttgccacgtaagatcaatcgcagtgacttcaccgatttgatcgctagccaatttcgtcgctttcagatttgcttacccgataccaagagcaagcgcgcactgcgtagctcgaaggcccgactctaccgagtgaatcgggcctctgttggtcaatcggggttgaaacagcagatctcactcgatatccacgtccattccgatcctctgaacgggatacgtctggactcacggttgatggactatagcttagagcatacacgcttgatggaaagctccggtctcaaaacagaggctattaactggctgcacgagcgcaagttagaggccgctagttccacactagaagactattgtgatctggcaaaagatatggtgatccgccgatatatcggacgtgatggtaagctggaactagggcgtttactccatgatcgccagcgcagaaaaaccagctatggtaacagcacgatgcaacgtatgatgattgggcctgtctatgcagcccccaatcgtaacactttaattaagtgggctgaacggttgccacgtcagcagcaggtacatcaaggaatctggcttggtgctaccaacgagttatttggcgctagtttaggtctcgggtcgttcatcaaacaaatgaacaccgagctcgcaagtggagagcgcaacagtcgcctcaatttggcatttcagtgcgatgaggaatttcgggcacagcgtttaatcaccaatcagtttaatagccgtaccgacggtagcctacgaattttcccaaaaggccgttctgagtcgcacttggaaatattggttttccctggcgagtacggtatggcagtggttcagtaccatgctgctttggatccgtctcttgggtatgctggccttacattgccaatcggctacttcacgacggaccctgagcaggtagctcagttgtggatgcaggtgcagcaacgaatccagtcaccggttcggtcagccgaccagcccgaggtagcgacagatgatcttaataagctactgggttgtgctcctgcagaattggcacaaatgctagtcgacaattccgaggaaaaactgaaaaaactggtggaaagattcaatcaacactag

SEQ ID NO: 227332 - DNA, 234 bp, Klebsiella pneumoniae
atgactggctcccaactcgccgcctttcaggccgccagcctgagcaaaccagagaccgtcagtctgctggtgctcggtctgtttaccagcgccctgctgctgtggtgcgcttggacactgatggtcgcttggcagggcgtctgccgccagcgcctgagctggcagagttttggcgcggtggcggcacgttcactgttactggtgctggtcagcttctggctggtactgagctga

SEQ ID NO: 227333 - DNA, 318 bp, Klebsiella pneumoniae
atgcgctggcttctgttattgctgttcgccacatttaacgccctcgccgacctgcctacgatggaagatccctcgcgcggccagggccagggcattatggagacgctgcaaaactacggttttgacatcgtggtgctgctagcgctggccatctgtgccgtcggttttctggtggtggcgaacaactgtattgccacctattcggagatccagagcgggcgtaagcagtggaaagatctgggctcgatggcgggcgtcggcagcatactgctggtgatcatcatctggctgctcaaccaggcttcggacgtcctgtaa

SEQ ID NO: 227334 - DNA, 354 bp, Klebsiella pneumoniae
atggcgactatcccctttctccccgaccgccttaaccgcgagcccgtggtctggcgcggcctgaccaccagcgagctgtttctggcactggcaagcggtcttggtggtggttgcctatccggcattctgctggccctgctcagcggttactggccgttgatccccggctcggcgctggcaggctcggcgttgctgattcagggtggtgggcgcattctggcgcgtgccaaaagcggtaagcccgacagttggctactcttagcaatccttgcctggctggagcgtcatcatcttcggggtacgcaactgatccagcatagcgctgtgtgggtggtacgcaggagtccgcgatga

SEQ ID NO: 227335 - DNA, 660 bp, Klebsiella pneumoniae
atgagccgctttcgccatgcgctggccgagcgcgataaccatatactgacactgcgggcggtgattattctgctgtgcctgtgtctggcgggcgtcggctacggctggtatcgcgcgccgcaaaagctcactctctggttcccgccggatctgcgcagcggcagcacccgcccgtggtgggaagtgccgcctgccagcgtctacgccttcaccttctatatcttccagcagcttaaccgctggccggataatggcgaggaggactattcccgcaacctgcgctcgctacgcgcctacctgacgcccgcctgttacacccggctggagcacgattttcaggtgcggcgcaacggtggtgaactgcgcgaacgtacgcgcggcgtgtatgagcttcccggccacggctacagcagctcggtgcatgacggtgataagcgccccttcccgcgcgtcgagacattaagccgggacgcctggcgggtaacgctggacgtggcggttgaggagtattttcagaacgagccggtaaaaaaggcgctggtgcgctacccattacaggtcgtgcgttatgccattgatgcggagaaaaacccgtgggggctggcaatcgactgtaccgatgccgcgccgcagcgtctggtggcggaggagaaacaatga

SEQ ID NO: 227336 - DNA, 768 bp, Klebsiella pneumoniae
atgaaatctgtcttcctggttttactcttcagcttcccggccttcgccacggaggtggtgcagtgggaaaacatcccgctcccagtcacgttgcatgtcgggcaggagcggattgtcgacgtagggaaagcggtgcgcatcggctatcccgccacgctggaaggcaaagtacgtctgcaaagcgcgggcggcaaagtcttcctgctggcgaatacgacgttcccggccactcgtatccagttacgcgataccagcagcggtgagctgatcctgctggatattcaggccacccaaagcacttcaccacttgaagcaatgcaaattagctatgcgccgcagacgcctgccacagccaaaacgcccgtcccggtgacagcatcaaccgagcccctgcccgtcctgttggtgcgctacgccgcgcagaatctgtatgcgccgctgcgcaccgtcgaagccctgcccggcgtcacgcctgcgcccgtccggctggcgaaacgcatcaccaccttactgccacagcagcctgtcaccgccatcccgctggcgtcatggcaagtcaacgccaccaccgtcaccgccatccgcctgcaaaaccgtagcgggcagcgcatcacgctcgatccacgtgaacttcagggacagtttaccgccgccgcgttccagcattactggctcggcccgcgtggtctggcagaagataccaccgtggcttacctggtgacggaaggtccggtttcccgcgccctgctgccggagccaaaatcatga

SEQ ID NO: 227337 - DNA, 1296 bp, Klebsiella pneumoniae
atgatgccgcgccagagtctcctgctgaaaatcctgctaccagtgattgtctttctcactgtctggctactgctgcgcccggcagacaaaagcacgccggagaaatctccatcccgcaccgtggctgccttaacgccgcaggaactgcgcgaactgggcattgacggcgacacgcccgccgataccatcgccacgctggtcggccagatgaagcagtatcgtcgggagcttcagtcaatccagagcgataacgaaagccagcaggcgcgcgagaagcgcctcaaagcacagcaggcgacgctggcatctgagttacgcggggatatgcgcagacagcaggaccagatgcgcgatggactactaaaaagccagcgaggattgctggacaagctcgaccgcctgatggcgaaacgcccggacgatatcccgcccggtctggggctgacgcccggcgaactgcctgccgatgtgcagccggatatccgctggctggagccgctggatgcgcccccgcctgtggacgaaaagctgctgcgcgtccccctgaaagcggcggacaaaccgccgccgaaacctgacgtaaaagtctacaccctgccgcagaacgccacgctgaccggatcggtggcgatgacggcgctgattggtcgcgttccgcttaacggcaccgtcagcgatccctacccgttcaaattgctgattggcgaggacaacctcaccgccaacggcattgaactgccggacgtggcgggcgcggtggtctccggtatcgcctccggcgactggacgctctcttgcgtgcgcgggcaaatcacctcgatgacctttgtgtttcacgacggcaccatccgcaccgtcccgcagggcggcaaatccggcaacaaacagcaggagatcggctggctttcggataaccaggggctgccgtgtattcccggcgagcgtaagagcaacgcgaaggaatacctgacctcgcagttcctgctggcgggatccggcgcggcggcgcaggctttcgccaatggtgaaagcaccaccgtggtggaggacggtagtatcaccagcgcggtgacgggcaacaatggccagtacgtgctcggccaggccatcggcggcgggctgaaagaaacagccgactggatgaagcaacactacggccagatgttcgatgccgtgtacgtgccgccgggccataaggtggcggtgcatctgactgaagcactggcgattgattacgagccggaaggccgaaaagtgaaataccagcaggccagcacgccggagggactggaatga

SEQ ID NO: 227338 - DNA, 360 bp, Klebsiella pneumoniae
atgatacgcgctatattgatgcttctgtttttgctggccggatgcagcacctcgcaggaggaactgatgccggtcgatcctgatgccagcatgctgacgctgtggcagcagcaaagcggcggcagcgcagccctgctggatgcccgcgcccagttgcgccgcacgccggatggtccggtgtcgcaacccgaagcggataccatccgtagccagtttccgcgcctgcccaatccggatcttgtgttgtacgttttcccgcaccttaacggcaacaccccggtgcctggttacagcaccgtcttccccttctatacccgcccgcagtatgcattaccgggcgaacgcctgactccgccatga

SEQ ID NO: 227339 - DNA, 2631 bp, Klebsiella pneumoniae
atgaatgaacggtgcggtctcccgcaacaggcgctgaataccagctaccgcaagggcccgtcctttgtcgactggctgccgtgggtggagtttttgccggagtcgcagacgctgctgctggaagatggccgctcggtgggcgcggtgtttgagctaatacctgttggcaccgaaggccgctcgacggcctttctcgaacagatgcgcgataccgtcaccgacgcattacaggatgcctttgatgagcatgaacgtgcgccgtgggtggtgcagtttttctgccaggacgaggacgacagcgaggcgtggctggcatcactttcagcttacgccgcaccggaaattcgcaactccgcctttacccgcgaatggctcacgcagatggcaaaccatatggcgaatctcacccgcgatgaggggctgtttctcgataacaccgtcacccgtacccggtggcgggcgacgtggcggcgcacgcggatggtggtgtaccgctggcttccaggtttctcgccggacgaaccgtccccggaagagacgctgaacaatatctgcgagcgtctcaccgccgggctgaaagcggcgggaattaacgccatccgccagaatgaacaggccattcaccgctggatggtgcgctggtttaatcctgcgcctccagtggaagataaaaaagccttctggcgacaactggatttaccggaagctgaatctctgcccgttatcaccgatttcgctgaacgactgctgacgagcgaaccgcgctcggacgcaaagaacggcgtttggtggttggataaccgaccgcataaagtgatggtggtcgaccgcctgcgcaaagcgccgccgcccggcctgctgaccggagaaacctcgcgcggcgacggcatcaatgccctgttcgacctgctgcctgcgggaaccatcataaacctgaccgtagtggtgtatccgcaggacaagctggagcagcatatcagccacctcgccgaccgggcgattggcgacaacaccgattcggaatacacccgccgcgactgccacgaggtacgcagctatctcaaggacggccataagctctaccgcagcacgctggcgttttacctgcatgcacccgacaccgataccctgtttcgccagcagcgccagttgcacagcctgttgcttaacgccggtctggtacccgtacaggagcagcatgaagtggcccccttaagccactggttacgctggctgccgatgtgtttcgatcccctgcgcgatctgtgcgggctgtatacccggctcaacttcgttcagcatatcgccgggctgatgccggtgtacgggcgggaaaccggcaccgggcatccggggatttgttacttcaatcgcggcggcgcgccgctgtgcttcgatccgctgaataagctagaccgcgcccagaacggccatctgctgttgctcggcccgaccggagcgggcaaatccgccacgctgaacgcgaaaatagcccaattgatggcactgcaccgccctcgcctgtttatcatcgaagccgggaactcgttcggcctgatggcggactacgctgccgcccacggtctgacggtgaacaaaatcaacctgcgtcccggttccggtgtcaccctgcccctgttcgccgatgcctggcgactggtggaacaggcggtcaccgacgccgaaccaccggaagatgaagagagcgacggcgatgaccagcgtgacgtgctcggtgaaatggagatcaccgcccggctgatgatcaccggtggcgaggcgaaagaagatgcacgcctcacccggccagacatggcgatgatccgtcaggcgattatcgctgccgcacatacctgttatcaggaaaaacgccagacgctaacgcaggatatccgcgatgcactgttcgccctttcccgcgacaacagcctgccggaagcccgccgccagcgggcgtatgaaatggcggagtccatcaacctgttctgcgccggatttgaaggcgaactgtttaaccgtgaaggccagatgtggccggagacggatataactctggtcgatctcgccaccttcgcccgtgagggttacgaagcccagcttgccatcagctatatctcgctgattaaccatatcaataacctcggcgaacgcgaccagcatctggtgcgacccatcgtcaatatcaccgatgaggcgcatatcatcactgttaatcccttattggcgcgctttctcaccaaaggctcgaagatgtggcgcaagctcggtatctggctgtggctcgccacccagaacctggcagattttcctgatgaggcgaagaagctgctcaatatgatcgagtggtgggaactgctggtgatgccgccggaagagatcgagcaggtctgccgatttaaagcgctgacggaagaacagcgccaactgctgcgctcagcggtaaaatcgccggggcagtataccgagggcgtggtgctgtcgccgcgcgtggaggcgctgtttcgggtggtgccgccagcgctgtatctggcgctggccatgactgagaagcatgagaaggccgagcggaggcggattatgcaggagacggggtgtagtgaggtggaggcggctatgaaatttaagttctaa

SEQ ID NO: 227340 - DNA, 156 bp, Klebsiella pneumoniae
atgaatatcatccaagtgttgcttaccgtcgtcacagtgattggtttcaccaagacctgtgggaggcttgacaacctgtacaatacccctaaacctttgtttagggcattgtttttatatcatcgtaaatttaaaaaaacaaggtttacctattaa

SEQ ID NO: 227341 - DNA, 1278 bp, Klebsiella pneumoniae
atgaataatgatgattacccatggttcagaaaacgtggttatttgcatttcgatgaacctgtttcattaaaaaaagcggttaaatatgtttcctctccagaaaaaataataaaacattcttttctgccatttttaagctttgaagtaaaatcgtttaaaatcaaaaaagacaaatcaacaaaacaattaagtaaaactgaaaaattaagacctattgcctattcctcacatttggatagtcatatttatgcattttacgcagaatatcttactggacattatgaattattgatccaagaaaacaatttacacgagaacatccttgccttcagatctttaaataaaagcaatatagaatttgccaagagagcatttgatacaattactgaaatgggtgagtgtagcgctgttgcattagatctttctggtttttttgacaatttagatcatcaaattttgaaacaccagtggtgcaaagttattgggactgaagcgttgccgcaagaccattttgccatatacaaaagtataacaagatattctaaagttgataaaaatagagcgtatgagattttaggtatatcaaagaataaccccaagtataatagacgcaagatctgcacccctgttgattttagaaataagattagaaaaaatggtcttattatagttaataattcccaaaaaggtataccccaaggctcgccaattagtgctctactttcaaatatatatatgcttgactttgatattgaaatgagagattacgcgcaggaacgtggtggccattattatcgctattgtgatgatatgctattcattgtaccaactaagtataataaaactctagcaggtgatgtagcccagcggattaagcatcttaaggtagaactcaatactaagaaaactgagattcgagattttatatacaaagacagtaccttagtggcaaatatgcctttacagtatcttgggtttatttttgatgggagtaatatattattacgttcatcttctctcgcaagatattcggaacgaatgaaaagaggtgtccgcttagcaaaagctacaatggacagcaagaataggattagagaaaataaaggtgaagctttaaaagctttatttaagaaaaaattatatgccagatattcacatattggaagaaggaattttttgacttatggttatcgcgccgcgaagatcatgaattcgaaagctataaaaagacagttaaaaccattgcagaaaagattggaaaatgaaatactaaaataa

SEQ ID NO: 227342 - DNA, 1017 bp, Klebsiella pneumoniae
atgaacaaaatcagagccgccgtggtcggcgcaggtatctacggcaaacaccatatgaacgcgtaccgccataacccggacacggtgctggtcgccatctgcgaaacagatgaggaacgctgtgacgaccttgccatggcgtacggcgtgatgggctatacccggctggacgttcttctgcaggaggaagccatcgacgtggtctcggtggcgacgccggatccgtaccacaccgaatccatcctcaccgccctgcgccacggtaaacatgtgctggcagaaaaaccgctcgccacctcggtacgcgagtgtgagcttatcgtggagatggcgcagcagcgggacctgctggtcggcgtcgatttccacaagcgctgggacccggcggtgatgcgcattaaggctgaactggagaggccggaagccgggcgcatcctgcgcgggcatatcagtatggacgacgtgataacggtcccgacggcgtggctggactgggcgggcgcaagctccccggtatggttcctcggctcccactgcttcgacctggtgcgccacctctccggccaggaagtggtgtcggtgtacgccgtcggacagaagcggctgatggtcgaatgcggcctcgacacctttgacagcgtgcaaagcctgctgacgatgggcgacggcagttcgtgggtggtcgagaactcgtgggtgctgccggaaggctttccgaaagacaacgacgggcgcattgatattctctgcgaggcaacctatatccgcagttcctcgcagcatcggggactggaaattaccaccccggacaagacgctcacgcccaacagctacttcatcaactaccgcaacggtgtcgccagcggctttggtatcgaccccatcaatgactttgtgcgggcggtcaggaacaggtcaccgtacccggtcaccgcagttgacgggctggcggtaagccggatctgcgaggcggtgcatcagagtctcgaaagtcaaaaaccagtgtcattaaaatag

SEQ ID NO: 227343 - DNA, 1041 bp, Klebsiella pneumoniae
atgatccaatattggtggaaagatctgtttgatcgcaataataactggcagggtctggagccgacacttaagagcagccagaggaccgacgtggcaatggaaatgctaagtggtcgttatgggcggatggcgttgcaggtttctggggagacattattctgggcatcaatgttgaaagatcattccggtgtctggttggtgtttaatgccgatcattccgcttgccagacattattaccggctgtcacatctgaagatattgaaggcattaaaagcaaaggcgaacgggcctggacaggtgaatggtgtcgctatttttcccggcaattaatgaatgcgccagtgcctcttctgtctcttcgccgatggctgataaggccgatggaggccaaatattcattaccgaaattatccggacagcgtgttcctgtaaatagctggcgttttgatgccccagaaagcagcgggaatatcggctgtagctggacgctctacggcgaagattttcctgatttggtcaatcctgacaaagtcagattagtggactggtggtggggaggtagcctgctacttgggcgttatccgatacaacctgatgccggaaggttgaaatggtggcgtaaaaaatgccgggagggtgcgctgcctccagtacttgtctggtatatagcagggctgggatcatttgttattcttgatggtcattatcgtttacaggcagcgattgcagaagaaatcccactttcatttctggtgctcagcgaattgcaggaacgggattttgctaccgatcaagaccatcgggcccgtattgtccgggcgttagaacagcagctcaaaaatcctaagtgcaaaatcgatggtgtaaatcagacgctgattaatctttatgatacacgttatctttatgcctcaacccatagccgcgcgacgcttggcgaaggaacgcgctggacacaggagttagaaagctatctgcaacggtatcagttggaagactatcgggacagggtacttaatggcgttaacgatgaatgctga

SEQ ID NO: 227344 - DNA, 954 bp, Klebsiella pneumoniae
atgaaggtgttattaaaatccggctggctggtgctggcgttgtggctggtttcttttggtacacaggcctcctgtggtttcgcttccggagtgagtagtgaagttccggggtatatcagtttcggcaatgtggcggtccagcgtgatgcggcggtgggcagtgtcatcgccacggccacaacgggggcgtataacggcggcaatactatcgccgggtgttcagaagcctggacctaccgttgggaactgagtaaatggggaacgctgagcagtctcggaagcaatatctataacactaatgttcctggagtgggtatccggttgactaacacctcttccgggaaagtgcttccctatgaccagagtgtgggcgcgaatgtttatatttacatcggtggtgatggtattaaagcggagttaatcaaaacgggcgatattacgggaggaacgctggatagtggcatgctggcgcgggcctcggtggcgaaccagttttattttgccaatgtcaccctgaatggcacaaataccattacctctgaatcctgctccgttaccactaacccggttaatgtcccgctgggtgaccatgacaaaagcgagttcagcggtccgggttccgcaacggcctggcagacattcaatatcaatctgagttgtattcagggcgcacggattaatgtgcgtattgacgccacagcagatagcgacgccggcgtacccggcgtcattaaactcgacagcgatccggtaaatgccagcggtgtcggcgtgcagctctggtaccgctatgaagacagcccggtacagttcggtcaggagcggtattactacacctcgccatcaggcggcaacgaatatgttcagcttcaggcgcgctattaccagacaacacagagcatcacggccgggaaagcgaacgccacggcgacgtttacgttgacatataaatag

SEQ ID NO: 227345 - DNA, 1341 bp, Klebsiella pneumoniae
gtgacggcgatttacggcctgccgcacgccatcaccatttatggcggcacgctgtactcggaggactatcagtccggggcggcggggctgggctttggcctcggcacgctcggttcgctatccgtcgatatcaccgctgcgcacaccacgctcaacaacgatgaaacccacgacggccagtcgtaccgggtgcagtactcaaaggatttccaggccaccgacaccagcttcaccctggcggcgtaccgctactccaccgaaggcttttacaccttccaggaggccaatgacctgcggacggacagcgatgacggctggcggatgcagtacaacaagcggcagaaactccagctcgacctcagccagagcctcggcagctacggctcgttctttatctccggttaccagcaggattactggcacgaggacggctacgagcgcaccctcagcaccggctggaacggcaatatcaatggcgtcagctacagcgactatcctgacagcacccagcctgccgaccagcagctggccttcagcatgcaggtgccgctcagccgcttcctgcccaacgcctgggccagctacagcatcaacaccgcgaagcacggcgatacccgccagcaggtgggacttaacggcacggcgcttgccgacaacaacctcagctacagcctccagcagagctacaccaaccatggcgtgggcggctccggcaacatcaacgccgattacaaaggcggctggggcgaagtaaccggtggctacaactacgacgatgacagccagcaggtgaactacggcctgaagggcgggattgtcgcgcatccacatggcatcactttcgggcaaccgctcggcgactcgctggccgtggtgagcgcgcccggtgcggaggatgcaaaagtgcagaacaacaccggggtgtacaccgactggcgcggttatgcggtggtgccttacgtcaacccgtacaagaaaaaccgcatcgcgctggataccagcacgctcggcgatgaggtggatatcgacaccgccgtccagactgtgacgccgacgcagggtgcggtggtaatggctgacttcaacactcgcgtcggacggcgcgtgctgatgacgctgctttaccgtgggctgccggtgccgtttggcgcgcaggcgaagctgaaggaaggcggcagcggcatcgttggcgatgatggccaggtctatctcaccggcgtgccggatgagggcgatattgcggtgagctggaacgggacgcggcagtgcatggtgctttaccggctgccggagaatgccggaaacgttccggtgacggaaactgaacaggagtgtcgttaa

SEQ ID NO: 227346 - DNA, 1146 bp, Klebsiella pneumoniae
atgaacaaccctgaacggcgcaccatgatgatcctgctggcgctgctgctggtgatgatcctcctgctggcatatttccgcaacgcagaggcccgcgagacttttaactcccatgcgctggaaatcgacaatcccggccagccggtggcggatttatccacctttgccgaagcggacggccagttgccgggcgtttaccgggtgacggtgtatgtgaacggcgaacagcagggcgaagcgcaggatatcgccttcaccgccgggccagacaaaaaactccgcgcgcagataacccccgccatgctgaaagcgtggggcgtaaaaaccgatgcttttcccgcgctggcggcgttgcctccggataagccgctgaaggatatcggccgctatatcccgatggcgtccagcgaactgcgcttcagtaaactgcaactgaacgtcagcattccccaggcggcgatgagcgccgcggcccgcggccaggtggatccctcgcagtgggatgagggcgttcccgccgcgttgctgaactacagcctcagcggcagcaatacctggcgcgaccaccagagcggctcagaggataactactatgccaacctgcaaagcggcctgaacctcggcgcgtggcggctgcgcaactattccacctggaattacgacgaggacaatggcagccactgggattcggtgaacacgtatcttcagcgggatatccagcgcctgcaggggcaactgacgctcggcgacagctacaccccttccgatatcttcgacagcgtgcagttccgcggcgcgcaactggcgtccgacgacaatatgctgccggatagtctgcgcgggttcgctccggttatccgcggcattgcgcagtcgaacgcgcaggtgacggtgaagcagaacggctacatcatctaccagagctacgtcgcgccgggtgcgttcgccatcagcgacctctacccgacctcgggcagtggcgacctggaagtgaccattaaggaggccgacggcagcgagcgcacctttattcagccattttcagccgttcccattatgcagcgcgagggtcgcctgaaatacgccctgactgccgggaagtatcgcagcggcaacaacgacagcgatgagccgcagttcggctag

SEQ ID NO: 227347 - DNA, 681 bp, Klebsiella pneumoniae
atgaacaggtatgtacacgttgcgctggcgttcttgctggctttatttaccgtgcaggcgcaggccggaatcgtgattggcgggacgcgggtggtttatgacggggataaaaaagaggcctcagcgtccatccgtaacccggagaaatccggcgtttatctggtgcagagctgggtggataatggcgaacggggcggcaaagcgccgtttatcgtcacgccgccgctgtttcgcattaaccccggtgaagagaatatgctgcgcatcattcgcaccggcggcaacctgccgccggaccgggagtcggtgttctggctcaacgtaaaatccattcccgccactgatgacagcaaaccgcacaccaatgtattgcaggtagtggtgaagtcgcgcctgaagcttttttaccgaccggcgggtctggacgggcatccggaggccgcataccgccagctgtcggtggcccgcagcggcaatcgcctgactatcagcaatccgacgccgtattacgtcacgctgttcatcctgaaggtagatgggaaggagataaagagtgcggatatggtgccgccgaagggcagtgtgagtttcacgatcccttccgccacggcgtcccgcgttagctggcaggccatcagcgactacggcggcgtcagccagttcgaaagccgccagctgtga

SEQ ID NO: 227348 - DNA, 513 bp, Klebsiella pneumoniae
atgaaaaaaacgataacaatcgtgtgttttatgctggcggccggcagtgcaatggccgctgacgggacgatcaattttactggcagcattactgaccagacctgcacggtggacagcggttcacaaaacctgaatgtcaatttaggcaaagtggcgcagaccgcgcttaacggcgctgccggaatgaaagcggcgccaacgcgtttcacactcagcctgagtgactgcccggacaccgtaacgggagcaaacgtgaaatttgacggcacttccgacggcgtaaaccagaacctgctggcgctggacaacggcacaggtatcgcgaccggcgttggtattgaaatcgctgacaaaaacggtacggccattccgcttcacaccgcctctcctgactacaccctcgccgcaggggccaactcactggactttattgcccgttatgtctctaccggcgcagccgtcaccaccggtacagcaaacggcacctcgcagttcaccattaactacaaataa

SEQ ID NO: 227349 - DNA, 591 bp, Klebsiella pneumoniae
atgccagtaaaacgaaaacaccttacacgccaggaagtggggcagatactgcttgcagcggaccgagggatccatttcgagcgcgattactgcctcatccagatgtgttttttacacggtctgcgcgtcagtgagctgtgtggaatgcgcctgtcggatatcgatttggtcggacgctcggtgtatatcaggcgactcaaaaacagcctgtccacgcagcatccgctgttcgatgctgaactgcccgcgttgatgcgttggctaaaggtgcgccgccgctggcgggaggcagacagcgactggctttttttgtcgcagaaagggggtccactgtcgcgccatcaggtcaggttattgctcagacgttacggcgaactgggtgggatcagcattcccgcgtatccgcatatgctgagacacggatgcggttacgcgctggcggacctggggcgtgatacccgtctgatacaggattatctggggcaccggaacatccggcatacggtgatttatacggcgacaaatacgcagaggtttatgaatgtctgggggaacatgagagaaaaccacacaattagtgccagaatgtaa

SEQ ID NO: 227350 - DNA, 933 bp, Klebsiella pneumoniae
atgccagaccgctttactctgctgttgcccctgatgctgtgcgccgctttcccgctcagagccattaccacgccggaaattgccgcttccgccctgtcgccagactgcgtgaactaccgggttgtcggcttgtgctactggctctattgcacgccgctcggttgctcggtacgcacgtcggtgaaggttcgccatttccgcccggatctggtggtgtcggcttacagcatcaccgggcagaatccgtggacagagatgtcgtcgctcagcccaccgctgcccggcattgccgaaggcggtggcgacactaatccgcgaacggccagccagcacagcaagatccgctttaagaatgccgacgccatcggcttcccggcaggcgacgaactggcgacgtttttcacccagtttggctatatctgctcgccttcatcgcagccttttcaaccgtactttctgagtcaactggatacgctggcgtggcgcagcggcgtaccggagatgacctggccggaggcgctgacgccggggttacgagatgtagggaaagacggcgatatgtggggcaatatctaccctcgcgccggtgccatcagccagacgcacgactataaagctgccgccgttatcgcccagcgcgtggccgatctggtgacccgtaccggacaaccgcatatctatacgccgctggcagcctcctcccgcgccgggtactggccgccctctccgattatcgaaggcgacagcgataaccatcgctggcagatgctcaccccgaaaaaatccgccgcctgttcggtgttcccggatggcagcgccaccgacacctacgccgacaagctggcggaggatggcgcgtacgcctggacgctgtggcggccttacaaatgctgcccgcgccggggacagacttttctcggcagtacgggttaa

SEQ ID NO: 227351 - DNA, 1344 bp, Klebsiella pneumoniae
atgagagcgcttatcctggtcttactgtttttcgcctgggtttgcgcggccgccgatgactacagcttccgcacgcgaggcgcggtcgacgacctgctttactatcagattggcggcggcgaggccgtgatgcctccacccgttcgccgcagtccctctccgctcagcgtggggattggctggaacgccgatatgatgtgcggcaatttcgatatcggcaccaccgtgcgcaaccagttgaacggcatcaccgacggcttccagcaactgatgggcaacgtcatccagagcgccaccggcgcggttgccagcctgcccgcgatgattattcagcgcgccaatccgcagctttatgatctgctgaccaacggcgtgctgcaagggcggctggattttgacaaatcgctgctgaactgccagaaaatggcggagaagatgaccgatttagcggccgattccgcctggttttcgggagccaaagcggagaactaccagacccttgccgccagcgacagcgacgccatccgcaccgaccagaaagcggcaaaagaggccgccgaaaagggtaaacgctgggtgggcggcgaaaagcgcggcggtaaaggccagccgccgattaaggtagtccatgacgccaccgccgcaggctggaatatcctcaaccagcagcccgccaccagcaccacgtctcttacctcctctgaatgcgacggggaactttgtagcacctggaaatctcctgaagaggccgccggatggatgacccgcgtggttggcgagcagaccatcagcgtggcgcaggccaccgacgatccggatgcgcgttccggcgcacaggcggggatcggcctgcatccgctgatcgacgaagaaaaggcgaagatcctgcttgtgctgacggctctggttaacggtaaccagaagcccggcttcgacaacctggcgaaagcctccggcggatccatgcagcttacccgcggcgtggtcgaggcgctgcgcgacgatccggacgccgccgtcctcaccgaacggctggcgggagaactggcgctggcccgcgtcaccgaacaggcgctgctggcccggcgcacgctgcttgcaggtatgcgcgaaccgaatatcgccaacgtcaaagaggcgcaggagagcctgggcaaaaccaccatccaactggatgaagagctgagccagcttaagctggaactcgatttccgccaggcgctgacgcgcaataccgcgagccagatcctgcaacgcaaacagcagcgtgaccagcttcagggacaggcggtggaagtgccggacgacagcgaccgccgcctgcacaatctcaataatccgtag

SEQ ID NO: 227352 - DNA, 1503 bp, Klebsiella pneumoniae
atgaccgccaacagctatttcgagtacgtgctcaccctgctcggctggctggtgaacaacggcgtgtggcagacgctgaccgccaccgggctattcgccctgcccctgctggcaaaactggttgccctgtggctgaaagcgcgcggccagggggcggatgaaggcaacgtcgcccgcctgctggtcgtctgggtggagcactcgctctacagcgccctgctggtgatcctcttcgcgggcgtaccgttcctgagtgtcgatatcaataccattacatacgacagccagcgcacgaagcagtgcggctggtcggtggtgcagcccggtgattccggctatgcgccgttgattaatgaactcagcggccagagcgcctcggttccggtgtggtggtacttcactcatgcgctgggcaaaggcatcactagcgccgccgtcgcggtattaccctggaaaccggacctgcgtcagctgcgttttgaagtgcagcacaccctgatcgccgatccagcgctggcgcaggaattacaggatttcgttaatgactgctacgggccgtcgcgcacacgcctcaagcggctgggcagcgatattagcgaggaacagagccgggaggtggactgggtgggatcgtctttttatctctccacgccgggttattacgaccatgatcattcccgctcaccccgcgccgcctggccttatgacgccagccgcgacgacggtctgagtgatacgggtggcggaggctatcctgcgtgtaaggagtggtggtccgatggcgatgcggggctgaaaaatcggctactgaagcaggtcgatacgacactctggcagcggctgcaaaaactggggcagtctaaagaggagtatgaagaagcagtgctgcgctcgctggtgagcccgcgcaacatgcaggtgtcgcagggcgggctggtgtacaacgggtttggcgggagtgcgggggataatctcagccagacgcagttgctcagccgcgtcggcgggatcatcggcacggggctttccagctacgccctgtttccggcgtttgataacgtccgccaggcgctgccgatggtgcaggcgttcctcgaaatggcgctggtaatttgtataccggtaattctgctgttctcggcatgggagcttaaaacagtcatcacgctgagcgttgtgcagttcgctctgttctttctcaccttctggtgggaactggcccgctggctggataactggctgatgcagatgatgtacgacagcgacacccactcgtatttcaacctctggggcctgcaaaacacctccgacgatctgattgtgaatatcattatgggcgtgatgttcctggtgcttccggcattctggctgggggcgctgacctgggcgggcgtcaggatcggcacagcagtcgctggggtgatgggcagcgctgtcggtgatatccgcagcgctggcgaacaggtcgggaaaatgatcgtcagtaaaacgcgtttaccgtag

SEQ ID NO: 227353 - DNA, 663 bp, Klebsiella pneumoniae
atgagtgaaagtgtaagttactttgacaaagtcatatctttaataaatgcagtggtaccagtcctagctatttattttgctcagaggctttggcatgccaaaaatattgagcgagcgcatcaggcggcaaatgattttcttgacgaaatgacatcattaccaatgagagtaatgttactagaaacagagatggtcagagggttagttagagctgaatcagttattagttataaaaataaaaatgaatttgtgtgtgagttgctgcgtcttatggataattcgaataagatcagactttcgttttttaattcctatgaaagagttgttcgaagggggattaacatcaaaccttcccaaaaacatatgaaactcgaaaaatctgttattgagtttactgaacatgtttcaaaaattctccagaatgcagcagaggctattagtagatcgacaacaacagaagaatatagagagccattcagaacgttagctggtgctagaattgttataaccaaaaataaaaatacactcaatgaagcctgtgctgctacaaaggatatttcgtttgatgactatttttcctttccttcagcatatggttggttcaggcataaatgggatagtttgattcgaccttttttatttaaaccgtttaaaaatatgtaa

SEQ ID NO: 227354 - DNA, 291 bp, Klebsiella pneumoniae
atgtcgcttttcgataaaaaaccgtcgttaatgccggtggttatcgcccctgatgtctggcaatccgctgtggaatttcccgccgacccgcagcaggtggaagaacggctgggcaatctgttgctcgccgtactactaaccctgcgcaccgccgggacgtcccgcaagaaagtcacctttacgatctactgccagccgccgcaaggcgatatgaaagtccctgtcgcattaccgctatcactcaactatcacggccactatgtgcaggtctcgatggctgaacaggcataa

SEQ ID NO: 227355 - DNA, 906 bp, Klebsiella pneumoniae
atggacagaagcaacgatatctaccagaaagtcaccgaccagattattgctgagctggaaaacggcaatgtgccgtggatccgcccgtggcgcgatggcgagccgccgttcccgatcaatgcgttatccggtcgtccgtatcacggcatcaacgtgccgctgttgtggaacagcgccgacaagcagagtttcgccagtgaccgctggctgacgttccatcaggttagcgcgcttggcgcacaggtacgcagaggggaaaaatcgtccctggccgtgctgtacctgccgcgcacgcaggaggaaaccgacgctctcggtcagccgttgctcgatgaaaacggtgagccgcaggtgcggcatttcgggatcattcgtgagttccggctgtttaacctgtcgcagtgcgacggcctgccgcagacgctgtctgagccgtttacccggcccgcagaaccggtggaaaccgccgaagccattgcgatgaatagcggcgtaacactgcaccatcgccgccagtcgaaagcgtattacaaacccgcgaccgacctggtgatgatgccgcacccgcagcagtttgaaagcagtgaggcgtactacgccacgctgctgcatgaactgacgcacgccaccggtcacgcttcacgcctgaaccgccccggtattgccggaacggaacgcaccgaagcgctctacgccgctgaagagttagtggcggagatgggcagcgccttcctgtgcgcccactgcggcattctgggcaggctccagcacgccagctatatcggctactggctggatatcctgcgccaggacaaacgggcagtgatccgcgccagcggtatggcgcgccacgccagtgaatggctgctcaacgctgtaccacaaccctgtcagcttagcgcctga

SEQ ID NO: 227356 - DNA, 372 bp, Klebsiella pneumoniae
atgggactcgatctcttctttttcgaacgggcaaaaaacgcgcccgatgaaagccagtacgccagagtgggttatttccgcaaggtgaacccgttactcaaatgggtggatgaacacgtcgggctggtgcgtaaccaggtgctgttagaagtcacaaaagcacatttgcaggcgcttctgagcgacctgcagagcctgacgccggataactgcggcgcggtttatcccacgattgacggctttttctatggatataccgattatggagaacactactggaaagatgtccgcgccgtcactctctgggtgaaggagacgctggagacgtttgattttgagcgagacaggctgatgttttatgcctggtggtaa

SEQ ID NO: 227357 - DNA, 285 bp, Klebsiella pneumoniae
atgggcaccagtaaggctgacttgatcgagagcggaaggctgctgtatacgcagactcgcctgtgggcacgggcaatatatcttcagcattctgatatcaatggactggtctggaaatcgcggcagcatgatgacagtgatgcgtttgtgctgttcggtgacagggtcaaaccgggagatctgcgtattgccagttcaacggttcgctttacggatgatgtttctacaggatacgaaatacagcagatggcacagcggcttggcgtcattctctctgatgaataa

SEQ ID NO: 227358 - DNA, 726 bp, Klebsiella pneumoniae
atggcatccggaacagcagtaagaatggagaaagacgccggacgtgtagtggtcgatggtggagacgtacgcctctcttttgcgcgggataaacatcatggcgtacgcaaacaggaccagacttacacggtggaactgatcgttaaagaggtggacagcagcattgatgcgctgcagcacctgcttgaaacactgctgcgtgcgacggaagcgctgaagaataaacgcaagactgtgaaatcaggcaatgttgaaaccctgctgtcattgtttaaaacggcgctggaaacggaaccgccggaaaaggggttacgtggtcttgtcgaagaggagaggctggcgcaggcaagagcgaacttggtggaagagggctggctgaccgcgcgcgaaatcgcacaactggcgggcttttctgcgctgaatccctctgctcagcccagcaaatggaagcgcgcaggccgtattttttcggtatataaaaaaggcgtgggcgaggtatttccccgttatgcgctggatgaaaacctgcggcctctgcctgtgatgaaagcgattctggatattctgactgaagtgaaaacgccatggggcatggccgagtggttcgccacttcaaatgacctgctggctggcaggatgccccaggagatgttgttgcgctacccggccaatgttattcaggcggcggaagcggaagccgggcggatgcgggatggcgcagaataa

SEQ ID NO: 227359 - DNA, 1593 bp, Klebsiella pneumoniae
atgctgaagtggctacaaagaccatcccaaagccagcaacctgcgccagacgctgcgctgccggaggggtggtttgcgccacaatccgcagaacagttgctggcgacgccgttacgccaggccagcctgcgccagcttcggcaactgacgccgctgccggataccctgtttgatagctggatcctcactgcgattaaccgcttcgccgcactggtgcagttgctgcccgcctcacaaagtcatcaccattccattcccggcgggctactggatcattcgctggaggtagcctgtaacaccatccgactgcgccagggttatcttctgccgccggaatcaggcgcagaggaacaagcgcgccaggccagcgcatggactgttgcagtagtctgcgcggcattactgcacgatacgggaaaaatcgccgtggatatggagatccatcaactggatagcacccgctggcatccgtggcaagggaatctggcgcagccttatcgctggcagtaccagagccacggtcgcgactatcatctgcaccctgcggctggagcaatgctgattaatcagttgataccctcgccattactggactggctgaccggataccccgcggcttttgcatccctgatttatcagcttaccggacactacgaacgggctggcgcgctgacggagctggtgcagcaggccgataaagcctctgtcgcccgatacctcggcggcgatatcaaaaccgcactggcgcaaaagccctcttccttcccccagcaacttctttccgccttgcggtcgctggtgcagaacgagtaccgactcaataatcccgaatgcggatccgatggctggctgacggaggatgcgctgtggcttatcagcaaaaccaccgccgaccgggtccgcgcctggctgctccagcatggcgtatccagcgtgccggaaaacaataaccgcctgtttgacgaactgttgacgcatcagcttattgttgccaacgaagataaagcgatttggcgctgcattatccgatcggataaaggctggtcgcccgttgagccgctgacgctgctgcgcctggcgccgtccgcaatctgggaacagggggaacagcgtcccgcctgttttgctggtgatgtgacgccagtaagcgaagcggagcccgttcctgaactcagcgcccccactcaaccgttgccggagatagcagacgacccgaggcttggtgacaataataatttcctgcagtggctgaagaaccacaccaggccttcaggcacggtgaatacccggaacggcaaggtgcatgtggtggaaaaccatcttttcttgatttcgccggggatctttaagatatacgcagcagaaaccacaggtgacaccggcgacggctggaaactggcacagcgaatgttccaggagtcaggactggccctgcgctgtaatgatgacagctttatctggacctgcgaggttcgcgctccgcagaaaacggggcagttgaaagggtttctgatagaagatccggggctggtgtttggcgagaaaatgccggtgaataatccgtggctgaagctggtagcacctcaaaattaa

SEQ ID NO: 227360 - DNA, 987 bp, Klebsiella pneumoniae
atgagcaactctgaagaagaaaaatacaagattagtcgtgataacattgatagaccagagttaataaaattaatttacaaaccaaaatttttgttagcggtagttttaatctatgctggattaggcattccctttttactgaagtcacaatacaatttaacatattttttcgaaaaattcggtccaatgacattaggtgtcatatctgctttcttaggtttaacaatattaatgggggagataagcaagattaaaaaatttaaacgagaggaccgtttcattgatgttgatgacaatcgagacagtagagatcaaacgtttcaaaaaaaaattcttagtgaattaaattctattaaagccaaatctgacagtttttccacagacaacatcgaagaaatagtgtctaaggcgattgaatctaaaactttagatcaagctaatatgtttgattcatttgaaaattactttaatgaaattcgtcgagttttattggagcaagcatatacatcagacaaaaaagcctcaatactcctcgacaaaggtacttcatactcaaaaggcggaataacctttttcataacttcaataattgtgtggcaagtactatcctggcttactggattcaaagaacaatatatttatgggatgatttcttgctctctattatttatcttcatcgaatttttatcagcttggtttttaaaacaatatcgtcactttgttgatacatcaacataccatattaaagtaaaatctatatttgacaaatacatgatgtcatacttggctattaaaagccttggagataataatcgtagtgatgagacaaagtatcaagctatgcttagggttcttgaagaagaaataaaatggcccgaatcatatcttttgaaaaaatccgaggtgagttttgctagggaggcaattgaaacgatgtcccattttgcaaaggcaattaagtctgaagctaaaaataaggcaagctga

SEQ ID NO: 227361 - DNA, 1032 bp, Klebsiella pneumoniae
atgcaacttaagaaaatttttatctccggctttaaaagcatttccaatcaaaatccccaaaccattgaccttgagcatgaattaaccacgtttattggccataatggaactggaaagagtacagctatggaggcgcttaataagcttttttcggtggataattcccttcgaagcttatcaataaatgacttccataatgcggatgatgggaaagatgaaaaaaccagaagcttaattatagaaacttggtttagctttcctaaacccaaagaaggcaaaatttccatccctccgttaattgaacatcttaccattgataaatctgatgggaatattctttttagggtgcgattagaggggaaactttcttttgaagcaaatcccatgggggatattgacgaagatatctgggtagtaagtaccagcgacgaggttgttgaagagagcagtaagcagaagctttccgccgcagtaagaaacgccattcaagtgagttatgttccagccaaccgagatcctttattgcaattaaaatattcatcgaaagcggtgcttggacgcttattgaaagcgattgaatgggttggagggagccaggaagtattagaggagcaagcagctaagttaaacgcattaacgaagagtaatcctgcattaaatgagattgcggcggcgattaacgccagttgggggaatatctacaaggggcgttatttatctcaggcgtcgctgaattttccactcgctaatatcgatgaaatactaaaattaatacaacttcaatttaaccctgatgaaaccggcaacacgattaatgtagaccgactaagcgatgggcaaaaatcattggtctatttttctcttatcaaggcaatgtttgatattgataagaagactagggagttgatttcctcaggcgcggcttctaattttaatcctgaaaaaatgagattgcctatttttagtatgatctctctggaagagcctgaaaaccatctttctcctcattacttaggtagaataattagttag

SEQ ID NO: 227362 - DNA, 990 bp, Klebsiella pneumoniae
gtgaaagattatggtcgtaatgagctgtgccaagttattatttcttcccattcatcttccattttaagccgaatcgagcccgagcaaatacgtcactttagattggatcagatatcaaaaagcacggtagtaagcgcattaacgctaccggaaaaagaagacgagctttctaagtttattaaagaggcagttaaatcataccctgaaatctatttttctaaactggtgatatttggcgaaggggatagtgaggaaattataattccaaaggtgcttgagctgtattcgacggagattgatagccattctatctctgttgttcctcttggtggacgtcatgtgaatcatttttggcgtctgttgaagtcattacagattccctttatcactttactggatttcgatatcgatagaaatggcggtgggttcggccgacttagatatgctattgagcaactgtctattttctgtggtggaaaatatggcaagacaaaagaaaaaatacctgcatgggatgacgaacgagatccaacaacatttaaacttccgcgtactgacggtgattcatataatgttgtggctgcgttggagaatcataatatttatttttcatcgcctctagatatcgattacgcaatgattgaagcattccctgatattttctgtgaaaaagatgtggtctatggggaaagagggcctaaaaatattgaacaggaagaacaggaagaacaaaaaaaagagctgataaatgcagtattgaaaaaaggcaactccggcgtccgttacgaattttctgttgattatctaaaatatttcctgtggtatcgctatcgctttttatccaataaaagtaagccagcctctcatgttagaatgttttctaaaattgaagaaaaatatacgccggatgaaatcagagaaaaattgcctccagtgttaattcgggtagctgacaagactgtatcgttattggcggaggttattgaatga

SEQ ID NO: 227363 - DNA, 1674 bp, Klebsiella pneumoniae
atgaccagtcaatggctaccttctgagggcattgagccgacacaggagttaatggatattatattctgtgatcaatccgtttctgtacttgctggcgcgggggcgggtaaaacggagcttttagctcagaaatctaattacttgttgcagacaggaaagtgcatgtggcctaaacgcatattatgcctttcatataaaaaagaggcgcaagagaatatcaaaacacgtgtgatgaaaagatgtggacaaagaggtgagcgctttgattcgtatactttcgatgctttttgcaagagtattgttgaccgttttaaagatgttttgcctgagaataaaagacccttaaacaattatgatttagtgtttaatcagaaagccaataatggcaaggataagatatcatttgatctaataaggagtttggcattagatattttaacaattagaacggatattgttgatcttttttcgttgacgtattcacatgtttttatcgatgagtttcaagatacccgctctgatcagtatgaaatgattaagcttctttttaaagacaaaggaacgcaattgctagcggtgggcgatatcaaccaaagcattatgttgtgggctggtgccaagaaaacagtgtttgaagattgtgaaaaagagtttaatacaaccaaaaaactattggtgcataattttagagctagtgaggaaattcaagaggtcttaagatgctttattcattttgtacaaaatgatgctaactttacgccaataatcaaaagtatcgataattgcactattcactattatgataatgagctttctgaagcggatgatattgctgataaaatcgcaagattcatcacttctggcattgaagaaaaagagatttgtgtactggttaaacagcagtcagagcaatatacggaaaaacttcgagataagttaacgactaaagggattagaaatcttgatttatcggaattgcaagatgtgttaaaagaaccattagggcaaatatttgctgcgctcttcaaggtttatacatcacgctcatcatcaagctataccgagctttgtgatttatatcttgagttgcatcgagtctcccgcggcgatgaaaaagaagatgcattaattaaagtattgtcggataacatagcggaaaataagaaaaatttaggcgatgagcctagccccgattcattgataacctgcattaaggatattataactctatttggtgtgaaaagaatggtggggcgatggaatcagtataagtccgctgattattgggataagatctggcgtaatcttgagcaacatttgcgctacacaatagacgcaacacactctcttaacgaggcggcgttgatgtttcaggcggaaaattccgttcaggtgatgaacgtgcataaatgcaagggactggaatataaagtggttatttttcttggcttagaggaccaagctttttgggcttataaaaacgcaaaatttgaaaatgattgcgctctctatgttgctttatccagggctaaagaaagtataataataacttctacaaaatgtagagagcatagaatcactaattggcgagatgatagaacctctacctataaaaatattggtcctatatattcgttcttaacgaaacattgcaagtttagggaggtgagataa

SEQ ID NO: 227364 - DNA, 1434 bp, Klebsiella pneumoniae
atgagttacaaaaattggcatgcctatcaagaagccacagcgaaagtatttcgagatcttgggtgtaatgctcagattgattttcgcacaaagggtgctcgtgcaacacatgatatcgacgtctacgcgaccttttttcgttcaggtattctctgtacttgggtgatcgaatgcaaattatggaaaactcgcgtccccaaggaaaaagtgcttatcctcaagagcatcattgaagacctcggtgctgaccggggaattattgtcagtgaggttggttttcaatctggggcatatgatgctgcgcgtgggacaaatattactcttgtgacgtcattggatgaattttcccgcactgcactggcagcagcgtcagaagtcccgcttattctgaacagcagtggcgaaggagagcctatctatcaatttccaaacctagctgggccgcatgacttacttctgtataacaatgtcattattagtgcaaattggatcgggtgtagtattgctattattaatcctgcttccaaagcgatcatccgtactattgatctcgataaatacgagaaagtctctccgcaaaccggcgctagagaaatactcagccatccaccagggagtttggttattgcggatgggcgtttgtttgtaggtcaagttttctcggaagttatattagtcattgatctggcgactcatgctatcgttaaaagaatagcaatactgggtggaggggaaggacaattagcggtgtcgcatgatgagaaaaaagtgtattttgcgagtaacactattaatcagttttatattattgatagcgccacttacgatgttacaacagtgccgtatcctgaaggcggtcggggttgcatgtcgctgctccgacatccaacacaaccgcttctctacattggtgtttcgcgtggtggtcgcatcaatggacaacgatatccgcacgctaactcttatttagcgatttatgatctcagtcgtcagatttatttggtcgacactcagcttgctgaagtgagaaatggtcgagcagatgacgctactccagcatgtttgacttacgacgatattcacaatcgaatttatatcggcatgttccagtcccaacgggggatctgcgtactagatgcggaatctgggaggccagttcaggatattcgatttgaggctaattcttggagcaagccattttcatgggtggaccccttatcgcaagcactcacagttagctcgttactgtcagtaaatcgcaacaataatgaactggtagtgcttgaccgctcgtcactccatctccagaaaagcatatttcttggtaatgcttctaatggtccacgtgcagtcttagtatggcaaaatcaagccatcgttagctatcccggtcgaaatggattgatcttcatttctctaaatagcagttcctaa

SEQ ID NO: 227365 - DNA, 1683 bp, Klebsiella pneumoniae
atggcgcttacagatctcgcaatccggcatgccaggccgcttggcaaggcatacaggctctctgactgtcacggtctttacattcaggttaaccccagcggatctaagctgtggtatctgaaatttcgctttggaaacaaagagaaccgtatggcattaggcccttatccgcttatttctctcgcactggcaagggagaagcaagcggatataagaaggcttattttagaaggcattaatccggcggaaaaacgcagagaggaaaagcggggtggagagcccctttatacgttcgagtccgtggcgcgcgaatgggtctccagcaacgtcaactggtcggcggaacataagaagcgggtgctgcgttatttcgagctttacgtattccccacgaacggcagctgggatattaccaaaatgaaggtcaaagacctgctggtacccatcaaagaggtggagaaagcgggcaaactggacgtagcttcccggcttcagcaacgtaccgcttgcgtgatgcgctatgccgtccagaacggcattatcgatcataaccccgcatcagatttaaccggcgcggtctccacgcccaaagtacgtcatcacccggcgctggatctgaatcttatccctgattttctggaaagagtcgacgacttcaaaggacgtaagctgacacaactggcggtaaagctggcgttgttattattcatccgctccagcgaactgcgctttgcccgctgggatgagatagacctgcataacgccatgtggaccattcccgccgagcgtgaaccgatccccggcgttaaatactctgcgcgtggcgcgaagatgcgatctccacacctggtacctctgtcacatcaggccatcgaactgctgcgcgaggtgcggcagcattgccgaccgggaactgaactggtgttccccggcgaccacaattaccgcaaaccgatgagtgaaaacaccattaacaaagcgctgcgggtgatgggctacgacacccagaaagatgtctgtggccacgggtttcgcaccatggcctgtagcgcgctggtggagtcgggcctgtggtcaagcgacgcggtagagcgccagatgagccatcaggagcgcaagcgcgttcgtgcggcgtatatccataaggcgcagcatctcgaagaacgccgggaaatgatgcagtggtgggcggattatctggatgcgaaccgcttcaggcatgtggtgccgtatggcttcaaaaaatcgccgggaggcgcactcgaccatatgagcttccaggagcgtaatgaccgacaagtggaggagctgaaagcccggatactggctgactcggaatggctgacggcgtctgagttatcggcaaaagcgggttttcgttctgccgatcctgaagctggcccgaaaggctggaaagccgcaggtaagattttctcgctgaaggtcgacggggaggatttgtacccggattatgttctggatgagaaaatgcgacctctcaaggttgtcaggcttattctttcgctgttcaaagagcgtaaaacgccgtgggggctagctatctggtttggctcggcaaaccgcaggttgagaggtgggaagccgaaagatctgctgatttcaaagtcagagttggttctgatggttgcccaagaggaaattgagatgagggagcatgggtga

SEQ ID NO: 227366 - DNA, 231 bp, Klebsiella pneumoniae
atgcgcacagtttcgatatttaaaaacggcaataaccgcgccatccgtctgccccgggacctggattttgacggcgtcagcgagctggagatcgtccgggaaggggacagcatcattctgcgtcccgtccggccgacctggggctcgttcgcgcagctggacagggccgctccggactttatggcggagcgtgaggatgtggtcagcgatgaaggacgctttgagccatga

SEQ ID NO: 227367 - DNA, 1134 bp, Klebsiella pneumoniae
atgcacttttatgttgatgaaaccggccataccggaccgaacctttttgacagcactcagccgatactgtcctacggcgtgctgtcctcacccgatgatctcgatactgtcgcggagcctgccctcgctgcgctgcgtaaaaaaatgggggtggtgcgactgcacgccgccgaactgggtatgcaccgcctggataacgtcatcgatacgttactggttctgcagaaaaagcaccgtatccgctttgatatctggcaggtggtcaaacgcgatcacgccatcatttccttcttcgatcaggtgtttgaccaggggatgaatccggtggtgccctggacggcctactggaccccgcttcgctatcccctgctgataaatctggcccggctgtttgatgatgagctagcggaaaaagcctggcgcgcccgtctggaagcccacgatggccggtcggcggcgttgttgggggaagtctgcagcgtactgctttcacgtgtcgggatgctgggcgatccccgtttcattgaaattgtgactgatgcgctgtcgtgggcaatggcccactttgatgaactcagctacaactgcaaaaccaataaagaaaaactgcagatcatgccaaacatgattggctttcagtccgtgcttcatgggatctgccaccggctaggcgctcccaaccgcaaggcccgcatcattgttgatcagcaatcgcagttcaacaccacccagcgggagttgagcgtattttatcgtcagattcgcgctcagccatgggagctggggccaggtctgccggtgatggacatgaaaaacatgccagagcaaccgctggtcttccagtctggtacgcagagcgccggactggaactggttgatctctatctgtggatcttcaaacgctttatggaaggtaaagaactaacccggccgctgacacgcctggtttataccaaccggcatacctctatcacctccagcgtgtcactggacgcgatcggcaaacagtttaaagcgttcatggagaccctgccggagccaacggcggacatgttgcaaaaagggcgtgaacttcaggcccgggaagaagcccgccgtctgcagcaccgggttcccggtttcactagcatctga

SEQ ID NO: 227368 - DNA, 294 bp, Klebsiella pneumoniae
atggaaaatcaggagcacctgacgctgatccactcgctgatcaaaacccacgccttcaacggttataccctagtcagcacgaagtactggcagacgccctcggtcagtgacatttccgtggtccgggggctgatccccctgactgacctggagctggcccaccggctggcggtggacccacgaactatccgcaaatggaaatccggtcagacacagatggtgttcaccacctggtgctgtctgtgctggctggccgggctgggcatgccgctggataacgaaatcagcgactga

SEQ ID NO: 227369 - DNA, 207 bp, Klebsiella pneumoniae
atgtctacatttatcgcagcagtatttactgtcatcctcaccctcatcgccatcggtaagttcatctgggccgttgtcgtagcgtaccggagcctcacctggttcttaacccactttgacgagcttccctatatctggacatgcagctggcgatattaccgccggtatattttccgccgtatctaccgtcgcgtcttcagtcgctga

SEQ ID NO: 227370 - DNA, 291 bp, Klebsiella pneumoniae
ttgggcgtaaaaattacaggtatagataaattgcagaaacaattgaaagaagttgaggaagcggctgaaacccttaacggtagttatccggtaagttttgatgcaaacgatcctgtcagcattgaaactgcgattcaggaagcgtacagcatgttggaggagcgagcctcacggtatgccgctaatccgatgattagtcccatgatcgaggccatgaaagaggatttgcgtcagcaaattctggatagtgccgaacagcaaagacaggagaacgggcaggatggcaattga

SEQ ID NO: 227371 - DNA, 900 bp, Klebsiella pneumoniae
atggcaattgacatttttcagtcactcaaaaattgtgtgtatgatttgcagcgtgctgatgcacagaactatcagcaaccactgaaacaactggcccggctcctgaacgacggtaatctacaggctgttaacgaacgcctgacatgtgatgtcgatcttgacgcctttctggcgaaaagtcatgaaaccgaatccagtatggccggctccgccatcctgcagtggcctgaagaaccgcgtgaaattttaggcctgaagcttttgttaatcaggaaaatgtccgttaacgataatttcgcattcaatttttgccacacgtttttctatgaccgaaaaattattgaatctgtccgtaagttcacatcctcgttactggtaacttttgttcgcgactaccagctgtatgttgagaatgaatccgatcctgatccggtagtaatacgtcaggtctcgcgcaaaatttttattgttcacggccatgataatgatgcccttcagtctgttgcccgctttatatcccggatagggctggaggaaatcattctctctgaacgtcctgatggctcaaggactgtaatcgagaaatttgaagcggagtcaggagatgtcagctttgccatagtgctgatgacacccgacgacagtggaaatgccctggcatctgaaaacacacgactgcgtgcacgccagaatgtcctgtatgaactgggatatttcgcgggtaagcttgggcgcgggaaagtgctggtactaaggaagggagatatcgaaataccttccgatctcgcgggcgtactctataccgagcttgatgagcatggtggatggaaacgcaagctgctgagtgagctgacgtatgccggtgttccttttgacaaggaaaaagcgttaagcgcctga

SEQ ID NO: 227372 - DNA, 2085 bp, Klebsiella pneumoniae
gtgatcggaattgaaggagcatggggctcaggtaaaacaagccttctgaatctgatactgaaaagtctttttcagcacaaggatggacacacgcatgtactgcatgtttccccatggctgagtggcagtgatccggttgaagcgctctttcttcctgttgccacggttattcagcaggaaatggaaaaacgctatcctccgaagggcttcaaaaagttctggcgtaaatatctgttgtcaccagaagctcagaaagtgattgagtatgctcaggatacttcatcgcgcgttcttccgctggttcagtatatcgggcagttttccagcatcattaactggatagcaggcgggataaaagtatttaccgagagtcgtctcgcagttgatcaaaaaacgacaacaaaactgcgggctgaaattgcgaaacaactggttactctggatctgaaattcatcgtcgttatggatgaccttgatcgacttgaaccttcccagattgctgaagtgttcagactggtgagggctgtagccgatctgccccgctttacccatattctctgttatgacaggcagattatcactcatgccgttgagtatgcgctgaatatagaagatggcagccgttacctgcagaaaatcattcagctcagttttaaattaccccggcctgaagcctttgatttacgcaatgaatttcgccagcgggctgaggcgctgtatcagcaaattaataatcaaccgccagactctggaatgtcaggggatctcgccgcggtgacggatacgtatggtggcgcactttcgacgccacgggagatccatcaggcgattaattccctgatttttctgtatccggggatgcgggattttgtgtatttccctgatttgtgcctactccagcttatccgggtgacaaacccggccctgtatgactggacagagcattacctgacagaacggtccgtgattgaaaccggccagggcatgctttctgaccgagaaaaggcagacttccgggaggagcttataaggtctatgaagacgttcagggcatccaatgcagactcgtttctgacgcttgcagactggctccccggtatcagcggacatgatgatgcacatctgaatctctttgagcccgtcagtgaggattttcgtcatatccagacgaccggtaaacgactcagcagtctgacgcactggcgatattattatgccttctcctcaccccagaatgttctgcccactgatttctttaatgagctttttaagcaggcaggcgtaccggaaaaccagcagcagctctctgaaaagctcctttcaaaaatcaacagtgtgggtagtctgtccggaacctggttcgaacatatactaagcaggctgacaccggggctgattaaggaacgtaatttcgaagagtgtgctgggttgattcagtttttcttcgatcacacggatgaggtcagcactcgcttccggatccgtaacacatggttttccctgcgtgaaactggcattaatcaggttgtacggcatctgctgaagcatatgcagaatattgatgagaccagaacagtcacgcagatggaaaagctgattgttactggcgcttcgccgttctggatagccgattttatgcgggatcttatctgggaacacggtcttgctcaaaatgcagtaccttccccttcagacgctcttttcagtcgcgatattacggaacggttgcgtgacagatttgctgaacgcatgagtcagccagaacttaagcaacaacttctcctgcgccagtcaattctcgggtatctctacgcctggagagacatgagttcagatgaagccgtgaagcaatgggtcagagaagtaactgccactgatgaaggcctcgttaacctgttgatacgattacagaccagtgtcttcagctctcacagaggggcatatcgccggattgcgcgtgaccaggtcagtccgttctttgatgactggtcagcagtcgaagagaagctgaaggttatgctgtccggcaacgagctgacgccggagcaggaagaactcaaaagtgcactgggaaatgacgactga

SEQ ID NO: 227373 - DNA, 903 bp, Klebsiella pneumoniae
gtgtaccggcatatcattctcggccagaccttcggcacgtcagtgctctcccgcgacgagctgcgctttatgctggttcataccagggaggccttcctgcgcgggcataacaggctggcaaccctgccggccctgggcacgctgctcgacatcacccgtgacctgctggcctggcaggtggagcatgaccgtccggtggatgaccactacctgaaggggatcttccgcctggccggcgaaaactggatggaagagtttgaccggttccgggcagcgctgcgcccggtcgtggatcagatgtatgccgagcatcttttgcgtccgctggagagcgactgttttgagctggctgacattcccgacgctaacctgtctgaaattttcaccctgccgcggctgaagaccatattccctctggtcctgcgcgggctgggctggacagaacagaaggccaccgctctggcgcaggagctgcgcccggttatttctgccgtaacggaaaccatcggggccggcaccctgcgccttgatatccgcattgacggccagccccccggagaacgcccgggggcctggtacaccacgccccgtctgcacctgctgatcaccggccaggacttcgtggtgccgtacggctgggaggcgttctacgaactgctgggcctgttcacgctgtattcccgccatccggaagccctggcgcacggtcaccaaggggcgcgtgtgatgttctccccgcccgggcatgtatcaaaagagggatttttcggtatcgacggcctgcggatttttttaccggcggaggcctttgagacgctggtccgggagcttaccacgcgatgtgcggaaggtacgctggcggaggccctgaccgggctgcgcggcctttacggagatctgtaa

SEQ ID NO: 227374 - DNA, 183 bp, Klebsiella pneumoniae
atgttggtgactatgacagacaaagaactcagtcggatcaacatcattcagtcagttattgaaaagcgcatgcgtcgtcgcgatgctgctcatcagcttgctttgaccgaatgtcagacacagcgtttgattgatgatcagcactacagtgagtccataaaacggtcgttttatggagactga

SEQ ID NO: 227375 - DNA, 462 bp, Klebsiella pneumoniae
atgctggataagaaagataaggagctgctcaggctgttacaacatgactgtacactgtgtctacaggacctggcagcggctgtcgatttaacgccgaatccttgctggaagcgcataaaacgtcttgaagatgaggggatcatcactggtcgggttgctctgttgagtaaggataagcttaacttgtcgcttacagccttcgtgatgataaaaacacaaaaccacagccatgactggtataaacatttcgtttcgcaggtcaatagtatgccagaagtgatgacttttttccgtaccacgggagaatatgattatcttcttcaggtagtggtttcagatatgaagggttacgatagtttttacaaaaagctggtcagctcagtaagcggattgagtgatgtaacatccagtttttccatggaggaaataaaatacaccactcaacttccattacctagttaa

SEQ ID NO: 227376 - DNA, 948 bp, Klebsiella pneumoniae
atgcgcagagtgacgatattggtattattcctgctggtttcactgacctgggggaccacatggctggctatgcggatagccgctgaaactatccctccggtgtttgcaaccgggatgaggtttatgtttgcagctccattcttaatcggcattgcatggttaagaaaaacaccgcttttatttccacgcggacaacgcttgttccagcttgtaatttgtattttttattttgccattcctttctcattaatgatttatggtgaaacatatgtcagctccgggcttgcctccattatattttcaaacatgcctgtggctgttttgattgcatcagttttgtttttgaatgaaaaaacaaactcaatgcagattgcgggtttaactatcgcaatagtggcactggcgggcattcttctcgaagaaacgaaaacaagcacagagacccaatggcagggaatcattgcgcttgtttcagccgtaatcatccatgccataatatatactcaatgcaagaaaagaagctgtgctgtctctgttataacgtttaatgcgctcccgtgctttctggcaggattgttactttctgcggcaggatggttcttcgaaagaccactggtgtcagccttctcagcacactcaatattagctaccctgtatctcggtgcttttgccggggtttttgggatattgtgctactttgcacttcagcaaaaggccagtgcctttcaggcttcacttgtattccttatttttcctctgattgcggtaagcctggaaagctatgtatatggatatgcaatttcaactcaatcaatgctctttattataccgttagttgccgggatatttcttactcttttctcacggcgagtgtctgcaaccaacaaacatcgggattgctcaccacaaacaaataatggtattcatgagcatactgagacttcctga

SEQ ID NO: 227377 - DNA, 996 bp, Klebsiella pneumoniae
atgtttccagtcggcattgacgtaagtaaaaacacccttgatctttgcatactgtatgacggtatcaaaggacgcataaaaacccgtaacatccaaaataacagacattcagttgaaaatattcttcgctggctcaggctccagcactgcggtcctgaggatgttcatgttgtgatggaagctaccggtgtttatcacgaacggctggccactgagttacatgatgccggtttccgggtttctctggccaaccctcaccgcagtcgggagtttgcacgcggcatgggaataatgacaaagacggataaggtggatgcgtatatgcttgcctgttacgcattccttaagaagccacaccactgggagccgccgtcccccgaaatcagatatctcgctgcactcctgcgacggcgtgatgttctgctgggtgatgccctgcgtgaggagaacaggctggaaaaatacctgtcgacagacacacctgcagatattatcagttcctgcaggcgtatggcgcagcttctgcgcgaggaggtaagtaatatcgagcggcagattaaagcacatatcaaagccagccctgcactgaggcgtgattatacactgctgaactcaattaaatcggttggtccccagttggggatgcatatgctggtcgagcttcgcagccataactttgcatcagctgagcaggctgccgcctttctgggcgtggtgccgatcgagaaacgctcaggcacatcggtccggagccgaccgcggatgtcgaaaatcggcccccctcagttgagagcgaggctttacatgtccgccctgtgcggaaaaatctacaataagcgaatgcgtaatatttacgatgagatgtgcctgcggggtaaacctaaaatggtagccattggcgcgctgatgcggaaactggtgcactggtgttatggcgtcctgaagaccggaaccgtttttaatgacgaaggtctgaaacaagtactgtcaacctga

SEQ ID NO: 227378 - DNA, 2940 bp, Klebsiella pneumoniae
atgttgttacaggagaaggcttttgatgacagggacgagtggcatttgcttgctgacgagctttccctgctaccggggatgaccgatacggggcgtctgggatttgcccttcaactaaaattccgacaggttcagggccattatcccgactctgtacacgatttcccttccggcattgtgcacaccatcgctgagcaggtcggatgcgcttccgtatcccctgaaaactatccgtttcagggacggcaggctcagcgacaccgacaccgacaacatattcgtcgctatctgggtgtcagactccccagtaaagctgatatcgcacgactcagcgcctggttaaccgaatttatcctcccgttaaatccgcaggccgtacatggcagtgaacttgttactgactggtgtcaggaacagctgattgaacggccagccaccgagcacctggagcggattatacgttcagctgtacaccagttcgaaacaaagcaacaaaacaccatatttacccgactttcactcgacagtaaggttgccatcaatcatctactgtctgccgaagaaccgggcgctgcccaggtaaacgaagtcacattcagcggcctcaaagctgacccgggaaggcccagtctggagaatgtcctttccgtcatcgcccaactaaaatgccttgatggtgttgcgctactgccgaatatttttcagggcatatctcctaaattcatcgtccagtttcaacaacggtgtgccagtgaatcgatcagggagcttcgtcgccacccttcagcgatccgttacagcatggtagctatgttttgctggcgtcgccgccagcaactgaccgatgcgttgattgagatgttgatggtgctgatccataatctcggtacccgtgctgaaaaaaaggtcgataaaaagcagtttgcggcgtttaaaaaggtcaggggcaaggcgcgtctgctattccgcatggccgaggctaccgttgaccagccagacggtgtcataaaggaagttgtctatcctgttgtctcacagaaaatgctgcaaaatctggtcgatgaattcaaaactctaggggtgaatactgagcaggaagtacatgaatccatgcgttcttcttacggtaaccactatcgcaggatgttgatgccggtactggaccggcttgagtttcagtccggcaatgccctctatcggcccgtgattgatgctatccagattattaaggaaaacaggaccagcaatcagcatttctatgcggtgggtgatgtgcctgttgacggtattattcagaaaaaatggcgggatgttgtcatcgtacagagccagtccggtgaagagcgtattaatcgtaccaactatgaaatttgtgtattacgggctttacgcaaaagtctgcgcaacaaagaaatctgggtcaccggcgcggatcgctatcgtgatccggcagaagatctccctgccgattttgccactaaccgcgcatattattattccctgttgcaggcacccactgatgcgacaacctttattaatcaaatcaaagacaggatgcgccagtggctcggtacgctggataatggcctgccggataatcccagacttcgcatcagggaacaggggaaaaatcgtatccacctgacgccgctggataaacaaacggagccgcccaacaccgcagcgctgaagcaggagattggccagcgctgggccgatctggagttgatagacatactcaaggaggtggatttacgggaacatttctcgtggttatttcgcacatcggccagtcgggaagtgctggagcctgaggtattacaacgccgcctgttgttatgtctgtttggcctcggaacgaatgtagggctgaaacgtatcgccagccagcaaccccgcgtcagttatgatgaattgcgttacgttaaacggcggtttattcagaaagatgctttgcgctcagcgatttcacatattgtgaatggtattttcagaattcgtcagcccgctatctgggggaatgcgacgacatcctgtgcggcggactcccgaaagtttggtgcttatgatcagaatctgatgacagaatggcatgctcgctatggcgggcgcggcgtgatgatttactggcatgtggatacgcattccacctgtatttattcacaattgcgccgctgttcctcatcggaggtggccgccatgatggaaggtgttctgcgtcactgtaccgacatggaaattaaccaccagtatgtggacagccacggacaaagtgaggtggcctttgcgttcagtgatgtgctggggttcgatctattgccgcgcctgaaagcgatcgcccgacagaaactgtatgtgtgtgaaaaggaagatacatcgttgtacccgcatcttacgccgattttaacccgggggatcgactgggagcttattgcacaacagtatgacgagataatcaaatatacagcggcacttaaaaccggaacggcagaacccgaggccatattacgacgattcacccgcaataacattcagcatccaacctataaggcactcgcggagctgggcaaagcgattaagaccatcttcctctgccgttatttacacgatgagtcactgcgttgcgaaattaatgcgggtctcaacgtcgtggaaaactggaacagcgccaataattttattttttatggcgaacacggagaatttaccagcaaccggcctgcggatcaggaactgtcgatgctctctttgcacctgttgcaaatcagcctggtctatatcaataccctgttgattcaaaatgtgctgacagagccggcctggcagcagagaatgacagaagaagactggcgtggtctgaccccattgatataccaccatgttaatccgtatggacgtatcgagctgaacatggatcaacggctggcgctggcagcctga

SEQ ID NO: 227379 - DNA, 561 bp, Klebsiella pneumoniae
atgtcacgcgtttttgcctactgccgtgtttctacactggagcagaacacggaaaaccagcgcagggaaatagaagctgctggttttaccgtcaaatcccagagactgattgaggagcacatcagtggttcggttgctgccagtgagcggcctggatttacccgtctgctcgacagaatggaaaatggtgacgtgctgattgtcactaaactggatcgtcttggacgaaatgctatggacgttaggaaaacggtggaacaactagcagcgtccggtattcgcgtacactgtctcgcgctgggcggcgtggacctcaccagcgcggccggcaggatgaccatgcaggtgatttcggccgtcgctgagtttgagaaagacctgctgattgagcgtacacattcagggattgcaagagccagggcttcgggaaaacgcttcgggcgtccttcgtcactcaatggggtacagcagcaggtggtgctggaacgtcttaacgctggagtaagtattggtctattgcccgtgagtttagcactacacggcagaccattcttcgcgtaa

SEQ ID NO: 227380 - DNA, 861 bp, Klebsiella pneumoniae
atggaaatttcaacacaaaaactgtctgacggcatcgttctgacgcttcgctctccctccgacagtacaaaaagcccggtgatcattttgtgccatggcttctgtggtatcagagaaattctgctacctgattttgctgaagcatttacccgcgccggattttccaccatcacgtttgattatcgtggtttcggggacagtgacggcgaacgcggccgcttggttcctgctatgcaaattgacgatattatctctgttgttaactgggcaagagaacagccctcccttgatgcgcagcgtattggcctgtggggaacatcatttgggggatgccacgtatttggtgcggcggtcagagacccgggaatcaaatgtattgtcagccagctggcttttgcagacggtgaagagatagtcaccgggaatatgaataatgaagagaaagaagcttttctttcaaccctggacaagatggctgaaaagcagaagaacacaggtaaagaaatgttcgtgggtgtcaaccgggtactgagcgatgcagaatcaaaatcatttttcgaagaaaacagaacgcagtacccaaagatggacattaaaataccgtttcttacggtgcgcgaaactcttctgtacaaacccgcattgaatgcctcacaggtgatgtgcccgaccctgatcgttattgctggtcaggatacggttaatccaccggagcagggacgggccttatttgacgcggtgggggccaaagaaaaaaggctatatgaggaaagcagtgcccgccattacgacatttatgcaggagagcactttaagcaggttatcagcattcagacagaatggtttaaaacgcacctgtaa

SEQ ID NO: 227381 - DNA, 495 bp, Klebsiella pneumoniae
atgaaagtcactgaacccgggctgaataagctgatcgataacctgaacaccctgatttgcgaggacagcctgctcacgcgccaggagcgtgaaacgctggtactggccgtcgccgctatcggcgccatgaaagcgcgcgtcggcttgaaaaaaggcgatgcgccgaccgttgccagacgggaaaaaagggagaaaaaagaccgccagcctgatccgcgttttccgcgagccggtcatccctggcagaaagacgaaaaaaccttactgagtgatgcgctcgattcggtaccggacgaagagattggcaagcatctgttctggctttccgagaaactgggcagaacgcctttcagtgttgctttccagatcgcggcaatcagggagctgcaggacggctgggaggagcagttcagggagatttcggataacattcgcttgtccggtctgagcatcagtgattatcttacacagaacggcacgggccataacgcctga

SEQ ID NO: 227382 - DNA, 1035 bp, Klebsiella pneumoniae
atgaaaagaatatttattctaatgacattactgatacttggcagcgaggctactgctaagtgtacatatgatggtaatgttaaacgccaggggttaacgctaagtaatgtaaaaataccaacggatacgtctattccggtaggcacggtattatatagccgtaagtttggtacaggttcatataaatcgttcacttgtaataaaaatacggatgaccagtatattattgatatcggtgccgccgtcgttcctggcgtcaccggacttcagggtggtccggtatatgaaacagggatcgaaggtatcggttttcaggtctcagatctcttacgtagcaaaaatggctctctggttgccgcagcagcaggctcaacgctggttcccatttcgagctcatcagaaaataactatcaagccattacggtatggttaataaaaaccaaaactgtgattgacacaagcacaaaatcaacttcgaatccctcggtttcattttctgttggaaatataaaaactaaccccagcccttcagagcgcctattgtataacgtaacttcaatttccattaaagacattaattatcgttctacatcttgtaatatttctactccacgctcgcaggttaccttgaatcgcatcgataaaggtcaattaatgtcacttactcgtggtgcgataacgccctcgcagaagaccattgccatgaacattagctgcccgaatgattccgtaggaaatacggtcacctattggtttaacccgatcggcggaaacagtgcatcgggtgatggcattgttgacaatatgcttacgggaacaacagcagctaataaagtaggggttatattcaagctatcgggtagacccgttgtcttctatgataccgacagctacagctataaaataaacaacagtaatgatctcaataaaaccatcaacttgaccgctgattactataggcaaagtgacagtagcgccgatgtcacattgggacttgttaaaggaatgctggaagtcgttattcaggaagattaa

SEQ ID NO: 227383 - DNA, 1287 bp, Klebsiella pneumoniae
atgaataataagctttatcgcacggaagcgatcgaatataaaaggcatcactggagaggaaaagctttgttattggctggattacctgcatggttaatagtattattatctactttatttttaattgcactgatcgttgcggtgatattttgtaagtttacacaacggatagatgtaaaaggagaggtcatcactctccctcattctattaatgtgttttcgccacaacagggattcatcatcaagcagtatgttaaaataggtgatcttgtcaaaaagaatcaacctttatacgagatagacgtttctcgtaacacgagtagcggtaacgttagtgctgcgcaagtagaatctattaatgaaaaaatttataactcagaagaaattatcaaaaaactggttcacaataaaaaacagacgctgaacgcgctaaatgaacaattaaaaacatctactgactcgcttaaagtaacgatcagaatgttgcaaaacacgcaagccggcctcaaaaaaatgcatgataaccttgcgagttacgacaaatatcttagtgatggtttaattactaaagatcaatataactatcagcattctttatacttccaacagcaaagtgcctaccagtctctggttagtcaaaaaatgcaacttgaatcacagattacacaacttaacagcgacaaagtaacaaaagctgctgattttgacaatcaaatatcaagtcaatataatcagactaatgattataagaaccaactcatcgaatctaatgctaatggtaaccttattgttaaagctaccgcagatggcagaatagaatcattgtctgctacacaaggccaaacggtcgataacggtagtagcctggcgcagataaagcctataggtaatgttgagtattaccttatactttggttacctaacaatagcattccctatttaaaaataggtgattctattaatatccgttatgatgcctttcctgcagataaattcgggcagttccccggagaaataatttccatttcttccatgccggcctcacgccaggaaatgtcagaatatacaaatgtaaataatggcagcacccaacaggaactagcactttacaaagcaatcgtaaaaataaaggataaagaattcagttacaaggggaaaacattgagcttatctaatgggcttaaagctcaggctgtcgtttttcttgaagaacgtcctttatatatgtggatgtttacccctatttataagatttctcaaagtgtgagcggccctgtcaatgactaa

SEQ ID NO: 227384 - DNA, 1881 bp, Klebsiella pneumoniae
atgagatcaaaattattaagtatatatgtcaagaatataggatgtatcgggcctgagggtgttcaggttaagcttgatgatatcctttttcttgttggccccaataactccggaaaaacaacgatactcagggcttacgaactcgcatttaacccaatttctttcaatattagtaatgaccgatgtaattgggctactgctgaacaaccgtctgaggttatccttgatgttcatattccagaaggaatgggaaatgtagatgaaaaatggaagattgttgatggcgaaaagaggatagtcagaagttcatgggtctgggatgaaaccggaaaggctataaggaaaacatgggatcctcaattagataattgggcacctgatgggaaggctggtggagccgataatgttttcaaatctcggcttccaagaccaatgcgtataaaatcattagatgatgccataacgacagaagaagtattgcttacccttgccttaagccctttagtaaaggaaattaagacactggaaagtgataataactctcagatatcgaaagataaagcggctctggcagctactgttaatgcactggcaggacctcatcaggaaagaatttccagcatttctcagcaaatacaatctggatttcaaagtatctttccagggcttggcgtactactccatgtagaaatgattccacctgaactaaaaattgagaatttgctcaagcaaggatccggattattggttgaagaagctgctggccaatcccgaataggacaacaaggtacaggagcaaggagagctttattctgggcgatgttacaagttaataatgagatcagtcgacaaactgaaaaacgagatgcacttcttaagtctttaaatgaacaattaaagaaagagtgtaaaaaggatgcagaaagtgaggccgtaaaattacttaaccaccaaattgacgctataaaaaatggaggtgtaattccggaggatgccgaagatcctgcattgccgggctacgtccttctgatgggtgagccagaaaatgctttgcatccaatggcagcaagagctgcacaatcacacctttatgctctgggaaaacatcctgactggcaagtattattgactacgcactcaccttactttattaacccacttgaagaccatacgacaattgcacgtatgcaacgttcacctgatgggaaatcattatctccaaaattatatgtcgcagatgaagccaacttttctgcagaagagaaagataatttacaggcattgcaactaaccgatataggttttgcagaaatattctttggcagttatccaattattgtagagggtgatactgaacatgcggcatttatttctgcaatagtaaaaactcagcatgaaatggcaggaaagataagcattatccgggcgcggggtaaagccgttcttgtacctttaataaaaatgctacgccatttcaaaagcaactttgggatcgtgcatgatattgattggccatatcgcaaggatggttccggaaatggaatgtggactatcaatgagacaattcgcaacgaaataataagatgcagacaaaatggccatgttgtttatgatcgctggagcatccctgactttgaacgctttctgggaggaactgaacttggcaaagataaaccatattctgcttttcatcgcatatcatctgatgacgaacttaaggttaaagtacaaaatcttatatcaagcttattcaacggagatgattatgacccgataggtcatgatccgaacggagagtttatttctcagattttagcagagttaaatgtctgggccataaaaaataatcaacaacatagtatacgtataattggtgtctaa

SEQ ID NO: 227385 - DNA, 1158 bp, Klebsiella pneumoniae
gtgtcgacagtaaagccgcgcctttattatgagaactggttgattttatttaaaaaaaacgttaattatataacttttaacactactgaatacattaagatgaaaaaattaattttaaaaattaacctatgtgtgtgtttttctctggctcagttcactcatgcggcacaattaactcccttcgctgatgaaaacagaaacttatggttgcgaatggaagggactcttgaaaatggggacgcgcagtcattcaacaactacattgaggaggcgaaggcgcaaaatctagaattttacggggttactttgatatccagtggtgggttattacaagaaggaaaagctattgcgaagctggtcagagacaacagaatgataacctacgttcctgataattcattgtgtgccagttcatgcttttgggtatttgctgcagggatacaccggtatgctggcaagcaaacttccatcggcgttcatagtgtagggcgaacaaatcaagaagaagatgaattaacaaaatcgaatacactggatatgattagggcatacgcagctctgggagtacctgatgatattgtcggtgcaacagcaaaaaccaaacccaatgagatacacttcctgaccagaagtgaactaaacgcaatggtgaacaaccctgcaccacccgaagaatttacaaattaccttatttcaacaaatcaatcagtagagacaacaaaattaattcaaacatccttaccatcagaagaatccaaaaactactcccgagacctcaatgagagagggattaatctcattcatacaggaaattacgatgaagcagtcaaagtattagaagaggctaaaaaacataataattttgacactgaagttttaggaaacttaggttacgcttattacaggaataatgacttaaaaaatgcacaggataacataacagcttcattaaaaatcaatgagacaagaagtgtatcctggggtaaccttggcgaaatcgttgcaaagcaaggaaatgttaagtgggcaatcgactgctttaataattatatttattactcaaaaaataaagagtctgcattaaggcacttaaatcgcctgacacagtctgagaatatttacttatcgatggccgcaagttcaataatcaataaataa

SEQ ID NO: 227386 - DNA, 156 bp, Klebsiella pneumoniae
atggccaacaatcttggtatcgacatgttccagttccttcctggcaaccattcgtatttcgccagccttttccccggcaaacccggcctgacggtacgcagcatttgtacgccacgatcagtgtacccggatgctacccccctcaaaaggggatag

SEQ ID NO: 227387 - DNA, 348 bp, Klebsiella pneumoniae
atgaatgtgacggaacaggaattgacgtgtttatccggaaagattttgagtaccagcatggttttcttaattatttcatgcagtgcttcccaggatgttcatgtgccggaggggaagtgtgacgccattgcagattatgacatcagtttctcccggtttgatgaaactgctcagcaactgccgcacgggacagggtgttttatcagggctgacctcagcaggacgtcccgggtcagcgtaaatcccgttaaaggtagaatgactatccgggaagctctccataccgcgctcgcgggcacggtgctgaaagtgactgaacagcaggctgattcgatgacggtcagataa

SEQ ID NO: 227388 - DNA, 489 bp, Klebsiella pneumoniae
atgctgagtgcccgggagagcagaatggaaacctacaagcagatataccaggaactccgtaataacgataaatctgcctggaccggtgatggctatccctgggcatgggaaaaactgacagaaacgctcgattcactggccgccacgggccatttacctgagccggggagccatatcctggagctggggcgaggcaacggaatgatggcatccctgtgttttgcccggaaaggaaatcatgtctgtggcgtggacttttcgcccacagccattcactgggcgcaggaaaatttcgcagaacagaggatttcaggtgatgtctgctcgctggtgcaactggaagataattgtttcgacctgatttttgatggcagttgcatgcactgcctgacgggaagccagcgtgaacaggcttacagccaggtcagacgtttactcagggaaaacgggacgttcattatcagcagtatgtgtggtgagccaggataa

SEQ ID NO: 227389 - DNA, 693 bp, Klebsiella pneumoniae
atggaaaccaacaagtataacggtgagtatataaaaaagaacagaaatagcaccggctgtttttctatgtttgtattgttttttgctattaccttcactccactatttttcaaaaatagcccggaaattatgtctcgaggacttcttgcccccatgttattcatcctcgaatttattattttagttccgttgtattatttgttttttaggaaaagagatgggcttggcattggcactttcaacttgaagctattttttatattgttttttataattatattcattcaatttatggtgccatatttgttggggttcaggaaggctgaatcatggagcacatcccaaatatcttatgagcattatattttctggattaatgttcttcctgctatttttatagtgcccatatatgaagaaattgtgttcagaggttgtctttttaattcctttaaattctggttcaacgggaatgtttatggttcagctgttgttacttcatttctatttgctgtaatgcaccttcagtattctgacatacgaacttttgttatgctatttttagtttcattaacactcattgtggcgagagttaagtcaaatggtatattaatgcctatattgcttcacatgcttatgaatgttgttgttattggagtgcaatacttagtatatatcaatcacgctcatcaatag

SEQ ID NO: 227390 - DNA, 471 bp, Klebsiella pneumoniae
gtgatcctctacaggctgacgaaaacaaagtatctttctacggcctggaccggatatggtgcgaaagaggctggtgggcgttggaatagcgtgggggtgtcaatggtatatgtctccgaaacggcatcactaacgatgctggagacgctggtacacctgcatgcggcacagataatggactctttcacgctactgagtatcgatgtgcctgatgaactgatccaaagcgcaaacatggatgaattaccgggcaactgggctgatgaggatgcgcctcaggaactggctgattacggagatgcctggtcatttaccaggagctcggttgcactgcgtgttccctcagccttatcgccggtagagttcaactatctgttaaatcctgagcaccctgagttttacgggatcgtgcagaaggctcaacagataccgttccggtttgatagtcgtcttaaacctgacaggaagtga

SEQ ID NO: 227391 - DNA, 444 bp, Klebsiella pneumoniae
atgaaaacatttagtttgtcctcaactccagccagaccacagcgcctctggcaggttgccgggttaaataatgctgatggcgtagcgcttctgggccaaatcaatgaaggcctggacgggaaggtggcgaatcggatcactgactgggccagaataacccagaatgacctgagaaaaatgtccggtatcccgtcgaccacgtttagccgcagtgtgaaggcacgttttaacccggaacaaagtgaacgtctggtacggattatccgcgtcattgatcgggcggtagatttgtttgaaggcgacaaggaagccgcacagaagtggttgaacgaacctaaccgggcattgagctggaaagtgccagcagacctgatggcatccgagacaggagcgtatgaggtcattaagctgattacgcgtctggagcatggggtgtactcgtga

SEQ ID NO: 227392 - DNA, 2127 bp, Klebsiella pneumoniae
atgacgactttacgtgtttttcgcaaaacaacacctttggtttacacaattcgcctgagcctgctgccgctggccgggttatcgttatccgccttcgcaacgcaggttgatatcgcaccgggttcgctcgacaaagaagatgtcctgaccgtggtgggcgactggctaggggatgcgcgcgaaaacgacgtcttcgaacatgctggcgcgcgtgacgttatccgccgtgaggattccgccaaaaccggcgcgacgaccattcgcgatgtgctgaatcgcatccctggtgtcactgccccggaaaacaacggcaccggcagccacgatctggcgatgaactttggtattcgcggcctgactccgcgccttgccagccgttcaaccgtactgatggacggtattcccgtaccgtttgccccttacggccagccacagctttcactggcgcctgtctcactcgggaatatggacgccatcgacgtggtacgcggcggtggtgcggtgcgttacgggccgcagagcgtgggcggtgtggtgaactttgtcacccgcaccattccgcaagacttcggcatcgaagccggcgtggaaggccagctcagcccgacgtcctcacaaaataacccaaaagagactcacaatctgatggtgggcggcacggcggataacggttttggtaccgccctgctttactccggcactcgcggcagcgactggcgcgagcacagcgcaacgcgcatcgacgacctgatgctgaaaagcaaatatgcgccgaacgaggtgcataccttcaacagcctgctgcaatactacgacggtgaagccgacatgcccggcggcctgtctcgcgcggattacaacgccgaccgctggctgtccacgcgccattacgatcgtttctgggggcgtcgcaagctggcaagcctcggctatcagttccagccggacagccagcataaattcaatattcagggcttctacaccgaaaccctgcgcagtggctacctagaacagggcaaacacatcaccctttcaccgcgtaactactgggtacgcggcattgaaccgcgctacagccagagctttatggtcggcccgagcgcacacgaggtgggcgtcggttaccggtatgtgaatgaatccacgcacgaaatgcgttactacaccgccaccagcagcgggcagctaccgtccagctcaagcccgtacaatcgtgacacccgttccggtaccgaagcgcatgcctggtatctggatgacgaaatcgacattggcaactggtcgatcaccctaggtatgcgctttgaacatatcgagtcataccagaacaacgccatcaaaggcacgcataaggaagtgagctacaacgccccacttccggcgttaaacgttctctatcacctcactgacagctggaatctttatgcaaacaccgaaggctcgttcggcaccgtacagtacagccaaattggcaaggctgtgcaaagcggcaatgtggaaccggaaaaagcacgaacttgggagctcggaacccgatatgacgatggcgcgctgacggcagaaatggggctgttcctgattaactttaataatcagtaccactccaaccagaccaacgacaccgtgaccgcacggggtaaaacgcgccataccgggttggaaaccctggtccgctatgacctcggcacgctgacgcccacgctcgataacgtctccgtctatgcaagctatgcgtacgtaaatgccgagatccgcgagaaaggcgacacctatggcaaccaagtaccgttctcgccgaaacacaaaggcacgctgggcgtggattacaagctaggcagttggacgttcaacctgaacagcgatttccagtccagccagtttgcggataacgccaacactgttaaagagagcgccgatggcagtaccggccgcatccccggattcatgctctggggcgcgagcgtggcgtatgactttggtccgcagatggcagacctgaaccttgcgttcggcgtgaaaaatatcttcgaccaggattatttcatccgctcttacgacgacaacaacaaaggcatctacgcaggtcagccgcgcacgctgtatatgcagggggcgttgaagttctaa

SEQ ID NO: 227393 - DNA, 522 bp, Klebsiella pneumoniae
gtgaacgcgtctatcaccaattctcgccgccaggcattgcgctcggcatcacactggtatgccgtattgagcggcgagcgcgtcagtccgcagcaggaagcacgctggcaacagtggtatgaagaggataaggagcatcagtgggcctggcaacaggttgcaaacctgcgcagccagctcagccatgtaccggccaatgtcgccagccgggtgctgcacgatacgcaccttacccgtcgtcacgttttgaaaggactgctgttgctgctcggcgtgggcggcggctggcagctctggcaatccgaaactggcgaaggtcttcgcgcggactaccgcaccgacaaaggcgcggtcagccatcagctgctagaagatgattcgcagctgacgctcaacacacaaagtgcagctgacgttccttttgatgtacatcagcgcgctgtccacctctggtacggcgaaattgctatcaccaccgcaaaagatgctcagcagcgacctttccgcgtgatgacccgctag

SEQ ID NO: 227394 - DNA, 192 bp, Klebsiella pneumoniae
atggaacgggtgttcaagagcctgaagagtgaatggataccggtgggtggctacagtgatatccgacagatgatgcaggatatcaccgtctggatacactactacaaccagcatcgcccccacacatttaatggcgggttatcaccctatgaatatgaaaatcaatggaaagaggctatgcaggtgtcttga

SEQ ID NO: 227395 - DNA, 360 bp, Klebsiella pneumoniae
atgagtcagaaatacctcattcgcatcgctgagctggaaaggctgctctctgagcagggtgaagccctccgtcagaaagaccagaaactgagtcaggttgaagagacggaggcctttctgcgctctgtgctgacccatgccgaagaaaagcccgaagaagatgcacgggaagtagaacatctgtgggcccagatagaaaaactgcgtcttgaggttgaacgggttgagacccagctaaatactgcgaacatctgccactgtatcacatcagaatgttactctctgagtctgttcagagaatatatttctgctgttttccggggtatacagcgctatctgaggagggggaatgaacagtga

SEQ ID NO: 227396 - DNA, 1233 bp, Klebsiella pneumoniae
atgaacagtgatttttctgcggaaaaaatcctgacgggtaagaatgtcctgtgcgcggccattcgccgtattgagtggttgtttgagacattctcttctgtctgtttgtctttttctggtggtaaggattccactgtgcttctccatcttgtggcagaggtggcccgcaggagaaaacgccgtttctctgtactgttcattgactgggaagcccagtaccagtgcaccattgaacatattcagaagatgcaggatatgtaccgggatgtgacggacaccttttactgggtggctcttcccctgaccacggtaaacggtgtctctcagtttcagccggagtggatatgctgggaacccggtgtggcgtgggttcgtcagccaccggaatatgccattacagatatggcatattttcccttttaccggtatgccatgacctttgaagaatttgttccggcattttcttcttggtttaccggaaaccggtgtgcagtggcaatactgattggtgtccgggcggatgaatcccttaaccgctttatgggactggtgtcccggcgtaaactgagatatgccgatgataaaccctggaccacggcgtcgcctgaaggtttttactacactatgtacccgttgtatgactggaaatcccgtgatatctggatatataacgccaaaacccgtgccatctacaatcctctgtatgatttgatgtaccgtgcaggtgtgccgttacgcgacatgcgtgtctgtgagccttttggcccggaacagcgtaaaggactgtggctttatcatgttctggagccggaaacctgggctaggatgtgtgagcgggtgtccggggctgccagtggtgctctttatgccaatgaaagcggtgcttattttgctctgcgtaagcgtatcacaaagccagttcatcacacctggcgcagttacgcgatgttcctgctggatgtgatgccggaaagaacggcagaacattaccgtaacaaaattgctgtctacctgcgctggtatcagactaaggggtttccggatgacatcccggatgaacaggagaatgatttggggtgcagggatatcccgtcctggcgacgaatctgtaagactctcataaagaatgatttctggtgccggtccctctccttcagcccgaacaaacctcggcactatgaacgttatctgcagcgtatgaaggaaaggagaaaggaatgggggattctgtga

SEQ ID NO: 227397 - DNA, 645 bp, Klebsiella pneumoniae
atgggggattctgtgataccggaggtggaggtactgagcaacattattcgtcagtacttcagtcaggcacgaagtgaagaagaaaccatacaagcccttaatcatctgcgcagggtgctgcatgaggtcagcccttttgcacaggagcctgtggactgtgtgctgtgggtgaaagcggatgaggtggtggccaacgattacaatcccaatgtcatggctccgggtgagaagagactgctgaagcagtcactggagaaagatggtttcacacaaccggtggtggtgtcagaagataagagccattatctggtggtggatggttttcatcgtcagttactgggcagggaatcagatacagggaaacgcctgaagggctggctgcctgtagcctgtattaatccggagagaaagggacaggccgcacgcattgctgctaccattcgacataaccgggccagggggaagcaccagataacctcaatgtctgatattgtaagagacctttcgcgtctgggttggacagatcaacgcattggcactgagttgggcatggaccaagatgaagtgctgaggctgaaacagattagcggactgacagaactgtttcaggaagaggatttcagtccggcatggacggttcgctga

SEQ ID NO: 227398 - DNA, 1116 bp, Klebsiella pneumoniae
atgcgtattttatttataggtcctcctctctatgggctattgtatcctgtgctatctctggcacaggcgtttcgcgttaacggccatgaagtgctgatcgccagcggaggaaaattcgtcaaaaaagcagcagaggcgggattggtggcgtttgatgccgcaccaggcttagattccgaagctggctattgccgccatgaagctctgcggaaagaaagtcacatcggcaccaaaatgggaaacttctcattcttcagcgaagagatggccgaccacctggtggagttcgccggacactggcggcccgatctcatcatctaccctccgctcggagtcatcgggccgctgattgcggccaaatacgatatcccggtcgtgatgcaaaccgtcggcttcggccatacgccctggcatatcaaaggcgtaacgcgttcgcttgcggacacgtatcatcgccacggcgtcggggccgcaccgcgcgatatggcctggatcgacgtagcaccgccgagcatgagcattcttgaaaacgacggcgaacccattattcctatgcagtacgtcccgtacaacggcggcgcggtgtgggaaccatggtgggagaggaagcccgatcgtaaacgtctgctggtgagtctcggcaccgtcaaaccgatggtcgacggccttgaattgatcacctgggtgttggattccgccagtgaagtcgatgccgagattatcctgcatcttccggccaatgcgcggtccgatctacgctcgctaccgtcaaatgtccgcttggtcgactggatacccatgggggccttcctgaacggcgcagatggcttcattcatcatggcggcgcaggcaatactctgacagcgctacacgccggtattccacagatcgtcttcggccagggtgctgatcgcccggtaaatgcccgcgttgttgtcgagcgtggctgcgggatcatccccggcgacggcggcctgtcaagcaacatgatcaatgctttcctcgacaatcgcgcacttcgcgacgcctctgaagaggtagcggcggaaatggcgacgctaccctgcccaagcgaagtggcgaaaaacctgatcgcgatggtacagaaagggtag

SEQ ID NO: 227399 - DNA, 3645 bp, Klebsiella pneumoniae
atgcctgcgactcactctcccacacctgcgcggtcctggatagttcgcttggcacgcgtgtgctgggaacgtaagaaacttaccatcatcgtggtagtagcgtcggtatcgactattctgctggccgcgctgacaccgctgctgacaaggcaagcggtgaacgacgcgctggcaggcaatccgacccgtctgccgaggctggcctgcgggctactgctgatcgccttttttgatttcatcggtaactacgtgcgccgcggttatgccggggagctctcgctctgggtacagcacaccctgcgaggacgggcattcgacagcattcagaaacttgacggcgcaggccaggacgcgctgcgcaccgggcaagtgatttcccggaccaacagcgatctgcagcaggtgcataccctgctgcagatgtgtccggtgccgctggcagtattcacttattacatcgccggcattgccgtgatgctgtggatgtcacctgccatgacactcatcgtcgtgtgcgtactggcgtgcctagcgatcactgcgctgcgcgcgcgtcgtcgggtcttcgcgcagaccggtctagcctcggaccgactggcgaatctcaccgaacatatgcgcgaggtgctggcgcagatctccgtggtgaaatcctgcgtggcggagctgcgtgaaacgcgctggctggatcgccagtcgcggcagattgtgcatgtacgcatcggcgcagccatctcgcaggcgataccaggtgccaccatgctggcgctaccggtgctcgggcaaatcgttctgctgtgctacggcggctggtcgatcatacatgggcggatcaatctcggaaccttcgtggcatttgccagcttcctcgcgatgctgaccgggccaacccgcgtactggcatcgtttctggttatcgctcagcgcacccaggcgtccgtggagcgagtgtttgctctgatcgacacccgttcgcagatggaagacgggacggaggtggttaacggtcaggttgtcgggctggaactggagaatatgagcttcgactaccgtggcggcagacgcatcctcagcgatgtatccttttccctgcacgccggtgaaaccgtggcggtagtgggcgcatcgggttccgggaaatcgacgctgctgatgctgctggcgcgtttttacgatcccagcgccggagatatatggctcaacaccagcgctggccgacataacctccgcgctctcaggctggaggcgcttcgtcgtcgtataggcgttgtgtttgaagatgcttttctgtttgccggtacggtggcggaaaatatcgcctatggccaccctcaggcaacggcggacgacatttaccgcgcggcgacggcagcaggagccagcgattttatcaacgccctgccgaaaggctttgatacttggttaactgaacgcggtacaaatctttctggcgggcagaggcagcgaatcgcgctggcgcgggcgctcattaccgcgccggaagtattgatcctcgatgacaccacctcggcggtcgatgccggtactgaagcggagatcaacaccgcgctgagtcgctatgctgacgaagagcatatgctgctggtgattgcccgacgccgttcaacgcttcagttagccagccgaattgtgatgctggataagggccgggtggtggatactggaacccaggcagaacttgaagcgcgctgtccggcgttccgtgcgcttatgaccggcgatggcgatttcctcgcgccttcccacagtgagaataacgaattgtggccaaccggacccgcggcacaagactatgcgccggagacaggggataaaggctttgttgcccgtatgactcgcgtgccggaaaatgcagtacagcaggcgctggccggtaaaggccgcaaagtcacgtcgctgctgaagcccgtggcgtggatgttcgtcatcgccgccctgttgatcgcactcgattcggcggcaggcgtcggggtactgatactgctgcagcgcggcattgactccggcgtcgccgcaggcgatatgtcgactatcggcctctgcgtcctgctcgccctgtgcctagtagccgtgagctggagctgttattcgctgcagacggtcttcgccgcaagggcggcggagtcagtccagcataccgtgcgtgtgcgcaccttcggccatatgctgcgtcttggcctcccctggcatgaaaagcatgtcgattcgcgtctgacccgcatgaccgttgatgtggactctctcgcccgctttctgcaaaacggccttgccggtgcggccaccagcctcgtgacgatgttcgctatcgccgccgccatgttctggctcgacccgctcctggcgctgacggcattaagtgcggtgccacaggtcgcactggcaacctggatttatcgccgactcagctcccctgcttatgcgcaggcgcggctggaaataggcaaagttaacagcaccctgcaggagaaagtctccggcttgcgcgtcgtgcaatcgcatggccagcaggaacaggaggcagcacggctgcgtgcgttatcggatcgcttccgcacgacccgcgtgcgtgcgcaaaaataccttgccgtctatttcccgttcctgaccttctgcaccgaggcctcctatgccgccgttctactggtgggagcatcgcgggtcgccgaaggtgaaatgaccgccggggtgatggcggctttctacctgctgctggggcaattctacggaccagttcagcagttatcagggattgtcgacgcctggcagcaggcgacggccagcggtaaacatattgatgaactgctggcgaccgaaggcactgagaacgtaaccccctcttctgcaccgcccgccaccggtgcgcttcatcttgatgatgtcacgtttagttatcccgacagttccgagccggcgttgaccaaacttaccctgacgatccccgagggaacggttgtcgcggtcgtcggtcgcagtggtgcgggtaagtcaacgctgattaaactgattgccgggttatattcccccacctacggcagtatcagcatcggtgatcggacgattgatgatgcctcgcttgccgattaccgtctccagattggggtggtcgatcaggatgtggcgctgtttagtagtgatattgcggaaaacattcgttattcacggccatccagcaccaatgacgacgttgagattgcttcactgcgggctgggctgtatgagacggtacgcaatctgccgcagggattccggacaccggtgagtaacggcggtgccgatctgtccgcaggtcagcgccagctgattgcactggctcgcgcgcaattagcgaatgctcacatcctgctactcgatgaagctacgtcacgcttggatcgcgcatccgaagaacgattgatgtcatcgttaatagatgtcgcgcacgccaggcagcactcggcgctgattgtggcgcaccgtctgaccaccgcgcagcgctgcgaactgattgccgttctcgataaggggcagcttactgaatacggcactcacgaacagcttttagctgcaggcggcctctataaccagttatggcatgacagtgtcggcagtactgtgctacatcgacagcacgacatcgcgggatag

SEQ ID NO: 227400 - DNA, 1230 bp, Klebsiella pneumoniae
atgctgaacatgcaacaacatccctcagctatcgccaggttgcgtagccaactggcagcaggccacattgctaacgtttctgacttctggcgcgacgctgaatcgctgaatggaccgctggtgatgccggtcgaaggggcggaagacgagcgtgaagtgacctttctgtggcgtgcctggcactctctgcagggcgtatatctgcgtctgaatcgggtaacggataaagagcacgtagcaaaaggcatgatgaccccccttcccgagacggatatctggacactaacgctgcgtttacccgcaagttactgcggctcctattcgctgatagaaatccccctcggcactccggccaagaggattgcacaggccggaggccgctttgccgctctccccgggcacgccgatccgctaaacaaaacgccaagaattagcgttcggggaagctcacaggaatcggtgctgacgcttgataaagcccccgcccagcccgaatggagcggcggctcacccacagggcaattgcttacctcctcgcgcattatcgccgggcaatcgcgccgggttcagctttatatgccggacgttgatgttttgcagcccctgggcctagtggtgctgcccgatggtgaaacgtggttcgatcatctaggagtatgcgcggcaattgacgttgctataaacaacggacgcatcgttcccgtagctataatgggcatcgacaacatcgatgaacacgagcgcaatgcgatacttggcgggcgcagcgaactgataacggatattgccaggcatctactgccgactattcgtgccgaacaaccgcagcggcagtgggcagaccgttctcgcacagtgttagccgggcagagcctcggcggagtcagcgcgctaatagccgctcgtcacgcaccagaaacgttcggcctggcgctcagccactccccttcaatgtggtggacgccggaaggcgcctgccggccaaacttattcagagaaaccgatacgtcatgggtgagcgagcatctgctttctgccccaccgcagaatgttcgtatccgcctatgcgtgggatcactggaaggttcgacggtactgcacgttcagcagcttcatcagcgtctgctgaatgctggcgtcgacagccattacgcaatttacaccggtggtcacgattacgcatggtggcgcggcgcactgattgacgggcttggtttactaaaaggttga

SEQ ID NO: 227401 - DNA, 2175 bp, Klebsiella pneumoniae
atgagaattaacaagatcctctggccgtcaattgcgctcttggcagggttgaatagtcaagtatcagtagccaaatcctacgacgataacgacgagaccttggtggtggtagccaccgcagagcaagtactaaaacagcagcctggcgtgtcgattattaccagcgaagatattaaaaagacccctccggtcaacgacctctccgatattattcgcaaaatgccaggtgtcaatctgaccggcaatagcgcctcgggtacacgcggtaataaccgccagatcgatattcgcggtatggggccggaaaacacattaattttaattgatggtgtaccggtgacgtcgcgcaactccgtgcgttatagctggcgtggggagcgtgatacccgcggcgacaccaactgggtgccaccggaacaggttgagcgtatcgaagtgatccgtggccctgcggcggcgcgctacggttcgggcgccgcgggcggggtggtaaacatcattaccaaacgtccctccaacgactggcacggttcgctgtcgctatacaccaaccagccggaaagcagcgatgaaggcgctacgcatcgcaccaacttcagccttagtgggccactggctggcgatgcgctgaccatgcacctctacggtaacctgaataaaaccgatgccgacagctgggatattaactcctcagccggtacgaaaaacgcggccgggcatgaaggggtgcgcaacaaagatattaacggcgttgtttcgtggaaattaaatccgcagcaaattctcgatttcgaagccggatatagccgtcaggggaatatttatgcgggcgatacgcaaaacagttcttccagtgctgttactgaaaacctagcgaaatcccgcaaagagacgaaccgcctttaccggcagaattatggcattgcgcataatggtatttgggactggggacaaagtcgttttggtgtttattacgagaaaaccaataacaaccgcatgaatgaaggattatccggcggcagtgaagggcgtattttggcggatgaaaaattcacgaccaatcgcctgagctcttggcgaaccagcggtgagattaatattccgctgaatgaaccggtcgatcaaacgctaacagttggtgtggagtggagtcgagataaactcgacgccccttcctctaccagccttacggtgaatgacagtgatataggcggcatttctggctctgctgcggatcgcagcagtaaaaaccattcccaaatcagtgcgctgtatattgatgataatattgagccggttcccggcacgaatatcatttccggcttgcgctttgattatctcaacgagtccggcggtaacttcagccccagcctgaacctatcgcaggaattgggcgattacttcaaagtcaaagcggggattgcccgaaccttcaaagcaccaaacttgtatcaatccagcaaaggttatctgctctactcgaaaggcaacggttgtccaaaagatattacatcgggcggctgctacctgaaaggaaataaagatctcgatccggaaatcagtatcaataaagaaattgggctggagttcgcctgggaagattactacgccagcgtgacctacttccgcaatgactaccagaataagatcgtggccggggataatgctatcgggcaaaccgcttcaggcgcatatatcctccagtggcagaatggagggaaagcgctggttgacggtatcgaagccagcatggcgttcccgctggtgaaagatcgtctgaactggaataccaatgccacctggatgatcacctcggagcaaaaagacaccggtaacccactgtcgatcatcccgaaatatacaattaataactcgcttgactggaccatcacccaggcgttttccgccagcgtcaactggacgttatacggcagacaaaaaccgcgtacccatgcggaaagtcgaagtgaagatactcgcggcatgtcaggtaaagtcttgggggcttattctctggtgggaacgaacttcaattacgatattaataaaaatcttcgtcttaacatcggtgtcagtaatatcctcgataagcagatctaccgaacttcagaaggtgctagtacctataatgagccagggcgggcttattatgtgggggcggtagtttcattctga

SEQ ID NO: 227402 - DNA, 222 bp, Klebsiella pneumoniae
atggataaaaagctttttcaataccctgaggatgatttttttattcttctttataatgaatctttgttggaattcaatatacagaaagccaatgcgtttttaatcgaaagttgcaattgttttcttgaaggaaaggataatgggtttaggccgctggcattttcaaactcgcgagatgagttacttgagataaaaaaatatttgaaccgtgctagaggttaa

SEQ ID NO: 227403 - DNA, 903 bp, Klebsiella pneumoniae
atgcgtagaattactatatttatattattcctgttagttgctgtaacttggggaaccacgtggttagctatgaagattgctcttgaaactatccctccagtctttgctaccgggatgagatttttattttccgctccattattaatcattatcgcatgggtaaaaaaaataccaattttatttcctgttggccagcgtctatttcaacttgcaattagtatgttttattttgccattcctttctctctaatgatttatggtgaggtttatgtaaacccaggacttgccgctattatatttgcaaatatgccggtggctattttaatagcatcatttttatttttgaatgaaaaaacaaactcaatacagattactggactaattatcgcattagcttcactttcgttcatcctcatcacggaggcgcgggaaaggacagaaagccagtggacgggagttattgccctttcttctgcagtaataattcatgccatagtatatactcaatgtaaaaaaagatgctgtaaagtctctgttatatcgtttaatgcgttaccgtgttttatagctggggttattctttcgctggtggggagtatctttgagaggccacaattatcagctttatctttacactctacattagcaacaatgtatttaggctgttttgctggagtttttgggatactgtgctatttttctctgcagaaaagggctagcgctttccaggcttcgctcgtatttctcatcttccctctaattgcagtaagcttggaaagttatatatatgggaaaaccatatcaacatactcaatcttactgattatccccctcgtcattggaatacttatcacacttatccccaaaaaaactgtcgttgataaaaacaaaatgaatagctga

SEQ ID NO: 227404 - DNA, 552 bp, Klebsiella pneumoniae
atgaaattgtgtgtcgttacaaataataattatttctttgccggcatggaacatattttctcagaggttcaatgctgtctttgtagaatatcgagttatgatgtatatgcatgcactcctaattcaaacgtaatcattttattggatggtgtgaatcacaaagtttcgataaaagagtatagctatctaaaaaaaataggtttacctgttttttttattctgaacacaaactgtaatgttaattccaccctcatcggaattaacatcattaacgcacgcgaggctatcactattttaaaagatagaatgatttctctctttaatgggggggggcagcttgattataaaccaataaatttgacaaagaaggagtcttttattcttagattatatatagatggattatcattaacacagataagtgaaaaaacagccattagaaaaaaaacacttataactcacacacgaaatattcttaataagaccggtgtaaaacaccataatcaccttaatattttaaaaaacatccttggcatacatttggctcattaa

SEQ ID NO: 227405 - DNA, 861 bp, Klebsiella pneumoniae; identical to SEQ ID NO: 74980

SEQ ID NO: 227406 - DNA, 828 bp, Klebsiella pneumoniae; identical to SEQ ID NO: 74981

SEQ ID NO: 227407 - DNA, 138 bp, Klebsiella pneumoniae
atgataagtcaatggatgtggcttgacatttcgggggggggggagaagttttatcctaaagggtgtgattatgacatctatgtcaacatgcaaggaaatttaaaaaaaacattgaagagctatattatgcatacttaa

SEQ ID NO: 227408 - DNA, 921 bp, Klebsiella pneumoniae
atgttaaagaaaaccgttataaccagcgctgttgtgtctgccctgttactctcatcctccggtattgcggccgccgtcgccggcgataaatccggcgcgcaaacgccagcagccagccggctcgtcatgtcgtcagattcttacggcgaaattattgggcaattcaacagccctgacggggcggtcgtgggggccactttgcctggcaaaagtgtttcattcagcattccggtgaagaaacatcacggacagtatctgcattttgccttcatgcatgccgcctctgcgtcagaaggctggttctttgccccggcgtcagaacaggggattaatctcacaggtctgatgactgaggacgggaaaccggtagacataacggaacagattgctcttttccgggctcctgctgcagaccagcttgtgaaagttacagcagatagtggaaaactcaggctcggggctgcagcgaagtttatgacggcaaaactgacccgtcataatggtatgtttgtcatcagcattaaaaatatttctgaaggagactacgaaacaccattttcctccggtgtgtggggcgtgacaggaaccgcagtccgaagtttcgaccatgaaccttcttcagccttatcaaaactggccaccacagggcacagaggcgaattgtataaacttgctcagaaaaaaataccagaacaaaataacgcactttcaatggagctgaccagaggtgccattaaaatggccgaagaacagatggcaggtcataaaaaaataggtagcatcagcggaactgcgccaactcagggagaactggagaagaaatttgccatggctgcggcgcaaatgggggccagatattacgttatcaccggcctcagtaataacaactatgcctttggtaacgctgatatctacgaataa

SEQ ID NO: 227409 - DNA, 492 bp, Klebsiella pneumoniae
atgaagaccagacttaaagttatcctgctaatttcacacctggctgttctgggagcgggtaccggcctggggatttatctgctgccgatactgactgcccaggaaaatgcttcgctgaacgaaatcaacgatgtgcggaagctggcaaaatataagggtgattttaaacgtaatcagaaaggcagcgatgttcttcactgggcagagggcgagctttacgttaccgataacgaaatcgccttcaaaggtgaagtagcgcccgggccggattacaaaatctatctgacgaaaaaacaggcggtagataagagttcttttctggaaatgaaaaaagaggccgtgctgattggagaactcaaaaactttggtaatttcagaaagagtattcctgacagtgttaacgtcaatgaattcaccaccgttcagatatggtgtgaacggttctccaaatttattggctctgctgaataccggcatgaggccggacaataa

SEQ ID NO: 227410 - DNA, 276 bp, Klebsiella pneumoniae
gtgactgagatccctgaacccctgaaggtctatcagactatcgctgaatttgccaatcgtcagggcgtgctggaccagaaaacacaggagctgatttccctggcggtcgccgtaacgacccggtgcgacggctgcatcagtattcactcacaggcggccctgaaagccggtgcatccagagaagaaatcgccgctgcgctggccgtggctgtttccctgaacgcgggcgccgcagtagtttattcatcacatgtgatggaagccataaatcagtaa

SEQ ID NO: 227411 - DNA, 429 bp, Klebsiella pneumoniae
atgaaaaattttttcaaaagttttatccgctcagacaacgacatggttattcttcgcctgtcggttatcacgatatttatgttgttcgggacctataaatggtttgattttgaagtgatggccctcgaacctattatttcctcaacatggctgaatatcctgtatatcctctttggtgtccacggggggagctacttcctcggcgtaatggaaacgcttacctttctggcactgattatcggtttcttcagacctgctgccggcgtgctgggggatatcatcgttatcgtcacaggtatcaccacactgagtttgctgccacaactggggaaaattgacagcttcatcataaaagatgttctgttaatcggtgccggtgctgtcctgctgaaacatgacctgaaaagatatttaactatcagggcctga

SEQ ID NO: 227412 - DNA, 561 bp, Klebsiella pneumoniae
gtgtctacttacgacaaaatacttcgcctgacggataccttaattcagcaacgcggatttctgggtttcagctatgccgacctggaaaaagagattggtatcagaaaagccagtatccaccaccattttcccgggaaaaccgatctgggtttggcctactgcgaatacaaaacaggggtgtttagtcagcttgatgccgccctccatgatattcctccgggggtacaacgcctcagggcgtatctcgacgcgtttgccggctgtgcagagagagaggaaatgtgcggcgtttacgccatgctgtcggacagtcaccagttctcctctgaactgcagaaagctgtcagctgcctggcacagacggagatgctaatactgaaaaacgtccttgcttccgggcagaaaagcggcgagctcaggtctgtcgtccctcctgatgagcttgccatcattgtctgctccgcactgaagggcgcgctgatgctgaaccggatccctcctcatgatgcctataccggtgccgttgacgctttaatgatgatgcttgatgcccgtacctga

SEQ ID NO: 227413 - DNA, 261 bp, Klebsiella pneumoniae
atgaaacgcattatccataccaccgttgccgcacttgctcttaccctggccagctacgcagccgccgcagatgaaattaaccgtcaggacgctgcgggtctgatgccgtcaggccatatttctgccggcaatctgtcaacgctagacgaagtgaccgctgcgcttaaagccagagtagagcaggccggggcctcttacttccgtatcacttcgcttgacggtaaaaataaattttacggaaccgccgttatctaccgctaa

SEQ ID NO: 227414 - DNA, 1278 bp, Klebsiella pneumoniae
atgacaaacactgtagattttattggcataggcatcggcccgttcaacctgagcatcgcggcgctgtctcatcaggcagaaggattaagcagccgcttctttgacggccgcccgcattttgcctggcatcccggcatgctggtgccggactgccatatgcagaccatgttcctgaaagatctggttagcgctgtggctcccacaagcccgtacagctttgttaattatctggtgaagcgcaaaaaattctaccgcttcctgaccaccgaactgcgtaccgtatcccgcgatgagttttccgactacctgcgctgggccgccgaagggatgaacaatctgcatttcaatcataccgttgagagtattgatttcgacgagagacaccagcggtttgtggtgcagaccagccagggcgaaagcgttgcccgcaatatctgccttggcattggcaagcaaccgcacctgccgccttgcgtaaaaacggcgacgcaaacctgcttccacgccagtgaaatgagcctgcgccggccagacctcggcggcaagcgagtcagcgtggttggcggcgggcaaagcggcgccgacctgtttctcaatgcgctacgcggagaatggggcgacgttgcagagatcagttgggtctcgcgccgcaataactttaacgcgctggatgaggcggcgttcgccaacgaatacttcacgcctgagtacgtttcaggcttcgtcggtctgaatgaacgcgcgcgccagaagatgctcgacgagcagaaaatgacctccgacggcatcacggccgactcgctactgaccatttatcgcgagttgtatcatcgcttcgaggtactgaggcaaccgcgtaacgcccgtctgctgccaagccgctcggtcaccgggctggaaagtcgcggccagagctggcaactgctgctggagcatcatctggataacggctatgacacactggaaagcgacgtggtgattttcgccaccggataccgtcccgcgctgccgcagattctttcaccgctgatgtcgcgaatcgccatgcgcgatgagtgcaatttcaaagtacgcgacgacttcaccctggagtggaacggcccgaaagagaacaacatcttcgcggtcaacgccagtatgcaaacccatggcatcgccgaaccccagctcagcctgatggcatggagatctgcacgtattcttaatcgtgtaatgggacgtgatttattcgatctcagtatgccgcccgccctgattcagtggcgcagcggcacctag

SEQ ID NO: 227415 - DNA, 1200 bp, Klebsiella pneumoniae
atgccgcaaaaaacattgtcctgctggccgcttgcgttcagcgcggggttactcggtgtcgggcaaaacggcctgctggtcgcgatccctgtactggtgattcagacaaacctgagtttgtcgatttgggcggctttgctgatgcttggctcaatgctgttcctgccgtcttccccgtggtggggaaagcaaattgcccgtattggcagtaagcctgtggtgctgtgggctctggggggatacggtgcaagctttactctgcttgggctgggaagcatgctgatggcgaccggcgctgtaacaacagcggtggggctgggaatattaatcatcgcgcggatcgcctacgggcttaccgtgtcagcgatggtaccagcctgtcaggtctgggcattgcagagagcgggggaagggaatagcatggtcgctctggcaaccattagctccggcttgagctgcggcagactattcgggccgttgtgcgcggcggcgatgctggcaattcaccctctggcgccgatggggctgctgatggcagcgccactgctggcgctggtgatgctgctgcggttgcctggcacgtcaccgcggcctacagcggagcgcaagagcgccagcctgaggctggattgcctgccttatctgctttgcgcgctgttattagctgcggcggtgagcatgatgcagcttggtctttctcccgcccttactcgccagttcgctacagataccgccgctattagccatcatgtggcgtggctgttagggctggccgcagttgccgcgcttatcgcacagttcggggtgctccgcccgcagcgcctgacgccgatggcgctgcttttgagtgccggagcgctgatgatttgtggcctggcgataatgttcgctgaacagctatggttgttttacctcggctgtgcggtgctgtcgtttggggcggctctggcaacacctgcttatcagcttctactgaatgataaactgacagacggcacgggtgcgggctggattgctaccagtcatacgcttggctatgggctttgtgcattgctggtgccgctggtgtcgaaaagtggtgccgccgctgcggcgctgattatagcggcttttttcgttgctgttttatttaccataatatctattttcatctggttcaatctaaagttttcaacagctgatagggctgttaatggctaa

SEQ ID NO: 227416 - DNA, 240 bp, Klebsiella pneumoniae
gtgggagagcgttacgataaaacgcagaccgtagcagcattaattaacgaggacgtggaggtcatcaatgcttacagctttcagttggctttactaaccaaggactgcgcgttgctcacgtaccgcagcgaggttgtcgattcaaaaagacgcttcgttcgtcaatttggcagaggagccatatttgtacaaatcatcagaaatgttggcagctcagatttcaccaagggacgccagtga

SEQ ID NO: 227417 - DNA, 336 bp, Klebsiella pneumoniae
atggtgacaatccacaaagcactggacgaatgcagcgcaaaatatccggttttttatgaagatgaggtggatatccatcttaatcccaaaatcggttcggactggcagttgcgcggacagcaaaaacgagtggtgacgcttggtcagaatgaaaaatattatctggctggcgcactgcacagcggaacaggtaaagtcagctatgtaggcggcaacagcaaaagttcggcgctgttcatcagcctgctgaagcggcttaaagcgacgtatcggcgggcgcaagccatcaggcggacgtggacaaagccgggaaacgcagcgctggttaaagtgtag

SEQ ID NO: 227418 - DNA, 510 bp, Klebsiella pneumoniae
atgtcagttttgcaagtgttacatattccggacgagcggcttcgcaaagttgctaaaccggtagaagaagtgaatgcagaaattcagcgtatcgtcgatgatatgtttgagacgatgtatgcagaagaaggtattggcttggcggcaacccaagttgatatccatcaacgtatcattgttattgatgtttcggaaaaccgtgacgaacggctggtgttaatcaatccggagcttttagaaaaaagcggcgaaacaggcattgaagaaggttgcctgtcgatccctgaacaacgtgctttagtgccacgcgcagagaaagtgaaaattcgcgccctgaaccgctacggtaaaccatttgaactggaagcagacggcttgttagccatctgtattcagcatgagatggatcacttggttggtaaactgtttatggattatctgtcaccgttgaaacaacaacgtattcgtcagaaagttgaaaaactggatcgtctgaaagaccgggcttaa

SEQ ID NO: 227419 - DNA, 318 bp, Klebsiella pneumoniae
atgaaatctctattttcctctatcgttctgcttgctttgagcgtccccgggggggctatggcagatgaagtcacccacacccaatacgcctgcgatgacagcaaaacgctggatgtggtctacatcggggactatgctgtcatccagcagatggatgagttgatcccgatgaagcgggctgttagtggttcaggcatgcgctatgtgccgctcaacaaggattacatctacgagctgtggggcaaaggcagcaacatgaatctttccacctatgatggtaaaaagaacgaagacatcctgagcaactgcaagccgtaa

SEQ ID NO: 227420 - DNA, 387 bp, Klebsiella pneumoniae
atggcaacaccagtagccaaaacgtatgactggaagcaagcgttgcgcacacatgagcaggctcccgatcgtgtgaccctttaccgaatactggagcggctaatgcaggccagtattgtccagcgttataccgactcggcaagaactcagcgtttcgctctgactctacgggctaccgtaggactttttgaatgcgataactgccatcatgttattcctattgagcgggagccaaccctggaagcggccattggattggtaaagtcacatctcactgggcatggtatgaccgagctgtggatctgcttgacttttctgcaaacttgtggggaaaataaaggtatttatgacatacctgtggtcatctaccgcaaggagttccgatag

SEQ ID NO: 227421 - DNA, 840 bp, Klebsiella pneumoniae
atgaccactgacagcatactgcttaacgacggctattatatgccccggccaggttgtggcctctggctgattgacaacagggacgttgactctctgatccgacaggcattgaaagcaggcttccggcactttgacacggcccaggcatattttaatgaagatggggtaggccgtgcgttacggtataccgaagtaccgcgtgagcagttgtttattacttctaaaattcgcggcagggatatgggctatgcacgtacgcttgtctcctttaacgaaacactggagcgtctgggcgtcgaataccttgagctttttctcattcactggccgatacccgcaaaaaatttgtatgtggaaacctgggaagcatcaatcgagctggaggccagcggtctgattcgttccattggtgtgtccaatttcacctgccagcatatagagcggcttatagaggatactggtgtggtgccggctgtgaatcagcttgaactgcatccgcattttcaacagtgtgatgtccgtgattatcatcatgaagccggaatagccattcagagttacagcccttttggtagtaatggtgcagcagttttacgcaatgcggtggtaatggttttggcaagacgacatgaccattcaccggctcagattgtacttcgctggcatcttcaacaaggactcacgcctctgcccagaacaaccaatggtgcacgatttagtgaaaacgttgatgtctgggattttgaactttcagaggaagaaatgaaacttctggcgagcctcaacacacgaaccggtaatactcaacccctgcccgatgctatgaatatgtcgttctga

SEQ ID NO: 227422 - DNA, 480 bp, Klebsiella pneumoniae
atgaaaaaatataaagttgtcactgcaggacttctcctggcaggccttattgctaccggtatcacctgggcagcaggccagtccaacggagagaagaatgcgcaatggcgaaaacccctgaacgagagcatcacgcttcggttcggtgaaaaagcctatagcgtggatttgtatgataatcccacgactcacgacctgctaaaaaagctgccccttaacgttcaggccacggattacccggggtatgacgagaaagtgttgcgcttagcaacaccattatcgatggaaaatgcgccgcggggtgatgaaccagaaattcctgaagtgggctactatgctcccgggcagtggattgctgtttacttcggtcctattggttactggtctggtaaggtgccgcttggccgtattcatgcttcagtcgatgaaatcagtgccattccggagaatacgccagtcaccattgagaaagcgaaatga

SEQ ID NO: 227423 - DNA, 1776 bp, Klebsiella pneumoniae
atgagcgaatcgctgtactgccggacctgcgccaggatccatcgggcaggtaacctgccaaaaggcttagtggcaacgttgctgtcgcggataattacgctgaccggtattgtcgtgctgatcgggatgctgccttgggtatcgggccaggatcccgccatggcgctgctgagagcgcgttctgccgaacaggaagcaaccccggaagcattagcagcgattcgccagtcgctggggttcgatcagggccctgtgcaactcctgctgcactggctcagcggcctcttgcagggggatgcaggtaactcttggatatcagggcgcccggtgctgcctgacatgatccaggcagcccaggtgtcactgacgctgatgctgatgtccgccgtggtggcactgctgctggcggcgatgatttgcctgccgacattccgacgaggcctgcaggggcggtcgtttcgttcgacgggctttttcgcgtcagtattcaccgcattacctgaatttcttctggcgtcattcttactggtcgttggggccgtctggctggagtggtttcctccttacggctggaacggcctgcactatgcggtgctgcccgcgctggcaatggggatcccggcaggtggctatctggggcggatattctcggatgctttagcggcaacctttagtgaaaactggataatcacctggaccgtctccgggatatcgcgttggcacattacctgcgcggtacttaagcgaacgctctccaccgttatgccgttaattggcctggttttggtgtcattgacgggcagtgcagtggccgtggaaaaggtcttcgccattccggggctcggcagggcaacgctcggtgccgtagttgcacaggatcttccggcgctgcaaatgggcgtgctcttcctgctcatcattgcatttatgttcggaatgctgtgtgcggggatcagatacctcattctggggcgggcgttacgcacgtcctctctgccggtcaccaatgaacctgacggaaaaagcgggaaattgtcgctgttgcttccgttcgcctgtggcgttgcgttggtcgtgcttctgcttattggtctgccccgtgatccttactcgtctgagtttatgcgactggctcatccttccttttcgctgccctttggggccgatgccatggggcgtgatttgctggccagagtggcctacggcacagtgcatacctgcatgctggcgctgatggtgtcgcttatttgtctgctactggggctggttattggtcttttccccagggtatttgtgggaccgacagagatggcaaatgcgctgcctccggtgattgcgggcttactggtggtttccatcagtggccccggcagtttaggtgcggccattgcgattgcagcagtaggctgggcgcctcttgccacacataccgcggcgctggcgacagaaattcgcgccagaccttatatcaacatgcttcctgttctgggggttggctggctacgtcagaatctgttttacatttttccggcactaattggccctctctttcgtcatgctatgctgcgcttaccggggatcgccctagctttggcttcactgggttttctcgggctgggcgcatcaccgccggagccggaatggggaagggtacttgcggaaggaatgccttatctggagcgcgcctattgggtcgttctggcacctgcagtcgcccttgccgttttgtcggtgatgggcgtgagtctggccggtctgacgggtcaaaaaaagtaa

SEQ ID NO: 227424 - DNA, 1527 bp, Klebsiella pneumoniae
atgaatacgggtaaatcattatggcctgtttatgggctcttgtcagccaccttattactgactggctgctttaatgaaccgcaggacgaatcggtcagcgccagcgagggcagaattaaagtggcgcaccttcttccaccgcgttccggcctgacgccgctcagtgatgatgcatttaaattatcgcgctggagcacggctgaaaccctggtcgtactcaacagcgccagtgatgcacagcctgcgctggcaaccagctgggagcaaatcaatgacacaacctggcgttttgaattgcgcccgaacgtcaagtttcatgacaataccgatctaaccgcgcagtcggtggttaacgcgctgagcgttgccgctagcgccaaaccaaagccccgtattctggatggcataacgctcacagccaaagtagacggcgataatgccgtactgatcacgactgaaaaacgcgatcctcttctgcctcagcgtctttccagccctcagctggccattttgtcgctgaatgcttacaaagaaaatggcgtggtgaacccagttaatgcaggaaccgggccattcattctgcgcagcgtgaatggcaccagcagtgccgcgctcgatcgctttgatggctactggggcgagaaggcgaaagctagcggtattgacgcaagctttgttccggacggggccgcgcgcgcagccgcattacgtactggcacggcggatatcattgaggcaattcctgtgtctcaggccccgcttctggatcaatcactggttcatgaagtcccgatgccgagaaccaatacgctttatctcaatacggcgcagggcgtgatgaaagatccagctatgcgagccgcagtccgtgacgtgattaatcgtcagcagattgttgataatgtctatgagaaacgtgccgacgtcgcgcaggggcttctggggccagccttgccatgggccgcaccactgcgcaaaccggtgaccaaccccgttgcagcgggaaaaccagacggggccacaatcactctggcaacgttcagcgatcgtgcggaattgcctgaagtcgcggtctatcttgcacagcagctcattgccgccgggtttaccgtgaaacaagtggtccgcgagtattcgcagattgaagctgatgcgctggccggaaagtttgatgcctttattctgtcgcgtgcaaccgtgctggattccggtgacccggttgcctacatgtacagcgatttcgcctgcgaagggtcgttcaatatatcccagctgtgccgcccggaaattgatgcagcgctgaaaaaagcccgtgaaacgccagcgggtgaaacccgacgtcaggccattatggacgctgaaaacatgatccttgccagtgatgctgcgatcccaatactacatgagcgcgtcattcagggagaaagtgcggtagtgaaaaatgcgctccgtgaccctcgcgagcgcacgctcatcgacagccagacccaattagtcgctggcgaacatactactgctgcgcagtaa

SEQ ID NO: 227425 - DNA, 1245 bp, Klebsiella pneumoniae
atgactgaattgatttcagggaagaaagcgaacacctccccttcattgctgcttgtcagccagtttatttttaataccggtttttatgcggtagtgccttttctcgctatttttctgcgcgatgacatgctgttgtccggtgccgcgattggcctggtgctcggtctcaggaccttctcgcagcagggtatgtttctggttggaggggcactgactgacaggtttggcggacgtgccatcattctgtgcggctgcgtggtccgaatcagtggctacctgctgctcgccatcagcgcctcgttatggggcgttattctgggagcctgcctgacagggattggcggtgcgctcttctcgcctgcaatcgagtcgctgatggctcaggcggggacgcaaagtgaaagggaaggcaagcgcagccgttcagaatggttcgcgttgttctctgtttgtggtgagctgggttcagtcatcggtcctttgctgggagcattgctgacagggtacagctttcagagtgtggcccttggcggggcaggcgtcttcttgtttgcgctgattatgctctatttcatgctaccgacaggcaccagccatcatggcacgcttaaaatttccccttggtggacggcatttcaccagcgccgctttgttgcctttatcgttgcttacagcgcgtatttattcagctataaccagctctatctggcgttacccgttgaactacgccgctccgggggaagtgaggccgagctcggcccgctgtttatgctggcctcagtcatgatcattttcctgcaattgcctctggcacggtttgcccgaaaacgcggcgcatcacagattttgcctgtgggatttttgctgctggcactgtcattctttagcgtcgctctgttcgccggtaccacagcgccagacactctgtggcggctgcttcccgcggtttcactagtcacgctgctgacgcttggccagatgcttattgtgcctgtgggcatggacatgatccctgtttttgcccgggataaaaatcttggggcgcactacggagcactctcctccatgggcggcgccaccgtgctggccggcaattttgccctcggcgggctgctggatcgcgcactcatcccttcttcgcaggcttttgtgccatggctacttatgggctgcattccgttatgcagcgcggttgccatgctgtttattttacgatcgtttaaaacgacctctggaaatcaataa

SEQ ID NO: 227426 - DNA, 834 bp, Klebsiella pneumoniae
atgagtattcccctgcagatggcatccgactccttcattcaggtcgacaggatttcccgctaccggagtcaccccggactcccttggcagaagaccctgccagtgaatgccattcttaaagatttttcgctcacactgcgtcagcatgagcgtgttggcctgttaggatgttcgggctgtggaaaatcgacgttactgaaagctatcttggccctcgacccggtagatgacggtgaggtgtattgtgatggaaaggtggtcaggcccggctctgcccgaatattgcgctggtatcgccgcagggttcagtaccttcctcaggaacccgccagtacgttgccgccgtcaatgcgtgtcagagagattctcaacgagccgctaagacatttaggctgcaaccgtgatgcgtcacctaatcttgccgccgcgcttgaacaggtcgaactcagcgcaaaagttctcgatcagcgtgcaggctcgctttcaggggggcaggctcagcgcgttgcgctggcaagagcgctgatcatacagcccgattttttgctggccgatgagccggtcagcgggctggatcttcccctgcgtgagcaaatcaaattgctacttttgcgtatagcagaagaaaaccgcatggggctgctgattgtctctcatgacatttctatgctggcagggttgtgcgacagaacgctggtcatggtggctggaaaaatcattgaagatcgcccgacgtttgaaatgttgcatttacctcatcatccgcatacgcgtcagcttctggacgcggtaccggctcttgtaactcatgccccgtcgctggcacgtggctga

SEQ ID NO: 227427 - DNA, 810 bp, Klebsiella pneumoniae
atgaacaacaatcttccttatccaatacctgtgcttgatgttaaaagcgtcagcatttctacgggccattctgctctggttagcgatgtcagctttcggctccaacaaggcgagcgggtctgtattatcggctcatcagggtcaggtaagtctctgacggcaaaagccattataggtacattgtctgccgggctgttattacaaggaagcattcgtataaacggtgcggatgtcgttggccttcatcccacccggcgccctcagcatgcgctggtatccgccatctttcaggactcttccaccgcgctgaacccgctgatgccggtggggcgacagcttgctctggcgttgaaaacaggtgataacgcgatgctgggctctttgctggatgcgctacagctcagcgatatccctcaattgctctcccgctacccggcagagctttccggtgggcagcgtcagcggatttgcatcgcgctggcgttgctggggaataatcgcctgctggttgctgatgaaccgacgacggcactggatgtgattagccagcagcaggttttgcagatattagttcagggttccacgatgagagctccgcctgcgttgctcttcatcacacatgatattgccgttgccacacagttgtgccagcgaggtatcgtgatggaaaaaggcaggattgtggagtcaggcacaatggaccagctcctgaacgagccggagcatccttacacccgcaaattggtacgggccgcgcgagccgctgaacagacgttgttaacacacacccgtgaggtgctcgccggatga

SEQ ID NO: 227428 - DNA, 675 bp, Klebsiella pneumoniae
atgattggctcccatattgacaccgttgtaaacgccggcgctttcgatggttgttacggtgtcctgtccggcctggctgtcgtcagggctttcagaaaagccgggatcaaaccttcccgcccgattactgtcggcgcattcacaaacgaagagggtatccgttatcaacccgatatgatgggatcgctcgtctatgcaggggggatctcgctgaagaaaatcctggacactgtcggcactgatggcacacgtctgggtgatgagctgcagcgtattggctatgcgggagacctggagcccggctcgatcgtccctcatgaatacattgaactgcacatcgaacagggacctgttcttgaagccgaagggatccagatcggtgctgtcgaaaatcttcagggaatttcctggcaggaaatcaccatcaaaggcacggcaaaccatgcaggcaccacgccgacacggctacccgttcttacgatccggcagtctaggaaatgcttgaaaaacggatgcgtgttatctgtaattctgtttgcgcaatgcacgaagcagaatgtgaattcatttacacacatgagttttcacctacagtcgatcatccgcgggaaactgcatatgcaattgacgcagcggttcgcgtattcggcgaaaaaaatgtggattccacggtga

SEQ ID NO: 227429 - DNA, 147 bp, Klebsiella pneumoniae
atgaatgcggaaacctgggcccgtgtgaaggccttccgtcgggcgctggagctggccgccggagaacggtccggtgagccggtaccttccctctggcgtgactggctgaagccatttccggccggcagttgtgaactggccagctag

SEQ ID NO: 227430 - DNA, 126 bp, Klebsiella pneumoniae
atgctgttcccttatgtcattgccatacagtggaatgacggccctgacattcatggccacgtcattgtcgtcctcgactgggagtatatcgacctgatgctcgatcagtttccagggtatgactag

SEQ ID NO: 227431 - DNA, 486 bp, Klebsiella pneumoniae
gtggcggagccggttgagtctggtaagcctctgggtaccttcctgcggaaggtccgaaggcaggacgggagcttcaccgcgcgtaaactgacgcttgatggcattccgggtaatggtcataagctgtatggctggctgaaagccacggcggacagtctgttacccgtcccggggcagggcagggccctgcctctgcgcctgtctatggagatccctactgaataccgtgaccgggcggtgaatggttcgtcagataaggtcacccatgtccatgaaacgaaaaagcagaagaagatgactcacaccgggaccgttactgaatgctaccaaccccgtttagtcaggctgcgggaaaccagttcccagtgggtcagtgagtgcggcctgcgcttcagaaaatccaccggtgccgcggtcggaagcggcgtctggagttcacgtcaccgtgatttaagcagcatccgggaaattcagcccaataaatag

SEQ ID NO: 227432 - DNA, 501 bp, Klebsiella pneumoniae
atgaataacaaactacattctgaattgattaagaaagctatgttcccggatctaggctgttcagaatttagggaactgactgcccgtaaggcgatgcgaattactccgatgcggatgatggtgtatcacttcatcaggtgtgctgaagacaaaggtatcagtgcataccaaatccttgaccagttaaaatcatataacccaaatgcaaaaccaactactgtttatcgtactctggattatctacaacaggctggagtcattgtaaaaatagaaagctgtagcaagtttgtaaaaaagaatagctttccccatgaaggattaacactttttatgatttgttcaaactgcggtacaatcattcagcatacagacagcaaaatacaatattacgttgaggataaatcacatgaatatgggtatattatgcaaagaaaggacatagaaatcagtataatttgtcccggttgtcaggctaatgaaaaaatggcgcaatctgggtga

SEQ ID NO: 227433 - DNA, 1224 bp, Klebsiella pneumoniae; identical to SEQ ID NO: 74993

SEQ ID NO: 227434 - DNA, 207 bp, Klebsiella pneumoniae; identical to SEQ ID NO: 74992

SEQ ID NO: 227435 - DNA, 1275 bp, Klebsiella pneumoniae
atgtcccttaccgacgcgaaaatccgcactctcaagccttctgataaaccctttaaagtctccgattcccacggtctgtatctgctggtcaagccgggcggttcccatctctggtatcttaaataccgtattaacggcaaagaatcccgtattgcactgggtgcctatcctgccgtctccctgtctgacgcccgccagcagcgcgaaggcatccgtaagatgctggcgctgaacatcaacccggcgcagcaacgtgccgctgaacgcggctcgcgcatgccggagaaaatgtttaaaacggtggcactggcttggcacagtagcaataagaaatggtcgcagaataccgctgaccgtctgcttgccagcctgaacaatcatatctttccggtgattggtcatctgtcagtgtcagagcttaaaccccgtcatttcattgacctgctgaaaggcattgaggtaaaaggcctgctggaagttgcgtcccgcacgcggcagcacctcagtaacatcatgcgttatgcggttcatcaggggttaatcgacagtaacccggcggcaaaccttgacggcgtgacgacaccgcccgtcagacaccactatcctgccctgcaactggagcgtcttcctgaactgcttgaacggattgacggttatcaccagggacgggaactcacccggcttgccgtcctgctgacgttacatgtgttcattcgctccagtgaactgcgttttgcccgctggtcagagattgatttcacaaaccgggtctggacgatacccgccacacgcgaagccattgcaggcgtgcgttattccgggcgcggtgccaaaatgcgcacggctcacatcgtgcccctctcagaacaggccatcgccattctgaaacagattaaggaaatatccggtgtttatgaactggtcttccccggcgaccataacccgtacaagccgatgtgcgaaaacacagtcaataaagcactgcgcctgatgggatataatactaaacaggatatctgcggtcacggcttccggacaatggcatgcagtgccctgatggagtctggtttatggtcgcaggatgcagtggagcgccagatgagtcatcaggagcgcaacaccgtgcgtctggcttacattcataaggctgagcatctggaagcccgtaaggcgatgatgcagtggtggtcagattatctggatgtatgccgaaaaacctacgttccgccctatattcaggggcaaatcaaccagctatatatcaacctgacttaa

SEQ ID NO: 227436 - DNA, 1113 bp, Klebsiella pneumoniae
gtgcgtattctctttattggccctcctttgtatgggctgttatacccggtaatttctctggctcaggcttttcgtgtgaacggacatgaagtagtggttgccagtgcaggtaaattcacgcataaagcggcagatgctggtctggttgtttttgatgccgcaccaggactggattcagaagcgggttatcgccatcaggaggagctgagaaagaaaagtaacactgtggggcatttctcttttttcagtgatgagatggctgaccgtctcgttgattttgcaggacaatggcatccggatttaatcgtttaccccccacttggtttagccggaccgctgattgccgctaaatatgggatcccatcggtcatgcagacggttggatttgcccatacttctgcccacatccagatggtaactcgttctctgggaaatgcttacaggcgtcatggtgtcagtggcccgccgcgtgatcttgcatggattgatgtcacacctccgagtatgagcattcttaaaaatgatggtgagcctgttatttccatgaggtatgtgccctacaatggaggtgctgtccgggagccgtggtgggacagagcaccgggaagaaaacgtctgttgatcagccttggtacagtcaaaccaatggtggacgggctggatttgatatcatgggtgatggattctgcaaatgaggtggaagctgacattattctgcaactggcgatgaatgcccgtgcaggattgcgaaaattgccatcaaatgtgcgtctggtagagtggatccctatgggggtatttctcaacggcgctgatggatttattcatcatggcggtgcgggtaataccctgacagccctgtataacgggataccgcagattgtgtttggtgaaggtgctgatcgccctgtgaatgcaaaagcagttgctgagcgtggatgtgggatcattcctggcgaccatggcctgaccagtgatttggtgaatacctttctttatgatgattcacttcgcttatgttcagcacaggttgcagctgaaatggctgaacaacccagccctgctgagatcgctggtgttctggtagcgaaactgaaaaccatctggcaataa

SEQ ID NO: 227437 - DNA, 1236 bp, Klebsiella pneumoniae
atgaggaatcatccatccagaagtcttgatgatatctgtacggaatcaagaatatgtgcacagttgtccacaaatccatccatggatatcactcatttctggcgcgaagttgaatctgctgctcttcccctgatgacaaaaagcagcagcaacacagaaaatcgggaggtcacatttctgtggcgttcagaagaagtgctacaaggcgtatatcttcgcctgaaccgtgttacagataaaagagatgtcaaaaaaggacttatgactcatatcccttcgacgaatatctggacactgactctggagttacctgcttcatatcgtggttcatactcgtttatagaaattccaccggaaatgccgcaagaagatatttctcagcttggaggtcgcttctcaccgttacccggccaacctgacccgtttaacaaaacatcagaaataaatatacgaggattcggggaatcagtcctttctcttgatctggctcctggacaaacggagtgggatgatacttcccacacctgttccggcgtcctttcaacatcatattcttttgttgcgggacaccaacgccagattcgtttatatttcccggggtatccaacgtcagttcctctgggattactagtattacctgatgcagaaacatggtttgaccgtataggtattacccgggcaatagacatagccattactactggacgtattgcgccgatggcgatccttggaatagacaatattaatgaatctgatcgtgtgaatattctggggggtaacaaagaactcattctcgatatcgcaggaaatttaatcccccgattgtataaggattatcctgatatcgtatgggcaggtcgctcgaataccatactggccggacaaagccttggcggtgtcaccgcgctgatggcggccttatatgcaccggatatatttggcacagtaatcagccactccccttcaatgtggtggagtcccgacagaaacactcctctcatgtttacggagaatgatacctcctgggtaagtaaacaggtactttctgcgcttccgaaagatgtaaatattcagatgggggtcggttctctggaaggtgctacagtccctcatgttcagcagttacaccaatcgttgctcgccagtggtttgaaaagtaaactttctgtctataccggaggtcatgattatgcctggtggcgtggagcaattatcgatggattatcagatgtgtaa

SEQ ID NO: 227438 - DNA, 258 bp, Klebsiella pneumoniae; identical to SEQ ID NO: 205944

SEQ ID NO: 227439 - DNA, 345 bp, Klebsiella pneumoniae
atgaatggcaacaaagctcacaaaaaaacaaaaaacataagcattaataatgtaaatgaagtccaacatcagcaggtaacagaggtgagtaaagaggatggtgatttcctcactctcctctattccccccagcccctgccatccccagaaaacacagcattaaaagctaattattccatccggacaggaaatactgtttctgaatatcaggatattgcggatacagaatgcaaccagcatattatgcagatagattcagcccaggataaacgagagtatggggatgataattatatttgtggatgcggttgtgaaagttgctgcggctgcggtcatgacctataa

SEQ ID NO: 227440 - DNA, 768 bp, Klebsiella pneumoniae
atggattttaacgggctcagctgtttgttcccgggagattaccctgacaattttggacaccagttcagacttgccgaactggtgaaagaaccgatggtactgatacaggggctgtccgatctctgtttgtacatcggaaaatacatgtttgaccctgatttcacactggtgtctcgtctgaaggttgaggagacctttcagaaaactttccatgaagcatgctattactgttatctggaacagctgggtatccccacagagtttctaccacaggaagggataccggatacgttgaaacaactggtcaacagcctcgttgtacttgtcaataaacgcagcgaccgattgtgctgtccagatacagcctgtggagatgattcaccactgcaaagcctggtggtggaactgattcggcagagccaggcccaaacccacccattggataatgacgctgagcatgatgttcattttaccgaagcacaactgtgtttttcccgggctatccactggctgacgcaggacagtatcagacgtcagatcaatgtttcatccctcctgaaagaaatggaaaaccatgccaggaagaggctgcaacccagaaaatggctgggaaaggcgtgtctgtctgaggagattgcctctcttctggatgaacacagcgataacccctattacctgcgggaggcattttctgatatgggaacccgaatgcaggcattttccagagaagccttcggccatgtaaaccctgtcagaattgcggtgtaa

SEQ ID NO: 227441 - DNA, 486 bp, Klebsiella pneumoniae
atgatgtcgcatatacgagaatccatcaggggcagagaggaatggaccgtctatgagcagattggttttgcagtcagttgcatgcttcataaccgtaactacagtctgtatccggtgttaaccattcaatactggactgaatatgcgatacagcacaatcagataaagttcctgtttgattcgcgcggatttccactggcgtatattacctgggcgtatcttgaggcagatacggaagcacgcctgctcaacgatccggagttcagactacatccttctgaatgggatgaagatggaaggatctggatcctggatttctgttgtaagcccggctttggccgaaaggccattgagcgtttatttcagcttcgcccgtggggggagggagaagtgcgctggctgagcaggaggaagaaaatcatgacatttcggcccatgcggcgacataaaatgccgatggccccggagacacagaaagaactttga

SEQ ID NO: 227442 - DNA, 1275 bp, Klebsiella pneumoniae
ttgtttcgtcaggatgcgttagaaaacagaagaatgaaatggcggggacgggcaattttacttcccgggataccgctctggttaaccatgctgggaagcattgcgtttatcacggcatttctgacgttcgttatagctggcacctatagccgtcgtgtcaatgtcagtggtgaggtcacgacctggccgcgagccgtcaatatatactccggtgtgcaggggtttgtagtcaggcagtttgtacatgaaggtcagtcgataaaaaaaggtgatccgatttaccagattgacgtcagtaaaagcacacgcagtggcgttgtcaccgataatcagcgcagggatatcgaaaaccagctggttcgagtggacaacatcatttcccgtctggaagaaagtaaaaaaattacgctgaatacgctggaaaagcaacatctgcaatacagcgatgcgttccgtcgctcatcagatattatacggcgggcagaggaagggataaagataatgaagaacaacatggagaattacagaaactaccagttaaaagggctgattaataaagatcagttaactaaccaggtggcattatattatcagcaacaaaataatcttctcagcctgagcggacaaaatgaacagaatgccctgcagataaccagtctggagagccagatccagactcaggctgcggattttgataaccgtatctatcagatggaactgcaacggtacgagttgcaaaaagagctgattgatactgatgtggggggggaaatcattatccgtgctttgtctgacgggaaagttgactctctgagtgtcactgtcgggcaaatggtcaatgccggagacagtctcctgcaggtaatccctgaaaatatcgaaaactactaccttattctctgggtccctaatgatgctgttccttatatttcggcaggagataaagtgaacattcgttatgaagcctttccggcagaaaaatttggtcagttctctgctacggtgaaaaccatatccagaacgccagcctcaacgcaggaaatgctgacctacaagggggcacctcaaaatacgctgggcacttctgttccctggtataaggtcatcgttaaacctgaaaaacagattatttcttatggcgggaaatctctccctcttgagaatgggatgaaagctgaaagcacactattcctagaaaaaaggcgtatttaccagtggatgctttctcctttctatgacatgaaacacagtgcaacagggccgatcgatgagtaa

SEQ ID NO: 227443 - DNA, 2097 bp, Klebsiella pneumoniae
atgagtaacgggaatgtcagacgaatgataaatcagcttgatatgcgctggcgacgtcgggttccggttattcatcagacggagacctcggagtgtggactggcctgtctggcaatgatatgtggacattttggcaagaatattgacctgatatcccttcggaggaagtttaatctttctgcccgtggggcaaaccttgcgggaataaatagtatagcggaacagctggggatggtaacccgggcactttcgctggagctggatgaacttggtgcgctcaaaacgccatgtattctccactgggatttcagccattttgttgtactggtcagcgtaaagcgtaaccgttatgtactgcatgatccggccagaggcagaagaaatgtcggactggaggaaatgacccggtattttaccggagttgcgcttgaggtctggccaggcagtgaattttcggaggagaccacgcagaatcgaattcaactacgttctcttattaacagcatttacggtattaaaagtacactggcgaaaatcttctgtctgtcggttgtgattgaagctatcaatctcgtaatgcctgtgggtactcaactggttatggatcatgcgattccggcgggtgacagagggctgcttacactcatttctgctggccttatgttctttatactgctaagggcagctacgggtatgctccgtgcatggtcctcgctggtcatgggcacgctcatcaatgttcagtggcagtcgggtctgtttaaccatctgctcaggctaccgctggcatattttgaacgtcgcaaattaggtgatatccagtcgcgttttggctcccttgataccctgagagccaccttcaccaccagtgtggtgggggccattatggacagtattatggtggtgggtgttttcgtgatgatgctgttatatggagggtatcttacatggatagttctcgggtttaccacggtttacgttctgattcgtctggtgacatacggctattaccggcagatatcggaggaaacgctggtcaggggagccagagccagttcctattttatggaaaccctgtatggcatcgccactgtaaaaattcagggcatggctgaacggcggggaacgcactggcttaacctgaaaattgatgccatcaattcaggcattaagttaaccaaaatggatttgttctttggcgggataaatacttttgttgcagcctgtgaccaggtggctattttatggctgggaaccagccttgtgatcgataatcagatgacaatagggatgtttgtggcgtttggttctttccgtgggcagttttcggatcgggttgcctctctgaccaactttcttttgcaactgagaatgatgagtctgcataatgagcgtattgctgatatcgcactgcatgaaaaggaagagaaaaaacctgaattagatattgttgctgatatgaccccggtctcactggaaaccactgatttaagttaccggtatgacagccagtcagcgccggtgttcagtggtctgtacctgtcagtgactcccggagagagtgtggccataaccggtacatccggtgccggaaaaaccacgttaatgaaagtattatgtgggttgtttgaacctgatagcggaaaagtactggtgaatggtacggatatccggcagctggggataaataattatcaccggatgattgcctgcgtgatgcaggatgaccggttgttttcagggtccatcagagagaatatttgtgggttctctgaagaaatggacgaggcctggatgatcgagtgtgccagggccagttatattcatgatgtgataatgaaaatgccgatgggatatgaaaccctgattggtgagctgggtgaagggctttccggagggcaaaagcaacgtatttttattgccagagctctgtaccgtagacctggaatattatttatggatgaggctaccagttcactcgatacagaaagtgaacgctttgtgaatgtagcgataaggaatatgaatatcacgagagtgattatcgcacacagggagacaacgctgaggactgtcgaccgaactatttcgatttaa

SEQ ID NO: 227444 - DNA, 1002 bp, Klebsiella pneumoniae
atgtcagaagcgcttataacagagtcagaacctctcacctttactcttcctgatggctctctgaagctcgtcagaaaagggaccacgttgcagaacgtcgcggaaagtatcgattcttccgtcgcgaaaaacgccgtgtatgctgaaatcgatggccaatatatcgatctgatcgaggcagtgcagaaaagtggcacgctcaatatcatcacgctttttgacgaagaagcgttggacccgtgcacgctggaacagcttgagggggagtgtaaaagtatccttcatctggtgcttgatatttataagcagtttggatttgaagaggtcgaaatcaagttatccacccgtcctgaaaaacgcatgggaagtgacaccgactgggatcggctggaaaacgcgctttcagcctctctggaagctcagggattacaatggtcggtaaatcccggtgaaggggctttctatggccctaaactggagtttgtgttgcgcgacgcgatcggtcgtgactggcagtgcgggacgctacaggtagatatgaatctgcctgatcgattcgatattggctacattgccgaggatggttcgacaaaacgcccggtgatgttacacagggcgctcttcggctctcttgagcgttttaccggtattcttcttgaacactacgctggtaaactgcccgcctggctgtcgccggttcaggccgtggtcatgacgattactgataaacaacatcgatacgcggagcaggttctgaaggcacttcgccggaaaggacttcgctgtgagaccgatcttcgtaatgaaaaaattggatacaaaatccgggagcagacgctggcccgcattcctttcctcctgattattggcgatgcggaggaaaatgcggcgcgtgtcaccgtacgcgatcgtacggggaaatgtatgggaacactattactcaacgaagcagctgactgcattgagatgtgttgccgaccgccggaggtgcgccttgattaa

SEQ ID NO: 227445 - DNA, 852 bp, Klebsiella pneumoniae
ttgattaatcaacatggaggcagttcgtccctgcgcgagaaccgttgtcatatctggccagtgaagaaggatgatacccaaagtaacgatattgctttttttgaaaaggcattcagggaacagtccagtcgatgggggctgtatgaaattgttctggggtgtcctggagagggcaacatatcgctgtatcagtccgtcaatcagggggctgacgttccgcatattctgattgcggcagggtttcatggagaagaacccgcgggatgctgggggatgctggattttctgcgcgaaggctcccctgaattgtttgataacgtagctgtgagttttttaccgcttgtgaacctgtctggcctgagtgctggctgtcggctcaacagtactggacagaacccaaatcgcggctttaccaatggggcagaggtcgaaccttcagttgaaggaaaagtactgcttaattatgaagcgcttctgaaaaacgcagccagacacggtgtgctctgttgtcacgaggatattcttcgccagcaggcgtatctctacacctttgaacatactgcccgtccaggccattttagcgtagcattacgtgatgagcttgaacgctttttccctgtcatggaaaaagagcgggttgatggctgtgaatgtgaggatggcatcatctttaaccattttgattcgtcatttgaatcctggttgtattcttcaggttccgacgtcgcagcgtgcactgaaacgccgggattgcaaccctttgcaaagcgagcagaggcaaaccgttatttaatcggcgcgtttatctcatccatactggagcgcaacagtatcgggggcgggatgtcatga

SEQ ID NO: 227446 - DNA, 1347 bp, Klebsiella pneumoniae
atgaagcctttattactgaccaatgcattaataatcagtgaggacatgcgctatcaggccgacatcctcattgataagggacggatccagaaaattgcctcgtttattccctcccgaccggaatggctggttattgatgtgcgagggaaatgggtgatccccggtatgattgatgatcaggttcatttccgcgaacccggtctgacgcataagggaaccattgccactgaatccgctgccgcagtaatgggaggcattaccagttttatggaaatgccgaacgttacgccacccacgacaacccgtcaggcgctgcgtgagaaatttcagcgtgcctcgcgttcttcgctggcgaaccacagtttttacttcggcgcgacgaacgataaccttgacgaactgaaagcgcttacggcttcgcaagcctgtggggtgaaggtctttatgggggcttctaccgggaatatgctggtggacgatgaacaggtgctggaaagtattttcgctaatgccccttgtcttgtggcaacacattgcgagcataccccgacaataaagcaaaatgaggcgatatggcgggctcgttttggggatgctattcctcctggcgagcatgccgctattcgttctgtggacgcctgcctgacatcctcccgccaggccgtctctctggcgaaaaaacatcgtacccgattacatgttctgcacattaccaccgcagacgaacttgttctctttgatgcagcccccacgctggaggcgctgcgccagaaaaccatcacggctgaagcctgcgttcatcacctgttttttaattatgacgattatgaaacgctggggcataagctcaaatgtaacccatccgtaaaaacctcgtttcatcaggaagccctctggaaaggcgttaatgaaggcattatcgacgttatcgcaactgaccatgcgccgcatttactggaggaaaagcagagtgactattttgctgcgccttccggcttaccgctggtgcagcatgctcttcctgcactgctggatatgtgcagcagggggatttttaccccggaaatggtggtgagaaagaccagccatgctgtagccgagcgcttccagctcaaagatcgcggctatatcagggaaggctattgggcggacctggtggttatcgatccgttcagtcatcaacagataatccgggaggatgtggcatacaaatgcggatggtctccctttgaaggccggattttgtcaggcggtgcggttgatatgacgctggtaaatggccacgttatctggaatgggcacaccatacagcagaagtacggcctgccactggaattctgtcgctag

SEQ ID NO: 227447 - DNA, 1023 bp, Klebsiella pneumoniae
gtgagtattattattcctggttctttcccggcgcgacgactgcgtcgctctcgtacccattctttcagtcgccgtctggtcgctgaaaatcagctgaccgtaaacgacctgattttacctgtattcattattgaggggcaaaacctgcggcaggaagtgccgtcgatgccgggtgtgtttcgcctgtcggttgatatgttgcttcatgatgccgcgcaatttgttcaggcaggtatacctgctattgcactgtttccgtgtatagaaagttctgctaaatcgctgatggcagacgcttcgtgggatccatccggtttagtaccgcgaactgtaagggcgctgaaaaaggcttttcctgaactcggggtgataactgacgttgcgcttgacgcctatacgtcacatggtcaggacggcatcattgacgaacatggatatgtgcttaatgagccgacaaaagaaattctcaccagacaggcgcttacgcacgctgaagcgggtgcagatattgtcgcgccaagcgacatgatggatggccgcatcggacatatcagacaggcatttgaaacgaatggcctgctgactattcagatcatggcatattcagcgaaatacgcgtcaaactattacggtccttttcgcgaagccactcaatctgccatggcgctgggcaaacgggacaaaaaaaactatcagatggacccggcaaatgcgatggaagcgttgcatgaaattgcccaggatttgcaggagggggcagacatggtgatggttaagccgggcatgccatatctggatattatcagggaagctaggaaaacttttgcagtacccgtttttgcctaccaggtttccggtgagtatgcgatgcatatggccgcgttccggcatggctggctcgacgaagagcaaacggtgcttgagtcacttatatgcttcaaacgcgccggggcagacggcatattgacttactttgccagctcggtagctcagtggcttaatcaacatcaacgggaatattga

SEQ ID NO: 227448 - DNA, 315 bp, Klebsiella pneumoniae
gtgaatgtacataaggtatatgatactatcaaccactaccatttagattggttgacccctgctggcgactacccaaaatcggctctgatggtagttgaatgcaaggatggccggtggatgatagttcaggagtttggagaagagtatggctgcttcgaaggtgtgttgaagaatgatagcgatcttcatactaagccttctttttatcctgacttccgcagtgctgtgaagtccgcttttggaatgatgaaacgattatacccccagtacaacgacaagccctttagtgacttcctttcagaaattacggaatag

SEQ ID NO: 227449 - DNA, 495 bp, Klebsiella pneumoniae
atggccaatccccttatgcccgaatgccttgtaatgttaaataatgtcttacaggttattgagaatgcacccgttgagtgcgatggccataccttaatgataagcagtgctctaaatcatgctggcatttctcatcaacgaatgtgcggggtagttaaaaaccacaaaacagactttgagttatatccacatttttggattcagataggtgaattcactctggattaccgactcaggatgtgggttgagttatattcaggggaaaacttagcagagagtgcacctcacggaatatttgttgcacgtgggcttgaatatatttacacctctggaagcatttgcccaccacctgccctggattttaatttattaaacttaatcagtgatggttattacgaaaaaataaacttttccgagctaacaacactggcgcattctgtggatatcagtttaatcagtgattttaagaacattactatcgccgggataacctaa

SEQ ID NO: 227450 - DNA, 963 bp, Klebsiella pneumoniae
atgaatacatcagcggtatttgagtctgccggattgtcgttacgtaaggtccaacaggattatatcgaggctgcagctggtgcactgactcaggatcataaagttgcactgattagtgctgaaacaggtgtaggaaaaacgctgggctatctggtaccggcgcttctgattctgctgaaaaaccctgaggcaaaatttgtgattgccacgaattctcatgcactgatgcaccagatattcagaagcgatcgtcctctccttgaacagatagctgaacaatgcggcataaaagttactttttcccggcttatggggaaagtaaattacgtatccctggagaaagtacgtggactgttactcatggacgaatttaccgatctggatacggttaaggtccttgaaaaactcgctaactggtcaaaacctctggttgagtttgaagaagagtatggtgaactgccagcgcagatcacgccagagatggtcacctactccatctgggatgatatacaggacattgatgatattcgcctgaatgctctcagtgctaactttattgttacgacccatgcgatggtaatggtcgactgtatgtgtaatcaccgcatcctcggtgacaaagaaaatatgtacctcattattgatgaggcagacatttttgtagatatgcttgaggtctggaaacagcggcgcttcaacctcagagagttgactagtgcgttcaatgaacatattccacgtaatggcgtgcatgtcatcgaccagttaatgaacgacgtgacttcgatagcgggcgatctgcatttttgtagtacgcctgcagcggttgccttgtttgacaatagctttaacgccttatcaaaggtagggcggaaaataaaaaatgaagcggcccggaaagctttctttgactgtatctacagcagggatatgctcggattgtccgggggcaaaagggcgtag

SEQ ID NO: 227451 - DNA, 324 bp, Klebsiella pneumoniae
atggagtggttatgtaaagctctggggttaaccagcgatacgatttcaatcaggaaaatattctccccagacgtctatggctcaatgaagctgaccatcgccggtgctgattttccaaaggtgttcgatgacccgaaagaacagatattttcaggtcaatggttaaaggcagtagttgaacaactgtcctgtattcacgggccagctctggtattaactgccagtcattatgaaacccggatggttgccaatcagctgggtgaggtctcgcaaccagtttatattcagaaagcaggtcaggccctgtcagaaattattaaatag

SEQ ID NO: 227452 - DNA, 273 bp, Klebsiella pneumoniae
atgaccagcgttaccgttcattgcccccgttgtcagtctgaccaagttttccgccacaggcagagccctaaaggccgtgaccggtttcgctgccgcgattgctaccgcgtgtttctgctcacttatacttatgaagcacgcaagcacggcgtcaaagagaaaattaccgaaatggcattcaacggagccggcgtctgtgataccgcaaggacactcaaaatcggcattaacaccgttattcgcactttaaaaaactcgcgccacgacgagtaa

SEQ ID NO: 227453 - DNA, 654 bp, Klebsiella pneumoniae
atgagtaatactgataacgggacgaagatctacactccattaactctgaaactatatgactggtgggtgctttgcatttcgaatagttacgcatggaattgttcaacaaaggatattttaattccttattttttacaaaacttaagtcctaaccacctagatattggcgttggtactggttattatctcactaaaatccctgctcactataatatatccctcatggatcttaaccctgccagcttgaaagctgcatcggcaagagtaggggaagatagaatacactataaagttaggcatgatgtatttgaatcttacccagaggaacttcatggaaaatttgattccatatcaatgtattacctcatccattgtctaccaggaacaatggaagataaaagaattgtcataaaaaacgcgaaggccgccttaactaaaggtggaatactttacggagcaaccatacttggtgataaggtaaggcataatagttttgcgttaaaactgttgcaaatttataacaaaaaaggtattttttctaattttagtgattcagaagaagaactaaaaaaaatgctttctcattattttaaaaatattgatgtcattgtgaaaggtgctgtcgcaatgttctctgcgcatggaaaaaaatag

SEQ ID NO: 227454 - DNA, 402 bp, Klebsiella pneumoniae
atgtttctcttactggaaaaagcccatgcaggtgcagtttttaaacttgaagatatcctggcatcaataccctgggattctcatggattgatcgctgcgattgcacagcaatatgacactggagaggtgttgatgcttgcctggatgaatcaacaggctcttgatgaaaccttattgactggcagagcctgttactggtcgcgatcccgatcatgcctttggcgaaaaggtgagacctccggctgcgttcagcaagtacatgatatccgtctggattgtgacggagatgcggtgctactgctagtggatcaaaaaggtggagcctgccacacaggtcggcggagttgtttttacaacgccattaaaggcgatgagctaaccgtgctcaacgatcctggttaa

SEQ ID NO: 227455 - DNA, 1383 bp, Klebsiella pneumoniae
atgattaaactaacaaacacgcttggtatgcaaaaggagctattagttccggttgaagagagcaaaatcggcatgtatgtatgcggcgtgacggtttatgacctttgccatctggggcacgccagaacctttgtcgcttttgatatgattgtccgctatctgcgttttcgcggatacgatgtgactttcgtgcgtaacattactgatatagatgataaaattattcagcgcgcccgtgatacgggagaggactggcgcagcctgacagaacggatggtgcatgaaatgcacattgattttgcaaagttaggcatcctgccaccagacatcgaacctcgtcccacagagcacatcccacaaatcatcagtatgatcgaacgacttctgcatcgacaatttgcttacattgcagagaatggtgacgtcatgttctccactgcatcggcaaaaggctatggaaagctttcgggacaggatattaccatgcttcgtgccgggacccgcatcgaagtgaatgagtataaacgcgatccgctggattttgttctctggaagcgggcaaaacccggcgagcccgtctggccatcaccctggggtgaagggagacctggctggcatattgaatgttccgccatgaactgccattaccttggtacccatttcgacattcatggcggtggttcggacctgatatttccccatcatgaaaatgagattgcccagtccacctccgcaaatgatggcccctacgtaaattactggcttcacaccggcatggtgacggtgaataaagagaagatgtcgaaatcgctgaataacttttttaccctgcgcgatattctgcaccggttcgatgcccagagtgtgcgcttcttcctgctaggcgcacattatcgcaagccgctgaattatagcgaggaaaatattcacattgcgcgcgcctcgctgacacggctctacaccgcatgccagttcgctgacgggtctcgatctgaacagcacgatgcatggcgggccagattctgtgaggcaatggatgatgatttcaatacaccccaggcgcttgccattttatttgaactgacaagagagattaacaggctttgcggaacgaatgatgatgaagccgcagcacttgccaccacgctgaaatacctggggaatgtgctgggtttgcttgaacaatcagcagatgcctttttgaaaaaccgcagtgatcttcatcctgcagaactgcaacttattgaaaggttaattcaccagcgcagtaaggcacgacgtatgggcaagtgggacaaggccgatcgtttaaggaatgaattagcggagcaaggcattgaacttgaagatgtcggcgaaaatacctcatggcgtttccgataa

SEQ ID NO: 227456 - DNA, 708 bp, Klebsiella pneumoniae
atgagtaatgttgatgaaggaacgaagatctacacaccattcactttgaagctttatgactggtgggtgctgagcatttccaacagttacgcttggcattgtccgacaaaagagattttgctcccttattttttacaaaatttaagacctaaccatttagatattggcgttggaactgggtattatcttgccaaagctcctgcaaattacaatatctcacttatggatctcaataaggctagtttgaaaacggcatcagcaaggatagggaaagccagaatacggtatgaagttcagcataatgtatttgaatcttatccagaggaactacatggtaaattcgattctatatcaatgtattatctcttacattgtcttcctggggcgatggtggataaaggtgttgtcataaaaaacgtgaaagctgctttaactaaggacggaatactttacggggcaaccatacttggcgatggggtaatgcataatagtttctcatcaaaactaatgaggatttataatcacaaaggtattttttctaatatgagtgattctgaagaagggctaaaaaatggcccctttttcgccctcatacgaaggcacccgacaaatacgggtgccttcgattcattcttcgaaccaaggctcaacaggatcgggataatgccgccaattttgaggcccttcagccatttctgcatccgttaa

SEQ ID NO: 227457 - DNA, 369 bp, Klebsiella pneumoniae
atggaaaatgagctggatgaagtcgtcagatcaaaaggttacttctggctggccagccgtccggaattcgcaggttcatggtcacaggctggtggcattgcgcgccaggcgctggggggcatgtggtgggcgagtgtgccgaaagaacgttggctagaggatgctgagtcactgaagttcatcatgtctaactggatagatggcattggtgatgcccgtcaggaactcgtttttattggaatggatatgaatgaatcaaaactgcgcaacagactggattccgccctgttaacggatgcagaaatggctgaagggcctcaaaattggcggcattatcccgatcctgttgagccttggttcgaagaatga

SEQ ID NO: 227458 - DNA, 888 bp, Klebsiella pneumoniae
ttggttgatgatggaagtacgacagaagattctcatcgttatttgaatctcatcgagaatgattttaactctcgaggctggaaaattgtccgtagttctaataactatctgggtgctgcaaggaatttggctgcgcgacacgcctctggcgaatatctgatgtttatggacgatgataatgttgctaagccttttgaggtagaaacgtttgttactgcagcattaaactctggggccgatgtgttaaccacaccaagcgatcttatttttggtgaggagttcccttctccgttccgtaaaatgacgcactgctggcttccgttagggcctgatttaaatatcgccagctttagtaactgctttggcgatgctaatgcgctgatcagaaaagaggttttcgaaaaagttggcggatttactgaagattacggtttaggtcatgaagactgggagttttttgccaaaatatcattacagggatataaattgcaaatcgtcccggaacctctattttggtatagagttgcaaactccggcatgttgttaagtggaaataagagtaaaaataactaccgcagtttccgtccttttatggatgagaatgttaaatataactatgcaatggggttgataccttcctacctcgagaagattcaagaacttgagagtgaagtgaatcgcttgcggagcatcaatggtggtcattctgtcagtaacgagttacaacttttaaataataaggttgatggtcttatttctcagcaaagagatggctgggcccatgaccgttttaatgctctgtatgaagcaattcatgtccaaggcgcaaaacgaggcaccagcctggttcgccgggttgcccggaaagtgaaatcaatgttaaaataa

SEQ ID NO: 227459 - DNA, 1215 bp, Klebsiella pneumoniae
atgaaattacttgtatatggaatcaattatcgtcctgaattaactggtattggcaagtatagtggtgaaatggtgaagtggtttgttgaaaatggtcttgacgttagggtcattactgctccaccatattatcctgcctggaaggttgctgataattattctggatggaaatacgctaaagaaaaatttcctgaagtagtatatagatgtccactttatgttcctaataaaccttcaacgataaagcgtttattgcatttgtctagttttgcatttagttctcttttccctcttttaatgcaagcacgttggaaacccgattatgttatttgtattgtccccacattattctgtgtgccgggagccctgttattaagaaaactaacgcgtgctaaagtaataattcatatacaagatttcgaggtcgatgctatgctcggcctagggatggcaaagaaaggtgtgtttgcgaaatttgccaaaaagtttgaaaaatggtgtttaacgtctgcagacaaagtatccactatatctaaaacgatgttattgaatgcctctggtaaaggagtgccgcgaaaaaatctaatttttttccctaactggtctgagcttgaaaggtttaaaaatgttaaaagtgaccaatcagtcatgctgaaagaagagtttggaatagccgatgacagaaaagttatactttactctggcaatattggtgaaaaacaaggacttgagattgtcatcgctgctgcacaaaagttggcaatgaaaaattatgtattcttgtttgttggtcaaggaggtggtaaagaaaatttaaaaaaaatgagctcggacctgaatttggataatgtcatttttaaacctctacagccttatgatctattaccagcattattaaatcttgctgattgtcatcttgttgttcaaaagaaaggtgcagctgatgctgttttgccatccaagcttacgaatattctcgccgtaggcggtaattcagtcattacggcagaagaaaatactgaacttggtcagttatgcaaaaataacccaggtatagcgcaatgtgtagaacctgaatctgttgatgcccttatatctggtattgaacagtgtttgttgatgcctcggcaaaacaatatagcaattgaatatgccaacgcatcacttgatatgaataatgtactttcaaattttatagtagatatacaaaactaa

SEQ ID NO: 227460 - DNA, 507 bp, Klebsiella pneumoniae
atggcgcacgccagtagctggcaaacttatgtatctgaacttgttaagacccgttatacaaacgggatgattgattttactggcagaaaacattttttcacggactgggcggtcacatctccgcgaaatgcacaagatgttactcaggacatcagcccgtatactattactgtcaacaaacggctaaaccaaaagaataaaagacaagaatatgttaagggtctcggcattatctcacgccggataagctatataccggcttctgcaatagataaagaggtaataaataaactgaaaacaggtgattatgtgggtatttattcaacaaaaagaggactggatgtttcacatgttgggatcattatcaaagaccacaataacatctggttcagaaatgcatcgtcattagcgaaaaacagaaaggtagttgactcaccttttattagatacatggctacaaaaccgggtattgtagttttacgagagaaaacagatcaatacccctga

SEQ ID NO: 227461 - DNA, 867 bp, Klebsiella pneumoniae
gtgaaactttttattaatgatctgacggtcatggattttagtttccttgatgcggaatccgggttgattggcgatagccttattgttgatattattcttgagggagatctgaatgctgagtcaatggtaatggatttctcacatgctaaaaaaagtatcaaacatgaaattgataaactggccgatcatgtcctgattgtgccggaacaaaatagtcatattattgttagtcatgcggggactacgacggaagtcgccatgctgcgtaagaatggggagacccagtgttttatttccgggccgcaggagagtttctggctggtccaggcagataatattacttcccgttgccttgaatcccaaatagaaaaacatttactggcgtgtttgccgcaaggagtaaaagacataacgataacgttacggccggaaagtattaatggggacagttatcactattcgcatggactgaaaaaacaccgcggaaattgccagagaatagcgcatgggcatcgctctgcgatcagaatttttgtggatggtgagcgaagccatatgtgggaacaggagtgggcaacgcgatggaataacgcttatctgttaagccgggaagatgtcgttacagtgacaacactttcaccgcgtgccgttacatactggcataaggggctgacatgttcttcctggcgaagttctcagggatactttgaaatcatgctttgttctgaggtagtagatattctgccgtgtgataccacggttgagtcactggctttatttatcaggcagtcaattgagcacggtttacccgcagcgaaaatagaagtccatgcctttgagggagtgggtaaaggcgctattgcctga

SEQ ID NO: 227462 - DNA, 129 bp, Klebsiella pneumoniae
atgggccgttttgatgcgtggctaaccgacgagttaagccaaaagcaggaggtgacctgctccccgttgctttccgggctacgtaccgccgtatgtttaggctccagtcctaccattctggcgaactga

SEQ ID NO: 227463 - DNA, 738 bp, Klebsiella pneumoniae
atgacgccggaatttaaaaaggcgatgggctcgatccctgaactggcacccaaatatcccaccctggaaacattgctggcagccgagcctgatttctttttcgctggctggaactatggaatgaaagtaggcggcgaagtgacgccggatacgttaagcaaatatggcatcaagactttcgttctgagtgaaagctgtgtgttcaccactgcgcacaaaaataaagccacgatggatctgctgtataacgatatcctcacgctgggtaagatttttggcaagcgcaatgacgcacagtccctggtcagcggctggcaaaagaggctgagtgaactgccgaagccagcggcaggtacccgtcctttaaaggtgttcgtctacgactcaggtgaggataaaccgtttaccagtggtaaatatgcgatgcctacggccatgattgaggcggctggtggtaaaaatgcaatggaggcgctggataccagttggggaacgacgtcttgggaaagcgtggccgctactgagccggacttcattattttgttagattaccagacgggcagcggtgcggatacactgcgtcattttcttgagaatcatccgttaatgaaactgactccggctgttcagcatcatcgatacctgaaattacaatatgctgaactgacgccgggaccagctaatgttggtgcggtggaaaaactcgcgtgggcaatgtacccgacagaagcgaagtga

SEQ ID NO: 227464 - DNA, 591 bp, Klebsiella pneumoniae
atggctgtgccctggggaaatttacagctggatgaattgctttccatgccggattacgattttcatcgggtggcgttacttattgatgagcttcaggatgcaattgatgcagttttgtcggatgaacccgacaaaaaatatgatatttcgtggcgggtcattgaggatgaccgtccatttcatccgcagcggctgtgggatacctgccaccgatttatgggttccagggtttaccgcagcaagggttttttctggctaccgggaagggatgacctggcattactgtggaaccaggccgcaggaagcatcaatctcgaattcataagctactggaaagccggggtcctgacccacactgataattcactgacaaaggaagaacgcgcagctatccatgagcaactggcaaaaatgccgggcagatttggtgaccggcgctgccgcctgactgttattggcgagagcggcgaaattgacgattttgtcctcgcgttgcgccagtgtttactcactgaagaggaaattcgctggtggcagcaggggggaattttccacgatccctggcccacgaaagtggcccggctggcttaa

SEQ ID NO: 227465 - DNA, 492 bp, Klebsiella pneumoniae
atggtaatgttctcctcattattaggtaaaagtatctgggctgaactttcgaggttatgggcagaagagaaatataaagaattcaatagggtgtttttaaagtttaatgttgtgaattttgccatattatttatggcaagtgttattcttgtatttggttatgactatttctgtcaatggtttcaattgaaggatgtagcaacgaagcaagattatattctttatttagttgtatcgttgcattcattgttgatcgctatttcatattataatagtgtctctttattatcgactgaaaggcatcaaaaatatgctaagataataatgttaaatgcaattttgacaactgctttgttttggttgctatcagttttaacggattcattaacctgggcatatgttctggcattttgtataacagaaatggtcatagcattatggttgttattaattagtctcaataaaaactatttacgggaacgagaaatttaa

SEQ ID NO: 227466 - DNA, 681 bp, Klebsiella pneumoniae; identical to SEQ ID NO: 210508

SEQ ID NO: 227467 - DNA, 279 bp, Klebsiella pneumoniae
atgatcagattgcggctggcgctgaattttttcagcgtcaggctttgcagccaggctggcagcggcgtcatccacagctgtttccagttcgccggcagcgtgtactccagtccggcgaaagcggtatcgtcgagcaccagggcgttcccggcgcgcagccagttgccggaggtgcgcaccatgccgccctcccagcgcgaggagaactggcgcagcgcaatgccctggggagagaattcggcattgaggatcgggtcgaaaagatgcagcgaaccgtag

SEQ ID NO: 227468 - DNA, 126 bp, Klebsiella pneumoniae; identical to SEQ ID NO: 223594

SEQ ID NO: 227469 - DNA, 600 bp, Klebsiella pneumoniae
gtgctgaccttcagcccggaaaactttccggtgaacaccattaatgcctaccgggttcttaaccctcaacagtttaatgcaaaagacgcactgtctttcgcaatgcttatcaaagccgaagccagcgattacacgtcaggatacagggctatttttcatatcggtatgaataataatgcaggctctaacgtaccaatgatccgcctgcaattcaccagtgatactgcgttcggaattgtggcgcggcactcctcgcctgaagagacggcagaacagataggtatcaatgggcttaatacaggatacaatgtattattcgttgaactcgattatgttaacaggcgtatcaggaccaaacttaatgacgcgccggtagtaacacgaacagcattcccgggatccagcgggcaaaatgttgtatctgcgtcagctgtagttggtttggctggatacctttcggcatcaggacaggcgggaagaacaacgatgttctcgggcaaggtgagggaaatgagtattttttctggtcctctgtcagatgcggaaattacatctgttactgactggttacagagtaaaaaggttttactgaataattaa

SEQ ID NO: 227470 - DNA, 780 bp, Klebsiella pneumoniae; identical to SEQ ID NO: 15299

SEQ ID NO: 227471 - DNA, 516 bp, Klebsiella pneumoniae; identical to SEQ ID NO: 223580

SEQ ID NO: 227472 - DNA, 300 bp, Klebsiella pneumoniae; identical to SEQ ID NO: 213803

SEQ ID NO: 227473 - DNA, 981 bp, Klebsiella pneumoniae; identical to SEQ ID NO: 95379

SEQ ID NO: 227474 - DNA, 924 bp, Klebsiella pneumoniae
gtggcaaagcaaaagttcaaaatcaccaactggcccacctacaataaagccctcatcaaccgtggctccataactttctggctggatgatgaagctattcaggcctggtatgagtcagcaacaccttcttcacgaggcagacctcagcgctattctgaccttgccatcacgactgtgctggtcattaaacgcgtattcaggctgaccctgcgcgctgcgcagggctttattgattccattttttctctgatgaacgttccgctacgctgcccggattacagctgtgtcagcaggcaggcaaagtcggttaatgtcagtttcaaaacgcccacccggggtgaaatcgcacacctggtaattgattccaccgggctgaaggtcttcggtgaaggcgagtggaaagtcaaaaagcatggccaggaacgccgccgtatctggcgtaagctgcatctcgccgttgacagtaaaacacatgaaatcatctgcgctgacctgtcgctgaacaatgtgacggactcagaagccttcccgggtcttatccggcagactcacagaaaaatcagggcagcatcggcagacggcgcttacgacacccggctctgtcacgatgaactgcggcgtaagaaaatcagcgcgcttatcccaccccgaaaaggtgcgggttactggcccggtgaatatgcagaccgtaaccgtgcagtggctaatcagcgaatgaccgggagtaatgcgcggtggaaatggacaacagattacaaccgtcgctcgatagcggaaacggcgatgtaccgggtaaaacagctgttcgggggggcactgacgctgcgtgactacgatggtcaggttgcggaggctatggccctggtacgagcgctgaacaaaatgacgaaagcaggtatgcctgaaagcgtgcgtattgcctga

SEQ ID NO: 227475 - DNA, 195 bp, Klebsiella pneumoniae; identical to SEQ ID NO: 215003

SEQ ID NO: 227476 - DNA, 138 bp, Klebsiella pneumoniae
atggaagtggaggatatcgacaacctctcgcgcaaccaagacatcgcggtcggactgcaagtgatcttgaagccacgggcccgtcccaccccgacatggacctcgatgcccgaacggacgttagatttcgagttctag

SEQ ID NO: 227477 - DNA, 498 bp, Klebsiella pneumoniae
gtgggcgtcaacggcgtaaccggcttgtctgcggatgtgttctgggatctgcaggacccggcaactgatgccggactgctgaaccagaacgacgtcaccaccttgatccgcaaggatggtttccgcttctggggttcccgctgcctgagcgatgacccgttattccagtttgaaaactacacccgtaccgcgcaggtgctggcagacaccatggcggaggcgcatatgtgggcggtggatatgccgcttaacccgtcgctggcccgcgatattatcgaaggtatccgcgccaaaatgcgcagcctggtgaatcagggctacctcatcggcggtgattgctggattgatgacagcgttaacgacaaagacagcctgaaagccgggaagctctggatcgactacgactatacgccagtgccgccgctggaaaacctgatgctgcgccagcgcatcactgaccgttacctggtggatttcaccacccgcgtaagcgcataa

SEQ ID NO: 227478 - DNA, 903 bp, Klebsiella pneumoniae
atgaaaataattgctatgtgtttggtaaaaaatgaagtagatattttaagtgtcgtcatcgagaatgcattgaaatgggctgattatatcataatcgctgatcacatgagtacagacggtacttgggaattaattcagaataaaattaggttctttgagaaagtcaaggtgtatgggcaaattaatgaacctttcagtgatggaataagagcgaaactttataataaattcaaacatcttgctgataaaggagattggtggtgtcgcttggatgctgacgaaatatatattgataatcctagagaatttttatctaaaatccctccttttttcaatatcgttcgaggagcaaaatttcagtattattttacggataaagatgttgtattatataacgatgacccagaaaaatatgagaatgggaattgtgtttctaacttaaaatattatgtttgtaatgagtcagaaacacgatttttccggcattttgataaaaaatgggatattactaacttatggccagatgctgcttggccacatttaatttatccgttacatatacgcattaaacacttccaatatcgatacccagctcagatacaacaacgtattgacatccgttctgaagtcagaaaaatatctaatacatttactcatgaggtgcgtgcaaactggaatagtcgggttgcaaaaaacatgaaaatcaatcaaagtaatgaggggctgatttatgagcaatcgtggaaagatagaattgttccctccgaaaagttgtttcttcaagatgataactatgagattactctcgatttaatgccttctaaaattagtcacccagtaaaacaaataataagaaatactctacttatattattagggcgaaaaaatatctcgacaagataa

SEQ ID NO: 227479 - DNA, 1272 bp, Klebsiella pneumoniae
ttgaaaagtaaaatagtttccaattcaatatggatgatgttggaaaaaattatttcaattttggggctgatttttgtcacgtcctttgttgctaaatatgtaggcccagaaatttatggaaagattgctttttctttatcaatatttcagattatcttagttgtatcgcaatttggatctgatgtactgatttttaaaagagttagcaaaagcataagatcgggaggaaacttaattgtatcaacaattcctctaagattttttacatatttattattctcgattcctgttatcatctacaatgagttagagtcacattatggggtgatttttatttatgctgcatttatagcctgtttgtttcaagcgttggatgtatattcaatttattacgacgcattgcttttatcaaaaataaatactattcttaatgttttttcattaataatatgtttgatattacgatggtatattgcatttgaaaagttagatgcaaattggttatgtgcaccgattatccttacgacttttataccatatattttacgccatataatttttgctcgcggtcgaaataatacaaaaataacttttcgtcagcgatatcgatatactaaatatcttttctcagcaggtatttcttttgtattgtcttcgatctcaatagctatatatacacgattatctcttttaatgcttgggtttatgcaaggacaaactgctgttggggtcttttcaatagcattaacgcttgcagggtcatggtcatttatactaaattcgattataacttcaaaccttccatctattttttctgagtcaaataatggagttactataagaaaagcggcaaatttaatgtgtctcgttattatggtctctgtccctattatctttggtgtgtttgttatggggggatggtttattgagtatttttatggttatgattactcttcatctgtagtccccttacgtattttggtattttccactatgattggtgcattgggtattatttcttcacgctttatcgctaaatattctggttattcttttctttcaaaaaaaatgatccttgtagcaattctttctttagttttgaacgtgattttaattcattactttagtgttataggtgcttgtgttgcgacacttttgaccgagtttttatcgcttacaatatttaattatttctatagaaaagaaagtgttcttaaaatgcatttagcttgttttaaaaattttggttgtaaattttataaaagtagttga

SEQ ID NO: 227480 - DNA, 753 bp, Klebsiella pneumoniae
atgactgatattactgataccgggtcattgattgaaactggcgcgctgtttgtctccaaccattctggaggcaaagacagccaggcgatgctcatcaatctgcttgaggtcatcccgccgaagcagcttgtcgtcgtacatgcgtcgcttggcgcgatggaatggccaggagcgctggagctggcccagaagcaggcagaggccgcaggcataccgttcatcgtcgcccgttcacacaagaccctgctggagatggtagagcgtcgatttgagaaccgcccagaggtgccaagctggccgtcagccagcacccgtcaatgcacaagtgatctgaaacgtggccccatccagcgcgaggttcgccggtatgcaaaagccaacgggtttagaaccatcgttaattgccttggcctgcgtgctcaggagtcaccggggcgagccaagcggcaggtattcagcaaaatggggatcagcaactcggttaacacctggtacgaatggcttccgatccatgagttgcttaccgaagaagtgttcgccgtcattcgactggctgggcaagagccgcattacgcctatgcccttggcaatgagcgcctcagctgcgtgttctgcatcatggcgagccgtaacgacctgaggaatggcgcaactcatcatcctaagttgttggaacaatatgcgaagctggagacccgcaccggctacaccatgcacatgaataggatcccgattaaggagcttgcagcatga

SEQ ID NO: 227481 - DNA, 531 bp, Klebsiella pneumoniae
atgactgatatcaccgaactggcgcggagcctgaaagcggcagcagagaaggcgagtaacggcgactgggttaaagaatctggcgacggctgggaagcgtgttgtagcgcaaatgaccaggccaacggcggattcatcatcgcgcacttcgtaggtccagatgcagcggagaaccgcgagttcgtcaaggccgctaaccctgccaacgttctcgcgctggtagaggcgctggagaaggcgcaggcaggcgagaagcaatggcgcgaagttgtcgatgcgttctgctctgatgacgccgactggcacaagctgactaactcaaacaatgagctgattgctcttttgtctcaggcattgtgcaaacaagctgaccgcatcgccgggctggagtcccgcactgtgaccgcgaaaccgatgcggccggggcatatcacagtcgggggagagaaaatcggaatatatatgcgtgatgaagttgacgaatttatagcagcgctgaccgccgctggcatcaaggtggaggctgagtga

SEQ ID NO: 227482 - DNA, 402 bp, Klebsiella pneumoniae
atgggtaaaaacgcactggtaatcagcagggagctttctaaagatatggaatttgccggtcaatttttgttcaaaaagttgtcggtggctaatttacctatagatgcggcaatgtggttcttgtacccagatcagtcatggaagtatatcttaatcataagcgatctggcagaaagaggaccgacagatgtttacaaaaaaatcagtacaattaaccggaataccgcgtcacaaaaataccgacctattcctttagagtacattgaggcaaaggataaaaacttctttatctacaataggatgaagggtttttctagaatatccaacagtaaggttcgcgtgtcgaattctatgattaatggtttagaaataaccgactgtctcatctatgaattcaaatga

SEQ ID NO: 227483 - DNA, 177 bp, Klebsiella pneumoniae
atgaactatctcattaatcggctgaaagagccgtcaacctggcgcggcatcatcttggtcattgctggcgtatttggctatcagatgccgccgggtattcaggaaaccgtcattgcaggcggcgtagcgctggctggcgttgttggtgcggtaatgccggacagcgttaagaagtaa

SEQ ID NO: 227484 - DNA, 273 bp, Klebsiella pneumoniae
atgaaaaaaagaaaactcgtaattgaaattgatgacagcgccattgattcagtcatcgaaaaggtgcgcctgctgaaagatgaattgagcagtctgggactgcctgtaaacatggcaggcgcagcggcagcgtcacttcagccagaagacgaaagggacgcgcaagacctctggggctggtatatcagcgagttagattccagcattactcgggctcattcagagctgacagaacttttgaatatgcgtcgccgcgcgacttcctccgtttag

SEQ ID NO: 227485 - DNA, 261 bp, Klebsiella pneumoniae
atgtcgattgatgtcaaaaaaacatttgagaagattattgatgaactggaatcactcaaaggggaaaatgaggttttagctatcgctttatcctgcattctcagtgagttgccattggatagcgccagtaaatttcggtcaaacttcactaaagtagtttcagaaacaaacaacatgaaaccagcggcatcgcctaaacggaggaagtcgcgcggcgacgcatattcaaaagttctgtcagctctgaatgagcccgagtaa

SEQ ID NO: 227486 - DNA, 201 bp, Klebsiella pneumoniae
atgttaacagtaaaagtgatgtcaccggatggtggcgaagaaatccattgcggcctgagcgtcggtttcaaccccaatcagcagagtatcgcagtgtcgggaatggaccagaacgtgttcctgaaacagggagaggtggcgtacgtgatgaacgcaaacgggaagacaatttcccgttacgaacacagggcccagcagtag

SEQ ID NO: 227487 - DNA, 2133 bp, Klebsiella pneumoniae
atgagcacatataaaacgaaaaatcctttaggttccgccgccgtaaaggacctgtacgataacgctgaaaacgtggataaattcgttaacgacaggacaaaagaggagttagaggaccggttaggtgtgcttcgcaaaacctggcacggcatggagatgatcttcagccgctttatcgactacatcactggtcgtggcgagcaggcagttgcagctatcggctggcaggagcttggcaactgggctgttggtctggctgtagataatcgccagcagatcgtctactacaatggttcctggtacaaataccttggtgagcttgagcacgtcattgccggggattctcctgagaacgatggcggtgtgtggtcggctgcaaaccccacggggaaatggtcgaacatcggtgacgcggctcttcgctcaaacctgggttcaggcgaagagggtttaggaatatcacttaatgccctcgaacagggtggtaacggccagcatctggctgtttttgtctcccctcaaatgcgccactctgatccgtattcgttttttggcgctgccacaatgaatgcatttatgacagctatggatatgggtattggtgaggtcaggataccggcgggagaatacattctcgaatctactgtgagtgttacgctgacaatgcatatggcgatcacattcgacccgggcgtaatcatctacgtagactcgccgaaagacgtatttaatatcaatattaatggttttaaccttgatatccgtgcgtctaatggcagggtaatgagtcgctggggcagtgcggatggctcatctgtagctgcatttcgtatcactgatgcatccctggataaatcggtatcgactgactcattaaaagtaggttctgctgatggcacgtctcgattcgggtacgctgtttggggctccgggattaacctggctacgttctaccgctgtctgttacagggcatacgtggaatttatcttgaatctccactgataagcggaacaacagcccatgctatgggggcgcaaatttttgggtgtgagatatataccacaaatgaatgcgtaaaaatcgcgaaccagggagcgcttggggctgagggtattggtgtgtggggctgtgagtttgtaacaggcggaacggccattattattgataacgtcggcctgtcatcatcagcatatctgccaccgctggcacgaatcaataacaaccactttaactgctatcaggctctatatgcacgtgacatcagtcgactgcacttcggaggtaatgatgtacagggaacgtatagtgcagataagccgattaacggctggcttgagcttggtggcgtacagcagtttctgcacgccagcaatagctatagcgccgctgcaaccggatctggaacgacaggtgataactgtccatcagtgatttaccagtttgcaagcacgctgtcgaacgcgttttttaccagcaatggtaacgtctatcagctggatgcaatgacccggccagcctttagtttctcaggcacggcaaatattactgagattcaggtatcaaacgacaggctcaattcttccgggacgtgggtcgattcagcgtggctggcatatgtcagactgtctcctgaactgactattggtaatctcggcgcagccggagggcttgactacagtacaaaagggtctttctctgccggagtattgtctcttggagcgcgcccatctcaggggtttacatactctatccctgtgagcatagtgccaaatagttcgggaatttctcagataacattcccctcgcaaatggttggcaaggaggtgaatatactgctggcagcagcaaacgtatcgttcacgcatggcacaaatatggtttgccctgaccagaagtcgtttgtaatgacattgccaaatgtcattaaggtgtttgcgctaaacactacccagtgcattattctggatgtgggcggaatggcaaaccgtcatacggatattacctcaatccctacatcaagaacatcgccaggatacccgggggcggaggtattcgattcagcgaacatgattttatatcgatacatagccgaatatggctggggtgaggttgaaataaaagctattagttaa

SEQ ID NO: 227488 - DNA, 276 bp, Klebsiella pneumoniae
atgtcattcacagtaacgaaaagtattaagtgtattgcgtcctatccggaatttggtgcagaatcagaagttaccactattgaaaaactggtgacattttatgcccgacaggtagtcagtctggacgcggagaataatgctcaggtagtttttgatgtggggattgatggggccagcgttaaaggagtctactaccactcattcacatattccggaacgggaagcccaatagaagaagcagaactgtctctaaaagattcgctcaacgcagaataa

SEQ ID NO: 227489 - DNA, 231 bp, Klebsiella pneumoniae
atgccaggcgaaatgaatcaactgacagaaaaagaacagattgtattgtccttaatgaatttactggggatggatacgaatctgacagcgcaggcgatggagtttattggcgacagcgttctcaattatcaactgctcatcagatattttagcgtcagtagtttaactgatgatgcatctaaattaacggaggcaatagaaaaggcttctgatgcaaaatccttattttaa

SEQ ID NO: 227490 - DNA, 579 bp, Klebsiella pneumoniae
atgctgattggctacgcgcgggtgtctaccggcgatcaaaacctcaatttgcagaaaaacgcgctggttcgcgcagaatgtgagcagattttcgaagacacagcgagcgggaaaaatgccagacgccaaggactgaggcgtgctattcgtcgtttaaaaccaggtgattctcttgtggtctggaagctggatcgccttgggcgtagtgttcgtgacctcatcactctggtgtcggagctgcaggagaaaggcattcactttcgtagcctgaccgactcgatcgataccagcacagccgccggccgttttttcttccatgtcatgagcgccctggctgagatggaacgcgagttgatagtggagcgtacccgagcaggtttagccgctgcgagggagcaggggagagtcggcggccgccgccgggtaatgactgaagaagtggtggagagatgccgcagaatgctggagaacggcgcaacccggcaccagatcgcagatgtgataggggtgggagtgaagacgatctacaaatactttcctgctgccgtccgtgatcaaggattcctgcccttcccgtga

SEQ ID NO: 227491 - DNA, 276 bp, Klebsiella pneumoniae
atggcacttaaatgtcccgaatgcggtacgatggcacacgccagaacttccgcctatgaagcgccatcggttaaacgctcatggtatcagtgccagaatcttgaatgttcatgcacatttaccgcactggaaagtgtggatacgataattatgaaacccaggcgcaatgaacaggaagctgacgaaccggaaatgccggaaaagcagctgaaaacacttaaccgctatggttccgcgtctaagctgtcaagccgtcagcaaatccctgtcagataa

SEQ ID NO: 227492 - DNA, 1926 bp, Klebsiella pneumoniae
atgagcggttattcggtgacttatgaagagagatttctttttaaagaaatcggttcaatagctacaaaacctgacattgctcttactgaacttgtagctaactcacatgatgctggcgcaacggtagtaaaaataaatatatctgaaaccaatccgcaagtcctcactattgaagataatggagtaggactaacgaaagaacaattcgaaagcaggtggcttagattacgatacgataggcacaagcatcagggggcttatgtcgaatttcctaacgatgctgatgtccaaactaaacgtcttgcgtttggatgcaatggtgttgggagacatgcaggactatgtttcgatgatcattatatagttgaaacatggaaggactccatccgaaattattatcatttagctgtatcctccggtcaaagtccaattaaagttgtagaacaccgtagcgagaaatcaacaggtcatggttctaagattacagtaaatatcactcggaattatgtcgattccgaacaaatatcagatattatatctgcaaggtttctttttaatccggagtttcatgtttatgttaacggccgaaaaatcaccttgttagaacatcctggggtggtgaaaaccgaagaaataaacccaatcggaaacataaaaataaaactgactttagtagattcttctgctgcggctagaacttcaaatcagcatggtgtcgctttttggctgggtggtagattattaggtaagccttcttggtatattgctaaaaatcaaattatagatgggcgaaagtcatttgccaaaagatatactttaattgctgagtcgaatgatctattcagctatgttgaacctgattggtccggcttcaagtcagattttactactatagaccttatatctaatgagattggtaggattcttcgcgcttggtatgttgagttgtctcaaatagatatgcaacaagcaaaatctacggtaattcaaaaccatgttgaggatataaagagtctaaacattcttgctagaaaggaactgaatgattttctggacaatattttggaggaaaatccggatgttaaattggaatatttggagttggcatttaaagcagctataaatttagagaaatctagatctgggatttcacttttgagaaagttaattagcatttcacctgatgatgccgaagcgttgaatggttttctggatgaatggaatgtaacagatgcaatgacaattcttgctgaaattgactctcgcattaagttaattgagatgatttccaagattagtggtgaccatagggtagatgaattacatactttacatccgttaatcgagaaggctcgttgggttttcggtccagaattcgatagtgccgaatattcaagtaatagagggcttatcaaaacaatggaaacaatatttaaaaaaagttataggaaagaatgttttttaaattcatcaaaacgccctgatattgtcgtaggtagtaattcatctttaagcatgcttgggctcgaagagtttgatggtgaaataaagaagactaagactgtacttttaattgagcttaagaaaggcggtttcactattggtcgtgatgagatgaatcaggcaagatcttatgtggaagatatttggcatactggtgtggggtcttcacgtccttttattaaagcatttgttgttggtgatacgatagataaatttgccagcaagtatcaagccgttggtaataatgaaaatgataagtttggcgaagttaaagctattacttttgatgaaatggttaggactgcgcaggctaggctttttaatttgcgggataaagtattccttagatacgacagcttagacaatgaaactacgatgagtaacgtcatcaatacccctacacaagataaatttagcatttaa

SEQ ID NO: 227493 - DNA, 636 bp, Klebsiella pneumoniae
atgacagctaacaatgataaaatcgatcactcagaactacttaaaattaaagttgacatatggaagcacgtaatttcaacgcaacagcattttaatgatctcgcaatgaaaatacgaaatttcgctattttaattttatctgcatttatcggagccataggtgttagttttaaatccgggtttgcaatcccgttgtttggtcattacctctcggcttcattctttctggctcttggtgctgcatgcatatggatgctattcttttttgttgatgtttattggtaccacccattattagttggttctgttaataaaggtgctgaaattgaaaaaaatattggtagcgaacttaaagattttataaacttaactcaggtggtgggaaaggaaagtcctaaagaaattaaattaagctttcgcaagaaagtttactggaaaaaagaataccatagtaaagataaagcaaaattattttatatgggtgtcttttgggtgctaataacattcagcattgctatttttttcatggacggacctgttactagcaaagaaagtaacaagaatctactcccaacgaaattagaatgccaaaagacaattagccttaataaaataaattgtaccattacgtcataa

SEQ ID NO: 227494 - DNA, 873 bp, Klebsiella pneumoniae
atgaaaaacgttttaatcactgatgtcgacaatactctctttgattggttcaatgtatggtataacagttttaacgcaatgataaacacagcttccaagataagcgggattcctttatccgtgttaaagccagaaatcaaagaaatccatcaaaaatatgggacagcggagtattccttcgttttgcaagagttaccttctttgctcaaaaaatatggcaataaagagtcgatactaagagagttagatgaagccatacatgcttaccgctctgaaagaaaaagatgcctacaattgtacccaacggttatggatacattatccattttaaaaaatataggggtgaaaattattgcctataccgaatccaaggaatattacacaaactataggctttcaaagctcggtttagatggagttatagatgttgttttctcaccggaggatcattcacttcctgaaggaatcattaagcaagaaagctatcaactcaagaaaacattaaactaccacactcccaaaggagaaattaagccaaaccctaaaatcttgttagatattataaaattcgctaaggctaatccagaacaatgtgtatatataggggatagcgaaatgaaagatatagcaatggctcaatcagcacatgtttcctcagtatttgcaaaatacggaacgactcatttctcgaataatttagaaggatatgatctacttcgtgatgtaacccattggactgatgcagatgtagaatacgaaagaaggattaaagaagagaataaagaaattcacagccaaaatatagctctcaatttttctgatattttgaatatgttcacgttctgcgcctttgaggaaaaacatgacagctaa

SEQ ID NO: 227495 - DNA, 204 bp, Klebsiella pneumoniae
atgttctcggacaacgacagacacaaaaaaagcccgcagagcttgtgccatgcgggctttctgtacttcaccggacgtatccggatcatcatttggtggagctggcgggagttgaacccgcgtccgaaattcctacatcctcggcactacatgcttagtcagtctttacattcgcttgccagctgcggacagacacgccactaa

SEQ ID NO: 227496 - DNA, 2145 bp, Klebsiella pneumoniae
gtgaacacaaaaaataacataaatacaaaagaatcagacgatattgatttatcgcgtttcataggtgagattattgaccattggaaaataattttctccgtcacttgtttttttggtttggtaggcattatatatgctttttttgcgagtcccgtctttcaagcggatgctttggtgcaagttgaacaaaaacaaggaaatgcgattcttaataatttaagccaaatgctacctgatagccaacctcaatcagcgcctgaaattgctttattaagatctagaatgattttgggaaaaactgtggatgacttgaatctacagacaattgtatcgcagagttattttccagtttttggtaaaggttgggcccgccttatgggtgagaaaccgggcaatgtaagtatctcgcggctttatgttgatgattccttaaataaggatccatcaattaaagttcatatttttaataatgaaaaatatgagttaacggtaaatggagagtctgtaattggcaaggttggaaatttattggatttcaatgggataactattaaaatagataaagtaaatgctgagcctgatacatcatttaatataaaatatatatcgaaattaaatgcaataaccaatttgcaggatgtatttaatgtatcagatcagggtaaggatactggtatgttaaatctcactttgacaggaaacgatccagcgcttattgaaagtattctggataacatcacttcaaattatttagcacagaatatttcccggcaagcagcacaagacgaaaaaagcttagagtttctgaatcaacaattacctaaagtaagatctgacctcgatgaagcagaaaataagttaaatatttttcgcaggaaaaatgattcagttgatttgtcgttagaagctaaatctgtacttgatcaaatagtaaatgttgataaccaactaaatgaactgacctttcgtgaatcagaaatttctcaactgtatacaaaagagcatcctacatataaggcattaatggagaaaagaaagacacttcaggatgaaaagcaaaagttaaataaacgcgtgtctaacatgccagaaactcagcaagaaatattgagattaagtcgagatgtagagtcgggacgggctgtttacatgcaactcctaaatagacagcaagaactcaatatagccaaatccagtgcaattgggaatgtgaggattatagataatgcacttacaaaaacgaccccagtaaagcctaaaaaaatattagttattatttttagtattattgttggtgcaatagtatctatttctttagtcttggcgcgtgctttccttcggcgtggaattgataacccagaaaaaattgaagagttaggtcttaatgtttacgccagtatccctgtagctgagagtctctctaaaaaagggattaataactcggatacacaaccacaagagttcctatcgttaagcaatcccgctgatttagcaatcgaagctatacgaggattgcgtacgtcattgcattttgcgatgatggaagcaaggaacaatgtattaatgatctcaggagcgagcccgaacgcgggaaaaacctttatcagttctaacttggcggccgtgatagcacaatctggtaaaaaagtacttttaattgatgctgatatgcgaaaaggatatacgcataaaatttttggtgtctctaataacaacggactatcagatgttttagctggtaaaagtgactacagccaagctattaaacatatagaaagagttaatttcgattttatttcgagaggtattaccccaccaaatcctgctgaacttcttatgcataaacggttcggcgacttaatcaaattggcatcagaaaattatgatatcgtcatccttgatactcctccgattttagccgttacggatgctgctattattggcggttatgccggaacaacattcttggtggctcgttttgaagtaaatacagctaaggaaattgaagtaagtattaaaagatttgaaaacagtggtgttagaattaaaggatgcattttaaatggagtggtaaaaaaagcaagtaattattatgcatatggatatagcgactatggatactcttataaagatgcaaataaataa

SEQ ID NO: 227497 - DNA, 1701 bp, Klebsiella pneumoniae
atgcagcatattgaaaatctcttaaaacagaccgacctgattaacaagtatggtataggaaacgctcatttactgtggtctatggggctttatcttgacgagtctgactttgataaactcgcttcagatggtttaaccgacggtggaaatgataaaaaaatagacttcgttatagtatctaatggaacattatttattgcacaaggatatcattcgacgcaagaaaatatcaaaatagctgccccagccaataaagcttccgatttaaatatagcacttgcttggataatatccggtcaaggatattcacctaatgaaaagctacgttctaaaataattgaaataaggcagcttatagaagatggagagattgaagcaattgagttactatatattcataattgtgcagaatctaagcaagtaaaagaagaacttgagacttgtaaaagttacctagaaggtagattcaatgaaaaagaaattgaagtatcttataaggaattaggaatatcaagtttagagaaactttacatagcattatctcaacaaatagttgtaaaagaaaatgttatatttgatggagacttaattgattcaatccaaggtgacggttggacttcacatgttggctttgctaacggtgcgtggcttaatgaattgttccgcaaacacggagctgaattattctcagcgaattatcgtggttttatggggttaagtaaaagaaggaagataaattcagccatcagaagtacagccgaaacaaatccaaaagatttttttgttttcaataatggtgtatctattcttacaacgaaattcattaaaaatggtaatattttagaggggatatcgataattaatggagcgcaaacaaccggttcaataggttcagtgcaagactttaaaaaacttgatgggcttaaggtcctgtgtaaagttattgagtgtgtagattccgataaggtaaaaaaaatagttcagtataataatactcaaaatcatataacaacatgggaccattactctaatagtgccgaacaaaaattggttgaggaggagttcaaaacatttggctatgtatattccttgaaaagaggatttgaaaacacaggttcatacttcgggatagaatctgtcgcccagccgctaattgcacttcatggtgattatgcaagtgctaatagaggaaaaaactatgtttttgataccaaagcagcgtatgacaacgctttccatgaatccaaggctcagcatatcctattggcatatacaatatcaaaagcaatagaaaaagttaagttaaactttaaagcaaaaatcaataaaatctcctcggatgaagattctttgttgtttcttcagaatttaaaatctagattttttttaatttctgttattggtgagattctagatgaactaactggaaaacctcttgataaaaagtttgtaaaatttaattacaattcgagcctacaaaaaaacttaagtttagatgatttgatcaatatatgggtgcctgtgataaccgcaattcttccttatgtcattcgtcaaacaggacaagatctcacagctttcttaacaaatacagagaatccattacaacatgtcgctgtagaagtaaaaagcttgataaacactgtaaaaggttttcaaccgatacctgcactagacactttatctaactatattgagtga

SEQ ID NO: 227498 - DNA, 1065 bp, Klebsiella pneumoniae
atgaatgacaaggtgatcacactcgctccggactctccgctgaataagatgctggatctgattgcaaatgtagcatcccgtaagatccccggcgtctctgttgttttagaactacgccaggcgtatgcaaaaatcagggaggaaatacaccaggatcgaatgcttgatttcgcgctaggccttcgggacttagggattgataaagataattttgatttatcctccgaatgtttttctgccatcgtcacaaaactattactggatgacgagaagcgaaaaacggaattttatatcaaactgaccattgaacttgcccgaagtgacctcgatccagacctgaagatatattatatcaacacgctgagcgaactaaccggggctgatattgactttgcccgcaagctgtatatcagacagaccgttccgctcagagggtacacatccctagaggatgcggaactggcgctgacatcaagcaaacaggggatcacgctgaaatcactgcacaagttgattaatcacggcttactagatgagaacagaagtggcgatatcagggcaaagccgctttataacatgacggatgaactgaaaaccctgatttcctatctgtttcacccagatgacctggtcccgtcagcgattggtgataaccagaaagaagcgtttgacgttatcattatcgatcactataaatcgctggataacctgtacattacgcaaatcagggataccctaacgaataaacagatttctgtgggtatcgtgcaacacaatgatgactaccggttgcaaaaaaccgccaaactttatatctataataatgccatgacacattattcaggatccaggagcaaggaatatatacaggttttcgtactgttcgatcccgcttctgacacccttaaactgtctcattccggcgaacgcagttttaaaattgagaaggagaattattttggggcgattaggaacagcgcagacgcaagaaaggcattgcttaacacactgagtgaggtgaccgactatgttgtgggatatctgaagaagcctgagcacccatga

SEQ ID NO: 227499 - DNA, 621 bp, Klebsiella pneumoniae
atgacctcgctctccccggacaccgtccgccgcattgaagacgccgccgcagcccttatcgccgccggcaccgcaaacccgaccaacgagcaggtgcgggcgcacctcggcggcggctccctgtcgcatatctccccggtgatgcgtgcgttccgcgcccgccggcgtgaacagcgcgcggagcagctcccggcactgccgccagagcttgcgcagctgctgaccggccagctgggactgctgtggcaggcggccgtgaaacaggccgacgccgacaccctggcggcgcgcgagcaggccgatgcggatattgcgcaggccgaccaggagcgcgatggggcgctggccagagtggccacgctagaaggcgagctggcggtgctgcgggaagtcgtcaccgagcgggaccggctgctggacgaggtgcgggcgttgcgagccgacgcgttaccgttgcgtgaggcggtcgcccggctcaccgctacgggggagcacatgacagcacagttgaaagagacgaaggcagaactgaagggtgctcgggaagagacacggagcctgcaggctgagctgctgcaattggcacggaagggaataagtccacagggagaggcggtatga

SEQ ID NO: 227500 - DNA, 453 bp, Klebsiella pneumoniae
atgactgaccgggtgatattgcagcgtgagttttctgagcttatgaacgggctgcacggaagcatcttaaaatatgctattgaccgagccgaacaccatcagtgtgaggtttatctgtgcgtgaacaacaaatcacactgcgatcaaatactagaacgcatctttgaaaaaaaagttgttaataaacttaagtcaaatcaggttatctccgttaacggacggaaattgagcttatattcgcccctaaccctgaataagagttatctgccggaagcagtgtatttattgatgttcccaagccctgaactgctgaaatctgttgaatatcaggcgagcctcaaccccgctcatgaaattatcgtgtttactgaatcagacgggcatacggaggctacggataactggatgtcggaacatgaggtgcgcatgctgggaatcgaaaaaacagtttaa

SEQ ID NO: 227501 - DNA, 966 bp, Klebsiella pneumoniae
atgacgatgaacctgcacactcagacaaccgcccctaaagcttcacaggcgaccagcgtatccccgctggagcagtcaggctcctcaaaaacgaaattttccaggggcaaaagcaaagcccgtgctggcgcagtcaaaacagacctttaccagaccgtaacggacagcatcattgcagccctggaaagcggcgttaaaccgtgggtgtgcccgtgggttcgcaacggcgcagcggcgggattaccggccaacttcagcaccggcacggcatacagcggaattaatatcatgctgctgtggtgtagtgcggcaaaacagggttttcaggacgagcgctggctgacctacaaacaggcgcaggagctgggcggccaggttcgtaaaggtgaacacggcacgacggccatcttttacaagactctggagaaagaggacgaggacggggaaatcgaaaaaatcccgatgctgaaagcctttaccgtgtttaacgtggagcaaatcgacggcctgagcatcgagagcgtgccgcagccggttgccggtttcgatccgctgccgcaggcggaagcactcatgacccggagcggggcaaaaatcaccgagcagggcgtaaaggcgttctatcgtccggccaccgatgaaatcgtcctgccagagcggttccgcttcgcggacgcggcgaacttctacgccaccggcctgcatgagctggttcactggacgggggcagcgtcccgcctcaatcgtgaaaaaggcaataagtttggctctgaggcgtatgcgtttgaggaactgatcgccgagctgggcagcgcgtttctgatggcggatttgggaattacgggagaggtgcagcatgaaagctatatcgcgtcctggctgaaagccctgaagggagacaagcgctacatctttaaagcggcggcagcggcctcaaaagcgcaccgctggctgatggactgctga

SEQ ID NO: 227502 - DNA, 432 bp, Klebsiella pneumoniae
atgacgatgaacctgcacaccccgacaaccgcccctaaagctgcaccggcgaccagcgtatccccgctggagcagtcaggctccccaaaaacgaaatttcctgaaatcaaaaccgtcaaaacggcggtggttaaactgatcagcgacatcgagggcaacctcgatcagcgtctggcatatcgcgaggccgtagagggattgtgccaggaggcggccaaccggataacccagtgcatgcattcacgcagtacagggcagacgctacgtgatctccgcgagctgctgtcggtgacgctggacaccattatcgtggtggagtttgaaggggagcagacccgtctcaactatggcggacgttcagcagaagacgtgatcgccatgctgaaagcgctgcatcttgaagggcgcaaagcctggctggaagtggagtaa

SEQ ID NO: 227503 - DNA, 528 bp, Klebsiella pneumoniae
atgcgtaaaaccacccttctggtgctggccgccgccctctgcgtgcccgcgttcgccaccgccgcgcccgtcctgacggcgggtttttcgccgtctgacgggcgccctgctcttgaaatcgtgctcggcgccataaacaacgccaggcagagcattgacgtcgcggcctacagcttcaccagtaagccggtcgcgacggcgctcgccggtgctaaccggcgcggcgtggccgtgcgcgtggtggccgacgaaaaggcgaacagcgaccgctacaccgccgtgacgtatctgataaaccagggcgtgccggtgcaccttaacggccgttacgccatcatgcacaacaagtttatggtgatcgacggcaaaaacgtccagaccgggtcgtttaactacacggcaagcgccgtttcacgcaacgcggaaaacgtgctgctgatcgaggatgcgccgcagctggcggagacgtaccagcgagaatttaaccgcctgtgggatgagggcaccccgctgaatgccctgtactga

SEQ ID NO: 227504 - DNA, 222 bp, Klebsiella pneumoniae
atggcgagccacctgctggctatcagcgataaaaaatggcggtacgcgttttacgtcgccccggacgaggcgaaaaagcgcgccctgaagattattttcgacagcatcgccagcgtgatcgtgaaaaaccagcatgtgcaactggaggcaaaacaccgcgacgtcttccgcttttacaccctcgatgaactgaaaaacctggagctggacaactatgcgtaa

SEQ ID NO: 227505 - DNA, 5064 bp, Klebsiella pneumoniae
atgtccgtaaaacagtatgaaacctatctggcagaaaccttcattgaatgggttagcagcatcatccagcctggtgagcgctaccagtttaaatctcccgatccggataacgccttaaagctctggaaggctttcgactctttagcgaatggaaataaactagaaattgcaccggggcaatatcttacctacgtccaatgtaataatatacagcttattccggtactgcacggcaccactacccctgcattcacagaaaactatatttctcatttacgcgatcaggtttctggccgcaatggcatttttgcccagacagctttgttgattatccacaacagcatgctggataccttactcaatagtaccaaagatgtcgctgcaccggatgctatctggcatccagaaaccttccgtcaccagctagaaaagttaatcacaacggacagcgcccattctcaagtatcacgctgtttgctgggtgatcagttgacaacaatactggatgaaggtgcaacggtttttggattttcatcgttataccgtctactggacgacggcaatctggatttctcagagctaaaattattcaacgataataatctgctggattttagtgataagcagttacgcgcccggctcaatgaaaatcaaaagttatatcgccagatagaggacagtgttgaacgctacagcgggcaactggagaatgtactaactgaatttagtgcaaaattcattcaggagcatttcgttgacaatgacgattggcgtgaacttgatttctccgtctacctgaatgaaaaagcacaaaacagtgaacagaaactggtgttggaaaacattacttctgcaaacggtgaggtctggcaaagagccaaaagtaccagtaaagcaggtaaacgagacatcagtgtcctggttcaggttcaaccgggacaatcacacgttgaattggaatttatcttccagggcaacgatcttcaggacaatcaagtaaaaattgctcatcatcgtcagttacagaaagaacggttctggcgtacaagccggctcggggggagaaactctaagattctggcatcagtctcttttgacggtcggccctgcttctttagcctcgaaatcattaaccgcaataactcagcagaagaatacaagtttcgcctgctgttagttgaacaagggcaattctggcttaatgaaatccagcattgttatcgtattgaaccaggtaaaggtcaattaactctgcaactggaagataacgagttacgtattgcagagctcggcgacaagacctgtttacttgatgaagaaagtgatgatgttgattgccgacattatgcactcgttaattttgaaacgctggcgaatcaaagcgagctgatcaaatttaacttgatttcaggtgactcccgtttactgtttaacatcgaagggccaggagcagaggacggattaacactacctctgctttttgatcagggtcgtttcaataaactctttaaagaagaaggtaatgcaacctggaacaagatgaaaggtcgcgtcatcttggacaatatcgaacataatgtggttggtgttcgccagcagttgcttatgcaagagtacgccttgatcgagcgtaatctgctcagcattggcagtaatggcagtgagtttgcactggatgagcttctgccaagctatcccaacctccataatgcgtaccaccaattgttcgtttactatcaacgtcggaatactctgccgagtctggtgtcatggtcagcggaatatcgtgcattagtcagtcacatgatcgctacttttgaacaggcattacagcaaatcagtttgagcagagcattaaccacccaggaaaaatgtctgttacatctggggatttgtcgcagcgacgattatgaacgtctttcgcctctgcatccactggtaatggcttatcatttacagctagctgaaactattatcgccgagcccggattccccgcatcagcttccttcgcttcattaccagagattactctcgatcgtctggtcgtctctggcctaatgccatttgtatatcatagcgaacatgaatacgcacagttacaaccgatggcagaaaaccgcttctggatagatattgttccccagcgccagatgagtcacgaatacgttaagcgtctggtgaaagacaagctaaacgaatttactgatgcctattcccgattgttccagagtgcagggaataatgcactggttattaatgctattaatatgggagatgccagagaactatttttggggctagtagattattttaagcaggaaaaagataatgcaatttcgatacacgtaaactgctatgacgaacgtctgctacccaatgcctttgaccgctttgccgaaagtggcagctatgaacaacttaaaattgatcttggcctgaacagtggtgcgtggcgttctgaagccgatatgttgatcgatctacttcgcagtcgcttaacattcagcaaatttggcctgccaccggcaagtgatcaactggcttacgcccatctcgcatttttcaccaacaccgcgccggttgattgccgccaaattcgcattgaagatgctgccagcggggtattatgtcatggcctgattgcgggcgaaggggctgaaacacaaggcgatgcgtactttaccgcgtttggtctacgtaatgtcgatactgaatcatcttgcgccctgcgtctcgcccgcttgatgggttgtctgtggcaaccagcacgacaaagcaacagccagtatctcggtcagggaattagtctggctgtcagcggtaactttaagcaactgctgaatcgctcttatgatagctctctctggaccacaattatcgaccctaaggtcacactcgatttctttactagtcaaaaagacgtcgtactaattcattactctgaccagtacaccagttgtgctggttatgacgccgtaaccgtcacaaaacaggttgagttgttcctgcgtctccttcaaacagggcaatccaccgttgatagccagcaactacttgctgaatttaatgcctttaacggcgagtggctgttgaaaatgttgcgttcaaatgaaaaggatcgcaaagaaaaacacggcattatcggtgcatacaaattcgtacagtctatgctgcaccagtcagatatttgctggattccactgtcagtagctgagatgatccgcgtgtccggcaacgtcgggctgagaatgaaagaaagcgatttatcgcgccatttacaggggtatcagaaaggagcgatctctgacgatgtactctttgtcggcttcaaagataacaacctgtatctgttaccacttgaagtaaaaacaggggctcgtcctgattacaaccatgctgggcagcaggcccacgagctaaaacgctatttacagcaagatattcttgggccgcaaactctggcatcacaactttatcgggcactttttatccgccaggtattaatgcaggtagagaagttgcgtctgtatggtgtactggataacgacaagctatcccctctgctggaacgacgtgaatggtggctcactggcgactatcagttaggtgaacttgctgattatgcagaaggctttgtggtagctcatgtagacagtgaaacctgttttgatctctcttataaagaaacggcagagaatattcttcagatcgaaatcccctattctttgcttccatcgttaattgcagcacaaggtgatcaacctccactagctgaacgctatcgggtgccggaaaaatatctgctcaaaccagagtgtgatgtcaattcttcacacccagtacaggtagcaacaacaactgagccgcagcccatatctgtgctagagcttccacaacctgaagcatcgtcactaacccccagtaatgtcagcaatacaccattacaggtcttgtttggtcatgatgccgtgcgtcaaaatccattgtactgggagccaaccaacaccgctaagttcatgaatactaataccggtattattggaacaatgggtaccgggaaaacccagtttactaaatcgctggttacgcaactgatgcgcaatcagtctagcaacgttgatggtaaaccgattggcttgttgatcttcgactataaatccgactatgtggatgatgcgtttctggaagctacgggagctaagaggtatcagctctcgttgttaccttacaatccgttatcgttatttggtgatatgcccatgttaccgaggcatacagccatggcattcgctgaaacaatgggcaaagcgtataaccttggcgtaaaacaacgcatgaagctcgttaccctaataatggaatgctacgacttagcaggaatagtgcctcatgatcgatcaacatggaatcgtgtagcaccgacgattgaagatgtgtggcagcagtacctggcacaagagaaagtcgacgaagattcattatatgctgcactttataatctggctggtttccagatttttgaaacggatccagagaagatgaccagtttgtacgatctggttgatggagtaacagttatcgaactcgcgggttatccaacagagattcaaaacctggtggttgcgctgacactggatcttttttatgcgcagatgcaaaagcgtggaaaaccgacggtgcgaggtgactatcgccagctaactaaaatgattctggttgatgaagccgataattttatgcgccaggactttgccagtttgcgaaaaattcttaaagaaggtcgcgagtatggcgtcggtgcaattctatcaacacaagaaatcacccactttaagactggtgagaataattatgcctcctatattttaacttgggtgattcatcgagtttctgagatcaagaatgctgatatcaaggcagtattcaatattgaagataaaggcgagcaggaagctttaatgggacagattcggcagcttgataagcattttagcctttatgttgatggttcaaaaaaattttctaagttacgcgataaggctttctgggaactagaaaaataa

SEQ ID NO: 227506 - DNA, 1326 bp, Klebsiella pneumoniae
atgtaccccattgcaacaaatttaaaagttggtaataaccagctggatagctaccttccaatacgtaataagaataacaatattgactggcaaatcgtcacaggtttagtactgagctatgccgtgaaatataaaatcgatacttacagtctcgagcagtttcgcgaggattgcaaaactcatctgcaaatattgatcgatgaaccagaattcttgtccgtgctagaaaggatgtatttttccagtcaggatatttttcgcgtctcccccctgtttttgctgttccacgctcagtttgatggtgaaaaaataagcacaggttctacagccgataaacgccttggaactctgtttgccaatctgatgcgaggttttagccttaataatcctatacaagataagttaaattttattgaaaaagagatgctgaataagctcaataagaaattaatccgactgggagaggggccatttgtaaaagaacaaccttatttaccctatctggtaacgtgttttcagtctgatttggagtttctggcagagcatccacaatatcttttgcaggaactgaccaatactctacgtttgtatgcttttagttggtgcgcacaactggcgctcaatctggacaattggcaagacggcgagccgcaaagtaaatcgttgttttttatcctcgataccgaaaaagctagctcagaacgagataaaataaagttcttcggctataagtggtttgcccgccaaagtgaaaaattgttccccatactctctgcattagaggtattacaagtaaaaggtgaggaaaaacgccctctttggcaggtatatcaagattgtttaggttattcagatacatcgaatcgagtactgaatgaactcaataattatatacagaagtttatcagtaaggaggagcgagatcttcctgaacgcgatcgtgctacaaacttggaagatgcctttaaacagctattatctgttgccgttgaacagtttcagggtaaaaaaaccgagcgagcagcggtaaatcgcaaatacatcaacgagctggaaagccaaatttgcactgacttcattcaggttcgtggccgagcggggaaagtgctggtactgaaccaggatagactactgctactaactaaccttaccgtgggtaaaaacaaaaaactccgcctgcatgagctgctacgtggttttgagcaacgcggattttatcttgataaccagtctacacaaatgctggttgcgttttatgaacgcatgggaaatgtggagaggatgagtgacagtggagacgccgtatatgtccgtaaaacagtatga

SEQ ID NO: 227507 - DNA, 1650 bp, Klebsiella pneumoniae
atgagcgcaatcacattacgtcaagcgttgggtgtacttgcgaagtcatcttcgttttccgtaactacggagactcatcggcaaagggatgttttcgatgagttaaaagaacaactctttgtaaaacaagagattgaagaagatttacagcgttacttggataccgctactcccggtgagatcatttttctatgcggaagcagcggagatgggaaatcagaaattttaacacgctgtaagtcagatccacgatatcagcagaagtttagtttccatctggatgcgacacacagttttgcgcctcagcaatcggctatcgatgcactggatgaattgtttgaaaatcatcacccagaatcatacccgctcctcatcggtatcaacaccgggatgctcgccaactttgccagagaaggttctgagtcccatatagctattcgcactgctattgactcattcttgtcagctcaacaggaaggccaccgtccttaccgcaatgaacattgtacattctttgatttcgaacattatccaaagttcgagtttgatgaagagcaggaatactccccgtttataaaaaaattaatgaatcacttaacggggaatgaagacaaaaacctgttttatacaatttatcaacgtgatgaatcaataggacatgatttaaaaaccgttgctaactttaaactactgtgcatgcccggtgttcagaatgttttaataacacagctatttaaagctcgattaataaaagatcaatttgttaccacaagaaccttattggattttttacatcacctgctgacagggcctgggtacctttttgataatctgtttaatagtgcagaaaatgatctaatcaaaaaggtttctgattttgatcctgccagattgcatacatatgagattgatcaatttattttacgctatgagcttggattggttgatcccgaactggatgatttcctgagtacacttgcaaaattacatctcacgtttgatcgtcaatgtgttaagcctggtgacgcagcttccttaattagacttttctggctactacaacatgaacctttagggaataactatcacaaaagattctctgtattctttaaagaaactctctttgagcgttattcagagatttggcatctgcataaaaactataccgcagatccggaacaaaaaagagcactgaaccgcttctactcttttgagcttatcgctggtattcagcgttatgcgaaccgtaaagcacctgaactgagtaccaaaaaagaagagttctttttaggtgaatttggtgggattaaaatcacagcacctgttgcgctgaaaccggactgggattccatcctcaagaaaaatacagcccatacaacttgtttcgatatctatttaaaagtaggacaagatccgctggatccgattcggatcggtcttaatttatttgagctattgagcaaactgaataatggctatcgccctaataaatatgacaaaagtgcgattgtcttactggatgagatcgttgagctaattgcagaaaaggcaaaatctagcagcgaaatcaagttttatgacggtgtaacacgagtttatagtgcaagagcggacgatgacatgattactatcagcggcatggagggataa

SEQ ID NO: 227508 - DNA, 663 bp, Klebsiella pneumoniae
atggataaaatattagacatagtgaacggatggatcgccgctgcagtgtcaagcggggcattaagtattacgcaggttattctttttcttttcatcgcagggcctttggctcttatcatctggagaatcagaggggtaatcgagtttgttaatgaagtcagaaactcaaagttaaatgagttacagcgccttttggatagccatgatctatctgatgaaataactatctgcttaaaagaagatatcgagagaatatcctgttatcgcttgacaggaattgctgatgtacccagtcaaaaaatcatcttaagactgttagtaaagaataaaggtcttatagccgcaggtttctttaaaaaattcaatgcatttttatcagttaaagatggggttcttatgtttaataaaggattctctttttggttttttaatgtcgttcatgtcttgttttcgttgcagtttatatcactttctattttgtcgttgatattgtctatctacaggcatgagcaaatccctgtttgggggcatttaatattgtatttcgttgctgtgattatgtttctgttttttatcgcttttacagcaatgataccgcgaccaggagagtgtaaattactaaataagatcttacaaatgcaacataacgacttgtctaaataa

SEQ ID NO: 227509 - DNA, 816 bp, Klebsiella pneumoniae; identical to SEQ ID NO: 6090

SEQ ID NO: 227510 - DNA, 1014 bp, Klebsiella pneumoniae; identical to SEQ ID NO: 5004

SEQ ID NO: 227511 - DNA, 225 bp, Klebsiella pneumoniae
atgagggagctaaagactcttacgaaccatgttgttgtttctggtggtggagagatctacaagagtctgatcgcccatgccgacacgctacatatctcgacaatagattccgagccagagggcaatgttttctttccggaaatccccaaagagttcaatgtggtgttcgagcaggaatttcattcaaatataaattatcgctatcaaatctggcaaaggggttaa

SEQ ID NO: 227512 - DNA, 846 bp, Klebsiella pneumoniae
atgagcaacgcagtgcccgccgagatttcggtacagctatcacaggcactcaacgtcatcgagcatcatctgggatcgacgttgctggccgtgcatttgtacggctctgcactcgacggtggcctgaagccatgcagtgatattgatttgctggttactgtgactgcacagctcgatgagactgtgcggcaggctctgttcgtagatttcctggaagtttccgcttctcccggccaaagtgaagctctccgtgccttggaagttaccatcgtcgtgtacggcgatgttgttccttggcgttatccagccagacgggaactgcaattcggggagtggcagcgcaaggacattcttgcgggcatcttcgagcccgcgacaaccgatgttgatctggctattctgctaactaaagcaaggcaacacagccttgccttggcaggttcggccgcggaagatttcttcaactcagtcccggaaagcgatctattcaaagcactggccgacaccttgaaactatggaactcacaaccggattgggcaggcgacgagcggaatgtagtgcttactttgtctcgcatttggtacagcgcagcaaccggcaagatcgcgccgaaggatgtagctgccaactgggtaatggaacgcctgcccgtccaacatcagcccgtgctgcttgaagcccagcaggcttaccttggacaagggatggattgcttggcctcacgcgctgatcagttgactgcgttcatttactttgtgaagcacgaagccgccagtctgctcggctccacgccaatgatgtctaacagttcattcaagccgacgccgcttcgcggcgcagcttaa

SEQ ID NO: 227513 - DNA, 348 bp, Klebsiella pneumoniae; identical to SEQ ID NO: 6026

SEQ ID NO: 227514 - DNA, 354 bp, Klebsiella pneumoniae
atgctcccaaatcgaatggcgcttagccgtcagactgaagatcagcttaaaaagttaaaaggatataccgggattacacccaatgttgccgcccgactggcgttttttcgctcgatagagagtgaatttcgttattcgtccgagcgtgatagtaagaaactggatggttctctggtgctggataaaattacgtggctgggagagactctgcaagctacagaactggtattgaaaatgctttatccgcaactagatcaaaaggcgttgattaaggcatgggcggctcatgttgaggatgggattgctggattaaggaattatcgaagcttaaaagatttatcaattaatatatag

SEQ ID NO: 227515 - DNA, 2001 bp, Klebsiella pneumoniae
gtgctcattaaacagctggtattacataatttccgggtatttaacggtacacatactattgatctggcacccagaaagcgtccgcatgatttgaatccacgacctattgtgctgtttggtggtttaaacggcgcagggaaaacgtctatcctatcggcgatccgcatagcgttgtatggccgactggcgtttggactagcgactcaacagcaagagtatatcgaacaactcagcgcattgattcataacggcgcgtactatattgagcagccggaagaagcatctgtagaactgacgtttacctataataaaggcggtcatgaggccgaatttaccgttacgcgaacttggaaaaaggggaagagggaccgcctttctttgcaacaggatgggcagccactcagtgagctggattacgatcagtgtcagggatttctaaatgagttaattccgcatggcattgctgatttgttctttttcgatggcgagaaaattgcagaacttgctgaggacgaatccggtaatattttacgtactgccgtacgacgcttattggggctggatctcatctctaaactgcgtaacgatttaatgatttttattaagcgtcagcaatccagccagctagcaagttctcagcaacaacagattgcagagcttgaaaaacagagtaaagaattagcctgccagacagaagcactgctagaaagcgccgattttgccaaatcgcggattgagtttctgtctaaagatataacccgttatgaaggcttgctaaatgctcaggggggcgcttttgcccagactaaagcgcaggaaaaacagaaagtcgaaacgctgctaaaagataaagaacatctggaaaaagcactgagacaagaatgcgatggctcgctaccttatgcgcttgcgcccactattttgtctcgtttgttgcaacaaattgctgatgaaacgcagattaaacaggcaaaaagctttgaaaaagagctgagccagtttttaacgcaactcagaaatgatattgcatttcgttctgcagggactggcaaaatagcagcggaagcgatttccgataatctaaaagattatatggcaacgaaaccaaaaggtgatttgctctttgatatctctgagcgtgaagcaggtatgcttcaacagtctattgagatagatagtaaaagagcatggcagcgttttgaactttatcgcacacagttatctgagattgaacaacagttagaacaagcggctgctaatattgcccgcgctcctgaagatgatcagctgatggatctctttgaaaaattacgtgacttggataggcagcgcgaagcccaattgcagaaatatcggacattgctggaagatgctaaacgcacgaaacagcagcaactggattgtgttcgccagattcaaaaagcgcatgatgccgctcgttatcagcacagctatagtagtgcgtttaagaatgctcaggaaacgataaatttactcgatcgctacagtgatgtattaacacaggctcgagtgaaaacactgtctacaaactttgagcttgcttaccgtaagttagctcgtaaagaggatttacaacttagcgcacacataaaccctcaaacgtttgatgttgaattaattgatgagaatggctcagtgattaaccgtaagttgctttctgctggtgaaaagcagatttatgcaattgctattcttgaggcgctggcgaaaacctctggccgtgatttaccagtgatcattgatacgccattgggacgtctggactctcaacatcgggataagttgattaaccactacttcccggaagccagtcatcaggttgtattgttatccactgatacggaagttgatgagcgttattttgtcgatcagttgcgtgatgatatctctcatgcttatgagattgtgtttaatgcgcatactaaatcatctacgctgaaacctggttatttctgggaattaactaaggaggctatctga

SEQ ID NO: 227516 - DNA, 1623 bp, Klebsiella pneumoniae
atgagtaaattagttcaggcctatgatttggccgaatacgaagattttattaatcaggaacagttcgctggacgacctctggccgaatatgttgctgaggtacaaagaatttattgtgcggataagcgtccgtgggtgattggttatagtgggggcaaagattcttcagcagttattacgctggtctatctggccttactgggcctacccccagaaatgcgcagtaaagatgtttttgtggtgtcatccgatacgcttgttgaaacgccggtagtcgtggatctgattaagaaaacgatgttgcagattgaggcgggggcaaagcgtaacggcttgccgatcactcaacacgcggtaacgcctaaaacgaatgaaaccttctgggtcaatttgctggggaaaggttatccggctccaacccgcagttttcgttggtgcaccgagcgtatgaaaatcaatccggtaagtgactttattaaagataaggtcagtcagtttgatgaagttattgtcgtactgggttcgcgcagtagcgaaagtgcttcgcgtgcgcaggtcatctcaaagcacaagattgatggatcacgccttgcccggcataccacattggcaaacgcgttcatctatactcccattgatacctgggatgtagaagatgtctggaagctactgcgcggcgcgttccgctatgcacccgaagatatcgacgaatgggaaagcccgtggggtggaaacaaccgtcctctgtggacgctgtatatggattcttccgcacagggggaatgccctctggtaattgatgatagtactccttcctgcggtaattcgcgttttggctgttggacctgtaccgttgtcactaaagataaagcgatggaaagtctgatcaaaaacggcgaagaatggatgtctccgttgctgaaatatcgcgatctgctggcatttaccaccgatccggtgaataaagacacgtttcgaaactataagcgccgtactggtaaggtgagctatcagtacgctaaagaaagtgatgagccgggggctgagcgtaagcatgttccaggtccttactggctaaaataccgtcagcaatggctcaaagaattgctggaaattgagcgcgatttaaatgctcaaggccataccattacgttaattaccaaaccagagctacatgcgattcgtcaagagtggttgaaagatcctaatgagccagactggtatgacacgctaccggggatttaccgcgaagtttatcagcaggatttagactgggtggtagacgatcagtcgcgctttgatgccagcgatgcagatctgttggtgcagatagcgcaggggtttgacgttgtgcctgaaatggtgatgaaactcattgagctggaagtttcaatggaaggcttaagccgtcgtcaggggatttttgataaacttggcacgatcttgaagcaggactggggcactctcgaagaaattgagcaacaacaagtcaatctgcaaaatcgagttgaacgggatattcatcaggaagagcttacaaagctggaagctgaacttcaggttttacagcgcagaattgttgatgccagtgaatcctcgttactgattggggaggataaataa

SEQ ID NO: 227517 - DNA, 1086 bp, Klebsiella pneumoniae
atggctaatattgatgcggattactgctactcgtttcctgctatacgtggcattcaggctggccgacctttctatatcgccacgtgcccgatgcgtatcatcccgaaaattttcagttttgatgaaaatgacgtaccgcctgagctacgtgcacaacggactctaaataaatcgcgtatccctgaaatggtccgttatcttctggaaaatcctaaagattatgtgttttcagccctgacggcttccattgcagtagatgtgcagtttgaagagtttcaggggtccaataacttgggtacattatgtgtgccgatggatgcgcaaattttgatcaatgatggtcagcatcgccgtaaagcgatagaagatgctttagacgcacgtcctgagctgggacaggataatattccggtattgttttttgttgatgaaggtttaaaacgcagccaacagatgttcgcggatctaaataaatacgcaattcggcccagtccatctctggcgtcactttatgatcatcgcgatgctagttcgaatttggcacgttatctggcgatgtctatcgagccattcgttggaatgactgaattagaaaagtccggtataagccagcggtccaataagctttttactttgagcagtatcaagcaggctacccgttctttattgggcaaggatccaaaagaaaacaattttgaacaatgcacccaaattgctacccaatattggttggctatttacaacgtgatgccggattggcagttagcgatcaaaaaagaggtttcaccggttcagttgcgacaagattatattcacgctcatggtcttggattacaggctcttgggctactaggatataccctcctaacggattatcctgagcaatggtctgagaaaatctctgcacttaagacatttaactggcgcaggaacaatccggatctcattaaacgtgcaatgcagcacggcaaactgagtaaaaccagtgccgcgatccagttaacctgcaatgcgctaaaaactgcgctctctattcccctcactcctgaagaacaggagcttgaagctcagatggttgtctcatga

SEQ ID NO: 227518 - DNA, 228 bp, Klebsiella pneumoniae; identical to SEQ ID NO: 6111

SEQ ID NO: 227519 - DNA, 783 bp, Klebsiella pneumoniae
gtgtctcaactctcccagcttcgaagccccgccgccgtgcaggctgccatcgatgagttcgtgcaactgggccgcacgaaattcctggcgcgccacggctacggcaagtcccgcgacttcctggtacgtgatccgaagaccggcaccgattgcgattccaaggccatcgccggtgtggccttcggcaagcaatttcccgagcagggcccgctcactgctgacagcttctccggtggcgaggcgaccgtcgttccggcgctgacgcggctcgggtttcgcatcattcgcatcggcgaagactggtccgaagaagaggtcctggccacggtcgaagactatttcgacatgctgcgtgccgaggcggctggggagccgtacaacaagtccgagcacaaccaggcactgcgccaactgctgaacggtcgcagcaagtcttcagtcgagctcaagcaccagaacattagcgccgtactcgatgccctgggcctgccctatatcaacggctacaagccacgcggcaacagccaactgctgctgcgtaaatccgtacacgcctacgttctggaacatcagcagacggtcggcgctcttgtcgatgccctggaggaggtaaaacttccgggtgacaaaacctaccgagcggctttggtagaaccacccgcccgtgaagtgcttgtgcgtaccccggcatctctacggcaacgcctaccgcgaaagttcgattatgccgctcgcgatgaagccaaccgcaagctgggccgggcagggcactgttgcaaatag

SEQ ID NO: 227520 - DNA, 1752 bp, Klebsiella pneumoniae
atgcccgttgactttctgaccactgagcagactgaaagctatggcagattcaccggtgaaccggatgagcttcagctggcacgatattttcaccttgatgaagcagacaaggaatttatcggaaaaagcagaggtgatcacaaccgtctgggcattgccctgcaaattggatgtgtccgttttctgggcaccttcctcaccgatatgaatcatattccttccggcgtccggcattttaccgccagacagctcgggattcgtgatatcaccgttcttgcagaatacggtcagagggaaaatacccgccgtgagcatgcagcgctgatacgtcagcactatcagtatcgtgaatttgcctggccctggacatttcgccttacccgtcttttatatacccggagctggataagcaacgaacgtcctggcctgcttttcgatctggcgacagggtggcttatgcaacatcgtattattctccccggagccactacgctgacccggttgatttcagaggtaagggaaaaggcgacgttgcgcctgtggaacaaactggcactgataccgtcagccgaacagcgttcacagctggagatgctgctggggccaactgattgcagccgcctgtctttactggaatcactgaaaaagggccctgtgaccatcagtggtccggcgtttaatgaagcaattgaacgctggaaaactctgaacgattttggcctgcatgctgaaaacctgagtacactcccggctgtgcgcctgaaaaatctcgcacgttatgctggtatgacttcggtgttcaatattgccaggatgtcaccgcagaaaaggatggcggttctggttgcctttgtccttgcatgggaaacgctggcgctggatgatgcattggacgttctggacgccatgctggccgttatcatccgtgacgccagaaagattgggcagaaaaaacggctccgctcgctgaaggatctggataaatctgcattggcgctcgccagcgcatgttcgtacctgctgaaagaagaaacaccggacgaatcgattcgtgctgaggtgttcagctacatcccaaggcaaaagctggctgaaatcatcacgcttgtccgtgaaattgcccggccctcagacgataattttcatgaagaaatggtggagcagtacgggcgcgttcgtcgtttcctgccccatctgctgaataccgttaaattttcatccgcacctgccggggttaccactctgaatgcctgtgactacctcagccgggagttcagctcacggcggcagttttttgacgacgcaccaacggaaattatcagtcggtcatggaaacggctggtgattaacaaggaaaaacatatcacccgcaggggatacacgctctgctttctcagtaaactgcaggatagtctgaggcggagggatgtctacgttaccggcagtaaccggtggggagatcctcgtgcaagattactacagggtgctgactggcaggcaaaccggattaaggtttatcgttctttggggcacccgacagacccgcaggaagcaataaaatctctgggtcatcagcttgatagtcgttacagacaggttgctgcacgtctttgcgaaaatgaggctgtcgaactcgatgtttctggcccgaagccccggttgacaatttctcccctcgccagtcttgatgagccggacagtctgaaacgactgagcaaaatgatcggcactgttgcaaatagtcggtggtga

SEQ ID NO: 227521 - DNA, 1200 bp, Klebsiella pneumoniae
gtgattactaacccggaaaccaccgccgcctcgccggatatggccattccgttcggcctcaagttcagcggctacgcccgctatggcgcccacttccagaccggcgaccagaaatatgtcggcgtcgacggctcctataacggcgcctcggcgatcggccgtctgggcaacgaaagcaacggcggcgaattccagatcagcaaggccttcaaaagcgcgcagggggctatctgggatcttaacgtgatgttcgaccactggagcgacgaagttaacctgaagaaggcctacgtcggggtcaccaacgtgctggaatccaaccccaacgcctatatctgggccggccgcgacttccaccagcgtccgcaacaggggatcaacgactacttctggatgaaccacgacggccagggcgccggggtgaagaactttgatatcggcggcgtgcagtttgacgtggcggcggtctcgcaggtgaaatcctgcagcccggaagtgatggccgacgagaccaacccgtcgcgcatcacctgtaccggcagctccgacaccggcgacaacggccactacgcgctgaccaccaaaacccacaacatcaaggccgggccgatcgacgtcgaggtgtacgccaactacggctttgactcaaaggcggtggacagcgacgcgcgtctcgaagcctggcagggcggcctggtgctgagccacaccaacgacagcggggtgaacaaggtgatcctgcgctattccgacaactcggataacagcgtctacaacaaaaccgacgacctgaccacggtctacgccagcttcgagggcagccataagttcacccagcaggcgcagatcgaatacctgctggccttccacgattacgacaacggcaaggacaacaccgacaaccgtaaaaactacggcgccatcgtccggccgatgtatttctggaacgacgtgcactccacctggctggaagcgggctaccagcgcgtggattacgaccagggcggggataaccacggctggaagctgacgctgtcgcagaacatcgccatcggcatggggccggagttccgtccgatgctgcgcttctacgtgaccggcggccaggtggacaacgagcacaccgcgaaggtaaacggcacccaggaccagcagctggattcgctgaacgtcggcgggatgtttgaggcgtggttctga

SEQ ID NO: 227522 - DNA, 1152 bp, Klebsiella pneumoniae
atgcgtatcttaggtcatggagagtttatatatgacggtcctaaaactaataaggctgcttgcataagattcaaaaaccagacaaaggaacatgggatatccagtagctcctttgaaattaatgggcgaatgcgtattagaaaaggaaggtttgaatggaaatatgggttatatcttgaaaatacgcgagataccattatccaaggtatccaaatagatggtttatcatccgagctacatcgtagtaggcaaattggtatttattccgtgtcaaatgaaagtccatctgtttcatggacaatatgtaatgtacagcttaatgatctatatattggtttctattttgaatgtaatcatataccgggtattgaaggtttaaaaataataaattgtgatatagtaggtgttgctacaggtataagctatgttaataatacaaaatattttccgccacaaatagaaattataggctgtcatatcaatggttatgatgatttaatatccattaacaaatctcttagtatccatgttgtatcctgtttgttataccgtagtgggaataacggggggtttataaaatttactggtgcgcaagatgttacgattaactccgtaagttttgcgattatagacgttgaaactgatgttccaggaattgttcttgatggtcgcttaagtacaagcgcattcgtgcgtgtagataactgtcattattgggcctatcataaaaaatccccgtttatagcacttttaggcgatatacaaaccatttcgttaggattatctacgaaagattcttacggaaagtggattgatacagaaaatctatcatcaccaaaaagtaatatttcaatagacacagagacaatagccttaacgaaatatgattacggtgatttgattggatgtgatttggaatgtaaggaaggtatattgaatttgagtgatgtagttattgggccaacttttatttcatctgacgtgcctattaaaaaacttgtttcaggaaaaattaataaacgatatctccttataatgaaggataaagttagtttttctgatgacatcaatatcataaatattgaagagttccctaataagaaatctattattgaaatcgtatgtgtcggtgacgattattattgtatttga

SEQ ID NO: 227523 - DNA, 933 bp, Klebsiella pneumoniae
atgttaaccggtactaacattactgcatcctctgtcttagaggaatataagaagactgtctttaatgaaacaactagcaaatcaaaaataaaccaaacagtttccttcattagagattgcgttgaacgcctagagtatatttccagtggagagtggcccttcgagaatgatagtgacaataaatggcataaaagtaagctcgatcttcttattaataaactaaaacatttacatgcaatgccattattattagccgcaagcttctcatctgagaataactttaaaaatattgtcaatgaaacaagtaagttttttataagatgtaaaatgattagcgacttacatgcaagtattttctctaaattatatgcagtattagcattaacaatacatacagagcgtgataggtttgatattggcaaattgcataatgcctttaatgctatactacaagataaagatcctgaagatgtaaaatttagcactaacgttaggggtttgctttaccaaagaaaaggggacaacaaaccaataaaatgcttattaatgactattcaggaaaattgggaatggttaaatcaaccttgtcaaggtaatagtctaaaccgattaaaaagagaagaccaatctgttatcttcgattttaatagtatgacccttgagcatatatatccatactcagcgcaccaagaggataaagatgtagatatggaaaaattaaaaaataacattgggaatattgttctcttagatccatctagaaataacaagaatgataacaagcctttcaaagataaaaaaagcacatttaataatacaggaattggtgttcactcatggattcatgaacaaacggattggacagaaaattccatcaaaaaacttactgatatatatgttgatgctgcaataaaagtattttccttctcttaa

SEQ ID NO: 227524 - DNA, 201 bp, Klebsiella pneumoniae
atggggcatgttttactaggaacgctgcaattaatattgctaaaggaaagtttatcacaggtttggatgatgatgatgaatttacatctgatagaattagtatttttcttgatgaatggaatgatgaattttcctttatttgtgctaactttcaagaaaaattcagtgacggaagggcaaaaaattattttcaaccattga

SEQ ID NO: 227525 - DNA, 525 bp, Klebsiella pneumoniae
atggacagcgatctgctacaggggcgcattgacggcgacaaactgcgccagctcgctgaccatctgctggatttcagccgtttcgacgaggcctttatctgcggtccggcggcgatgatggacgaggcggaagcgacgttacgtgaacttggcgtagcggagaaatcgattcatctcgaacgctttaataccccaggcggcaatgtgaagcgggtcgctggagtgcaggcggaagggcgcacggtgaccatccgccaggacgggcgcgatcggcttatcgccctcagcgccgaagacgacagcatcctggatgccgcattgcgtcagggcgccgatctgccgttcgcctgtaagggcggggtatgcgccacctgtaaatgcaaagtgctacgcggtgaagtggcgatggccgccaattacagcctggaagcggatgagctggcggcgggctacgtgctgagctgccagtcgctgccgaccagcggcgatgtagtggtcgactttgacgcgcgggggatggcatga

SEQ ID NO: 227526 - DNA, 291 bp, Klebsiella pneumoniae
gtggtgctcattaaaaatctgaaagaagagatgttaaggtttgaagatgaagccaaaactgactggctgtttcctaatccgctgccatttagtcttgaatcagtaatgacgcagcgatggatgcgcgaacgctttggatttcccataggttatggcgaacgcaaaacgatagagagctatagtcgtcgtattagcgaggtatacccactgttgccacctaatcagaaaatgtctgttttatttgcttataattctgattattttgttgttagtgtattttttattgtatag

SEQ ID NO: 227527 - DNA, 186 bp, Klebsiella pneumoniae
atgatgcatttgttaattatctcagcagctgtaattttcggctttctgacctttattgcggttatgtcatttatgacctgggaaaactacttccggctgtttggtcgcaatcgcatcattagagtgattattgttcttttgattttctcggcggcgaattacctcatttttggcggtgcagcatga

SEQ ID NO: 227528 - DNA, 345 bp, Klebsiella pneumoniae
atgagtaaatcactgaacgcacgttgcatccgccgctgggaagttgaatttaaaccattctgcgactcaaagcgcaatccgtactggcgcaagcgtgaccttcgtgggtatatccgcgaagcggcgcttaccaccgcctacagcatggtcgagagcatggctgaacgtaacgccaaggttgactatgacggtgagccgaacggctggactccagagttttcggcctggtaccgggagcgccatgaacagtacctgaaagaagcgcgggactatctggacgaagacgctaccaacgacgaaatcgacgaagagatcgagaacgaactggaggcctggaatgactga

SEQ ID NO: 227529 - DNA, 135 bp, Klebsiella pneumoniae
atgaattttgaacctgagaattacagcaaatacaccctgcgtcggttcgccgccctgttagatgtgatctgctgggtgctgattgccgtagtaaccgttggtatctgcatgtttattgaatggtgggcagcatga

SEQ ID NO: 227530 - DNA, 786 bp, Klebsiella pneumoniae
atggcaaaagactcaaaggttgtatacggcgccagcggcaaaacgaatgttttaacgttcgaacctgaaagcctgcatttggttaccgataaaactcacccgctttacgatgaacgggtccaccttcctatcgacgaagggatggttctgaacattgcggagctgggtgtactggagccgattattgtctggaaagaccctgaaacagggctcacctgcgtagttgttggccgtcagcgcgttaaacataccctggaggcaaataaactccgtctgaaagaaggcaaagacccactgcttgttcctggggtcgttaagcgtggatcagcaaatcagatggctaaatacatggtaagcgaaaacgaaattcgccgacccgatacgccgcttggccgggctaaaaaaatgtcagacgcgctcgaccgtgggctcgatgaggacgacattgcggtgttgtttggctgcagcgttcagaccgttcgagcaacgctttccctcctcgatgctactcaggccgtcagggaagcggtggaggctggcacagtcaccgttacccaggcgcgtcagctggcatcgcttaaacctgaagagcagcgggagaaggtctctgaaatcgaagcggcaactgctggcacaaccggccatgaaaaagcccggcgtcagcgtcagatcctcggcgaggcaaagccgcgcctgaaaacccgcaaagaaatcatcaaagccctggaatcagccgagggtgagtatgcaagcgcacttcgttgggtacttggggaggcgcaatga

SEQ ID NO: 227531 - DNA, 2154 bp, Klebsiella pneumoniae
atggccgaacttaacccgcctttgggaacgacgacgcctgaaatattcctggataacgtcaagcgcgctgacgaactggttaacggtccggccggaacggttgacgaccgcggcggtgaaccgctcgatacctggcgccagatgatggcgaaaaacgatgaggtcagacagaaccttatcccgctcagtaagcagtacgcgacgctggcggcggcgcaggcggacatcgcgaatattccagaaagcagcagcacctatgtgcgtagcccggacagcagcgcgctggctgacgagtacatgaatgtggctgggacgctgacagcaaccgggcggaaaatgccttctcaagcggccatccaggcagttcttgactatatctcatctctcattgctactgatgatgctgattctcctttactgacacttaatgatgaggcggggtttcgtctggcggcattcggcctgaatgcaattcagagcaatgcgatgacggctgagtatgatgagtttattgatggttttgtattccgggatagcgtcggattcgttattcagcaaatagggactcctctgctcagctctgttgacagtgttcagcctgtcgttgagcagcagcgattggtgactgaggcattcagtgctgaatctgacgcggatatttctggttttgtatttcgcgacagtgtgggatttgtcctgatgaatctcaatggtgagcaaagcgatcagaataacgatggggtagatgacatttcacgcagaaatgcagcaaatcttgccgctgctgctgccgcacgagacgaaattaatacgcgtattgctcgcccggtttacgattacaatattctgatcacagacggccagtcgctgagtaacgggactgagggatgggcagcactgagcaaggacattcgcgctactctgaacattaatatgctcggtgactccgtccggccaaaaaatgagaatggttcaacatttacgccgttgaacggagctgaaatcagatcagcccgtgcggtggtgcaggatttaatcgcccctcctgacggcggaaaccttatgaccgatgaggctgtggccgcactgcctcgtggggctaacaatttcggtgaaaccgtcgatatcggcgcgatgtggatgtggcgggaaatgcagttgcagttccgggggctggcaacggatgagcgcaaaattgtggctgtcaactgcggtgttggcgggcagattattgaacgtctgtctaaggggcactcctggggattctacaaccggatcatttcagccgttacccagattaaagctattgctgacgccgaagggaaaacctgcggcgtggtgggttttttatatcttggcaatgaatataactatgacagcacaaaaggaggggcgacagaccgcgcagaatacagagcactcctgagaaagctcattgatgatgtcattaccgatactaccgctatcaccgggcagacagagctccccctgactgtgctgtatcagaccagcggcagctggacgcgtgacagcacgaatatgagcattggcgaggctcagctcgatatctgtgcagcagatgcaaacgtaatgatggcatcaccggcgtatgctgtcaccgacaagggtggccatcttgacgcgaacggctaccgctggctgggaatgcagttcggaaaagtgctccatcgtgcaattgatcgtcgccagaactggcgtccactgcaacccctgtcagtcacgctgagcggaacattcctgcgtgcggatttcctggtgtggagcccgccgcttcagtttcgatcgtgctacgtgggttcatctccgacgacgtatgccgcaaaaggattcagagtcactgacgacgccggggacgttccggtgacgcgggtcgacattgtagccgataccgtagtcgatattacactggggcgtgaaacgaccggcgatgtttatctatggtacgccagccagaccggaagtaacggtaacggaaatctgtttgacagcgacacaacggtcgctgttgcgaattacgaatttcatcaagggacggggcaatatccggaatcaaatattccagagctggtaaaccgtccatacccactgaataacccctgtgtggcatttcgtcgccaggcaatcgctatttaa

SEQ ID NO: 227532 - DNA, 1017 bp, Klebsiella pneumoniae
gtgccaccaataaagcagaccgtatccgacgataagaataccgaaattccatcatgggtttatgagaaaggtttaattttcgattatgttgcctacctgtctgatattcttggcggctacgtttcaggctccttcaataacagtgaagccgtgatttctgacgattcgttaaaaggttcatcaagggcaagcaactacatcaatcgaatcggtgatattctggtttattatggtacgaaagaggatatcgccatcctgaaaacactggtcacttcgctggatacgatgagtgatgaagtggttgtttctggttatgtttttgaggttcagacctcgcagtctgacggctccggcattcttttagcggctaaaattctgtctgataaattcaatatttcagttggtgctgccggactggataattttatcaatattcgaaccggctccattgatgccattttcaatctgctgaaaaccgacagtcgttttactgttgtcagtgcgccacgactgcgggtaaaaaataatgcctcagcgtctttttcagtcggctctgatgtgccagtactgggcagtgttacggtgaataacaatacgacaacgcaatccgttgaatatcgttccagcggtgttttgtttaacgtgacgccatcaatcaaaagtcggacaatggatctcaagattcagcagcagctttccaactttgtgaccactgaaaccggcgtcaataactcgccaacccttatcaagcgtgatgtaacaaccgaagtcagccttgcagatggtgatattattttacttggtggccttgctgaacagaaagacagtaaggccagttccggctggagcttcttcggttcccgtaccagtgaaagcaacaagactgatattatggtgatgcttcaggtcagaaaggttgaccggagcagggcgacgccccgcagcgccgcgaggagcggtgaactgttccgggacaacctgaactcgtacagtttccattttcagcgttatggctga

SEQ ID NO: 227533 - DNA, 954 bp, Klebsiella pneumoniae
atgatgttatttcacaccggaaaactgcgtttccttgctgtcgccacgaccatgctggcatccatgagttttatttctgccgccagcgctgccggtccgacttatgcgctggtacaaatcaaccaacaggcgctgttctttaatctgatgaataaaggcgcacaagatgcggccaaagccagtggcaaggatttagttatttttaactctaacgataatcccgtggcgcaaaacgacgcgatagaaaactatattcagcaaggcgttaaaggcattctggttgctgctatcgacgttaacgggatcatgccagcggttaaagaagccgccgccgcaaacattccggtgattgcgattgatgccgtattaccggccgggccacaggcagctcaggtcggcgttgataatattgaaggcggcagaattatcggtcaatacttcgtggactacgtgcagaaagagatgggcggccaggcgcgactgggtatagtcggcgcgctgaattcggccattcagaaccagcggcagaaagggttcgaagagacgctgaaaagcaatccgaagattactatcgctaacgtggtcgacgggcagaatgtgcaggataaagcgatgaccgcggcggaaaacctgatcaccggtaatccggatctgacagcgatttatgccaccggcgaacccgcgctgctcggcgctatcgccgccgtagaaaaccaggggcggcagaaggatattaaagtctttggctgggatctgacggcgaaggcgatttccggtattgacggcggctacgtcaccgccgtactgcagcaggacccggaaaagatgggcgccgaagccctgaatgcgctgaacagcatcacgtcgggtaaaaccgtgccgaaaaccattctggttccggcgacggtggtaaccaaagcgaacgtcgattcataccgtccgctgtttaagtag

SEQ ID NO: 227534 - DNA, 849 bp, Klebsiella pneumoniae
atgaaacttgtagcccagggctcaaccctcgatctctctcacccccacgtgatgggtattctaaatgtgacgcctgactccttctccgatggcggcgcccataattcgctgattgaggcggtgaagcatgccaatctgatgatcaacgccggcgcgaccatcattgatatcggcggtgaatcgacgcggccaggggcggctgaggttagtgtggaagaggagcttgcgcgggtgataccggtggttgaagccattgcccagcgctttgaggtatggatctcagtggatacctccaaggcggaggttattcgccaatcggccagggccggggcgcatatcatcaacgatattcgttcgctgaccgagcccggcgcgctgcaggccgccgcggaaactggactgccggtgtgtctgatgcatatgcagggacaaccaaaaaccatgcaggaggcgccgaagtatgaggacgtcttcgccgatgttgagcgtttttttaatgagcacattgtgcgctgcgaacaggcggggatcgcaaaagaaaaattgctgctcgacccgggattcggtttcggtaaaaatctctcccacaattaccaactgttggccaggcttggggagtttcatcactttggtctgccgctgctggtcggtatgtcacgtaagtcgatggtaggtcagttgctgaacgtcgggccgtcggagcggctgaacggcagcctggcgtgtgctgtcattgcagcaatgcagggcgcgcagattatccgcgtccatgatgtcaaagaaacggtagaagcgctgcgcgtggtggaagccaccctcgccgctaagggaaaaaaacgttatgagtaa

SEQ ID NO: 227535 - DNA, 330 bp, Klebsiella pneumoniae
atgagtaaaaagatagccgtcctcattaccgacgactttgaagattctgaatttacctctcccgccgaagcctttaagctcgccgggcatcaggtcatcacgatcgaaaagcaggctggcaaaacggtgaagggtaagcagggagaagccgaggtcgccatcgacagagccatcgatgacgtcacaccgggtgaatttgatgccttattgctgcccgggggctactctccgaccagctgcgtggtgatgaacgcttcgtcacctttacccgcgattttgtcaacggcggtaagccggtgtttgccatctgccacggcccgcagctgctga

SEQ ID NO: 227536 - DNA, 834 bp, Klebsiella pneumoniae
atgaatagacaaattgaactttctgaattaatcagtaaatcatttattgaatcgaccaataagatgagtcaagacgataaacttgcgttttatcaggctatcttagatggaaataaaaatatagagcgtgaaattttaaaaaaatataattatacagtggtgacaccagttgaaaacatcatgagcgatgaagatgctgaggcattagcaaattctcttttgaaggatgaaaaagggttgttcaatgaaatcaataatctttttgtatctgccagtaaaaaatattggtcaaatgcagaaaggttgagcgacttacctttagaacagcatgacaaaatacttaaccatgcaagagagcttcaaaattctttcaattctaaagagcatgttaactctgtattgcacgggatttatggagaaaatgcggcgacgattgttaaggccgcaattattgctgaccttattggttgtcttgatttaagaaatgatctgatggttgtatttggctccatggttgagagtgctcacaatagcaaagctatggatatttttaagaagaaaaaaattataagcgaagacagaagttcagccaagaaaggtaaaacaaacagacaccatgcaacagcaataaaaatcgctgccgatacgtgggctaagtatccaaatgcaagccttgcgggactttcagaggacatatcagcgcatttgagaaaagcgtggaaagacgtgccagtagccggaacggtagagaagtggttaaaagattctgggttaaatcctgccgttaagccgaagaacagaaattatgagttaatcatattagaaggggaataa

SEQ ID NO: 227537 - DNA, 186 bp, Klebsiella pneumoniae
atggcaacaggttcagtaaacaacaaatcaaaacaagtaaatgttcgagttccgcatgaagtgttagaagaaattgagtctgtaaaaaataatggcgagagtacggctggttttcttatcaccgcagccataggcgagatcaaacgccgccagcgtaaaaaggccaaggaagccgacaaggagtga

SEQ ID NO: 227538 - DNA, 228 bp, Klebsiella pneumoniae
atggataacttttacacctaccgcagcaaaaaagatttgctgttactggcgcaagaggttgccgcgcttctgtcatgtgctgcttaccttgcgactatcaggggagaggaagagcgtctccatgtaatgagtttaactggcttggctcaacgactttctgacgaactggcaaactcactggatatttctactttttcagaccctgaatcgcaggaggcaaaatcatga

SEQ ID NO: 227539 - DNA, 237 bp, Klebsiella pneumoniae; identical to SEQ ID NO: 28740

SEQ ID NO: 227540 - DNA, 774 bp, Klebsiella pneumoniae
atgcagggatataaagagtttttagaatccttacaaaaaatgactgacgttcggttgaatatcgctatattgctgacttgcttagccgctatcatcttatcttcaccagaccatttcattttagacccagttcccaaattgattccacaaagtttaatcctaataacttcaattcgcttggtgttttctgtcattaatactatacacactatgatatccaagaaaatagagaaacaaaaattagaagcacaagctctaattgaaaaacaaaacaaagagcgtgaaaaagaattgctaaaagataaaattagttcttccattgatgaactggatgtctttcaactttacataataaaaaaactaattggcaaaaataatgcttcacatgctaaaggtgctacgttgttttctttatgcaatttaaatatcacctatgttgttgcaacaggagaacgctcacagagtgtggcgttaacaagtatcgcaaaagatatacttgagaaaaaattcaataatgacatttctcaattggaaaaaaacgctgcaaccagagcgtttaatgccatggctgaaaaggaaatatcttcatttaaattacttttagaaaaagatgtcacaaaaacaacatggacagatcgcagtggaagattacattactcacctagcgaatatatttttagaaatttcagtgattccatcatctttgaacagccgcaaaaaggctatgaatatacattaaactctaatttaagaagcatacttgaaaagtattga

SEQ ID NO: 227541 - DNA, 1662 bp, Klebsiella pneumoniae
ttgaccgtctgggatgagtacgcaaacgcgatcaaaacgggcgaaattccggcctgtaagcgcgtaaaacaggccgtggaaaggtacttttcagacctgagtgacccccgttatgagttcgatacggcgaccgtagagcggtttattgcgttctcccggctctgtcctcacgtcaaaggaccgctacgcggccagcctattgaactggagccgtggcaacaatttgcctttgctaacctgctgggatttaaagtcagggaatcaggccgccggaagtacagcagcgcctttattgaagtgccgcgcaagaatgccaaatctaccgtagccgccatgctggctaactggtttctggtaatggagaagggccagcaggatatctacacggcggcggtgagccgggatcaggcccgaatcgtgttcgacgatgcccgccagatgtgcctgctgtcaaaaccgctaaaaaagcgcgtcaatattcaggcgcacaaggtcatttatccaaagagcaacagcctgttgaagccgctggcggcaaaagcggccaccattgaggggactaaccccagcctggcgattgtcgatgaataccaccttcaccccgataacggcgtttattccgcgcttgagctggggatgggcgcacgaccggaggcgattttgttcgccatcacgaccgccggaagtaacgttgtctccgcctgcaaacagcattatgactactgctgccagattctggccggggaggagagtaacgattcgctgtttgtcctgatctacgagctggacgacgaaagcgaggttgagcagcctgaaatgtggatcaaggctaaccctaacctgcatgtgtccgttgacgcggcgaaactggagtccaccatccagaaagcgcggggcataccgtcgcagtgggtggaaatgctgaccaaacgtttcaatatctggtgtcagggctccactccgtggatgggtgccggtgcatgggacgcctgtgcgctcgactataccgaagaagatcttgcagggatggagtgctacgcaggatttgacctgtcctcaaccagcgatatcaccagcgtgagctacgctttcccgttcgacagggagatccgcctgctgacccgccattatctgccggaaacgcagttgcttaacgtcgccaacaaaaaccgcgctatctaccgccagtgggtgaaagcggggtggatacgcaccacacccggcgactgtatcgattatgaccgcattcgtgacgatatcctgcgcgatgctgaaatcttcaatatcaggctggtgggcttcgatacctggaacgccacccatctgcgcactcagcttcagggagcaggtctcgatgtggagccgtttcctcaaacctatctcaagttcagcccggtagcgaaatcctttgaggtttttgttaaccgcaaggtggtgcgccatcgtggcgatccggttctggcctgggcaattggtaacgtggtgatggagtccgacgccaacgccaatatcaagcccaacaaaaagaaatcctctaacaagatagacccggctgtatctgcgctgatggcgttcggtacctttcaggctgagcatgaggattttgttttcgatatgagcgacagccataaacagcggcttgctgagttcagtggcatctaa

SEQ ID NO: 227542 - DNA, 1452 bp, Klebsiella pneumoniae
atggtagatatacgaagtaaattaaaagctaaatatgctgcaggaaataaatatgctaattttggtgcggctctgagaagtatagatattaaaggttttagaggcatcgagaatatcactctgagcttggattttccagtgacggcaatttctggtttaaatggtgcaggtaaaagcacccttggacaattagcaatttgcgcatataaaaaacccgtaacggctcaagattacaagcgactttatataaaagattttttccctgtatcaaaagcagatcctaatccgtttaaaatcgattcaagtgtcatttataaatatgaaacaaatgaccctagtaggactcaagatataaccgtttcacgtataaaatcttcttggtctggatataagcgtcaaccggagaggcattgttactatatcggtttcacagtatacattccaaaggttgagcgtcgtgatctcagtgtatatggtggaagagatttcgatttaacagtgagacggaatgttgaccaagagataatatctaggatggctaaaattatcggtcatccatatgatgatgttgcttttcaaggaatatcacataggaaacgagagacagaaatagggatggttgagagacttggatattcatattcagaaaataacatgggctttggagaaggacgagtactttatacggtagacatgttagaaacatctccggaacagagcttatttgttttagaagagccagaaacgtctcttcatgaaagtgcccaatacgaatttactaagtatcttatggaggtttgtgagagaagaaaacaccaaattattctttctactcattctagcgttattttaaatgcattgcctccagaggctcgtaaattattgattcgcgatgagactggggtagatataaaagacggcatttcaacgacgcacataagatcaatactgtcagacggtcattttaaggggttgcatgtttgcgttgaggatcattttgctaaagtgctacttagccaagtaataaggcttaaacgacgagacatccttaaatccattcagattactgatgttggtgataaaactgccgtaagaaaggctgtagagattttgagtaaatctggattaaatgctattgcagttagggatgctgatgtgggtgaggctaaaaaagagaatttattttcttttcctggcaatcgtcctccagaaattgaggtttaccaaaatgctgctgttaaagaatttttacatcaagaatatgggattgattttgattggctgatacaaagaaaaggcgttgaagatcatcacctttataccaaaacaatttccgaagaggtggaatgcgaggaggaagtggtgaggatactagcgattaagaagtacatagatgtccttggggagcagtttgataacctagttgatcaaattgtcagaaaaatagtatag

SEQ ID NO: 227543 - DNA, 216 bp, Klebsiella pneumoniae
atgaatctgcttttctgtaccagcgcaccgccgatacaggcgaaaattttaccaggcccgcagttagccgcttttttactgcgtaagcgcaaggaaaataaacgtgatttgctgcacagtgtaaatactaatgagaaccactatcaattcgatgtcgttttgatattattgtgggcagattttgtgattatcgtcgtggagatagagcgtgggtaa

SEQ ID NO: 227544 - DNA, 804 bp, Klebsiella pneumoniae
gtggagggtgaggagggcgaatgctggtttgttcatttccaggacttacacctctatggccgcgtggttcacctccagccgatgtcctggggtaacgatggctggccgcgtatcggtgagcagattggcaactgcggcgtcggacagccggttttacgttggcagcgtcctaaagggttaacgccttcaccggcattggcgccgcaaaccagcgactattttgcgcaaggccaaccgggaatacagtggcagtggcaggctaaccccagccctgagtggctgctgccggcgaaaggcgaacttcgattacgctgcgtcccattatccgaagtcgatggacagagagcgttatactgggcgccgcagctgttgctgcagaaattcccggcgctaacttttagcgcgaaaacaagcgtaacgttatatgctgctcaggacggtgatgccggaggcctgatcgtatacggcgaacgctacgccgctttgctggtggagtttgggcaagggggttaccggctcgtgtggcgacacggttggatgagcgatgcgggcgtggtgcgcgaaactcgtcaggttcttgctgagcttaagtgcggcaagtgtcagctgcaggtggccgtaggcgaaggcggcctgtgtcaattttcctggcgagccgaggaggagtggcggaaggttcctctttgttttgctgccgggaagggaaaatgggtcggcgcgaaatttggtctgctggctgcttcaatggttggcctacaaagcgagggctactccgctttgcaggactttgaggtcatactttaa

SEQ ID NO: 227545 - DNA, 2034 bp, Klebsiella pneumoniae
atgatgaacatgaatcccacacagtgtaatgagctgagtgcggagcacgatgaacgcacgaagtggcataacgacgacctgcgtgatgcgcaacgtttagacgatgcctgggcctggctgtgtgagtcgcgcaaaacggcgccagcgaatgcggatatctggcatttgcgacagcgctggcctgcctgccgggaagcgtttctcagaaaactgcagtcgggagagcaccacctgtcccccatgttggtggtggggacacgccgtcaggtgatgtggtccgcggaggatgcgctggcccttaagtgggtggcgctgtccatcaccccatccatcccggtacatgagaagtgtgagcatgtgaaggggcatggcggtggtagatcgtccgtacgtcggatctcgcagagcctgaccgaaaacggttaccgctgggtttgccgcaccgacattaaggggtattacggggctatcaataaagagactttgatgttgcagctgagagagcatattacgcgcccggcgtatctgactattttaactcagtatattcactacagcgtggaagagggcggtgagttttacacgcccgaaaagggtatcgcgcgtggttgcgcgttaagtccgctcatgggggcgttgcatctcagggctgtggataattattttgctcatcaacataaaatctattatggacgttatatggacgattttgttattttaacttacagccgctggcagttacgtaagcaggtgaagcaactcaataaatatcttgcgtcattagggtttgagaaacacccggacaagacgtttattggcaaagtgagccggggttttgactggctgggcgcgtggctcacggataagggtgtggtcggcattgcccctcgcgcactgaccaaccaccgggagaaggtccgtcggctttatgagcagacacgtcactggtctaaaacgaaacaagccaggcgtgtgtcggattaccggaatcggtggaaaatttgggcagtgttaatggcctccccggttgcgcacgcggcctccctcgaccccggggaaaccctgcggacgtccgggacctggagctacaccaagatgggctcaggtgcggtcgcgggaaccggttcggatgccgccggctacgggttcgtgatctcgccaggcgggtcatccgcccactcgctctgcacccttgccaccacctttcccatgggacaaacgaccgatgggtataccggggtccagatcgcgccggacgtagtgctaggccttactggcactgcaaccggtcccaacgacaccagtacgtcgatacagcggctagccacgtggtcggaaactggcgcctacgctcccacgtatcccaactacagcgggtacacttggtgcggtcgacaagcgcgcgctgatgagattaaatcgccgtcgactgctacgttctccgggtcctggttcatccacgcggggcctgcggcacgaccgggcacgtattcgtattccggcctcctcttgtccaggctaggggcaagtacctggcctctgcctgccaaaaccgtcgtagtgcccgcaggctctataaccgtccggccgcccaccagctgcacggtcggcctcgacgcgccaactgtcaagttcggaactgtggcagacactgacgtgagtaacagctccctatccgtgcaacactctcgactaaccacgaactgtagctccgtccacgacggagggacgggcactggccgtgtcacgacctcactgtctttgctatcccagtccggggggagtcaagcgctcccgctccaatcgtcagaaaacttacaagtagctgaagtatatgcgcgtctgggtaactactctgtcgggagctgtcagccggggtcggggagtcttgactttgttgggacaccggtcactttgggagactatgctgttggtgcaaacgtggaggtgattacgtggtcgctgtgtagcaatggagaaaagaacagagggaacggatcgggttctgccaccctgaccgtcgcatggccctaa

SEQ ID NO: 227546 - DNA, 855 bp, Klebsiella pneumoniae
atgcaagaaattacaaactacgttctgtcgccatgcgccatggcagcgaaaggattgtcccaactaataggtacctcactccagtccccggtctggctgaatccttgccatcagaccccactaaccattccaccgacagtcaacgtggggcagatcataatatttattcctgacgatccactgtggttgctgttcactctgcgcaaagccgctagcctcctcgcctataccaaacgtcctttgccggtggtattgttaagccgcagcccgactccatggctgtggaaaactttacttcaccaggtaagcgatcaccgcctgctggcttctggacaagcggtctcctctgatctaccgtgccgggctctggcggatctactgaaaggtggtctggtcggctaccccaccttgcaacaactttcttctgttgaagcgctggcaagcggtaatccaccatcaggtttaagcaaaattgaacttaatgccattttcgccctgctgtgtggtctcagtatcaacagccaggctcagatccgtaacgtcagtcagaaaacgctttaccgacaaatatcgtcaggattaaacaagatagcgaaatatcacccacacatggcgagccgatttcatggtggcctaaacaaactcgtagaggggcagggcatgagcgtgctgactgcatgtgaacgtgagtttatccacgcgattcatagccgacagatatttccggtctttcagccaattgttgatgacaacttacgtgtgcagggttttgagatattatcgcgctggcgaaaagataatattgtactgaagtcggatgaatttctattgcatatccactccgaatacgcctga

SEQ ID NO: 227547 - DNA, 276 bp, Klebsiella pneumoniae
atgttcccggtgagaatagctcgttttagtggctacaagctggatatgagcattatcaatgaattgcatagcgattcgcacgtgctggcgctgatcaaaagcctagtttactattgccagctgacgcagagttgctgtattgctgagggggtggatagcatcgaaaaatttaatctattaaaagcgcttggagttaatagtttccagggatatctgttctccccgccagttaaccgtgaacagctatatgggattttccagagttttaatttataa

SEQ ID NO: 227548 - DNA, 1800 bp, Klebsiella pneumoniae
atgaaaaaaatcataccatacggctatctgcgtgtctcaagtctggaacaggtaaggtctggtggcgggcttgaagcacaggatgaagaggttaggcgatacataacacaaaaaagcgatgtgtttgacattgataaaatggtgatgatgagcgatgaaggtttgtcggcatactctggcaggaacattaaagagggggaactcggtcgcttccttgctaatgttgacgctgggttgattcctgcgggtagtgctctcgtctgttatagtgttgaccgtttatcgcgtcaaaatccgtgggttggaactcaattaatatctacccttattggggctggtattgagattcacagcgtcgcagaaaaccagatattacggagtgatgatcctgtcggggcaatcatgagtactatatatttgatgcgagcaaataacgaatcggtgattaaatctgagcgtgcaaagcatggttatacaaaacgcctcaatgaatcgattgcaaataataaggtattaacccgccagatgccacgttggttgtatgataacgatggtaagtatgcaatcgatcccaacatgcaaaaggtaatcgattttacttttgatagttatattgcaggtcagagtactggatatattgcaaaaaaactaaatgatatgggattgaagtatggtgatacgagttggcgaggttcatacgttgcaaaactgatccgcgatgagcgtttgataggtaaacacattcgttacagtaagcagattaaaggtgttaagcgtgaaataatagagacgatacccgacttttatccagttacgattgatacggataagtttcatattgcaaacaacatgcttacgagtgtagctaaaaatataagaggccgcacacgtatgacatatggtgatatatccattctaaggaatctattcaatggtgttatcaaatgtggcgtttgtagcggcgagacgtcagtagttcaaaacaccaggaggaaaataaccaatggagtagttacatacgttccatataaaacgtttctacgttgtagaaataggtatgagttaaaaacatgtacgcaaggtgacatacgatatgaagtgattgagcgtgcgatactaaatcatttgatgggattagatattactactttattagctgctccagttgataacaagattgaacgctatcgcactgaattagaattatgcaaggcggaagaagaagaattacaagctataatcaaagaacgtgaaaatgaaggtaaacgtccacgtcctcaaacgttaaaatcatatgaggatgttgctgatcgcatagatgaattgactcaactgattgaatcacatgtggaggataattttattccacattttaatgtggatttggatagtattacagatgtgagtaatgtttctgagcgtagtttgattaaaaaaggcattgctactattgcagatagtatttgttataaacgcattagtgatttcatacttgttgagattaaatatcgtaacttaaatgacaagcatgtattagtgatagacaataaaaattcagaaatggttgttaatttttctatagaatacaatgaagaaaacaaggtgtacatatgtaactctttcgtcatggagtatgataatttatcatgtgaatttacagtatcaaaaacaacgatggaagattatgcacatatgatgaattttgttgattatgtatcggatgatgagtcatataacgctaaagagtttcttgtgaagaatttcactcatattaaattcattgacaagagcaatgagtga

SEQ ID NO: 227549 - DNA, 555 bp, Klebsiella pneumoniae
atggcaccacgcataaaaacacacgacaacagaaatgtaatgaattatctgaaaggtaagtcatataatggccgtactcaaaagaaaattaaggaaattattgaattcgtaactgataaggaacaatttcacaatgctaaaggtgggaattcattatatctatttgaagcattgaagagagttccagatctaacaaatacagaagtaggtaaatgtattaatgatttcaggttagaaatactacttaatcagttaagaggtaaattagaacatacgggaatacagtatattaattcaaatagatatgaccctgaaggttttgtgaatatacaatttctaaagcattacagtagtgattttgaagagtttgaactattaggttctacaagtataaagaactacggaaaagcagcaagagaggcttcaaaactattagaaatgaaaatcaatgttccagtactggatgatagtataaaacagtaccttgatgatttaataaagaatggtattgataagaaactaataattgattatcttaagaataaaaagacctaa

SEQ ID NO: 227550 - DNA, 777 bp, Klebsiella pneumoniae
gtgagactggcacaacttgtaatctatggattttggggcgtttttctttgtctggcggcactggaaaagtttggtgatttcttcgccgctggtactggcttctggtcggtcgtaatgctttccgtcgctggattgtgccagctacttgcaagtactgccgcgataggttgggctgttttggggttaggcactctacgggctaagtacttaccctataaactcgttaataattatacggttcctgtactgatcatcggactagctatcgcggcaagtgcagcccgttcctcaagtgatgaagcgagagcacataaactcggttttaaggacggtagagagttttctcacgcccgtgaaaataacattaccaatactaccgattacgcaaagtacctggcagaacagaaatctaaagctgaagcaaaagccgctcaggatgctgctcttgcagcagagaaggaacaaaaggcaaaagaggaagagattgaatgtatgcgtagtgataatcccgaatgctatatatcgaaacatgaacgtggagattatatgtgtgcgaaagctgtcgaaggatcttcgaaatatgattttaaatggactgatggaatgactgaaccaaagttttcatctctcagttggttcgataaaaatagaaaattagttactctttacggacatagagcacaggctcaaaacgggtttggtgcgtttaaaaatattcagtactcttgtacgtataatgcagatactggcgaagtattaagtactaatcttcaataa

SEQ ID NO: 227551 - DNA, 354 bp, Klebsiella pneumoniae
atgaaaaaggcttttatcgcagtactgttattttgttgctctggtgtgtcagttgcggctgtaccagatgggaaaatagaaaaaccatttacttttaataatgaagttgtttgcttaaaggaaattcaggaacaaatgacgccttatctcaagtcatttgaagaagaaggtggggttaagtacaagtacaatgttaaatccggtttgtcgtacaaggatacgatagggctacggttacagatcaaccgtgtggattcggggctcaatgtacgtgtggcagatctggactactactggctacaggaacgcggcagcatgtgccagccagcgtacatggttcttaatcgattatag

SEQ ID NO: 227552 - DNA, 1752 bp, Klebsiella pneumoniae
atgaaacttgtaagtataaaaattaaaggtaggggaattgttgggcttgaatccgacgaacttgtttttggtaaaaatattactgaattttacggacctaatgggtgtggtaaaacgccactactgcaatcaatctcttattgccttggatacccatgcaaatttagagatgatatttataaattatgcaaatctgccacccttacttttacgatagctaataatatttttaaagccactagagactttgaacataccgacttcattttgtccttagaaagcaataatgagatattgaagttttacaatgaagctgattattctaagtacattttcgaaaaactatctttaaattacccatcacttcttacaactcagaacaaacagtcttatccttacttatcaactattcttcctatattttatcttgaccaagacttaggttactcaaaattttattactcgccaagaaactttattaaagatcagttttctgaaatgctcagaatagtattctctttgccagaaaaacattcttttgatgctaaaaagaaaaatattaatcttacagaagaaattaaatatttagataattcattagcagtacaaagaagaaatattgaaatagctaaagatgcccataaagataaaaacatcgaatcaatcgatagttccattaatagtctgaaagacgaacttactgaactgaaaaatagcaaatcattaaaaaatgattctcttgtgagcatagatgcagtcataagaaatcaaaaagaaaacctaaacactctcaagtcagaattaaaattcatggaaagaagagagtcatcattattacaaataatgaaagaaattaacactgaaataaatactctcaatctaaatgaggaagctaaaagaatatttcgctcttttgaggaaatttgcccatccctagattgcaaaatgtttacaagaagttctgaaagctatgcaaaacatcttttatatcttaaagatcaaattaaagatattgaaagaagtttaaatttagatagtgatcggcatgacgcgatagaacaggaaataaaacacacgagtaagatcatcgaagacctgaacactatgagaaccaatattattgaagaggaagatatatcttcagtaattgacgctatttctgaaataacatcaatgttatttaagctacaacttgagaaaaatgaattaaataaaatagcattattagaggcaaagtatgttgaaatgcttaataaacgtgaacacgctttagacgaattagatggtctcgataaaaatagacagacaatccctagattggcaaaggttaagacaaccttacgagataaattcatattctggttaaaagtattgaaaacccctaacattgatttcaatattacatttgaaaatgatttcagtccaataatgggctatgaaaccttagaacaattaaaaggcagcactaaatcacgagctatactagcttatagaagtgcattgatagaaagcatgatagaattaaattgcaagtcatttatgtttgctatatttgatactccgaagcaacatgaaatacatcacgaagacatagataattttattatggctttaaagaaattatctaaagaaaataattttcagtttatattctcgtcaacagaatacaaatataatggtgatgatgatgatatcattttaactcctgagtatccaggggatcagcatgacatgttcttaagaagatattag

SEQ ID NO: 227553 - DNA, 480 bp, Klebsiella pneumoniae
atgaactacgatgaatttttcgacattatatctaaaaaagatattaaaattgacataaaatatatagataagcaagagagttcaggcctaaacaatgaagccctgttccaattgcctttaatagctcttattatacttcttttatctaaaaatcgtgtaaaaccgcatgctagtgaaataggaagcttagtaggtagacttttagaagacgtaatgctgggattcaagggatcatcacaattattaggctggtctgccaatcttagaatacgcacagtcaccgctttacagtttcttgagtcagtacaactcgttataattgatgaaagtaataagaaattaagtattaccaaattaggaaaaaaagttatcgacaaagcatttttatatgaaagtgatttgtcttataatcttgcattaatagaaagatcatatagaaattactgtgttgattcaaaattagacggtgagttattatga

SEQ ID NO: 227554 - DNA, 1185 bp, Klebsiella pneumoniae
atggctgagttacatgaagttaaaccaagagagcaagcgggaagagacactttagaacgctataatgctcagatcagagcagcaagtattgcatgtttgtctatcctagaaggtaaagatgtcaaacgcgttttttgcgaatttcacgatgattttgtcattgaaaaagtcattgctagtgatattcgttacacatttgtacaagtcaaaactaaggagaaactgcgagaaatttggaaactacgagacgtttttggaattttaaaaaggaaaagtgcaaaaaatcctcagacagatgaaatgatcagagatagtttcattgggaaactattacaacatacgattaatttcggagagtcttgtaatgaaattgttttccttacaaatacgcatgttgatgaagatatagagaacattatcgatgatatcgtttctgaaaccttttctaatacacactgcaaacttataattgactcgtttaataattgcttcatctcaatccaggaagatcacgaaaagctagatattgatgcgataaaacaaaagcttaagaaactaaaatttgaaactgatgttgaatatattaaaagcaaacatgaaacgtttgaaatacttgctaaacagaagatatttaaatttagcgaaattgaactatcacacactgaagcaaaagaaatattattttcgcttttggcactagtaaactcaaaatcaagtgtaaaaattaatgattgttcaagcgaaaatataaaaaagctggctggtatagatatcgatgatctcctggatgttctcagcatctcaaaacgtgcttattatgactttttagataatggcgatgaacacgccctaaaatcagcgtcagtaattgaaagattgctgagaaaagcaggagccaacgacatggaagtagattttttcacaagatgtaaaataaaatgggatcagtggttaaggaataatagacatattatatctgagtttgattatatcacaatcgacagagaaattaatgcaaccttagataaattaacgtttctgcatggaaatttatttttatcaaacttaagaacattcattaatgaattatatgattcattacatcaaaataatttacttcattccttagataaagaggctttaaccggaagtcttttttccagattagtagagcgttcaaaatga

SEQ ID NO: 227555 - DNA, 576 bp, Klebsiella pneumoniae
atgatttttggttatgcgagagtctcaacgaaggatcagaatcttgagcgtcagttggcagtactggaacctatttgtgacaaaattgttacggagaaagaatcagggaaatccaccagcgaaagacctgaattgttgaacttgctttcccacctccgcgaaggtgacaccctcattacccattccattgatcgcctcgcacgtaatacccgcgatttgttggagatgattgataacctcgttgagcgtgggatcactgttcagttccttgctaactcaatgagttttgataactcccctcaatcccgcttgattctaaccatgatgggagccgttgcagaatttgagaggggtatgatcgcatcccgtcgcaatgaggggattgcgattgctaaagaggcgaagaagtacaagggtaagcaaaagaacaaagagctacataacaagattatcgatatgttacaggccggaaagaacacaccggacgagatcgcaaagttgtgcgattgtggcagagctacagtgtttcgcgtgaagaaagaaatgcttgccagtactggcagtattgagaactga

SEQ ID NO: 227556 - DNA, 678 bp, Klebsiella pneumoniae
gtggtattgccgggtggcggctgcgccttacccggtctacaggctcctctcacagactcacaccccgtaggcccgcgcaagcgcagcgccgccgggcgagatatcaggcacggtacccttgattttgccgggtggcggcaggcgccttacccggcctacaggatcctctcacaggcttacactccgcaggcccgcgcaagcgcagcgccgccgggcgagatatcaaatacggtacccgtggtattgccgggcggcggctacgccttacccggcctacaggatcctctcacaggctcacactccgtaggcccgcgcaagcgcagcgccgccgggcgagatatcaggcacggtacccttgattttgccgggtggcggcaggcgccttacccggcctacaggatcctctcacaggcttacactccgcaggcccgcgcaagcgcagcgccgccgggcgagatatcaaatacggtacccgtggtattgccgggcggcggctacgccttacccggcctacaggatcctctcacaggctcacactccgtaggcccgcgcaagcgcagcgccgccgggcgagatatcaggcacggtacccttgattttgccgggtggcggctgcgccttacccggcctacaggatcctctcacaggcttacgctccgtaggcccgcgcaagcgtag

SEQ ID NO: 227557 - DNA, 1491 bp, Klebsiella pneumoniae
atggctcactcccggcacattaaggcagcactcaaggcaatacatgcggatgaccctacagcctcctatgaggatatgaggaaacacttacgggatatcgcggagtgggaactttcagcgggacgctctgacctcttcgagccggacatgagggacatctatcgggaccagtacggtgaacttggtgagaaccttaccgatgctctggctagtgaaccgctgagtattgaccagcatcgctacatcaatgaggccctgaaggtactcaaggcttgcatgaagcgtatcgaagcgggagacagtcagtcactgatagattacgtcgatcgttttgatggtattgatcggcaggatgaccaagcctctgtgtccctatctgttagtgctcctgaggtaaaaccagcagcgctagctgcactagcagtcacaccaagcgtcactgtggctagcctctttgagcagtatgaagcggagaacgctcagaactggaagccagccaccttaagggaaaaccaatcgtctcacgctgcgttaatcgaaatctttgactatctgggtcttggtgctgacgccaatacggtaacacgcgctgacgtgcttagagtccgtgatgtcctccagcagttaccgaagaaccgtaagcagcgcttcaaggatgccccgttggttgacttgctgggccgtgaagagaaaacagattgtctggacgtagtcaccatcaacaataaatatctcattaagatggcggctgtctttaagtgggctgtgcgtaatgacctgattaaaaagaatatgactgaggggctggaactcaaggttccccagcgtaaagcctcagaggcccgtaacgctttctctacggagcaggtagggcaactgctggttgccgctaagtcatactctcagaagacctctggcaagccttatcactattacgttacggcgctggcggctatcactggtgcgcgactcaatgaagtggctcaacttcaggtaaaagacgttagggtcactgaggccgggaccgtttatattcatatcaatgaggatgacagcagcctgcccggtaagagcatcaagaacgcccacagtgatcgctgtgtccctctggttgatggtgcctacggttttgtattggctgactttatggacctgttagaagcccgtaggaacgctgggagtgaagatgctatggtattcgatggtctgcgtctcatgaagaacggctacggtgagcaggtgagcaagtggtttaacagaacgctgttacctaaggtcattactgaccgtgacggcttagctttccactcgtttagacatacggtcgccactcagttaaaacagcatggcgtcgagttggcttacgctcaggctattatggggcatagctcagggtccattacttatgaccgctacgctaaagaggttgaggtagaccgattggtgaacgtgttggctgatgtttataaggaggtaagactatcaaactga

SEQ ID NO: 227558 - DNA, 192 bp, Klebsiella pneumoniae
atgcgggacacaacgtggctcattgacgagccaaacacctacaaggttttactgaggggtcacttgccccagtccgaaccgttccgcaaatgggtgacagaggaggtcctgcccaccatccgtaagaccggtaagtatgatatcgctaagtccaacttgataattgacactaagtcaagcattttgaattag

SEQ ID NO: 227559 - DNA, 564 bp, Klebsiella pneumoniae
atgaacattatcaccaacgtattcgagtcctattcggtccgttcagtcatcattgatggcgacccttggtttatcgctaaggacgtcgctgaagcccttgggtataagcaggccgacaaggccgtgagacaacgctgcgacgaatttaagattctcaaaccgggcgatttggccggtatgaagattcctaaccgtggcttgcaggttatcaatgagtcagacgtatacaacctcgtctttggctccaagctggaatcagcgcagcgtttccgcaagtgggtcacaaaggaagtcctgccgtctatccgtaagacaggtggcttcatcgctggtatctccgataaccacgcagtcgactctgagttacgctcacgaatcaccgctgagttcgcccgtaaggccaaggacctgctctctgacattgaccgtcatgaccgctacggggccctcaagcgccgagaagtgatgagcctgtgtgaccagctaagtaagcgccacggtgtccctgcctctcttatagaggccatgatgttcaacggtatgaaagcgctggagggactgtaa

SEQ ID NO: 227560 - DNA, 411 bp, Klebsiella pneumoniae
atggctatttcataccgtaaactcgacatcaacctgagcgccgacaaagagaccgtgcttgtcttcggccaagagatgaccaccaagtatttcactgagattgtagtgacctcaatgctgaatggtctacctgccctgagcgcaggagcacacgccatcctgacagctctacacgctgctggtcttaacgctaatgactacggggcatattcccgagcgtgggctgagagcaacgcagaggcacgccgagaggctgagcgtcagcgcattgagaacgagaaagaccgtcagcgcatcgccgctatgtatgcaacccctgaagaaatcgctaaagaggccgcagcgcgtaaggaacgtaaggcagaccttgagcgtcgcttcagccgtaaaggcgctgcattcggtctgtaa

SEQ ID NO: 227561 - DNA, 1128 bp, Klebsiella pneumoniae
atgccagaagtaaaacgtatcgactcgaacaattcaaagattaaacacaccgacgaactccgcgctcacctgctggataaagaaggcaacaagattccacatagcgtctttggcactgacaccacgcgcaccgagattatctctcaggctgacggtacaggcgagatcatgaatgttggcttcactgaccgctcaggccgcccgcaggcgttcggtaatgacgtgactgattacgttcaggcccttgagtctgcacttgatgagacgcttaacgatggtgattttatcgatgggttgaataccgaagtattcccctgtgagcagcgcccatttgctactctgccgactccgattaaccgtgagaccctgaccgatcgcaccgtccgcttcctgtctaacggcgtgtataacccagctaagaacgccccgaccactaaggtgaaaggcggtcagacccttatggttagccctgtgattgccgacaaggacgctaaagaaactggcattctgtgctcagcgattacccatgtctccgactttgcaatgatgggcggctggactggcgctggtctgatggctacggctaccgatatggttgaccagtatctgcgtaatatgacctctaaagttgtcgatgtgctgctggatgctccagaccttcagtcaaccaaagtgggcgcattgtctggcaaagcgtcagcacaagccgatgacattctggatgctgtagcggtgaacctgccgttctaccttggctcctcactgaccgattacactctactggtcccagagaagtacgaagctatcctcaatcgtgcagctcagaaagcgggtatgaccgagattagcgaactggtaggcactgccgttgcgccttacagtggtgatgaccgtggcgttatcattctaccgaagaagtacgctatgttatctttccgttcaacccgtagtggcgacctcgttaacgtgttggttactcgtgacgctaaccgtgcaggctatgacgtcgaactggtaggcgcactagatgtcatggcaacgggtaccgttaaggttaaggccggggcgttcgacactgaggcggctgctagttatccgttggtccacgtcctgaagtttgaagactaa

SEQ ID NO: 227562 - DNA, 3645 bp, Klebsiella pneumoniae
atgattattgtgctggctatgatattgctaacaggccaaacagtagccgctacgactgaaccaattacgctgacgctaagcagcaaaaagcacaattttatctctaagcttcctctaagccaggaggatctcgcatggcttgctgataaacgtaccatgacgattgcggtctatggtgaagaaaatccgcccatcgccatgaatagtaacaatggctgttatcgagggattaatgcagattatttgcagctgctgaaagatgctttgcacgtaaatcttgtacttcactattatgatgatgaacctcaggcgcttagtgccttgaataacgaagaggcagatctggtactgacctcaaacaatacctctcatcaggccaccacaccgttcattatcagccagctattattccaggcctatccgacattagtaaccctgaattcgaacggaatgatgccattttaccagcttgataaaactgtgaatgtggcagtgagtcaacactatccatcagataccttcattaaatcgatattcagacacgccaacattgtctcctattccagcaattatcaagcactggcttctgttgccaaaagtgaaaacgactacttcattggcgacaatatcgccagcaactttctcatcgctcgcgatttttatcaaaagctagacattgttaaatactggcgttcaccgttaacgggtagctattttatcgcacgagaaaatcagtccaggctcgtcgcgataatcaataaattcatttccgccttagatgcatcgacacatatccggatctcccatacctgggtggatgacggtaacctcacttttttaactaaaccactatctttaacgccgaaagaaaagcgttggatagaaaaaaatccggtcctcagaactctggtcaatccttattatgcccctttcaccgtactggatgaaaaccgggaaattcgtgggttagtaggagatattctcaatcttgttcaattgcagaccgggctgcactttcaacccgttatcgcaaaatccaacagcgatatggcagagattatgcgtaaaggagactgggatatggtgcctacagtaacctatagcccggaacgtgaagatgaaatggccttcacgcagccatttttttccacaccttatgtagtggtgagccgcactgaaaataagcaaaaagatattttccaagccggttcaacagtcgctatacctgcttattattccttacgggataagctgattcagaagtatcccgacgtccattggatcatcgttgagaataccagtaccgctctgagtagtctcaatcttggcaaagtggatagcgtggtgaccacccaactggcagctcgatatatcatcgatcattactatcccgaaacaatgagctatcagcggatccccaatcagccttctgcgcaaattgcttttgctgtacctcgtgataaacccgagctacaaagtattctaaacaaggcgctggccgaaatcccccccaaagaaacgctaagtctggcgggcaagtggattaaaatgcctgaggtaaaaatcgatacctgggatctctatagccgtcctttttatattttgacggttagtgcggtactgctcattttgagtagtttactctggggtggttatttgctacgcgccattcggcgggaaaaggcctcgcaggcagcgctggaataccagctgagtttacgtcagaccttatcgaattcgataccggtcccggtctatattacgacgccggaaggagaaattgaaagttacaaccgtgccttcaacgcgttttttacgccgcaacaaagagaggctatacattattccctttttgatcgccgaagcccgcttgtgcatatctttccggttattcagcaggaaatgcagcaaggattggcaccggagacggtggcatcacatcaatttacactcaacaacggtgccgaagaccgtactattctgcactggatgacattgtgcccgctgccagtgccattaccacctgtactgatttgtggctggcaggacataactgaatcccgcaaactcatggaggcgcttcaggtcgaaaaagataaagccattgaggctagccgggcaaaaagtagatttttggccagaatgagccatgaaatacgtaccccggtcagcgctattatgggttttctggaattactggcaacggggccgcaaagcgaacgagaagcgcaggaatcacttcagttggcttatgctacagcgcaatcgttgattggactgatcggcgatgtgctggatatggaaaaaatagaatctggtaattttgagctgactccagaatgggttgacatcgaggcattaacccaagcaacgatggccaattttgctggccttgctcgccaaaaaaacctgcagttaacggtaagttatcagttgaatgccggaggcatattgtggctggatccgcaggccattaagcaagtgctcgccaatttcttaagcaacgcgatcaaatttacggtgagcggtggcgtagagattaaggtggaaacacaacctcgtgaaaatgatgcggctcagctgatgctaagcgtcaaagacagtggcgtagggatcagcgaagaggaacagcagctactgttcaaacctttcagtcaggccagctgtggtaagaagcaaatgggctctggtctcgggttaaccatctgtaaggagctgatggatcgcatgcatggcaccatttcggtggccagccaccctggcacgggcacaacaatgagcatatatgttcagactcaagtatccgatcgcgcccctgcagatttaaataatcaggaaatggcccttcctgtatcatatgggctacgggtcatcattgctgacgataaccctaccaaccggttattactgcgccgtcagttagatattctcggttattatgtagatgatgtcgaagatggcgaacaggcattcagtttgatcaaacgacgacagtacgatctgctgataacggatctcaatatgcccggaatggatggacttacactagcccagcaggtaaggaagattaatcccgccctggtcatttggggcttaacggctaatgcgcagcctgacgaaaaagcacgttgtttggccagcggtatggatttgtgcctgattaaacccgttaatttgccgcaacttgctgcagcttttaacagcataacgcagcgtctggaaaatccaactcagactgaaatatcggcgtcattaaacacacaattggatactacagtatgtaatgaactgattgatatgcaggcactacgggctaacgcaatggatgatacggcattcatgcttgaattaattaatcaggcataccatgagaatgtcaaagatctggcggcgcttaaaaaagcgatgttcagccatgatcgagatatcgttcgatatcatctacatcgaattaatggtacggcacagttaatcggcgcaacgtcgttacatgtgcttgcagataaattagaaaatgcactggcatcagagcaaccgctttcccttttcggggaggatatgcagctgcttgaacaacaattgattgcattagggaaagcaatggacaattttcttaaaagggaagggcttacctcaagggaataa

SEQ ID NO: 227563 - DNA, 927 bp, Klebsiella pneumoniae
atgaataacgcgctttataatcagatacgcatctttcagagcattgcgcgcgagggcaatatctcggccgccgcgcgcaagctcgaaatcacgccgccgtcggtcagcaatgcgctcaggctgctggaggagcatattggccaccccctttttgtgcgcactacccggcgtatcgagttgacggaaaccgggcaacagctgctggagcagaccgccgcggcggtggagacactggaaaagtcgctggaaatcatccgcgaccagaatcaggagccctccggggcagtgagaataaccctctcgcgctttgcctacctgcttattctcaaaccggcgatggcggcattttgtcagcaatatccggggatccagctggaaatatcggtctatgacggtaccgtcaatattattgaagaacgtttcgaccttgggatccgctttggcgatatcctcgaaggcggcgtggtcgcccgcccgttaatgaagccgtttcgtgaagggctatacgcctcctctgcctatcttgccgaatatggcgtgcccgcgatgcctgccgatctccatcatcaccggctgattggctatcgctttattaccaacaaccgcatcctgccgctgatcctcaatgaccacggcgagcagctcaccgtcgagatgcccggacagttaatcagcaatgatattgacgtcatggccgacggtattcgccacggaatggggattggccgtttatttgaaccaatcctgcaattacagcccgatcgtgagcagtttattcccgtgatggaggactactggaaaacctatccgccggtttatctctattacccaaaaaacgcgggcagaacgaaaagggtgaaagccctgattgatttcctgataatgcatgccgcggatgatgcagagaaagtcgggtcttcccgctag

SEQ ID NO: 227564 - DNA, 1008 bp, Klebsiella pneumoniae
atgagtgattcattaaaagggaatatatgggctgaaagaaatcttcccgccctcgaatattgcaatattagacgtgcagcagatttgttgaactgtacagttagcgatatactccattgggctgaaattgaagcaattaatctttgcttgaaaattgattggatgccttcggctatcgatttcaatataggcatggaacaagctgaaccgtggttcgaacagcaaataaatagtaaagttactttaaatcccagagctgtattgtccaaaaaatcatgcttttatctcggagtgaatacggtcaaccctttagaagcggacattaaatataatttcaatggacaagagattggttttaatatcaaaaaaaacgaaaaaggtcagatttgtgggcatgcagaggggttctggaattttttcgtatttggatacaacgagatggtctatcacgagctaaatagttgtggaagtataacatttgactttctagaccttagaattgtcgctgctgatcgaacggatgaaccggagatttacttaactccttgcagttttgtagaagatgaccttttttattgtgactccgaagataaaagtggttatgaaaaaataaagttacctagtttgattactatcacattagaagatttatttataacaaggagccaattagagtatttatacagtcgtagaggtgaggttttggctagcttagttactggtgacatacaaaggaatcacagagatggtgatataaataaggcggaaacaaaacgaagagcacctaaaaaagacgctttaatgacggcgctcatgaataggattggggttgattcagaaagacctcttaaatcacttcttgaattagttggtatgaatgagcaaaaactcaaatcttacagtgagtcacagttacaccgggctttaagtaaggagctagaagcaaatatgccagatattgaccccaagacattagctcgctggttaaaagatgagggggcacggtaa

SEQ ID NO: 227565 - DNA, 180 bp, Klebsiella pneumoniae
atggttaagaccaccagcacgccgctgccaaaccactcctatcacgacgctcacggccagatggtgagcgtaaccgctgtagcgcataaccgcgtgacgttctatcgcgaggactatcagttcccatgcgtacagcccattgagcgcttcatgaaggagtacacggaggtgaagcaatga

SEQ ID NO: 227566 - DNA, 966 bp, Klebsiella pneumoniae
atgattaccggtgcacggcgtaaaagcctctctctggctggcctgatgtatgcaaaagttaacgctctgcaggcggtgcgccaccgtggaaacctgtcaaaatctgtcactttgcgggccactgatagtggcgtacaaaacgcctggcggagtttcgagacaattgcgcccgcgggtaagcgttcggaaactgactatctggaaggtagcgtgtccggcgccggcggtagatgcggggcccatcacaccgccagctataaattgccgcaccgtgacaaaaagggcttgcggtctgaaggtatcccggtctatggttatagcgcaccagcaaaatctggtgccgggattggcgtcctggtaattcgaatggcgacacatgacgcgcctagcgtctttttttgtgccgttagtctgactcaccctttttttgagcgttgggatataatccagcgcctcgcaagagcaatggtggctcaggcaggggcttcttcggaagcgccggtatccattcgagccggttacgccaaccctgcttgggctaccaccagtgaaattggcgtttccggtggtagcgttacccgctatcgaatggaggctgccgcatggctactaccctcacccaaaatccgcaatttatctggattatcgccgctgttcgccgcgatataccgacaattaccgcaaaaattcaccatattgccgcgccttctgagcgcgaagcccgccgttctctggttcgggatcacgtctgctttttcgctggtcgcatccgtctggaggtggctcatgcgtaactatttccgcatcaccggctacgccgttaataagcgcggtttaacggttggtatcggctatcagctcatatccagcgacaccaaaacagcaacggcccacgcagtgcttcaggcgcagcgtgaaggtctcagccatgtgcgcattacccgcgttcaggaggtatcggcatga

SEQ ID NO: 227567 - DNA, 504 bp, Klebsiella pneumoniae
atgatgaatattgctcaaagagatcgaatcctggcgtctgtaaaccaggttattgggcgcaaagagagtgttgtgcctaataccccagaaaataattcgcacgatcgtttattgcggataagcgctggtctcttgcacctgttaaatgaggttctccctggcatggccaatacggctgaacgcgacgaaatagcagtgtgggtagatgcgatgtattccatcacgatgatggaagcgttagatgcaaaatcactgccccccacaacagtgccagacttgcgcagtgaaatgcctgtgccgactggtggtgatgccgcaaccacggtgcgttatgcggcagaactgcaggcgttgtgggagcttcatcttgatgctcgcttgcgggctgccaatcctaaagctggcgccagactatggacgctaattaacgaacttaactacgcggctcagcgtacggaaagcagatacaaccgcctgctggtaaagctggagggtatgaaatga

SEQ ID NO: 227568 - DNA, 210 bp, Klebsiella pneumoniae
atgagagagtttcgtgtgttttccacgtgtctcgatcgtgccgtttacccggtgcctgttacatggcgcgggtatgccagcagttcagatgttgcgatcagaaaaatggagagtgaggctaaaagcaatggctggagcgttgcgctgattgtttttgtacagcaaagaagagtggcgcgcgataagtcgctggtggagataaaggcatga

SEQ ID NO: 227569 - DNA, 474 bp, Klebsiella pneumoniae
atgaaatatttgacagggctactgttcttatcggtgatggttattgctggatgtggcgacactccagattctcagctaatcaatgatgctcatgagtccgtaaaaaaagagttggcaaaaaagtacaagcctggagagtgccaaaaatggcagtttatggaaagttcaggcgtcatcaaggctggagcctcaaagttggtatgtgatagcgagtttaacatcgacaagggattgcgttttagtgaggaaaaagtgtataggcatgacggatttaatgcggtatgcgggaaagtatctggctatacagatgtaggaaaaattagcggagaatatattttcaccgacaaacaggctgataatgtaattataaaagcgtcaaagtcggagcttgctatggtcaacaatgagactagccgtaaactacagaagttatatgatgatcttttcaacctcgaaatgaaaaattgtaagtga

SEQ ID NO: 227570 - DNA, 171 bp, Klebsiella pneumoniae
atggcaacaccatccgtaaaacccgttcttctcagcatggaacagatcgagaaactccgtacgctgcaggaaaatgaacggaagaaatcaccgctgggcattgctcccaccatccacgttatcgcgcgtcagttgatggaacgcgctttaagcacagaaatggaggcgtaa

SEQ ID NO: 227571 - DNA, 327 bp, Klebsiella pneumoniae
atggaacaactacaacgactggcagaggctatcgctgaaacctacattcgcgatctgcgccgggaaacgggagataatgttattaccgttgatggcgtcagcggcaatgttgaaacgcaccttttagccgcggggctggtggataactcagtttcagcagccaaaaaccaatacggggcgacatttgaacgtgaagcatatcaaatgttactgcggttaatttctctcgatggcccggagtatcggctgactgagcatggtgcttacgtcatcaccttcatgacgactaaggctttaaaaaaacagtcttccacgacagtacactga

SEQ ID NO: 227572 - DNA, 3066 bp, Klebsiella pneumoniae
atgagtaataattttggtaattattacattgaaattgacgctgatgtcttaccgttcctcaaggggatggacaaggtacagagcactcttgatgctctttcggctgattcgaaaaatggcagtaaagcctttgataatttgagctcgtccgcatctagtgccggaacctcatttagtgaacttgctggctacgcccgctcaatggatagctcgctcaaaaccttaaactcaaatgtgaatgccatcacgcgggctatgcaggaagctggttcaagtgccggcggcgctggtgctgagtttactagggcagaggctatccttgagaacctggggaaccaattggcaattctcgacgaagcccaagaaaacggcgcacgtagcgcagcaatcctcgctgcacagatccgggcgggctcgaaggccaccgatgaagagaagcagaaaatcggcgagcttaccgggcgactctatgacatgaaaacgggagttgataccggagccaaaagccacggcaactggaaaaacaccatgcagcaggccgggtatcaggttcaggattttgttgtgcaggttcagggtgggcagtctgcgctggtggcctttgcgcagcagggctctcagttggccggtgcttttggccccggcggtgctgtactcggtgccgttattgctattggttccgcggtggccggtacgcttgtagcgtctctgggtaagggtaaggatgcgatggaagcgcttcaggacgccacgaaaacgctcgacgatgtaatgacggtatcgagtaatggcgtggcggcgctatcagataaatatgctgaaatggcccgtattaacctttctgtcgcaacagccatgaaaaagcaggctgagttagaggtaagcaatgcgctggcaaagctaccatcacagattaaagatgtgacaactgagtttattacgttgactgacaggattacctccggattttctggcgcatctcctagcattaaattgttcaacgcaaacctgaagtacctcggggttacaacagacgattatggacaagcagtccagcaggccatgtctaaaggcccggattttcagacaataactctttcaatggcaggtacagttgatgcgatagctgagcgttttggatggacgagcgatcaagcttttctattcactaaaaaactctctgaggttagcaataaggcagcgccggccactgatgatctaatagcactaaataatatcattttaagcaacggaagcagtacgcaaaaagggagtgagcaaacagccatatactcccgaaagatgttagatatggctagcagtgcggtaacagcagaggcaaagctggcgcaactacgagccattacaatcagcctcagcgacagccaggctaaggccttgcagcaggcccgccaggagcttttcatcactaaacagactggagaggccaaacagcaggcgcaggcatggcgtgacgctgaacggcaggggcttaaagccggtacgcaagctttcagagaatactatcaggttaagctccagacatataagcagcaggaagccaacgccgaagccgctaaaaacgagcgaaacgcacagagcgaagctaattcggcagcaaaacaagcaggtactcaggcagaacggaatgcccgtatccttgaggattatcagcagaaggcggctttgtctgctgactccaccagcgacctctcccgcgagcaggcgatactggcggcgaagcaaaaactaattaacccaacgccccagcaggtcgctcaggttgaaagagacgcagcagcggcatgggataaggccgctgccctgaaagcacagaatgcggttcctgagcgcaaggagaacgccgactatgccgcccagcgtaaggcactcgacagtctgaaagaccagaagaacgccaatggtgagctgataatctcacaggagcagtacaaccgcgcctcagagcagttggaggagcagcaccaggtaaacctcgccaaaatccgcgcacagcaggtcgtgagcccgacgcaggaggcgcagggacagatagacccagttcaacaactggctaatcagcacgcccaacaaatcgcgttaatacagcaattcgagacacagaagggccagctaacccagcgcggcatcgagctgatgaacgcggcgaataaacagtatgagcagcagcgaatcgccgcgcagtgggagatctaccgcaatcaaagcctgagtaatgaagcgctggcggcatcgtttgatgcgctggccgggaatgcttctaacgcccttaccggtgtgataacggggagtatgagcgctcaggaggcgatgcgatctttatccagcactgtgctgaatagcctgattaactccttcgtccagatgggcgttgagtgggctaaaaacgccattatgggggctaccactcagcaggctgccattatcgccacttctgcggttcaaaatgctgccgtggctactcaggttggcgtttctactgccgcagccgctacaacaactgctgcatggacgcctgcagcgctaatggcatcgatagcatctatgggtactgcggctaagattggcttgggtgctttactcggtgttatggctatgggtattgctggcggccgtaagaatggcggcccggtatcatccggcaatatttaccctgtaggcgaaggaaaccttccggaactcatgcagaccagcaaaggccttttcatgataccgggtgatggcgggaaggtattcagcaacaaggatgtgacaagcggctctccgagcatcaagagagcgtcaaccggtaaagaatatctcccggcatcctcagcatcatccagccaggcggaaagccgcactgaacgaccgatacaggtcaacataacccttatcgaccagaccaccggcaaccagcacaacattactggcactgacgctttccagcaaggtgacgtggtaacagttactggatttctcaatgacgtggataccggcggcccaatgtccacagcgatcgcagatgcgcacgggcttagacggcaggcaaggggtgccttttaa

SEQ ID NO: 227573 - DNA, 894 bp, Klebsiella pneumoniae
atgtcactacttgatttcgcatcacacaactcatttgagcgtgctgtgtctccctttagggaaatggccgcctacgaggccttgtggacggaacaaggcgcaaccttcaaaactattgctgataagtttcgtcatgctcatggcagtgtattgccgtctgagttagttcctgatagcacgatcgaaagcttcaaatcgaagctgaaaagcatcctcgacaagtacaatgtcgaggatttcggcgttcgtgtgcatggggctggtgaatacccagaaaagttgcgtgatgcgagacaccctattgaggttctctactatcagggttggtgggatttagttaataccccctctgtagcggttgtaggctcacgaaaggtatctgaggaaggtgccaggagaactaaaaagctggttaagtgcctcgttaaagatggtttcacgattgtctctggcttagctgaaggggttgacacctgtgcccatgaaacagctttagaaatgggcggtaacactattgctgttatcggtacgccattgtcgcataattatccaaagcaaaatgtcaaattacagaaaaagataagagagaactttttgcttatcagccaagtgccattccagcgctatctggatcaggattatcgtagcaaccggatatttttccctgaacgtaacattacgatgtctgctctgaccaaagcaaccattattgtggaagcgtctgacacatcgggcactctgactcaggctcgagcagctttagcgcagggcagaaagctatttattctggagtcatgtttccagaatccttctatctcatggcctgcgaagtatgaagcgctgggggccatcagagttagtgactatgacgatattcggaagcaactgaaatga

SEQ ID NO: 227574 - DNA, 657 bp, Klebsiella pneumoniae
atgacattccgtttaactaaaattgatgagttaaccataggtcagcattatcacctagatgcaagtgacacctgctttttttttggtgagtatacggctcgaaaaggatttggcttcagtgaaacaaatcaattgatacataatcttaaaaaatcagttgagaaacgcgggtcctatgaatatcgctataaagggaaagctatcaataagattgcacagatgcttgtagggataacaaatttgaaggatttgacctttgttcctatcccaccttcaaaatgccacgaagaccctctctacgatggccgaatgattgaagtactggagagtgctaaaagaattaatgcagatattgattaccgagaattggtcaggcaacgagagtcacgagcagcatctcataattcagaagtacgtcaaactcctgaagagatagccagtaactatatatttgagcgcagtcaggcacaaagcctcagaaaaatgatagtgatattcgatgatgttctaaccgctggtagtcattacaaggctatgaaggctgtcattcgaactcatttaccagaatctgttattgtaggcctctttgttgccagaacagccagggaggcggagattgattggtttgaagatttagatgaaagtgatgaattttaa

SEQ ID NO: 227575 - DNA, 438 bp, Klebsiella pneumoniae
atggtggaccctcatgagcaaatcaaatctggtagcgttccggcagaattgcaggacgcatttaatcaggctgtagcggcggcaggcggtgacaaaacagcgtggctgctcgatgccctgcgcagcaaactgaaccagccggagagcaacccacagctgcgcttgcttgagctggtggagagaatggaagtggctgccgccgcgctggccggtggcaagcagggaataccgccgaccccgtacaatgaaacggcggtgataggaattgttgcggacactatccgagaagggttcgacaatggccgcattatcgctgagcgactcaatgaggccggttatcagactaaagcaggtaaggcgtgggataaggacatctacagcgcctggaaacgacaggacaacgtaaaagacaagataactttagccattaccatataa

SEQ ID NO: 227576 - DNA, 294 bp, Klebsiella pneumoniae
atgagcatcaaaatagtcacagtttccatacttgctgccgctttcgtctttgtatcagatatggccatcgccaaatcgagccagttaactgacgaccaggttaagcaaagaattatcgacgactctatagcatcctacgcaggtacctgcgcttgcccattcaatacggcacggaacggaagctcatgcggccgccgcagcgcctggagcaaagcgggagggtattcgcctgtctgctacaagaaggaggtcacgaaggatatggtaaaagagtggcgccagcagaatcagtaa

SEQ ID NO: 227577 - DNA, 1032 bp, Klebsiella pneumoniae
atgagttatttacagatctccggccttaaaattagttatggcgataaggtggttttacataatatcgatctggcggtagagcagggagagatgattgctctactgggcccgtcgggatgcggaaaaaccacgctgctgaacgccctctgcggctttattccggtgcaaagcggcgaggtggctattgccagccgaacgatcactcatcttgcgccggagcagcgcaatatcaccatggtatttcaaagctacgccctgtggccgcacctgacggtagcgcgcaatatcggctatggcctgaagctgcgcaaatggcgcggggcggatatcgcgcggcgggtggcggagctgctgcgaatagtcaatctcgaagggcttggcgaggtgaaagtgaccgaactgtcgggcggccagcggcagcgggtggcgctggcgagagccctggccatagagccccaggtgctggtgttggatgagccgttatctaatctggatgccaaagtgcgcctgaatgtgcgccatgaaattaaatctctgcaaaagagactggggttcacgtcattaattgtcacccacgatcagcaggaagccttagtgatggcggaccgcattgcggtattaaatcaggggcgtattgaacaaaccggcacgccggaagaaatatatcaacgccccgcgacgcccttcgtcgctaattttatgggggccgataataaaataatttccggtgaattatccgctgccgcaatatccggtttatctgccgctcagcagggtgacaacgttatttattttcgcagcgccgatgccgcgctcgctgaattaacgcagcctgcgccgcaggaggggctggctctggaaggcgtggtggagcaaagcgcgtttctgggcaatctgtatcgtcacagcgtgcgctgccatgaccgcctgctgctggcggatgccgcgcagtgctggccgacaaaaagccgcgttcggctccatgtgccaacgccggccctgcatatttttcctttaccactatcacagtga

SEQ ID NO: 227578 - DNA, 762 bp, Klebsiella pneumoniae
atgacggaagcacaacgagagtcattatgcgccttgattcgccaggcaggcgcccacgcccaggcgctgcgcgatgcgggattacaggtcgataaaaaagcgcgccaggactttgtgtcgcaggcggatctcgcggtagaacaagagattaaaggctggctgcaggcccactttcccgaggagggtttcctcggcgaggagagcggttttgaaggcgacgaccagaccgtctgggtgctggatcctgtcgatggcaccaccaactttatcctcggcatggattactggtgcatctcactggcgcgagtgtgccagggcgagctgtcgctcggcatcatttacgcccccgatcgcgatgaatttttcttcgccgcccgcggcgaaggcgcgtatctcaacggtcggcgcctgacgctacgcgagccggagcccgatgcggtggtgatcggcatggggcgctccagccgggccccggccagcgactacgcccgggccatcgacacgctgctcgacgccggtctggagtatcgccgttttggcgcgggcgccctgatgctggcgcatgtcgccgccggtcagctccacgcctattatgaagcgcatatgaacagctgggatgcgctggcaggcatgctattgattgaggaggcgggcggaacgtgcaatgcgtttctcgccaatgcgggcctgcggcgaggcaacctcgtgctggccggctgcgcaagcgtccagcctcgactggccgccctgctggcgaaatga

SEQ ID NO: 227579 - DNA, 783 bp, Klebsiella pneumoniae; identical to SEQ ID NO: 215074

SEQ ID NO: 227580 - DNA, 915 bp, Klebsiella pneumoniae
atgcaagatgaaaaaccgccaatgaagaagttacccacctccatgttgccagaagagacggttccacgtccggagttcccggagcaagaacaaaccccgccgggtctggatgcggaaatggagccatccccggaccacggtgaaaccagctacaccggctccgggcgactggccggtaagaaagcgttaattaccggcggcgactccggtattggccgtgcggtggcgatcgcctttgcccgcgaaggcgccgacgtcgcgataaactatctgcccgaagagcaaaaggatgcggatgaagttatcgccctgatcaaagccgaagggcgcaccgcggtggccctcccgggtgatattcgctccgaatccttctgccagtcgctggtggccgacgcggtggaacagctgggaggtctgagcatcctggttaataacgccgggcgtcagcaatactgtgaaacccttgaggaactcactaccgaagatttcgacgctacctttaaaaccaacgtctacgcgccgttctggatcacccgcgccgcactgcctcacctccaggccggaagcgcgattatcaataccacctcggtgcaggcgtataaacccagcccgatcctgctcgattatgcgcagaccaaagcctgtctcgcgatcttcactaaatcgctggctaaacaggtggcgaaacgaggcattcgcgtaaacgccgtagcgcctggcccttactggacggtgctgcaatccagcggcggccagccggacgagaaggtgaaacagtttggcaaagacacgcctatggggcgcccggggcaaccggtagagatcgccccgctgtatgtcaccctggcatccgatgcctgctcatatacctccggacaggtgtggtgctctgacggcggggatggtgtggtctaa

SEQ ID NO: 227581 - DNA, 1698 bp, Klebsiella pneumoniae
atgcaatttacccataagaaaaaccgttccctgtacatcccctacgcgggtcccgttctgcttgaattccccctgctcaacaagggaagcgccttcagtatggaagagcgcagcaatttcaacctgctcggcctgctgccggaagtggttgaaactatcgaagagcaagcggaacgcgcctggatccagtatcagggattcaaaactgaaatcgacaaacatatttatctgcgtaacatccaggacaccaacgaaaccctgttttatcgcctgatcggcaaccaccttgaagagatgatgccggttatctataccccgacggtaggcgcggcctgcgaacggttctccgagatctatcgtcgcgcccgcggcgtctttatctcctaccagaatcgccataaccttgacgacatcctgcagaacgtcccgaaccacaacgtgaaagtgattgtggtcaccgatggcgagcgcattctcggcctcggcgaccagggaatcggcggaatggggatcccgatcggtaaactgtcgctgtacaccacctgcggcggcatcagcccggcttacaccctgcctatcgtgctggacgtcggaacaaacaaccagcagctgctcgacgatccgctgtatatgggctggcgccatccacgcattaccgacgacgagtactatcagttcgttgacgacgtgatccaggcgattaaggcccgctggccggacgtgctgctgcagtttgaagattttgcgcaaaagaacgccatgccgctgctcaaccgctaccgcaatgaaatctgctcgtttaacgacgatattcagggcaccgcggcggtgaccgtcgggacgctgatcgccgccagccgcggcgccggtagccagctgagcgagcaaaaaatcgtctttctcggcgcgggttcggccggctgcggtatcgctgaacagattatcgcccagatcgtccgcgaaggactcagtgaagaagaggcccgccagcgcgtgtttatggttgaccgcttcggcctgttaaccgacggcatgcctaatctgctaccgttccagaacaagctggtgcaaaagcgtgagcagctgcagagctgggataccaccagcgaggcgctgtccctgctggacgtagtgcgcaacgtgaagccgaacatcctgatcggcgtctcgggtcagccgggactgttcacggaagagattatccgcgagatgcacaagcactgcccgcggccgatcgtgatgccgctctccaacccaacctcacgggtggaagcgacgccgcagaatatcctgagctggaccgacggcgaggcgctggtcgccaccggcagtccattctccccggttaccgtgaaaggcaagcagtatcccatcgcccagtgcaataactcctatatcttcccgggtattggactgggggtgatcgcctccggcgcgtcgcgggtcaccgacgagatgctgatggctgccagcgaaaccctggcgcagcactcgccgctggtcaacaacggcgaaggtccggtgctgccggagctgaaggatatccagaccgtctcacgggcaattgccttcgcggtcggcaaggtggcccaggagcaaggcgtggcggtgaaaacctccgccgaagcgctgctgcaagcgatcagcgataatttctggttaccggaatatcgcaattatcgccgcacctcgatttaa

SEQ ID NO: 227582 - DNA, 1071 bp, Klebsiella pneumoniae
atgaagtctaaaagcgctactctggaagacgtcgcacgccatgcgggcgtctcttaccagaccgtgtccagggtactcaacaaatcagctaatgtatccgaagcgacgcgtcgcaaggtggagaaatcgatagaggccttacgctatgtgccaaaccggctggcgcagcagctggtggggaaggagagccagacggtcgggttggtgactatttctctggcctggcatgcgccttcccaggtggcggcggcggtaaaacgctatgccaatctggaaggttaccaggttctgatttcgatgatcgatgagagcgtcaaccaaagtatccaggattccatcaatgagctgaaatctcagcgggtggataaagtcattatcaacgtgccgctggagaccgaacaggcgcagaaaatcgctgctgacaacgatgatatcgtctgcctgtttctcgacgttgatccctacagctctgtgtttaacgtttcgtttaacccggcggacggcacccgggccagcgtcaaatatctctatgagatggggcatagggagatcgccctgctggcggggccggacagctcagtctcggccaaactccggttaaaaagctggctggagaccctggatggttacggtctgaagccggtgaccgttctgcacggcaactgggatgcgcagagcggctacgccggcgcgctgcagatgctgcgcgaaacgcctaatttcagcgctgtgctggtgggtaatgatcagatggcgctgggggtgctcagcgccttccatcagcatcaggtggcggtgccgggtgagaagtcggttattggctatgacgatacctacgaaagctcctttttctatccggcgctgagtaccgtgtcgctcgacctcgacctgcaggggaaagaggcggtgcggcggatcctcgccagcaccagcggggcgcctcatacctcatccattctgccggcgcgcctggtgatacgccattccagcggcgcccgaatcgagcagggaaaagatctgcaggccattgcggaacagctccgcgccatcgcccaccgtctggcaccctga

SEQ ID NO: 227583 - DNA, 261 bp, Klebsiella pneumoniae
atgaaccatccaactttatggggtcagtccagtagcgccgccgggcaaggacagcgggcacggagccgattttttgccgggtggcggctgacgccttacccggcctacaaaaacagggccgcccgtactctgctggtggcatgcccaggcccgcgcctgcgcagcgccaccgggcagttattgcgcctgctgctgcgcctgcgccagctggcggacaatcgccgcgcgccgcgcatccccttccggcagccgggccagtaa

SEQ ID NO: 227584 - DNA, 504 bp, Klebsiella pneumoniae
gtgttttttcgcgaaacgctccgcggaatcccactcccgacccggcaagcgcagcgccgccggggaggatacctccggcgccatacccgcctttgtgccggatggcggcttcgccttatccggcctgcgggagcctcccgtaagctcctataccccaggcccggcaagcgcagcgccgccggggagggcaccaccggtgccatactcgcctttgtgccggatggcggcttcgccttatccggcctacgggagcctcccgtaagcccatataccccaggcccggcaagcgcagcgccgccggggaggatacctccggcgccatacctgcttttatgccggatggcgctacgcttatccggcctacgggagcctcccgtaagctcctataccgtaggcccggcaagcgcagcgccgccgggcgatgaccacaggcacggcgctgcttttatgccgggcggcggctcacgccttgcccggcatacggttcgtgcgacctgccgttaa

SEQ ID NO: 227585 - DNA, 651 bp, Klebsiella pneumoniae
atgtcattacctatgttacaggtcgccctggacaaccaaacgctggccagcgcttatgaaacaacccgtctgatcgccgaagaggtagatatcattgaagtcggcactatcctctgcgttggtgaaggtgtacgcgcggtgcgcgatctgaaagcgctgtatccgcataaaatcgtgctggcggacgccaaaattgccgatgccggcaagatcctgtcgcggatgtgcttcgaagccaacgccgactgggtcacggtgatctgctgcgccgatatcaacaccgccaaaggggcgctggatgtcgccaaagagttcaacggcgatgtgcaaatagagctgaccggcttctggacctgggagcaggcgcaggcgtggcgcgaggcgggtattcagcaggtggtctatcaccgcagccgcgacgcgcaggcggcaggcgtggcgtggagtgaggcggatatcagcgcgattaagcgtctgtctgatatgggcttcaaagtgaccgtcaccggcgggctggcgctggaagacctgccgctgtttgccgggatccctgttcacgtctttattgccggacgcagcatccgcgatgctgcctcgccggtggaagcggcgcgccagtttaaacgctctatcgcccagctgtggggttaa

SEQ ID NO: 227586 - DNA, 411 bp, Klebsiella pneumoniae
atgtggggcaccatcggccagctgattgccgtcggcattctggttggcattggctcttcaattctgattattccgggctttatcccgatgttcttctccaacgcgacgattggcgtctttgccaaccacttcggcggctggcgcgcggcgctcaagatctgcctggtgatgggcatggttgaaattttcggttgcgtgtgggcggtgaagctcaccggtatgagcgcctggatgggaatggcggactggtcgattctggcgccgccgatgatgcagggcttcgcctccatcgggctggcgtttatggccgtcatcatcctgattgctctcgcttatatgttcttcgctggccgcgcgctgcgcgccgaagaagacgcggaaaaacaactggcagaggcctctgcccaataa

SEQ ID NO: 227587 - DNA, 936 bp, Klebsiella pneumoniae
atgagtattgcagccaaacaaaccttatgccccggcatgctaccggatattcagtccactaagggtgacggtgagggagagtcattatcctgggttggcatggagcaaattgacctgccgatagacatcgcaggtaggccggtatcagcaaaggtcaatgccggcataaaccttctcagttcacctgaagctgaaaaggggatccatatgtctcgcctttatcttcttctggacgaactgacacaaggggaaatcacaccggcattattgcaacatgtgctgaaagcatttctggtatctcatcagggacgtagtgatgaagccagtattgagatttcaggggatttgttactgtcgcgtaagtcgttaaattctaatcactccggctggaaagcttatcctctgactctgagcgccgaactcaggcaatcttttacggttaccctcaaagtgggtatcccttattcgtcaacctgcccggcttccgctgcacttagccgccacgtcgcgggtttgcagtttagcaaagactttggtaaccggatcgacaggctcccggcagcagaaatagccgactggcttgttgagaaaggaatgccggcaaccccgcacagccagcgaagctgggcatgggtggatatccgtcttaatcctgaagcaaaatcactgcctgtgcttgagctgattgattatgctgaagttgctctcgggacagccgtgcaaacggtcgtcaagcggagcgacgaacaggcttttgcagtggctaacggtcaaaatctgatgttttgcgaagatgctgcccgtcggctcaataatgtttttcgttgtgcatccttttgtgaagcatttgatatcagggttgaacatcaggaaagcctgcatccccataatgccgttgcccgtattcactggaaaggaagtaaaaatgttacgtaa

SEQ ID NO: 227588 - DNA, 1650 bp, Klebsiella pneumoniae
atgcaatcattcgttttaacagggttagaaagtgctggaaaatcaactctttttaatttcctgacggaaagtgcagccagtgatgaacgtaatttcaggggatccaccgttgtatgtcgggagggggtcattaaggatgcggatatcaacctggttgataccccgggtatacgctttcagagcgacagtgaaaccacgaaactcgcgctcaatgcgctaaaccagcatgatggtattcttctggtgttgcgggccacaaacgctcagcaggagtggcaaatgatctgcaacctcataccatcacagacaaaacgcctcattatcctcctgacctttgctgataaggttatagaggggctcgcggaggtggctgaatacctgggtgaaatatcaggtgcgcctgtcatggcagttaatgccagagaagcggataggaatgttcgccaggatgcactgcagttacttctgcacggtaaaccagctccttcggtggacactttaaccagtcagcaaataccggtcattaatctgctgactgaagtccctcagcaaacgatatttgaacatcgtcggggtggtaggcctgctgcgataatatgtcttttcctgctttttgccgttccggtatggtgtgcatggctgctgtcagatttcattcagcctgtcattgacagtgcggttattcagccgcttgagaatataacgaccaactggcccgactttctgaaggctctatttgtcggcaattacggtctttttagtcttggactttattcgtttgtatgggcatttcctgtggtggtactgatagggttgtctctttcgctgacagacgacagcgggcttaaggaaagaatcaccgcgacgctggatccttggttacgaaaagtgggcctcagcggacaggacctgatcccggttttaagtggtttcggctgtaatgtcgtggcggtttttcagagccgttcgtgttcgcgatgcacccggcatgcctgtataagtatgattagctttgggtccgcttgcagctatcagaccggggcgacgctttctctttttaatgccgcccatcaaccctggctctttgtcccctatctcagtctgctgtttatcacaggcgcaatacatacgcgactctggaacgggtcgttgaagcctagcgaagaccagcgtctgacagagcccacctggctgcaatggccacgctggcgaaatgtgacatggatgctgaaaaatatcctccgtcagttcattacgcaagccatgccgttattcctgattatctgcagtgttgcggggatgcttgattacgcagggatcactcgctgggtgagtgaaacgacggcacctttacttcatctttttaaactgccggcagaactgatgcccgggatcattttttcactgctaaggaaagatggtttgatggtgctcaatcaggatggcggcagcttaatacagtccctcagcacatctcagttactgctacttgtctggctcgcctctacgttgatggcctgccttgtcacggtatttaccatcgcccgggaaataaactggcggtttgcagtagcagtggctgggaaacaggtattaagttctctggtggtggctctggtgatatcccagttatttattcatgaggcataa

SEQ ID NO: 227589 - DNA, 570 bp, Klebsiella pneumoniae
atggataaaaatatcaataaaacaaaggacaaaaacctcgcccggcggctcaccgccatgctgatgctgcatcatggtgacaccgtcagtcatgttgccagaacgctctgctgtgcccgctcatcgattggtcgctggattaactggttcacgctgtctggtactgaaggcctgaaatcattgccgtcaggacgtgggaggcgctggccgttcgaacatatttgcgcattgctgcttgagcttgttaagcattctcccggcgatttcagttatcagcgttcccgctggagcaccgaactgctggcgataaaagtccgtgatgttatcggttgtccgctacatgcttcaaccatccggcgatggttacctgctgccggactggtatggcggagagcagcgccgacactgcgtatccgtgccccacacaaagaagaaaaaatggtcgctatccatgaagcactggcgaatgcagtgcggaaaaccccgtattttacgaagatgaagtggatattcacctcaatcccaaaattggtgctgactggcatctgcgcgggcagcaaaagcgcgtag

SEQ ID NO: 227590 - DNA, 588 bp, Klebsiella pneumoniae
gtgttgactgatgattattttttttattatggcctaaagcagttaactggactacctctgtttcatattacatatgaaggagtagttaataaatcaatagcaattaagcacaaaagaaacataagagtattggttgacagcaggattttttattcagggaaatggggagggtacaaaatgttaaggggatcattaaatatgataagccaatggatgtggcttgacgtttcggggggggggcggttttatcctaaagggtgtgattatgacatctatgttaacatgcaaggaaatgtaaaaaataatattgaaaaactatattttgcattcttaaagaaaaatgttagccgaattgtaaaccattatccacggctaacaaaaaaggaacaagcagtgctgcaatgcctactgaaaaatgggggcattaatgaaataaaaagtcaactaaaaattgaagaaaaaacgctatcatgctaccaaagcaaaataacaagaaaatttggctgcaaaaggtacataaggtttatgtatctttacagccttaataaagaaatggttgatgaaagatggctcatgccaagtatttag

SEQ ID NO: 227591 - DNA, 384 bp, Klebsiella pneumoniae
atggtcacttttgagacagttatggaaattaaaatcctgcacaagcagggtatgagcagtcgggcgatagccagggaactgggtatctcccgtaacaccgtaaagcgttatctgcttgcgcagtctgaaccgccaaaatatacgccgcgttccgccgtcgcttcactcctggatgaacaccgggactatattcggcaacgcatcgccgatgcccatccttataaaatccctgcaacggtcatcgcccgcgagatcacggagcagggttatcgtggtggcatgaccatcctgagagagttcatacgttcactcgccatccctcaggaacaggagcccgtcgtgcgcttcgaaacagaaccaggacgacagatgcaggttgactga

SEQ ID NO: 227592 - DNA, 603 bp, Klebsiella pneumoniae
atgagcaccggcagcggccccgcttacccgccagcgttgaggatgagcacctgcagcagccccgtttgcccgccagcgttgatgattagcacctgcagcgaccccgcttacccgccagcgttgaggatgagcaccgtcagcgcccccgtttgcccgccagcgttgaggataagcaccgtcagcggccccgtttgcccgccagcgttgaggatgagcaccggcagcggccacgtttacccgccagcgttgaggttgagcaccggcagcggccacgcttacccgccagcgttgaggatgactaccggcagcggtcccgtttacccgccagcgttgaggatgagcaccggcagcggatccgtttacccgccagcgttgaggatgagcaccggcagcggccccgcttacccgccagcgttgaggataagcaccgtcagcggtcacgtttacccgccagcgttgaggataagcaccgtcagcgcccccgtttgcccgccagcgttgaggataagcaacggtagcggatccgtttacccgccagcgttgagaatgattcccctccaccgaccccgtttacccgccagctttgacactaccagcgactag

SEQ ID NO: 227593 - DNA, 2085 bp, Klebsiella pneumoniae; identical to SEQ ID NO: 227372

SEQ ID NO: 227594 - DNA, 966 bp, Klebsiella pneumoniae
atgaagcagcaggctgggattggcattattctggcgcttaccaccgcaatgtgttggggagcgttgccgattgcaatgaaacaggttctcgaggtgatggcgccgcctacggtggtcttttatcgcttcctgatggccagcattgggcttggcgcgatcctcgcgatcaaaggcaaactgccgccgatgcgaatttttcgcaagccgcgctggctggtgttattagcgattgccaccggcggtctgttcggtaacttcatcctgtttagttcttccctgcaatacctcagccccacggcttctcaggtcatcggccagctatcgccggtggggatgatggtggctagcgtcgtaattctgaaagagcgcatgcgcggcacccaggtggtgggcgcgttgatgctgctcagcgggctggtgatgttcttcaataccagtctgattgaaatctttacccgcctgacggactacacgtggggggtaattttcggcgttgctgccgctacggtgtgggtaagctacggcgtcgcgcaaaaggtgttattgcgccgtctggcatcacagcagatactatttttgctgtacactttgtgtacgattgcattactgccacttgctgagcccggagtgatttcccggttaagcagctggcaactggcatgcctgattttttgcgggctgaataccctggtcggctacggggcgctggcggaagccatggcgcgctggcaggcggcgcaggtcagcgcgttaatcaccttgacgccactgtttacgctactgttttctgatttattatcaatggcctggcccgatgttttcgccagaccgatgttaaacctgattggttatctcggtgcgtttgtcgtggttgcgggcgcgatgtattccgccatcggtcatcgtctttggggacgttggcgtaagcgagaggcggtagtaccgctgccccgctcaggcgaatga

SEQ ID NO: 227595 - DNA, 1005 bp, Klebsiella pneumoniae; identical to SEQ ID NO: 210847

SEQ ID NO: 227596 - DNA, 2559 bp, Klebsiella pneumoniae
atggtgttttgttctcttggaaaaattgcgaatgtacattcgttaggattatttatttttgtttcattaagtcctttagttatgaaggcttatgcaacagataatattcaatttaacacagatgtattggatgttcgcgaccgaaagaacattgatttgagccaattttcgcgaagtggttacatcatgcctggaacctacgacatggttgttcatatcaataagaatactctaccggagcaagaaattcccttttatgagccggatgatgacccaaatggcagtcgcgcctgcataaatcccaaactggttgaacaacttggactgaaacccggggtactgaaagaccttgcttggtggcataaggggggatgcctggacaagagaagtgtgaagggaatggaaatacgaggcgatcttccaacggcctctctttacctgagtataccgcaggcatatttggaatacaccgacgagaactgggaccctccgtcacggtgggatgaaggcgttgcgggcttgttgctggattacaatctcaacgccagcagtcaacaccagcagagtgagggcagcaatacccaagctctcagtggtaatggaacagcgggaggaaatctaggtagttggcgttttcgagccgactggcaggccaatttagatcatagcaacggttcggaacagtcgacacaaaaacagttcgacttgagtcgttactacgcttaccgggcaataccgggtttgcactcaaagttgacactgggagaaaactaccttgactcgggaatgtttgacagttttcgctttaccggtgtgagtttgatttcagatgacaatatgctgccacctaacttgcgtggttatgctccggaagttacgggaatagcgaagactaatgcaaaggttattatcagtcagcaggggagagtgctttatgagacctcagtggcctcggggccgttccgcattcaggatattaacgaagctgtgagcggtgaactgaacgtccgggtggaagagcaggacggtggtgtgcaggagtttgtagtcaatactgcgaatatcccatacctgacgcggccaggctcggtgcgattcaaattaactatgggaaaaccatcagattggcaacatcatttacgcgatccgatgttcggtaccggcgaattatcctgggggatcagtaacggttggtctttgtatggtggaattctgaggggcggggattataacgctctatcactgggcatcggacgtgatcttatgttcctgggagcgctgtcatttgacgcaacacattcgcgtgttcgtctgccctgggaagatcttacgctcaatggggattcttatcgactgagttattcgaaaaacttcgaggagtacgatagccaggtaacttttgcaggttaccgcttttcagaacaagacttcatgaccatgagtgagtatctggacgcacgatcttatggtacacgcagcaatggcaatggcaaagagatgtacaccgtcaacttaaacaaacattttcgcaaattggaactcagtagctatatcaactttagccgagaaacctattgggaccggccaactacagaccgctataacattaccttatcacattattttgatttaggacggttccgtggtgtgagtatatcgttatcggcttatcgcaaccagtacaatggaaccgaagataatggggcttacgtatccatgtcaattccgtggagtgatagttcgacggttagctacaacgcgatggtcagccataacgacaatacccatcgggttggatattacgaccgtgttgacgaacacaacaactatcaattgagtgcagggaactccagcagaggagtgagcgtgagcggttattacagccatgaaggtgacatggcacgcatgagtgccaatgccagctaccaggatggtcgttacagtgccatcggtttaacaatgcagggcggactcactctcacttccgaaggcggtgcaatgcaccgctctggaatgatgggggggacgaggatgctaattgatactgaaggtgttccggacgtaccggtccgtggctatggcagtaccagccgtaccaatgcctggggcaaggcggtaattagtgacgttaacagctattaccgaaacaaggcaagcattgatttgaaccagttgggtgacaacattgaagccactgtgtcggtggtacaggctacgctgactgaaggggcgattggttacagaaaatttgatgtaatttctggcgctaaagcgatggcagctataaagctggctgatggtagtgaaccaccgttcggtgcgactgttataaataagcgaaagcaggagacgggtatcgtcaatgatagtggaaacgtttatttaagcggtattaatgccggagaaaccatggtggtgcattggggaggctcagcacagtgtgaagtgaggatgcctgcacttctgcaaccagatatgttgatgaatacattgcgactactgtgtaagccgcttgatgggggcatacctggcgccgacgatattaagccggctgcgtga

SEQ ID NO: 227597 - DNA, 360 bp, Klebsiella pneumoniae; identical to SEQ ID NO: 217478

SEQ ID NO: 227598 - DNA, 2208 bp, Klebsiella pneumoniae
atggcgcgtccaaaaactgctcagccaaatcactcgctgcgtaaagtcgcagctgtagtagccacggcggttagcggcatgtctgtctacgcacaggcagcagaacaaccgaagcaagaagaaaccatcaccgtcgttgccgccccggccgcccaggaaagcgcctggggaccggcgccgactatcgcggcaaaacgctccgccacggcgaccaaaaccgataccccgattgaaaaaacgccgcagtctgtgtcggtggtcacgcgccaggagatggagatgcgccagccgacgacggtaaaagaggcgctctcctatacgccaagcgtcttctccactcgcggcagttcgaccacctatgacgtggtcaccattcgcggcttcaccacctcgacgaccgtcaacaccaaccagtatctggacggcatgaagctgcaggggaataactactctgaagtctccatggatccttacttcctcgagcgtgtggaagtgatgcgcgggccaacctcggtgctgtacggcaacagcaacccgggcggtatcgtcagcatggtcagcaagcgcccgactaccgagccgctgaaagaagtgcagtttaagatgggcaccgacaatctgtggcagaccgggtttgactttagcgacgccattgatgatgccggcgtttggtcgtatcgcctgaccggccttggccgcagtcaggatgcccagcagcagatggcgaaatcgactcgctacgcggtggcgccctcctttagctggcgtccggacgataaaaccgacttcaccttcctgagcaacttccagaatgacccggatgcgggctactacggctggctgccgcgcgaaggcaccgtggtgccgtattacgacgccaacggtaaggcgcacaagctgccgaccgatttcaacgaaggcgagtccgataataaaatctcccgccgccagaagatggtgggctacagcttctcccatcagttcgatgacacctttaccgtgcggcagaacctgcgctatgccgatgtgcatacgctctatcgttccgtatacggcaacggctatgtcgcgccgggctacatgaatcgcgcctacgtgcgctccgacgagcacctgaacaccttcaccgtcgatacccagctgcagtctgatttcgccaccggcgcggtcagccatacgctgctgaccggcgtggactactcgcggatgcgtaacgatgtggatgccgactacgggacggcggatcctatcagcatgagcaatccgcagtacggcaatccgaatattcaggtcaccttcccgtacgcggtcctcaaccggatggagcagaccggcctgtacgcgcaggatcagatggagtgggataaatgggtgatgaccctgggcggccgttacgattacgccacgacctcaacgttaacccgcgccaccaacagcctggcggagaatcacgaccagcagttcagctggcgcggcggcatcaactacctgttcgataacggcatctctccgtacttcagctacagcgaatcgtttgaaccggtatcgggttccaacagccgcggccagccgttcgatccgtcgcgcggtaagcagtatgaagccggcgtgaaatacgtgccgaaagatatgccggtggtggtcaccgcggcggtctatcagctgaccaaagacaagaacctgacggctgatccggctaaccaggcgttcagcatccagaccggcgagatccgctcccgcggccttgagctggaggcgaaggcggcggtgaacgccaatattaacgtcaccgcagcctacagctacaccgatgcggagtacactcacgatacggtgttcaacggcaaacgtccggcggaagtgccgcgtaacatggcctccctgtgggcggattataccttccacgaaaccgcgctgagtggtctgacgattggggccggggcgcgctatatcggttcaacggtcagctactacaaaaatgacaccagcaccggtaagaaaaatgatgcctttagtgtggccggttatgcgctgatggatgcgacggtgaaatacgatctggcgcgctttggcctgccgggatcgtcggtcggcgtcaacgtcaacaacctgttcgaccgcgaatatgtctccagttgctacagcgaatacgcctgctactggggcgccggacgtcaggtcgtcgccaccgccaccttccgtttctaa

SEQ ID NO: 227599 - DNA, 597 bp, Klebsiella pneumoniae; identical to SEQ ID NO: 136940

SEQ ID NO: 227600 - DNA, 207 bp, Klebsiella pneumoniae; identical to SEQ ID NO: 137114

SEQ ID NO: 227601 - DNA, 1965 bp, Klebsiella pneumoniae
atggaaacaatctacttttcttattgctggggcgtttttgatggtggcggagttcggggggctgctcatgccggcgcatactacgctgcaagaaatgcaggtataagtttcgaaagagtggcaggaacttctgctgggtctattgttgcagctttaatcgcggctggtgggagtccagattttataaaaaatctattaattgaaactgacttcgagagttttcttgctccggcaaataactttgatagtatttttactaagaagaataattggtctaatctattaaagattataccacataaaaaaataaaaatgctcagtagtgtcatttttaattctggtgttcattcatcttcaatgattgaagaatggatggagaagaaaattgtcagtttactgagaactggtcaaaaggaaaagaatacaagacctgtaacatttcgagaacttaaaattccgctacatattgttgctactgatatatcaactgggatccctaaaatatggtcttgtgaagacacgccagatgaaagtgtctcatttgcagtccgttgctcatgtacgattcctatattttttcaagctatttcaaataacaattctatcttggttgatggtggtgttgttagcaatttaccatcttttgttttttcgaaattggctaatgaatatggacagtatacaaaaaaacctaatataatctcattcactttagtgcaagatgcttctgaaaaaaagagaccggaaaatatacttgattatatggggcagttgtcaaatgctgtggtttccggtgcaactgaaatacaaaaaatattacaaaattcagtttataatatcagtataaatacaggttccattagttctactgatttcaaaggcgttaagatagaagataaaaattatttgttcgactcaggtgtgagggctgttgcggattttataaaaaatgaaagggctgtaataaaaaaaggaatggttaatattgtttcaaatgggattgatgaaaaatttttattattagttcaagaaatgaggaattgtcatgatgagttttatatttcaggtgactccagctattggttggattttctttttccttccgtttattcattgaaaaaacgaaatgtaaatataacttgcttcttttctcagaatgaaactaatgatatagatgaaatcagaagacgagatattttaaggcgattaggtataaatatcttattcgtagaaaaaattccatttcaaggctttttgttctcgcctaaaagcgaatattgctcagcagtgctcacaacgtcacaaggacagatatatagtgatgcacaatatgtagaagaaaaagtaaaattatataatagctatgcagacgctccaatcatccaattattaatcgataaaattgataattgtatgatttctaaagaacatgatgattttgttttttcttatcaaaattgtgcggaagaaaaaataattgataggcttaggaatgttaggcaatataaaaatgcaagtttttctgtcatcgatgtgaatgttgatgacaatgttttagttctttcgagttctgtcaaagagtataaggttctccagttacgttatttttttgacgatttaaaatgtgctggaaagagtgtgatggatctattagaggtcgagttgaaagataatgttaaatctattgtaactccacctgtgttagagaaaataaatgacaagtatattataatagatggaagcgcacgatttttttattgcatgacaaagggaattactcagataaaatcaattgtggttgataatgttttagatcctctcccatatctagatcctaagcctttgagtactcttagattgaccttattaactaagacatttaagcaaaactatggtgattttgataagtctaactttaggttaattgagaaaaatatgcatccacatagtgattttaaatactag

SEQ ID NO: 227602 - DNA, 795 bp, Klebsiella pneumoniae
atggttgttgaaagtgttattctttctaggggccgaatgaatattgaaacttcatctattgaaccacaaactatgcatgaaattacggaatatgtgaatgaaagtttcaatgctatgttatttaaaaatagttctttagatcttttaatgtatgagctgaatttgtatgaatttgagtttatactgtttggtggatgggttcgagatcgaatattagaatatttcagcaaaaagagaataaaatcgaaggatatcgatttagtatgtcatggaacacctatgttaattgattttttccataagaaaaacttcaaatttactgaaaattcttttgggggatttgggttagaattagattcacaacatgtggacatatgggagctggagaaaacatatttaatacaaaaatataatctcgatagggattatatttcattactgaagactactgattatacaatgaacgcaatagcctttcagcctggaactattaatagtaaatctattctttatgactatggttgtatctcttcagttttgaataaagaaatcgaatttctggcaaatgaagtggcattccctaacatacaagcagcaagggcagtaatatttagtgctaaaatggattttaaattatcagaaacggtaaggctatttattagagaggtttgctccaatgaaaatagatataaattagttaggaaaggaattattgagtattgccctaaaaagtatgaaaaaaaagcaataaatatattgttaaatgtgattaataatgttcaagtgagctggtga

SEQ ID NO: 227603 - DNA, 1008 bp, Klebsiella pneumoniae
atggctggcaagatgtggatgattcgtggcgatggtggaaaactatatgatgattttcgtgataagcaagtcgcggctatagggtggtcaccctttgcaccacatgtaaaaccggggttatccagagaacagttgttcgatttataccaagagcttgaacctcaaattaaaccgggaactgcacgttctggtacttctcagatttggcgatttgtgaacgaaatgcagaaaggtgactgggcaattacgtattccccctctaatcgaacctacctgttagggaagatcgtttcagattttgaatatcatgcagagtggcttgaagatggtatgggcattgcccgccaggtgaaatggaatacggaagaaattgatcgtgataacttgagtgatgccaccagaaatacattgggttcaacactgacggttttccgtgtgccggatttcgctgtgaacgaattattgcaggggaaaaaacctgctcctgacgttacgccagaggttcttggttcagttaacgaggaagacgccgtatctaacctcttacgcgatatggaaatgatcgcctttgaaggcatcaaagatcgtatcaatcgacttgattgggacgagatgcaaaatctggtggcaggtgttttacgtagcatgggatataaaactcaggtatcacctgctggcgcggataggggcaaagatattattgcttctccggatggtttcggttttgaaaacccacgtattattgttgaagtgaagcatcgccgtgaacagatggggagccagcagatccgcagctttatcggtggccgccataaagacgatcgcgggttgtacgtcagcaccggaggattcagcaaggaggctcgctatgaagccgatcgttcaacgatcccgctgacgttgtggacactcgacgatctggtgcgtgcgttggttgaaaactacgagcaggttgatattaaaacgaaattactggtacccctaaaaagaacctatttacctgcctag

SEQ ID NO: 227604 - DNA, 873 bp, Klebsiella pneumoniae
atgatctctccagaaaagctgcaatccgccatctctaacgtctcagtctggcgtcagggtgacgtatgcgcgccgcataaaccgctgctgctgttgtacgtactgtcgcagtacaaagcaggccatccacgcctgtttaactacggcctggagatccacgaaccgcttactcgcttgctgaaagagtttggccccaagcgacgcaccgactatcccaatatgccgttctggcggctgcgaacagacggcttctgggagatcgctcacgcagaaggttgcaaaccgcgcaagggcaatactcagccgacaaagaaagaactgattgataaccaggtggcgggcggcttcgatgaagcggcttaccagcaattgctggcccaccctgagatgatcgaccaactggctcagaagatcctcaccgatcgcttcccggaaagtattcagcggatcctggccaaccaactgggattcgattttatcgatcgctccaggaaccgcgacccgcgtttccgggatatcgttcttcgcgcttaccactcacggtgcgcgttctgcggttacgatctccggctggatggtgcgctggttggtattgaagcggcgcatattcactggaaagcatatggtggtccgtgcgtggtaaacaatggcctggcgctctgtacgttgcaccacgatgcgtttgatatgggggcattcgggctggatgagagtatgaccatccgcatctccggcggcgtcagtcgtagtccggtggtagaccatctgttctggcagcgggacggccagcagttattcctcccttatgacaaaacgcagtggcctgctgaacagtatgtcggctggcaccgtaaacagattttcaaagcctga

SEQ ID NO: 227605 - DNA, 588 bp, Klebsiella pneumoniae
atggttgatagtttgaaaacattgtttgcctggtttcctgttcttagaaagctttttgaagcgaggactgccgaggaatttgatgattttcttgatctccattttgaggaatgcgtgcagcgtatggaggccgaggcacatcacttgaatggagactgcgaagaaaagctatctgcttttctggcggcgacgttaagtatgccggggctctctgtcgttcgagagggatatagtaacgggcgtgttgatttaaccataaagtctgaaagtattaatactcctcagcgtcgtttggccgaggcaaagatctattcagggccgagttatcatgtgcaagctatagcacaattgatttcccggtattcaacaggtcggcaaagtcgtggttatgttgtcgagtatgtaaaaaaaccaggaatttccgacatcgtagttaaactccgcagtagtgctgatgaaactcttcctgtgtcccaacatggaattaccaaagaacattcgatgaaatgggcatatgtgagtagccacaaacatgcaagtgaagagctgatccatgtggttcacatcaatgtgaatattcatagataa

SEQ ID NO: 227606 - DNA, 3435 bp, Klebsiella pneumoniae
atggcgaagactgacactagcgagcgtgggttcgaggcgcgcattgtgcgcagactgactggggtgtcacaaccggagtacaaccacgatctctccctgacagactttgctgccacccataatggttatgttcagggccaggccaaagactacaaccgcgatgtcgccctagacgtcgtgcaactgcttgccttcctccatacaacccaacccgacgcggtggaaacgttggaactatcggttgaagggatcaagcgcacccagttcttacaccgtttgcaaggtgagatcaccaaacgtggtgtggttgatgtattgcgcaaagggataagccacgggccggttcacctggacctttacaaatggttgcctacaccaggcaatcctgctgcagcggaagccttcaacaagaacatcttcagcgttacccggcagttgcgctacagcaatgactgtggcaatgaactagacatggtgattttcatcaacggtttgccagtactgacgtttgaattgaagaactctttgacaaagcagaccttggcggacgccattgtccagtaccagacaacacgggagccccgagaactgttgttccagttggggcgctgtgtagcccacattgcggttgatgatgttgaggcggcattttgtactgaactgaagggcaaaacgtcgtggttccttcccttcaaccaggggtggaatagcggtgctggcaacccacccaacccgaatggcctgaagacagactatatgtggaagtcagtgttgactcgggagtcgttggccaacatcatcgaaagttttgctcaggtggtggaagaagaagagatcgatgcaaaaggtaagaagcgcaagaagcgcaaacaaatcttcccgcgctaccatcagctccgcactgtacgcgcccttctgcgccgtgcccgcgctgacggggttggcaatcgctacttgatccagcattcagcaggtagtggtaagagcaatacgattgcttggttagctcaccaactggtagagctgcgtaccgccgctaaccctcttactacccaatttgactcaattattgtcatcaccgatcggcgagcgctggatacgcagattgctcgtaccatcaagggctatgatcatgtcgcctctatctttggtcactctgacaatgcacaagagttacgcagcttcttgcaaaaaggcaagaagatcatcgttactacggtacaaaaatttccctttatccttgatgaactgggcgatttatcgagcaagaagtttgcattgctaatcgatgaggcacattccagtcagggggggaagaccaccacacggatgcatgaagctcttggcgggaaagttggtgaggaggattttgaagaggatgccactcaatctgcagtgaatgcagagattgagaagcgtattcagtcacgtaagttgttgatgaatgctagctacttcgcctttaccgctaccccaaagaataagaccttggagttgttcggcgagagaatcgttataggtgacgaagtgcagtttcgttcaccggaggaattaacctacactaccaagcaggcgattcaagaaaagttcattctggatgtggtggagaactacactagttacgacagcttctaccaggttgccaagaccgtcgaagatgatcccgaattcgacaagatgaaggcgcttaagaagattcgccactatgtcgaatcacacgacaaggccattcgcagtaaggccgagattatggtcgatcattttatcactcaggtcgtaggtaagcacaagattggcggcaaggcgcgggcgatgattgtgtgcaatgggatttccagagctatcgactacttccgtgaggtgtcagattaccttatccagatcaagagcccatataaggctatggttgcgtactctggagacttcgagatcggtggtgagaagaaaacagaggctgatctcaaccacttcccaagcaaggatattcctgccaagctcaagcaggatccttatcgttttttgattgtagccaacaagttcgtcactggttttgatgaacctctattacacaccatgtatgtggataagcctttagcgggggtgttggcagtacagaccctgtcacggcttaaccgtgcccatccgcagaagcatgacactttcgtactggactttgccgataatgctgaggcagtgaaggctgcattccaggactattaccgtgccacaattcaaaccggcgaaacggaccccaacaaattgcacgatctgaaagctgagctggatgggctacaggtgtatagctggcagcaggtagaggatttagtctcgctttatttaggaggggcagatcgggataaactcgacccaatcctcgacctctgtgtagaggaatataaagaaaacttggacgaagacggccaagtgagatttaaggggaaagccaaggcattcgtgcgtagctatagcttcttggcagcgatcctgagctatggtcatccagcgtgggagaagctgtcggtcttcctgaacttccttataccgaagctaccagcacccaaagaggaagacctttctaaaggagtgctggagtcggttgatatggatagctaccgggtggaagccaaagcgtcactcaagatggctatggaggacatagatgcagcagttgagcctgttcctgccagcagcagtggtggcgtaagtgagccagaaatagacagactgtcgaatattattaagaccttcaatgacctgtttggcaatatcgactggaaagacgaggatcagattcataaggtccttaccgaggaaatccctgcacgcgtcgctcgtgataaggcttaccagaatgctcaggtgaattctgacaggcaaaatgccaagcttgagcatgataaagcacttcaccgtgttgtacttgaactcttggccgatcacaccgaactgtttaaacagttcagcgataacagcaatttcaaacgctggttgacagacatggtgtttgatgtgacttacaagaagcatctgtctaatcagctagttagtgatgagttaaagaaacgagtgcaggatgtaattcgtgatagattcggtgaggcggagatatggtcacacgcagcaagccttttgatagatcgtttaatgggcaatgggcgcagcagcatagggcttgctgacttggctatgattgaggaaagcagtggattctctgtaagccatattctcttccctgtcttaaatcttttatccgccaatgatgtaggtcttttacatcgtgaatttttacgtatggatgcatcacatgcgcaatacacgattagttttgatgaggtacgattcatgagttcaggaatgcaaacggaccgcgactgggcagaaggcttgtctatccgctggacgcttcctaaaacacaggatagcgcacatggttga

SEQ ID NO: 227607 - DNA, 1335 bp, Klebsiella pneumoniae
atggccgaaacgaaaaggtatccggcttaccgtgccgcgcgaatgcgttggctgccaccagtgcctgaacattggaatgagcaacgtgccaaaactttctttcacgaggtagatgagcgttccaaaactggtcacgaagaattattgtctgtatcgcatattaccggcgttactccgcgtagccagaagaacgtaaccatgttcaaagcggcgagctatgtgggatcaaagttgtgccgtcctggtgatatagtgattaacaccctgtgggcttggatggctgcgctcggcacgagtaagcatgcaggaattgttagcccagcttatggtgtatatcgcccacatagtgccgacagttttaatccagtgtatctcgattacctattgcgtacccgcgtttatgtcgccgagtatattgggcgttcgactggcatccagtcttctcgtttgcgtttgtatccaaaccagttcctcgatattccattgctgcagccgccgagagctgaacaagaccaggtcgtcgcctacctgcgagcgaaggacgcccacatcgcacgctttattaaggccaagcgcgaccttatcgcgctattgaccgagcaaaagctgcgtctcattgaccacgcggtcactcatggtattgatgcatcggtcaaactcaaaccttctggtatcgagtggatgggcgaggtgccacagcattggagtgtagtgcgcctcaaatgggtttgtcgattcacttatggggattctctttcggatgccaatcgccgacagggcaatgttcccgtatttggctccaacggccctgtaggtatgcatgacacatcaaactcgatggggccatgcatagtaatcggacgcaaaggctcattcggcaaagttaactattccgaaagcgacctatttgcaatcgacactacatatttcgtcgatagaagatgtacgaaagctaatatcagatggctttattacttattggtttggtgtcgactcgaccgaatctcgaaggactcggctgttcccggattagacagaacagatgcgctaaacactctcgtaccattgcctgatggggctgaacaagagcgaattgcaaagcagctcgatattgagacagcagaggtaaatggagctattgccaaggttgaggacgaaatcaagcttatccgtgaataccgcgatcggctgattgctgatgtagtcactggccaagtagatgtacgtggctggcagcccggctcggatgacatcgtgaacgatgaggagctagctgcgttcggtgatgaacaagaagagctggccgatgaggaggatgatgatggcgaagactga

SEQ ID NO: 227608 - DNA, 1431 bp, Klebsiella pneumoniae
atgatctccaacccaccttacggcaaaagctggaaaacagacttggaaaggatgggcggtaagaaggagttcagtgatccgaggttcatcgtcaatcatggtggcgatgccgagttcaagctcattactcgctccagcgatgggcagcttatgttcttggtcaacaagttgcaaaagatgaagcacaatactccgctgggcagtcgcatcgcgctggtgcacaacggctcggctctgttcactggagatgctggacagggggagagcaatatccgccgctgggtgttggagaacgattggctcgaagcaattatcgcgctgccgctcaacattttctataacactggcatcgctacctatatttgggtgctggccaacaagaaagccgaatatcgtaagggccgggtacaactgatcgatgcgagcaagtggttccaaccgcttcgtcggaaccttggcaggaaaaactgtgaactctccgaagcggatatcaaaaatatcttggatttgtacctgggcgagccacaggaaaatgagaattgtaagtggttcgatattgctgactttggctacaggaagatcactgttgaacgtccgctgcgtctcaagagtcaacttaagtcagagagtatcgagagcttgcgatttgcctcgggtgatgaggctctgcgagctgaaatctataaggaatatggggaaaagctctatactgagttcgctaaagtcaagccgctcattgatgcttggttgaaaggtgaagatgagaacaacgatgatgacagcgatgaagagggcgaagaaaacaagtctgccaggcagatagttccggcaaaacgtcgcaagaaactgctcgatggcacgacatgggggcgcgacaagggactggtcgagcttgctttacttgcgcagaaggagattggccagaccgtttttgacgatcacaacgaattccgcactcgtttcgatgctgtgctaaaggcgaacggtaaaaaattaggggcagccgagaagaagatgatctatagggcggtgagctggcgagacgaaacggcaccacctgttattgctaagcgcaataagcttaaagaaagcgatttctttgaacagggatacgacggcgtatatttagaagttgtgggcaaggatcgcttcattgtcgagtatgaagcggactctgatcttcgcgatactgagcaagtccctctaaaggaacaaggaggcattgatgctttctttgagcgagaagtacttccattcgctcaagattcttggattgctatggacaaaactcagattggctatgagatttcatttgcccgctacttctataagccggccaagttgcgcacgttacaggagattcgtacagatatcctcgagcttgagcagcagtcagaaggtttgttgcacaagatcgtgggagcgcaatga

SEQ ID NO: 227609 - DNA, 924 bp, Klebsiella pneumoniae
atgcataagaaacaacaagaccaaagccagatcaagtgggtatctgactttatctggaatatcgctgatgaccgtctacgcgatgtgtatgtgcgcggcaaatatcgtgacgtaatccttccattcactgtactacggcgattggatgccgttctggagtccaccaaagaagcggtactggagcgcaagaagtttctcgatgcccataaagtggtggagcaagatggggctctacgtatggctgctgggcaagcgttttataatgtctctgattttactttgaccaaattgaaagccagtgcggcaggacagcgacttcgtgatgattttattgcctacctcgatggtttttcgcccaacgtgcaagagattctatccaagttcaacttccgaaatcaaatccagaagctggtggattcgcaagtactcggctatttgatcgacgatttcctcgatcctaagatcaatctctcgccgctaccagtcaaggatgccgacgggcgcattaggctcccggcgctagataaccatggcatgggtacagtgtttgaagagttgatccggcgtttcaacgaagaaaataacgatcaggcaggtgaacacttcactccacgtgatgtggtacagcttatggccaaattactatttttgcctgtggctgatcgaatagaatccagcacctactccctgtatgacggctcctgtggtaccggtgggatgctgactgtagctgaagatgctttgctggaattggctgaggaatatggcaaagatgtgtccattcacctgttcgggcaggaaatcagcgatgaaacctatgccatttgcaaggctgacttactcctcaaaggggaaggcgaagaggctgaaaacatagtgggtggtgcggacaaatcaactctttccgccgatcaattcagttag

SEQ ID NO: 227610 - DNA, 906 bp, Klebsiella pneumoniae
atggacagaagcaacgatatctaccagaaagtcaccgaccagattattgctgagctggaaaacggcaatgtgccgtggatccgcccgtggcgcgatggcgagccgccgttcccaatcaatgcgttatccggtcgaccgtatcacggcatcaacgtgccgctgctgtggaacagcgccgacaagcagagcttcgccagcgaccgctggctgacgttccatcaggtcagcgcgctcggcgggcaggtgcgccggggggagaaatcctctctggcggtgttgtatctgccgcgcacacaggaagagaccgatgcactcggccagccgttgctggataaagacggcgagccgaaggtgcggcatttcgggattattcgtgaatttcggctgtttaacctgtcgcagtgcgacggcctgccgcagacgctgtctgagccgtttacccggcccgcaaagcctgtggagatggccgaagccattgcgatgaacagcggcgtgactctgcgccatcgccgccagtcgaaagcgtattacaaacccgcgaccgacctggtgatgatgccgcacccgcagcagtttgaaagcagcgaggcgtactatgccacgctactgcatgaactgacgcacgctactggtcacgcttcacgcatcaaccgccccggtattgccggagcagaacgcaccgaagcactctacgccgctgaagaattagtggcggagaggggtagcgccttcctttgcgcacattgcggcatgcagggcaggctccagcacgccagctatatcggctactggctggatatcctgcgccaggacaagcgggcagtgatccgcgccagcggtatggcgcgccacgccagtgaatggctactcaacgctgtaccacaaccctgtcagcttagcgcctga

SEQ ID NO: 227611 - DNA, 396 bp, Klebsiella pneumoniae
atgacgataaaaacacgcattcagtcacgactgaaacgctcaaaacgctatgtattcactcgtgacgatttcaaggatattgcaggctatgatcagattggcagggtattgcgcgaccttctcaaagaggggcaactactgaaggtgggctacggtgtgtacaccaaagcgcgtcggaacagcattactggaaaagtcatgcccgcagcaccaaggggatcttcggcagtgatcgttgaaacgctggagcgcctgaaagtacgttaccgctatgaaggagctacacagacatataatagtggcgaatccacgcaaatccccgtgtcaccggagatcaaaacatctccgcgctttaaacgcgcgttgtctgtggggaacagcaaactaaatggataa

SEQ ID NO: 227612 - DNA, 258 bp, Klebsiella pneumoniae
atgtgtttgcttactgatttttttaagcaaaccattgagcaagatatccagcgttatggcaatcagtatccgcagttttgtgtttcaccaaatgatgagctaaaaatggggctggacgaacttgagcataacccgctttataagacacgctaccagcaatttgttgccccaatggtatatggtgctcgcaaggtatcgtgggatgaagcgtatgcttcctttcgtcaaatggcgttaataattctagatacttactaa

SEQ ID NO: 227613 - DNA, 690 bp, Klebsiella pneumoniae
atgatcattcattttactaataactttaaaaaattgacgtctattatttcgtctagttcatttctattgcgttattgtggtgaatattttggcgacaagcgaggagcgatagtatctcgggctgcacatcccatggtttcatttagtgagtatgaacataatgagttgcataataaaactgtgacatatggtggttacggtattgcgcttaaaaaatcatgggcagtgagaaatggtttaactcctgttaattatattgagaaaaattcgccagttgcattaggtcttattgctttgttacgatcccgccagcttggttcgttgccgaaaagcctacgcctacctgttattcagttaaaatgttttacaaaacatgtttatggctataatagccactttaaagaagatgatttcttcttcaaatatgagaatgaatggagattcgttccgacaatccaacaaattggaggtggtagaatatctgtggactattctaaatataaaaagagagagagtttatataataatagagtagcttcttatcctctaaaatttttgcgtgaaaatgtaaaatatatctatgttcaaagtgcatttgaacgtcaagagattattgatagatttggtttctctgaaagacaagttgtgatatctacatggaagcaatcgataaagagtaagaatttttaa

SEQ ID NO: 227614 - DNA, 795 bp, Klebsiella pneumoniae
atgttgagacggattgtatcccctaaagacgcagtggatatttgcagaaaaataagagcgtcgagggaccgaggttttatttcaagaggattcagatttttattgagtcagctcccaatgggctttcatgatgttactgaggccactttatggcgggcaagaaaaactgataaaacacattctgaaggatttgattatatccaggatattatctgccctccggcacagtttgccaaaattgggcgcctcaataataaaggtatgcctgtattgtacgcatctatcagcaatcatggatgtcttgctgagattggtgccatgcctggggataaagttcaggtatctgcatttactctaaagcctgggctgaaattgcactgcggttttgtcggtgatattgttagggcgcataaatggaatagtgaaaattttactcttgtccaggaaacactggagccatttactgaagagcaaagaactagtgtttttttgatagatagttttattgcagaaatactttctgataatgacgccagagttaatgattatctccacacgacaatacttgcagatgttataagaaatggtaagaataaactggatgcaattgtgtatccgggagttgagtcggtaggggctaagaattatgctatacatactgaagcattagttaaatttaacatacctgatatttatcttgttgaaattaaaaacaaatacccttatggtttctatgaatggacagtgcttcggcaaagaagtcattatgataatggtagggttatttggaaatga

SEQ ID NO: 227615 - DNA, 552 bp, Klebsiella pneumoniae
atgaaacgcattctgacccttggcctggcgctgctgatgctgatcctcgccggctgcagcaccgaggtcacggagtaccggcagcagcagcccgccctcgacatctttcactattttcaagggcgaaccgaggcgtgggggatggtgcaggatcgcagcggcaagcagctgcgccgcttccatgttgagatcgatggcgacgtcgtcggcgacaccctgaccctccatgagcgctttgtctatgacgacggtgagaagcagcagcgggtatggcgcattcgccgcaccggcgataaccgttatcagggcaccgccggggatatcgaaggggtggccagcggccaggcggcaggcaatgcctttcactggcgctacagcatgaacgtcgaggccagcggcagccggtggctgctgcactttgacgactggatgttcctgcaggacggcagccatttatttaacaaaaccgagatgaagaaattcggcattacggtcgccaccgtgacccttttctttacccgaaccacagcagaagagaggacagcgccatga

SEQ ID NO: 227616 - DNA, 1110 bp, Klebsiella pneumoniae
atgagagttaatggacttaccaaaggatttttcatccttatcgtcttcattgtaaccctggccttttttgatgttctctcaccctattattccgccatcctttgggctgcgatcctcgcggtgatttttaatccggtcaaaaacaagatccgtacccgcctcggcgagcgcaatggcctcgcggcgctgatgaccatcgtcattatctgtcttatcgtttttacgccgctggctatcattctctcctcgctggcctacgagctcaacctggtgtacagcaaactgcagcataacgacacccagtttccgacggtggtcgccagcctgttcgcccatcttcccggctgggccagaagcttcctcgccgatcataaccttgatagcgcgcagcagatccagcagcagctctctgatgccgctctgaaaggcggtcagtatctggccggcagcgcgtttctgattggcaaagggacttttggcttcaccgtcagcttcggcatcatgctgtatctgctgtttttcctgctgaaggatggaccttatctggtgctgttgatcctcgagtctctaccgttatcaagctatgtgaagcagcatttgttcgctaaattcgccgctgtggcccgcgccacggtaaaaggtaccgtcgccgtggcgctggcgcagggggcgctgggtggctttgccttctggatcgccggtctggacggcagcattctctggggagcgctgatggcgtttctgtcgcttatcccggcggtgggctcggccattatctgggtgccagcggccatctacctcttcgccaccggccagctgtggcagggcgcctttatcgtcggcttctttgtgattgtgattggcctggtggataacattctgcgtccactgctggtgggcaaggataccaggatgccggactatctgatccttatcgccactctgggcggcatggagatctacggtatcaacggcttcgtgatcgggccgctgatcgccgccctgtttatcgcctgctggaacctgctgtcgggacgagaacatgccggcaataccgatgaaatcgatgaagagtttattgaggaagcgaaaaatagccgtaatgaatag

SEQ ID NO: 227617 - DNA, 888 bp, Klebsiella pneumoniae
atgaaaaccctacagtattcattcgcacagattgaagccttcgcgacgattgctgagaccggcagcctgtcgcaggcggccattcgtttagctaaagaccggaccacgctgcgcgatctgctggactatctggaagatgcgctgggctaccggctgttcagccgtgaaggacgtagcctgacgctaaccgccgagggcgagcagctgtttcgccaggcgcatctgctgttgcgtcaggcgcaggctttcgagtcttttgcgcaaacgctgccgcaaaccgccgggcaggcgctgcgtctggtgtacgatcccttcgtgccgcgtgaatttctctgtgcgctggccgataacctggcccgacggcagatccgcctgagctgctggagcgcctcgcgtcgcgaagccgagcaggcgctgagcgatggcgtggcggagatggcgatttgtcaggctaacaaccgcacgctggggagcgaaatggagtggcgggcgctcggcaccgtggatctgcgtttctacgcggcggacagcctgttccacgacgctccgcggccgctgacgctattgaatctttcgttgacgccgcagttagtgatgcaccggcgcagtgacgatcaaatcgcccgccggctgcagatttccggccatacgttgtatatgaatgaaattaccctgttgcgccatgcgctggagcaggggaggggctgggggtttttaccggaccatttgcggccaggcgagtggcagggagtcagtgaaatcgcgacggaggtcggcagtcaggggctgaacgtcactatggtgatgctctggctgcccggaatgaataagcatcggatgcttagcgacatcgtgcacgaggcgccggagctttggctgcgcagataa

SEQ ID NO: 227618 - DNA, 1758 bp, Klebsiella pneumoniae
atgacttttacattacgtccttaccaacaagaagccgtcgatgccaccctcgcctggttccgtcgccataccgagccggcggcgattgtcctgcccaccggcgcgggcaaaagtctggtgatcgccgagcttgccaggctggcgcgcggccgcgtgctggtgctggcccatgtcaaagagctggtggcgcagaaccatgccaaatactgcgcccttggcctcgaggcggatatcttcgccgccggtctgcagcgaaaagagagccacggcaaagtggtgttcggcagcgtgcagtcggtggcgcgcaatctcgaccagtttcgcagcgaattttcgctactcatcgtcgatgaatgccaccgcatcagcgatgatgacgacagccagtatcagcagatcatcggtcacctgcggcaggtcaatccgcagatccggctgctcggcctgacggccacgccgttccgccttggcaagggctggatctatcagttccattatcatgggatggtgcgcggcgatgaaaaggccctgttccgcgactgcatctatgagctaccgctgcgctatatgattaaacacggctatctgacgccgccggagcgcctcgatatgccggtggtgcagtacgatttcagccgcctgcaggcgcaaagcaacggcctgttcagcgaagccgatcttaaccatgagctgaaaaaacaacagcgtatcacgccgcatattgtcagccagatcgtggagttcgccgaaaaccgcaaaggggtgatgatctttgccgccaccgtggaacacgcccgggaagtgaccggcctgctgccggtaggccaggcggcgctgatcaccggcgaaacgcctgggccggagcgggatcgcatcatcgaggcctttaaagcgcaggcgtatcgctatctggtgaacgtcgcggtgctgaccaccggcttcgacgccccgcacgtcgacctgatcgccatcctccgccccaccgagtcggtgagtctttaccaacagatcgttggccgcggtctgcgcctggcgccggggaaaaccgactgtctgatcctcgactacgccggcaatccgcatgacctgtatgccccggaagtagggacgccgaagggcaaaagcgacaacgtgccggtgcaggtcttctgcccagcctgcggcttcgccaataccttctggggcaaaaccaccgccgacggcaccttgattgaacactttggccgccgctgccaggggtggttcgaagatgacgacggccaccgcgaacagtgcgacttccgctttcgctttaaaaactgcccgcagtgtaatgcggaaaacgacatcgccgcccgccgttgccgggagtgcgacactatactggttgacccggacgatatgctgaaggcggcgctgaaactgaaggacgcgctggtgctgcgctgcagcggcatggccctgcagcacggcggcgacgagaagggcccgtggctgaaaatcacctactacgatgaagacggggcggatgtcagtgagcgcttccgtctgcagacccccgcccagcgcaccgccttcgaacaactgtttattcgcccgcatacccgcacccccggggtgccgctgcgctggataacgccggcggatatcgtgacccagcaggcgctgctgcgccatccggactttgtcgtcgcccgcatgaaggggcagtactggcaggtgcgggaaaaagtgttcgattatcaggggcgttttcgtcgcgccaacgagctgcgttaa

SEQ ID NO: 227619 - DNA, 324 bp, Klebsiella pneumoniae
atggagtggttatgtaaagctctggggttaaccagcgatacgatttcaatcaggaaaatattctccccagacgtctatggctcaatgaagctgaccatcgccggtgctgattttccaaaggtgttcgatgacccgaaagaacagatattttcaggtcaatggttaaaggcagtagttgaacaattgtcctgtattcacgggccagctctggtattaactgccagtcattatgaaacccggatggttgccaatcagctgggtgaggtctcgcaaccagtttatattcagaaagcaggtcaggccctgtcagaaattattaaatag

SEQ ID NO: 227620 - DNA, 195 bp, Klebsiella pneumoniae
atgaccgtactgatcaccataatagcgagcataatgacgatgaataataagcgaggcgaatcaaccaacggttgtaatagctccgataccatcatgggtaattcggcgatcgtaataagccatgcagataccgcagcagaggccaccaggaacatcaccacggatgtggtttttgccgcgttaatcagcacatga

SEQ ID NO: 227621 - DNA, 1407 bp, Klebsiella pneumoniae
atggggaataagtgggccaccgttagcattgacgatattaagttacctgagaaatatagttgtgttggaggcccgttcggttcttctctttcacaaaaacattatgtcgattcaggtgttcctgttatccggggcaccaatttagccggagacatattttcagaaagtgactttgtttttgtttctccagataaagcaaatgaattacaacgtaatatggcctttcgtggagacattgtctttacacaacggggaacattgggacaagtagcgttaattcctgaagactcactatacgaaaaatatattgtgtcgcagagccaaatgaagttgactgtaaatccaaaacaagcggatgcatattttatctacacatatttcagaactaatgaagccaagacattgattgaaaataatgctattattggaggagttcctcatatcaaccttggtattctgaaagaatttaagttgagactccctccactttcagagcaaaagcgaatctctgaggtttccaagtctattgataacaaaatcaatctaaaccgccaaatcaaccaaaccctggaacaaatatcccaaaccctgttcaaatcatggtttgtggatttcgacccggtgattgataacgcgctggatgcagtaaactcaatcccggaaacgctgcaatctcgcgccgaactgcgtcaaaaagtacgcaatagtgcagatttcaaaccacttccggcggatattcgtgcactattcccggctgaatttgaagaaacagagttgggctgggtaccaaaggggtgggagagcgtgactttcgattcattctgtgatttgattcagagtgggggaacaccttcaagaaaggaaacatcattctgggatgaaggtacaataaaatggctttcatctggcgaagtgaaaggaaaaatagtattagatacaaaagaaaaaatcacagatattggattactaaatagctcagcgaaattatgggcaaagtatacaaccgttgttgcaatgtacggtgcaactgcgggagaagtgtgtcttattggcgataagatgacagccaaccaagcatgttgtggattgtattcagaaaaatatccattctatgtctataattttgtcagcgataaagcatatgaaatagcatcaaaagctacgggctcagcgcaacagaatcttaataaacttataatatcctcaacaaaatttacacgtccctctaatgcgataatttctatatttgaagataatgtagccccattatttatgaactggttttctaatacagctgaaaataatactttaacagccctccgcgacactctgctccccaaacttatctccggcgagctgtccctggaggatctaccagatttagtaacccaaaccgaacccgcttaa

SEQ ID NO: 227622 - DNA, 270 bp, Klebsiella pneumoniae
atgtcatttaccatcacgcaaaatttgaagtcgtttcaaacaattccatacctgaatctcgttgagccgcttagtgccgcacctgtagttgtgacatataccgcaaaaggggtcgacagtatcaacgggactactgcaacggtgctgtttgatacgcaggttgaggggctggatgctacaggtcagctctactattcctttgagtttactgacctggtaactatttttgaggatgcagaaacggcacttaaaaaggagattcagtcttaa

SEQ ID NO: 227623 - DNA, 2157 bp, Klebsiella pneumoniae
atgacatcagaattgactagcaaaaccacaaactcggaaactgatgaaatcgatttagggcgccttttcggtgaattaatagattatagaaaacttatcgtatcactaactgcgggatttacagcattagcagtactttatacattgctcgctacaccaatatatcaagcaaatgctttgatacaagtggagcaaaaacaaggtaatgctatattaaatagtttaagtcaaatgataactggtactcagccacaatcagaaccagagatcgcattactacagtcgcggatgatattgggaaagacggttgatgatcttaatcttcaagcaagagttgaacaagtctattttccagtaatcggtcgagggcttgctagattgttaggtaataaagagggagagataaatgtatctcatctatatataccaaccttcaatggggaaaaacccgaactaaaacttactgtaattgataataagaactttagtattgatggaaatataggtagtgttaaaggtgttgtcaatgaaatgctggattacaaaggacttgcattgttagttaatagtattaatgcaaatcctggtacaacatttaaaatatcgtatattccgaaattgaaagcaatatccaatatacaaaatgtcttctcggttcttgaccaaggtaaagatacgggaatgctcaatttaacgatattggattctgatcctgatatggcttcaaaaatattagatagtatcagtcaaaactatcttgcacaaaatgttgagcgtcaggctgctcagaacgctaaaagtttagattttctagcacagcaattacctaaagtgagaaatgatttagatacagctgaaggaaaactgaataactatagaaaagagcaagattctgtcgatttaacgatggaagccaaaactgtactcgatcaaattgtaaacgttgataatcaactaaatcaattgacctttaaagaagctgaaatatcacagttatatactaaagaacatcctacctataaagctttaatagaaaaaagacagaccttgcagaaggaaaaagagaggctaaataaaaaagtaagtgccatgccttcaactcagcaagaagtgcttcgtttgagtcgagatgttgagtcaggccgtgcagtttatatgcaattattgaatcggcaacaagaacttaatattgctaaatcaagcgcgattggttatgtcaggatcatagataacgccgtaacggatccgtcaccagtcaagccaaaaaaaatagtaattataattgcgggttttgtttttggtttatttatttctattggcattgtattgctgaagatatttttccgtcgtggtgttgaatcacctgagcaacttgaagaagtgggtattaacatctatgcaagcataccaacctccgaatggctaactacggaaggtaagaaattaaataagaataaaaaatcacaagaagaaattctattagcagtagaaaatccagcggatttagcaattgaagcaattagaagccttcgcaccagtttacatttcgctatgttagaagcaaaaaataacatattgatgatctctggtgctagtcctaatgcagggaaaacatttgttagtagtaatttggcttcggtaatagcacagactggaaaaaaagtactttttattgatgctgatatgcgaaaaggttacatacataaagtgtttggaaaccctaataaatacgggctatcggatatactagcaggaaaagcttcgttaaatgacgttataagtaacattcctaatgccggttttgattttatcccaagaggtcaaataccacctaatcctgctgagttgttaatgcacccacgttgcgaagagctatttaggaaaatctcgcaattgtatgatttaattatagttgatacaccgccaatattagctgtaactgatgcggcaataataggtcgatatgcaggtaccgcattgttagttgcgcgttttgaacaggataccgtaaaatcaattacggtcagtatgaaacgcttcgagcaatcaggtacagtggtgaagggttgcatacttaatggcatagtaaaaaaagctagtaactattatggttatggttataaccattacggctactcatactctgataagaaataa

SEQ ID NO: 227624 - DNA, 303 bp, Klebsiella pneumoniae
atggattctggaaacacgggcgttaaaattaaaaaagtcaccttcgactggaaagaaatcaataagtctgaagtttcaagttgctaccgagtaacctgtaaaataactacagacaacggcatagaggttgaaggtagctacttttaccaatgggataagcctggcgtctctggtttggggtcttttaattgggaccggactcctgaggcaagcgcggaagtagaagctttcaacgtggcatttggaagagttcagaatgttctgccaatggttattattccgaagaatgaaaattggaattaa

SEQ ID NO: 227625 - DNA, 318 bp, Klebsiella pneumoniae
atgcaaaagagcagatcgcactggacgcatcgggagcctcggctgatatccgggttgctgttgcgaatgatgattgcactaatcgccctgtgcctgctggcgcagttaagcggctgcaacaatacgcgaacggtatacgtcaaagtgccggtagtcccgttaccggccagcctgacggctgacaccccgcaaccggaaatccccgacaacctgacgtggggccagagccttgatttaaacgtcagtctgctatcagcactgggccagtgcaacagggataaggccgacatcaggcaggcggaaacaaaacgtcagtag

SEQ ID NO: 227626 - DNA, 258 bp, Klebsiella pneumoniae
atgtctaactacaacatagcatccaaaggcctagaagagcagaacaaagtcaacgttgatctcgcagcctccggcgtcgcctacaaagagcgcctgaacatgccggttgtcgccgaagtggtcgccagagagcagccagagcacctgagaaactacttcatggagcgcgtccgccactaccgagagcagagtatccagctcccgcgcgcctccgatccgcgctacattgagatggcagagcagaacgccaagaaatag

SEQ ID NO: 227627 - DNA, 777 bp, Klebsiella pneumoniae
atgaccgctcagcttatgaccgcgatcagcaatcgcgatggtgatgcgctggccagaatggcagcaggtggcacggagccgcagaggcttctcgatttcgaagctgaaaggctggttgactctctgttccgtcagctgaagcagatcttcccggcatctacccagactaacctgcggaccgacgccgaagagaagacagcgaagcgccagtggattgccgcttttgccgaaaacggaatccgcacccgcgaacagttatccgccggtgtgcgccacgcgagagccagtgagtcgccgttctggccatcgccgggccagttcatcaagtggtgcaaggacagtggcaccgtgctgggagtgactcttgtcgacgtgatgaacgagttccaccgctacagccgtgagaaggggctgcataccggcggtgctgagcgcttcccgtgggctcaccctgtcatgtactgggttgttaccgatacccggagagcaatgtaccagcgccagctcagcgaggcagaaaccgagaaatatgccgataaaaagctggaagactgggcgctgaaagtcgccgcaggagaacaaataccgtcgccggtactggctctggagaacaaccaggaagccattccgacaaaccatgtcagccgtcagcaggggtttcaccctgaaggaaaaagcttcggatgcatgccaagcgcggcatcgctcggcgcgttaactccggctcagtggctgcgggatgaatacctgcgcgggaaagagagagggcttatctga

SEQ ID NO: 227628 - DNA, 417 bp, Klebsiella pneumoniae
ttggatatcgccgtcagcgctggtccaggggtgataaaccaagagttcgttgagatactccgttccgttgagtatgcgccagctgaggccaaccatatgtttgatgggcgcaaagctgagaacatcaggattatcaacgtccgcggagacagtatgtcaggtacgattgagccaggagatttgctgtttgtggatatcagcgttaagagatttgacggtgatgggatttatgcgttcttgtacgacgatacagcacacgttaaacgcctgcagaagatgaaggacaagctgttagttatctcagataacaagagctacgcagcatgggacccgatcgagaaagacgagatgaaccgggtattcgtgttcggcaaggtgatcggcagcatgccgcagacgtacaggaagcatgggtaa

SEQ ID NO: 227629 - DNA, 321 bp, Klebsiella pneumoniae
atgcaaaacattgaaattaagctttcggatagtttcattgagacctctgctgactttgcaagtttttcaccggtgagctcatctaacgataaaatgatctacatacattttttgaaaaacaaggctataccagtgattgtttctcaacaggagatccaagaggagccaggtagagcaaacttgcaaatcggctcaaggaatgaactttaccaagaatgtactgtccttatgggtattgaccagttaagaactctaaacgaaaacttgaaaggtcttctggatcaacttgacgctcagcactcgaagggaacatcgcgctga

SEQ ID NO: 227630 - DNA, 699 bp, Klebsiella pneumoniae
atgaaaagagaagaagatgtaggtgacctgacaatttcttacacgaaaggtagtacaactacgcctttgtcacttactcttagcaatgttccatctcaagattttatgagcttcatgcagactggttcagacttacttaaggggaattctgaaaaacctattttttctatgtacccacagaaaaaagataaagaacctgaggaatctttggacgaatcttctaaacttttctcaattggtgtcgaaattgaatcgccagaaggatattacacaccagatttcgtaaagccggcttcaccaaaggacaagcaggattctcatatgtcagatttaaacagaaatgaaatacaagcactactgaaagcaaacaaggctgaagtagatgctgtagcttctaagatgcaagctgacatggccaagtggcgtgaatcaatggctttagatatgaaagaaatcaaggggttgatatccactcagcatgaaaagattaatggtagattggacatgcaatcgactaaaatagaaagcgccctcgattcgcagtccaaaaaaattgacgcagccctttctatccaagaagcaaagattgaaggtaagttaacagaggttaaacttgacataatcaaatgggctttagggctacctgctcttgcatttgtgttgtataagatttacggggcgttaactggaaccccatga

SEQ ID NO: 227631 - DNA, 285 bp, Klebsiella pneumoniae
atgaacgcataccgcgcatacgacgctatcgaagaacggaaatgggctgaacagtcgctcaccgaagagaagcaaaagtggattgacgatcgggcgcaggaaattatcgacgtcctgccgaaagagccgtcaggcctgttccgcttctctgtgccgatggacaaaagcccatacgaaggcctccgcagcgatgcagctggcgaggcatataacgatctcatttcggcagtagcttacgcccaggcggaatacgactgggatcaccgcaccggctgcccgttttaa

SEQ ID NO: 227632 - DNA, 219 bp, Klebsiella pneumoniae
atgccagaaatcattgatcaggccaacgagttagaggaactccagcgggaagccgccattgcgaaatgtcgcatcaaccatgcggcggtttcagctactcactgccgcgactgcggggaagagatacccgagcggcgccgggaactggtggcgggatgccagcgctgtgttagttgcgccagtgatatcgaactacggttgaaacaggagggcaaatga

SEQ ID NO: 227633 - DNA, 1215 bp, Klebsiella pneumoniae
atgagttatcaggtcttagcccgtaaatggcgcccacaaacctttgctgacgtcgtcggccaggaacatgtgctgaccgcactggcgaacggcttgtcgttagggcgcattcatcacgcttatcttttttccggtacccgcggggtcgggaagacctccatcgcccgtctgctggcgaaagggttaaactgtgaaaccggcatcaccgccaccccctgcggcgtgtgcgataactgccgggaaattgaacaggggcgctttgtcgatctgattgagattgacgccgcctcgcgaaccaaagtcgaagatacccgcgatctgctggacaacgtccagtacgcgccggcccgcggccgctttaaggtctatctcatcgacgaagtccatatgctgtcgcgtcacagcttcaacgcgttgttaaaaacgctggaggagccgccggcgcacgtcaaattcctgctggcgacaacggatccgcagaagctgccggtaacgatcttatcccgctgcctgcagttccacctgaaggcgctggacgttgaacagatccgccatcagctggagcatattcttggcgaagagcagattgcctttgagccccgcgcgctgcagctgttgtcgcgggcggccgatggcagcctgcgcgatgccttaagcctgaccgatcaggcgattgccagtggggaagggcagctgacggccgcatcggtgagcaccatgctcggcacccttgatgacgatcaggcgctgtcgctgattgaagcgctggttgctgccgacggcgagcgggtcatggcgggcgtcaatgacgccgccgcacgcggcgtcgagtgggaggcgctgcttgtcgagatgcagagcctgctgcaccgcatcgccatggttcagctgtcgccttcggcgctgggcgccgacatggccgcggtcgaagtgcggatgcgcgaactggcgcgaaccgtaccgcccggcgacgttcagctctactaccaaacgctgctgattggccgcaaagagctgccttacgccccggaccggcggatgggcgtcgaaatgacgctgctgcgcgccctggcgtttcatccgcgtaagccgctgccggagccggaggtgcagccggcacaggccgccgcgcccgcgccgcgtcagccggttgcccctggcggcccgcagccacctgcagcgcagtcagggagcaaccaccccaaaaaagagtga

SEQ ID NO: 227634 - DNA, 411 bp, Klebsiella pneumoniae; identical to SEQ ID NO: 139558

SEQ ID NO: 227635 - DNA, 1431 bp, Klebsiella pneumoniae
atgaagccgatgaaaaacctgctgctgatggggctgctgtccgcgctgggggccggcggggcgctggccgccgagcgctcgcactttacgcactttatcactcgcgacggcgccaccctcaaggacggcgacaaggtgtttcgtttcgccgggatccacgcgccggagctgcaccgcattgaagacgacgcccgcggcccctgcagggcagacccgcgcggctggggacaatactttaaatggccaacggcccaggagcaacaaaactggatccaggcgatggtgcaaaccggggcgaaagcccagcgcgtctacgtgctgtcggtgcagcaggaatttgataaggcctgcgggcgcgagacccatattctggcgccggaaacggcggacggcatgccgcggctgaatgagaaagccatgcgggtgtatgacaacatgattgccgaagcggataaacagggattgcgtctgatcctgccgtttatcgaccactggtggtggtggggcgggcgcgagcagctggcggcgttctatcatgaaaaagcggaagacttttatcggaccgatagcaagaccttcaaagcctatctggatgtgatccgccaggttatcacccggacaaataccgtcaccggccgcgcctattatgatgaaaaggcgatcatggcctgggaaaccggtaacgagctggaggataccaacgccgatttcctgcatcagaccgcggcgtggattaaaaagtgggcccctcatcagctggtggtggatggcacctataagaaaattaatccgtttgcgttgaccgaccccaatgtggatatcgtcagcaatcactattacaccaatgccgataataaccatcccgggcaggtgacgcaggatctgcgcgccgtcggcggacaaaaagtctatctcgtcggcgagtttggcctgctgccggcggatcaactgaacgccattatgcagtcgattgttcacagcgaggtccagggctgcgacgtgatatctcgcctcaaggtgcggatcaacgaggtttacaccgcgctgaatatgattgatttcggtctcgataacctgccgggcggcccgctgatggtggaggggttcacctatattccgcaccgcttcgcgctgggcttctccgaggcgccgcgcggcgacgatatccactggagcatgaccggcgacaaccagaaactgtaccgctggcgctgccgggcggcgacttacgccaactggccgaccctgcgctatatgctgcgcggcaacaccgtttccgatgcgccgctgatcatcggcagcctcgacccgtgctactcctgtactgaccgcatgaccgtggtcgatgtacgcaagaagaagagcaaagtggtgccatacaaagagctggagcgctacagcatcgagcgtaaaaactcgccgctgaaataa

SEQ ID NO: 227636 - DNA, 1092 bp, Klebsiella pneumoniae
atggcgctggcgtgggcggataaacacttccgctacggcgaagatcagaacgctgagcagtataagcgcaatgaaacgcagagccgcgcggtgctgaaagagagcctgctgatggcgatgtgcatccgcgacatgatgcagggcaacccgaagctcgcagaaaaagggctggtggaggagtcgctgggctacaacgccatcgccgccggtttccagggtcagcgccactggaccgatcaataccccaatggcgataccgccgaagcgctgctcaacagctcttttgactggaacggggtgcgcgaaccgtttgtcgtcgctaccgaaaacgacagcctcaacggcgtggccatgctgatgggccatcagctcaccggcaccgcccaggtgtttgccgacgtacgcacctactggtcgccggatgccgttgaacgggtcaccgggcagccgctcaccgggcgggcggagcacggcatcattcacctgattaactccggctctgcggcgctggacggctcctgccagcagcgcgacgcgcagggcaatccgacgatgaaaccccactgggagattgagcagagcgaggcggatgcctgcctcgcggcgaccgaatggtgcccggcgatccacgaatacttccgcggcggcggcttctcttcccgcttcctgaccgaaggcggcgtgccgttcaccatgacccgggtgaacatcatcaaaggtctggggccggtgctgcaaattgccgaaggctggagcgtagcgctgcccaaagcgatgcacgaccagctcgacgcccgcaccaactccacctggcccaccacctggtttgccccacgcctgaccggcaagggcccgttcagcgatgtgtactcggtgatggccaactggggcgccaaccacggcgtgctgaccatcggccacgttggcgcagatttcattaccctcgccgccatgctgcgcattccggtctgcatgcacaacgtggaagcggcgaaaatctatcgcccttccgcctgggccgcgcacggcatggatatcgagggccaggactaccgcgcctgccagaactacgggccgctgtataagcgttaa

SEQ ID NO: 227637 - DNA, 216 bp, Klebsiella pneumoniae
atgatgatctcatatcaggaacttgttcgcaccttccttaacaatataaaagccattgccttgccgtttaacgatatcgcggcggtcggtaatgactatttactgtatgtgccgttggaacgctgcaaccttgcgcctatgaactatcttttgaagggtggccacaggtcgggccactttagcttagccaccacaggagtcagcgatgtcacataa

SEQ ID NO: 227638 - DNA, 831 bp, Klebsiella pneumoniae
atggataaaaagctgcgcgtcgccgaaattgccgcccgcaccgggctatcgcccagcaccgtttcacgcgtcctggccgggaaagcgaataccagcgacaaggcgcgccgggcggtgctggactgcgcccgcgagctgggtgtcatgcaggggttggccgccgggcgtctgctgctcaatcatctgctggtgtttgccccgcagcgcgcattcgatgagcgatcggatatcttctactaccgggtgatccagagtatcaataacgcgctggcggcgcatgaagtgcgcctgcgctactgcgcgctggatgagaacgacagcgacgccaacctgtttcttgcccgcatgaatgaacctgagacccaggccgcggtgctgctggggatcgacgatccgcatattcatggcctggcggcggatctgggcaaaccctgcgtattgatcaactgtcgggatgaagggatgcggctgccgtccatcgctcccgatcatcggctgatcggccagtgcgcggcccgctatctgtttgatatggggcatcgggcggtgatgaacgtgatgtgcctgcgccgctataccatggagctgcggctggggggattcaggaggcgtggcgcgcgcgtaatctgcgctttaccgccagccgggatcttatcagcgtcgccaactttagcgccagagagacggaagagcaggtgggcacctggcttgacggcttacagggcaggccgttgcccaccgccttcctggtgggcggcgattttatggccgccggcaccgtcagcgcattgcaaaagcgtggcctgcgggtgccgcaggatgtctcggtga

SEQ ID NO: 227639 - DNA, 651 bp, Klebsiella pneumoniae
atgaataacaaacttaatctgttatatatcaataatattgggattcttaatgagtatagcaaaagatattcagataaaaatctacatggcccacttcttttaaatatcagtaattattcatctcagaagataaagttgatggttgttggacaagagacgttcggctggaataaatcaccctctatagtagatcagcaagctacgtatcaaaaatttaattttggatcatcatattatagtagtgctttttggaatataattaggaaggtggaaagatcactaaatattgaaccatatgctatagcgtggtcaaatctcaatcgatttgatattgattgtgggtcaccagatcgcacggaacttgcacaagatattgcttctctagactatctcgttaaggaagagattagtattcttaaaccagatatatgtatattttttacgaatcacaagtatgataaaaggctgagtgatttataccgagatctggtttttgataatattgatggattgccaaagaaacatttttcaagattacatcatccagatcttccgaagtatacgcttagagcgccacatcctagaacaatcagaacgcagcgatgggaagatggttttattatggctgtttcacaatttaaaaatgcttga

SEQ ID NO: 227640 - DNA, 375 bp, Klebsiella pneumoniae
atgattgacgttattaaagcgctcaataacatacgtatccttcgcgctcaggcacgagaaaaagatttggctacactggaagagatcctatcaaagttcacggatcttgttcatgacagacgccaacatgctgaacgtcagggaaaaatcgaagccctccgtgcacagatgcttgaagatggcattgacccgtctgagctgctgggtaatgttaaatcttcacgcccttctgctgttcggccagctcgcccggctaaatacaaatacactgatgaaaatggcaacgagaaaacatggacagggctgggacgtacaccaaaagtgattgcagctgcactggaaagcggtaaggttctggaagattttgccatttga

SEQ ID NO: 227641 - DNA, 906 bp, Klebsiella pneumoniae
atgacaatcctattttgcaacattggatggatgaacaaatatgatggaattgacggggattcaatcgagcgaggtgggtcctacaataaaacagccataggccatgaagtttgcaactttacgaattctgatggatatgtatatggatatgtacaaccaacaggccagataaaaatagaaaaattaggagccagcaggaaggctgagaaaattgatggtataactgttgtttggctagctggtcctgagtctggtggtactgccgttgttggttggtataaaaatgcgacagtattccgtgagccacaagatttaatatatccttcatcaaaacatagagataatggcataactacttttagaataaaagcgctgtgggaggatgcttttttattaccctcggataatagaagtttaatgatccctagagcagtgaaaggtggaattggacaaagtaatgtttggtatgccaacactccagaaagtggtgaacatgtcactaaagtaaaaaatcttattgctaattttgacaaaaacactcaaataccagatgtagaccaagaagccatgggtgccgaaggcaatccgagacttagagcacatatacaaagagaaagaaactcaaaaattgttaaggaaaaaaaacgaattacactaaaagaaaaaggtcatttgaaatgtgaagtatgtagcttcgattttttcgaattttatggcgaaaatgggtatggtttttgcgaagtacatcacttaataccattacataaatcagacggtgttattatcactaagttatcagaccttgcaatagtatgttcaaattgccatagaatcatacataaaacatcgccaatgatttcgattgatgaattatcaaaaaaactaacaaataatatttcaatataa

SEQ ID NO: 227642 - DNA, 843 bp, Klebsiella pneumoniae
atgatggtgttgctcaccaaaggcattgatctgtcgatggccgccaacctggcgctgaccgggatgatcgtcgccctgattaacgcccactatccgggtattccggtggtggcgctgctggcgctggcgactctgctgggcctgctgatgggagtaattaacggcctgctggtctggcgcctcggcattcccgccattgtggtgaccctgggcaccatgagcatttatcgcggcattatcttcctgctgactgacggcggctgggttaactcacatcagatgagcgctgattttctcagtctgccgcgcagccccctcctggggctgccgctactgagctggtgcgccatcgccgcgctgctgctggtgggttatttcctgcgctacagccgcaccggccgggccttatacaccgcgggcggcaatgcgacggcggcatactacaccggcattaacgccgggaaaatgcagttcgtcagcttctgtctctccggcgcgctggccggcttctgcggctatctgtggatctcgcgcttcgccgtcgcctatgtcgacgtcgccaacggttttgaactccaggtggtcgccgcctgcgtgatcggcggtatcagcaccatgggcggaagcggacgggtgctgggctgcctgtgcggcgcgctgttcctcggggtcatcaataacgccctgccggtgatcggcatctcgcccttctggcaaatggcgatttccggggcggtgatcgtcatggcggtgctgctcaacgagcgcggcaatcgcggtcacgggcggttaatcctgcgcaacgcggcgttagcccgacagaaacaggcggtgaaatcatga

SEQ ID NO: 227643 - DNA, 1005 bp, Klebsiella pneumoniae
atgagcaaaatgatggtatctgaagagatgaaaaacgccccggccgcgccgtcgccgctgcgccgcctgctgtgctgggaagggtttttactggcgatcaccctggcggtatttatcggcaacgccgtggcttccccgtacttcctcaatatctggaacctgtcggacgccacctttacctttaccgagaaggcgatcgtcgtcctgccgatggcgatgctgattatcgcccgggaaatcgatctgtcggtagcctcgacgatggcgctcagctcaacggtgatgggcttctgcgcggcagcggggatggacactccgctgctggtggtcatcggcctgagcgtaggtctgctgtgcggcctgttcaacggcttgctggtgacccgctttaacctgtcgtccattgtgatcaccatcggcaccatgagcctgtatcgcggcatcacctatatcctgctgggcgatcaggcactcaatcactatccggagagctttgcctggttcggccaggggtacgtgtggggggcgctctcttttgagtttgcgctgtttatcctcctcgcggccgccttcaccttcctgctgcataaaaccaactttggtcgccggacctacgccatcggcaataacccgaccggcgcctggttctctgggatcaacgttaagcgtcataacctggtgctgttcgcgctggtcgggctgatggccgggctggcggcggtcctgctgacctcacggctcggcagtacccgccccaccctggcgatgggttgggagctggcggttgtcaccatggcggtgctcggcggcgtcaatattctcggcggctccggcagcatgcccggggtgatcattgccgcctttctgatggggctggtgaccttcggcctgagcctgctgaacgtccccggcatcgtgatgtcggtgattatcggcgccatgctgatcgtggtgatctccctgccgattattacccggcggatgatgcagcgaagacgatgttaa

SEQ ID NO: 227644 - DNA, 621 bp, Klebsiella pneumoniae
gtgcgtaactatggcgaagccttccgctcccgcaacgtgatcctgctctgcgcgcagtattttgcctggagtatcggcgtatacggctttgtactgtggctaccgtcgattatccgcagcggcggtgaaaatatggggatggtggaagtgggctggctctcttctgtcccgtacctggcggccaccatcgccatgatcgtcgtctcctgggcctcggataaactgcaaaaccgtaagctgttcgtctggccgctgctgctgattggcggactggccttcatcggttcctgggcggtcggcgccaaccacttctgggtctcctacaccctgctggtggtagccggggcggcaatgtatgcgccttacggccccttcttcgccattattccggaaatgctgccgcgcaacgtcgccgggggcgccatggcgctgatcaacagcatgggcgccctgggctccttctgcggctcgtggtttgtcggctacctgaacggcgccaccggcagccccgcagcgtcctatatttttatgggggtagcgcttttcgcctcagtatggctgactttgattgttaagcctgctaataatcaaaaccttccacttggcgctcatcacgcctga

SEQ ID NO: 227645 - DNA, 603 bp, Klebsiella pneumoniae; identical to SEQ ID NO: 225707

SEQ ID NO: 227646 - DNA, 1749 bp, Klebsiella pneumoniae
atggtcaacaggaagtcaaaaaagaatcggaataagcaacaacgacagaagaaaaatgaaaatccccaacgaagagggaatggtgaatatttattcaacaatactatacttccaactaatattccattgattgacttttgttcacttgttattgatcaggttaaattaaacccagcactagaaaatagtccagattatcatttttctaatatgattgttcattgggaaaataaagattatgagtcacacaggatatctgcatttttattactgatgactatttatgatgaagtcccctcatatataacaagactgatgactgaagaaaatgaatttattttatcagagagactttcatttattcatttagataacataagtgaagggttaaagttagcacatgtatattataaactaattgattgctttatacgtacgggggctaaaggacgtaactcatcgtattttaagacctttatgaaagtgattgcaaataaaaaagagaattccaactatcctttacatcattatgacgatattttattacggttttatgagtactatcatcgagtattgattaaaaatgataatgagttgaataacctcacactttttatttatcaacatcttgagggcgaagggagtcagtcattatatttctttttgtcttatttctgtcttaataaaaatgatcaacaagcaatagactatgctttaacgtgtttgaactcaagaaattatgcagatggaacatcgtataatttttcattatgtaagaatacaataagagcaactattcgctgtaacctttggcatgaatatgataagtggatggacattttagaatcagcagttggtggtgataatccagagttgttacagttacgagaacaaggtgaatgtgcaataaataaagcattagctagacatgaacatccaataaatcccaccaatgtaactccaattaccctggattctgtgaagacagaagaattgttgatattgttatcaataattgatggatgtggtggggattggggaattgttgctaaagaagaacttttacgctatacatttccatcaaaggaaattgcaaacaagcaactaataaatctgcttactcagcacattctcaaaatttcagtttctgatttttcttcattgaaagatgatgatttatataactttgactcattcatcaacctctgccgtttccacttaaatataattggaataagtgatacgaaaactatatcgttaaaagttttacaagaagaggttttaaagaggggggatataaaagatagtattgtcaatctttggcgtaaaattaatctagggtatttttacaatacgttagaatattatctttccaaaatatctgagcgatgggctcaggaattttttcttaacgaaaacactaggcagcgactagagaatattataaccagtgctaggcgattgtctttttcagcatataagtcggttaattcgacagtagggtttcatgaattacaaagtacgggaacaaaacacacacaaaatatgcttttgcatgagataaataaatatatcagttttattgagcaaagtgatgttgattattcaaagccacgttatgataaaatgcctatactttcagtagaaaggcagttatatgatttgtttaatcttgagccagcaattttgtataatgaagttccatctataggtattgttgaaaactgtatgctgcttgatgagttttga

SEQ ID NO: 227647 - DNA, 1293 bp, Klebsiella pneumoniae
atggcttctttaaagataaaatatgctgcaataattatcagcagcctcatagcaggggggctgatatcggttactgcctggcagtatgtaaactcatcacaaaaaacagtacaaaccgaacaaaaggcaccggagcgaaaggtacttttctggtatgacccgatgaaaccggataccaaatttgataaacccggaaaatctccctttatggatatggacctggtgccgaaatatgctgatgaaagtggcgataaaagcagtggcgggatccgtatcgatccaacccaggttcagaatctgggattaaaaacgcaaaaagttacgcgaggaatgctgaattattcccagacaatcccggctaatgtcagttacaacgagtatcagtttgtcattgtgcaggcgcgttctgacggtttcgtcgaaaaagtgtatcccctgacgattggcgatcatgtgaagaaaggcactccgcttatcgatatcaccattcctgaatgggttgaggcacaaagtgagttcctgctgttatccggtacaggcggtacgtcaacccagataaaaggggttctggagcgacttcgtctggctggtatgccggaagaggatattcaaaggctgcgttcaacccgcacaatccagacccgttttaccattaaagcacctattgatggtgtcattactgcgtttgacctgcgcaccggaatgaatatttcgaaagataaagtagtggctcagattcaggggatggacccggtctggatcagcgctgcagtgccagaatctatcgcctatctgctgaaagatacgtcgcagtttgaaatttcggtaccggcttatccggataaaacattccatgtcgaaaaatggaacattcttcccagcgtggatcagacaacccgtacgcttcaggtccgtctccaggtttctaataaggatgagtttctcaagccgggcatgaatgcctatctgaaactgaataccaagagccaggagatgctgctgataccaagccaggccgttatcgataccggcaaagaacagcgcgtgattactgttgatgatgaaggcaagtttgtgccgaaacagatccacgttctgcatgaatcacagcaacagtccggcatcggttccggcctgaatgaaggcgataccgtggtggtcagtggcctgttcctcattgactccgaagccaatattacgggcgcgctggaacgtatgcgccaccctgaaaaaacagaaagcagtatgccagcaatgtctgaccagcctgtaaatatgcattcagggcactga

SEQ ID NO: 227648 - DNA, 447 bp, Klebsiella pneumoniae
atggcggtagccagcgactgccagcgcagcggacggccgctggcggtgatccagctcgatctggatcattttaagcacatcaacgatcgctatggtcatcaggcgggggacagggtgctgtcgatggtggccagtacgctgtccagcgcggttcggcagggcgatctgctgggcagagtgggcggagaagagttttgtatcgtgatgccgaataccaccctgcaggaagcggcggcggtggcggagcgattgcgccagcgtatccagggacgggaagtctttttgcataacaacgtgacgctgcgggttagcgcctcgttaggggtgagcgccagcgaagagcggggggagtatcagtttgaagcgctgcagtcggtggccgatgggcgactctatctggccaagcaaaatgggcgtaaccaggtctgttttcgcagcgcagcgtga

SEQ ID NO: 227649 - DNA, 1440 bp, Klebsiella pneumoniae
atgagtttatttaataatgcaaaatgggtagctatctctcaggtagtcaaagttcttgtacaactcataaatattgtttatttagctagactaataccgcctggcgagtacggtataatggcaatggccttggtcattataaattttggtatgttaattagagatctaggtacagccgcagcaatcattcagcgcaaaaaaattgatgatgatattataaattctatattttggttgaatttgttcatggggataggaatagctctaagtgttattgcgttctcgcctcttgtatctagtttttttcacgaaccaaaacttattttggtattgttatgtatttctattatttttccattgtcgagtagttcgtctgctcatctagctttgttagaaagagagtcaaaattcaaaaaaatagcatcaattgaaattttctcttcggttattggtgttggtgtggcgttatttttggcatataaaaattttggagtttatagtcttgtttggcaaacagttatttttaatgcgttatcaacaatccaattctggaaagcttctggatggcgtccttgtctgaaaaaaatgtttgttttttctggattgaaagaaatttttggtttcagtgcacatttgtccatttttaatttaattaattatttctcaaggaatgccgatagccttataattggtagatatatggcgccgcctatactaggtgcgtatagtcttgcatatagaataatgttattcccattggcaagtttgactttcgttgctgcaagatcgttattcccaattttgagtaagaatcaagatgatcatgtgcaacttaaaaagacatatttagattgcgtttatgctattttatttcttgtcattcctttgatgagtggtttagcatttctcagtaagccattcgttatattgatttttggtaagcaatggatgcttactgctgatattttattatggctggcgcctactgctataattcaatctgttttaagtactacaggtacagtattcatggcaaaggggcgtacggatattttaatgaagctcggtatcttaggtatgatattatacatgtccgcatttattgctggagtgcaatttaatataattacttttgctaagttctattttattgcaaatgtcattaattttcttcctgcgatgtttttactgatgaaaattattaatggaacattatttgaatttttcaaaagaatattacctatagtttgtgtaggatttctaatgatcgttgttatgtatgttactaacaggccacttaaattattcttgaacgaagattcgtttgtttatttaattgcaatgtctattgttggggcatttacatatgttttaatctcattgttttttctgaaggatgtaaaggagttcgtacttaacaagctcccttttacgggttga

SEQ ID NO: 227650 - DNA, 234 bp, Klebsiella pneumoniae
atggcgggagaaatgaatcaactgacagaaaaagaacagattgtattgtccttaatgaatttactggggatggatacgaatctgacagcgcaggcaatggagtttattggcgacagcgttctcaattatcagcttctcatcagatattttagtgccagcgagtcaacagaaaatcaaacaaagctgaatgaggcaatagataaagccactgccgcaaaagttttgtttgaataa

SEQ ID NO: 227651 - DNA, 753 bp, Klebsiella pneumoniae
atgaatctgttaactaacgcccataatctgcaacccggagacgaggtttacggggttgagattgattgtaatattgatggcagcgtgggtaacggtacttatgttggctgttacatcgctgggattggagatctatccacatcatctggggctgatggcattcgcgttcagcgtctacgtaacggagtcgataagtggaattgtggtgtcagaatttttgattcagtaacggggcttaatattacggatgccgcaacctactctatttttgcttcaggtgatgcccctatagtacgcagaaaaacgacgcagaatggtagctggtcatatatacatcaggtttcggcatctgtaacgccgtggggcgttgatgactttggtgacacatattccaggcggctgtatttgggtacgggcaacggaaaagcaaaaaacagggtaaacctcgacggtggtgtgaaattccataccacatcctcagctgtcgcgtgggggccaataagtgccggcgggtattctgaaaaagatgtgacgacactgtttggcatttctattgctgactggacgaactacacactggacgtgacgccagtcggatacgccgggtcaatgcctgttgtggctgttcaggtttatatcaacagcgcgaaaacgcaggcgtacgttcgaatcatcaacatcagcggcgtggctttgtccgagtgtaatgtaggactaaatgccaaactatgcggccactcatcaacaaactaa

SEQ ID NO: 227652 - DNA, 474 bp, Klebsiella pneumoniae; identical to SEQ ID NO: 220663

SEQ ID NO: 227653 - DNA, 3579 bp, Klebsiella pneumoniae
atggcaaccctacgtgagcttatcataaaggtttcagcaaactctcaatcattccagactgagatcgcccgagcttcacgcatggggcaagactattataaaaccatgcagaatggtgggcgccaggctgctgccgctgcgaaagaaagccaaaaagctctttccgatttaacggatggatttgcttcagcgggtcgagcagctacagctgcagctgcagcatttgcaacaggaaaactggttcagattgcagaccaatggaattcagtaaatgcacggcttaaacaagcctcagtgtctacgaatgattttactttatctcagacccgattaatggcgatcagccagagtacgggcactgcttttactgataacgcaaatttattttcacgcgctgcagcatcaatgcgtgaatttggctacagctcagatgaagtactaaaaatcaccgaagcggtatcaacaggactaaagctatctggtgcaagcacagaagaagccggttctgttattacccagtttagccaggcgcttgctcaaggtgttttgcgtggcgaagagtttaacgcagttaacgaagctggggatcgtgtcatccgtgccctagctgctggtatgggggttgcccgaaaagatcttaaagcgatggctgaccaggggcaactcacgattgataaagtcgtaccagcattaatcagccagttaggtgtgttacagggggagttttcctcgttgccgccgacagtgtccggctcaatgcaaaaagtcactaactcgtttatggcatgggttggtggagtgaaccaggcgactggcgcgacagacgcgctttctggcggtcttgatgggctggcaggtacactggattctcttacatcttctgctgtcagcggggccctcagtgacgtagcagataatatgtcactaattaccactgctgctggtggcctggttgggatcggattggcccggtatcttggcggaattgttaccagtgcaagcagtgctactggcgcacttatttcagcggcaaaatctgaggtagctcttgccgtcgctcaggaaaaagccgcgcaatcttctgttgccgcttcccgcgccgccgtttaccgcgcccaacaagcccttcagaatgctaaaagtgcagatgttcaggctgcacaacaggagagggttgcagccgcagaagcaaaggttactgctgcacaaggtcgattgactactgccctcgccaccgggacagctacagaaaaagtacgagcacgaacagctctggagcgggctcaggccgggcttgtggctgcaaaaaatgccgatgcacaggctattgcagaaagaaaacttgctgcagcgcaagcggcgcttagtcgtaatatttcaggtagggtttctgctcaaaataatcttaacagcgttacctctgtcggcacccggttgatgagtggggctcttgggctggtcggtggtatacccgggttggttatgctgggtgcgggcgcatggtacgctatgtaccaaagccaggagcaagcaagaaaatcagctcaggaatatgccagccaaatagatcagatcagagaaaaaacctcctcaatgaccctacctgaggtcgatagtaatcgaagattaacggttgaggcgatgcaggagcaaaaacgcctaatcgaagcgcaagaacaaagtgtaaaaaaacttaacggacaaataaatgatttaaatgaaagtagaagcaaaccaggtattactcaagaaaatgatttaaatattacaaaggctattgcaattttgaccgagcaggttgtcgtagaagaagacaagcttcgtcagatgcgagaaaaatccagtgatatattaaaggcacttgaggagaatgaaagaagaagaaatgatcttataaaagaaagagcatggcggcaaaatgcagaataccagagtctaatattgatgactggtaagtattccgaagttaaccgtttacttggattaggaaaccagcttttaatggaacggcagggcttggttaatgttccaatgcgaatgcctcaggctgatttaacttcacagcaagccaatgctctggaaaaaagccgtcaggaccttgaactatcaaagcttaaaggagaggcaaaggaaagagcccggttaggttatgcagctgatgaattaggtcttaaggatgaacctcagtttaaaactaaccgcgatctgtatattaatcagggtttggcgaaatggcaaaatgatgaatcgaataaacctacccggaaagcaccaaaaagtgaagaggttaaagcggctgaaaagacagaggacgtttacaagcgtcttattaaacagcaggaagaacaaattgctttgggaagccaaaataccgaattggctaaagtaaaataccaggtcacgcagggtgagttagcatctcttgagcaagctaaaaaagaaaccattttgcacaatgctgcgcttatcgatcagaaaaacattgctgaacagttaaaaacgttccgcgaggggctggctgatagtaatgctgctgcgcgtgaccgtgggaatattgattttcttggtgccgggatgggggataaggcccgcgaccgcatgaaggaaatggcagatattcgtactgattttctcaaacagcagcgggacctgcagcgggatttcagtcgaggggaaatttctgaggacctgtacaaacagcaaacggaagcactgcaggctgcgcttgctgaacggctggcgattcaggaggactattacaaaaaaaccgatgagcagcagtcagactggcgggcagggatcagcgattccctgatgaactatgccgatcaggcttctgatctgagttcaatggctgctactgcaaccagcgaaattctggatgccaccactaactctatctcgaacaacctgaccagcgtcctgacgggcgccacttcgtttaaagatggtatgtcgaatatcttcagctctctgggtgaaacggtgattaagacgctgatccagatggcaacacaggcgttaatcaccaaagcaattatggcgtcatttggcggcggagcgggtgggttgttcggtagtcttttcggcggtgccagcggtgcggcaagtagtggtaccgctattcaaagcgcgggagctaatttttcatttaacgctctcggaggcgtttacgattctccgtcactttctgcctacagcaatggtgtttacagcactccccaatattttgcgtttgcgaaaggggcaggtgtattcggcgaggccgggcccgaagccatcatgccgcttacccgtggcgctgatggttcgctgggggttcgtgcggttggacgtgagtcaccggcagtccaggatgctgcaaggcagattgaggcgcaaccacgaatcgcggtcagtgttgatgcccgtagcacgtttagcgggcaacctgacgacgcaacaatgctggcagtagatcgaaggaatgctgcactggagcgacgcatcatcaacacactcactgctgaagtaaataacccccagaagaaattcggacgcgccatctactccaatctacagcccaaaaaaccaagatag

SEQ ID NO: 227654 - DNA, 306 bp, Klebsiella pneumoniae
atgcctggcatgcagttcctgatggcgctggcgctccggatgggccgcacgctgggcgaactgcgacaaacaatgacggtcggcgaattcaggatgtgggctgaatacgaccgtatcagcccaatcggcgatattcgcggcgatattctcaatgctcagctggtatctgcggtttacggagcgcagggcggtaaagtcaccattgaagacgcacagcttcagtggagcacagaagaggatgaggtaaacgatagcgacgacccatttgctgggctggaagcggcgctgctggctgcatcagtttga

SEQ ID NO: 227655 - DNA, 258 bp, Klebsiella pneumoniae
atgaatatgatatttgaactgattggattgttactggtagtcggatgcgcattcttcaccacttttttcttagccgcagtagcaggcactatggtagttattcttggatggggaatttctattgtcaccccgaaggtggttacctgtactaatgattgcatcactactgtttttgatgccaaaccctttggctggcttctgattgtgttttcattaaccatgatgttctttattatcagaggtatgattaaacgttag

SEQ ID NO: 227656 - DNA, 468 bp, Klebsiella pneumoniae; identical to SEQ ID NO: 185229

SEQ ID NO: 227657 - DNA, 252 bp, Klebsiella pneumoniae
atgtctgaaaacacacaaagaaaaaaagcccgccgcgataacgatgtacaaatcacgacgcgcgagtttgcgctcatgctgggtgtacctgagcatgaactaggcgtcgcggcagccaccaccaatattttccgagaaataacattaccggcaccggtaagtctgttaaaggggaagacaaggcaattctggctgtctgactgtctggctttcgccgaacagttaaaaggaacatccgcagaaaaaaaataa

SEQ ID NO: 227658 - DNA, 315 bp, Klebsiella pneumoniae; identical to SEQ ID NO: 151383

SEQ ID NO: 227659 - DNA, 1173 bp, Klebsiella pneumoniae
atgacgattgcgaaggatagttcgactgatgaaatcattcatggaaatgatctccgtggaatggatgatttttacattaagacaacgagttttgaatgcccatacgagccttgtaaaattaaagccacaccttgtagttttactatgaaacatgttaatcaatcatattttagatatggtgataaacataaggatggatgtggtattcatgacccaagatataaaaacaatcatacttcaaatgacgaaagaaaacataattcgccacctgctccggttatatcacttttaaaaattgatgtgaagccaagagatggcgttaaaaatgccagaagtagtaaaaatgaaaatcacaaggatgaaaaaaaagctaatgaacatcctgtatcttcatcaagtattaagccagtcgttgactattacataaataatagcaatcataatgaacagctatcaatccctccatatggcacgcgatcttataaagatacgtttcaacttattttttacaaaaacaacatacgttattacaaacctgcaatttattatggtgtagttcagtctaatatccgtctgcatgaagattcagataaacattgtattactttcctcgcaagggataagaagacccaaaagccatttacgcttgaaattgatgtttctgactggaataaaagtcagaaggatgtgttttggaaagaatatgaaaagcaaaggaaggaagctgataggtattataaggggcttaaagataaaaggaatgctaaaaaatacctgacggttttcttttttgggatgccggatgaaaatgataagtttctatttaagacaaaccactttaaattagtatatgtggctttcttgggtaaatttgaaagctcatataatgatagtaattattacattgaaaatgatttgtctgtatcatcattgaatgaacaacccatttcattatctgatatagagcataaaaatcatgaatataatattgaaacttcattagattttagttctcctttgccagagccagagccagagccagagccagagccagagccagagccagagccagagccaataaaatcctctttaaaggaaaatactgagactgtagaaatgaagagtaaagtttgggggaggctgaaaaagataatcactttctttaaaaagtga

SEQ ID NO: 227660 - DNA, 375 bp, Klebsiella pneumoniae
atgaaaaaaatcataatcgtaggattcgtttttctgaccttggcaggttgttcttcagtaggcaaccagtcattgaaaaatgagacgcaggaaagtgtgaaaactaaaattgttaaaggcaaaactacaaaacaggacgtgttagcgtcgttcggtgaacctgacagccgttctttgatcgatggtgaagagcaatggtcatacactatgtataacagccagtccaaagcaacctctttcatccccgttgtgggactgcttgaaggtggagcagactcacaaactaaatctctgacagtttctttcaaaggcgaaaaagtcagcacatacatctttaatgctggaacaagcaacgtgaagactggcattttttag

SEQ ID NO: 227661 - DNA, 669 bp, Klebsiella pneumoniae
atgagcatctccgctacgaaaagcaggaagaaagaagctgaagctggtctttctgatgatcctcggcaaacggaaatcacgacacccaattttgtgctgtttggtgaaactttcacatttattgatactttctctgccactgtcatcgactccgatccaggcaatggtcatatctgggtaaaaaccaacacaggggatgagaagcagatttctgactatggtatccctttcagaagttcacacactatccataaatacgaacttcgccaatatagtgaggatggttcgtatgatgcatataaagatgcgcttatcgttaataagaaaacgggtgaacacgaggtaaatttaaaaagaaaaaccattattattcccgcttttctgacaatgctatttcatactgcctccacagcatcgtattacagagcaatgcctgttccaaagtttctcaccgttattttcattttactttgtgctgctgcacttatttcatttctcacactaccctggggatttaaagacggctacatgtggagcgaccacaaatacatgtggtttacatatcttttctcaagagttggaagttttatttgtctcaatttgatgaaaagacgaagccagaaatttgaaaatgaacttagaaatcttattgagtcagtaaagcgctaa

SEQ ID NO: 227662 - DNA, 1269 bp, Klebsiella pneumoniae
atgaagggaatgcaaaaaatcaaaagaggaaaaacctttaacgggctaatttcttatttattaaaacctgcttcgcaccacaagtcagatccgtatgtagtaggtggtaatgtcattgatagcttcgcagaaacgttgagtgcagagttcaacgctacgaagctcctacgctccgatgtcagtaaacctgtttggcacaattctctgcgtctgcctgctggtgagagtctacctatacaacgatggaagctgttagccgatgactatatgacgcgtatgggcttctctgagacgcatttacgcgcttatgtcctgcatgatgataaagatggccaacatatccatatagttgcaagtcgcatagattcaacttcggggaagctctaccttggtaaaaatgagaaccttatcagcacccgtatcatccaggatcttgaaaaagactatcagttaacaagaaccaaaggaactgatgccctgaaaccttcaaccttacctgccaagcgtaaaaaatcacgtagtgaagcgatgatggagaaaaggactggtgagctatgcccgaaaaccatcatccaaaacgctctggaagtattccttgccgataaaccgtcaaccactgagtttgtgcatcagcttgccgcacaaaacatcagagcaatcccgaacatcgcttctaccggacgcatgaacggcttctcattcgaatacaacgggattgctttcaaagcatctcaattgggaaaagggtattcctggtctgccttgcaaagcagaatcgactaccaacaggaacgtgataatgctttcctgtttaaactgaaatcatctgtcagagaaacatctgttagtgcaactcatgatatggccataactacagatgctcctgaaaccacgacagaatacgttaaccgccccatagaagcacttatcctcgataaacgagctgctggtcaggacgaatactctatcgcttctgtcgaagcgcttctcccagaagctgttgcaactaacaaagaaacgatagcaaccgaagcgttaaaagtagcgcccaagcgaagctatgccgtgtcagctttcaggtggttggaatacatcccctacctcgatttaatttatcgtatgttgaaaaatctcaaaataccaacccttaaatgccctcgaaaacacaaaaccatcactggcgtgagagtggtagagattatgcctatcccccaaaaaaatctcatcgaatcagcacctcaatccagaagagcatcgctttcgatgtaa

SEQ ID NO: 227663 - DNA, 837 bp, Klebsiella pneumoniae
atggatttacttcgtgggattattaggaagccattcaaaacagttacctattttttcacttcatttagtgtattatttaccatagttagaatgatcgtttattttgtcccaagcattaagtttgatggagtaatccctcttataataatgctttgtattagtctgggttttactcttaaaaaggtttggaaaccgtcaaaagttgtaattccaatccccaacactgctacaaagatagaaatagtatttggagatattttcaatcaggatggcatacgtgtgattcctgcaaatgaatactttgacagcaagttaggacttccggtttctgaaaatagcttacatggtatattcattaataaatgttttggtggccatcctgagtcattcgataagcaggtagaagaaggcttatccgggaaagaatcggaagtcgtaaataataaaattgatggaaactttaggaaatatgagataggaacaagtgtccttatggaagctgactcaaagaaatatcttgtttttgctttcgctcacactaatgaatccacctgcaaagcttttatcgatgttaaagatacctggattgcattacatgaaatgtggagttcattaaggattttttcagggggatcagcagttaaccttccattaattggtagtggaatttcaggcttaggcttaccaacacgagatattctcaatttaattattttatctgccattactgaaaccaagaataaagaggttactaaactgataagggttatactgcatcgcgatagatttgatgatcttgatttacgagaaataaaagattattgggagaagaagtaa

SEQ ID NO: 227664 - DNA, 567 bp, Klebsiella pneumoniae
atggcatatcgtaatggaacatatgtagcatttcacgcaaatggcaccaatagaccaggagaatcagacattagctattataatcttttgaaagcatggtcaggaaaaggagatgatagcttcacctttattaatagtcatgacaaagcctcagcagtaagagactcaagtaaggctgaaacattgagaaggtctctgaatgaacggcttaagaattcaaagaacatgttacttattatcggcgatactaccaaagatgatgatgattgggttccgtttgaaataaataaagcagttgatacatataaactccccctgataattgcatatacaaaatcagtacataatgggagcttaattagaaaccctaatgcactgtcagagtattggcctgatgtattaaaagaaaaaatagaatcgtcttctataaatgcaatacacatacctttttcaaaaaatgtaataaatgatgctattgggcagttcaatcataccaagccaccattaggtaaggggcttggtatttatagtgatgatgcgtatcgaagttttggttttgctctttaa

SEQ ID NO: 227665 - DNA, 552 bp, Klebsiella pneumoniae
gtgggaatcggcccatcttgccgggcgccgctgtcgtgtgggaatccgcccaccttgccgggcgccgctgccgtgtggaaatccgcccatcttgccgggcgccgctgtcgtgtgggaatccgcccaccttgccgggcgaggctgccgtgtggaaatccgcccaccttgccgggcgccgttgccgtgtggaaatccacccaccttgccgggcgccgctgccgcgtgggaatccgcccaccttgccgggcgccgctgccgtgtggaaatccgcccatcttgccgggcgccggtgctgtgtggaaattcgcccatcttcatgacaaaaatttgtcaaatgacaggctcatgtgtgctgatttatgtcagacgggattttgcttatcaattattgagaacagaaattttcctgaatcatcaatactatacttagcaagtaaaggtgttttctcatttatctgcttgagtgcaggatcaaggaaagatcgtttcaactctgccaagttcttctgttgggattccggcaaaaggaaacggtcatttaaccaagcatga

SEQ ID NO: 227666 - DNA, 1557 bp, Klebsiella pneumoniae
atgaccagcctgcaacaacgcgccgaattacaccgtcagatatgggctattgcgaacgaggttcgcggtgccgttgacggatgggactttaaacaatacgtcttaggggcgctgttttaccgttttatcagtgagaacttcaccagttacatcgaagccggtgatgacagtgttcagtatgccggaatggctgacagtgatattggtgatgagattaaggacgatgcggtcagaacaaaggggtattttatcgctccaagccagctgttctgtaatgtggcgaagcgtgccaatacgaatgaccacctgaatgctgatttaaacagtatctttgttgcgattgaaagctctgcatccggttatccgtcagaagccgccattaagggactgtttgctgattttgatacgaccagtaaccggctgggcagtaccgttaaagagaaaaatatccggcttgctgcggtactgaaaggggttgaggggctggctctcggggattttgatgcccatcagattgacctgttcggtgatgcctatgagtttctgatatccaattatgccgccaatgcgggtaagtccggcggtgagttctttaccccgcagcatgtctctaagctgattgctcagctggccatgcacggacagacctccgtcaataaaatctatgaccctgcggccggttcaggttctctgctgcttcaggccaagaaacactttgataatcacattatcgaggacggtttctttggtcaggagattaaccatacgacctttaacctggcgcgtatgaatatgttcctgcacaacatcaactacgacaagtttgatatccggttagggaacacattactggcccctgaatttaaagaccagaagccgtttgatgcgattgtgtctaacccgccgtactccgtgaaatgggtgggcagtgatgacccgaccctgattaacgatgaccgctttgcaccggcgggggtgctggctccgaaatctaaagctgactttgcgttcgtgctgcatgccctgaattacctgtccgcgaaaggccgtgccgcgattgtctgtttccccggtattttctaccgtggcggggctgagcagaaaatccgtcagtacctggttgataacaactatgtggaaaccgtgatatcactagccccgaacctgttcttcggtacaaccattgccgtgaatattctggtgctgtcgaaacacaaagccgatacccacgtgcagttcattgatgcaagcgcattgtttaagaaagaaaccaacaacaacgtgctgaccgatgcccatatcgaacagataatgcaggtctttgagagcaaggcagatactgaccatctggcgaagtctgttgcggctgaagatgttgctaagaatgactataacctgtctgtcagtagttacgttgaggctgaagatacccgtgaagttatcgatatcacggtactcaatgcagagctgaaaactacagtcagtaaaattgaccagttacgcaaggatatcgatgcgattgtggcagagattgaaagtagtgaggtgcaggcatga

SEQ ID NO: 227667 - DNA, 1206 bp, Klebsiella pneumoniae
atgagtgagctaagttatatggaaaaactgctcgagggtgttgaggttgagtggttatttttaagtgaaatagttgagctcaagcgtggcaagcgattagttaaaagtcaattatcagatgttggcaaatatgctgtttatcagaatagcatgactcctttaggctattatcatcaatcaaatacatcaactgataccacatacatcatatgtgcaggtgcagctggagagataggatttagcacatcgccattgtgggctgctgatgatgtttactatcttgtttcacctgaaaaattgagtagtaaatatatttattattttctcctgacccagaagagtaaaattctgtctcaagtgcgtagggctagtattcctcgattatcaagaacagcatttgaaaaaatacccgtacccatcccttgccccaataacccagaaaaatcgctggctatccagtctgaaatcgtgcggattctggataaatttaccgcccttaccgctgagcttaccgctgaacttaccgcacgtaaaaagcagtacaactactatcgtgaccagttgctgagttttgatgagggtgtagttccacatgttcctatgggacaagaaggtgtgggtgaatttatacgcggaggtagtttacaaaaaaaggatttcactgaaattggtgtggggtgcattcactatgggcagatttatacgtattacggcacatacaccaatcaaacgaaagtattcgtatccgaagggttggcaagcaaatgtcgcaaagctcagcaaggaaatttggttattgctacaactagtgagaatgatgaagatgtttgcaaagctgttgcatggttaggaaaggaagacattgcagttagcagtgatgcttgtatttataagcacaggatgaaccctaaatatgtttcatatttctttcaaactgagcagtttcagcaacagaagaaaaagtatattacaggagctaaagtccggcgagttaatgcggatagtttagctaagatattaatacctaatccatcactggcagaacaatcgcgcattgtcgctattctggataaattcgacacactcaccaactcaatttccgaaggcctcccccgtgagattgagttacgccagaagcaatacgagtactaccgtgaacttctgttcagcttccctaagccagaaacaattcacaacgcgcattga

SEQ ID NO: 227668 - DNA, 432 bp, Klebsiella pneumoniae
atgaaaaatatcgtattagcatctttgctgggctttggtttaatttcatcggcctgggccactgaaaccgtgaatatccatgatcgcgtcaacaatgcacaggctcctgctcaccagatgcagtctgctgcggctcctgtcgggatccaggggactgctcctcgtatgaccggtatggaccagcatgaacaggccattattgctcatgagaccatgacgaacggctcggcggatgcgcaccagaaaatggtggaaagtcatcagaagatgatgggaaataacacggtatccacgaccgtcccgtcaacgtcttacgcggcgatgaatgagcatgaaagagcagcggttgcccatgaattcatgaataacgggcaatccggcccacatcaggccatggccgaagcgcaccgccgcatgatcaatgcaggctga

SEQ ID NO: 227669 - DNA, 723 bp, Klebsiella pneumoniae
atgattggaaagattgaggatgtctttacccgccaggccaatttctctgccgatatcgcgcatgagatcagaacgcccatcaccaatctggtgacgcagactgaaatcgcactgagtcaggatcgaacacagagggaacttgaggatgtcctctattccagtcttgaagagtataaccggatgaccaaaatggtcagcgatatgctgttcctggcacaggcggacaataaccagcttatacctgacagggtccgttttgacctcagagcggaagtcatgaaagtcttcgagtttttcgaagcctgggccgaagaacgcaatatcacgctcaaatttaacgggatgccctgcctggttgagggagatccacaaatgttcagaagggcgatcaataatctgttatccaatgccctgcgttataccccggagggacaggcaatcaccgtctcaataagagagcaggagagcttttttgaccttgtgattgaaaatccggggaaaccgatccctgaagaacatttatcaaggctgtttgaccgtttttatcgggtggatccatccagacaacgcaaaggagaaggcagcggcatcggccttgcgattgtgaagtcaatcgtggaagcacatcacggaagagtgcaggtggaatcagacgtacgctccacgcgttttatcttatccgtgcccagactggagaaaatgatcccggaaacccaatgctga

SEQ ID NO: 227670 - DNA, 2940 bp, Klebsiella pneumoniae
atgagtaattttaattttctaacagacatcagccctgaactcgctcaatttggtaaaagtgccgagctgtattgccatgatgataagcaggtagcactagtgaaacttaggtgttttactgaagtagtcgttggggaaatttattcacgtttatcgctaaccccacctgttcgtgatgatttatataatcgactgcgcagctacgaattcaaggacgttgtcagtgataagggaatctgggccaaattagatgtattgcgacataaaggtaacaaagccgcccactctagcaatggttcagacgagatttccctcaatgaaacactctggttaatcaaagaagcttatttagtcgcccgttggtatgctcaagctattctcaataagcctatcactccgccagagtttgttgatccggtaaaacctatcgatcatacatctcgcttagaagcagagttagaacggcaacgtcaagaactcaataaacgagaggctgaattaaagacccagcttgctgataatagtgataaatatcaacaacagacgagtgagctaatagctcaactagacgaaaaaaacgacacactttccaatgtaaaaaaagagcaagcactattacagattgaacttgaacaaaaacaaaaagatctagtcgcttcacaacaagccttctttgattacaggacgcgtgaaaagtttaaacaagctagtatttcatcagcttcaagctttgatcttgatatgggagtgacgcgccgaaatattgatatatttgattgctttgaaggagtaagtttaactaaaggtcaaaaccaaatagttaagcaaataaatgagtttctaaccgataccaaacaaaacgtatttttacttaatggttatgcaggtacaggtaaaacatttataactaaaggaattactcagtacctagaaagaattggtcgtgaattcgctattatggccccgacggggaaagccgcgaaagtgatatcagacaaaacaatgcaacctgccagcactattcaccgcgtgatatacaattacgacaacgtgaaagagtacaaagttgacggtgtggaagggtctgaaacttatcgttgctatgctgaccttaaagtcaatgtagatactgccgaagctgtttatataattgatgaagcgtcaatggtttctgacagatattccgatggtgagttttttcgttttgggagcggatatttattaaaagacttgctcaagtacataaatattgaccacaacgatcataataagaaagttatttttattggtgataatgcacagttgccacctgttggaatgaatacgtcaccagcgctagatgccagttaccttaaagaaaattatcaagtcgctgtggcttcagggtacttgactgaagttgttcgtcaaaaaggtgatagtggtgttttgaacaatgctgccatgttgcgtgacggtttagagcaaaatcttttcaataaactgaaatttgaagttaatgatcatgatgtatttaatttgtcctcggaaaatctacttagcacttatctagactcatgtgatagaaaagttagccgtacaggagaaagtattattattgcttcttcaaaccgacaagtagctgagtataaccgtttggttagagagtacttctttactggtcaacagcaaatggtcgcgggagataaagtcatttcggtagcaaatcactatcgagcagacgcttgtattaccaatggtgaatttggaatgatcaaggaagtactatctcctcattctgagttgattagtgttgacattagcgtcaaaggtgacactggtgacatggttaagcgaaaagtaaatctgagttttagggatgtgattctaggctttcgcaacgactacggtgaaccattcttctttgaagccaaaattgtagaaaacctactttacaatgatcagccgaccttatcgtcagatgagcacaaagcactctatgttcactttttaaatcgacacccagaactgagacgtaaaggtaatgaacaaaagcttagaattgcattattgcaagatccttatttcaatgcttttaaacttaagtttggttattccattactggacacaaagcacagggtagcgaatggaaaactgttttcttacagtgtcaaacacaccaaaaagccttaactaaagattacttccgctggttatacaccgctataacgagaacttctggcatcctgtatgtaatgaatccacctcagttgcgcttaggagatggaatgaaaatagcaggagcgtaccaacccaaagcagtaaacctagacaattctgctcctgaaggcgttgaggttgtgcgaccaggtaccgaagcaacgaactcagtagccacagcgaagtttgattttcagactgacatcccgcaacttaaaaagctataccaacttgttgatgcatgtattgaaggtacagggattactgtagtggatgtccttcattataactatcaagatcgttacatcttgcagcgcgggaatgagcaggcttcgataagtttcaattacaagggtaactggaaagtgtctggcgtaaagagcattactcaagatgggttcgatgttgaactcatggctttgcttggtcaattagaaggtactttgctcgatgtacctgagccttcaaaggatactcagttccatttttcagagccattcttagaagagttttatctaaatgtaatggatcaaatcaacagtgttggagctgatataagcaaaattgaatctcgttcattttgtgaaagatatgcatttgttaaaggcaatgagttggcggtaattgagttttggtacaacaagtctagccagtttactaaagttcaacctatgcctcagcttagtaattccacaaggctcattgacgaaataatatgtcaaataggtgtgcttctatga

SEQ ID NO: 227671 - DNA, 246 bp, Klebsiella pneumoniae; identical to SEQ ID NO: 101700

SEQ ID NO: 227672 - DNA, 402 bp, Klebsiella pneumoniae
atggccagagtatctattagtgaggctgccagactgacgggtaagagtagaacaacgctgcacaggttaattaaagcaggtgacttgtccacctgtagcggtgaacgtaatgcaaaaatggtagatacttcagagcttttgcgtgtcttcggtccctttgagcaacctaagggtgaacacctttctggacaggtctctgaacagcgtgatacagcctctgctgaccagaatgaacaggtgattcgtcatctgaaacaggagattgaacacctgaacaccttacttttgtccaaggattcgcacattgacagcctgaaacaggccatgctccttcttgaaaatcaccaggcaaaattaactgaatccccggcgccatggtggaaattctggaagaaatcctga

SEQ ID NO: 227673 - DNA, 192 bp, Klebsiella pneumoniae; identical to SEQ ID NO: 103879

SEQ ID NO: 227674 - DNA, 258 bp, Klebsiella pneumoniae; identical to SEQ ID NO: 101701

SEQ ID NO: 227675 - DNA, 1398 bp, Klebsiella pneumoniae
atggccttcggtctgccagcccttgccactccgggggctgagggactggctttatccgtctctggcgatgcgttgtcggccgctgttgctgatgtgctggccgccctgaaaggtccgtttaagtttggtctgtgggggatagcgatctacggtgtgctgccttctgagattgcaaaagatgatccgaacatgatgtcaaaaattatgacgtcattaccggccgatacggtgacggagactccggtaagtactttaccactggagcaggcgacggttcgtgtcagacaacgggttgtggatgtggtgaaggatgagcggcagcatattgcggttgtcgcgggtcggccaatgagtgttcctgtggtggatgcgaaaccgacaaaacgtccgggggtattcagtgtgtcgattccgggtctcccgtctctgcaggtgagcgtaccgaaaggtgttccggccgcgaaagccccgccaaaaggcattgttgctgaaaaaggtgattcacgtccggctggttttacggccggtggtaactcccgtgaggccgttattcgtttcccgaaagagaccggacagaagccggtttatgtgtcggtgacagatgttcttaccccggcacaggtaaagcagcgtcaggaggaagaaaagcgtcgtcagcaggcatgggacgccgctcacccggaagaggggctgaaaagagagtatgataaagcgaaagctgagctggatgccgaagataaaaatattgcgaccttaaacggtaggattacatcgacagaaaaaaccattcctggtgcaagaactgctgttcaggaagccgataaaaaggtgaaagaagccgaggcaaataaagatgattttgtgacttacaacccgcctcatgaatatggctccgggtggcaggaccaggttcgctatcttgataaggatattcagaatcagaatgagaaattaaaagcagctcaggcatctttaaacgcaatgaatgaatccttatccagagataaggctgcgctttccggggcgatggagagccggaaacaaaaggagaaaaaagcgaaggatgcagaaaataaattaaatgaggaaaagaaaaaacctcgcaagggaactaaagattacggccatgattatcatccagccccgaaaactgaagacataaaggggctaggtgacctcaaaaaaggtacacctaaaacaccaatgcagggaggtggaggtaggcgtaaacgctgggttggtgataaaggtcgtaagatttatgaatgggattcccagcacggtgagcttgaagggtaccgcgccagtgatggcgaacacctcggcgcattcgatccaaaaacgggtaagcaggttaaagggccggatccaaaaagaaacattaaaaaatatctttga

SEQ ID NO: 227676 - DNA, 948 bp, Klebsiella pneumoniae
atgacaattgaaagttttttcatcggtactcgcatggcaggaaaacgttatggccctcaaagcaaagacatgcaggtatctgaatttattactattttatctaatcataaaaaacccgataaatacgttttacccgatttctctggtctggtaagccggtttgacgcccagatcagaaagcagtttattcagcaaaaagaagatgaacattatcgtcgttacagacagctttctgacagatggagtcaggctggttctatcagtgatcaacataaccgcagcaaacgatttgagaaggtaatggatgagtcgctggatttcttggtttacagttctgatgtaatgcctgatatcaatccaaacaacctcaaatacgatgatcatactcaggcaagccagaaaggaaaaatgtactgcgtagcgcttctgtaccatatcatcgccagagctgcgtatgagccgggatcagttggtgcagattctacacttccagagcactgcagacggatgaaagactggatcaaaaaaactctgggggaccacttcataactaacatgatggtcaactgcgctctgttcacccctgatgcgttcccagctcttctgcatcttagcggggaggatggaactcgtgatgccgacacattcctggctgaaaaactccgtaaagaattacagaagcctgaggaaccagttaactatcacaacggcacgtataggttaaattttgagtacaaaaaattctcaaaagaacagttccattttttatacgaaatgcgagatcttcattaccgcgttgatcgtattgaacagcttcttcaggaactgattcataacccggaggtcgattttagcgaagctgatgctgcagggaagtggattgacgaacaagtcctgctacttgaatcaaacgaaacgatgtcattacctgcagtggaacagaaataa

SEQ ID NO: 227677 - DNA, 264 bp, Klebsiella pneumoniae
atgaagaagcgtttttccgacgaacagatcatcagtattctccgagaggccgaagccgggatttctgcccgtgagctctgccgtaagcacgccatttccgacgccaccttttatacctggcgcaagaagtatggcggtatggaagtgcccgaggttaagcgcctgaagtcgctcgaggaagagaacgccagactcaagaagctgcttgccgaagccatgctggataaggaggcacttcaggtggctctggggcgaaagtactga

SEQ ID NO: 227678 - DNA, 825 bp, Klebsiella pneumoniae
gtgtgtgatgcgaccggtctgtcgcaacgtcgtgcctgccggcttacaggtttgtccctgtcgacctgccgctatgaggctcagcgtccggcggctgatgcgcatttatcagggcgcatcactgagctggcactggagcgcaggcgttttggctaccgccgcatctggcagttactgcgccgtgaaggccttcatgttaatcacaagcgcgtgtaccgcctttatcatctgagcgggctgggcgtaaaacgcagacgacgccgtaaagggctggcaacagaacgtctgccgctgctccgcccggcggcaccgaacctgacctggtcgatggattttgtcatggacgcgctggccaccggtcgcaggatcaagtgcctgacctgtgtggacgacttcacgaaggagtgtctgacaattaccatcgcattcgggatttcaggcgttcaggtcacgcgtattctggacagcattgcactgtttcgaggctatccggcgacgataagaactgaccaggggccggagttcacctgccgcgcactggatcaatgggcctttgagcatggtgtagagttacgcttaatccagccgggaaagccaacgcagaacggatttattgagagttttaacggacgatttcgcgatgaatgtctgaatgagcactggttcagcgatatcgttcacgccaggaaaatcattaatgactggcggcaggattataacgagtgtcgtccacattcggcactgaattatcagacgccatcagagtttgcagcacggtggcgaaatggaaaatgtgaaggtaaacaaaccgacattactaactga

SEQ ID NO: 227679 - DNA, 357 bp, Klebsiella pneumoniae
atgtctacaaacaacttgaaagaagcagtaaatcacaatacctacaacgcgccagtaactatcaacaactactacggcagtcccgttcccccccctgaagaaccaccggttgttcctgcgaaaaagaaacgtggctgggtttttgaaaccgccagtattttacttggaacaggtattaccttatggcagtcaatgtacaacggggtaatgatgtcagtcttgacggctggcctaatctggttgggggtgtcttcaggggcagcgccagtattggcaactggtatcattgcttttggcgtctgcgccgcccctacattgttgttagctttggttcgttgggtcgtaaaccagaagtag

SEQ ID NO: 227680 - DNA, 243 bp, Klebsiella pneumoniae
atgtctttgagcctaatggcccgaacaactaaaccgccgctgcacgggattaggggcaaccactggaggttggccagcgatacgacgcggatatttatagccgcgtacggttttgagacggtacagtcgcataataaggcccatccggttttttactgtaagtatcaagaagtttgttcagatcgccttgaacccaccggtaaccgtatcagcgaagatgagtcacggataagcgtcagctag

SEQ ID NO: 227681 - DNA, 255 bp, Klebsiella pneumoniae
atgaagaagcgtttttccgacgaacagatcatcagtatcctccgcgaagctgaagcagggggttctgcccgagagctctaccgcaagtacgccatttccgacgccacctattatacctggcgtaagaagtatggtggtatggaggtgcccgaggttaagcgcctgaagtcgcttgaggaagagaatgccagactcaagaagctgcttgccgaagccatgctagataaggaggcacttcaggtggccctggggtga

SEQ ID NO: 227682 - DNA, 591 bp, Klebsiella pneumoniae
gtgaaagtactgacgacaaaccagaagcgggaagccatggtattgatgtgtgatgcgaccggtctgtcgcaacgtcgtgcctgcatgcttataggcttgtccctgtcgacctgtcgctatgaggctcagcgtccggcggctgatgcgcatttaacagggtgcatcactgagctggcactggagcgcaggcgttttggttaccgccgcatctggcagttacagcaccgtgagggccttcatgttaaccacaagcgcgtgtaccgcctttatcatcttagaggactgggcgtaaaacgcagacgacgtcgtaaagggctggcaacagaacgtctgcctctgatccgcccggcggcgcccaacctgacctgttcgatggattttgtcatggacgcgctcgccaccggtcgcagaatcaagtgcctgacaattaccatcgcattcgggatttcaggcgttcaggtcacgcgtattctggacagcattgcactgtttcgaggctatccggggacgataagaactaaccagggccggagttcacctgccgcgcactggatcaatgggcttttgagcatggtgttgagctgcgcttaa

SEQ ID NO: 227683 - DNA, 726 bp, Klebsiella pneumoniae
ttgaagcttgatatgcactgtcatttggatctttataaagatccaagtgatattatccaaaagtgtacagagaaaggactttatgtcctttctattacaactacacctaatgcctatattggcactcatcgactgtctgctaataacagtagaatcagaacggcattaggccttcatcctgaactagcccatctaagacaccatgagttagatattttcgatattttactcccgcaagctaaatatgttggagaaatcggacttgatggtgggaaagattataaagagcattcggaagtacagcttaaagtatttaaacatatacttaaaaaggtacataaccaaggtggcaggattatgtcaatacattcaaggggttgtgctgaagaggttgttgcacaacttaaaggaattgatggtattcctgtatttcattggtttacgggttcagaatctgaattaaggagcgctattgatattggtgcatggttctctgttggcccggcgatgttaaactctattaaaggacgacggatattacaattgatacctaaagatagattattaactgaaactgatgggccattcgcaaaatatgctagtaaacggctattcccttgggatgtagatatagctattgaggggatttcgaaaatatggggatgtagctcagagtatgtagaatataaaatcgaagaaaactttaggaatatccttcagttatga

SEQ ID NO: 227684 - DNA, 1341 bp, Klebsiella pneumoniae
atgaatatttatgttgaatatgatcatgcaaaattaccattggcagatgaaaaaactgtttctgtgcagatttattcgcgtgatggtgtagttattaaaaatggaattaagcctagagatgatattgcaactataggtaagccaatatttgatgctataaaaagactgggagtaagtatatcagatgaagttatggactttttaactatctctcttgcagtaactgctgccgatacatttattataagagataattgttttgatggctggacaagaaatataaatatatttgtttcattaaataacccagtaatttgggaaaaaaacaaaccacttttagaaaaagctttacaatttttgagtggtgatgtatggaatttcaattttaaaggtgatggtcctaagccaccgcaaccattcaaagctgttaatgggcgaaaattgattaatttagaggggttagattgtgtgtcattattttctggaggtcttgacagtgctataggtgttatagattttttatcttcgggaagaaaacctttgctaatcagccattcgtataaaggggataaaactaaacaagatcaaatagcccataaaattcgtgagaagggcaccttttcaagacttcgttcaagtgccaaccctattggcagggggatgacaagagacattactatgagaacgcgaagtttaaacttcttagcgtttgcacttgtaggtgcatatgcggtaaaacagattaataatcataaagatctatcaatatttgttcctgaaaatggttttatctctttgaatgcaccattaacgcatcggagagttggctcgcttagtacccggacaacacatccgtatttcattggaatgattcaagaactttttaataatcttggcttcggtgtaagattgattaacccttatcaattcatgaccaagggtcaaatggtgagtaattgtaaagattctaagatgctttctgaaattgtggatcttaccgtatcatgtagtcattggaaaagaaaaaatcaacagtgtggatattgtgtcccatgtatgattagaagagcagctttaatgaaaggtactctaaaagaatctataagttatcatcatgcctcatatccaaccctacgtgattttgttaaaaacaaacaagatggtcgtgatgatgttatcgcggtaacagtagccttagataaatctaaaaaaataaatttgaaatcatggctattaaagtcgggaaagcttaaatttgaggatcttgataagtatgagcaagtgttttcagatggcttacttgaagttgaagatttcttgaaaaaggaaaaggtgatttga

SEQ ID NO: 227685 - DNA, 744 bp, Klebsiella pneumoniae
atgggtacatctcagtcaagtaaaggtcctaaaaatggaaacgaactcgtaccaccttgggctgatcaaacaaaaaatgggacaaatcaaaacctaagtggatttagaactttatttggtagatttgctcgtaatagagattccgtcgcattgaaaggggctttgtctcgttatgcaagacaagtaacgggcggttctgaatcagctaatgctcgtttaggaaatattataggcgctggtggggggttatttgaattattgaatgaaggtattaccaatgattctggtatgaagccactggtagatcttgacagtcttaaaggactaccctgcgaagatgtgattgctaaaatatcacattcattgtctgatggtagtgaagatgcagacaaaatacaaaccgccatgaatgatgcgttagttgaagcattgaacggtaaatccacctttgacccatccgatataacagacgatgtgattattgagacaatgatttgttatttgactgacagtatttttttgcagattactatggatgccggtaaagcatggaataatgctcaaaatgcaaaagaattacaggtggctgaaaattctttgcatgagttgattagtgcgactgtagacaatatcatggaaccaaaattaagtaaaaatataagatctttttcaaaagctgattttataattatccaaaaggatgttatcacagaagtttggaatgaatggaaaggatatgaataa

SEQ ID NO: 227686 - DNA, 1038 bp, Klebsiella pneumoniae
atgatacgaacttcggtttctgaatactttaaaggtacatctgcaagacatcatattgattatttggataaacttattcaggtacctataagagtgccgagaacaggtcttctggagattagatcatatctttttttactccatgcagtaaatgcaggaatagaggaagatttaattgaagatctacgactggctttagagaaatctttacaagagtcatggcatgaagatccgatgaagaaagaagatgctcttaaggttctaaaatgtgaaggaaacatagagttagctattgcttttgaccaagttgatcgaatcgcacctattttcgcaacatctcctataatccatggtaatccacgtattgtaaaaagattactcaacatagttaagatgagatcaaatattgctaagagaagaaagatttcgcttgatgaaaatgttataacaaaacttgttatatttgaacgttgtgctggcgaggaagccgcaaatgcactctattccatgatcgatacaaataaaaatttcaaaaagataattagtgaattagaaagtaaaaaattagatgaacttcctgattcagtgccttcggtatggaggaaagatgatacaacaagtgattttattcttaaatggcttgagcttgaaccaaagttaagtgataaggatttacgtgcggccgtatatctttctcgtgagactatgcctgcgggacattatgttcttggtctttcgccaaaagcaagggaagcattgaatattctggtagcaaccaaaagaaaaagttcacaagcggcttcgagagctttgaaagatatttctaatgaagaattcattccggtaatggaagggataattgaacatcttagaaatataacagaatggagcagccagccagatggttttgctggagccatattaatcgctgacaataatatagatgcagctaaaatacttaaaagattcatcgctggtatcaatgaacaacctcattggatgaatatgcttataaaagacaaaacatggaataaataa

SEQ ID NO: 227687 - DNA, 942 bp, Klebsiella pneumoniae; identical to SEQ ID NO: 188822

SEQ ID NO: 227688 - DNA, 1116 bp, Klebsiella pneumoniae; identical to SEQ ID NO: 188823

SEQ ID NO: 227689 - DNA, 1005 bp, Klebsiella pneumoniae
atgagtaataccccaatagatcatcattatttaccccaattttaccttaaaaactttgcattcacttttaaaaagaaaaattatagattatacgtttatgacaaaatacatgaaaacaaaatatcacctaaaaccacaaaagaaatttgctatgaaaagaatcggaacactttagatttacatggggaaaaagactattttattgaaaaaagtcttggagagttagaaggagtaatggccgaatttgtaagattaacattagattacgaaaaactcataaagaacagaacgattagtaataaaagtgttttggatagaagtaaatatcttccttttagttataaaatcaagctaagggaactgttggacatcccatattacgcacgcattttcaattatataatatcagttttttattggaggctgaccataaacgatagttatttcattcagaagatggggaaaacaactctatcagagtcaattaataacatactgagtgaaaataaaagtattccggctgatattagcgatgttcatcatttgctgagtgaaatgcgagaggaaataatctcattcgaatctttaattgaccataattcaatcataaaaatatataagagcctaatacatccagctaagaatatttttagaaatcctaataataaaaatcttattttactgcggaccacattcagtgttatcagctcagattttccattttgtattttcgataacgagccttcactggacgataggtttatatttatttggtcgcctaatgtgatattcataaataatatcaacctcgataaaatagacatcagggagttctgttttaaactttctttgttaaattatttaagcgcaaaaaggtacgtttttagtaatgataaagaattacttaataatgtgatatgctacgcaaacatgaaatacaacgatggcgatacaaaaaaagtaaaggatgaaatattgaaaacgcttaccatgaataagatttaa

SEQ ID NO: 227690 - DNA, 651 bp, Klebsiella pneumoniae
atgaactctgtctattgggtgattttcatggggctgctgataaacataccatcactggctccagtgctgcttctcaggaaagcagaaaagaaggttaaagtatcgttgtcattgaggttttttcttcttaatgctttcttggtgctgtcgttagtgacgctatcgcagaacatcacacaaaaatacaggctgtttccaatatggctggtgttagctgctatcgtgctgtttgctgtcacgctggtaccaacggtaaaatttgtgcgtaagtatttaactgttgggaaaagtcgggccgttatcctgtcatcatttctgattgtctatgccgtaagatttcatagcgtgttttcaaacgattatggcagcggatatacagttaatggatacaatacggtgtggacgttgttcttcctgtttgcctgcctgctggcttatctcggtagtgctgggagtaaaacatattctggttattctgctccgtcatctgcatcgcaaccagattattttaagccgaccaaagaatatgagacgcaatcacagattgattatgatattgcagtgaagggacggagtgttctgtctgacaccaatctgagtattgttgaacagcagcgttatcgggatactttacataaaagagaaaactag

SEQ ID NO: 227691 - DNA, 549 bp, Klebsiella pneumoniae; identical to SEQ ID NO: 162301

SEQ ID NO: 227692 - DNA, 954 bp, Klebsiella pneumoniae
atgatgaagaaaaacagcacccccacaccccacgatgccacgttcaggcagttcctgacgcagccggatattgcccgggattttatgaagttgcatttgcccgctgagctgcaggccatctgcgacctcagcacgctgaaactggaatccggctcgttcgttgaggatgacctccgccagtatttcagcgacgtcctctacagcctgaaaaccaccggtggtgacggctacgttcacgtgctcattgagcaccagtcgtcgcctgacaggcacatggcgtttcgcctgatacgttacgcggtagccgccatgcagcgccatctggaagcgggccataagaagctgcccctggtgataccggtcctgttctataccggtaaacgcagcccgtatccgtattccacccgctggctggatgagtttgacgacccggcgctggcaggcacactctacagcggcgctttcccgctggttgatgtgaccgttattccggatgatgacatcgccggccaccgcagtatggccgctctgaccttactgcagaaacatattcaccagcgcgacctcgctgaactggttgaccggctggcgcccattttgctggccggctatctgtcttcatcccaggtcatatcgctggtacactatatactccaggcaggcgagacagctgacgccgaagcctttgtacgcgaactggcacagcgtgtgccgcaacacggagacgcactcatgaccatcgcacaacagcttgagcagaagggtatccagaaggggattgagcagggcatccagctcggtgaacaacggggtattgaaaagggccgttcagaaggtgagcgtcaggccactctgaaaattgcccgtaccatgctgcataacggcattgaccgcaataccgttatgaaaatgaccggcctgacggaagacgacctggcgcagatccgccactaa

SEQ ID NO: 227693 - DNA, 444 bp, Klebsiella pneumoniae
atgaacccattcaaaggccggcattttcagcgtgacatcattctgtgggccgtacgctggtactgcaaatacggcatcagttaccgtgagctgcaggagatgctggctgaacgcggagtgaatgtcgatcactccacgatttaccgctgggttcagcgttatgcgcctgaaatggaaaaacggctgcgctggtactggcgtaacccttccgatctttgcccgtggcacatggatgaaacctacgtgaaggtcaatggccgctgggcgtatctgtaccgggccgtcgacagccggggccgcactgtcgatttttatctctcctcccgtcgtaacagcaaagctgcataccggtttctgggtaaaatcctcaacaacgtgaagaagtggcagatcccgcgattcatcaacacggataaagcgcccgcctatggtcgcgcgctgtaa

SEQ ID NO: 227694 - DNA, 612 bp, Klebsiella pneumoniae; identical to SEQ ID NO: 61245

SEQ ID NO: 227695 - DNA, 1455 bp, Klebsiella pneumoniae
atggagtcagaagtaaaaccaaacgccagatttattatattagaccccaatggcgagtatgtacgtgctttgggaccaactacaaaatttaaaggcagaatttttaaagtcgaagctggggaaaatgagcatcaactccaagtgccatcttggttttggaatagctcggaatgggcatcatttacgcaagcgagtcctaaagcccaacttcctttactaaagcgttctctaagggcaatgagaaacgaagattttgaacttgaaacaacctcaaatatagaaataaaacgttttctagggaatgttctcataaccttaaaacatgataaaagttcagggaaaccctttggagcttgggggcctgcaaaaggctttaacgagataatgggtaaatggattgaaagctttgaaggatacagagataaacttggaaataacaacttaacgaatgtaatcacaataatgtctaaatatagacaagataggaatgtacagtacgcaaccatgcaagcgaccgtgcctgaaatagatagcattatcgagagtgttacctctgcatttagagagttcggagggtttgagaaagagttactaccaaagaatgaagatataccgttaccatttgatggtaataacctggttgcctatttagaagctcttgctcaagaaaatggcagtgaacaatatgttgaatatttggttgccagaatacgcaccatgctctcagatacaaggatgagatctgttactaatgatgctgataatcggattgacttagctaaatggttagagaaatatcttggtaccgattgttcaagagatgataacagttgtatttctataatagatctatctctagttccaagcgaaattactcacattgttactgctgtgatttcaaggattatttttgaatcattgcaacgctatagaagactatataataaatctttacctacggtacttgtagctgaagaagcacatacatttattaaacggtatcgtgatgactctgaaaatcaggatgtcgcagctgtttgctgccaagtgtttgagaaaattgcacgagaaggcagaaaatttggtcttgggatggtggtttcctcgcaacgaccatcagaattatcacctacagttttatctcaatgtaatacttttcttctgcatcgaattagtaatgacaaagatcaggagcaagttcataaaatggtacctgataatttgcgaggattactccgtgagttgccttcactgccatcccaacatgcaatactgatgggctgggcatctgagcttcctgtcctggttaaaatgaaaaatttgacgaaagatcagcaaccccattctgatgaccctgacttctgggatgtttggacaagaaagtatgctgatgggaaattggtcgagagaactgtcgattggggagctgttgtaaaggaatggcaacaaaagtga

SEQ ID NO: 227696 - DNA, 1278 bp, Klebsiella pneumoniae
atgatttcacgctggaaatggattctgaagcagacatttaaaaagctatggttcagggcaacgttattcgccattgtcgcgataataacggcccttttatcaattctttttaaatcaatgatacctgagtcggtttccgtgaaggttggtgcggaagcagtcgataacattctgaacatactggcatcgagtatgctggcagtgaccactttttcgttgagtatcatggtcacagcctacggttcagccactactaatgtgactcccagagctacgcgtttagttgttgaagacgtgaccacacaaaatgtactggccaccttcatcggttcttttctcttcagtctggtagggattattgccctcaatatgggagcttatggagaaagggggatagtcattttattcattgtcacactggttgtcattgccttaatcctcatcacattgcttcgctggatacagcatttgacctctctggggagggttggtgagacaacggcaaaagtagaacaggcggccatcgaatcatttattgcgagagcaagaaatccctttctcggcggatatccatggcttgagaacaatgaacagccgaaaggaacggttgcagtttatccgaagaagattggctatgttgaatatattgatatggtgaaacttagcaaactgctgaccaatgatccccgtcatgtatacctcgtggcgcagccaggcagtttcatacatccatccatgccagttttgtacctgagtcaaggccaggagtcatcaatcagcgccgatttacttgagacgattattgtctcggatgtacgttcatttgctcaggatccccgattttgtcttagcgtcatggccgaaatagcctgccgggccctttcccccgcagtgaacgatcctggaaccgccattgatgtcattggcagaggtgttcgtatactttccacttacgcgcagaataaatctgatgaaatagaagtgaaatatccttcagttcatgttgcaccacttcagaataacgatctactggaagactttttctcacctgtcgcgcgcgatggcgccagtatgagggagattcagataagagtccttaaaggactgtctatgctgagtaagggttggcctggggtattttctgaggccgcgcataatttagcatttgaaacattagagcatgcaacacgtgctgaccatataaattctgaaaaatatctaataaaatcaatttattataatttatttggtggcgaagattctaataaaaaaccatag

SEQ ID NO: 227697 - DNA, 498 bp, Klebsiella pneumoniae
ttgcgccgggatttgaccaagcgtgaaagcctgagcatggcgacaattgctcctacggctgcacgtaacccaattccctggcagagaaggttacgcaatatcgcgtatctgccgaagcgatctcttgtgaaacgttttatggacgacgtcatccaccccgccatgacgctggttcaggaagagctgaacaagcaggggacgataagccacatcagtgacgcagtcgacgatcgtattcgtcttgaagtcgatttgggtaacgagctgaattttatatatgaagtgaggcttcgcgggtatagctcaccgaccttcgcgctcgccgcgatggataataatgagcagcagactgaacaacatagatattatcgcgctgaggtatatctcaaagaaggcggtcaaaattatgatgtgatgggctggaaccaggagcagctgattaatgacatactggaccagtacgaaaaacatctgcacttcctgcacctggttcgttaa

SEQ ID NO: 227698 - DNA, 315 bp, Klebsiella pneumoniae; identical to SEQ ID NO: 151383

SEQ ID NO: 227699 - DNA, 951 bp, Klebsiella pneumoniae
gtgccttacggccagcacgagcagacacggcgggagcacttggtcgagctgcaaacggtgtttggattcaagcccttcaccatgagtcattaccggcaagccgtgcatacattgaccgaaatggccttgcaaacagacaaaggcattgtgctggccagcacccttattgaaaacctgcggcggcagagcatcatcctacccgccatgaatgccatcgagcgcgcaagcgccgaggccattacccgtgccaaccgaagcatccatgcggcattggccgattccttgatacctgtccatcgccagtgcctggacgaactgctcaagcgcaaggatggtagcaaaatgacgtggctagcgtggctgcgccaatcgcccgccaagccaaactcgcgccacatgcttgaacacatcgaacgcctcaaagcctggcaggcgcttgacctacctgctggcatcgaacggcaggtacaccaaaaccgcttgctcaagatcgcccgcgaaggcggccagatgacgcccgccgacctggccaagttcgagtcgcagcggcgttacgccaccttggtagcactggccatcgagggcatggccaccgtcactgatgaaatcatcgaccttcacgaccgtatcatcggcaagctgttcaatgcggccaagaacaagcatcaacagcagttccaggcttccggcaaggcgatcaacgacaaggtgcggatgtatgggcgcatcgagcgcacgctgttcattctggattggctgcaaagcgtggagctgcgccgccgcgtccatgcggggctgaataagggcgaggcgctggacgacacgttgctgcaatatctgtccccgctggggtgggagcatatcaacctgaccggcgattacctatggcgcagcagtgccaaggtcggtgcggggaagttcaggccattgcgaccgctgccaccggcttag

SEQ ID NO: 227700 - DNA, 516 bp, Klebsiella pneumoniae
atgctcgatctcgaaggctatattccaaatactgacgttattctaaaggtatatacagattttacagcaggtagcactcatatttgttcatttgcttcatttgcttcatttgcttcatttgataatacagatgaaagtaaaagaattgagcatgaaaaatttagttttcatgatgataatccgtatgtgagttcttggcagtcttgctcaacaaccacaacttatctgcctgatagtaataaggttttaatatgtcatccagtgcttgttaataatccattagatagaagtttagatacacaaaatcatactgttttggcattgcttgctattgagatttatacccattacacaaatataccccttttagatccgaacgggaaaaatacaaatagtattctggatgttgactttactgagaaatcgtattatatattagatgtgtacagtctgatcattagaaatgcgatgcttggtcagcaagttatcttccatgattcgaagcaaaacgcatga

SEQ ID NO: 227701 - DNA, 972 bp, Klebsiella pneumoniae
atgaatatttactgcgatgatggttcaactaatgttaagctggcatggtttgaaggcgatgagcttcagacccgggtttctgcgaactccttccggcatggctggaaagtggcggaattcagtgcggcaacgttcaactatcaggtggggacgctgaaatacacctgggacagcgtcagtcgggatgccatcccgacaacaaacgtggaatatcagtacggtgatctcaacctgctggccgtgcatcatgcgctgctgaacagcggactggagccgcagccggtgagcctgaccgtgacgctgcccctgagcgagtattacgacggggactgccagcggaacgaggagaacatacgacgcaaacgggaaaacctgatgcgtgagctggttctgaataagggcagggcatttaccgtaacggacgtgaaggtgatgccggaatcactgccggcggcgttctcccgtctcgcggagctgaagcccggccccgctgagaccaccctgattatcgatctcggtggcaccacgctcgatgccggtgtgattgtcggccagtttgatgatatcagtgcggtgcacggtaatccgtctgtcggcgtgtcacaggtcacccgggcagctgcaggggcactgcgggcggcagacagcgaaaccagcgccctcatcgctgacactgtcatccgcaaccgcaatgatcgtcagtatctgcagcgtgtgatcaacgatgccggtaaaatcgacgaggttcggaacaaaataacagaggcgatcacttccctgggggcgcgtgtcaccagtgaactgacggccttcaggaacgttaaccgggtattcctggtcgggggaggggcttccctcatagaagaagctatccgtcaggcctggcctctggctcctgaccgtatcgaggttataggcgatccgcagatggcgctggccagggagattgccctttacaataaagaggactaa

SEQ ID NO: 227702 - DNA, 672 bp, Klebsiella pneumoniae
gtgccggacggccagtattctttctatctgcacagcgacgatcgcaccgacatcgcagcaatggcaaccatcagcaccatctcacagcccctgcgcggtgagttcatccgtaccgccgccaccgccggggcggtggtataccaggtggatgcccgtttaccggcgctgatcccggtgttctttgccgggcagctgagtgctgtccgcctttgcgccgtgatggccctggtctccggaacctggtcctcactcaccggccttccggatgagcccgaaaatggtggggctgctctgcccgtgtcaccggagacagaataccagcgccggcgttacaccctgacgcttcagaatggccggagtggggaacgggtggaaagtgtgctgacggaagcgtcatcccgtctgcgtggcgatctgctgagaaacctgattatcaccggtcttgccctccacacgacggcaccggagctgccgcgcctgctggccagtatgccggtaccgcccacctcggtcagtgagctgcaggcactggttcagcagatggccggcaccgctgacgtgaacagggctgcagctgcagtaccggatacgccgacagcatctgccgcgccggtgtccgggtcggatacccgggaaataaagaaaaatatgcggcgtgcattcggtgactaa

SEQ ID NO: 227703 - DNA, 765 bp, Klebsiella pneumoniae
atggatgaaatagaagttgatttagatttaggcttaaatcctttttgctttgagacagagataaagattgaaacaagaaagaagaacctgactgttttaagaggaacagaacttattgaaaggaaagatgccagcaaatcttattttgccaatatagtacatacacaagaggtcgataaagaagagttcattaagctctacacttcccagataaaagcatattttgatttaacgaaaacagcgtacaaggtgtttttcatatttctccgtatctatcaggatgcgataggtaaagatcacttttacctgagctgtaaaaaagcaatgtcgcttgcggaaaagatagatcacttcgtcttgtctgaatctatcttttacagaggcataaaagaacttattgagaaacgtattattgctaaaacgaatgaaaaaaactggtattttataaatcctgctattgtgttcaatggtgatcgtgctcgctttgtttcagagattataaaaaagaaagaagtaatggaagaacaacccgaaagcgttgccagtactgaccgaataaataaaaatattacagaagaagatagatcaattgagtcagtgatagctgatgttaatgaccaagaggatattgatttgttaatcgcaagattacaggctaaaaagtcccaaggggcgatgatgagtaaaaggatgggaggatgtatcactattgaggccgcaacacttttaccaccagaagaaccgttagattgggataatatttaa

SEQ ID NO: 227704 - DNA, 519 bp, Klebsiella pneumoniae
atgggtaagccactttcatataatgatatagatataacttcagcagtaagtatggaaagggcccacactttcctggatcgtttatatatactttggccacgcgcattcgataatttccttcactctatgctgttggggatgggatttaccagttatgatgaccaatgggttcgttataatgatataataccgtatatttttagtattaaaatggacaatgttgttgttcatactgattcacatgctcataactcaacatttgcgatattagctgaactcggtgttgtgggctatatattgtttatcttgcttttctcacaaatactatccaaaattaaagaaatggaaaagtataataggcattactcacttatgctgttattcagtttttggtcatgcgttttctcttctggtactgaacatcgaattactacgccatcacagatggttccatttttcactttattcggcattggatatgtaacatttttgcataaaaaaaataaggctggtagttaa

SEQ ID NO: 227705 - DNA, 204 bp, Klebsiella pneumoniae
atgatagtagttatgtatatgtattacatctggtttaaaaaaaagaattctttccttaacccgtttatactcactgcacgaataaatatatgtaaaaacatttcgttttccttcagcaatgagtacgtcgttctcgaaaccaagttcctgcgaaatttttatcgtatctctaaatactgcctctgcaccgccaccttcccatga

SEQ ID NO: 227706 - DNA, 198 bp, Klebsiella pneumoniae; identical to SEQ ID NO: 191037

SEQ ID NO: 227707 - DNA, 231 bp, Klebsiella pneumoniae; identical to SEQ ID NO: 121662

SEQ ID NO: 227708 - DNA, 198 bp, Klebsiella pneumoniae; identical to SEQ ID NO: 191037

SEQ ID NO: 227709 - DNA, 315 bp, Klebsiella pneumoniae; identical to SEQ ID NO: 151383

SEQ ID NO: 227710 - DNA, 141 bp, Klebsiella pneumoniae; identical to SEQ ID NO: 36145

SEQ ID NO: 227711 - DNA, 141 bp, Klebsiella pneumoniae; identical to SEQ ID NO: 36145

SEQ ID NO: 227712 - DNA, 183 bp, Klebsiella pneumoniae; identical to SEQ ID NO: 101388

SEQ ID NO: 227713 - DNA, 153 bp, Klebsiella pneumoniae; identical to SEQ ID NO: 94368

SEQ ID NO: 227714 - DNA, 225 bp, Klebsiella pneumoniae
atgacccaaccatcgcacacagcttttatcaccggcgcgtcctcaggtatcggcgcgatctatgccgaacgactcgccgcccgcggctacaacctgatcctcgccgcccgtcgtgaagaccgtctgcaggcgctcgccgaccagctgcaggcgcgctacgccatccaggcaagcatcctcaaagccgatcttagcgaagagcacgggattgccgccgtagagtag

SEQ ID NO: 227715 - DNA, 618 bp, Klebsiella pneumoniae
atgggtgggaacgaatggagccagggtgagaaagccagagagcatggcgcagatgttctctcatgcgcagataacccgtctggtgaagcttgccagcgaggaattgctgagaataaagcttatgcaggtgccttggcttcagcggggctaatctacctgccggggggaatgcaggttactggcgcgataggcggaacggcaaatgctggtatccagtatcttattaatggagaagttaatccaacggatgtgctcattgcgacgtatgttggagcttttaccagaaatacaggattaaagagaacaatgagctggaatgcggcaggtggtgcaacatccagctatctgaaaggggataatccttttacaggtggcttaattaatggtttggcctctggagtgggttatggtgcaggaaaactcattgagctgcctgtggataaaatttacaacccgatgaagccatggaaagattggctgtggactgatgtcggaatggggatatcgaagccattgtcattagatccaataccaagagttgctggtaatataacaagctcaataataacagaatatagtaatgatcaggcaggtaaaaatttagggggtaagaaatga

SEQ ID NO: 227716 - DNA, 7836 bp, Klebsiella pneumoniae
atgctgatggtggtggcggaaacgacccgctctcatcgggctggcgtatcgccgcaatccggcgccgacgcgcgaaccgggtcgacgttaatctcctccctggcgccgctggcctttagctttctgctcgctttttcctgtctcactccggctcaggcggcgattgtcgccgataaccatgcgccaggcggccagcaaccgcagatcgccaatagcgctaatggcacgccgcaggtcaatattcagacaccgagcggcgcaggcgtttcacgcaacgtttacagccagtttgacgtcgatgggcgcggcgtggtgctgaataacagccacgctaacacttcaacccaactggccgggatggtcgccgggaacccgaatctggcgaaaggggaagccagagtgatcctcaacgaggtgaatacccgcgatccgagccggctgaatggctatatcgaggttgccggacaaaaagcgcaggtggttatcgctaaccctgccggaattagctgcgacggctgcgggttcatcaatgccaaccgcgcgacgctgacgacaggccaggtgcagtacggtaacgggcagattagtggttatgatgtcaatcgcggcgaaattatcatacagggcggcggccttgatgcgagctcggtagacagtaccgacctgctcgcccgcgcggtgaaaatcaacgccggggtttgggcgcaggagctaaaggtcaccgcagggcgtaatcagatcgatgcggcgcacagccggacgacggcaaaatcagccgacggcagtgcgctgcctgcggtggcgatcgacgtcagcgcgctgggcgggatgtacgcccataaaattcgtcttgtcggtaccgagcgcggcgtaggcgttcacaatgccggcaatatcggcgcggcggcgggggacgtagcaatcagcgctgatggcgcgctcagcaaccgcggcgtgattcagtccgcgcagaatctgcaactgtccgttaagggcgatcttcacaaccagggccagctgtacgccggaaaagatagcgtggtgacggccagcgcgacgctaaccaatgacggcatgattgccgcgcaaggcgatacgcggattgccgccaacgctttgcgtagcgcgcaaaacagtacgctcgccgccggattaaatagcgatggttctaccgccagcagcggcgcgctgacgctgaatagccagagctcgctggcgctgaatggccgcaatatggcggcagggacgctgacggcgcagggcaggacggtggatcttgataacagtcgaacctcgggggcgcggatcgtggtcagcgccgcgtccggcaatatcaccacccgagatgcggtggtggcggccagcgaaaaactccagttggccgccagcggcaaactcaacaaccacagtggcctgttgacggccagcaagcttgagctgaaagctgtggcgctggataaccaacagggcgtaatccagcagacgggcgaggacgatctacgccttgattttcgcgcgggattggataaccgcggcggtgagattgccagcaacagccatgctttgacgctcagcaccagccagttgctcaatcaaaacggaacgctgctgcataccggcagcggcggcatgtctattaccagcgaaggcgcgctggacaacggcgaaggcactattgccgctaacggcaatatcgttttgcactccgataacattaataatcgcagcggtaaaatcagcacgacgcagggcaatgctcagctcactacgcgtcacgagctggaaaattcgcaagggaatatcgttgctggcggcagcctttctctacaagtggccagccttcggaaccagcaggggcaattgattgcggcgcagggcgacctggccatgagcgctgaagaagggctggataaccgcgaaggcgtgcttaccgcaaatggcaatatcaagcttgacgccgacaatctgaccaaccatggcggaaaaatcagcgcggcgcagggcgacgttcagctcactgcgcgccatggggtgaataactcgcaggggaatatcatcgccagcggcgacatccggctacaggctgaaaatcttaataatcgtcacgggcagataggcacggcgcagcggggcagcgtcaacctgacgacgagcggtttgctggataatcagcagggcacaattaccgcctttgatgccttgggtattcagagcgccaccgttgataaccggcagggagaactgcagtccggcggtaatctcaatatcaccatccacaaccgggggctggataaccgacaggggcagatcgtctccgccgccgctctggaaatagcaggcgtcaacctggcgctggctaatacgggcggaacgttacttgccgcgagcaaacttagcctcgatgccgattccctcagcggcgatggcgaggtgctctctcagggcgatatgtcgctcacgttgcgtcaggcgtttcataacgccgggagggtcatcgccaacggcaacctgcagtggaatctctccggactggggctgattaaccagggggttatcagcgccggccgggcgctcaatctctatgcggcaaagctggataaccgtcaggaaggtgaaatcagcgctggcgagaaccatttgacggtcaacggcgagttggtcaatcgggggctgattgacggtggcttaacccatattgtcgccacgacgttaaccaatatcggcagcgggcgcctgtacggcgacgccgtcgcgctgcaggcggcaacgctgactaacgccgcggagaacggcgtggcggcgacgattgccgcacgggcatcgctggcaatgggcgtcggcacgctcaataaccaggatcacgcgctgatctacagcgacggtacgctcgccattggcggccagcttgccgaagacggttcgctcagcggccgggcgggagtgtttaataaccacagcgcaacgcttgagtccgccggcgatatggtgctcgatatccaacaaatcaataactacaacgaccatctggtgacgaaagatgtgatggtcgagcagtcatggcgccatgaagcggcgctgaaaggatcggtacagcgcttcgactggtcgctggtcgataccagttataaaaacaaatacggcgttcacgacgccatcatgccggacggaagccgcggcgatgagttctatgaataccagtaccagcgtaccgttgtggaaacgcaggtggtggaaagcgatcctggcaaaatcctctccggcgcccggctcatcatcaacagcgataagctgaataactacgatagccagattatcgccggaggagcgctcggtggcgtgattggcgaactaaacaacgtcgccacgaccggcaaacgggtgaccaccgacgtcggcacccagacccgttggtatgagaaaaagaccagccgcccgtttggcggcaccaaaaccagccaggggaaaaaaagcagcgaatatgaaccgacgccgatggttcagaccatcgatttgcaaaccatgaagtggcagggcaatacccaaattgatggccatagcggcgtgattaatccgcgcgatcgcgccgatgaaacaggcgaactacccgccggacggctggtggaagtgacgccggttaacgctgacggaacggttattcgcgtcgtcacgccggatacccggcttcctgtcagcagcctgtatcagatcgatccgcaggctaaagcaggttatctggtggaaaccgatccgcgtttcaccaacggtaaagcgtggctcgccagcgactacatgcaaaatcagctgggcgttgatcaggcgatgaagcggcttggcgacggctattacgagcagcggctggtgcgtgagcagatcgttaagctgagcggcgggcgctacctgcagggctacagtaacgatgaagagcagtatcgggcgctgatggacgcgggcgtcgccttcgccaaacagtacaacctgacggtcggggtggcgctgacgccagcgcagatggcgctgctgaccagcgatatggtctggctggtcgccagagaggtcacgctaacggatggctccgtgcagcaggtgctggtgccgcaggtttacgcgcgggttaaagcgggcgatctcgatggcagcggcgcgttgctcggcggtgaaaacgtggcgttcagcgtgagccgtgatgtgaccaacagcgggcacatccaaagccgcggcgtgacgcagctaaccgcggaaaacattcataacagcggctatatcggcggcaaccagcttacgctaaacgcgcgtactgatatcaacaatattggcggaacgctgcagggcggcgatagcctgatcgcgcaagccgggcgtgatatcaacagcgccagcaccctcggcggcggcccaggtaacatcagcctcgatcggcctgcggggatttatgtccagaatgaaaacggccagctggggctgcaggcgttacataacattaatctgacggcaagcatggtgagtaacagcgcggcgggcagccagacgcagattatcgccggcaacgatctcaacctgcagacgctcgccaccacccatagcgaaagcggaagctgggggaaaggcaacgatcgttccttgacccagcgtagcgatatcggcacgcaaattaacggcggcgcggtggcgctgtccgccggccacgatatgattgcccgcgccgccagcgtgacggcgaccagcagcctgacggttgccgccggcaatgatattaacctcagcagcggcgagtcctcatggcacctgacggaaaatagccatcaaagcagcagcggcctgctggctcgccgctcgctcaccactcacgatgaagtgtgggcgcagaacgccatcggcagcaattttagcggtgacagtattgtgatgcaggccgggcgcgacctgctggtgtccggcagcagtgttgccggcacccaggatgtcaaccttgtggcggggcgtaacctgaccatcaccaccgccaaggagagtcgccaggaaaaccatctacgtaaagagaaacatagcggcttttccggcaccggcggcgttggcttcagcgtcggcagttcgtcgctgaaagccaacgatgtgacgacggcgctgagtagcgccgccagtaccgtcggaagctcacagggcaaccttagcctgagcgccggtaatgtattgacggttcagggatctgacctggtggccggcaacaatatggcgttgaccggtaaaaccgtgaatattctggcagcggaaaaccagagcacccagacccataccgtggagcagaaaaccagcggcctgacgctggcgttatccgggatggtgggcagcgccattaataccgcggtttccagcgccaaccaggccagcaccgagagcaatggccgtctcgccgcgctgagcgggctgcagtcggcattatcgggcgtacaggcgtatcaggcatcgcagatgcagactgcggattccagtccggagagcatgataggggtcaacctctcctggggtagccagtcctcgaaatccactcagcgacaaacgcagaacaccagccgcggcagcagcctgatggccggcaacaatctcagcattatcgccacggagacggatatcaacgttgagggcagccagctgcaggccggcggcagcgcgttgctcaatgccgcgcgcgatgtgaatttattctctgcggagaacgccagcaccctgagcggtaaaaacgagagccatgggagttcgtttggcgtcggtattaacttcggtcagggcgcgaacgggctgacggtcagcgccagcgccaacgccgcgaagggccacgagaagggcaacagcctgacgcataacgaaacgaccctcagcgccggtgagcgggtgactatcgtcagcggtcgcgatacgacgctgaccggggcgcaggtgagcggccatcaggtgacaatggacgtcgggcgtaacctgacgctgagcagcgagcaggacagcgataactacgattcgaagcagcgtagcggcagtgcgggggcgagcggcagcatgggcggcggttcgggttctctcaacctgagccagagcaaaatgcacagcacctgggcgtcggtggaggcgcagacggggatttttgccggcgagggcggttttgatgtgaaggtgggcgggcatacgcagctgaacggcagcgtgctggcgagcacggcggcggcggagctgaaccggctggataccgggacgctgggtttccgggatattaaaaactatgccgagtacagcgtggagcagcagagcgcgggagtgagcacgagcggtagcgtggcagggcagttcctcgggaatgcggccagcggtctgctgatgggggcgaacggcagcggcagcgacagttcgctgacgcgggcggcggtgagcgagggcagtatcgttatccgcgacggcgcgaatcagcagcaggacgtgacggggttaagccgggatgcggcgcatgcgaaccagacgctgagtccgatatttgataaggagaaagagcagaaccgtctggcgacggcgcagaagataggtgaaatcgggcgccaggtgagtgatgtgctggtgacgcagggcaagctgaacgcgcaggcggcgcagagcgacccggcggcgcgggcagcggcgcgggcgaagctggtagcgggagggaatggcagtccgagcgaggagcaaatcagcgcgcaggtgagccggacggcgacggcggactacgatacgggcggaaagtaccagaaggtggcgcaggcggtaacggcggcgatgcagggtctggcggggggcaacctggcgcaggcggcgagcggggcagtgagcccgtatgtggcggaaatcattcacagccagacgacggacagcgcgacgggtaaggtgaatgtggaagccaatgcgatggcgcatgcggtgtggggagcgatagcggcggcatcgggaaataacagcgcgctggcgggagcggcaggcgcggtgagcggcgagctgctggggcgctggatagcgacggaatactatccggatgttaagacagaagagctgtcggatgagcagaagtcgacgataagcgcgctgagtacgctggcggcgggactgatgggtgggcttagcggaggcagcagcgcggatgcggtggcgggtgcgcaggccgggaagaacgcggtggagaataatttacttggcggtagtgaatggcttcagacggaaaaagccagggaacatggtgctgatgtactttcctgtaatgatgctccagatggtgaagcctgcaagcgaggcgaagcagttaataaagcttatgccggagcattggcttccgctgggttaatttatttaccaggcgggatgcaagtaactgctgggataggcggttcagcaaatgcaggaatacaatatgcattaactggtgaaattaaaccgacagaggttttaatagccagctatataggtgcagctactgctaatacaggattattgggaacgattggatggaatgcggcgggtggtgcaatgtcaaattatttgaaaggtgatgacccgctgaatggtgctggttggggggctgctggttcagcactgggttacgggatgggtaagtatcttattgaaatgccgctaaataaagtactcaatcctacatggaaaaactatgagtgggttgatgttggaatggggataagtaagcctttacagtttgacgctcgtcccagtacttggggggcaatatctggctctgctgcttcggaagcaacctctcagggtggaccaaaggttgaagacgctatcacaaaaaaaggtttaataaaatga

SEQ ID NO: 227717 - DNA, 1755 bp, Klebsiella pneumoniae
atgggtttggttgtattaaatgccacgctttgctttttattactcgacatggaacgttgtgacttaactataatgaataaatggaatttcattcataaagttttaattatctgtatattgcctgcctgggcatgggctgcgcctgtggataccgtacgtgagcagcagttcatcaaccagcagcagcgccagcaggcgctggaaaaccagctcgcgccgccgtcaccggatattcatttatcagcggaagaaataaataccgatgatggtttatttcccgtggaacaaccttgctttgctatttcacagattattttacagggcgccgatgccttaccgcattggcttccgctccagcgtcaggaaaataaagcgattgggcgttgtctgggagggaagggcattaatctactgatggcccagttgcagaatatattaatcgatcgtggttatatcaccagccggatccttgccccgcagcaggatttaaaaagcggtgttttgcgcctggtggtgatgccgggttatatccgtgaagccaggcttacgcaggacagcgatgattatctgtggctggcgagcgcgtttccggcgaccgacgggaaactactggacctgcgcgatattgagcaggggctggaaaacttgcagagtctgccgacggtacaggccagcatggaaattgttcctggcgaaacgcctgggcaaagcgatattgtcattaaccgccaacaggaacgcttctggcgcgttgacgcctcgctcgatgattccggctctaatgccaccggccgctatcagggtaacctgacgttgtccctggataacccgttagccttaagcgatcttttttacctttccggctcacataacctcgatggcaacggcggtaaatcctcaaagaacctgaccggtcactattcggtcccgctgggttactggcagttcggattaaccgccagccagtacgattacgtgcaaaccgtggcgggggccaacggcgattaccagtacagcggtaaaagcaagaacgttgatttccagatgagccgcgtactgcaccgtagcggtagtcagaagaccacgcttagcgccgatgtgttagcccgcgagcagcgcaacttcattaacgacaccgagattgccgttcagcggcggcaaacggcggcctggaagcttggtctgcagcatcgccattacctgggcaacgccactctcgatgccggagtgagctatcagcgcggtacccgctggtttggcgctcagcccgcgccggaagagcaatggggggaagcaaccgccctcagcaaaatcctgcaattcaatgctcagctcaatttgccttttgccctgggcgggcaaaattttcgctttaccagccgctatcagcggcagatgagcagcacgccgctgacttcgccggatatgttttccatcggcaaccgctggacggtacgcggcttcgacggcgagcgcaccctgaccgccagtcacggctggtacgtacgtaacgatatcgcctggtcgactccgttgccggggcaggagttttatctgggggcggattacggcgaagtcggcggcgcaggcagtgaaacgctggtgggcaaacacctcgccgggggcgtggcagggctgcgcggccagtaccaccgcgccagctacgacctgttcgccggtatccctttagccaaacccgatggctttaaaaccgatccggcaacttttggtttcagcgtcagctggagctactga

SEQ ID NO: 227718 - DNA, 2109 bp, Klebsiella pneumoniae
atgccagcaggttcctggcagggttacgagctggaactgagccaattcacggaacagcaatggcatgactgccagtcactgctgacgcgctggcaacaggaagtcgaaggtaaagaatttagcgatgtcctggatctgggcaaatatggcgatcgcgtcatcggcatcggtgagttcgaaaaaatatcctctccctggctgaccaaggcgcaaagtgaaaactggctccctgttggcatcgacttctccgaattttcggtagaaacactggatggctggcaacccgataatctgcagcatttcgatgaactgcaggagagaataacctatgccgaagcgactggcgaaacgcatatcatctctccctggaatgagactgaactgccactggatgcggcgaaaaccttcagtaagaactgggaaaaacagcaaaatgcagcacatgaatcagagagcaatgttgttgaaaaagcagcccgggcagtgctcaaaattgaacagaatattgaagaagcggtttacattaaacagcgccgaaattcactcctcaatgcacgcaatgctgaacctgaaattccactgagcctgaaagagcacatccgactcaaagaccaccagcgtgaaggtgtggcctggcttcagcagcttttccttcgttcacctcaggaaactgcaggttgcctgctcgcggatgatatggggctggggaaaacgctgcagattctgaccttcctggtgtggttcattgaaaaattccctgacgagccaccaagtctcatcgttgcccccgtctctcttttggataactgggagcgtgaactcgacaatttcttctacacctctgggatttcggtgatgaaattgtatggcgacactatcaaagcggtgaaatacccgaaacaggcgattcctgctcatctccaaagtcaggggattaaaaatttgctcaaacccggctggcagggtgaagcgaaaatcattctgacaacctacgagacgcttcgcgatcaggagttctccctggcgcgccagccatggtccatcatggtctgcgacgaggcacaaaaaataaagaacccggcggcattaatcactcatgcagccaatgcgatacaagcaagattcaaagtggcatgtaccggcacgcctgtcgaaaacacgcttgtagacctgtggagcctctttgatttcgcacagcctggcctgttaggtgcactcaatgaatttggcagacactatgttcgcccgatagagaacgaagcgggtcgggatacagggcagcttgaaagcttacgagcgttgattgaaccacaaacattacgccggactaaagaagaagttgcgcgtgatttaccgcaaaaaatcgaagtcgttagttgtaagcaactgccgctttctggccctcaaaagcaactgtatctttcttcgatagcgaactggcaacaacagcaggcacttagtgaaggaatgcagcaggcgggggcggggatgctggggttattacatcgtcttaaactcatttgtgcacacccagcagtcgttaaccctgagcctcgatatagggaagggtcgccaaagctaaactggatgttgaaaacgctagatgaaattaagcacaccagcaaagacaaagtaatcatctttactgagctgcgcgatctccagcgcgagatacagcatgctattcaacagcgattcggtttccgtccggtgatcatcaacggcgacaccagtactaagagtcatagccagaatagccgccagcgattgattgataatttccagtcccaatccggctttggcgtgattattctctccaccgtcgcagttggatttggggttaacgtgcagaaagcaaaccacgttattcatttcacccgctgttggaatccggcaaaagaagatcaggcaactgaccgcgcttaccgtatcggccagacaaaagatgtatatgtgtattatccgacggtaatggactctgaaatcacgacgtttgaagaaacattagatgaactccttcagcgtcgccgtgcattggccagagatatgttatgttctacacctgagctgagcagtgccgattttgagaatattttaaaagggacataa

SEQ ID NO: 227719 - DNA, 1401 bp, Klebsiella pneumoniae; identical to SEQ ID NO: 199080

SEQ ID NO: 227720 - DNA, 693 bp, Klebsiella pneumoniae; identical to SEQ ID NO: 199081

SEQ ID NO: 227721 - DNA, 3318 bp, Klebsiella pneumoniae
atgacgagtccaatgtgcgcgttgctttcagactctaggctatatgacttgttcggagatgatcaaaatctcactgtaagccaaatctggctattggagatcgagtgggaagattcaagtgaactacgttttctgtatggtcggtcactatcaggaaactaccaatcaaacagttggagcgggagcgttagttccaaaatgccacttactgagaattgctcagtcagaactcacgccttgacacttcatacctctaccgagagactgaggactttccttgagcacttcatctgcggagagacgtttcagaaatcttgccaattctccgggctgcatatcagcgacaaattggctaaggcgataggaacaagtacattttgtgtgaatcctatcactcgccctgtaatgcatttgccgacacgcgattattatagatttcaaactaatcggctaagcccgaccagctattccagtgttgacagcggcgcaatttctccaagagaaaaatcaaaattattcagtgtgttggaaggatatgacatgaagattgccaaatttgcatgccaagtattggatgcagatactggcttagacttctccacaattgactcttggcgaattggagactttgagttcatctgtgctcctgggctcaatgcttcagagcgcagcaagtatgacgtatctttgaaggggcagcagtcatctctgacgctattcgaaccactaacccgggaaccttccgatctgttggttattgtcaaggcgtacagtgatggtggccttcagtcctcttatatcgccaacctcagcaagaatgcttcataccctctccatcacacatttgaactcaaagtgtttcaggaccaagctagcacagcttatacaatggaggtttatgcgcttggaataaatggtgagcaatcattcctcctgcttcaaaccggcgcagaatttgtgcgcgaaatgaatctcaacatgcagttagtcgaacccattagggcaaactaccaattcgaatggttggcaaaaaaagtaccgaaaagggaaagggccagactggagacagcaggacagattgggcgtgctattagtcgtccgtctcggtcacaaatgggcgggtatgcggatgatccatgggttccactcaactggctcatccagaacagagtcaaacagttatgccccaagaaatccgacggacggttctttcctactctcaacgacagcagcggtatgagccgtctcgagttgatagactggctcaaaggcattttcgaacggcaccacgacgcgaaaattgcttggatcgacccatttatggaggatgtagggattgagcttctcaaccgactgggcactgctactgctgattaccttgtcatcacgacggaaaaaatgtcgaatgatgacagcataaaagaggccgatgagcccaaccgtgttgaaaatcttctagcgagatgttcaggttggaataatggctactttggaagtgtttgcctcaaaatactctcagtaccagataaaaaactccacgaccgcatgatcctcattcgctcagccaatggtcagccgttagctgggtaccatctttccaattcagttcagagggccagcgagaaacatcctctattggtaacccctattcctctggacgtgattccgcaagtatttgagtacgttgatcagattatccaaagtacactctatggagagggtaatccccaccttcctgcaagaataattttcaattctgccgatattagcccatgtgaggaggagaagcctaaaggactaaatcacaattcctcatttgctgagctaccatgcgctggtagcgtgctagcttggtggcttgatgatgagcagctttcaaacttgtcaggagctgtactcatggagcagatgagtgctaaaggatatattaaggatgggaaacttgacggagatcgctttgacgctcttcccgccaaattctggactgaagggttgccaatagcagatttccactcagcttgggatgcccttggttatgtcatagccaactccccggctagtcgctatgcaggtagcctctacaacaaggagcaatcagtattatccgaacttgtgaaggttgcactgttggagcacatctctccctccagagcaaaagcactgcaaccacgtctcacaaaaaaacaacttgacattgaacactactgttcacagggacttacagcactactgctttcaaaaaatgatccgttcagtacattcacatattcacccgtagatacctcatggagcgattactactccatacaactcctatggtcgcaagctccaaagcagttggtatcttggttaaacacaatattctctgaaccaatcaagtctcctcgtactcacgcgcttgtggttgaagcccttaagcatatttgtttgtgcgtcagctttgacaagcatcatgagcaaattgatgcgcttttgcagagcaatgtgagtgtaataatctggatagggcttcatgctcttgaaaacgcccttaacaggggagtctggggaattgaagccctttcaaaaatcgaccatatcgaatcagccactgttcgacgtatcattttgtgctggctgatcaacgaagccaactaccttaattcggagattaaaccacaactcatcgcttgtttaatccaatcgttaaaggctcctctcgcggacgatgagctcaaggatattcttcaacctgttcggggacgcctcggcaggctacaccatttcacgccctggattcttgaatccatgctcgtacccatgctggaaaaaagaacaatcgatatcactcaagttgcccatcagtggttgacagagctgactacccaatggcgtacagcactcaagaatgagagtctctattttactctagatgcggacggtgcattcaccgatgagctggctattgcgaccaaatacctagtctcagcagatcgagtggagattgtcagagaacttaggaatgtctttgatgcactggctcggaccatcaggcggccgatgagcgcgcagataagctgtaaatcctacaacaatgcgcaccaagtaaacctctggctctatgcgctcgctcgtaggattaaaacattggtgcctgatgagttaccactgttgaatgaacttctgcttgaaagcgaagaaattattgaacgaatcagcccctcaacttggcgctggagttcaagcaaagacctgctcacttatgtaaatggcgatcccgaacagattgggtcacatggtcttcatcaaattattcagagagcaatcgagccacggtga

SEQ ID NO: 227722 - DNA, 711 bp, Klebsiella pneumoniae; identical to SEQ ID NO: 199083

SEQ ID NO: 227723 - DNA, 387 bp, Klebsiella pneumoniae; identical to SEQ ID NO: 199061

SEQ ID NO: 227724 - DNA, 471 bp, Klebsiella pneumoniae
gtgacgctcaatactcatcaggtcagttattacatgactcagcgtaagaaaggtgtaacccagcatatctcggccatgaaggccggtatctctgttcgctcaggtcgcaggatcgaaaaagatcagtggtctaaaaccggtaatcgtcactggcggacgcgtaaagatccgcttgaggccgtctgggacatcgagcttgttcccctgttgaaggaaagaccagctctgatgcccacgaccctgctggaaatgctgcaggataaatatcccggtcaataccctggcagcctccgcaggacgatgcagcggcgggtccgcgagtgtaagctgcagtatggtgccgaacaggaagtgatgttccggcaactgcatcagccaggcctgcgcggtctgtcggactttacccgaaaagcgggaaatgagaccgggcatgcagctaattgctactgcccaatgatgaagccagcataa

SEQ ID NO: 227725 - DNA, 255 bp, Klebsiella pneumoniae; identical to SEQ ID NO: 199060

SEQ ID NO: 227726 - DNA, 285 bp, Klebsiella pneumoniae; identical to SEQ ID NO: 199059

SEQ ID NO: 227727 - DNA, 375 bp, Klebsiella pneumoniae; identical to SEQ ID NO: 199058

SEQ ID NO: 227728 - DNA, 651 bp, Klebsiella pneumoniae; identical to SEQ ID NO: 199057

SEQ ID NO: 227729 - DNA, 1107 bp, Klebsiella pneumoniae; identical to SEQ ID NO: 199056

SEQ ID NO: 227730 - DNA, 639 bp, Klebsiella pneumoniae; identical to SEQ ID NO: 199055

SEQ ID NO: 227731 - DNA, 1020 bp, Klebsiella pneumoniae; identical to SEQ ID NO: 199054

SEQ ID NO: 227732 - DNA, 186 bp, Klebsiella pneumoniae; identical to SEQ ID NO: 199053

SEQ ID NO: 227733 - DNA, 1320 bp, Klebsiella pneumoniae; identical to SEQ ID NO: 199052

SEQ ID NO: 227734 - DNA, 3507 bp, Klebsiella pneumoniae; identical to SEQ ID NO: 199051

SEQ ID NO: 227735 - DNA, 783 bp, Klebsiella pneumoniae; identical to SEQ ID NO: 199050

SEQ ID NO: 227736 - DNA, 1770 bp, Klebsiella pneumoniae; identical to SEQ ID NO: 199049

SEQ ID NO: 227737 - DNA, 339 bp, Klebsiella pneumoniae
gtggaccgatctcccgggcgcgggctgaccgccgtgggcgcgaatggcctgcaaaagcatcgctttggcatttttacccagtcgttcccgaccttcctcgcgctgagcctgtatcagattgaatccaacacccgctccgcggcggtgctgggcttcgtcggcgccggcggtatcgggcttatctatgccgagaatatgcgtctgtggaactgggatgtggtgatgtttatcaccctgctgctggtggcggtggtgatgatcatggacaccctttccgcctggctgcgccgtcgttatatcggcggcgccgcggtgccgctgtatcagggcggacgctag

SEQ ID NO: 227738 - DNA, 891 bp, Klebsiella pneumoniae
atgaatgaaaacaagctgctgggattggcatggatatcgccctatatcatcgggctgatcgtctttaccgcttttccctttgtttcatctttctttctcagttttaccgagtacgacttgatgagcccgccggtatttaacggcatcgaaaactatcgctatatgttgaccgaggatagcctgttctggaaatcgatgggggtgacctttgcctacgtctttttaaccatccccttaaaactggctttcgccctcggcattgcttttgtgctcaatttcaaactgcgcggcatcggctttttccgcaccgcctactacattccgtcgatcctcggcagctcggtggcgattgccgtgctgtggcgcgccctgttcgccattgacggcctgctgaacagttttctcgccgtctttggcatcgatgccatcaactggctgggggaaccctccctggcgctgatgtcggtcaccctgctgcgcgtctggcagtttggctccgcgatggtcatcttcctcgccgcgctgcagaacgttccgcagtcgcagtatgaggcggcaatgattgacggcgcctcaaagtggcagatgttcatgaaggtcaccgtgccgctgatcaccccggtgattttcttcaactttattatgcagaccacccaggcgttccaggagtttaccggcccgtacgtgataaccggcggcggtccgacctattacacctacctgttctcactctatatctacgataccgcctttaagtacttcgacatgggctatggcgccgcgctggcgtgggtgctgttcctcgtcgtggcggtctttgcgtcgatcgcctttaagtcatcgaaatactgggtcttctactccgccgataagggaggcaaaaatggctga

SEQ ID NO: 227739 - DNA, 1773 bp, Klebsiella pneumoniae
atgttgccggatagccagagaggctttgcgccagtaatccatggtattgcccgtagcactgctcaggtctctatcaaacaaaatggctatgagatttatcagagtacagtaccgcctggtcccttcgcaattaacgatctttatgctgcgagtagtggtggcgacctacaggtcacaattaaagaaaacgatggtacccgtcaggtctttagcgtgccgtggtcaacggtacccgtgctacagcgtgaagggtatacccgctatgcgttgacagccggagagtatcgtagtggcaacgttcagcaggaagagcctaagttctttcaggggactgttttacatggtttacccaccggatggacaatttatggtggcgctcaacttgctgaacgttaccgagccgtgaacctcggcatgggaaaaaatatgggtgattttggtgccctttcactggacattactcaggcgaacgccacgttgtctgactacagcgatcatcagggacagtcaattcgctttctgtataacaaggcgctgagcgatgtaggtactaatatccagttagtgggttatcgctattctacaaaaggttattacaattttgctgatactacctatcgccggatgagcggttacgacgtacagactcaggatggcgttattcaggtgaaaccgaaattcactgattactacaaccttacctggaacaagcgcggcaaagtacaggtgaatgttacccaacagttaggacgtactgccacgctttatttgagcggcagcaatcaaacctactggacaacaggtaaggcagaccagcagttgcaagcaggactgagcgccgcggttgaagatatcaactggacgctaagttacagcctgaccaaaaacgcttggcagcaaggacgtgaccagatgctggcggttaacgtcaatattccatttagtcattggcttcgttctgacagccaatccttatggcgccacacctccgctagctacagtatgtcacacgatcttaatggccgaatgaccaatctggccgggatttacggcactcttctggaagataacaacctgagctatagcgtacaaactggctatgccaatggaggagaaaccgatactagcagcactggctatgccgcactgaactaccgtggcggctacggtagtgccaatcttggctacagtcgcaatgatggattcaggcaactctattatggcgtcagtggaggcgtgctggctcacggggacggtgtgaccttaagccaaccgctgaatgatacagtggtactagtgaaagcgccgggtgcggatggggtcaaagtggaaaaccagaccggtgtgaccaccgactggcgtggttatgcggttgtgccttacgccactgagtatcgggaaaaccgagtggctcttgataccaatacacttgcagataatgttgaccttgatgatgcagtagtcagcgtggtgcccacccacggcgcgattgtgcgagcagatttcaaagcccatgttggtgtcaagttgctgataaccctgacccgtaaaggtaaaccggtaccgttcggtgcaatagtgacttcaggcagcagtcagagcggcagtattgtagctgataacggtcaggcctatatgagtggcatgccgcttgctggaagcctacaggttaaatggggtgaaggggtgggagctagctgtgtggcccgttaccgcttgccggaggagagtcagcggcagtcgctgagccagctatcggcagaatgccgttaa

SEQ ID NO: 227740 - DNA, 1317 bp, Klebsiella pneumoniae
atggccgctaatcttaccgagactgctatacgtggattgaagacaaaaagcacggcgtactacgtgtggagcaacagtgctcaacgtggtactggcaggcttggcgttaaggttcagccgtcaggcagcaaagttttttatttccgttactacgttgagaaaggtaagaaagagaagttcatccagttgggcatctggcctgagatgaagctggtgacggccaatgaactggcgaaaaagtacggagcctggcttgtcgaaggaaaggaaccccagcaagagcttgagcaacagcgcctggccgaacagcacattatgcagatccatcgttctcagggatcttttgaagaactggtgcatggctacgtcaacaagatgaagctcgataataagcggacctgggctgatgttctgaaacgtcttgaaagagagtgctacacggttattcctcgtgaaaccaaagcgaaggacgtgacgcctctgcagatcaaaaccattctatcaggcattatccagcgtgatgcggtggtccatgctaatcggattcgctcgtatctgatggcggcatttaactacggcctgaaagccgataacgatccgatgaataccagcgtaggtatcacgtttggccttgaagttaaccctgtgtcggcaatacctaagcagtcttcggcagaaaaggtgggtgatacatggttaacgctggaagagctacgttttgtcatggagcagttcgctcaggcaactaacgttgggccgctgatgcagcacctaatccgcttctgtgtttatgctggcgggcagcgaccatttgaaatgattgccagccagtggagcgcgattgactggcagcaaaagacgttactggttatagctgatgtatcgaaaaacaagcgtgagcacctgatcccgctgactgaatcggcactacaggaattaacctcagtgaaagaactgactaaggaaagcaagagtccctatatcttcccactctcgaccaatggagagcgcccggtacgtaccgatagcctggcccgttccatcatgtatttccgggcttttaatcctgagtttaaagttttcacagcgcgagatttacgtcggacctgtaagactctgatgggggaggtagggatcagcaaagagatccgtgaccgtatccaaaatcacgctttgaacgacgttagctcgaaacactatgatcgttatgattacctgactgaaaagcgcagggcgcttgagatctgggaagatcggattaacaactatcaacgacagcaggaaaacaacgttgtgaacttgtttgggcggaggtga

SEQ ID NO: 227741 - DNA, 615 bp, Klebsiella pneumoniae
ttggcaaaatatgagcttaattcagcagaagagcgatatcagccgggctctggagacttggtactggctaataagttagggatcacagatgaagagaaaatggaggcgctggaatctggccttctgctgatgctgtatgagcagctatttattgagggccagccgcctgaagcgctggcttttgagcacatcagcaggtggcatcgccaatggctagggaatgtgtacgactgggcgggaaggctgcgtaatgccaacttgactaaggatggctttcagtttgctgctgccgacaggattccgcttcttcttgatggtttcgagaagcagtttctctccaggtctggtgaactgaaatctctggctcgtccggatctggtcaattatctggctgaatgccacgtggagtttattttgatccacccattcagagaaggtaacgggcgtctgtcgagactgctttgtgatgtgctgtcggttctggcagggaagggcttacttgattacagcctgtgggatgagcacaaggcgttttactttaaggcaatacaggcaggtgtatcagggaactacagccctatgaagcaactagtgagcgatatcttgccagattaa

SEQ ID NO: 227742 - DNA, 159 bp, Klebsiella pneumoniae
atgacaaaaaaaacagcacatactcagattaccaaaactcacatctaccgtgccgttgccagctcgaccgcgatcgaaacgggtgtttctgtgcaaaaaattgagcagcaactcaaaaaaaaccaggcacaggcgaaagccgttggcctcgcccgttaa

SEQ ID NO: 227743 - DNA, 1002 bp, Klebsiella pneumoniae
atgacaagtaaatctgatttttttgatgcttctgatctgtttaatcttcctgaagaattcgacatccccgatactttttgtcgtgctgacgagttctcgaaaaaatctaaagtgagcttggaagatattatatctacatggctggatgataaaatcagtctctatgttaaccttcgttcagaatactgccgaataattcgttacgcgaataaaaaagaacatcgttataatacatttgatatcagagctggaggagacttttatcaacataaggatagccctcagtttgcagtaagaacattcataccttgtgataaatcagaaataaatgagtatccggtttttaatggcagttctttttttaaatatgtttacaatggatatgccagtggtttttggcgactgcaacctacaagcaccactcgattagcaaggcaaaattacaatctcaaaaatgctaatgaatcatgggaaaccattcctagagaggttaaaatatttggtcgagatgaaagtgattgtttgctttttaataaagatacttatgtctcctttgaaaggatttatatagctgattctggatgtgaaattttatgtgaattatttccctctaatgaagctagtaatatagaaaaatatgacccacctattaacagagttgcaatggttttacttattaatgaactgttcagcattaatggaaatgtgacttattcaaatgtcagcacaattcttttaagtaatggaattgaagttacgcaatcaaccataaaaaaagtcctcgaagaaacatctgaaaaaagagatcagccttacaaacatcagcctcagcattcgaagatagcttcgtgcttaatcacactttattgcaaaggcaaaaatcttgctaagacaccatcaaatgtagctcaaatattgaacgagcttgccaggtcatcaccaagagagtggagcattattttcacctctaaaatggctgctaacctaatgaaaataaaataa

SEQ ID NO: 227744 - DNA, 237 bp, Klebsiella pneumoniae
atgagtacaacatctatcattccaacccctgaacaacggctgcaaattctgcatgtctacggtgagaaaggtgaccgtctggtgcgtgaaaaagagcgacagtatatcacttcgatttctcgctcgacagcctggaagctcgaaaaggctgggaggtttcctcaacgcaaatcacttggagctaagtcgtgcgggtggttgcttagcgatctactctactggattaatgaacgctaa

SEQ ID NO: 227745 - DNA, 1407 bp, Klebsiella pneumoniae
atgtcgggagatcaagagttccccatacatgtgttccccgcgagggcgggaaatgcaatttatgagatagtgcaacatactcatgcaccgcttcccatggttgcagcagagatgcttggcgtcatatctcttgcttgtcagaacagaattgatgtttgtagattgaataatctgcgtagccctacatcgctttttattgtgacaattgcggaatctggggaacggaagagcacggtaactaagttgttaatgaagcccatttaccaactagaggaacggctatttgacctatataaacaagaaataattaagtggcggtataacgtaaagattttcaaggcggaagagaaagctttgatgtcaaaactgaagtcagagatccgtggtggcaaagatccaaccataacacgtgaaagtctgagtatgctgcaagatagttatcctgtagagcctgtcagatataagttgacgtttaatgataccacaccagcggcgataaaagagtatctctgtggtgactggcgatcagttggcattttatcagatgaggctgggaccatatttaatggttatgcattaaatgaattgccgtttgtcaacaaaatgtgggatggcgcaacgtattcagtcgaaaggaaaaacgcacctgagaggttaataaaaaatgccagattgacattatccctacaggttcagtctgtagttattaatagatatattgaaagaaaaggggatatagcaaaagggataggattttttgctcgtacacttatttgtcgtcccttttccacacaaggatatagacaaataactaatcctgttgtctcaagtgaacatttgcctgtgttccatgagcgattaatggagatcgtcaatgagagtatcgaaaacaaagatgaacgtatttgcctgcatttctcgccagaagcaagacagagatggattgcattttataatcaagttgaaacagaaatgcggttactcggatttctttcagactttaaagattatgcatctaaaatcgctgaaaatatggcaaggattgctgctttattacactattttaatggtgatgaaggggatgtatcacttaccgctgctgaagctgctatagaaataagtgcatggtacgtagatgagtatataaaattattttccaaacaacaggagctagatatggtcaatacagatgcagatgagctttattggtggataaaagaatattgcaatcaaaattttttaccatatatgaggaagaataccatactgcaatatgggcctaaccggttcaggggccgcggtaaagtaaatgaattattaagcactctttattctcaagggaagataaaggctgctaaaaaaggaaaaactatctttatacaggcgatggatacctggggggtttaa

SEQ ID NO: 227746 - DNA, 621 bp, Klebsiella pneumoniae
atgaaactttaccaaggtactcatggcgatcatattctcgcttacagagataaaattgctctgacagtcagtaatgctatcaatcagtttccacgtactatggcattaagagcggatcttcattacccacctattttagatgatggtgatacagtatgctgttttcctaaccttgaacccggtgcaatatcacgatttctggattcgatgaaagcgattttggaagcacatgaacaccgcagaaaatttgctgggatcagagtcaacaagaacgttatacgtaatgtctgggcaagagaatactcaaagagtggaaaatgccatttccatatttgcttattttttaacaaggatgcttattaccatctggggcatcttaagcatagtggtacacttagcaaccagatagtcagagcttggtacagtgctctcggactagagattgaagattgtcgtgatcttgttcattttcccgataacggtaaatacatactggacataaacgatcctgattttgacgtcacatacaatgagttgcttgaacgactggattacttgaccaagctcgatacgaaggtatttggtgagggggatagaagtttcggatgtagtcggggataa

SEQ ID NO: 227747 - DNA, 648 bp, Klebsiella pneumoniae
atgaatccacacagcgatgcagaacgtcaggccggtatactgattctttcgcaactaaagatgtttaacgaagctgttgtttattttgaacagcatttaagccctgccttctggaaaagctttgatcagtgtgttgaacgatttatgaaagacaacagctgggtaggtaaagcaaattatgaacatcaggattattgctggctggcccatccagcttgggtcattgaaggcgttaactgcaaatattggtttgaaaacagttcgactgttactgaaggaaatgattatattttagccgtcctgacgggtacgggaaccgagcaggggctgtttggttttgagtttaaattgaatgccgggtattttggtggagtcaaaaagattgctagttatgcgagtaatgttcaacaatcctaccgtgagcaactgcagacactagggctattggaacaagggaaaggtaactatttcctacctgtcacgattaaacctaatttactcactgagtgctggaaagagcatggtgagtttccagtggaacatgaagtattttttccattgcaaacagctcttgacaagctactacaatctacaaaaattttggatgctatatttttgtccgaagcgcagattgcagtaagtgaataa

SEQ ID NO: 227748 - DNA, 756 bp, Klebsiella pneumoniae
atggaacatgacaattcttcattggttgagttgctaccggaattttttcaccaatggccaaaaaacctggagtgggccagagaaaaagataaaaaaacaaatattgaggcatctcagctaactgaattcttcagccttctctctgaaccactgaaagttgttcagcatcgctctttatcttttgatccctgggaagtagcaggccttgggcgtaaagaggttcgcaatactgcagtcctttcatggcttcttgatcccgagggaacccatggtttcggtagactacctttacaggctttcttgcgggcaatacgacacagcaggaatgatatccctgaagattatcttcactactgccgggtacaagttgaaacgaatcctactggcgaaaatagcaatcgtgttgatatagaaatcgatgcggataacttttttctgcttatcgaggtgaaaattgatgcctatgagcaaccggaacaagttgcccgatactgctctgatgccaaattacgcgcaatgtcacgtccctgggccgttatttttttaacgcctcgtggcggaaaaccgctgacctgtggcttagatttcaaaccagagtatgttccctgtatttcctggcgacatctcgcctcagctttagagtcttcgttgcaaccgcattacaaagatttcatttctgccaatgaaaactctccttcacgccaaatggctgcccatgcctcattttgctttcttaatcgagttcgtacattttaa

SEQ ID NO: 227749 - DNA, 1848 bp, Klebsiella pneumoniae
atgagtgagatagatatccagggtgatgacgcgttggttcaactgctgttgaacgcagacaaaggcgatatagatctgctgatcgattatgtcactaacaccggtaagcttggtttttccatgtcagacagtgtgaagaatgtattacaggatgccaaacgccaggatatacctgatgacgaaactctgcgtctgcttgttcgggagttgcagcatttcggtggtaatacgttcgtgaatctgtttcgtcgcaacggcgtcaactacagcgaaattgtagatgacgttgccagccatctgaagatgaaagtccctgctgatgcatcggtagaagaaaaagaagcgctgattattgactgtgtatttacctcgtcatggaaaaaaatgtcggatgatgagcgccgccagattctgcgtgagatgggcataaacggctctgccagtatggatattcctgtctggcagagagcggcactcgttgccaatagtcttgcacaaacgactgcaggcaaagtactgcctttaattgcagggcttggcatcgggcgcgttttgggcgtattaaccgggccggttggcctggctattacgggtctttataccgcctatgacatctcaaaccctgcgtttcgagtgacactgccttgcgtggtgcaaattgcctggattcgcttaaaaaactcccgccagttccggcttgccacccagccatcatctgccacgctgcctgctctcacatacgatcaacgctggggttttgggcatgatattcaccaacctgcgcttacggttgcgacaattccaccttcggaaagtatcaacacgggtgcgatgcaggaacaggatattgccggtatttcacgcctgagcccgctgttgcaaacattaccctcactagcgacctctgcacatgttgccagccatcaatatatggaggtcattattaatggtcctctggcgagtgtaaaagatggccctggtttccgtggatttagcctgggagaaaaaggcatcaaagaacatgccgttctgctgaatcctgacaaactcagtcagcttgttaacgccggaatgttgttgaatgttgcttctgccgtgctagcgcaaaagcacctggctgatatcagtaaaaaattgacggagattgttgaagcagtacgcgaggtttctgcgttccagaacaatgcacgtaagtcagagatcattggagccatacagtatctgcagcaaattacccccacggtcctggaggggcaatgctcacccgcaatacgtcaaaaactggaggatattgaagtccagttttccgccctgcaggcacacttactgactgatattactgctactggcgacaaagtggcagcacttaaagaccgtgggctctttggcagttcggaaattacgaataagatccagacccaacaaaagatccttgatgagcgaatccatgaatggaacctggcaatgaaggttcgtgcgcaagcgttacaccttttgactcatgcggaaggtaacacaacactcgtcaggcaccgccaacaaaccattgttcataattatcaggagtttgaaagcgttgttgacaaaattgagcgtcagcttcaccagcggatacaaggtatcagtgcattgacggaacagagcaataccaccaatgccaataaagtattactggggaaatggacgacaacgacgttaatgcagcaaaagatggctattgaagaggcacattcgtcgttcgggaaattccaacaaggattgttggctgagcagccgcaatctgcacgattactggtagaaatgcaggacgggaaaccggtgaagtgttttgaattgccgctaatatga

SEQ ID NO: 227750 - DNA, 2916 bp, Klebsiella pneumoniae
atggcaacgcaaagcgaatacgagttagaagcgcaactggtggaacagctggttggcatgcactacgaacgggtgaatgtcaccgacgaaaccagtatgaaagccaacctgcgaaagcagattgaaatacataaccggctggaatcttctccgctaacggacggcgaatttaaccgtattttcttgcacctgacaaaaggtaatgaagtcatcgatcgcgccaaaattctgcgcgatcgctaccagttattgcgtgatgacggcaccgagaagtggctcagctttatcaataaagaggagtggtgccagaacgagtttcaggtagcgagccaggtgaagcagttcaacgccgagcaaaacacgcgtaaaacccgcttcgatgtcacgctgctgatcaacggcctgccgctggtgcaaattgaacttaagcgtcgcggtctggggctgaaggaagccttcaaccagatcgatcgctaccatcgggatgcgttctgggtaggcagcggcctgttccagtatgtgcagatctttattatcagcaacggcgtggacaccaaatactacgccaacaaccgcgccaaccatttcgagcagaccttcttctggaccgatgaaaaaaataacccgctaaaagcgctggagaaattcaccgacgcatttctgaaagtgtgtcacatcgccaaaatgatcacccactacacggtgctgaacgaaacccgtaagtgcctgatggtgatgcggccctatcagttttacgcctgtgaggcgatgatccaccatgtgaaggacaatctccacaagcagggacggccggagaacggctatatctggcacaccaccggctccggtaaaacgctgacctcgttcaaagccagtcaggtgatcatggaaatgccagaagtggatcgggtcatttttgtggtcgatcgccgggatctggattatcagacggcgaaagagttcaacggctttgcgaaagacagcgtggataccaccaacaacaccagcacgctgataaaacatctcaagcaaagcagcaccaaactgacgttgaccaccattcagaagctgaataacgccatcacccatgaagggtataaagcgcagctcgcacacctgcgcaaagagcgcatcgtctttatcttcgatgaatgccaccgcagccagttcggtgacacgcataaagcgatcgtgaacttcttcgagaatgcccagctgtttggttttaccggcacgccaatctttgccgataacgtcaatattaccaacggcgtcaaacagaccaccgaactgttgttcgataaatgcctgcataaatacgtgattgtagacgccatccgggatgaaaacgttctgcgctttgccgtggaatatgtgggtacttacaagcgcaaagaaagcagcaatgagatcgatatcgatgtggaggatatcgacaccaaagaggtgatggaaagcgacatccggttgggcaaagtgaccgactacatccttgcccaccataacgccaagacccgcaatcgcgagttcaccgcgatgttctgcgtcgggtcagtcgatatgctgatcacctactacaaactctttaaagaaaagcaggccgcactgcaggcggcggatgccaactacaagccattaaaaattgccaccatcttcacttatgccgccaatgaagcggacaaaagtgataaagaggcggtaaacggtctgctggatgaagaggatattagcctgccgcaaggcgcgaaagttgatacctcgggtcgcgatcatctggatagttttatcaaggattataacgagctgtatggcgccagctactcggccaatgattcaaagagcttctacaattactacaaaaatattgcccagcgcaccaaagagaaaggcatcgatattcttctggtggtgaatatgttcctcaccggtttcgacagcccggcgttgaacacgctatatgttgataaaaacctgcgttttcacggcctagtgcaggcgttttcccgcaccaaccgcattctcaacgagaagaaaagtcacgggaatatcgtctgcttccgtaatctgaagaaagcgaccgacgatgctatcgcccttttctcgaacaaagatgcctcttctacggtgctggtcaaaccctttgacgagtatttcggggattatcaggacgctgtcgatcgcttgttaacgctgacgccaacggtggaaagcgtggacgatttaccggatgaagaagcacaattggcgtttgtaacggcattccgcgatgtgatgcgtttgaaaaacatcctcgaaagcttcgccgattttgacgatgcgactaaaccgctgtcggaccagacgctggcagatttcaccagtaaatacctcgatatccacgacaaagtgaaaaaacactccagcaaagagaaagtctcgattcttgacgacgtggattttgaggtctcgctgattcatcgcgacgaaattaacgtcggctacattctgcgtctgctggcgggcattcaggcgatgccgccaaaagagcagcaggagcagaagaaaaagatcatggatattgtcgacagcgacgtcacgctgcgtagtaaacgtgagcttattgataattttatcgaaaaaagcctgctgcatgcctcgcatgacgaagatatcactcaggtgtttgaagcttatgtcgaacaggaaaaaggtaaggcgctggcagccttgtgtagcgaagagcgactcgattcgatcaaactgaccggcttactggataactacctctttaccgacgtgatgccgcgagaggatgaagtggcagaaacgctaacctggacgccgaagattctggaacgcaagaacgtgcgggcacgtgtctacgaccgtgtgcgcaatgtgattgaaacgtttatcaatgggatgcgcgggttttaa

SEQ ID NO: 227751 - DNA, 1203 bp, Klebsiella pneumoniae
atggtgccaaagataaggtttaaatcattctcagcctccctaggtgagcataaaattgaggatattttagctcgctttgtttcccctgtatctgtttctaaaatagaaaaatatagagaaatagggattcgctcccatggtagaggtttattccataaagaggaagtgtctggtgctgaattaggggataaacgcgttttttggataaagaaagatgctgttatttttaatatcgtttttgcttgggaacaagcagtagcaattacttcgtcgaaagatgagggatgtattgcatctcaccgattcccaatgtacttacctaaagataacaaatgtaacactgactatatcagaagatactttctgacaaaaaaagggaaatatttattagaatttgcatcccctggtggtgcaggtcgaaacaaaactctaggacaaaaaaacttcgatgagttggttgtaactattccagatgttacagaacaaaccaaaatcgctgattttctgtcctctgttgacgaaaaaattacgttactgaaaaatcagtatgatctactgtgtcagtacaaaaaaggcatgatgcagaagatttttagtcagaaagtgcggtttaaggatgagagtggggaggagtttcctgagtggcaaataatgaaattaggagaaatcgctcaaattaaacgtggggcttccccaaggccaataacagatcctatatggttcgatagtttatcaaatattggctgggtacgcatttcagatgtaacaaagtcaaataaatatctattaaaaactgagcaatacgtttccgataaaggcgtaaaaaaaagccgattggttaacagcgaaaaaataatcatgagtatctgcgctacgattgggaagcctatatgcacgacatttgatgtatgtatacatgatggatttgttgtatttgaatcattatcaactaatacggattttttatattattatctgtccttcattgaagataattggcaacgatacggccagccgggcactcaagtaaatcttaatgttgatatagtatcaaatgaaagcattaacatcccttcattatcagagcagattaaaatatctcaattcttagcaaatattgacaataaattaacttcaaaaaaagcagaactggacaagttaaaaacctggaagcaaggcctgctccagcaaatgttcgtatag

SEQ ID NO: 227752 - DNA, 1608 bp, Klebsiella pneumoniae
atgtctccccagattgaagcgcaaaatttaagtgaactgcaaggccgcctgtggaatatcgccgataccctgcgcggtaagatgaatgccgatgaattccgcgactactgcttaggctttattttctacaaatatctttctgaaaaattcgttgcttacgcgaacaaaattctggcggaagatggcattcagtataacgagctgactgcggagcatccggcatatcaggacatcgttgatgcggtaaaagaagacagtatcaagaccttaggctatttcctgccaccaacggatttgttccacacgatggcggaacgtgtggctaaagacccgaaaggcacaggcaccggctttattctggaagacctcgctactaccctgcgcagtattgaacagagcacgctgggcactgattctgcggatgacttcagcaacctttttgaagatctcgatttaggttccagcaagcttggcaacactgcgaaagcgaaaaatgagttgatcggcaaagtcgtcacggaactcgataaactgagctttaacctgagtgaagcgagttccgacattctgggtgatgcctacgagtacctgatcggccagttcgcctcaggcgcaggtaagaaagccggtgaattttataccccgcagccggtttccaccctgttggctaaaatcgtcaccacccacaagttgaagctgaaaaacgtctatgacccgacctgtggctctggctctttgttattgcgcgtgaagcgtgaagcctcgtcggtgggtaaaatctacggtcaggagatgaaccgtaccacctacaacctggcgcgtatgaacatgatcctacacggggttcactatgcggattttgagatcattcaggaagatacgctggagcatccgcagcatacgcatctgaaatttgacgccatcgttgctaacccaccgttctccgccaagtggagcgccagcccgctgtttatgaacgatgaccgcttcgcccagtacggcaaactggcaccgtccagcaaagcggatatggcgtttgtgcagcatatgttccatcacctggaagatgacggcaccatggcggtggtgctgcctcacggcgtgctgttccgtggcgcagcggaaggccatattcgtcagtttatgattgagaagctgaattgcattgatgcggtgattggcctgccagcaaatatcttctacggtaccagcattccgacttgtgtgttggtgctgcgtaaatgccgtaagcacaacgacagtattctgtttattgacgctagcaatgactttgaaaaggtgaaaactcagaaccgtctgttgccggaacatatcgacaaaatcgctaatacttacaacgactggaaaggtgtcgagaagtacagctatatcgctacccttgaggagatccgtaataacgattacaacctcaatatcccacgctatgtcgatacttttgaagcggaagaagagattgacctcaatgcggtagcgcaggaaattcgcgatctggaagggaaagtggcggagatcgataaaaccattgctgatttttgtaaggaactggggattgacgcgccgtttgcgtttgtggaggggaataagtaa

SEQ ID NO: 227753 - DNA, 573 bp, Klebsiella pneumoniae
atgctgctcacctacaaggaaatagctacgtttacggcaggctcgcacatcagccgtatccaggaaagcgcagatgggtccgcatttcgtttctatgcgaccgaacagtttctggtagatgactggcagtcagctattgtgtcagccgagaaagaacagtgggtgaaaacgcatcaggatgttgtgctggcgcagaaaggagatgttgtcatcagcctgattcatggcaaggcggttcgcgtgagcaccgaaaatgccggacgtattttaggtaataactacgtcaaagtggatgttgataccagtcggattgatgccgcgtggttcctctggcatttcaatgaaagcccggagggacgacgtcagcggattcagaccacccagggttctaccgtcgtacagcgtatcgcggttaatgaactgaaaaattttaccgttaccctcccgccactcgcacagcaaaaaacgatgggggggctctatctggcggcgcgagaaaaacgcttttatcagcagcggattgccgccctgagtgaacaacagatcctgagcctgctcagtggtatgatttga

SEQ ID NO: 227754 - DNA, 2316 bp, Klebsiella pneumoniae
atgcatttgagaaagctggcagtccgtaatttcagaaggctgcacgatgttgttatcgatcttgcgtcagacatttcaattttcgttggggcgaataacagtggtaagacttctgtcggtcatgcacttcaactattcaccggtaaaagccgattcaatattcatgacttcaatgctgaatgttggactgacattgtcacatttggagaaggggcggatgctgcgtcgctatcttcactggaacttgatatttggtttgaagtaacaccgaatgatgttcatcgtgtagtcgatcttctccccagcctatcgtggtcaggttctctggttggaatgcgcgttgctttttcccccatcaatcctgaagaaatccgttcgcgcttcctcgcagtacgtcagcttgctatcgatgccacacctaaagatgaaaatggaactcccaaatacgatccttcacctcgtaatctttgggaatatcttcgcgatagactcaatgacgaatatgaactccgctattttgttcttgatcccgcacgtttcaatgcggaaatgatatccgaggaaggctatgagcctactccgctcacagggcgtgatcgaagtggtcgcgaaatactgaacagccttatccaaatcaactttttgaatgctcagcgtcatctttcagatggttccagaggttcccgttcggaggatctttctcgtgttctcagccgtttttacggacgaaatcttgaacaaaaaggtgaagattatgaagcattaattgctttagctgcgtctgaatcagctttcaatcagcatcttgaacgtgtttttgcacctacgctgaaaagtctggcgaaactcggataccctggactttcaaacccacgcatgatgattcgttcggccttagacccggcgcagatcatgaacaaccaaaatggggccgtaatacattacgcgttgggggaggatgacggtaatcctaccccaccaacactacccgatagttataacgggcttggatttaagaatctgatctttatggttgttgaattactcgacatccacaaccaatggttagcaatagaagagaatcgaccaccggttcacctgatttttattgaagagccagaagctcatctccacgcacagttacagcaggcttttatacgcaagataatggaccttcttgccatggagagtcaggagcttatgcactacaccactcaagtggtggtgacttctcattcaactcatattctttacgaacgtggttttcggccgatccgttactttcggcggaagcgttcatcaaatatgtcggcaacagatgtgctcaatctctctgttttttatgataatactgatcctgaaattcgagactttcttgagcgttacttgaagctgacccattgtgatttgttttttgccgacggggctgtacttgtagaaggcaatgttgagcggctactgctcccgcaaatgattgctaccgccgcacctagattaaaatcctcttacctaacagtccttgagattggcggtgcttttggctatcgattccaaaaactaattgaatatcttgggcttacgacactcattattactgatctggatagtgtgtactgtacccctccggtacaagatgcaacagaagctcgagcagatgagttagatggtcttgcagaaaatccggctgcaaatgatgatggcgaggaacctgatgatgatgaggaagaacaggccaacacagaaacaccaggaaaggcttgtattgccagtcatcctggagctatgacctctaatcaaacacttcggcagtggttaccgaaatgtgacaccgttgccgctttatgggaagcaactgaggaaatgaaaatacaaagccgcacagctgagtgtgacgctttggttcgtgttgcttaccagtgtcagacaaatgttacatggaaagaggaaacactggcacttgctggccgtactttagaggaagcttttgcacttgaaaatctgtcctggtgtcaagatgtgggctgtaagccactcaagctacgtattgccagagcagtaagtatggatctactgcaactggcccagcgcattcacaagcgcgtgcaatcaaaaagctttagtaaaactgattttgctctgaatttacttcttaaaaaaccggatgaatggtctgtcccaacatacattgctgaaggattaaaatggctcgaagctgaaatagccccgccggaactagaagttgcagaaggtcaggaagaggatgttgaggatatgtccgtcgctttagctgaaacagatggagggagggttgcatga

SEQ ID NO: 227755 - DNA, 1878 bp, Klebsiella pneumoniae
atgaccagtcgcattggtagccctgatacacaggcagatattgatgttcgtgcttgtctggatagctcgccaccacgttcatttgtcatggtagccggtgctggttcaggtaaaacaacatctctcattaaagccctggcacatttggctgatacccgtggttctgctttacgtcgtgccgggcaaaaaatatcctgtatcacgtatacagaggtagctgttggtgagattgccgctgacgttggtaactcgcagttatttcatatttcaaccattcatagctttctttggtcggtcatccgaccttttcatttagatatcgcaaagtgggtcgtagcgcgaatacatgaaaaaatagctgaaaagcaagcccattatgataagcccagaacacaagctaaaacaaaatctcgtcttgaagatgaaattgcctatctctctgctcaacttgagtgcattgatgatgttgataaatttatctacgggacaggaagtaactatgctaagggtattttaggtcacgatgatattcttaaactcgtccctgcttgtgttgaggctcatccacttttgagaaggattgtagccaagcgctttccatttgtttttgtcgatgaaagtcaggataccgatcctgatgtgatctctgcgcttcgaactattgctaatgacaatcctgacatgtgcataggattttttggtgatccgatgcagaaaatctatatgagcggagctggtgctattccgttaagtgatgggtgggctgaaattacaaaaccagagaatttcagatgtccgacgtctgtacttggtgttatcaattcgattcgtgcttctggggatggtctccaacaaattcgtggtcgaacgactatcgtagatggcgttgaacaaactgtatcaggcacagtgaatcttttcatcttgccttcaaatgtggaacgaagtgcctatctcacatctgtcagacgttaccttgcaaatgaaactagcgatgaacaatggttaagtgatacacgcgaaggtgatgttcgtcttcttgttttggtgcatcgtatggcagctaatcgactggggttcccgaatttatttgctgctcttactgataaagcaccgatgagtttgagtgaaggggtgaacgatgggtcagcttggccgcttcgtccgtttgtccagcatatacttccaatttttgctgcggctcaggcaaacgatcaatttcagattatgtcgattatgcgtagcgagtgtccaaagctggagccgttacgactgcatggtcaagctatggtggcagttttaaatgaaatacaacaaggcatcgatggcctgtttgcactgttagaagaaggatcacaagcaacagttcgggatatattgctacatgttaaagactgcgagctgttacgtcttgacgatcgttttgaaaatcatttaagtgatgaacctgtgaatgatggtaatgatgacttcgaaaatgttcagaactatctaagatgcaatgcccatgaactttgggcataccgccgctacctttcagaggaatcaccttttgccactcatcatggtgtaaaaggtgcacagttcgagcgcgtattggttgttattgatgatgaagaagctcgcttcagccaatattcgtatgggaaatattttcaatacattcccctatccgacaatgatctagccaatcttgaagagggcaaagagtcagtactcgaccgtactcgtcgccttttttatgtctgttgctcccgtgcgctgaaagacttggccgttgtcatctttgttccagatgtcgccgtcgctcaagcggcaatcgttgagcaaaatttattccctgcatcgacaattctagggcagcatgatctaagttag

SEQ ID NO: 227756 - DNA, 927 bp, Klebsiella pneumoniae
atgacgatgtttcatgatgttcatctggaactgctggtcgacgcctattcacttccccaggcagaacgacttgcgtacatagatctctgtattcgctatcttggcagcatctccagagctgaaattatggctgagttcaaggttgctcaggctgcagcatctaaggatcttgctctctatcgggagttaaaaccggataactgctgcattgatactgcaaccaaaagaactgttatccttgcagacagctataccccactaattaggattggtgtccacacggcccttaaccttattcagtatgggtttacacgctccgaattaatgcaaaagcgcccaatgctacccattgatgaagtggacccgctctatcagccggaacgcctcaaagaagaacaggtagcggcggtaacaagggcaataaagggacaatgtgccattagatgttcctacggttcaaaaagtggtgatcacagggaaaggatactgtttccatcagcattgtttgttgatcgtaagaactggtatttcagagcttatgaccgaaatgaggaacacccacagcgcagtggttttaagaacttcaaactatccaggctttttgatgctcatttggaaacaacaatttcgccgactcttgctgagaagacggatagagagtgggacgaagaaatcacttttatcattgaatttaaaaaaaatttaccaaaagaaacaattaatgaaatatcgcgcgagttctctataaatggtaacgtccattccgtcacttgccgtgcagctttggcctgttatgtaaaaaccaattggaaaattgacttggtcaatgatgaaaataataagtggttatactttgacgtactgaatgcagaggctttacaagaagttcagtgtttagcaccattgtttgaagaaaaaaatgggtaa

SEQ ID NO: 227757 - DNA, 345 bp, Klebsiella pneumoniae
atgaaaaaaattcttcgtaatatcattcttactacagctgtggtttctggttcagtgttcgcagcagatagtagccagcaggttgcactttctgatcttcattttgccacaacgccaaatgggatgcagcaaattgaaggtaatggtattaatactactaatcaaacactaaagcatgtgttcgtgaaatttaaccttctgcagaataataccgtagtggggcaaaccatcgctatggtagagagtctggaggccggacagagctggaaagtacaggctccttataatagtttttctgttaagcctgatagttttaaggttaccgagattaacgttataaattga

SEQ ID NO: 227758 - DNA, 684 bp, Klebsiella pneumoniae
atgaacacactgacagtatctctggtaacaataatgatccctggtgtcattatggcactaatttatgatacctatactcaacataaatcctgggattcatttcgatatgttctgatgtcggttgtatttggtatcgttacttatctggcaatgcaggcagctgtgagcttatttcaactgattgcagggatcggtgataccaaatccataagctggagattactgtcggtctggtcaattcccaatgaggaaaagatagcaattaatccactggagatcttgctgggcgggctttgtgctatcccgttggggctgatagctgtctatcttgcaaccaagcggacatttcatgaactattactacgtaagggtatttcaaataaatacggtgatgataatgcctttataaggtcggttgagatcatgcatagaaataccgggcaatgctacgttctgttgcatgaaaacaacatgctcattcatgggaatgtctatctgtataacgaaaatgacaaatctcaggaactagggcttctaaacgcaactgtactcaattccgaaacgggagcagttctctggacgacggggtttatctatctttccaaagaatacggtaaaatggtcgtatttgaaaattacattgaggcttcaaatgtcaaagaatcagacaccgaaagcaactag

SEQ ID NO: 227759 - DNA, 864 bp, Klebsiella pneumoniae
atgagaaatcaggaaggcttgcattcgctgcagggctcacttataggcttaccagaatgggcctcagaacaagttatgcagcaaattcgtcaactgacaaattacgagccaatgatcggtattatgggaaaaactggagcgggtaagtcctcattgtgcaatgctctgtttgcgagtgaggtatcgccggtcagcgacatatcagcctgtacccgtgaacctttgcgattccgtcagcaggttggcgaacactttatgaccatcgtcgacctgcctggcgtgggtgaaagcagagctcgtgataccgagtatgctgcgctgtaccacgaacaactcccccaactcgacttggtactgtggctgattaaggctgatgatcgggcgcttggagtggatgagcacttttattatcagataattggggaagcttaccgccataaggtgctgtttgttatcagtcagtcggataaggtcgagcccactagcagtggagagacattgtccacgaaacagaaacaaaatatcagccgtaaaatctgtctgctacatgagttgttccaaccagtaaatccgatctgtgcggtgtcggttcgtctgcaatggggactgcgggtaatggcggagcgtatgattcgttgcctgccacgcgaggccagcagtccggtggcggtacagcttagtgctccgcttcgtaccgatgccgttaataaaaaagcccgtgacgattttggtgaaacggtcggctcggtactggacaccataagttccatgcccctgataccggccccggttcggacagtcatccagtctgtacgcgacatcgtggtatcagtcgctcgtgcagtctggaatttcttcttctga

SEQ ID NO: 227760 - DNA, 828 bp, Klebsiella pneumoniae
atgacccgtctggcttcgcgctttggcgcagcaaatcttatccgtcgtgaccgtccgttaacccgcgaagagctatttcgtgtagtgcccagtgttttcagcgaggacaaacacgaatctcgcagtgaacggtacacatatatacccacgatttctctcctcgacagtctgcagcgcgaaggctttcagcccttctttgcctgtcagaccagagtgcgtgatccaggtcgccgcgagcacacaaagcacatgctgcgcttgcgtcgggaggggcaaattaccggcaagcaagtccccgaaatcattttgctcaactctcatgacggtaccagctcgtatcagatgctgccgggattattccgtgctgtatgccagaacggactcgtctgcggtgagtcgtttggcgaggtgcgggtgccacacaagggggacgtggtgagccaggtgattgagggtgcgtatgaagtgctgggcatttttgaccgggtggaggagaagcgggatgcgatgcagtcgttgctgttgctgccacctgcgcaacaggcactggcacaggctgcactgacgtaccggttcggggaggaccaccagccggttactccgtcacaggtactctccccccggcgttggcaggacgaaagcaacgacctgtggaccacgtaccagcgtattcaggagaatctgatcaaaggaggactcagcggacgtagtgcaaaagggggacgcacgcatacccgtgcggtacgcggcatagacggtgacgtgaagcttaaccgggcactgtgggtaatggcggaagcgatgctcagtggtctccgccctgcgtga

SEQ ID NO: 227761 - DNA, 684 bp, Klebsiella pneumoniae
atgccactgacagagcgccgctacgacagactggcggtcaggctgtcgctgattatcagccgccttgtggcgggtgaaacgctggacatgcaaaagctcgcaaccgagtttgatgtgtcagtccgcaccctttaccgggacttccgtgagcggctgatttatctggacctcgaatgtcatcagggctgctatcgcctgcggacaggggccgggccgcagggcgagctggacgtcctgacttttgcccaccgtaccggcatcgccggtctctttccggggctggaccgtcggctggtgagcctgctgctgaactgcgagggggccccctgcctgatcggagatgcggtttctgcgggctcgcccgcgaccccgctgtccttttaccggctggtacaggccattaccacctgccagcgcgtcacgctgctggctgacggaaatcgttgcgaaagactggccccgtaccggctgattgcgcagcagggccactggtacctgattgcggagcacaacaaccatccggcggtatttgcgctcagtgatattcaccttgtgcagccccttacggagagcttcagacgcaacgagcgcctttaccgtctgacggaagatttacgttttatccgggcactgccgcactttagtgttgtcctgcagtcgctcaacagcctgtcttcactctga

SEQ ID NO: 227762 - DNA, 3156 bp, Klebsiella pneumoniae
atgatgaagcgaaacctgaacaccagctaccgactggtatggaacgaggttctgggagcatttgttgttgtctcagagctggcaaaagcaaaaggaaagcgcagcactgccgttctggcgctggcagttgccggactggtggcaagtcctgccgcactggccgacgatgcaccgggtaatatcagcactgtcgctgccggagacgtggcgagcaacactgttatcagcaaccatgacacccagctggtatccggtacggcaaacaacacggtcatcaacaccggtcaggaatacggtgatgatgaagatgccaacagcggtggtcagtttgttcagaccgggggtgtggcaaaccagacgaccattaacggtaatggtctgcagggggtactggcaggcggcagcgccacggacaccaccgtcaacagcggcggcggtcagagcgtacatggtcaggcgacagatacggtactcaatggcggggcgcagtgggtacacagcggcggcagcgtatccggtactgtcattaatgaaggcggatatcagctggtcaaagccggggcgcaggcgaccggtaccgtggtcaacaccggtgcacagggtggcccggatgcggaaaacagcgacggaatgtttgtcgccggtacggcaacggataccaccattaatgcgaatggtcgtcagattattgccgtcggtgggcttgccaccggcacagtgattaaagcgggcggcgaccagagtgtgcacggttcggcacacacgacccgtcttgatggcggcaatcagtacgtgcataccggtgcatccgcagcagacacggtaatcaatgcgggcggctggcaggtggtacaaagcggtgcgacagcggacaacaccacggttaacgcggacggtaaactgcaggtgaatgcaggaggagccgccacgaatgttacccagaatgcgggtggcgcactggtgacgaataccagcgccaccgtctccgggaccaacagcctgggggacttcagtgtggatgcggcgaccgccagcgccactaacgtgctgctggaaaacggcgggcgtcttgatgtgctgggtaacggcagcgccgataccactaaggttaatcagggcggtattctggcagtctcctccggcggtaaggcgcagaacatcgtgatgcatgacggcggtgtgctgattgccgataccggcgcaacggtcagcggcacaaacacctccggcgcattcggcattgacggcgcaaccggcaaggccagcaacctgcgcctcgataacggcagtcagttcacggtgctgggtaatggcagtgcggataacaccaccgtgggggcaggcagcacactgaatgtggcgcagggcggaacgctcaccggtaccacctcatttggcgacggtgcatcactgacggggaacgccaccaacagcggacaactgcacttcagcacgggtaacggtcagaacgcggtcatcagcggttcggtaagcggtgacgggcagctactcaaagacggtgacggcaccctgacggtcagcaacggcacgctgtcccagtcacaggtaaacctgaatcagggtacactggcactgaataatgccatcatcaacagcgatatcatcgcacagtccggtacgcaggtgcgcctgaccggcaactcggtcatgaacggggcgattgacccgactgacgtcaccctcgacagcggtgcccgctggaatattcagcgtggtgcggcggtgaaatcggtgcttgataacctggataacgccggaaccatcagttttgcgccagcaccggcaaacagtccgtttgtccctgaaacgctgactgtcacgaatctgacaggacgcaacggcacccttaatctgtctattcgtcttgatgacccgaccttcccgaccgatatgctggtcattgatggcgggcaggcaaccggtaaaacctggctgaatttcaccaataccggtgatgccggactggggctggcgacaaccggcaacggtatcaaagtggtggaggcgattaacggggccaccaccgaagccggagcctttgcgctgggccgtaaactgcaggccggggcgtacaactacaccctgagccacggcagtgccgatgaaaactggtatctctccagtgaagcgggctaccgtgccgaagtggcactgtacgcctctttgtttgcacagagcatggattatgaccgcacactggcaggcacatacaaccagcgcagcagtgcggtgaacgaccaggggttctggggacgtattcagggcgggcataccgggcatgatggtaacggtggcattgcacagggcgacaccccggaaagcagtggcagctacggcttcatccagctcggcggagacctgctgaagcatgataccggctcgctttccctgaccagtggcctgtatggcgcggcaggccagtcgctggtggatgtgaaaaacgatgaccgctctgcggcaggcagcgtgcgcgacacggtgtacagcctcggcggatatctgacagccgttcatgataccagtggtctgtgggccgatgtggtggcacagggctcccgccacagcctgaaggccagctctgcggataaccgttttgatactgacggcaccggctggctggcctctctggaaaccggtctgccgtttaacatcactcagggactggtgctggaaccacagctgcagtacgtctggcagagactggccctggatgaggggcatgacaacggcggttacgtgaactttggtgacggcagtgcgcagcatgtgcgtgccggacttcgtttcggcagttcgtctgaaatggacttcggtcaggggaattctgcagtcgcagggtttgctgacagcatgaagagcagcgcaagcgagctgccggtgaactggtgggtgcgtccgtcggtcatccgcaccttcagttcagacggcgagatgagcatgggtaccgcgactgcaggcagcaatgtcagcttcacgccatctcaggatggcacctcgcttgacctgcaggcgggtattgaagcgcgagtacggcagaatgtcgcacttggcgtgcaggccggttatacccgtagcgtcagcggtaacagcgctgacggttacaacggtcaggctacactgaaggtcgccttctga

SEQ ID NO: 227763 - DNA, 240 bp, Klebsiella pneumoniae
atgcctgaatctcacttactgccacagggaccgttcacccggcaacaggcagaagcaattacctgtcactatcacaacgtctgtattgaagacgaccagggcagtcacttccgcctggtggttcgcgatgccgaaagccggatggtctggcgggcatggagctttgagccggatgccggtgaaggtcttaaccgttatatccgcaggtcaggcatccgcactgacaccttcacccgctga

SEQ ID NO: 227764 - DNA, 459 bp, Klebsiella pneumoniae
atgacaacagcgacacaaaacaacctcgtatctgctaacgaatccgaatttgaactgaccgtaacgcaggtacccgatgaacaacgtatcgatttctggccgcagcactttggcaccattccacaatggataaccctggagccgcatattttcgcctggatgggccgcttctgtgatgagtacagcggtggtatctggtccttttacacgctcagcaatggcggcgcgtttatggctcctgatgctgacagtgacgataaatggcgtctgttcaacagcatgaacgggaatggtgcggaaatgagcgcagaagctgccggtatcgcggtctgcctgattgaatacagccatcatgcctgccgtacagagtgtgacgcaatgaccacgcactattaccgcctgcgggactatgccctgcagcatccagaagcccacgccattctgcgcatcattgactga

SEQ ID NO: 227765 - DNA, 477 bp, Klebsiella pneumoniae
atgaaacagctttcctttttacccggcgagatgacgccacaggaccggcgtctcattcagcgagcgctcagcgttctggaccgccacctgcatgagcccggggtggccttcacttccacccacgccgtacgcgagtggctgcggctgcatatggccgcgcttgagcgggaagagttccgggtgttgtatctggacaaccagaatcagcttattgcccatgagacgctctttagcggcacgattaaccgcaccgaggtgtatccccgggaagtggtcaagcgcgccctgtatttcaacgcggcggcggtgatactcgctcataaccatccctccggcgaaacgacacccagccaggctgacaaagccctcacgcagcgactggttcaggtacttcagatggtggatatccgtgtccccgaccatctgattgttggcggaaggcaaatctattcgttcgcagaacacggtctgctgtga

SEQ ID NO: 227766 - DNA, 318 bp, Klebsiella pneumoniae
atgagcaacattacatggggcctgcagcgggataccacgccgcgtctgggagcccgtctggtacaggaggggaaccaactgcattatctggctgaccgggccagtatgaccggtaaattcagtgacgccgaatgccggaagctggatgaaacattcccgcactttatcagccagatggaatcgatgctgatcactggtgaaatgaatcctcgccatgcccactgtgtcaccctgtaccacaacggttttacctgcgaagccgatacccttggcagttgcggctacgtatacatcgccgtttaccccatccaacgataa

SEQ ID NO: 227767 - DNA, 342 bp, Klebsiella pneumoniae
atgaaaactctacctgctataatttcgcgggcggcgaagccctgtctgtcgcccgttgcagtctggcaaatgctacttacacgcctgctggaaaaacactatggtctgaccctgaacgatacgccgttctgtgatgaaaccgttatacaggaacatatcgatgccggtattacgctggctgatgccgttaattttctggtggaaaaatacggactggttcgtatcgacaggaatggatttgtctggcaggaacaatcaccttatcttcgggccgttgatattctgcgagcgcggcaggcaactggcttattgcgacaaagccgtaacaacgcaatacgttga

SEQ ID NO: 227768 - DNA, 834 bp, Klebsiella pneumoniae
atgcaaaccgaaactgaagtattaaccgatcatagcgagctaatttgctcgaccagtattgaacgcatagtgacaggccgcgatacagcactaaaacagatcgagcaactcatccagcaacttgatgccatttcacagctaacctcagaaattggcggtggtacagcgcaagactgggcgatgaaagccgggcatcgttacgatagctggatgaccgaaaaggtcgataaagcactgcctgccgttacccgcaatattgaccgtagtatctggcgcgatttgatgttgaagtctggcatgatggccttgatggatgctcaggcccgtgaccagtggcataagagcctggaggagggggatctgcctgccatcagcgaggcgaatatcctgagtacttttgagcagctacatctgaacaaaatggatgtatttgagcgtggcattatcaatgtcttcaaagggctgtcgtgggattacaaaaccaatagtccctgcagctttggtaaaaagatcatcgtcaacaatttggtgacgcataaccgctggggatttagtttgaactggggttggcgacgggatcaactagcggacctggagagaatgttgtttctgctcgatggtaaaccgatacccgacaaccatggcgatgtcactatacgtttgatggatcatattcgggacaacccgtcgaaggatatttacgaagatgatttcttcagtatccgttacttccagaagggaaccgcgcacatcacttttaagcggtatgatctgacagaaaagatgaatgatatcgtggcgaagtactatccggggatgctggctgcgagatga

SEQ ID NO: 227769 - DNA, 846 bp, Klebsiella pneumoniae
atgaaaaactggtcaacggaacatacgaaagagatcaaatcttggctcgacattgatacttaccgcaaattcgaagagcttacgcttatacggttctatcatgagctatgggcaaggacgttgttcttcaaaagctacagagaaaattttgagagcaaagctcttatgggatactactcgaaaatctttagtgggaatccttttcttatagaagaggaaaagcttggatatatgactcccgaaaacaagttgtttcaacctcctcatttcttgcttactacaacagatgatattgctcgattaagcatactttctttgaaaagagaaatgtatttctggagtggcggggatgggtatgctgtaaataaagagtttgaagaaaaacctgtctctgagagtatgccagatcagtttccccggacagttatgtttgaaataaatttagcaagtgggactgacgaggaaattgctgaatcacttaaggctgcactacctcaatggcgaaaaattaagggtatagaagaaaatcccttggagtcagttcggtttgggtatggaactatcaagaaactgatcaactatcgtgtaatacctatgctggatattctggtctgggccgccattaaaaagatccgtgtctctgacgacagactatccaggttgctatatacagatgatgacgcagaaagtgaaatgagactaccccagcagatcaaggatactgaccgacctcttgcccttaaagcctcaacaattgacttcatcaggcagtttcatttttttataaacaagaacaatcatttgaaaaaaatgaaaatttctgatgtaattaaacttacagattaa

SEQ ID NO: 227770 - DNA, 966 bp, Klebsiella pneumoniae
atgggctcgactataatctatatgataggtctggttgttttatttcattatttcaattggttaaagctgaatgaaaaaaacctcctcaagcaacctctgtttatagcagcagttacagtcccattgcaattatttgttttgtatggtctttgggcttgggatggacacaatctagactttacatcagatggctttaatcgcttcttagatatttctaaactaccattattaatattagcctcttctgtacctcttgctgccattgtaagcaacatacatagaactacccagacagaaaatcagatagaaaaaacacaaaaacaaattagccttgttattgaaaaaaacaaaactgattcttattactcacatttaaaaagttatgcggacatattccaaacaatgccaaaattcaaagtatctagactaaataaaaatgaaggaagtatagaacaaattgaactatctatcgttcatccatatacgctttacaaaaacatttttaaatcatcttcaattgacaatggatataacacaaatgttgacaacgatttcatagaaaaaacacaaaacttttacaacaacataaataaatcactcaattcgaataaaagtacatttgacaaccaattatttagcttgcaactaattgagtctaatataattcaactatgtagactgcttggaattgattataaatatcaagaacatcttttctctattgtcttagaacgccctcaaccgaatgaagaagcaattagcatctcatttagtgatgaaaagcaacttaagcagatgctttgggggcttagagatgtcctcattgaattgtatgttttaattgacaaagagccaattgttttccaaatgggaaaaaataaaggtgattacattcctgattatgcactttatgacgaaaggttgtttggtagcattttacctatatcaaatgacaaccgaatatga

SEQ ID NO: 227771 - DNA, 1677 bp, Klebsiella pneumoniae
atgctgagccatcctgctgaaaagtaccgtccctatccgccgatcgccctgcctgaccgccgctggccagaccggcaaatcagccacgccccgcgctggctgtcgactgacctgcgcgacggcaaccaggcgctggcggagcccatggacagcgcccgcaaactgcagttctgggatctgctgctggagtgcggctttaaagagattgaagtcgccttcccttccgcctcacaaaccgatttcaactttgtccgccagctgattgacgaacagcgcatcccggaggatgtcaccatccaggtgctgacccaggcgcgagacccgctgatcctgcgcacctttgaggcgctgcgcggcgcccgccgggctaccgtccacctctacaatgccatcgcgccgctgttccgcgagctggttttcggcatggacaaggccgaggtgatcgccctcgcgacccgcgccacccggcttatccgtcagcagtgcgaacagcagccggagacccgctggcaatatgaatattcgcctgaaaccttctgcttcaccgagcccgagtttgcgcttgagatttgcgaagcggtggcggatgtctggcagccctgcgccgagcgaccgatgatcgtcaatctgccggcgacggtggaagtcaacacccccaacgtctatgccgatcagatcgagtatttttgccgccacttctcccgccgcggcgaggtctgcatcagcgtgcacccgcataacgatcgcggcaccggcgtcgccagcgccgagctggcggtgatggccggcgccgatcgggtagaaggctgcctgtttggcaacggcgaacgcaccggcaacgtctgtctggtgactttggcgatgaacctctacagccagggcatcgaccctgagcttcgcttcgagcagatgaaccgggtggtggaggtggtggaaaactgcaaccagatccccgttcacccgcgccacccgtgggcgggaagtctggcttacaccgccttctccggctcccatcaggatgcgatcaaaaaagggtttgatgcccgtcagcctggcgatccgtggcagatgccctacctgcccattgacccgcaagatataggctgcagctatgaggcggtgatccgcgtcaacagccagtcggggaagagcggcagcgcctggcttatcgaacaaaatcatggtctgaaactgccccgcgggctgcagcaggacttcagccagcacgttcagcaagccaccgatagcgacggcaaagagatgacccaccatgcgctgtggcagctgttccgcacgcgctacgggctgcaggcgcagccggcgctgacgctgctcgattatcagagcgccagccagcaggatggccagctttccctgcaggcaacgctgcgtcaccacggcgaaacccgacgcctgcagggccagggcaacggcctgctctccgccgcagccagcgggctcagcgcgctgtttcggcagccgtttatgatcaaggactatcatgagcataccctcggcgcgcgcagcgacagccggtcggtggcctatatccgctgcgtttttccgcaaggagaaagctactggggcgtgggtatcgataatgacgtggcgcgcgcctcgctgcaggcgctgtgcaatgcgctcagcgccgccgatcaggccgggggacgaaaatag

SEQ ID NO: 227772 - DNA, 522 bp, Klebsiella pneumoniae
atgacgacgacgctttccttctcctttcagcaccgccctttggtgccctttgcccatgattatgcccacggtgaccaggaagactggcatcaacatgactgcgcccagctgctgcatatactaagcggcgtggtgcgggtcgcgacgccggtaggctactgggtggtgccgcccgggcgcggcgtctggctgccggcgggaacgccgcacgcgctgcgcatgaccggcaacgtggcggcgcgcaccctgtttatcgatccgctggcgcgcgccgatcttccggcgggctgccagatcgtacagatcacgccgctgctgcgggaactgatcgtgtcatccctggcgctggcggaacgctatgcccccgccagccgcgacgaaagaatttatgaactgatcctcgatgagatccgcgggatggcgatcctgccgtttggcctgccggagccgcaaagcgaaacgctgcgtcggctgtgccagcaggtacgcgaggcgccgggcgaggcctggagcagcggctag

SEQ ID NO: 227773 - DNA, 918 bp, Klebsiella pneumoniae
atggaattgaaggattattatgccattctcggggtacaaccaaccgacgatctgaaaaccatcaagaccgcctaccgccgcctggcgcgcaaatatcaccccgacgtcagtaaagaaaacgatgccgaagccaaatttaaggatctcgccgaagcctgggaagtcctgaaagatgagcaacggcgcgccgaatacgatcagctctggcagcatcgcaacgatcccggcttcggtcgccagcgacagacccacgagcagagctacagtcagcaagatttcgacgacatcttctcctccatgtttggccagcaggcgcatcagcgtcgtcgtcaacacgcggcgcgcggccacgatctggagatcgaagtggcggtgttccttgaagagacgctggccgagcagacgcgcaccatcagctataacctgccggtgtacaacgtgtttggcatgatcgaaagcgaaacgccgaaaacgctgaatgtgaagatccccgccggggtagtcgatggtcagcgtatccgcctgaaaggccagggaacgccgggggagaatggcggcccgaacggcgatctgtggctggttatccacatcgccccgcatccgctattcgatattgtcggtcataacctggagatcgtcctgccgctggcaccatgggaggccgcgctgggcgcgaaagtgacggtgcccaccctgaaagagagcattctgctgacggtgccgccgggcagtcaggcagggcagcgactgcgtatcaaagggaaaggactcgtgagcaaaacccacaccggcgatttgttcgccgttattaaaatagtgatgccgccaaaaccagatgaaaaagcgcgtgagctctggcaacaattggccgccgccgaagccagcttcgatccgcgtaagacatgggggaaagcctga

SEQ ID NO: 227774 - DNA, 1359 bp, Klebsiella pneumoniae
atggcaccaatcgctatcaatccaataagtcgctcgagattcaacgcattagccacttatgcccgaaacccacaagttaaatatcattctaatgagttagaatggttcgaaactatcgatggaaaagtgttaggcacgttattgttagatacaattgataatgactacgctggaataatacttgcccgagatctaaataaaaaatatcgatttattgacataactaaattcgacgatagccgaattaaaacaagaaaaaaattattaaatagaatccgtgaactacattcatcagttgatgagcaagggatacaaggtgatgagagtgctgaaacaatggatttctttattgatattaataaggaaaacatcaaccccgacttcatgttagtgaaagactcaccagagtattccgctgctaaaaacattatagaaccattaatgagatggtatactgatatagacggtaatttcgtagagcaatttcaaacaactgggtttaaccaaaggatatgggaaatacttctttactgtatacttacagaaaatgactgtgtgtttgatacctcattcaatgctcctgattttaatctgtcctatattaacggattaacgaatatacctttctcaatcgaagcaaccaccgttaataaaccggtagatcgtacaggccagccaatccttatgccagaagtaaacagagaaaaaatagatgagtacaaaaaccttttgattaattattttccaactcgctattctggcccgttgcttgcaaaacttagaaaaaaatattgggagaaagaacacgtttcaggaaagccatttgtaatcgctatagctgattgtcaatttaaaggtgcaggtaacattagtcatgatgcattaccattatacctttatggatttattcaaaaagtgacacctgatggccttgaagaacgtgaggatattaattgccatatttggggggcaaaagaagtaccttcaggattttttaattttgaaggagctgaaaatattagcgctatatttttctccccgtcaaatgacattgacaagtttaaccgaatgggattaaaggatgggtttaatgaaaggaagtataaaatcaagcgaacagtaaaattgcctaacactcactcttgggaaattgaatcaattataaaaatagtaccaacaaaaaaatacaccgagacttgggacgaaggtttaatcgtttatcacaatccaaatgcattgcatcccttccctaaagctatattaccaaatgcaactcattactacgtaaataatgatagaatatttatagaatttaacacccctcctataattgaagacacatctgaaattataaaataa

SEQ ID NO: 227775 - DNA, 12135 bp, Klebsiella pneumoniae
atggatcagttcaagaaaaagagattgcccctcctgattgcgggagcgggcggcaaaaagagctcaggctcaagccgtacaccagttgaagcggatgataccgttaattcgcgggccatggcgtctatcctcgatctgctcggggaaggtgttgttggtgggcttattaacggtgctaaatctatcttcatcgatggcgtggcgctggagaacgaagacggatcattcaactattccggtgtaacctgggatttccgggatggttcacaagaccaaagtccgatgcctggtttcgattttgtcgaaacgccaaaggccgttaacacacagctgaaaaccacaaacgcggttacggtcgccatcgataacgacgacgctgatcgtgtccgagtgatcatgaagttcccgtcgctgcgtagcattgacaagaaaacaggggacacaaacggtacttctgtccagtttaagttccagctggccaatggcaatggctctttctatgacgtgattgctacaggtgagagcagctctgacgtgacgctgactgcgaaaaagactggtgtctactaccgcagttacgaaatccagcttccaaagcctgggcgtgcctataaagtgcgcgtgcttcgtctctccgccgacagcaacgatcagtatctctttaacgatacctgggtcgactctatcggtgagatcgttgataccccaatgaactacccgaactccgttctggttggccttaaggttaactctgagcagtttggtagctctatgccgtcacgttcgtatcttatccgtggcctcaaaatccgtgtgccttcgaattatgatgaaaatacgaacacttataacggcgtttgggatggaacatttaagcttctgtcgtcttccaaccctgcctggattctgttcgatctgctgaccaatgctcgttatggcctcggcaaatttgtttcggagtcaatgattgaccttggccagctttatcagatcggtcgctactgcgacgaagaggttgatgatggctttggcggcaaagaaaaacgctttgcaatcaacacccagatcaccagtcgtcaggacgcttatcgtctgattcaggatattgccggtgctttccgtggcatggttttctgggctggtggcatggtgaatatcatgcaggacagcccgtctgatcctgtcatgctgtttaccaacgcaaacgtaaaagatggcctgtttacctataaaggctctgctcgaaaagaccggccgtccgtagcgctgatcacttataacaacaaacaagacggctataagcagaacgttgagtatgttgaagatcaggaagcgatggcccgatacggggagcgcaagaccgaggccgttgcgttcggatgcaccagccgtggtcaggctcatcgtgtaggtttgtggctgctctataccgcgcgtatggagtcagacatgatcacctttaccgcgggcctggacgcctcgttcctgatgccgggcgaaaccgttctgatccagaacaaatatcgtgccggcaaacgcaattccggtcgcattgtctctttcaccaaaaacagcatcaccctcgatgcacctgtctctctgaaaaagagcggtagcttcatccgtatcatcaatcaggaagacaaaatcgttgagcgagacatcaacgagaccggcgacaacatcactaaagttaccttcaagacggcgttggccacagccgatcaaccagtagcgaatggcgtctggacgatcaccgaaccagacctggttccaatgcgggcgcgcgttgtcgctatcgcgcaaggtgaaaccccggggtcgtttgatatcacggtggtgcagaacaatgcatctaagtaccaggcgattgataacggggccgcgctcgttccagaaaatacgacggttcttgatcccacatattccaaaccgagcaatctggtcatctcagaaggcacctatctgtccagtccgggcaacttgtccgtgaagctgatgcttgcctgggaaggtaaatcaccagaatactgggtcagctggcgccgctccgacgagggcaacgtctccaactggcaatctgcccgcgccacggaagaacaatatgaaatcgtcaatgttgccgaaaatgggcgatatgacttccagctgtattccgtttccttcggcggcaaaaaatccgagattattactgctgtctatcaggtaaaaggcacgatgacgccgccaggggcgcccacatcactgaccgcggtgggggattatcgtaacgtggtattgaattgggttaaccctgattcagtcgacctcgcgcagatcaacgtgtatgcgtccaaaacaaataagctggacaccgcgacactcattgctcaggccgccacaacgactttcactcacgctgggctgggtgacaacgagacctggtattactggattcgtgcggtaaacaaacgtgggatggtaggccagccgaactcgaacctcggtacagaggccaccactcgcgacgtattgtctttcctgaaagacaagatcacatcttctgaactcggcaaagagctgctcgacgaaatcgacagcaaagccactcaggaggcggtagacaacgccattggcgaggttcagaactcagtcaacgagtctattcagcaagttgaaaacgacctggcgcaaacctcctccgaaattaaggcgcaggttgactctgtcaatcagtcgctgaaagagaacattgataccgtcaatcagacaattgtcgacaatatcgatacggtcaaccagacgatcaataccaacatctccaatgtaaacagccaaattgaagctgcaaaacagtcgattaaagacggcgacgctgctctgtcgcaggagattaagaaagcgcagtcatcactgacaacgtcgctgtcccagaccagcaaagatctgactgcggccattcagaaagagacgaatgaccgtattgcagatgttaatgatgcagccaagcaagcggccgaccaactgctgagcgcgaagaatgagctgaaaacctctatcgatagcttgtctgaggttgtgacctccggtgacgaaaatctcgcgcgacagatctcgcagattgccgccggcacaggggaacagttcgactctctgaaaatctggtatttcgaccaggacgccgaaggctggacggaagatgataatggctacacgccaatgagcgtcaccagcgatggctggctgaaagcgaacaatccgacctcaacatgtcgttcccctaacggattgacgatcgatgcccatgcttatcgtttcattaagatgcgcattaaaaaggttggcaacccaacctggaacgccaaaatgttctggattggcgctgatgaaaccggctggaatgctggtcgctccgtggttatcaatgaaccggaatacgatgacaagggtattgcgattctgaccctgcacgacattgagtggcgagattcgacaacgattcgtcgtttccgcttcgatttcacatcaggtcaggatgcggacaattacctgttattcgactggatcgccgtcggtcgaccgacgccgggcgcaggcatggccgcgttacaggaagagcagcaggctcgtgcgaatgcggataccgccgaagcgcaggcgcgcagcacattggctgcacaaatccgcggttcctctgaaagcggaaatctggacgacattcgttctggtctgatctatcaggagaaaaatgctcgtatcaccgccgatgctgcggaagcgagtgcgcgtgaatccctgcagactgaattcaacagaaacaaagcctctgttgcagaagagctccatacgctgtccactgaacaagcttcccaggcaagcaagattaccgggttgcaaacaagccttggccagaaggccgatgccagtgcagtacagacaatttcccagaaggtcgaagagcagggcaacacccttaaatcacaaggtgcggcattgtctacgctggataatcgcgtaggaagtgttgagtctggtgtatctgcgaatagcaaggcgatcacgggcctgcagtcgaccgtaacccagcaggataaaacccttagcagccagagtgaaagcatcaccaccctgaataactcgctgagcgatatccagagcgataccgatactgccaaaagcaacccgagcaatttgctggttaacgcttcctttgagcgtgacctggcagggtggtctgcaggaaacagcgtatccagtgttatcaaagcgagtgcgccccattctggtagcaaaattcttgtttgcgccgccggaacggtgcaaatcgcgcaatctgtaagcgtcgtcgaagggcggacatacaagctgtcctcttttgtgcggtgcaccactgatgcggtgatcagcagccctggcaacaacaaactgcgtattggcgcggccacgttgctcaaagagattccgatccgtccggagaatctgcccaaagatgaaacatggaaagaggtctctgatacctggaaggcaacgctgaccggtaaagttgacgtatcgatcatgtcttctctcaaaaccggttctcagtacttcgatgatgttggttttgttgacgtcactgatgctctggcgattgaggcgaacgccagtgccaccaatgctttgacctctcgggtatcgtctgttgagggcaccatcacaagccaggggcagcagatcacttcgatgcagaacagcatcaagaacaaagctgacgcctccgctgtgactaatctgacaaaccgcgtaactgctgccgaaaatcagatctccagccagtcccagagcatcaccagcctgtcaaactcgctggataacgccaatgctgatgcggatgcctcgaaagcgatcatcggcaacatgctcaaaaacaactcttttgaacgtggtttcgaaggttgggagtatgtcggctggactctgctggaggcccagaaccccaaatctgggaaatacatcatccaggcgggcaaactggcctctggcggtgactcaggctgcaatcaaacggtcgagctgcaggctggcaagacttatcgtatcggcgcatgggttcgcaaatccgctgacttcgcgatcaataatgccggcaacaacaagattagccttcgaaacgcagatctgacgccgttaaaggatatcccgatcaccggcgccgggctgtcgactaactgggcacttattagcggcgagtatacgccagccaaaaccgccagcgtggttgtgtctctgcgcgcaagtgtcgcttccggctatatgtatctcgatgacgtcttctgcgttgacgtgagcaatgagaaagcgattgatgcgacgtccaatgcgttatcaaccctcaacagcaccgtgacccagcagggaaaagacattacgtctaactccaacagcatcacttcgctgtcaaaccagatggttaacggccgccagaacatgtggatgcgtagcgtatacaacgtacaactggcaaacagcactattgagccgacctttagcgatatcaacggtaaggcgccaacctcgatcgaggaggttcctgatgctgcaaaactggactttgcgagcgccggcagttacgtgatcgcgcattacaaagccttcgtgaaggtcaatgctgataccaccatcactatggctccaggtgctcgtgtttttgatgatacgggcgctgtatatgtgaacggtgttagggttgcatttggtaatgcgagctggaatacggttagctttgatctgaaagctggctggagcaccgttgagttcctggtgaaccaatggactggtcaggcttacattaacctcggttttaaactgtccgagaaagtagcccagctgaattctgctcttgggatgaacgcgctttcgaatgccattagcgccgtcacctcaaacgtcagcactgtaggtgatcgcgtcacgagcacctcgcagagcgttactgatctgcgaaacagcctcgaacagaccaacgttaatctggcgaataaggcagatgcacaggcgctgtctacgctgcaaaatacggtctccaagcagggggatacgatttccagccagggtaacagcatcacgaacctgaataataccctgaccgctgccagaaactccggtgacaacctgatcccgaactacgatttcctgcagggtgcaactgcgtgggatacccagtatccggcgggcgtcactttcggcaacttcggtgatggtaaggctggggttaagctgaaccggacgaccactaccagcccaggcatcttctccaacaacaacaagccgctgccgcttaatggtcagcgcaaatatcgtgttgtggttaaagccaagggtgtttccggggcgatgaacatgttgatccggcgccagaataaaatcggccagaccgacagcaattatgaagataaaaacgtcacactcaccagtgagtggcagaccattacctgggaaactgggcttactgcctctaacgctgatggtcagaactttaagctttacgcgcacccggctaatgccgaaatctgggttgatacctttaaggtctttgatatcacggatgaggtgaagatcaaggctaatagcgatgcgctgtctacattgtcgagcacggtgacacagcagggtgacaagatcaccagccagggcaacagcatcactaagttgaccaatgacctcgaggccgctgacgcaaacatcgcgaaaaaggccgatcagtcggcagtcactacgctgacaggtcgggtagagaagacggagtccggtctgacggcggcgaacagcaacattacgtcgcttagcagctctctgagccagcaatccaaacgcggcgctaatctgcttcctgatggcacttttgaaagctacgcggttggccacaatctatcaaataatcgcgttatcgtgaccactgatgactcgcatggtggtaataagtgcatccgtgtgacgcgtccgaatgattacaacgctaacgcaactgataacagcgataatcacattttcagcgggttccaggttcgcgataacgcagtcttctatatggaatgctgggttaagcgggatgccaagagtaccgctatggccgagaatgcgcagatctctatcggtttgtcgctccagtatcaggacaactcctggcagtggccggcagttaccaaagcggcaaaggatctctcttcaactcaatggacgaaggtttctggttacctgaaatcaacgaagagcggtattaagcaggcaatggtgaggatttctattcctaacgttagcagcgttaaggcgggaaactcattcctcattgatgacctggtcattaccgaagtaactgatgcctacaatgcgcaaagtacagcagatgctaacgccaatgcgatttcgacactggactcgaccgtctcccaacagggtgaccagatcaccagtcagggtaacagcatcaccaaactgacaaatgacctggcaacgaccaataacaacgtcagtaaaaaagcggatcagagcgctttaagcgtgttgtccgggcgcgtcgatcaaacagagtcgggcttatcctctgcgaatagcagtatcactgcgcttaattcatctgtacgcgcagggaatgcgacaagtggcgatttgattagcaacccgacatttgacccagagtttagtcagatgggcttcactgtggtttccagctcgtctgagggcgtgccagccaattgcccatacgcttatgtcgcacgcattgcggctcgcgaccatcacccaaattttgctgctattccggcgacattgggggatgtctatgaaatgtctgctctcgtcgcgtgtggtaccggctccgctgatttcaacctgtatctcggaaccgcaacaaggccaagcggcagcgtgggcgcgcctctgtcatccggcggcaaccgcaaggcgtcggccacatggcagcgagtaacctggcgattcaaaattactcaggggattgtcgatcgcggcttcttccgtccattcctgcaaattaaccagtccagcccattcggcaccgtctggtatgtgactgactggcatctgcggaacgtaaccgactcctccaaagtccaggattccctcgacgccacggcgaaagcggttgattcgctgacctctacggtaaatcagcagggggagaacatcttaagtattggtacacgcactaccaatcttgagaacaatttgagaacaacaaatgcaaacgttgctcaaaaagcggacgcaaatgctctgacggcactgaccaaccgtgttacccagaccgaaaaagacattaactcaacgagttcttctgtcacgaatctgaacaacaaggttgatgcaatttctgtcggcggtacaaacctgatcaagaactccggcgatatgaccggctggtcgaacgttgtcagcgatacgtatcgtggtaacgcggtaattggcgcaactgtaaaagccggctccggttacagggatttgcgggaaatcatgcttgagtcgccggtcgatgcaggggagtacgtttacagcttctatgccaaaggcggcgttgctggccagacgatgacggcgttcttctacaatccgaacaccacaacgtccatcgagaccagccagggtgcgaaaggcaacaacagtgatggtcgtgcgcagttcacgctgaccacttcatgggcccgctattgggttaagtggaaacagacacctaccacgggcaccaagcgcctgattctgtgccgtatcgagagcaatacctccaaagaccagacggtgtacatcaacagtccgaagtttgaggtaggtaacgttgtttccgactggaacgagtctccgtctgatagcgccagtgcgtcggctgtggattcgctgacaacgaaagtgaatcagcaaggcacttccattagctctatcggaaatcgcaccacatcgttggaaaacgggctatcgacagctcagaacaacattgccaagaaggctgatgcttctgcattgcaggatctccggaacacggtgacatctcaggggggcgatttaaccgcggcgaacagtagcattaccagcctgcaggcctcgatgaaccgtcgcactgtgtttactgtcactgcacgggggaatggcaacagcgtaactcctgggatttttgatgaaagcggcaagaacctgtttacccctggccgcagctgggcgctggtcacttttacaaaacacagcgacggatcaacggtgattgcgacctccaaaacatacgatgtttttggcagcgcgaataatggtgccacgatgtcggctgatatcgaggcgttggccagtggcacttacgtttgcgtcctgacattcgatgagccaactggcaaccgaggtaaggtattgtctgccctggaatctcttggtggcacatccgaagtcgtcaactctctgccgtatcgtggagcctatatcctccttggccgcaaaggcatgaagcctggcgatggtctggaactgcgtgcgccaaccggcggcgacggcaccgctcacatttcgacctcagtcgagtttgtgaacggggtaatgatggggcttggcgccgctggcggtgtaatgatgaaggctgatgcgaacgcatctgcaattaccacgctccagaacacagtgaagacccagggggataatattgactccctgagctcctcgacaacagcgctggaaaacagccttgcgtccagtaacgccagcgtggatgcagcaagccagatccccggtaacctgatcgtaaacccgtcttttgagcgtggtacggagggctacactggttggagcggtattgccacggtggcaacgcttcaggttccacatcttggcaccaaagccgccaaactagcagcgggtggttctgcaggcgttggccagaagatctccttcaagaaagatcggtcgtacaaaattggaatttgggcaaagcaggaccctaataccaccattcagtcgaccgacaacacaaaattccgtgtggcggacggtacaggcctgatcgcaagtaaggcttatggcccgttcacttcgaactggcaggaggtgtcatggacatggaaggcgacaaaggatgtcattgctgacgttcagttcactgctttcttgtccgcaggcgcgatgtactttgatgatttttatgtcgtcgatgtgaccgactctgttgaaactcaggcgaactcgagcgcgatcactaaactcgatagtcgtgtgaccaaaacagagaatgatatcaccagccagggcagccaagttacgcaacttaagaatgaccttgcgaccacaaacacaaatgtttcgaagaaagctgatgcggctgcgttaacggcattaacgaatcgcgtcacgcagaacgagaaagaaattgaaacccagagcagccagacaacttcgctcaaaaactctttgagcactgttcaggcaatgggtagtaacccgtggtttgatggttctctggagacgtactccgaaaaccagcagatcagcggctcgcgtgcggtcgtcgtcagctctcagaaacgaagcggaacgaagtcgttgcgtgtttcccgcggcgccggtgagggcggaaacagcgataaatccattggtaagtggattgctctgcgagaaaatgcggtattccgcattgaactctgggcgatgatgccggcagatcagtcgccatcatccgggtggtcaacaatcgttggtttgcagacccaaaacgctgccaacaataacaactggccgtcggcgatcaccatcactgaaggttcgttggggggcagagggacctggaagaaattcaccggcacgctccgtgtagcgactggtcacactcgcggcgtgttctggatttctacccgcggcacaactggcactggtacaccggggtatgatctgtatatcgatgacgttgttgtcaccgatatcaccgacgcaaaagaggctcaagattcggctaatgcgaacgcatccgcgctcaccagccttacctcacgtgttaccaatgtagaagggcaggtgacatcccaggcgtctcagctgtcctctttgacgtcccaggtgaatgatgcgtcttcgaaggttgatcagatggcgcagaccatcaccaacaacgagaaaacgcagtcgtcgctgaataccagcttgcagtcgcaaattgatgcgcaggcatcggcaaacatcaagaaccagacggagttgaataacgccaccacttcgctggcggcaattaagtcaactcagcagacccaggccacaacgataagcgcactgtctcagcagcagacgaatttgacagctcaggtaggaggccagtcagccgagcttcaggagctgaagaaaacggttgtcgaaaacggcaacgttaacagtacctggatggtcaaaatggaaaccaacagcaatggtaaaaaatatgctgctggtattgctttaggtatcgatggcaaaaatttgcagagccagtttctggttcaggctgatcgcttcggcttaatcaacacctctaacgggaatacgaccacaccgtttgttgttgaaaatggcgttgcgtacatgaatgctgcggtgatcaaggatggctcgatcaccaatgcgaaaattggcagtgagattatgtctgacaacttcgtagatgggtctcgaggctggcgcgtcgggaaggatggttcttctcagttccacaacgtcattgttcgaggacatgttgaagcagaaagcggttctttcaaaggcaccattgacgctactgacggggttttcagaggaaccgtgcaggcaagccgatttgttggtgatatttgctcagctggagtattcaaacaaggcgtaaggccagacattacccattatgactctggttcagtcggcggaacaaaaacatacgttgtatcaggcacagtggcatgcgatgtgaatttcgttggaaagatcatggtctggattaagggggttaaagtttccgagtttagcgttggcgcggccgcatctaacgcgactacacgttatatcccagctgtaggttcactgtccggcgtaactgaccaaaatgtcaggtgcgaaattacggtggaggggagcggaatttataactatgtcggcggctttgccctcatgaccagatcgagcggttcctgggcgtaa

SEQ ID NO: 227776 - DNA, 360 bp, Klebsiella pneumoniae
atgtctgggtattactattttacaactcgtaacgctgccaaaacgtctttcactgctctcattacgtcaccagtagaggggcagaatgagttttacatcgcgccagatttgtctaacgtgctggcgatggttaacacgtatggggatggtgattttggcactgttcacgtacacaacacggagaaactctccctggtagattttgataccagttatgaatatttagccaaagactctgtgagaatgtcgaaggagtacgacaatggtgcctctggtgactttgcctacacgatgccagatgacgctcgactggttgaaggcgaggatgtgaccttctttatggaattagatgccctatga

SEQ ID NO: 227777 - DNA, 516 bp, Klebsiella pneumoniae
atgaattcttatatagctggtgttatagccataagtttatccttctcatccctcgctacagagaggcagagtgatttgttacatacagctccaacagcaacacgcagtacaatgctgatctgtaaagctgaacgaatatcagacggtgttgcaaccactcttgcaggaaaagcgtatcttgaaggtgttggggaacaaatactgttagcgttaatccctacaactcaatccggcgagtatctgcatgtttcttttaacgcatggggattcactcctttcggacaagttgaaagtcatgagcagttcactaactggacgctaattcatattggacgtgacaatctcgataatggagatgcttttgactatacctttgttgattacacctcacagactgggcatgagattcggtcaagaccgttcatgcgtatatatgagtgccagaggcagaacaaacgtccagagtggacgcggaaaaaatccactcagaaatttttcagtggggaactctattag

SEQ ID NO: 227778 - DNA, 837 bp, Klebsiella pneumoniae
atggaactattccagtatcttcattctatgtatcctcaactgacaccgcagaactgcaaaattcatttagctggcaagaatgagcatggcgaattgccgataaacgaatttcttaacgggacgtttgatgaatggcaatgcttccagaagaagaattattttaaccggacttacgtcatttccctcattcaaactgaggataagcaaagatggctttatgccggaacgtatcgtcgtgaaagctgtagtccgacagcgtcaccatgttttcgtgatcgcaaagacgactattacgcctatgttttgagtcccattcccgagttagctgaataccggggacgtatgtatgtcagccttagtcgaccacgcatccatgtactttatggagagaggttggcggggaaaatgccaatagttgaaatagcccctgtgtgtctatcgtttggtgaattccctggatataagaacgtagtgcttaccagagcaacgcttggcactattattcgacaggagcttgattcgtggaaaacggcccttagtatcgtaaaaggcatctatctgctgactgacgtggatggaggtaaattgtacgtaggccaagcgaacggcaaggatggtatctggggaagatggaagacatattttgacacaggccatggagggaacgcagggttgattgaggcgttcggagcattcgacgaagagcgtcttaaacgtgtcacattctccatactggagatcatggacattaacagtgatgctgatgagatagggttgcgagaatctcattggaaacgcatccttctttcacgttccataggccataaccgcaactga

SEQ ID NO: 227779 - DNA, 1083 bp, Klebsiella pneumoniae
ttgaaaccggaacagatgaaaaatagggataaattagttagctttgcagcgaaacttgctagtcaaatcaagatttacacccgcagtaacttaaatgatctttctactgcacaagaaatttcgctattgcctttaatcaattatgcttggggtgaacaatttgagaatatgaataaggtatctcaaaattaccctggctttgattatgggcaacctgtcaagcgtttaggtctgcagatgactgccaccgtagcaaaaaaaaagtatcagaatactttagacaaactgcggaacaataaggaattgaagggcaagtttgacgaggtttggtttttcgtactcacggctgaacgcttacctgataatgttcgtgaatactctgaggatttttgctgtaaatattacacgttatatgacttggttgaaatggtcatggcgcagcctctggcgtttcagtgtgaatttttgctccttgccgagcaagaatactcggattatttctctcctagtgtagtttcttctaatcagggatatagtgtatcaaaaaatattccggtcccctttgacttgggcctgtttaactctttgattgaaactaatgaatggtttgatgatgttgccaaaggcgaacgagatgtgcatgaatttattgaaatatttaaaagaactctacgtcagtgcacttttccagctagaagtcttttaagcaaaatcattagtgaaatagactcgccgaagggtataagtacaaaaatcgagtttcctgaaaagctactttatggcccactaagtattgatgaaagaaactattcagtattttcaaatgaccttgataatttgttcgacatggggttgattgaacgatggaataattctgtaggaatgtacactgtgggtgatgatgcgtattttgaaagtgaacgaatgatttgccttgagtttaaaaaatttgaacctgaaatgaatttgtatgcggctctatttatattttataaaatgtatcatgatatcaataaactagcgcttgcaattgaaaataatgatttttctctgcttgctgacggtgcttgccaaaatccttag

SEQ ID NO: 227780 - DNA, 879 bp, Klebsiella pneumoniae
atgcagcatacgatatttcacaagaaattaaaatttaacaaacttatcattcttgattgtgtgccagacggcgatatgcaaactgccagacgcttacatgaaaatcttagtgacatagggttcaggaccggtattgctctacttaagattaaagatacaattactcttcgagaagtgcttcagcaaataaaagaatcttttcaaccggaattaaatattggaatgcaaccgattattcacatcgaagcgcatggtaatccacagtcaatggaactgcccgatggaagttactttagctgggatgaactggcaaataatttaagaataatcaatcagtttatgtgtaatcaacttatcacttttatcggcacttgccacggatataattttatatatgtaaatcatacaattacgaagttcacgcctgtttatttttgtatagctcccttggattcaatccctgccggtgaccttcaggactctacttttgccttctatcaaagtttattcacaactggagatttgaccctgtctgcaagtcttctagatgattcaaaattctatacgtataattctgattatatgtttcaccgagcatttcacgaagccatgcaacgaggtcatagaggtaaaaatttaagggaaagaaaagaggctttaattagcgaagccataaatgaattaggtgacgtatggaatgggatgagtgaaagtgacaggagtgcttttcttaaaaaagcacgaaaacttttggatgataaattaaaaagaaaagattctctaaaaaatgagtttgatagattttcgatttgttatatgggctatagtaatgatgaagtatttgaggagatttggaatcatatgcagtcagataaataa

SEQ ID NO: 227781 - DNA, 1518 bp, Klebsiella pneumoniae
atgacacctccagacaaaattgataccacaagtctactaaccatactgggcgtcatcgctgcggtttgggctcttataaccccaaatgcacgtcttcgcttgcgattttgtctggcttggtgggattgggcaattattgttacttcatttatcctaagtaattacttagtgttcgcaccaactttgaaagcattgggtttatattttagttttggcccttggatgtggggattagatagttcaagtgccgtatatcttatattacttactgtttcaatttatcttttagcacgcttaaaaaatccaaaactatcatctagcaggacaaaaatatttctcgaattagtcgaaaatttgcacctaactaaaaaatatgatgatcttgctcaattgcttgcgccgcaattagggaggctaatatcaataattgataaaccagcaaagcggagctttcttaataaaattgccgaaaaacttcggttaactaacagtgatacagctgccgaacattcacgcgaagcattaataaatattgtttcctcacctgaactcacaaattattttgctctagcacacccatctctctgcctagagttaatcaagattgagccaacagttcgttctgatttttcttataatttcatcagagcattgctcagttcacctaatagtcgtctatatgttgaacttaagaataatattaatataagactagggcatcgcttgttgattcctgaaagcaaccgtattttacactttttcttctctaacgctgcgtttgctgagaaaacacagatctatcgtgatattggcgataatatcttatgtatcctcgaggaggatgaaaatcttattaaatcgctcaataaaccattaggattctatagcgatatctcgaagtatagatgccccatttactctggggtgtctatgtttcaaatcatggttcatgaggctattcatcaggggcatcaagatcatctgtggcttcattattatgaccattttgcggctaaaatattaaagaacatggacaggcaaacagataattatattggtgagtgggagactccttttcattatattttatgccgtttgttttatatttctacagactggatggagcaaagcatatatattgataaggcagaaatccctcagcaaaatttgaataaagatcacttcgatattcactacattccgaagcaggcttcaaaattactgagtgatatgttgcagcaagttatacccaataacaaattgagcttgtcaactagaagaaatatcttgggctcggttgtttcctcttacattagattaaacagacatgaagaattagaggatattaagctctcattattaaattttgtgacaaaggggcatttaaactcagcaagtcctaattaccgcaaaatgctactagatatatatgactcgcttgatgattatcggttaaagagcgatgcaccggagtttagagcagcaattgtatcggcaattcaacaacggcctaactaa

SEQ ID NO: 227782 - DNA, 225 bp, Klebsiella pneumoniae
ttgcagcaagcccaaataaataaaaatctttgtaatcattataaagagcaaattcagcagtggattactctgattgagtattacgagggatcactgagtaaatatgaaaaggtgaaaagatttgtgggaaagcataaatggttctttgtaatagcgacaactgttatcgcgaaaagctatgtggcctatgatgttatcgaaggatggataagtaaaattgtgtga

SEQ ID NO: 227783 - DNA, 783 bp, Klebsiella pneumoniae
atgctattatataaatacataccagaagaaagtctaaaactattttttgatcatgacgcaatcagctttaaatttacgccagttggtcatttcaatgaccctttcgaaacatatggggtatcgttggcatcagaggatgtagactcgttaatgcatttgaccttgcgctcaaaaataaactctgaacttgccagtctatgtttatccgaatcgccattagaagttttaatgtggtctcactacgcacaacatcatagaggttacgtagtaggcatagatgcagatttagcaggttttaacgatgactctctttgtttaataacagctaatgagggaaatatcgactaccgagaggagagagagaaagcaagaatcattgtttcagaaaaagattttaaaaacaaagagataatcaaaaaaatattgttacgaaaaagcctgcactggaaatatgagaaagaagttagagttgtaatagaaagtaaaaaactgctccccatagagaatgaagaagagaagttctatttatacaaggctccagggattaatagcattaaagagatttatatcggcattaataatgaggagtatgaatttaccgttacagagaatgaaaatttaagaaatgccatattggaaaataatataaaaattcaaaagtgcaatttcaaaaagggaacttgggacttagattcgatggactacgacatgaaggatattacaaacattgagttcaatatacttgcgggggtaatatctgcttttgaaaaaaatgaagtataa

SEQ ID NO: 227784 - DNA, 522 bp, Klebsiella pneumoniae
atgagcattgagctaagcagtacccaaaacacttacggccttctgaactcaggaaacccatactctgcttgctggcgcttcttcgagccacgaggagtacatatagaccaattaggggaaaaaactctcaagcagctcgtagagaaaaggctaatacaaaagccactaaacatgttctttataagttatggagcgctgattggtatcgacagaggtggtttgaagcaggctaggaaaatttatgagggtatagaacgagcaaaaaacgttcgcttaggcccgcttcttttcgcctgcggtatctacggtgttgaagaggaagaagcttggttgctggcagagaaattcaattctcttgaggcgctatacgatgccagcgtggactctctgctaagccatggttttttaaacgagtctgtggccgtgaacgcatacaatttttttcgccaccctgccaatgtcttagcacttactgagttacaggagaaagccgggttaaagataagtaacgtgaaaatctga

SEQ ID NO: 227785 - DNA, 1257 bp, Klebsiella pneumoniae
atggcgcgtcagacaaagccccttaacaacaccgaagtcaaaaattccaaagcgactgaacgtgccactatcctgtatgacggggacggcttagaactactggtgaagcccggtggctcaaaactctggcgattccgctattacaaacctttcactcgcaaacgcgccatgattagctttggtgcttaccctgctgtatctctctctgaggcacgtcaacttcgtgaagatgcccgtcttctattaagcaaagatattgatccgcaggaacataaaaaaactgaacagttgcggcaaaaaaatgccactgaaaacacttttcaaaaggtcgctgccgaatggttcaaaaccaaagaatcagcggggctggcaactcatacgttaaacgatatctggcgttctatgagtaaatatgtattcccacatattggctctatgcccattgctaacatcacggctcagcagttcatcggagcgttagagccaacacacgcagccggaagactcgaaacggttaaacgtctaagccagcgtataaatgaagttatggattacgccctcaattctgggctggtatctgtaaaccccgcagcacgaatcgggcgaacatttcataaacctaaggtaaagcaccgccctgccctacctccagagcaactcccccttttaatgaaaactctggcatttgccagtatcggacgacaaacccgctgtcttatcgaatggcaattacttacgatgatccgacctgccgaagcgtcaacgactcgctgggatgagatcgactttgacgcaaaagaatggcgtatccctgctggccgcatgaagatgaagcgtgagcatatcgttccgctttctgagcaagctttggctattctggaagtaatgaagcccatcagtaagcacagagattatgtttttcctggctaccgtaatccacttgaaccaatgaatagtcagacagcaaacatggcgcttaaacggatgggcttcaaagatcttcttgtcgctcatgggatgagagcgattgcctcaacagtccttaacgagaaaggatttcctcctgatgtgatcgaagcagcattagcacatatcgatactaacgaagttaggagagcctacaatcgcgctcaataccttgaacagcgtagagagatgatgagctggtggggtgagtatgtagaagcagcatcctttggaaactcatcaatcagtgttactggcaagttaacctcaacagaaggatataccgattaa

SEQ ID NO: 227786 - DNA, 1377 bp, Klebsiella pneumoniae
atgggcgttaagggatactatttattcagaggtgataagacacgatgtggtggcgttatcactgaaggatggagcgaccaccagcattttgacagagatatgtcctgtgaagggcataaagtaacttgtggtaaacatccagggctttaccgtatttgtggtgggcttgatgatgacatacacggcaaaaggattgccggaacactacacagttatagctcctgcccctgtaaatccaaattcatcaattcaaactgggatgatgattacgaacttggtggagaagcaacggtaacgcacactgatctacctcacctcgtcaagatgcctgaacttccagggccgattgagtcagaaccggaacagaacgcccaaacagcaaaaaagaaaacaggtatagatgcaggttttgccgttatcacttatggcggtactacggaagcgtggcaacgtctgttattcactgaaaacccaccagcaggggcaaaagagctattctctattctgaacggcccggatgaaagatacaaagctggttcgattatgcttctggttgatccagagaaacaggacgacgagcagattgcccacatgaaagccgcgaaagcgcgagttgatgcggcgttagaaccgctgacaatccaggaagctaacttgctgcacaaacactacgcaaccatagctaatttcaccagctacgctgatacaggaattggccttgctgctgatcctgttggaaaatactttgagagtatcgaaaaaatactcagagagattcaagaaacgtataagaatacctacataacgagaggctcgttgataggagaacaattttacattcaacgtagcctgttgtttaaagagcttgaatcaatacttaaagtcagattcctgaataaggctatgaaattcgaagagtatacaaaaataaaaaaagcacttggcctatccagcagttctattacccacaaatggaatgaaacggggatcagtgacattgaaggctatgctacccacatcgaacgggcagttaaatacgtaaaagcaatgcgttacactggttatttaggcattggttttagcggactgcattcactaaatgaaataaatgaggcttgttctgttggtcgcgaagctgaatgtaccaagaaaaagtatactgagattggtagctttgctgtaggtacgggggttggtgttgctggtggctatttagcaatacctctttgtatcgctatcggtgttggtactgctggtgtcggagggcttgcttgctctgtgattgctggggctggtttaggctatgtcggtagtagtgcaggtggcgcattcggtgaatggggtggagagcagctgtatgaaactttcggtaattaa

SEQ ID NO: 227787 - DNA, 219 bp, Klebsiella pneumoniae
atggcgaaagtagatctggaaaaaatcattccggtatttgcgttgcgaattgcaaatgttggtgatgtcacagatggacaatgcaccttaacgatagagggtggccaggacgtatctgacccggtagtcgtgaccgaagagtatatacagaagtacaaccctcagcctggtggttattacatcatgtgctcaaatggggtcgggttgtattccaattag

SEQ ID NO: 227788 - DNA, 2109 bp, Klebsiella pneumoniae
atggccgatattaacgaatctccattatgggaagacgtcattgaactgattggcagaactgagcgcgtatcgggcggtcaggatggcgtggctaaccgcccgttaaagaaactggcaaaccgcacgcgttatctgaaagagcgatttgatgaaaccgatgccgatatttcatcaaaggtggaagcggttaaaacctttgatgagggggcgacgcttaattctccacgcgatgaaattctgtacggaaattaccgacttgtctggacagggtggtttcctaaagacgttccggcggcgtcgacgcccttcaataccggcggtatcggtgccggggcctgggcatatacttctgatgccgcaatccgtgacaacctcaatgccgttgacggtctggcgatggtgggtcagtgcccggatattaaccggctgaggatgattaaatttgacgcggtcggaaaacagattttccttaaagaacatacgtcggggcagggaatgggcggcggcacctggtattgtcattccctgaccaatgataatagttatgtggacgataacgggtgccagattattaataatcacggtcaggtcatccgccggaaagatttgaaagaaataacttctagttacttcggtcttcaagctggcgatttgattgatccagttgttgataatatgtacaaggcatcgcgcacatttaatatttatgaagccaggatagaaaatccaggatttgataaaggttacgtgcttactgggggtaaaagatactactgtggtgacaagccgttttacatcctgtcatactcggttggaaccttgagagggccaaatatatggcatacaggggataatgtcggtatcactttttccagatttaaggaggacggcacgtctgagcaggcctggtcatgtggtggtattcgtgggtttcgcttttggggcgctgcatcttaccttgttcaaggaaataccggtgtggatgctacaccagtacgcctgtctgatatgtggcaaggagaggcttgcgacttgtggattaccgggtatacggggaatactaatggtgcatcggtttctctatataacgaatttgcgtggacggaaggatctcttgttaaaaatgtaatggttcgccaatcactgcgtggtttaacatttcttcgcaagcatgggactacagctactgattcatttttccgaccagaagttgatttttcatttaacgctggtgttcctgggaaatcaacacaagtcatggttgttggcgatggaactgccgctggtaaatgtcttgtatacggccatgatattaagcttactcagtggatgagtgccgggtcatggcacgatatcgtcaggcttgaggactacagtattatcgctgagaccggtattattaaaatcgtggctgatgggtacggaatatccaaaaatactgttccatcgactgaagttgtccactctataaacgtccgcggacttaatgccaggttcaggagtagagtggaaaactggtcaaaccaggccggtggttgggggctggacttcctgaacatcatcttccagtccagcatgcacactaacgcccaggctttttatgagtctgattttgacgcgctgccaaccattaaccctgttgggatgaaaatacgatttaacggggtattcactgttgctgagcggaaggcaggacggatttacacccttaatgggttaattccaggaatgacgcttaaagtaaaacttacatcccgtgaaggcgatgatatctatgcggtatcagtccaggaatggaaggttttcgttagatcaaccgatctcccatgtattgttgtgccgatgtcaggaggtgcaaatatcacaaccactgatggacttgcgctggttactgctggcggtcagcaggcaacattcctgaaaacagtgacaccaacgcaagcaaggaatttcatcggtcagaattatggccttactttgaaaaacattaatgacgataacagtacatcatattccataaactctggccgaaaaattagatttgttcttccggctaacccggatgcaactacaactactccttattccgttgagatggaggtgctttaa

SEQ ID NO: 227789 - DNA, 594 bp, Klebsiella pneumoniae
atgaatagcctgttaccgccgggatcgtccgcgctggagcgcaggctggcgcaggcctgttctggaatcagcgatttaaacgtgccgctgcgtgacctttggaacccgtggaagtgcccggcaaagttcctgccttatctggcctgggctttttcagtggaccgctgggatgacgtctggacagaagccgagagacgtcaggttatcgctgatgcgttctgggtgcatcaacgcaagggcaccatagccgcagtcaggcgcgtcattgaggacatgggtttttcaatgacgctggcggaatggtggcaggtgaatgaccctgcggggacattccggcttgaaattaatgtgaatgacgtcgggctgagcagcaaatatctggatgagctgaacaggctgattagcgtgacaaaacccgtgagccgtcatatatcacaaatgactattgcaacgcatgttacagggcttattcacgccggagcggcactttatggcggcgacataatcagtatttacccggaagaatacgagccggatgacagtcttttttataacggcatggttttccatgatggaaataacagctacaggtga

SEQ ID NO: 227790 - DNA, 1434 bp, Klebsiella pneumoniae
atgatccagccaaaagtttttatatcctatagttggtcaagtaaaactcatcagcaacatatcaaagatatggctgaacgattggcggcagatggagttgaaactgtcatagatatttatgacttgaaagaaggggatgataaaaattattacatggaaagaatggttcaagatgaaacggttacgcatgttttagtcatttgtgataaaaaatactcagaaaaagccgatttaagaaaagatggtgtcggtgttgagtcgatgataatttcccaggaaatatattcatccgtgtcgcagtccaaatttataccattaatatttgagtacaaagataatggagagccgtatactccaatctttctgaagtctagaatctatattgatttttcaacaccagaaaaagaaaatgataattgggaacgtttgatcaggttgctttatggaaaaccagaatttactaagccaccattaggtaagcctccggtttatttagagcaagacacgtcaaaaccgacgtatgaaattcatgcaaaatttcaaactttaaaatcagctgtcttaaatcaaaagcagacattaaaggattgcagaaggcaatttttagaggtgtgccgaaattattgtatctcactacaagtcgtaacaaacccaactactgaagattttgcagcggaagttttgcaaattcataaagagcttattgccgttagggatgccattacagactgggttttacttgagggtgatacgcagggcgaagacttttccaaagcactattacagtttatggaagtaatattagcgattagaaatcgtccgaaaaatgtaagttcatataatgaaatatggtttttgccccatcagatttttgcgtatgaaacgtttttatatattttggcggctttaataaaaattgaagctttccagcatgtacatacattactgcatacatcttatttgctacccgatcatataaccagtccgggaatggagtttgctaattacagtgagttatatttaagctctgattaccttcaaagtaaattgtcccctgaaaactatcgactgtattcccctgttgctgagttagtaaagcaaagtgcaactagagatgatgtgtctttcgatgatctgaaacaagctgatcttgttgctcttatgatatccttcattaatcccggtattttttggtacccgcaaatgttgttgtattccggtcactatgagaaatatcctctatttacaagagcaatacagcatagaggattcaagagtattgcagttattaccggaatcgatgacagtaaacttttggctcaaaagctgacagagggtgaggcccagcgaaatactagcaactggtatcatttcggttttaatagagactttctcaatcaaatgaatgttagtcgtctagatagtattgaatga

SEQ ID NO: 227791 - DNA, 843 bp, Klebsiella pneumoniae
atggcaacattacttttagcagtgattttggttagtggttttatatatgtaaacctatcactttcaacacgttatagatataagcgttccaatggctgggacgcttatttttttgtggctgcatggggaattgtctttttcctcgctggcggcttccttaccttcgctcttaacatcagcggtgggtttcgctggttttctaatgcactgaatctgactccagacagctttaacgggatgttatccaccacaaccgataaaccgcagcgcatcaatgaaattaagcaaatcgcgtgggttgtgatttcaatagttctcgcggcgctgttcggttggctaaacaaacgccgtacttcaaagggggatcgccgttgggatgcactggcaaaggcagtgggaaacaatgcttttgaatcgctgctcatggaagcatcagctcgccagtttcctatcattgctacactttcatcacgcaaaatctatgtagggctggtgacttgccctgcgttggaaaatggattgtcggaacaccttgaaattctccccttgctgagcggatatcgtgataaagacgacctaacgataaatatcacgacaaactatcatcagcactatcttgatagcggtgttatcagtgggatgtcgcgcctgaatatccaggatttccgtgtgctgctccctaaagacgaagttgaaaccatctcgttttttgatactgaaacgtataacaaatttaaagaaaacgaagcgcgtgaccggaaagactgccgcaagttgggtggtaaaaagccatccgcacgcaggagaaagactgctggcgacgcagagcagggtagtgcatga

SEQ ID NO: 227792 - DNA, 219 bp, Klebsiella pneumoniae
atgtcaagtatcgccgcattgaagctgggtaatccagttgaacgtttggcacgggttctgaaagagaaccaggacaagctcaatctgagtaaagatggttttgtgtccgtagatttgtccaacgaagaagctataaaagccatccgagatcagatggataagcttgaaggcatcaaaacgagcactgttaaagcaaaatattattacagaacccgataa

SEQ ID NO: 227793 - DNA, 327 bp, Klebsiella pneumoniae
atgcggttagaagatgaaaataaaacggcttggttatttcctaatccgctgccttttagtcttgaaccagtaatgatgcagcgatggatgcgcgaacgctttggatttcccataggttatggcgaacgcaaaatgatagggagcaatagtcgtcatattagcgaggtatacccactgttgccacctaatcagaaaatgtctgttttatttgcttataattctgattattttgttgttagtgtatttttttattgtatagagcatgcaatagtaattaaggcgattttcgcgagtataaggtcgtctggcaattggcgttcgaagtga

SEQ ID NO: 227794 - DNA, 561 bp, Klebsiella pneumoniae
gtgaaaaaaatgaaccgtacgctccgcagatgttgtctgtacgggcttatcagcctgtctttgtttgcacccgttccggccgtgtatgccgccagcatcgagacggggtattcgccggaaggaacggctctgcagctggtcctgaagactattaattctgcacagcaggaaatccggctgatgggctattccttcacctcacccgaagtcgccggcgcgcttgtcagggcaaaacagcgtggtctcgatgtgaaagtggttctggactggaaagccaatacaggcaggcaaaacaaggcgagtctggcggccatgaatcttctggtcaatgccggtatcccggttcgcacagtgtcgcagtacaaaatcatgcacgataaagtcattattgctgacggccgtaatgttgaagtggggtcttttaactacactcgagccgctgatcgggtcaattcagagaacgtgcttgtcgtgtgggatgttccagtcgttgctcaacactatctgcggcactggcagtcccgctggaatggcggtactgactggtattcatcgtactaa

SEQ ID NO: 227795 - DNA, 690 bp, Klebsiella pneumoniae
atgacaatatctgagcctgtcaggtctcttgatacacatgaactgatgcctggcgatatttacccacatcctgcagtgggggaaagttattccctgtcacattgcgaggtctgttctctcttcagtgaccacttcatgtatatctgcagcgcgttagttattcttctgcttgttttcattgcaggtgtattttttagaaaattaatgacgtcttccacggggcgtaagcgagacacggtgtcagttattcccgatacaaagccagaagcacagagcaaaccggaatacttccatctttccatatgtgtggaaggcccggccagcacggatgactccgccttgtcctctcttgcctcccgtgttgtccgcgaagcagaaaatctgtatatccccggcgtcaatcgccgcgacagcgctgacgacgtgtttgcctggtccgtgcagactcagtttccttctgacaggctcttcggcacacggattttcccgtcgaccggctggtttgaacgtccggatatgattaaacctccggtgaaatgctactgcgtctgcctgcagtacacggctgaaacattgccatccacactgcatgccctggtcgatgaggccggacggcaggtggcgaagtcgtatattaaaggcgggcactgccctggctcagagggctattccttctgcataacctcttaa

SEQ ID NO: 227796 - DNA, 1956 bp, Klebsiella pneumoniae
atgaagacggttatttccgtgctgactgcgcatttttttgtcctgagcgcctttatctggctggcatccccagcctgtgctgacagaggaagcgactataaagctggttcggattttgcgaaacaggtgcagggcaatggtctgaactcactgaaaaatttcagtggtgagcaaaacctgccggggtataccgacagccctgatcagacaaaatactatggcggcgtcactgccagcggagacagctctctgaaaagcgattcagccctggagttcagccagggagataccggcaaagcgattacggagtcgttcacgaaccggccaccggatcagatatctcaggatgcgccgtttattcaggccgcaaaggatacagaatcccgtgccgacagcattgtcggcgataccggacagtcctgtaccgcccaggttgtgaaccgcagtgagttcacaaaccatacctgcgaacgtgatctgcaggtggaaaatttttgcacacgggaagcgaccctgaaggataacgccaccacacagaaagttaaccgaacctatcagcaggtggtgacgctgaattatgcccggagtacccggcaatggagtggcaacctgacgatcccgaccaacggtcgtctgctgaatgcctcggtggatggtgagcctctggtgatcccctggattgaagaatgcgattccgaagggaaggtgcgggatagctgcaagagtgcagtgagtgaaagcctgaccctctttgaacgaacgttccccattgatgtgatcaactggccacgttcagaatcgatgtgttcaggcggtcagaacacgcattgtacgaaatatacctatgacgggaaggggaagattcatcagtcgtttggtgtggacaaagcggtcactgctgggcagaacttttcagtaagcaaaacatcacggaccgtatcatcggccagccagaaacccgtacaggtcacggtcaccctggtgatggaagaaaccgaaaccgtctatgcacctgaagtcgtctgggttgaaagctgtccgttcagtaaggatgaaggaaaaaaaacgggcgaggaatgtatcagtccgggaggaacgcgaaccatcaccctcggaggcagggattactcgttcacggaggcctgctggaaatataaggatacctggctcacgcagccggcggacaacggctcctgtgaaagcctgatgaaaaatacggcctgtactctgtcatcccgccagtgcgccttctccagcgaggaaggcacgtgcctgcatgaatatgcaacgtattcctgcgaaaccaggacgagtggcaagcaaatgatctgcggcggtgatgtcttctgccttgatggtgaatgtgacaaagccacgtccgggaagagcaacgactttgggcaggcggtgtctgagctggcggcactggctgccgcggggaaggacgtcgcggcactgaacggggtggatgtccgggcattcaccggaaaagcgaagttctgtaagaagtttgctgccggcttcagtaactgctgcaaagacagcggctggggccaggatgtggggctggcacgctgcagcagcgaggaaaaggcgctggccaaagcgaaaaaagacaagctgacggtcagtataggggaattctgctctaaaaaggttctggggatttgcctggagaaaaaaaggagctattgccagttcgactcaaaactggcgcagatcgttcagcagcagggaagaaacggtcagctgcatatcggttttggcggcgccagcagtcctgactgtcgaggcattaccgtcgcggaactccaggggattgattttaacaagctggatttcaccaactttatggacgacctgatgaaaaatcaaaaaataccggaaaacgatgtgctcaccaataagaccagagaacgaattaaggaaatcatgagtcagcaatccgcgcaataa

SEQ ID NO: 227797 - DNA, 639 bp, Klebsiella pneumoniae
atgaaattaatgaatctgtttatggtcatgcttttgctgaccggacgagcggtgttggctgaaacctcctctgttacagacagagaatggctgaagcagcaggagaccctcagcgaacagctgcgccagcatccggataaacagctgcagcaggagcttgaggcgcaaatcaaccgtaatcctctgcccaaatcagaccgccagtttatcgataatctggtcagccagcagaaagcggcgaatcaggaaaagccagcagaaggggcgctgtactttgtctccttctcgatacctgaagaggggctgaagcggatgctgcacgaaacccggcagtacggcattccggcgacactgcgtgggctcgtcaataacgacatgaagaccaccactgacgcggtgctgcagctggtgaaggatggcgtgaccgacggcgtgcagatcgacccgacactgtacacgcagtacagcatccggagtgtgccgtctctggtggtacggtgtcaggccggatatgacgtggtacgcggtaacattcacgtcaaacaggcgctggagaaagtggcacaaaccggtgactgcgcacaggtggcccggcaaatacttgatgcgccctcgaatgccgccgggagccagccatga

SEQ ID NO: 227798 - DNA, 990 bp, Klebsiella pneumoniae
atgagaaaaatatcatttttgtttatcctcctgtttttttcgttagtccctcaggtacatgcagatccgtcgtgtgaaggtcgattcgtcaacccgatcaccgatgtgtgctggcgctgcatatttcctttatcactcggcagcgtgcaggttggtaaaggcgatctgcctgataccagcaatccgggtagtcccctgcagctgtgtccggcgccgccaccgctttttgttcgtcccggcctggccatcgggtactgggaaccgatggccatgacggacgtcagccgttcgccaggctgtatggtcaatctggggggcttcagtatcaatctcggcaagaccggcatggggaccgcgagaaaggacgataagcaggtgaacggcgccttctatcacgttcactggtacaagtacccgctgacgtactggctgaacatcatcacttcggcagggtgtctggaaggcggagacatggatatagcctatctgtccgagattgacccgacctgggtggacagcagcctcaccaccattctgaatccggaagccatcctgtttgccaaccccatcgcacagggggcgtgcgcggctgacgctatggccagcgcgtttcatatgccactcgatattctgttctggtgtgccggctctcagggttcgatgtacccgtttagcggctgggtaagcaacgagtccagtccgctgcagtcctcgttacttgtcagcgagcgcatggcgtacaagcttcaccggcagggacaaattatggagagcatcgggaaggacaaggcggtctgctatgagtatccgtccccgatcatccccaaagagcgctggcgctatcagatggtgaacatgtacccggacagcggccagtgccatcccgtggggcgcagcgtgatgcgctgggaggccggtaaaaatccacccaacacccgtaagaactatggctatctgatgtggcgtaaacgcaattgtgtctttctctga

SEQ ID NO: 227799 - DNA, 390 bp, Klebsiella pneumoniae
atgactattaccgagattgctctcgcagcattaattgttgttcagtggcttacggtggttcgacaaaataaagaaattaaccaccgacgtgaatgtgaaagacttctgaaagaaagaattgacgattatgaaatacagaaggggcggtattgtcggtatgttgaaggaaaagcaaagtatctcatcagcgatatggaaaaggatttggatgagctttttcttttaaaaccacatgatgaggactcgttctggcgtaaggtttacaggctggagtttatttccagtgtgctgaaggagttcgctaagggacaggatttaaaaaagcagaaagaaataatcgatggtgtaaacaacatctgggaaaaattcaggggaagggataatcaatga

SEQ ID NO: 227800 - DNA, 2148 bp, Klebsiella pneumoniae
atgcctgactccacatccctggcatggagctggaatgccagaaagcagccagtaaacctttatgctgttgatgcgcctgcacggaaaccatctgcgctggccgtctggattgctctttatgagcaggataaaagcgatcaacgcgagcaggctgaagcaatgagtcgtgcagcagaagagtacctcttttctgttgcacattgcgatccctggcactatgacgaattgaatgatgcgctgattgagaaggctaagcgacatgcagaactccatcgtgttgatcctcttaccctgattcgtgatgacgtcgccagcttgcctggtttcctgcgcgagccgctggaaacaaggattaagtatttggaaaaatcagaagatccgcgccatttgcctacctatctgaatgaggtcattactccctcattagtgagaattgacaaggtccgtgctaaccaggcgtcgctgtcattccaggccatggctggcagggatagccttgatcaactccttcgacttgctgaactgaatcagcgggaggttaagcggctttcaacgctggtcgcagcgcacattgatatgatttttatccagctttgcggtgagatgctgaccgatgaattagcttctcccatcgtaatactggagctctatcgtcgtgtggcggccgaagtgtcacgccttgatgttatcccgccgggttatgaagcgctccgcagcaaacataatcgccgcaacccgattaattacgagctgataccgggcgcgcttgcccgtatgcgttgtgctgactggtggcaacgtaagctgtggcaactccgcaacgaatggcgggaagagttgcttcgggctgcgtgccttgttcatcggcacgcatcaccttatgtcagccatgacattctgttgcagaagcgggaacaacgccgtaaggcgatggattttttccgcaatcatgatctgattaacgaagatggcgatacgctcagcatggaggatgtggtgcttgcaagtgccagcaatccagcgcaccgccgtaatgagatgatggcctgtgttaaaggcctggaattgatagctgaaatgcgtggcgactgcgccatgttctataccatcacctgtccttctaagtaccacgccacactgatgaacgggaagcctaaccctacatgggatcactcgacagttaggaaaagcagcgactatctggttgatacgtttgcggcattccgtaaggcaatgcacaaaaaagagctgcgctggtacggcgtccgcgtagccgaaccacatcacgatggcactgtgcactggcatttattgtgttttatgcgcaaaaaacatcgacgtgcaatcacagagctgctgcgtcgtttcgctatccgagaagatcgcgccgaacttggcaataacactggcgctcgtttcaagtcaaagctgatagacccgcgaaaggggactccggccagttatattgcaaagtacgtcagtaaaaacatcgatgggcgtggtctgggtgacaccgtcagcaaggagacgggtaaatcactacgtgatagtgccgagcacgtcactgcgtgggcatcgttgcaccgtgttcaacaatttcgtttttttgggattccaggccgccaggcgtaccgcgagttacgattgttcgcatcgcaggcaactcgtgcaatgaaaaccagcaaaccgggcgctccggtacttatggatccaaaactggacgctgtgctcgctgctgctgatgttggctgttttgccacttacatcatgaagcagggcggtgtacttgttccccgcaaaaattacctcattcataccgcctacgagccgacagtcgaaccaggaacctatggcgatcacgggattcgtatttatggcatttggtcgccaatcaccggtaaggaaaacaaaatatgcacgcatgtccatacctggaagatggtgaagaaggctcccgctaacccaggcgctgaaagcgccgcccagggcgaccccgtcgccccttggactcgtggcaataactgtctccttcacaataaacggaatatactaagaataatgaatgattttacgccaccaaaaaatcatttcggaaggttcaagagggtcgattttataagcacaaactaccctccaaagaggttataa

SEQ ID NO: 227801 - DNA, 6321 bp, Klebsiella pneumoniae
atgactacacgctatttttcgtcacttattgaacaatcgttgtctcgttcaactgaagcaacactgagtatcatgggggtcacaaacccgcagttgcgtgagcacctcgcgcaacaaatgggcgccgattgtgggaaatcaggctcattccttgcttctcccgttttccaacaaatgtttggctggaaagcgtcaaacaaaacgatgcgtagcctgacggaaggcaaggcattgctcagtaaagctgtggttgattcgctggatgatcagaacaatggacgctatcgttttggtgctgactggaaaccctttactcaccagctagccagttggaaggctctgctggaaaaaaaacattctgtggtagtgaccagcggtacgggttcaggcaaaaccgaatgttttatggtgccggtgctggaagacctctaccgggaattacatgaaaatggcaacaacccacttatcggcgtcagggcccttttcctctatccacttaacgccttaattaattcgcaacgtgagcgcctggacgcctggacacgtggttttggttccggaatccgatactgcctctacaacggaaataccgaaaatctacacgccgcagtgaaaagcgaacaggtaaaaagaccgaatgaagtactctcgcgcgaaaaaatgcgtgaagaacccgctccaattctggtgaccaacggcacaatgctggaatatatgatggtccgccagatcgacgctccaattatccagcaatctaaatcacaaaaatcattacgctggatcgtattggatgaagcgcatacctatgtcggctcgcaggccgctgaactggcgctgcagttacgccgcgtgatgacggcctttggtgtgactccagatgatgttcgctttgtagcaacctctgcaaccattgccggaagcgatgccgaaaagcaattaaaaaaattcctctctgaattatccggtataccgcaagagcgcattgacgtactggacggaagccgggttattccggaactggaaccatgcaaacacgtttttattccgttagaagaaattgagcaaatccctgatacagacatgaaaggcgtaagcccagagcgctttgatgcacttacgcattcacctgaagcgtattacttgcgcgacatgctagttactcaaccgaatccaatgaagttggatgatatgacgcagcggttgaactcgctaacaaaacagcattatagccagcaggatgtgttgcgctggattgacgtctgctctggcacacaacccaatactaaggatcccgcatttcttaaggtcagggcgcacatattccaacgcaatacccagggggtgtgggcctgtgttgataaagaatgcagattaaagcacggtaccccgctggaaaagggttggccttttggctatgtgtatgtgaacaaacgccaaaattgcgattgtggaagcccggtttacgagctggcattctgtaatgaatgtaatgagccacatcttctggcgcgggacaaaaagggaaaacttgtccaatgggaaaataaaggcggtgatgagttctctttgcaagatgatgtgcatattgaacatgatgccgcagaagaaaaagttgataaagagagtcgttttcagcccccactcattatcgccgcagagaagaccagcgcggcgggttatacccaacagcgtctggaccgtcagacgcgtcgtattggtgttattaacaatgacagcatcccgctaattattaacgacattgaacaagtatgtagtgccagtagctgtggctacagaggcacgagcggaaaacaaccgttccgccgtgccttattaggtgggccattttacgtcaccaatattgtgccaaccgttctggaatattgtcaggattttattagtgaagaaggaaaagagggcgtcggacctgattcgttaccaggtcgaggccgtcgacttattacctttaccgacagccggcaaggaacggcccgaatggcggtgcgcatgcagcaagaagctgagcgcagccgcttacgcggtagtgtggtcgaaatcctgagctggcgtcaacgaacacagacttctgcaacaccgaatgccaatgccgatctggaaaagttagcgacgagggcaaaacaggcccgccatgaggcgaaagaatatagaagctggggaatgccggaacaagcaaaactggctgaagcgcaagccgaacagcttgaacaggctattcaggccgcgaccggtggcaaagctgcgactattctggtttcgcggacctggattgaaatggttaatgaacttaaagaaaaagccgatattcgcggccctattctgcaatataaccactatctgaagcctgaaattttcaatgagaatggcgggccgctaaagctttctgaaatgttgttattccgggagtttatgcgccggcccaaacgaactaacagcctggaaacgcagggattagttcaggttggttatcaggggctggagaagagccataagatgccggtgcattggcaagagaaagggctgacgctggatgactggaaggattttcttaaggttacgctggatctgtacgtacgtgaaagcaacttcacacaactggacgatgagttgaaaaactggattggtagccgtttttcatcgaaattcgtccgtaacccggacacaaaagatcccgaagataatcagaacagacgctggccacaaattcgtaatggcaatatatcccatcgtttagtgaagatattaatgcttggcgcaggattcaaaaccgtaaatacggcgacgatggatattatcaatacgtggctgaaagaagcgtggacccaacttaccggcccacttgcagtgctgaaacctgatggtaaccgtttctatctaccaaaagagcacatgactttttctttaatcacagatgcctggatttgtccggtaaccaataagattctggatacggcctttaaaggcttaaccccttatctgcccacccacatttcgtttgaacaccttaccaagacacaatatgacgcttttgtcgcgcaaaaggtcaccatgccggaaatctggaagctggatcgttcgcaagaagactacgctccgggtctggcgaaggtacgtgactgggttagtaaagagccactaatcgcacaattacgttcggaaaacgtctggacggatattaacgatcgtgtcgtggaaggcggattttactaccgcacagccgagcactctgctcagcaatcgtcagaacgtttgcaaagctacgaaaagatgttcaaaaacggacagcttaatgttctcaactgttccaccaccatggaaatgggggttgatatcggtggcattaccgccgtggtgatgaacaacgtaccgccacatccggcaaactatttacagcgtgccgggcgagccgggcgtagtcaggaatcacgtgcgatttcttatactctgtgcaaaggaaacccgcacgaccagcaggttttttccaacccactctggccgtttgagaccatgatccccgcgccgatggtggcaatgaattccgcccggttggtgcaacgccacgtcaatgcgttattactgtccgactttttatgtcacgtcattggcgaaacagataaagaaaaaaccagtcttgatagcctctggtttttcggtgaagacgacgggcaatcaaaatgtgaacactttaaagtctggctcgagcgtccggttcttgatatcgacgcggcgctggaacggctggtgaaaggtacagcattacatggcgccagacccgacctgttgcgggataaaacaatccatgcgattacgttcctgcaacagcgatggctttccgtctaccgcgatcttgtagcccaggaacgagaatcgcagccgcaaacgccttatcgcaagcgcatagaactggagaaaaaacgacactgtggcgagtatttgctgcgtgacctggcggccaggactttcctgccgggatacggcttcccgacagatgtggtgacgtttgataacttcactatggaagactatatccgtgaaaaatcacagaaaagccgggataaaaaagatcgcgaagataatgtgtcacgttataagggacttccctcgcgtaacctgggggttgccatccgtgaatatgcaccaggtgcagagatcatactggatggccgggtcttccgctctgctggcgtctcactgcactggcacaatattaatgccgataccaatgaagcccagcgtctggattgcgcctggcgctgtcacaaatgcgggaccataggctatgaagaggggttgagcagttccgggacgctattttgcaccaacagcgcctgtggtgaaaaaatcatcatggataatcgtcgccaggtgctgcagccagccgggtttgtaactgatgcacacgcgccggtgacgaacaatattgaaaccatgaaatttatcccggttgtccctgcctgggtatttgttaaagcagaacccgtatcgctacctaacccgataatggggtatatggcatctggcgctgatgggcatgttttccagcaaagccttggagaaggtgggcatggttacgcactttgtctgagctgcggtcgcgcagagtcgatgttgaacgcaaacgatgcgccgaaaagtatggaagcccactacccgccgcgtccgggaaaagcagatcgcgacagccagaatcaacgtctaatttgccccggctcgacggcgctcatgaagaacgtcacgctgggggcattggcacgaacggatgtctttgaaatggttctacgcaagccgcaaaacggtgaatatctcccggatagcacggaagaagggcggattgttgccatgactctggcggtagcactacgtcaggcgctggccggggttttgggtatctccgcggcagaactgggctacgccgtgcgtccggtcagactggaagatggacaatcagtattagccgttcaactctacgatgtgattagcggtggtgcaggttttgcatccagtgcgccaatgcacattgaggccattctgttgggaatggtgaagcagttgggttgccaccactgcgatacggcatgcagtgaatgcctcctcgactcccagactcgccacgatcacgatttgctggatcgtaaagcagcacaggcatggcttggtgatgacttctcgtactacatcggtttgccggatgatgaaacattctcgctaccggatgcccgatattgcccgggagccattggcgatacccttcgtcgggcgattaacgagggtgctgaaaaactcacactgtggatgaatgggccactcaatgagtgggatctttatgcccgtcaattccgggcggctattcagaactaccggattaaagacaatgttgcggtcgaccttgtcattcctgctggcgtcgatgatccggagctgttgcatgagctttcgcagtttactgctttgggcgtgcgtttgtgtcatagcgaacaggctctggaattgccgattgttgcgcaagtcgcctttgccgatcgcgtaatgacgctggcttcacgcagccagcaggcaactatcccagggccaggctggcacctgaatgacgaactggtcgttcgcagcctcggctataacacggtaaaactgaacgagtttgttttgccggggaaagcagcgaacgcggttgagcgtgtcaaagacatagagattcataaacagttaaatggtccactttcgcagttcggacaacgcttctgggatttgctgtgtaacaaccatgaagaagcacagtcactgatgaaaaaccagcgaatcacaagcgttcactataccgatcgctatctgcaaaacccggttgcgctggcactgctgggggcgatactgaaaccgctaaaaacaaagctgaccgatgacgcggagcttgagcttgatactctgtttaagcccaaagatcgttcaggaaatcgcccctctcatgactggatgagcgaagcggattttcaggatttcgccgaccagtggtttactgcggcaatgggcagagcggtagaactgacggtgttcgattcgccacgtgatattccacatcatcgtaagctgacggtgacctttgaagatagtcagatgttgaagattcgcttcgaccagggaatgggatactggcgtatcgacttcccgtatgcatggcgtaactttgactttactgatgatgtgacttatcagctagtaaaactggcgcaagcctgccaggagggcaaagtccttaatagcgaggaaagctgggcaacggatgtgctggtagaggtgatgccgtcttaa

SEQ ID NO: 227802 - DNA, 558 bp, Klebsiella pneumoniae; identical to SEQ ID NO: 25303

SEQ ID NO: 227803 - DNA, 252 bp, Klebsiella pneumoniae; identical to SEQ ID NO: 30842

SEQ ID NO: 227804 - DNA, 861 bp, Klebsiella pneumoniae; identical to SEQ ID NO: 25304

SEQ ID NO: 227805 - DNA, 411 bp, Klebsiella pneumoniae
atgaacccattcaaaggccggcattttcagcgtgacatcattctgtgggccgtacgctggtactgcaaatacggcatcagttaccgtgagctgcaggagatgctggctgaacgcggagtgaatgtcgatcactccacgatttaccgctgggttcagcgttatgcgcctgaaatggaaaaacggctgcgctggtactggcgtaacccttccgatctttgcccgtggcacatggatgaaacctacgtgaaggtcaatggccgctgggcgtatctgtaccgggccgtcgacagccggggccgcactgtcgatttttatctctcctcccgtcgtaacagcaaagctgcataccggtttctgggtaaaatcctcaacaaggggtctgacgctcagtggaacgaaaactcacgttaa

SEQ ID NO: 227806 - DNA, 2853 bp, Klebsiella pneumoniae
ttgagtcaatcagaatgcatttcttgggtaaaatgtacttcctggctaagtaactttcttaatcgtagaggattgagacaacctgatagccgtcccctatatgaatatcatgcgaccaatgatgaatacaataatctaacacaactacttcgtgcagttggtcaagtacagagttatatcgatgataaaggttacgctgcctgttttgtccttttttgctctgaatggtatcgcagagattatgagcgccattgtggttggatgtgggaccctatatatagagcattgggagtatcattaacgtcgactgaattaaggattattatccctaaagggatggaaggttactggaaccgcccaatccgattttacgaatcggaacgacgtaattttctcggaacattgttcagtgaggggggattaccattccgcttactgaaagaatcggatagccattttcagaatgtattctcccggattctcaatcaatatgggcaggcacaactggcaggattttccatactttctctagtaagaactgtcatagaaaaatcagccctgccaactgtttttagcgaagacacttctgtagaactcatcagccatatagcggaaaaactcagctcgctggttctaatgtacaacctgagcaatcataccgaacccgtgaagcagcttgataaagtgcatccaaaatggcgtgatgagttccctatgcctttggatgatgaaacaggtactcgctttcttaatgggttgctatgtactgcctccgtagaggctaaatcccacttacaaaaaaataagggttccggttgtcaattctattggtcggaaaaccatcccaatcaaatccaggcgataatttcgctgcctgatgaactcaccttcccaatcatcagcactccctcaacgacgcgatttgaacttgccatttatgaagatggtgaagaagtcacctgtctcggccccgcctatgcatccctggagaacgcccatgccaaagttcgcctgcgtaaaagtgagtcgagatttgtcagacgccagccagctgcgagcttaacgattgttgcacgaactggaggaatgattgttggcaccataaaacttgaagatagtgaaatcgccgttggcgaggtaccacttacttttgttgatgatgaggaacgctggttattgcaagggcaagcttcttgtactgtacgtaatagcaatgttcttattgccttacctcaagaaaaaaccactatttcagggtgtgaaggctctccaggtacagcgtcgttattaggactcagaacactgtccgtaaaaggacgccaagatataaccatttccggagatgaaacatacaggatccgcaccgggagggaacaatctaatcagagcggatttgattttgatggaaaacatgttacctggaattgccatcctgatgaaacattccttggtgtacctaaagttacggcgaaaaacctgaatgctgaagatatacaattcaaacgttacctgagtggcatatcgttagatgaatgtcaggtacaagagatgatgggtacgcaatatgtttctgtcagaaatactcacaatgaaactctactgcgtcgaaaaattgggatcttgccggcagattttaacattgaaataaagggtggtgagctagccaatgaaggttccattgttatctcaacgcaacatccctgcatgtctgtcttaaaagataaaacattagaggttgctcgcaaacgctcagcaggacaaacagaaatattacttaaagcagaaggaatacctcctgcgtttgtctctttgcagatttacccaaatttgggtgcagccccagtagagatgactctacctttccctgcaaaaggttgcctggcccttgatgcaaatggatgcactctggataaaaatattactctgcatgatttgctgggttcgagagcctttttatttggtaaaaatggcgatccgacacgtttttcactggaattacatttacgttccaaaagtgggttacaggcatggcatgaatggtgttataccgcgggggaacaccccgtcgaactcaatttatacagcctgagagagcatattgaaaacttactgtctcttgagacaggaattgaccaggttgttgagatgcaaatcaaaggcgcaggtgctgtaatgagctggcagattcgccgctataaatacagtttacgctatgattatgaaagagaacttctcgtcagccagtcaacccattatcgtaccgagcaaatgtcttcacctgtcatcatgttattgagtgagccggagagaaaaatcaccccattatcatcaagaatgagcgaaggtgtaccgacaggtgaatatgaactgagttcggttattaacaaaaatgggccgtggttagtcgtccccaaacagggtgaggaaatggcgtttcgcccctgcttcattcgtggggaaccgtcgttacctgtggatgaaagtagtattcgttcattgcagaaagcgacccagctttttaatccccagtctgaagttaataccattacactggtacttgaacagatggctaacgatcccgctcattccggctggcaatttatgcgttgcctgtacgaccaatttggttatctgccgctggcaacctttgaagtttggcgtgcgctagtacagcatccacgagcactggcgatgtcgctatttaaatttgagatgtcagctgagtatctgagccgcattgaaaatgagttccctattttatgggagttcttccccatcttcgaaatcaaaactgcagccgatcgatttaaattgttcctgagccaaggtgatgctgccaacttactgatttag

SEQ ID NO: 227807 - DNA, 1329 bp, Klebsiella pneumoniae
atgactgatcgcattatcgcactgtgcattttatgcctcgtattcgggctgccgttaggtgtcgcagcggtatttaccggcgagcttatcctcgactttgtctttttctggccgctgtttatgtcagtgttgtggatcaccgggggtctctacttctggtttcagctggaacgtcactggccgtggggggaggataccccgccgccgacgctgccgggcaatccactgatctcgatcctgatcccctgctttaacgaggagaaaaacgcccgggaaaccatcagcgcagcgctggcccagcgttacgccaatcttgaagtgatcgcgattaacgacggctcttcggacaacaccgcccaggtgctccagcagctggcgcaggaggagccgaggctgcgggtgatccatctggccgccaatcagggaaaagcggtggcgctcaaagcgggcgccgccgccgcccgcggcgatctgctggtctgcatcgatggcgacgccctgctggaccgggataccgcggcctggctggtcgcgccgttgatccattatccgcacgtcggggcggtcaccggcaatccgcggatccgcacccgatccacgctgatcggccgcattcaggttggggagttctcgtcgatcattgggcttatcaaacggacgcagcggatctatggccgggtctttaccgtctccggcgtaatcgccgccttccggcgccaggcgctggcggacgtcggctactggagcccggatatgatcactgaagatattgatatcagttggaagcttcagctccgccactgggacatctttttcgagccgcgagcgctgtgctggatcctgatgccggagaccctcaaagggttatggaagcagcgtctgcgctgggcccagggcggcgccgaagtctttctggtcaatctgcgccgcctgtttcactggcagcatcaccggatgtggccgctgtttctggagtatgcctgctccacgctgtgggcctttgcctacgcgatcaccattctgctgtttatcctcagccgcctgatgccgctgcctgacaatctggcggtgcatagcctgtttccaccggaattcaccggcatgctgctcggcctgatgtgcctgctgcagttcgtcgccagcctgtatatcgagcggcgctatgagaaaaaggtcgccaaatcgctgttctgggtgatctggttcccgatggtctactggatgatcggcctgctgaccacgctggtcgcttttccgaaagtgatggtgaaacgtcaacgttcccgcgcgcgctgggtgagtccggaccggggaaaaggaagcctgtga

SEQ ID NO: 227808 - DNA, 342 bp, Klebsiella pneumoniae
ttgcacagccactatctgaccgcgctctcctgcctgcaggggctcgatccgcacaactgtatccgcccctttaccccctatgtggtgatgcgcgtcggcgacgtcccggtggttccctactaccggccgggcgatgaccgtattgcccaggcgctggccgggctggcgccccgctataacgcctttttactggccaaccacggaccggtggttactggctcatcgcttcgcgaagccaccaacaataccgaggaactggaagagaccgcacggctgatatttaccctcggcaaccgcgagatccgctacctgaccgctgacgaagtgaaagaactgagataa

SEQ ID NO: 227809 - DNA, 480 bp, Klebsiella pneumoniae
atgactacaagtgacgtcatcgctttaggagcgcttgcagtatcaatctacaccattatatcatccgagcttaaatcaagaaaaagcgatagagaacaaaaggttattaaagatgagcaagatagattacgtaagttgcttctggaaaaagaaacaaagtcagctatcaatgaaatgaaggctgagcttggtgctcgcttggtaaaaatagccagaaacaattacaggctaaaaatatacaatagaggcaaagtcgaagctaggaatatagaaattcactttcctgataatgacggtgatgaataccttgtaatatcggatgtagaagacaagttcccatatgagatactgcatccgcaacacggaattgagatcatcgcgggactaagtttcggtagcaaaactaaatatcgaataaaactcatatgggatgatgattataagaggagaaatgaagaggagtttttcatttcaatatga

SEQ ID NO: 227810 - DNA, 207 bp, Klebsiella pneumoniae
atggaacatgccgaagattcggagatcgtcaaatgcataggatgcggaaaaatactcactaacgatgagttaatccaagaaaatggtgtaagtattgatgcgcatgttaatgaagtaaaagaagaattgacgaaggatatacaaaagcagtttaacgacatactgaagaaagcttttaagggaagtaaaaacataaggatcaaataa

SEQ ID NO: 227811 - DNA, 1314 bp, Klebsiella pneumoniae
atgactatatctgaaatgttttcagggtttatatcaaatttatctatcaataatgcagaaacaatcagctctcgctatggtgagttaaccactgctttaaacaaacagttcagagataccgaatctaatacagcaaatactttacaagtgggttcatttgggagaaaaacgggaatcagaggtatttcagatctagatatgctatatattatgcctaaatcaaaatgggataattacaaagacggtaaacaattagaactacttcaagatgtcaaatcagcgatattaaaaaggtatccgacgacgaaagttcgtgtggacagacttgtcgttactgtaacttataccaatttccatgttgaagttcagcctgtttttgaacaagaggattgtagttataaatatcctgacacgaaaaacggtggcagttggaaaataacgaagcccagagctgaaatgacagctataaataaccttgacgcaaacaaaaatagcaacctccgtcggctatgtaaaatgataagggcatggcgtaacaaacatggcttagctatgggagggcttctgattgatactctggtatacaattttctaaactcaacaactgagtatgatgataagagctatcactattatgattggttaagtagagattttttcaagtatattcatgaacttgaagaacagactgagtattcagcccctggcagtcgtcaacgagtgaaagttaagaaaaaatttcaaaagaaagctaaaaaagcataccatctgtgtcttgaagcaattgatgctagcggtcaatcgaatgaaaatgataaatggaaaaaggtctatggtcgcccgttcccgaaagctgaaactgtatcaaaggcatccctttcgatccatacccacgcaacatggaaaaacacagaagaatttatcgaagataaattccctgtggatattaaagaaaacataaaaattgattgtgaagtgaaacaaaatggttttcgagagttttttctgcgtgatatgatctcaagacatattcctctacgaaataaaaaggatttaaggtttgaggtgaaagagatttcagttatacaaccttatgatatatactggaaagtattgaatagaggtgaagtggcaaagagaaaaaataatattcgaggacaaatagttgcagatgccgggatgagacagaaaatagagtccaccaattttcgtggggatcacattgtcgaatgctattgtgttaaagacggagttgtcgttgccaaagatagaattcatgtaccaatagtaatcgagggtaaccgtgatgaatga

SEQ ID NO: 227812 - DNA, 555 bp, Klebsiella pneumoniae
atgaatgaagaccgtttaatccttgaagggcagataagagaatgttacggacgggtcgtttactcccataaaactcatgaaaaatgtgctgacatacttatccgtaagcatgaaaacataaaattatggcaaatagtcgtatcagcattagttacaggtggaatagtttcaactttctttgacaagggcaacgttagcgctattatcagtgttgtcctctcaaccatccttttgattttaaatacatatacaaaaaattatgatttaggagaactagctcaaaagcatcggcaagctggctgtgatctatggattataagagaagaatatctttcattgttgactgatatacgtattggggatatatcccttgataaaataagagaaaaaagagataaacttacaaaagaattacaggctgtatacgcaggttctccgagcacaaattacaaagcttatatagccgcacaaaaggctctaaaggaactggaggatatgactttttcagatagtgaaattgatgcctttttaccaaaagaattaaagcggtcttga

SEQ ID NO: 227813 - DNA, 1218 bp, Klebsiella pneumoniae
atgattggtggtattacagatttttatagatcctggcgcggggtgaaaatttctacggaattgaagattataattcaaaattggacattaagtattgtatttacgtcaggtattttatcatttctagcaggtaatgatttagaaatagagtttttcttttgttggtatattattgtaagccttttccttattgtcagtcgtttttccattcgggcactaatgaatgttattaggaaattaggctataacacgcgtattgtagctctagcgggaaatatacctgttggtattaatctgatgaaaagttttgccgaggaaccatggcttggattaaaagtaaaaggtatttactgtgattgccccccaacgaactcaataggtctaccttatagtgggaaatatgaggatttaatatgcgaagcccgtaaaggagagattgacaggatatatatagcaatggatatgcaggacgataaaaaattaaagaaattagtaaaaggattggctgataccacatgttctgtattgctaattcctgatatcttcacatttaacatccttcaatcacgtactgaagaagttaatggtgtccctgttgtaccgttattcgacactcccctaaacggcataaacagtgttttgaaaagactggaagatattgtcctttctttgataattttgatattaatatcccctgtattgatagtcattgcatgcatagtaaaatattcctccaaaggacctattttattccgacaaacgcggtatgggatggacggaaaatctatacaagtatggaaattcaggactatggttgtacaagagaacggcaatgttgttacgcaggcggtacgtggagatgtgcgtgttactaatgttgggcggtttttaagaagaacatcacttgatgagttaccgcagttttttaatgttttatttggtagcatgtctattgttgggccgagaccccacgcggtggctcataatgagcaatatagaacattaattgaagggtatatgcttaggcataaagttaaaccaggaattacaggcttagcacaaattaaaggatggaggggggaaactgatacacttgaaaaaatgcaaaaacgagtggagtatgatcttgaatacattcgtgagtggagtttatggttggatttaaaaattatatttttgacggtgtttaaagggttcgtcaataaatcagcatattaa

SEQ ID NO: 227814 - DNA, 993 bp, Klebsiella pneumoniae
atgaaaaataatatttacattgataccagatggaaaaatgctggaggtattggtacattttttgagggagttaacaatataaatcagtatacacctttaccattcagcggtagccccgcgtcaccaatagatacattcaggatggcgttccagttgaggaacataaaaaaaggagtggtttttttgccgggttatatttctccttttaaaacaagacttccatacgctgtaacagttcatgatttaaatcacttagatcgaccagaaaacagtagccctttaaaaatagcttattataacacctttctcaaaagaggctgtttgcatgcggaatatgtatttactgtttccgaattctctcgtaaaagaattattgaatgggcaggcatcgagccaagtaaagtcgtgaatgtcggaaatggtgtatcaccaaagttccaaccagaaggtgagagaataaatttaggatatgagtatatattatgcgtaagtaatagaaaaggacataaaaacgaatttggtactctagaggcctttaaacatgcagatattgacgaaagtattaagttagtctttacaggaaaagctaactctgaaatcttagaaaaaataaatttattaaaacttagtaatagagtggtcttcactggttttattcctgaaactgaacttccaaaattataccgatctgcaaaggctttaatctttgtgtcattttatgaagggttcggcttgcctgtaattgaggcgatggctagcggtgtaccggtggtcacttcaaatacatcttctctaggtgagatttctggtgatgctgctctattagctaatccaaatgatacaatggatatttcaaaaaaactcactcaagtcataaatgattttaatgtcgctaaatcattaatggcaaaaggattagttcattcgaaaaaatatacatggcacaaaacagcaaaacttattgatgattatcttaacaagatacatatataa

SEQ ID NO: 227815 - DNA, 636 bp, Klebsiella pneumoniae
atgagtcaaactatgcgtgaaagttgggtcgactatgctaagggaataggtatcctactggttgtctttggacatgttaatagaggattgcaagcagctggaattattatgccatcaaaactttatcatttggttgatagtataatatattctttccacatgcctttgtttttttttctgtctggcttgttttttattaagtcgattgagaagaaaggaaagttgcttcttttcattgataaatttaaaacgattgcttatccttatttagtatggtcactacttcaaggcacgattgaggttttattgtcaaggtttacaaactcaaagacctcgtttaccgatctgttgatgctattttcacatccgcgtgcgcaattttggtttttatatgctcttttgatgatatttgtactatcaatcataatatactcaaaacgattttttgaacgcggcataatagttttgttcgttattttttcttgcgtgtatatatatagtgataaaattggaactgtctataatatcaattatatcaatcaatatatggttttttttgttttaggggtattttttaataaatttaagttagatgattttttttctaaggaaggtgcgaacaagtccctgatatga

SEQ ID NO: 227816 - DNA, 183 bp, Klebsiella pneumoniae
atgattatttatttattacatatcttagttgctagtggttcaagagtgattttaatgaaagttcttcatgttaatgattggattgcacatctgacgattggtttgcttgcgggtataattattcccattctcatttatcaatacattaaaaatactaagcttaagtacttgttttctctttaa

SEQ ID NO: 227817 - DNA, 858 bp, Klebsiella pneumoniae; identical to SEQ ID NO: 61247

SEQ ID NO: 227818 - DNA, 975 bp, Klebsiella pneumoniae
atggcggcctacgcgatcatgcgatgcaagaagctggcgacgatgggcagcgtggcggcggcgttgcagcactgctaccgcgagcgcgaaacgcccaacgctgacgccgaacgcacgccggacaacgagcaccgggcggccacctcaaccgatgcggcgatggggcggctgcgcgagttgctgccggagaagcggcgcaaggacgcggtgctggcggtcgaatacgtgatgacggccagcccggaatggtgggccaaggccacgccccagcagcaggccgcgttcttcgaccaggcgcagggctggctggcggccaaatacggcgcggatcgcatcgtgacggccagcatccaccgcgacgaggccaccccgcacctgtcggccttcgtcgtgccgctgacgcaggacgggcggctgtcggccaaggagttcatcggtggccgcgacaagatgcgggccgaccagaccagctttgccgaggcggtgagggatctcgggctggaacgcggcatcgagggcagccgggccacccatcagcgcgtccagagctactacggcgccatcgagcgccagccggggcacgccaccatcacgccgcaggccatcgagccgcgggtgctgcgcaaggggattttctcgaaggacgtggagacgccggaggccgtggccgcccgcgtgaccgctgccgtcagggaagggtatggcccgaccgtcgcagcggccgcaggagcgcgtcaggagcgcgagaaggcccggcaggcacaggagacagcccggagcctgcgtgaccgcctgaagcccgttctggacgctctggggccgcttaatcgcgatatgcaggccaaggcggcccagatcatcaaggccgtgggcgagaagctgctcgccgaacagcgcgaggcgacacgccagcggcaggcccaacggcttcgcagtcgcggccgggatcgcgacgacggcgggctgtctcgttga

SEQ ID NO: 227819 - DNA, 321 bp, Klebsiella pneumoniae
atgaaaaaaacgttcgctcttgctgccatgatggcggcaatcgctccgaatcttgcttcagcagcggatgagatgatccagaccaagtacgcttgcgaaggcggaaagacgttggatgtcgtgtacgtcggagactatgccgtgatgctgcaaatggatgagcttgtcccactgaaacgcgccaagagcgcatcaggagtgcgctacatctccgctagcaaaaactacacctacgaactgtggggtaagggcaacgacatgaacctttcgacccacgatggcgggaaggagcaaaccgtcctcagtagctgcaagccataa

SEQ ID NO: 227820 - DNA, 552 bp, Klebsiella pneumoniae
atgcagcagatcacggtggcgaccgacgcccagcgtcgtatccgccagcgagagctggccatgctggacgagaaagaggctcaggagcgcgaagaggcgcggaagaacaaggggttcacgcaggtgtatcccttgggttggaagcgcatcattgagcttgctaaaggcaatgctggggccttcggcctgtattcattctttgctgaaaatatcgacccaacctgcggcgcggtggtctgcgatcagcagtttttggcagacaagatgaacgtcaacaggcggacaatcagccgttggttgtcttacctggaagaaaatcgcgcgcttgtccgcatccctgttgctggcaaggtttgcgcctatgcgctggatcctcacgaggtctggaagggctacgacaacgccaaggattacgcagctttcgtgaccaaaaccttggtcaacaaggatggcgatatccgccgccggatcatgtcgatgttcagcggcgagaagcagaacgacgaccgcgacccgaacaccattgacatgtttgaaagcactccccaatga

SEQ ID NO: 227821 - DNA, 807 bp, Klebsiella pneumoniae
  misc_feature (761)..(770): n is a, c, g, or t
atgaataaaaaaattatctttctcataatagcgttaactgttacttttagtaataaaggcttgtcctttgaacgtggtgtgtgtgctcattttgatagttattcagaagatccggtagtttacttaaaggcattaaaacaaatcggtgcaagttcaataagagttgattatcaatggaataaaattgaacgaaccaaaggtaagtatgttgtttcgaggcctttagagaaaacggatgctgctattaaccaatcatcgttatacggtctaaataatctccttattttagattatggtaattctctatacgataatggaggatatccaacgaccagagatggtatcaatgcatttgctaattatacaaaatgggttgtaaaaaaaaataaaggtaagattaaatattatgaagtatggaatgaatggaagaatggcactggcatgccgccagcaatgaaaaacacaggcactgcaaaaggatattttgaaattgtaaaaagagttagtcgtatcatcaaagaaaatgatcccaatgctattattctggctggatcatttaatcctcttaccgacagtgataacgcatggttctatgaattgttagaactaggaatacttgattatattgatggtatatcaatccatccgtattcttacaaaaatgaaaacattcaattgaggactgctgcagcaaacttaaatgcaattgatcaattttatgataaattaacaaacattgctaatagaaaaactgctatctnnnnnnnnnnctatctatattacagaaattggaataccaaattatga

SEQ ID NO: 227822 - DNA, 687 bp, Klebsiella pneumoniae
atgctaaatgaatttataaaacaggctattgaagaccaccactttataaaaattgaaagtacgtcagataatattcatttttttaaaaaggagaaggatgcattacgtcgatatataataacctacagaacagataaacttgaagatgcgagttctattaatgagataattattaataacactccaactgaacttttagaagcaccagcctttgcaaaaaacactgatcttataatagtatttcaactcgacaagctttcaaattacaagcaatatgaaaaaagtatatttgatatagaagaaaatgcttatcattttaaaaaatatgtgttgtattattcgactgaagagaatcaattaatttccgggaagaacttcaataatcttaaagcagttctctcagatcatgaagaattctccacatataaagcagatccatcccgacctagcctgtataatctggcagctagaattttcattaaactaccttttttagagatgcctgatatagaaaaggatattgttccaattgatctccaaatcaatacactggtagattcattaaatctatctgagccatataataagatcagcacagcaaataaacaaacagatataaatttagaaatgctaattgaggaattaataaatgaagaactggaagctatcaaagctgagaataaataa

SEQ ID NO: 227823 - DNA, 192 bp, Klebsiella pneumoniae
atgatcgtcagactggataaccggctgtttgagattctcgatgagatgggtgcgcatgtggatcgggaaatgttcatggcggcctatgcgcagcggaaggccgaaaaagaaaatgatccccggcatatccgtcaacggaaactgaccaggttggctcatgatttgatgtcagaatcggaccctgaattgtga

SEQ ID NO: 227824 - DNA, 942 bp, Klebsiella pneumoniae; identical to SEQ ID NO: 223422

SEQ ID NO: 227825 - DNA, 1179 bp, Klebsiella pneumoniae
  misc_feature (1110)..(1142): n is a, c, g, or t
atgttagaaaacaatataagtgttggaatagttgctgattggttagttacgtatgcaggggctgaacgtgttgtaaaagagatgatagaattgttccctgattctgatgtctattctattgtggacttcttatctgatgaagctagggctaattttaatcacaagaagtccacaacaacctttatacagcatttaccgaaagcgaaacagaaataccaaacttatctaccactgatgccattagcaatagaacagatcgatgtatcaaaacatgatgtcgttttgtcaagtagccatgccgtagcaaagggtgttttgactggaccagatcaattacatatcagttatgtgcattcacctatccgatacgcatgggacttacagcatcagtatctaaaagaagccaaactagataaagggctcaaaggtttactagctaagtatttacttcataagattagaatgtgggatgtgagaacttcaaatggagttgatcattttattgcgaactcaaaatttatctcaaggcgtgtaaaaaaagtctatggtagagatgcggatgttatttatcctcctgtcgaagtagagcggtttgattttaatgacaacaaagaggatttttatttaacggcttcacgcatggtgccttataaaagaatggatctcatagttgaagctttcgctaacatgccggataaaagattagtggtcattggtgatggcagtgaaatgcccaaggtaaagaaaaaagcagcatctaatattgaaattttaggctatcaacctgatcaggttcttcatgactatatgaggagagcaaaagcttttgtttttgcagcagaagaagattttgggattacaccagttgaagcacaagcgtgtggaacacctgttattgcatatggcaaaggaggtgtgcttgaaacggtgagaccctatggaataagcaacccaacagggctcttctttgaaaggcaatctatatcttccttagttgagacagttaaaaaatttgataaaatccagaatttaatattaccttcagattgtaaagaaaattcacaatctttttcttccgaccgctttaaaagagaactcaatacatatatnnnnnnnnnnnnnnnnnnnnnnnnnnnnnnnnncatatatagagcagaaatggaaatttttttcagataa

SEQ ID NO: 227826 - DNA, 246 bp, Klebsiella pneumoniae
atgaaaaatgatctccgagttagatgtgtacagtctctatttatcttagttgctacgattttattcatgatcgcattatctgtatgcggaaagctttttttttcgttgttactgtggctgcttggcgatggttttaatgcaacttggcaggatgttttgcatggagcgaaattaggactttatggtggaagcattggaggcattggactcgcattattccgcctttttaaagtaaagggattttaa

SEQ ID NO: 227827 - DNA, 660 bp, Klebsiella pneumoniae
atgggtgggaacgaatggagccagggtgagaaagccagagagcatggtaaggatgtgctgtcgtgtgcagacaatccttcaggagaagcctgtcagcgaggcctggcggaaaacaaagcctatgcgggagcactggctacaggaggcgtggcgttattacccggtaccgcgcaggcgatgtgggggttgggcgcaggggtaaacgcaggtgctcagtatgctgaagatggcaaggtgaatccggttaactctgctgtggctggctggataaacgttgcaagcatagggaatggcttatggggaacagtgggctggaatgcagccggtggcgcgctaaccagtcagatcaacggtgacaatcctttaacgggagcaattactaatggtctgggttctgctggcggctactggggaggcaaactaatctcttcaggcataaatgcggctggtaaatggctaaccggcggctgggatcctaagtttaatcctgacctgctgaaatataccgaaattaaaggtcaactggggatctctaaggagatgttgccgggtaagattccaggcaacatgggtaatattggagcttcagtaatatcagaaggaggcggtaaaggagctgaacaggtaataaaaaaaataggagataaaaatgaaaaatga

SEQ ID NO: 227828 - DNA, 924 bp, Klebsiella pneumoniae
gtggcaaagcaaaagttcaaaatcaccaactggcccacctacaataaagccctcatcaaccgtggctccataactttctggctggatgatgcagctattcaggcctggtatgagtcggcaacgccttcatcacgaggaagacctcagcgctattctgatctcgccatcaccaccgttctggtcattaaacgcgtgttcaggttgaccctgcgggctgcacagggttttattgattccatttttatactgatgaatgttccgttgcgctgcccggattacaccagtgtcagcaagcgcgcaaagtcggttaatgtcagtttcaaaacgcccacccggggtgaaatcgcacacctggtaattgattccaccgggctgaaggtcttcggtgaaggcgagtggaaagtcaaaaagcatggccaggaacgccgccgtatctggcgtaagctgcatctggcagttgacagtaaaacacatgaaatcatctgcgctgacctgtcgctgaacaacgttacggactcagaggccttccccgggttaatccggcaaacccaccggaaaatcaggtcagccgccgccgatggcgcttacgatacccggctatgtcacgatgaactgcggcgtaagaaaatcagcgcgcttatccctccccgaaaaggtgcaggttactggcccggtgaatatgcagaccgtaaccgtgcagtggctaatcagcgaatgaccgggagtaatgcgcggtggaaatggacaacagattacaaccgtcgctcgatagcggaaacggcgatgtaccgggtaaaacagctgttcgggggttcactgacgctgcgtgactacgatggtcaggttgcggaggctatggccctggtacgagcgctgaacaaaatgacgaaagcaggtatgcctgaaagcgtgcgtattgcctga

SEQ ID NO: 227829 - DNA, 1107 bp, Klebsiella pneumoniae
ttgaaggcaaacgcgtcaatgtctaataattatgctggccttctagctgacaaactcgatgagaggggagaagcccgatacgcgaaaatgattcgtgataaattgaataaaatgcccactgctctggttagcgctcaaaaaggtgatggtggcttttcatttaatgatttaccagtggacaatgatagcagattaaatactgttgacgtcagcattccaacattacatgaagacaagattattttgtcagagagtgctactgaggtaatcgatgatttcatagcaaatattgataattatgataaattatataagttcaatgcggcacttccaaatagaataatattatttggaaaacccggaacaggtaagacaagacttgccagacacatcgcagcccgtttatcgttacgaatgttaactgtgcgttgcgatacattagttagcagccttctagggcagacaagtaaaaatcttagaaaagtatttgaatattcctcgacagtcccttgtgtgctttttttagatgaatttgatgcgctcgcatcagcccgcgggaatgaaagggatatcggtgagttacaaaggatcgttattgcattattacagaatattgattctcttcccgaaaatgtgattgtgattgctgcgactaaccatgagaatcttttagatccagcaatttggaggcggttctcatttaagttaccgatgtatacaccagatgaaaatattttgactgaaatatggagagacaagcttggtcaattcatcagcaaagatgtagatataaattacattgcaaagaaatcattgggagtgactggctcaactgttgagcaaatttcacttgattgtaaaaggaaggcgatactttcaaataataataatgttgacgagatattactccttaaaaaaatcgcatttacaatagctcaggatcaaaatatttccttgaagagtaaagaagatgaaattagatggttgagaagttgggacgaaaaaaagttttcactgagagtattatctaaactatataacctatctgttcgcgggataggaaacattgttaaggaaaataattatcatggtaaacagagtatctaa

SEQ ID NO: 227830 - DNA, 2259 bp, Klebsiella pneumoniae
atggtaaacagagtatctaaaaagagaaacccgttcttccacattccttacaacccacgagatcttactggggtagaaacgaagggtgggggtgggaagttatttgttaatgtagatgaaaattaccgagtgaagttagcaaatgagctagactcatcttttgaggcattatctgaagaatcaagggattatccagaattacttaaaactttagttttcaagattcgagatgaagctattgctaaatctcatagaccaatgacattagcaagtgatggcaatcttgaaattgctgggcatgggaaaataaatgaaatgctcgttgctgcacactctgcgagttatagaagtcttaagactgctatactgaacaggcagactaaagctataaaaaacaacctaagcgcaatcgagtcaattgagccatggacagctgaacgaaaaacatcactttcttcagatgaacttgtacgcatgaaaagtatttatgtgcgtctatttagatataatggtgatgatgctaatcaaaaaaatatagatgctttccgagaaatcttagatgaagaggggttgatgtacgatgaaataattcagccaagaaatagctttattttcaatattaaagagttaagtacaaatgatatagtttctattgataaacttctcaagtttcctggagtaaaatctgcctatccagtgccgattgtaattccagaacaaactgattatctgaatgctcaaggaaatagtgagatccttcctccacctgtaaatggtttgccgattgttgctgtatttgatactggggtcagtaacgcagcaacagctttgtcaccctggatagtgggaaatgatttatacgtattgcctcctgaaactgattatgaacacggaacaatggtttcttctttgataataaattcaaggaaaataaataacaaccacagttggcttcctgatagccaatctagaatttataatgtctgtgctttagaatctgcaggaagtgataccgccctgctaactgaaaggcttaaagcagcaattgctaaaagaccagatataaaggtttggaatttgtcactaggtggaggctcctataaaaacgaagagtttagtgactttgccatcgaattagaccatcttagcgatcaatatggtgttttatttgttgttgcatcagggaattacattccttacaattacaacccacctctatcagttcgtagatggccagtaaatggtacatatccagatttattatcctccccatcagaatcagttcggagtttaactgttggttctatagcacatttagagactcatgactcttacgttaaagtcggtgaaccaacgccatattctcgtagaggacctgggcctgtctttacaccaaaaccagatgtagttcatcttggtgggggtgtgcaccaagcatggtgctctggcaatacaagcttaaatgtcataggtccagacaatagagtatatggtggttttgggactagtttttcagctcctattatttctagtatggctgcaaatacttggcgttcactagaaggcaatcccaatatttcagtttctccaagccttgtaaaggctttgattatacatgctgcgcaacttaactcacctaaatatgacgcaacggaaagacgttattatggtgcaggaagaccacaaggtgttttggaatcattatatgatagtgatgatagcttcactttggtttttcaggcatctttaattccgaatatgaaatggaggaaatcaaattatcctattccacaatgtcttattcaggatggaaaattcaagggtgaaataattatcaccgcctcctataacccgcctttagatcctaatgctggtagtgaatatgttagagccaatgtcgaactaagctttggcgtactggatggggaaagtatgaaaggcaaagtgcctatggaaggagaaaaaggaagtagcggttatgaatcagcccaaattgaacatggtggaaaatggtcgcctgttaaaatccacagacagcgattcccgaatggtatttctggagatgtttggggtctacaggctaaagtgatgctaagggcaaatgaaccagtacttcctaatcctttagatgtgaatattattgtcaccatccgctctttagatggaaacaactccgtccactcagatggaattagagcacttgacgcgactaactggatcaaaaatcaattatccaaccagttgccaattaatgtttaa

SEQ ID NO: 227831 - DNA, 795 bp, Klebsiella pneumoniae
atgaagttaatgctcctagtattttcatcactgagagggattttagcagctaaaaaatctttagcagcttccttcctggcatccatcatggcattaccggcgacagccggtatccctgtcatcgatggtactaatgtggtgcagaccacaatcagcgcagtcaataacgttcaggctgtggctaaacagatccagcagtaccagacgcagctgcagcagtatgaaaacatgctgaaaaatacagtcgcacctgcggcatatatctgggatcaggccaattcgaccatcaacaaattattgcaggcgcaggacactcttaattactacaaaaatcaggccgggagtctcgattcatatctgaaacgttatcaggatattaactattacagatcgtcggcgtgctttaacagtaatgttgaatgtactgcggatgaaattagcgcactgcgtaaagctgaacagaacaactctgaggcacgtaaaaaggcgaacgacgccgtgtttaaggctctcgatcaacagcaggaaacactgcaaagcgatgctgataacctgacagatttgcaaactcaggcaaccggcgcgcaagggcaaatggaagctattcaggccgctaaccagcttgccagtgctcaaacaaaccagctgctgcaaatccgctcgcttctggtagctcaacaaaacgctgcagcaacactggcgctggctcaggccgataaagaggcccaacaaatagtcgctgatgaaaaagcgttagctggcgagaacacaccaagcccgaagcgaatttggtga

SEQ ID NO: 227832 - DNA, 174 bp, Klebsiella pneumoniae
atgaaagataaaattttggttatttttattctaatcattccattgattctatcctcttgtgataaaaaagatgaagattgtttatcgacgccagagaataaattgaacgaacatagctacgataaatgtgccctgcgcagtaataacaatcctagtcctaagcgagaatggtaa

SEQ ID NO: 227833 - DNA, 1395 bp, Klebsiella pneumoniae
atgagaatagtaagcaaactcacttttttgggaatgatttttttgttttctgtaaatgcttatgctggtcaattagatagtagcggattacttgatacgttattagataagtttcagcaagtagccagcacatggtcattagtaattggtgattatgcaaattggctcttctgggggctggtattaatcagtatggtttggacatttggtatgttggcgatgcaaggggaaggtttaaccagtgcacttgcagaaatagttcgtttttttgccgtgattggttttttttattatcttttaatcaacggcccagccatagcacaatctataattaactcaatgagacaacttgcagcaaatgctttaggaacaagtactggtatttcaccctccagcatagttgatatagcttttgtgatattaacaaaggtcagttcagcagcatcaatttggtctccaatgatttcgaccattatgataaccgtcgcgataatagtattagtagtaatggcgcttatcgcgataaatatgctaataatgttagtttctgcatgggtattgtgttatgcaggagttattttgcttgggtttggtggctcgaaatggacttctgatatagcaataaattacttacgcacagtattatcgattggtattcagttatttacaatgacattaatcattgggattgggcaatcatttatagatcagtatttttctattattaaaaatgatattcctgatcttaatagtcttattgttttacttctggcgtcaattattcttttagtattgacgaataaattaccgttgttgttatcaggcgttgttggaggagcgtccttacaagggatcggtggttttggagcaggtatgattactggcgctgctactactgcaatcagtggcgcaggggcaatggcaatgagcgctacagctcaagtcagtggtggtgcttccgctctaaaagcagcatttgaatctgcacaagcggcgatggccgaagaatctggttctggtgataaaggtggtttaggtggaggatttggcggcggggaagataccggttccgtagatacttctggaggacaaccatcaggcggttccggtggttcttctgcagggagcaatacaggtagcgtcagcggaggaagccaggggtttgcttcatcattctcacgagctggccgcatggcttctcacatggcgagcgggctgtctaatggagcttcggagtatcagatgatgaagggaagtgctaattctatccgaacacaacagactgttggtggggaaatagcgaatcaaatacgtaaacacacagccgatcgtcagagtaaccacgaacaggatgagtttgagggcgatagttttactggcagtaaaaaatcttga

SEQ ID NO: 227834 - DNA, 213 bp, Klebsiella pneumoniae
atggttgattataatagcttagttttggaagggctaaaaatccttttttccgacaaaaataatgaattagtaaaaaaactctatgatcccttgataaatattctgtgcattgaagactattatgttgctaccggaatttatgattcagaagatgcgtccaaacaaattgaaaagctaaagaaagcaataaatgattataggtttaattattag

SEQ ID NO: 227835 - DNA, 189 bp, Klebsiella pneumoniae
atgaattcaatatatgataagcgtactaaagctttcaagaaagcggaggcgagtttatatttatcaaacaaagatccgcgagggttaccatactatgaactaataaagagcaaggtcattaatgaagaattgacttatgaagaagctagacttgaggtatttaactattacactgaaaaatcaaaataa

SEQ ID NO: 227836 - DNA, 1398 bp, Klebsiella pneumoniae
atgcaatttttgaaagatttaatctctagtatgtatagacacattgacaccagaataaatagtccaatcttaggtacattgagtgctatatttgtaattttatactgggataaattcacattgctattttggggaactggaacaatcgactccagagtcactcaatttaaatcattcttaactgggattaccacttcagaatatttattgatagcatttctgatactagcatatttatttttattacccttagtaaattatcttactgggttaattcaaggtgagatagaacacataagatattgttctagcattaatcaaaaagtaaaaaaagagaaagaaagagcaaggctaattaactcaaaatataaggctgaacatgagagtgaaattgcagctcaagaaatcatcgaagaaatagcatttagcaatgaaagaatcgaacaacaaaaaacactaactgaagatataaaggaacgctctaaagcatcctcggtaattattaaagcgatgtacgaaaaatctcagaaaatgaaaattgaactggagacttctatcaaagaaaaacaagcaacagaaatcaaactctcacgagaggctatgagcagagagagagaaaaaatgagctatgacaaactgaaatatcaaatcgaggaaaaaaagaaaatatcacaactttcctcagccttctatttaattaataaacttgacttaatacttactgctgattcaattaaaatctcgctttcgggtttaggcgcagtaatcgctagtgtttttggatacacatcttttacaaaattactcgaagatgaaaatttcaacacagattctttagaggcgattgattatataatttactcagaaagtttaataacggatattaaatcaataatcgaagatgaaaatattgatgaagatattgacagctacactttatttgaacatttacagaatatattcgaagaggatctcaatataaaaatccttacaaaagatgaggtcagtgaaaaaatacgtgacaatcttgaggaaaatggtatgtacgacttgattcattgtgatgaagtaagtggtagcatagcagaaactaacgcttactttgactatgtagaaaacctgcaaattatagacagcgaactcactgatgaatcgtttaaagtcaagttcgagtgcatcctttcaggaaccactcatgaagacaagccttattgcggtgaagaaattgatgtctcctttacaaataaaagtaaaatcatactaggcaagtttgctataggagaagcagaaattgaagagattgggagttctgtgaaagactatcatgaagaagatgattacgaacctcaagaaatcagtagtacagttaatgaaaaaaaacacgataatgagttttga

SEQ ID NO: 227837 - DNA, 1074 bp, Klebsiella pneumoniae
atggcgactatacgcaaacgtggtaactaccaatgggaagctcagatccgtaaacgtggttttccctcccaaaccaaaacctttaacaccaaagtggaagcagaggcatgggccaaaatgatcgagtcagaaatggcgagaggtgtttggctcagccggagcgaagcggaatctacaacactgtatgaaaccctaacgcgctatgaaaaagagattgttcccggcaaaaaaggagcagtgcaagatcactccctagtgcggatactaaaaggtactcagctggcgaaaaactatatggccagcatcaggagcgctgatgtcgccaaactcagggatgaatggttgaaaatctatgctcctgcaaccgttttaaggcgtttggcgttactttctcacgtattcaacgtttcgcgtaaagaatggggcatggaaagcctgcttaaccctgtagaagccattcgcaaaccccaacccaagaacgccagaactaggcgcctggaaacgcagccagtattttcagagaaaaccggtgttacgtcaggaaaggaaatagctaacgagatcgaacatattatcgccgcaacacattccgtagtattgccagcaatcattcttctggcgttagagacagccatgcgccgtagcgagatcgcagaactacgctggcgctttatcgaccttgagaagcgagttgcacatttaccagatactaagaatgggaatgcccgcgatgtccccttatcaacgaaagcaataaaaatgctctccaatctcaaggaacacgctaaacttgggactgacaaggttttcaatatgcgtccggacgcgataactcaagcttttgaccgagctgtaaagcgagcccgagaaaggtatgtagaaactaatccacactgtgatgacactttcctaaaagatctgagatttcatgacctgcggcatgaagccacttctcgacttgcggtaatcttccccatgcatgagttgacaaaaataacgggacataaagaccccaggatgctaatgcgctattatcatccaaaggctgaagatttggcaaaaaaattagactaa

SEQ ID NO: 227838 - DNA, 351 bp, Klebsiella pneumoniae
atgaaacttaatgcgagacaggtagacacggctaaacccagagagaaagcctatcagctggcagatggtgctggtttgtatcttgaggttgttccctctggttccagatactggcgaatgaaatatcgcttcaatggaaaaaagaatcgtctggctttcggtgtctatccagcagtgtcgcttgcgcaagcaagagcactgcgtgatgacgccaagaaaaagctggctgaggggatcgatccatcttttgccaagaaagaagaaaagctggttcgcgatgtgcaactcaacaacacgtttcagtctgtcgctctggagtggatagttcgaaagcgagccgatggtcagtag

SEQ ID NO: 227839 - DNA, 1446 bp, Klebsiella pneumoniae
atgagtctgaacctggtaagtgaacaattactgtcggcaaatggcctgaatcatcaggacctgtttgccattcttggtcaactgaccgagcgccgcctcgattacggcgatctctattttcagtcgagctatcacgaatcctgggttctggaagacagcatcattaaagatgggtcgtacaatatcgaccagggcgtaggcgtgcgcgccgtcagcggcgaaaaaacgggctttgcctacgccgatcagatcagcaaactggcgctggagcagagcgcccaggcggcgcggaccattgtgcgcgacaccggcaatggcaaagtgcagaccctcggcgccgtagagcatcgtgccctgtacaccagcatcgacccgctgcagagtatgacccgggaagagaagctggatattctgcgccgggtagacaaagtcgcccgggcggcggaccagcgggtgcaggaggtttcagccagcctgagcggggtgtatgagctgatcctggtcgccgccaccgatggcactctggccgccgacgttcgtccgctggttcgtctttccgtcagcgtgctggtggaagaggatggcaagcgtgagcgcggcagcagcggcggtggcgggcgttttggttatgactatttcctcgcctcccaggagggcgacgtgcgggctgatgcctgggcgaaagaagcggtgcgcatggcgctggtcaacctctcggcggtcgccgcccctgcggggatgctgccggtggtgctcggcgccggctggcctggcgtcctgctgcatgaagcggtcggccatgggctggaaggcgatttcaaccggcgtggcacctcggtctttagcggccatatgggggaattagtcgcctctgagctgtgcaccgtagtggatgacggcaccatcgccgatcgccgtggctcggtggccattgatgacgaagggacgccggggcaatacaacgtgctgatcgaaaacggcattctgaaaggctatatgcaggataaactcaacgcgcgcctgatgggcgtcgcaccgacaggcaatggccgacgtgagtcgtatgcccatctgccgatgccgcgtatgaccaacacctatatgctggcgggccagtcgacgccacaggagattatcgaatcggtcgactacggtatctttgcgcctaacttcggcggcgggcaggtggatatcacctccggtaaattcgtcttttccacttccgaggcctatctgatcgaaaaagggaaggtcacgaaggcggtgaaaggggccacgctgattggctccggcattgagaccatgcagcagatttcgatggtgggcaacgacctgcgcctggataacggcgtcggcgtctgtggcaaagagggccagagcgtgccggtgggcgtcggccagccgaccctgaaggtcgataaccttaccgtcggcggcaccgcctga

SEQ ID NO: 227840 - DNA, 441 bp, Klebsiella pneumoniae
gtggatagagagttaagcgagcacgttatgattgagcgggtcgaaatgattgcgcgtctgacggctgagggcgcttgtcaggaaagagaccgtgaaattgcattaaatttaattgcggaaatagcaagaggcaacctaatgaaaaacaataatttttctgttgttttttccgcgccgcctgctgatgaaaaatttgcaaaggagggcaaagtgaaagtaaatatcacgttggataaagaccaaaaaataggccagccggtaattgatgcttttcaatgcgaattgaccaggcgaatacagtctgttttcccgtcaacgcgcgttactgttaaaaagggatccatgaccggtgtcgagctgatggggttcgataaagattcagaccgcgaagcgctggatagcatccttcaggaagtgtgggaagatgagagctggcgttaa

SEQ ID NO: 227841 - DNA, 729 bp, Klebsiella pneumoniae
atgattctctataaatacatgcactatgatgcggcagtaaggcttatcaccaccggttcagtgtctttttcttcttatcataatttcaatgacccttatgagctaagttgtctggctcatggccctgggaacatcaacaacatgatggagatgcgtggtcaaataaatttatggggaagaaactctgttatcctttgtttaaccagagagcaccttaatcctcttatgtgggcccattacgctgattcccacaaaggagttgtcattggcttagatgtttctgatgacaaattcactagcttagtaaaaaacataattcctgttcaatttggcagtgttatttacacaaaaacccaacctaacgccccatacttcaccgctgaattccctccgacagaaatagagcaatttaaaggattcaacactgattatttagaaaaactacaacgcaccttcctttataagtcatatcactgggcatatgaagaggaggtgagaattgttaaacataagcactgcaccgatttgattgaagtgccagaacataatatttgcacaatgaagctagccgaaaactcgattaaagaaatacacattggactgagaatggatgattggcacaatgaattcatggcattatgcaataaatatcaacccaccgccaagctattcaaatgcatgataaatggtttgagctgggacatgtactctgcttcgcttgataagtaa

SEQ ID NO: 227842 - DNA, 630 bp, Klebsiella pneumoniae
atggttactaatagtagtatagatttaactaaattatccaaggaagaactgattgaactttatgaaaaacacaaaatttcaaatatagctcaccaattatggtgtcttacgcacccagatattccagtgaatttctcttccgaatttgtaaagttgatagaaaaactggaaaagttagtcgaattgaacagccagggggaaacgtctccagacattttactggatgccctaatagattcaatctattctgattgccgtggattattttgtgagaagagtggcaactcaaaaaattatacgttacaaaactgcctaaaaatagtaaatgagaacgatgcagtaactaaaattgatgcaatcattaacagaaaggaatttagtgatgaaattgtttgtgattattctttctgggagtgggtcaaattcgtgaccgataaggcgatagttcacaaagataatttaacggaagacaaaaagaaaacaatagaatatagataccaatttttgaacaatagctcgaatgtatttgattttcaatattatatcttccaaatccataatatatatgtcaatgtcgtagaatgcttcgctgaagatttattaagcacatacaataaacccaagctctaa

SEQ ID NO: 227843 - DNA, 594 bp, Klebsiella pneumoniae
atggcgaccgggtcgtcggtgctggagcagcgagccgccgcagcgtgtgccgtcatcagcgatttatctgtcccgctgcgtgatttgtggaacccctggcgatgccccgtaaaatttctgccgtatctggcgtgggcgttttctgtcgaccgctgggaagaaacctggtcggaaacagtgaaacgccaggcggtcagtgatgctttctggatccaccaacgcaaaggcaccgttgccgccgttcgccgggtgattgaaacgctgggttacagcatgacgctccaggaatggtgggaagtagccgaccccgcagggacattccgccttgagattgacctcaatgatatcggcatcactgaaccgatgattaaagagctggagcggattatcggtgatgcaaagccggtcagtcgccatatatcacagctgacactatcggcatccgtaagagggacggcttacaccggttctgcgttggttgatggtgaggtaatcgcggtttatccgccggactataaaccggatgacggaattatttacgacggcatggcgcaatttagcggtaattattatttttcaggtgagcaaaaatga

SEQ ID NO: 227844 - DNA, 3336 bp, Klebsiella pneumoniae
atgacaaacatcattgaacaatcggtatgggaaggcagcattcacctgttatcgcgtgctgaaaaagtggaaggcggtatgacaggttccgcaaatattcaggctaaacaactggcaaaccgcacccgttatctgatggacagtatggatgtgattaaatcaggtgagtcgccgtactggtctgaagacgccgcaaaagccgccattcagcagggtatcatccaggagggggcgctattttctgtcaggagccagaacgggctggcgtgggtagatgaataccgcaatgtgaacggcgtccccgtcgctactggaaaatccctgccggacgcttcggctattattccgttcgtggttccaaatgaaaccgacccaaccggcacgattaccgggctgtcactgacgcgcggcggtcagtatttcatggtgcgccgtgatgacagtaaatttccgataacgtattacctgaatgccaatggcgtggctgaagtggttgaccgtgtgccgggtatgtcaacgattaatcagcttggcagtgatatccgaaaaaataatgtctacctgcccggtaagaatctttttaataaagacgcggtaacggttggatattatttatttgaagggtctggcgagccaagaattaacccggattactgttattcagattatattggtgttaaagccggcagcgtgtacagctcagataaacgcatacgcatcgttacgttttacgatgaaaattacaattatctcagcgatattattaacgtatattcgtttaccgtacccgttaacgcggcgtcggtgcgtctgtccgtttcactcccccttgttgatacttttcagctgtcgtttggcgtgggcgtgctgccgtatgaaagttatcagatggtgttaccgcagaatgttcagacggccagaatgaatgtgattgaggcgctggactttgcgccaggtaaaaacctgtttgacccggcgggtgtgatggatggtgtacatctgtcatccatcgggacgattttcaccgatggtgattacaccatgtctgtttctgcgtatatcgccgttacgccaggagaaagcctttgtattaatcagcagtggaaagccgcaacatggtatgacaaaagcggcgttttcatcagcaggcagtatgatgaatcctatttagccaaacccattggcgtatttatcatcccggaaaatgccgcgtatttacgcgttgaggtgcctaaatctgttgtcacggcgacgatggtcgagcgtggcactgttgcaacggaatttgaaccgtttcgcctggcatcgccggaagactatgcaggccggaaggtgcagtatggcccggtgcctcggaatgataatccggtgattttcggtgcgggcactaatctgtttaataaaaacacggccagcgcaggatatataaacgagtacggttcattgtacccggtgcagggttcatccgggacggcgtatgtctattcagaatatatccctgtaaaagcaggtgtaaaatataaatcaaatcttcagctgcgatttgtggagttttcggacgcggaaaagaaatttatatcgacggttgtccgggtgactgatttcactccacctgccggggtggaatatgtgcgtgtcacggtagcgcagaccagcgcggcgtcactgtttctggcagagggagaccagctgaatcaacaagctgattacgttcatgtgatggcaccgaaagccagcgacggtacgccggtacgtattccgggtgaaatggtgattgcggatgggctggatattaattttgtgcagcatggcctgctggtatccggcaaaaatatatacaacaaatacacgcgaaaatcagggtatatcgatgagggcggggtcattcgtgagccggatgcgcgttatgactattctgattttattcctgtgaccccaggtaaaacctatgcattaaatccgggggccagatttgtcgcgctgtattcgaagaataaagcgtttatcagggcggtcgctgattccagtcagaatattaaatcaattacgccggacgccgattgttattttgtccggataacagtcagcgtggcctttagtgacacattccagatggaggaaggtgacgcatcgacgacttacgagccgtttgcatattcgctactttccgctatgcccgatggcacgccggtagccggggggggaagccagccggagccgcagccggaaacggtgattgtcccggatgtttacgggatggagcgactgcgtgaaacccgtatgcgaatgactaaaatgaccttcgcccaggcggttcggctggtcgtggcgatgctgggcgatagctacaccagaacgtcagcgcgttatgtgctgaaagtggcgcagatactatggcgctatttcaacaatgcaggcacggccgccatagtgccacccatcgggtacggctggcgctcgtttggttttgaccctaacggcgataacactgatgttatcgggacgaaggtcaaccgcagcggcttcacctgcgcttataacaccggccacggcccggatatttcgtcagtgacggcagcggccagcggcgcgacgatttcatacagccagaattttgcgctgggctttgactcattcctgttcgcggagggtggttccggggtgattcagtatcaggcgacggggggcgagccggtcactattgacctttcgacctatccggccgggatgcagattttaccgctcgcgcttccggctaccggaaacggcaccgtgacgtatacggtcatcaccgcgccggtaacgctttacggcgtcaacatcctcaataaaaccgcatcgggtgtgcttatccacaaaatgggcggtagcggttcgaactcccgtcactgggtgacggcgatggatgcacgctggcttgcggcatttgaaagtcttggggcggatctggttaccatcatgctgggtacgaatgaccagggggcgaagctgtctgcatcgacgttcagagataacattctgacgatgattgataacgtccgttcagtccgccccacggctgatattttgctgatttgcccggcggaaaataaccgcgacggcggaaacagtattcccatgaccacttacgcggaggtgatgtacaaaatcgcacgtgatgacagggatgtggcgtttttaaatatgcaggcgtcatttggtgaaagtcatgaggattatgccgccggttcagcgagaccgtggatgattggcgacgggcttcatcctgacccgagtaccggcggttacgcgattgccggtgcaattactcgcgcaatcggtctgccagtcgtttaa

SEQ ID NO: 227845 - DNA, 1074 bp, Klebsiella pneumoniae
atggaaaaagtataccaggccattctgaccgaaaagggccgcgacaaactggcggcagcggctatcactggcgaacaggtcgggtttaccatgatgggcgtgggggatggtggcgggcaatctgccgcgccattatccgcacaggactcgctgattaacgagctgtaccgcgcatcattaaacaggctggtcatcgctgaccaggccgcaaatgtgatccgggctgaaatggtcatgcagccgcaggtcggcgggttctggttacgggaggccggattatacgacgatgcgggcgactgtctggcggtggcgaacctgccgccctcttataaaccgatgcttgcggagggggcgggccggttgcaggcaatcaatctttggatagcggtcatcaataccgccgatgtgcagctgatgactgacccgacagtgattattgccagcgtggatgaggtggcacgcgcaaagaatgaggcaaaagattataccgatgaggtgttaggcgccctcgatacgaacataaagcagattattgccgaagccgtcaaaacggcggtaagcgatgcctgggaactggataaccccgtcggcaccacgcggttttttaatcagaacctgaaccccaatgagcgctggccgtggtcggagtgggtgtataccggcgaaaatagaacgatccgcgtcggcaaagccgatggctcaaacgtaggcgctaccggtggcagcgataccgtcacgctccagcgtaataacctgccagctgtacagattgatgtgagcggtgaaaccagcgagcagatagagcaaaaactgacaaccactaaaaatggtaaacacaatcatggtggtgtggccggtaaagatgacccgtgggaaattggcggtgatgtgcggcagctcgttaacccgaaagagctgggtgtgaccgatgatgccggagagcacgaacacgaagtcacggtaccggcgcacaaacacacgaccagcggcaaaaccgccaatctcggcgaaggtaaattgttcagcgtggtggaagcgcacaccctgctgatgtgctggagccgcgtcgcctga

SEQ ID NO: 227846 - DNA, 1593 bp, Klebsiella pneumoniae
gtgagcagcaaatttatcgacgcccatgaggcggcgcggtgggtcgccagcggcgacaccgtctgcaccgtcgggatgacgcttatcggcgcggcggagtccattttaagcgccatcgaagcgcgctttctgaccgcgggcgaaccgcgtgacctgacgctactgcatgccgcagggcaaagcgatcgccagcgcggtatccagcacttcgcccatccgggtatggtgacccgccttatcggttcgcactggggcctggcgccgcgctggatggcgatgatcaacaacaacgaagtggaagcctggtgcctgccgcaggggcagatcgttcatctctatagcgcgatggccgccggactgccggggcggctttcccccgtcggtctcggtacctttgtcgatccgcgcatagagggcggaaggatgaacgcccgcacccgcgaacgacccaatctgatcgagcacgtcacgtttcgcggcgacgaatatctgttttatccggctcttcctctggacgtggtcattgtgcgcggcacccatgctgatgaagacggcaacctcacgaccgatgaagaggtgatgaagctggaagtcctgcacgccgttctcgccgccagacgctacggggcgaaggtgctggcgcaggtgaaatatcgcgtagcgaaaggctcgctgcatccgaaaagcatcaccgttcccggcaacctgatcgacgccattgtggtgtgcgaagagccgcagacggatcaccgccagacttcaagctgggccttcgacccagcgctgtgcggcgatatccagctgcccgccgcgcagaatgcgccgctgccgctggacctgcgcaagcttatcgggcggattgcctgccgctatctgacccccggctgcgtcatcaatctcggcaccggtattcccaatgacgtgattggcgccatcattcacgaggaacagctcggcgagcaggtcaccatcaccgtcgagtcagggatctacggcgggcagcaggcgggtggcgtggattttggtatcggccgtaatctgagcgcgatgattagccaccaggatcaaatgctctactacaacggcgcaggggtcgacatcacctttatgggcgccggcgagatggacccgcacgggcacgtcaatgccacacggctcggcgcatcctgccccggcgcgggcggttttatcgatatcacccagaatgcccgccacgtcgtgttctgctcctcttttaccgccaaggggctggagatcgcctgtgaacacggggcgctgcatatccgccgcgaaggcgaggtgcgtaaattcgtcgccggggtaaaccagatttcttacaacggcgaactggcccgcgccaaaggacaaaccatgcattatgtcaccgaacgggcggttttcgaactgcgcccggaaggaccggtgctgacggaaatcgcccccggtatcgatcttgagcgcgacatcctggcgcatatggattttcatccggcgatcgccgcggatcttcaggttatggacagccgattgttcgccccgccgccctgcggtctcgcggaacatctgtcccggaattcatcctctgactcataa

SEQ ID NO: 227847 - DNA, 735 bp, Klebsiella pneumoniae
atgaaacttgccagtaaaaccgccattgtcaccggcgccgcacgcggtatcggctttggcattgcccaggtgcttgcgcgggaaggcgcgcgagtgattatcgccgatcgtgatgcacacggcgaagccgccgccgcttccctgcgcgaatcgggcgcacaggcgctgtttatcagctgcaatatcgctgaaaaaacgcaggtcgaagccctgttttcccaggccgaagaggcgtttggcccggtagacattctggtgaataacgccggaatcaaccgcgacgccatgctgcacaaattaacggaagcggactgggacacggttatcgacgttaacctgaaaggcactttcctctgtatgcagcaggccgctatccgcatgcgcgagcgcggtgcgggccgcattatcaatatcgcttccgccagttggcttggcaacgtcgggcaaaccaactattcggcgtcaaaagccggcgtggtgggaatgaccaaaaccgcctgccgcgaactggcgaaaaaaggtgtcacagtgaatgccatctgcccgggctttatcgataccgacatgacgcgcggcgtaccggaaaacgtctggcaaatcatggtcagcaaaattcccgcgggttacgccggcgaggcgaaagacgtcggcgagtgtgtggcgtttctggcgtccgatggcgcgcgctatatcaacggtgaagtgattaacgtcggcggcggcatggtgctgtaa

SEQ ID NO: 227848 - DNA, 954 bp, Klebsiella pneumoniae
atgacccaggctaatgatattgtgattgtcagcggcgtccgtaccgctattggcacgtttaacggcagtcttaaacatacccatcagcatgaccttggggccgccgtcattcgcgaagcgatcgcccgcgccgggattgcgccgcaggatatcgacgaaacgatcgtcggcaacgtcgggcaaatcgccgaaagcggttttatcgcccgcatctgtcagctgcgcgcggggatcccgcaggagagcaccgcctattccgttaaccgccagtgcggctccggacttcaggccctggcggacggcatgatgcagctgcaaagcggccaggccgaggtggtcgtcgcctgcggcactgaaaatatgacccagctgccctactacctgcgtaaagcgcgcgatggctatcgcatgggccacggcgagctggaagatggcctgatctccattctcacctggccggaaggcccttatcacaacggcatcaccgcggaaaacgtcgcgcaacgcttcggtattacccgcgaagcgatggacgatttcgcctggtcgagccagcagaaggcgctgaaggcgatcgcggaaggtcgctttcgcgagcagatcctggcccttgaggtgccggacggcaaaaaagcgacccgcctgtttgcgaccgatgaacacccgcgcaacaccccgcgtgaaaagctcgccacgctgcgtccggcgtttaaagccgacggcgtggtgacggcggccaactcatcgggcattaacgacggcgcggcggcgctggtgatgatgacccgccagcaggcggaaaaacgcggcttaaccccgcgcatgcgcattcgcggctgggcggtcgccggctgcggggcggagacatctggcaatagatcgcctgcggctgacaggcgggcgcgatttgcgccagtacctcgagggtggcctcgccgtcggcgagcatactga

SEQ ID NO: 227849 - DNA, 1533 bp, Klebsiella pneumoniae
atgattggagtgaaaaagcttcaggatttttccaaggcgatgatcgggccggtgctgtatctgccagctatcggcctgttgatcgccctgttcagcatgacgaccaaccggctgtgggtggatgaaagcagcgggctctacctggtggggaaatttgtctccagtatgctctgggcgctgatgaaccatctagggtttctgttctgccttgggctggccagcggtctggcgaaaacccgcaaggccgaagcggccttcgtggcggccatgacctggctgatgtacctggcggcgaataatagctggctaaccctcacccatcgcctggcgaccggagccaccaacgcgcaactgtacggcagcggacaaacctttatcttcggttttcaggttatcgatatgggcgtattccttgggattatccttggctgcgctgtcgcctttgtccataatcgcgtggttgggattgagtttcgcggcgcgctgtcgatctacggcaacagtaagctggtgctgatcgtgatgctgccgctggttggcatgttcgccatcgccaccgtctatctctggccggtggtggagctgggcatctcggcgctgaccggctttatgaaatcctttggcgccatcggggtcttcctgtacggctttctcaaccggttcctgatccccaccgggctgcatcatctgatctggtcgccgttcgtttttacctctatcggcggtcagctgctgatcgatggtcagaccgtcattggcgctaagcctattttcctggccgaaatcgccctccaccccgttgacgcgctcagtgattccgcccgtttcctcacctatgggatggtgaagatttttggcaccgccggcatggcgctcgccttctaccgtacggcgaaagcggagaataagcagcggttgaaagtcacgctgatccccttgattgttacctccgtcctggtggggatcaccgaaccttttgagtttctctttatcttcaccgccccattgctgtggcttatctactccctgctggacggttttttccagatgctggcctggctgcttcacgtcagggtctgcgccactaacggtctcatcgatttcgtcgtctataacctcccggcgggagtcagcgcgacgcgctggccggtgtttgtcgccctcggtctgctggaaaccgcgaccatgtacctggtcggcaccttctgtattacccgtctgcggctgctcaccccgggccgagaaaccgcagccgaagatgagcattcgcaacaggctaatagcgagcatccggataaaggcgcgctggtgattgccgggctgggagggaaagagaatgtctgtgcggtgggcaactgttttacccgtctgcggattgatgtgcgggaccccgcccttatccagcagaagctgttgaaagagagcggcgggagcagcgtgctgattaaaggaaaccatgtccaggttatctatggtctgggagttaacaaaattcgaacggcggtcaacgccagtctgggtgttactgaataa

SEQ ID NO: 227850 - DNA, 669 bp, Klebsiella pneumoniae
atgtttgatcttattgataccgccattaccggcgatcagtttctgctggcgctgcatgacacgctgattatggtcgccgtctcgctgggctttggcgcgctgatcggcgtaccgttagggattttgctggtggtttgccgtcccggcggcatcgtggccaacccggtggtgcatcaggcgctgaatccgctgattaacgtgctgcgttcgctgccgtttatcattttgctgattgtgatcctgccctttacccgactgctggtgggcaccactatcggcaccgcgggggccatcgtgccactgatcgtttttgtcgccccctacattgcccggctggtggagagctcactgctggaggtggatgaggggatcctcgaagccgcggatgcgatgggcgcgacccccctgcagacggtctggcattttatgctgccggaggcggcagcgtcgctgattctggcccttaccacggcgaccatcggtctgctcggcgccaccgccatggcgggtacagtgggcggcggcgggatcggcgacctggcgatcacctacggctatcagcgtttcgacgcctttgccactctcaccaccgccctggtgctgattgttattgtccagcttattcagacgctggggacccgcctggctcgccggctgcgtcgcgattaa

SEQ ID NO: 227851 - DNA, 195 bp, Klebsiella pneumoniae
atgtccctgacctcggccttaaagctggaagcagccaccagccattttattaatgtcgtgaccgtcgccggtaaaaatcagaaggcgcagtttgccaaagatattatcgatggctaccactcggccgagttcaaaaaatatattctcagccatccgcagtatgatggttacctgctgcctgactatttaaaatga

SEQ ID NO: 227852 - DNA, 1287 bp, Klebsiella pneumoniae
gtgaagtgggattttgaactgcggctggccgatcagatcggcgagcatgttgaccgggcctgggcgatcgctagctccctgccgaaagggccggtctacctgagcttaccgcgtgagccactgtgcgaaacctttgccgtcgatgaggccgcgctgcaggctggcccttcgcagcagccggtccgctatgcgccagtccgggaagatatcgcccgtgcagccgaggcaatcgcctgcgccagacacccggtcatcttcgcccagcgcggcgcccgaacggcggaaggctttgcgcgcctcgatagtctggtgcgcgaatgggcgatccctctggtggaatactggggcaccgaggttaccctgagcgccgataatcccctgctcgccggggctgatcccagcgtctggctcgctgacgccgatgtgattctggtggtcgactcgcaggcaccatggatgatcgccgagggcgactgtcgccaggactgcaccgtgatccagatggggcccgatccgctcttctcccgctacccggtgcgcggctatcgcgcggacatcaacctggcgggcgagaccgatgaagtcttcagcctgctggaagaggcgctgcgcccgctgcaggccgcccgccagcagcatgtggcggagcgggcggcatatacgcagagccgcatccagcaacagaaaaaccagcgcgacgcgcttctccatgccagccagaccggggccattaccaaaccctggctcagctactgcctcggccatctggctaatcaacaccgcggccggatcgtttctgaactgaccacgctgccgcagtttgccggactgacccatgccgagagctattaccaggaagcgctggccggcggcctgggcgaagccctgcccatcgcgctggggctgcagcttgcgcgccgggaagagctgattattgccgccgtcggcgacgggtcgtacctgttcgccaaccctgcggtctgccaccatattgcggaggtaatgaagcttcctgtcctcgtcgtggtcggaaataacggcggatggggcgccgtcgcgggcggcaccaaagcgctctacccggacggctacgcggcccgcgcggaaaccattccggccaccgcctttaccacctcgccggatttcgccgcgatcgccgcctccagccgcgcggcggccctgtcggtttcccgggccgaagatctccccggcgtgctggaagaagcggtatccctcatacgcacccgccgacagagcgtgctggttgacgtgcagttagcccgctaa

SEQ ID NO: 227853 - DNA, 633 bp, Klebsiella pneumoniae
atggcggttccatatgaaccagcggagtttgataaagaggcttttaactgtccgtattgtcaggcttatgctaagcaaacatgggggcgattatatccgtactatgaagacacgggtttccctatgcatgtatcacaatgtgagcgctgtggggaatattcatattggttcgaaaagtcccttctgattcctgcttctgcgaatgttgaaatgccaaatccagacatgccggaagactgtaagtccgactacatggaagccagaagcatcgttaacctgtctcctaaaggggccgcagcactcctccgcctgtgtctccagaagttaatggttcacttgggtgagccgggagagaacataaacaaagacatcaagtctctcgttgagaaaggtcttcctccccgtatccaacaagctgctgacatttgccgtatcgttggtaatcaggccgtgcatcccggagagattagccttgatgatgaccctcagttaacacatggtctctttaagttattgaatatcattgttgatgaccgcatcaccagacctaaagaaatcgaagcgatgttccagagtatgcctgaaggtccccgacaaaatatcgaaaagcgggacagcaaggctggcggatag

SEQ ID NO: 227854 - DNA, 492 bp, Klebsiella pneumoniae; identical to SEQ ID NO: 207956

SEQ ID NO: 227855 - DNA, 147 bp, Klebsiella pneumoniae
atgcgcctactggatgtgcctacagccatactcgtagccgcgttgggtctcccaccgaagcacacccggcccgatatgtattactcgaaaggtgcgctgtgtctcatggcgaccgctgaagggttgaccccgatggacttcaagtaa

SEQ ID NO: 227856 - DNA, 990 bp, Klebsiella pneumoniae; identical to SEQ ID NO: 227362

SEQ ID NO: 227857 - DNA, 384 bp, Klebsiella pneumoniae; identical to SEQ ID NO: 227591

SEQ ID NO: 227858 - DNA, 375 bp, Klebsiella pneumoniae
atgggttccagggtttaccgcagcaagggttttttctggctaccgggaagggatgacctggcattactgtggaaccaggccgcaggaagcatcaatctcgaattcataagctactggaaagccggggtcctgacccacactgataattcactgacaaaggaagaacgcgcagctatccatgagcaactggcaaaaatgccgggcagatttggtgaccggcgctgccgcctgactgttattggcgagagcggcgaaattgacgattttgtcctcgcgttgcgccagtgtttactcactgaagaggaaattcgctggtggcagcaggggggaattttccacgatccctggcccacgaaagtggcccggctggcttaa

SEQ ID NO: 227859 - DNA, 1461 bp, Klebsiella pneumoniae
atgcaaaatctgatcaatcctttagcagagggaaataaaaaaaacgtttacattttttatttctttttgcttatgttaacattttcaccggtaattttcttttcatatgcattttcagacgactggtcaacactctttgatgctataacaagaaacggctcttcgtttcagtgggatgtccaatctggtcgtcccgtttatgctgtgttccgttactatggaaaaatgttaattaatgatatttcttcattttcgtatttgcggctttttaatatattaagtcttgttgtcttaagttgttttatttacaacttcatagacagcagaaaaatatttgataaccccgtattcaaaataacatttccgctgttaatttgcttactccctgcgtttcaagtttatgcttcatgggcaacatgtttcccgttcactatttcagtattgctggcaggtattagttataataaatgtttcccacattcgaagcagcggtcgtcattgtcagaaaaattagcatccattgttgtcttatgggtggcatttgcaatatatcaaccgacagcaattacattcttattcttttttatgcttgatagttgtataaaaaaagaaagtagtttaactgtgaaaaaagttgcgacatgttttatcattttagttatcggtgttgcaggcagttttataatgtcaaaagtacttcctgtctggctatatggggaatcattatcgagagccgagttaaccgcagatatcggtggaaagatgaaatggttcataaatgaatcactaataaacgctgtaaataactataacatacaaccagtaaaaatatattcttggttctcctcgcttgcaattttaatcggcttatacactatttttgtgggaaaatcaggcagatggaaaacgttcatagtcatagcgatcgggataggttcctacgctccaaatttagcgacaaaagagaattgggcagcattccgctcgttagtggccttagaacttattatatcaactctatttcttattggcataaatagccttgtcagtagaatttttaagcaagcatttgtctggcctcttatcgctttaacaattatgataatagctcagtataatattataaatggatttattattcctcaacgctctgaaattcaggcacttgctgcggaaataactaataaaatacctaagaattacacaggaaaattaatgttcgatctcacagatcccgcttacaatgcctttacaaaaacacagagatatgatgaatttgggaatatttcattagcagcaccctgggcgctcaaaggtatggctgaagagatcagaattatgaaaggatttaatttcaaactatctaacaacgttatagtttctgagaccaatcgatgtattgatgattgtatggttatcaaaacgtcagatgcaatgcgaaggtcaacgataaattattag

SEQ ID NO: 227860 - DNA, 705 bp, Klebsiella pneumoniae
atggcagggttacgctcggtcgatacagacgtaagcattagcatcgatgcggatctacaagacgatgtaaattgcatcgaaaaaatgattgacgcttacagccagggatatgacatagtatacggcgtaagaggtaatcgagacagtgacacgttttttaaacgtacaacagctaatgcattttacgcaataatgtcccacttgggagtaaatcaaactccaaatcatgcagattatcgattattaagtaatcgagcattggaggctcttaaacaatataaagagcaaaatatatatttacgtggattagtgcctcttgtgggatacccctcgatcgaggtgcaatatagccgtgaagaaagaattgcaggtgaatcaaaatatccaattaaaaaaatgcttgcgctggctctcgagggaattacctcattatcagttacaccgttacgaattatagctatgacaggttttataacttgcatcatatcaaccatcgctgcgatttatgctttaattcaaaaaacaacaggtactacagttgagggatggacatcagtcatgatcgctatattctttcttggcggcgtgcaaatgctttctttaggtattataggagaatatgtcggaaaaatttatatagagacgaaaaatagacctaaatatttcattgacgaaagcgtaggtaatgatagcaatggaaaataa

SEQ ID NO: 227861 - DNA, 1005 bp, Klebsiella pneumoniae
atgctcatgtcgtaccgttatcactgggtgatgtggggatcgatggtcgtgctgattgggttaatgttattcagcataaccagagggacagtctcactgtcgctaatgcaggtgctgggtgcactgaagattgtggatgagccggtatctgccatggtcagcagaattgtgacggatttacgcgtaccgaggatgttgctctctgtgctgacaggggcgggactggcaatggtaggggcattgttacaaactaccacccgtaacgatctggctgatccttttttattcgggttatcctccggtgcgtcagcaggagcggtgctggtgatcacccgttttggtgatcgactaggagtattaacgctccccgtatcggcgtttgttggtggtgtgtgttccgccatagcagtaatgctgttatttcattttaaaaagcaacgcggagctgagcatctaattctctgcggtcttgccatctcttttttgttcggggcgctgactagttattttattttttcgggcgatcagcgagccgccagctcagtgcttttctggtcactgggtggcctgggattagccacctggaataatttgccttttgcagtgttcagcctggtattgctgtttgcctttgtcctgttgcggtggcgctctctggatggtgtgctggcaggagaacaaacagcgttgtcgctggggattaacgtgagtcgtctgcgcatcgagatttttctttgttgtgcactggcaacatcgttgatggtggcattaaccggcgtgattggatttgttggcttaatggtgcctcatctgtgtcggcattttgcaggagttaagcatctgttgttgttacctctgtgtggcgtctggggtgcaatattactgtgtgtcggcgatatagtcagccggacgatactggcaccacaggaactaccaattggcattattacggcgggcattggagggttgtttattatcatgttactcgcgcgaaactcgccctag

SEQ ID NO: 227862 - DNA, 828 bp, Klebsiella pneumoniae
atgaagcgcaataccgtaagtaatctgacagaaaaagatgattttgatacgctggaaagtattctcagcgttaatattcattctctgttgcggccagacggcgggacgttgctttctgacgtccattttgcggtcaaagcaggagaatgtctggccattatcgggcctaacggcagcggtaaaacttccctcgtgagagcgattagtcaggaactgacccatctaaagggggacattcttctgcggggccgttctatgtctgctttatcccgtcaacagcgagcccggctggttgctgttttggcccagaatgatacacctgatacgagattatcccttgaggattatgtagcgctggggcgtatccctcatgccggggatgtaccgcgtaatgtacatgacgcgattgtagcaaatgccattaaagaaaccggattacaacggctacgcaggcggtcacttttatcgctttccggcggcgaaagacaacgagcggcgctggcacgggtactggcacagacgcccgacctggtattgcttgatgaacccaccaatcatctcgatcctcccgggcgcgaggaactgctttcccttgtaaaaaacaaggggattgccgtcgtggcggtgttgcacgatctgacactgacagaatcatttgctgaccgtgttctcctcttgtcgcaggggcaatcagtgatctgtgacacaccggagaaggtattggtatcagaatacctttatcccgtttttggcttgaccagttttaccgtaccgcatccccatacaggaaaggcgttgcgtatttttgaagttccgcattatgtataa

SEQ ID NO: 227863 - DNA, 969 bp, Klebsiella pneumoniae
atgactattaagaagagagtttttgttgctgggcataatggtatggttggttcagcaatcgtaagacaattgaaaaatagagacgacattgaactcgtactgcgttcacgtcaggagctcaacctgcttaatgctcaagacgtaaatcattttttcgctaatgagcgtattaatgaagtatatttagctgctgcaaaagttggcggaatagtcgcgaataacacttatccagctgattttatttatgaaaatattcttattgaagcaaacatcatacatgctgcacatgttaatgatgtaaataaaataatgtttttaggctcatcatgtatataccctaaatttgctaagcaaccgataagcgagtctgaattactgcaaggaacacttgaatctacaaatgagccgtatgctatagcaaaaattgccggtataaaactctgcgagtcttataatcggcaacataatagagattatcgttcagtaatgccaactaatttatatggagaaaatgataatttccatccttctaactcgcatgtaattcctgcattattgcggcgctttcatgaggcaaagttagaaggactaccacaagtcgttgtttggggtagtggaacgccgatgcgtgagtttctacatgttgatgacatggctgctgcatctatttatgtcatggaccttgataaatctatttggcaggagcaaacacaaccaatgttgtcacatattaacgttggtactggagttgattgttctattagggaattagccgaaaccatatcaaaagtggttggttatcgcggagaggtagtttttgattcaaccaaacctgatggcactccaagaaaattattagatgtttcgagattggaaggcttaggttggaagtatcaaattaagcttgaggcaggtttaactcggacttatgagtggtttttaaagaatcagcaaagcttccggagttaa

SEQ ID NO: 227864 - DNA, 300 bp, Klebsiella pneumoniae
  misc_feature (17)..(26): n is a, c, g, or t
atggcttcaccagattnnnnnnnnnncaccagattaattcaaaatgaaattggcattgagatgctgagaaatgaagccacttttctcggtgtttttgaacatttctatgatgataattactttaatagtgaatttagtactcactatatagtattggcttataaaatatctattttatccaatggcttagtatttccgcatgaacagcataatgaatatctctggatgagtgcggatgaaatccttaataatgatttagtgcattttaatactaaagcttattttatggatgtttcttag

SEQ ID NO: 227865 - DNA, 561 bp, Klebsiella pneumoniae
atgaccagacggttcacgctgtacgcttactcagaaactgacgacatggcggtgatcaatgccaaacgcgtataccgcatcatgcgtcagaatgcgctgctgcttgagcgtaaaccggaaataccgccatcgaagcgggcgcatacagggaaagtggccgttggagaaagtaaccagcggtggtgctctgacggcttcgggttcagctgtgataacggtgaaaaactgcgggtcacgttcgctctggactgttgcgatcgcgaggcactttactgggcagccagtaacggtggatatgacagtgaaaccgtgcaggacgtcatgctgggtgccgtggagcgtcgcttcggtaacagcctgccgacatcccccgttgagtggctgacagacaacggttcagcctaccgttcttatcagacgcgtcagttcgccagaatggtaggactggagcctaaacatacggcggtacgtagcccggaaagcaacggggagcaggtcacctcctgcttttggcttaactcgtcggttagccacgcatcaaaacggcccatatgcccttaa

SEQ ID NO: 227866 - DNA, 702 bp, Klebsiella pneumoniae
atgagaaaagcgtcaagctcattattattgtataccaataatcagaaacaagaattacttaatgcttatggcgaaaaatgtaaaaaagagaatgaaatatttgttgctccaaactctctttatttcagaaatgacatgatgaatgttttgtcctctaaatccactggtgtaatatatgtaggacgtttagtttcaagtaaaaaagttgatgtgttaattaaagcaattccgttagtttgtaaagtcgaaccgagtattgtttttcatattgttggcgatggcgaacaatcgaatgaattaaaaaaaatatcgcgtgatctcggcatcgatgaaaatgttatgttttacggacatatcgcagatcattcaaaactgaaggagatttattcaaaaagctttgtatcaatatctccgggatatgttggtctctcaataacccaaagtctttcatttggtgtgcctatgttggtttcaaaggatgaaaaccattctcctgaacttgaggcattacagaccgggttgaatggaggattctttaatacgaatgatcctcagtcattagcagatgaaatcttaaagtattttcacgggcgtcaatataatatgtttgacggagaaaaaatagttaatgattgtaaacataggtattcagttgagactatggttgatggggtaattgaaagtgtcacgcaaacaagataa

SEQ ID NO: 227867 - DNA, 1617 bp, Klebsiella pneumoniae
atgaccgttctgtccgttgaagatctgcgcatcagctaccgctcgcggggcgaatggcgcgaggtggtgcacaacatcagcttttccatccagcgcggcgaaatgctggccttcgtcggagaatccggctcggggaaaaccaccaccgcgcaggccattatcggcctgctggcggataatgcccgccgggatgccgggcggattgtcctcaatggcgaagtgattagcgactggtcggcaaaacgcctgaaccgcctgcgcggagtgagcatcagcctggtcccgcaggatcccggtaattcgctcaacccggtaaaaaccattggtcagcaggtggaagagatcctgcggctgcatcagtccctctccgccgctgagcgccgacagcaggcccttaacctgctcgctaaagtcggtctcagccacccggaacagcgttttgaccagtatccgcatcagctgtctggcgggatgaaacagcgggtgctgatagccatcgccattgccctgcagccggatctgattattgctgacgagcccaccagcgccctcgacgtcacggtgcagaagcgcattctcgacctgctcgatatcctgcgtcgcgagtcgggtaccgccgtgctgtttgtcacccacgatctggcgctggccgccgaacgcgccgaccggatcatggtgtttcgccagggagagattcaggaacaaggcgccaccgaggcgattgtccagcgtccgcagcatccttacacccgccagctgctccacgacctgcaggatgcgccgttggggctaacggcggcgtgtcaccggccgctggccacgccggccattcgcgtggaggggatcagcaaacgcttctcgctgggcaaacaggcgctgcaggcgctcgacagcgtcagctttgaggtcagacgcggcagcacccatgcgctggtgggcgaatccggctccgggaaaaccaccctggcgcggatcctgctgggctttgagcgcgccgacgccggacaggtcaccatcgacggtattgacgccgggcatctcagccgcgaggcacagcgtcagctgcggcgcaagatccagtttgtctaccagaaccccttcgcttcgctcgacccgcgccagacgctgtttgcgattatcgaagagccgttaaaaaactttgagcgcctcagcgcggcgacgcgtcgccagcgtgtggagagcgttgccgcccgggtggccctggcccccgagctgctgtcgcgtacgccgcgggagctttccggcggccagcgccagcgggtggcgattgcccgggcgctgatcctcgagccggcgatactggtccttgacgaagcgacttcggcgctcgacgtcaccgttcaggcgcagatcctcgccctgctgcagcagctacagcagcagctgggtctgagctacctgttcattacccacgatctggcgacggtcaggcggatcgccgacagcgtcacggtgctgcgcgccggccaggtggtggagcatggcgacgtaaaccgcctgttcgccgccccgcagcaggcctacacccgcgaactgatcgccgccattccacaggtttcctcccgcttagcacaggcccacacggagaacgcataa

SEQ ID NO: 227868 - DNA, 1053 bp, Klebsiella pneumoniae
atgatcggcgcctttggcgaacagctgcttgagtggctcaccacctacaccttcccggtggagagccagtttgccgatgcggagtatgcccaggagatagcgcagttttttgtaaatcagctgataagccatggcaccaccaccgcgctggtgttttgtaccctgcatccggcctcggtggaggcgttattcagcgaagcgctgcgtctgaatatgcgcctgatcgccgggaaagtgatgatggatcgccatgtgcccgactacctgtgcgaaaccgccggggagagctacgagcagacccgggcgttgatccgccgctggcatcagcgcggcaggctgggctatgccatcaccccgcgctttgcccccacctcaaccccggggttgctggaggcggtgcagcgcctgcgggccgagtttcccgacacctggctgcagacgcatctcagtgaaaaccgggaggagatcgcctgggttaaacagctgtggcctgagcatgcgcgctatctggatgtctatcatcactatcagctcactggcgaacgcagcgtcttcgctcacgggatccatctcgatgatgccgagtggcagtgcctgcatgacaccgggtccgccgtcgccttctgcccgacgtcgaatctgtttctcggcagcgggctgttccgcctgcccgcctgctggcagcaccaggtgcggatgggcatcggcagcgacgtcggagccgggaccaccttcagcatgctgcggacgctgggcgaggcctacaaggtaggacaactgcagagctatcgcctgcgcgccagcgaggccttctatcacgccacccttggcggggcgcgcgccctgcggctggaggagaaaattggcaatttccagccgggcaaagaggcggattttgtggtgattgacccggcggtcaccccgctgcagcgcctgcgcataggccgctgccatgacatttatgagcagctgttcgtgctgatgaccctgggtgatgaacgcaatatcagcgagacgtgggtgaatggcgagcgggtgtggtgtcaggactga

SEQ ID NO: 227869 - DNA, 2163 bp, Klebsiella pneumoniae
atgtcggtaccgaaccagacgccctataacatctataccgccaacgggctgaccactgtctttgcctatgagttttatctgatcagcgccagcgatattcaggtgacaatcaacggcaacgaagtaacgtccggctataccgtgtctggtgtgggtaatactggcggcggagaggttacttttcttaccgcccccgcaaatggttctaccgtcatttttgaacgagttacgcctacgtaccgactcaccgattaccaggacaacggcgacctgctggcggacaccgtcaacaaagatttcgatcgcatctggatggctatccaacgggcgtttatcgatctcggccttgctcttactcgtccgttgttcggtggcccgttcaatgccaaggggtatcgtattgccaatcttgctgatccggttaatgctcaggatgcagcgactaaaaactacgttattgagcacggcaaatcaaaccttgctcgtactctgcgtgttcccgagcaaagcgttgcaatccttccaacccttgcgttgcgaaaaaataagctactggcatttaacgacctaggtgatccaataccagttctgccagaatcaggtagcgcagcagacgttatgattgagctggcgtcaagcgacggctcaatgcatgtttaccggaacgcctcacctctggccagaatcatccgggcatcaatactcgaatacatgacagaagcagatcagcaaaaactgctgatagtccctggcgctaatgtcattgccgactacgcgttaaaggccgctatagctgatggagtgatggtactggatattccgtggaatgtcggtgcgttaaatttcgggcttgaccccgcaatgcttccattaggttttcaatttatagggtggggttgccgacgcccatatacaattgatgacgataacagttttctgaattgcggagtcgtcatccgcgtagcagctggtgcaagttttccattttattcaacaggcaggcatgtattccgggatattgtttttgatggccgagataaaacaacgtaccttttttattcgccaaatactgcaacccagttcaacggcacccgacttgaggggtgcggattttatcggtttgcgatcgggattggctgggcttcaggaggagcagccaggtacatcggaacaatgaaagcatatttctgttcaatatccggaaacggggatggagtcaggaatttaatagactccatgatgtttggttgcacaatcaatgctaatgatcgaggagtggcccttaccggtggggcaaacaataacttttttggaggatgccggaacgaatggaacaccggcgataactggtatgcgtaccagtcggtggagaaccagattttcggcgaactgtgcgacagggccggaaggggaggtgtggtcgccggggcgaaatcctcatggattttaaacggcgttaacgtccggcgcagtggtgctaatcaacccgtgggtaatgactattccgcaaactttattattattgatgacggtaaaattgaactctcaggggtaagaactggtgtcggtgcgaatgacagcggtgacggagggacaatctcgccatcctacaacgtatcggctcttggctctggcggggggaccttgcaggtttccggaagtgacatgactggttttgttacttcagcaattaaccagaaggcgaccacgttaaataagtcgataaccggcaaccttggtatggacgacgatgtaaatattggtatgacccaggttgttaaaggcaggcgaattattggttcacagtcatcaggtacgttagcaggctctgcgggcgcaacgttatcgctgaccaagaccaacatattccagaattctttcgatacatatattacccgttcaatcctaattgaatgtcgaattggtagccagtcacttggtgacgatattaaaattcccgtcagattcagaagggagaatctttattatctggatatcctgacctcgggaattgttgccagctctgcacgcattgggctttcagggactggcgtaacggtatcattgtccattaacagctcaaccggtctggttactgttcagttgacaaatgttgatggtctggaaagaaccgttaatgtatcaatgttgccctcaatgtag

SEQ ID NO: 227870 - DNA, 1395 bp, Klebsiella pneumoniae
atgagtaatctaaagtcacgtttcagaacaaagactaatgcgtcgataatctctatttttcaaagattttcagacatatctatcatgataattacattatatagtctttgcgtaattaaccacttagagtttagctataaatatgtgtttatatttttagctgttttagtaatttttcaaatgattggcggtataacagatttctatcgttcatggcgtggtgtaaaactatcagctgaaatggcactggttattaaaaattggactcttagtattttacttactatgggcattgtttcatttaccccagaaataataattccctttaaaatcatgctgtggtggtatatatcatcgtttttgggaattctattatgtcgcactttaataagatatggggctcgctgggtaagattattaggttataatactcgcaaggtcgctattgctggaagtatgcctgtaggaataagtttagctaagagttttatcgaagagccatggttaggatttgttgttaatggatattatgatgatgtcaataagaatgagtcggctattccatatattggcaattacgatattttattgaatgatgctaaggctggtaaaatagatcgaatttatattgcgatgagtatggacgaccatgagaagataaaaaatttaataaaacaattaactgatacaacctgttcagttatgttaatacccgatatctttactttcaatatattgcaatctagaacggaagaagtaaatggagtaccggtagttcctcttttcgatactccactaaatggaataaatatggttttaaagagagtagaagatatattcgtctcaagttgtattttattgttaatttctcctttgttaatattaatttctattgttattaaattaacatctgcagggccagtgatttttaaacaaacaagatatggtatagatggtaaaccaataaaagtttggaaatttcggtcaatgaatgttatggaaaatgatagtgttgtcactcaagcaaaaaagaacgattcaaggatcactccatttggtagttttttacgaaaaacatcgttagatgagttacctcaatttatcaatgttttagtcggtaatatgtctattgttgggcctcggcctcatgctgtcgctcataatgaacaatataggtcactgattgaaggctatatgttacggcataaggtgaaaccaggaattactggactggcacaagtaaaaggctggcgcggtgaaacggatacattagagaaaatgcaaaagcgagttgaatatgatttagagtacattcgagaatggagtatttggctcgatattaaaattatattacttacaattttcaagggttttgtaaataaatccgcgtattaa

SEQ ID NO: 227871 - DNA, 642 bp, Klebsiella pneumoniae
atgactgatatgtcccatcagtgcgtcattgtaggcatcgccggcgcatcggcttctggcaaaagtcttatcgccagtactctctatcgcgaattgcgtgaacaagttggcgacgaacatattggcgtcattccggaagacagctattacaaagatcaaagccatctgtcgatggaagagcgcgtcaaaaccaactatgaccacccgagctcaatggaccacagtctgttgttccagcatttgcagatgctgaaaagcggccagccgattgaactgccggtctatagctacgtcgagcatacccgcacgccgaacaccattcacgtcgagccgaagaaggtgattatccttgaagggatcctgctgctgaccgatgcgcgcctgcgtaacgagctcaacttctctattttcgtcgacaccccgctcgatatttgcctgatgcgccgtattaagcgcgacgttaacgagcgcggccgctccatggactcggtgatggcccagtatcagaaaaccgtgcgcccgatgttcctgcagtttattgaaccgtcgaagcagtatgccgacatcatcgtgccgcgcggcggcaaaaaccgcatcgctattgatattctgaaggccaaaatcagtcagttctttgaataa

SEQ ID NO: 227872 - DNA, 279 bp, Klebsiella pneumoniae
atggaagtggatgttaatgacttaggtatatcagagccgaccattaacgagatggagagactgatcggtatcacgaagccggtcagtcgccacttgtctggtatcactatgatcaccaggacggcgggagacatttattacggcatagcagtgagtgagggggatgttatcagcgtctggcctgcggactatgagccggatatgagtattttttataacggtcgtcagtattttgacggcgaatgtgtgtttaccgggaatgccagcgatgaaaattaa

SEQ ID NO: 227873 - DNA, 966 bp, Klebsiella pneumoniae
gtgggtgacggcaatggtcagagtcttgccccgaccccggaggcgacggggctggtcagtgagcgttaccggggctttctgaacaaaattcgtgttgccgacagcgccgccagcattatcgaatcggaactgctgatttcagcccagaccggcggattctggactaacgaagccgcgctctatgatgaagacggggtctgtatcgcggttgccagcctgccaccgacctataagccgctgtcatcacagggggccgcgaaacaccagatagtgcggatgaatatagcggtcagcagtaccgatgctgtcactatcactgataatccgtcggtggtgattgccaccgcggaggacgtcagttgcgccgaagataacgcaaaagactatgccgatgagcagttgcaggcgctggacgccgcgacgcaggaggccatccggcaggtgttgcgggacgcctgggagcaggataaccccgtcggtaccacgcgctttttcagccagaacctgaatccgaatgaaaaatggccgtggtcgcattggcagtacaccggagaaaataaatctatccgcatcggtaaggctgacggttcgaacgtcgggcagaccggcggcagcgataacatcacacttcagcaggccaatctgcccgccgttcagattgacgtgagcggcgaaaccagcgaacaggggcagcaggagctgacgacatcgggcaacggaaggcaccggcacagggcaggtgacggggcgccgggggatacctggcaggacgccacacacggaacggataaccagaaatatacggggtggaactataccgactatgcagaagaccatcagcatagcgtcacgatcccgctgcacaaacactcgaccagcggcaaaacagccagcctcggtgagggcaaatcgttcagtgtggtggaatcccacacgctgctgatgtgctggagtcgtgttgcctga

SEQ ID NO: 227874 - DNA, 180 bp, Klebsiella pneumoniae
atggaaagctttgagagctatgaaaactttaacgactggtatgaggcgttgattaaagccggggaggaaacggataaatcattttcctacaaactgatgtttctggaattctacgaccggggcatgacgccggaagaaacgctgactcacattatcgaaaacggcattgtgacggaataa

SEQ ID NO: 227875 - DNA, 1764 bp, Klebsiella pneumoniae
atgaagaatgcaccaaaccttaaaaagcagccggcggatctcatggaggagtcaatcatctttgccggcgccgatgcctggactttcgccaaagcatggcaggaaatgaacccgattggcgatacggtgccgccggttgtgctggataaaaagcagctggcagagctggagaatatccgcattgtggatgatggccggctctatgcgcgggtttgccgcggcgggcatctgaccgaacggcagataaccattctcgcgacaaagctggcggtggccggcgtggagcgcgcgcaattctactctgaaggttatcagcttctggaggactggacgccgcagctgccgcgcctcaaagccgatgcggaagccggcaaaagtatggtgatcggcaaaccgctgacggatgtaaacctccgcgacctggctgataacgaaaaggcgctcatactggccgcgcgttacaccggcattgcaatcaacgaaaacagcgagggcgtgtacgtctaccgcgccggcatttgggagaaaacgtctatgctcgagctgagccgcgaaatggtggctatctacaacgagaacaaaaccaacttcagcaagcgcgcgatcaacaacgttatcgacgccctgaaaatcgttatcccggtgatgggggagccgcggcggagcctgatcccctttgcaaacggtgtctacgatatggaaaccggcattttctccgaacacagccaggacaactggctaaccaatcataacggcgtgacctacacgccagcggtaccgggcgaaaacctccgcgaccacgcgccgaacttccataaatggctaagttacgcatcagatagagacgcaattaagatgcagcgcatcgctgcagcgctctttatggtgctggcgaaccggtacgactggcagctgttcctcgagataaccggtgagggcggcagcgggaaaagtgtctttacccatatcgctacgatgctggccggtgcgcataacaccgccagcgggaacatggcggcgctcgacagcgcgcgcgggcgggcgcagttcgtcgggaaaagcatgataacgcttcctgatcagcccaaatattcaggagagggcaccgggataaaagcgataaccggcggggatgccgtggagatcgacccgaaacacgagcaccagtacaccgccgttttgcgggcggtggttgtggccacgaacaacacgccgatgattttcaccgaacgtgccggcggcgtttcccggcgacgcgtaattttccagtttaaccggcgcgtcagcgaggaggataaagatcccgacctggcagaaaagatatcggctgaaattccggtggtggttcgtcggctgctggcgaactttgcgaacccggaaaaagcgcgggcgctgctgctggagcaacggaacagcgaagaagcactggaggtgaagcagaaaacggatccgctttatgccttctgcgcgcatcttgagcggctggctgattgtgcgggaatgatggtaggaaaccgcaatccgcctcactatccgcgaatttatctctatcacgcttacctggcattcctggaggccaacggtttcgacaagccgctgacgctgaataaattcgcagaggggatggaaagcgcgatgagggagtttaatcacgagtaccgtaaggaacggagagcccgtggcatggtgaccaacgttgaactttcagagagtgcggaagactggttacctcagacgcatcctgtagccggtcataaagaatga

SEQ ID NO: 227876 - DNA, 123 bp, Klebsiella pneumoniae
atgtctaacttctacaagttagctctcaggcatagggtgggaaataacaaagttgtttttttaaccgcagttattgccttgataacattagggattgtatggttaatgatggtgatatactaa

SEQ ID NO: 227877 - DNA, 1077 bp, Klebsiella pneumoniae
atgcaacggaagataagagttgagtcagttaacctcaatgctaaatgctgggttgtgcgcccggggacgcgttataagtttgctaaagagtttatatcagaaagttttgttgcaataggccatttagatggatatttgtttggagagagaaggggaatttcttctcctcaagatcttcaaacaattgatgaagttattaactcctcaaggtttacaagaaatgtaaagtcacaagtgcttaattttatagatgatatgaacgtcggagatgtcattttcacaatgacatccaatcagatcattcctggtgttattaagtctgaagcatattttgatcctactactatcagattccaacaaaacactgacgaaacattttcaattagaagagatgttgagtggggctctataatagacagaaaggatgttcccctcacaatttctagaagttttctagcataccaagccgtattctcattaggtgattactcaacagaagttttccactggctttcttcattctttattaatgaagatggttactatagtagtttgaggatcgagcagaaagattcaatcaaccatcatgctctaaaaactttatctgaagtaattgataggatacaagtaatatcattattagctgaaaatagcgaattgaacgatgatatttctcttgagtatctgcaagagcaaatggaaaagctgtatgaagaaggtaagctaactcttactgctcaacaaatgttgatgtctccaggggatttctggcttggattaaagacaaaatcaaaaagatctggtgtaatattcctgttgctaatggcaatgattgttggagaaatagacaatgttgcattcgcaagtgaagattataaagcagaggttccagtagcacaggctataatcgcgaaacattcagatgttattatgaaaggtattaatattgataaaatgaaatcccagttaatgcttgaaactaaaaagcagaacaataaattcgttgaggcaaatcccaatgattatgatgaaggagatattcccaaggatatcgatcctcctatagtgagtaattaa

SEQ ID NO: 227878 - DNA, 675 bp, Klebsiella pneumoniae
atgtttatgacaataatagaggttattgcatttattatattatccctaggggctattttcataataggaatcttgtgttcaaattcagtaaattcaaattcagcaagaaaaatttcagctgatgatttcaataagatagctgtggcgcttggtgctattgcgactgttgcatggggtttattcacctacggggcattagaacaaagagataaggccaaagctgagcttattgatttaaagaaccgcataaaagatacagaatcaacctcatttgaagttgaagctccgtttataaaaggtgatggttttttttatattacaccgactgtgacagtaaaaaataatagcaataccgctatatatgttaagcttgaccaagactcattatctgtaaccagagtggttgctaagggagatcaacctatccccttagaaacattcaatccaattttttatcaaacaatcactaaagaaggtaaagcccctctttcaaatataacaattcctataggtgcagagcgtaaatttaattacctcgtgcaaacaaactatcctggtatgtattacattacattcacagctagtgcaatggacagtagtggtaatcttatcaataaaacatatgatgggaagccagtgaagtggttctcatcagcttatgtttaccttaaataa

SEQ ID NO: 227879 - DNA, 3525 bp, Klebsiella pneumoniae
atgccagcaacagctgatgaaattatcgaagctattaaggaagcttcagctgtaggttttcgcgggcgcctgattgcacgcgggcaagcccggtcggtgatctggcgagacggtgacttgccgccggatgcaccggagtttagcgcactgctcagtcaggaccttcaaggctatgcttatgccctaatcgatctcggccttcgtcttcgagaacttaatggagacgacgcctatgcgcgaattgcttttgaacaggccggaaccgcactcgagtcggctattgctaaaggaaaacgcgacagccgggatacagattttcacttcgtaatggctgctgcaagctatcaccttgcgcatctttcagcacgagcctattcgttactcgcaatggttggtcaggatgataatttttcaccaatagagagggctcttacacaactgatccggcgtgatttgcgtactctgcgcgataatgcgttgggctttcggctcagaggtgatggcagtgacgtgaaaattactgaaatcctccaggctcgcctaaacttgccgcaagacgagaacggtgacagtgagtcagaggaggacatcctttttgatgggcttgatttggcactgactgacgcctatatgtcggccatttctctctaccttctcgctgtagaaaggggagaatcacgtttgctttccagggctattgaaaaattaagaattagtctaagtatatgtgctcagtttaatatgctaccccagtggtggctaaactttattaccattcatctgttatctgacctttggtcagatacattccatgaaagattgccactggttccagttggtggtgacgctgctgaatggcccgcgcttcgggaactgtttattgcactgcttcaaagacgacctcgagccgaaattgatctctggccatcgcagagagaggccgccggacgctctgttaatgacaatgacgatttggttgtttcgttgccaaccagcgctggaaaaactcgtattgctgaattgtgtattcttcgctgtctggcgggtggcaagcgtgttgttttcatcaccccgcttcgtgcgctttctgcacaaacagaagccactctctccagaacatttgggccgcttgggaaaacaatatcaatgctgtatggcagcattggcgtaagtggtatggatgaggatgcaattcgccagcgtgacatcgtcgtcgccacgcctgaaaaacttgactttgctctccggaatgacccgtcaattattaatgatgtaggactttttatttttgatgaggggcacatgattggggccgatgaacgagaggttcggtatgaagttcaaattcaacggctgttgcgcagacaggatgccgatacgcgcagaattgtctgcctctcggcaattctacctgatggtgagcaactcgatgattttgccggttggctccgtcgtgacaagcccggaggaccaatcaaaaataattggcgaccgacccgcttgcagtttggcgaggtcatatggtccgctccagcaggtcggcttaatctcagcgtcggttatgaggcggcttgggtatcgcgttttatcgtcagcagacaaccgccaaaggttaaattacctaataaaaagcagcgaacaaaaatgtttccctctgataacaaggagctctgcttagcgacagcctggcgtctaattgaagatggacagaccgtacttatctactgcccacttcgccggagcgtcgaaccgtttgccgagacaattgtcgatctgcatcagcgcggactactgccatctttatttgatgctgccccggacattctggatacggctatctcgctgggagaagaatggttgggggcacacagcccgatacttgcctgcctacggttgggcgtggctcttcatcatggcgcattgcctacggcttaccgcaaagaaatcgaacgtttgctgcgagatggggtacttaaagtgacgatctcatcaccgacgctagcacaaggtcttaatctttcggcaacagctatcgtcatgcattctcttcatcggaatcgcgagcttatcaaagtgtccgagttcagaaacgtcataggcagagcagggcgcgcatatgtagatgttgaagggctggtgatttatccaatattcgataaagtaaataaacgccagactaactggcataccctcacatctgacacgggggcccgtgagatggagagcggactaatacagcttgtctgtgtgttattgattcgcatgcatacacggcttggtggggatttaaaagcactcactgaatatgtgaccaacaacgccgtagcgtgggaatttccagaaattatgaccgaatctccgcaagaaagagatattgcgcaggccatctgggaaaaacaactttcaacgcttgatactgctattctgagccttcttggtgagaatgatatcccggatgaccagattgaaactgctcttgatgacattcttcagtcttcactttggcaacgcagtttgcagcgttatagggatgagaatgaacggattttgctgaaatcgggactcctgtcccgcagccgctacatctggcagcgctcaacggcagcagggcgccgggggtatttcctgtcgggggtaggacttacaaccgggctacgacttgatgctattgccgctaaggccaaccaactattgattgatgcgaatgcggctataatgggcggtgatgccgaagaggcaattgctgctatcacggcgctcgctgaagaggtctttaccttctatccgtttatacccgatccattgcctggcgactggagaggtattttacgttcctggctattgggtgaacccatgactaacgtcgcgaatacgcaggcgtctgaaacgcttcaattcgtcgagaatgggctggtgtatcgacttccgtgggcaatggaggctattagggtacgtgcaacagctaatggagacctcataggtgatacagataccacgctagacgattatgagttaggttttgcggttgctgctgttgaaacaggtaccttgagccgttcgtcttcactgcttattcaggcgggttttagctctaggcttgcagccataaaagtggttacagacactactgccgattttcaatccggccaggagcttagaaggtggctgaactctgaagaagtgataagccacacggataatcatgactggcctacacctgaaaccagagtgatgtggctggaattcttgggtagtctcagccccaaaggcagccaggtttggagtcgtcatcgttataacggaatggtggactggagagatactccggcagtgatcggcacaccattgcagctttacactgttgatggtattcatcacgtactggctgatgatggcactcctctgggaagtataaatggcagaattaacacaaacagaagaggtcttcttagagttgaggtggatgatgagaatggtcgtgccatgttcgattatttaggaccggacgactttatttctacctga

SEQ ID NO: 227880 - DNA, 747 bp, Klebsiella pneumoniae; identical to SEQ ID NO: 98267

SEQ ID NO: 227881 - DNA, 744 bp, Klebsiella pneumoniae
ttgaatggatggtctggtaggcttagtcctcaaaaagagaatatattatccttcactaaggatattagtccggttagaaaccaatgccacttcaatgacggtgttccggagacgtcgcaatactgtatattaggtcaaggcaataaaattcctcatgttttcgtgtggggggatagccatggcgcagaaatagcctatgcgttgtcatcgttgactccgttagttacggctacgtattcagcttgcccccctgcttatgcatttaatactgaatctcgaccagattgcataactcataacaaaaaagttatgaattatctcttaaataataaaaatattaaggatgtcgttttagctgcaaattataatttgtatggaagtgataaagacatcgagtcttttgtcaagggctttgagaaaactattgagctattaacccggtctggtaagcatgttattgtgttagatcaagttccatctccaggagtgaatgtcccatacaccttaacaaatgtagatgtagtagtgaataaagaatttagatacaatgacaaggtttttagaaaaataaagttaacggatggtgttgatttattttcttacgaaaaatacttatgtgctggcgagtcgtgcccaatgatgtataataattttccgatatcttttgatgataatcatttatcattgtctgttgcaaaaataatggtgaaatatattaagcgtgatttattgctgaccgagtga

SEQ ID NO: 227882 - DNA, 480 bp, Klebsiella pneumoniae
atggattcgactgtatatatccataaagctattgaagaaactttattgaaaaaagaatttttaacattaaaaggtgttgaaaaattaaggcctggaaaacatcttggacttattcctgtatattttattggctgtgaatctaattatccccctatactaaaagttagggattatttattgtcttactggattcataatgacaaacaaattgattatttccttattgattattgttttaagttagtagtttgcaatgatgctgatttttcacgttatatgaatgctcatccgttaaatgggattgatagatttaaattaatagagcttatgaatactccttataatgaaattattaaaaatgaaatcgataaatgtaattgtggtgcatttaaattatcgaacaaatataagttaaaaacaagaagttcaaaaggtaaagataccttttgggggcatatattaaagcatcgagcattgtaa

SEQ ID NO: 227883 - DNA, 177 bp, Klebsiella pneumoniae
atgatggaaaaagaacagaatcaatgttgcctgcaacccctcctgcatcaggatgtatctcccactacatcccgggtcactttcagcacggataaaaaggtactaacggcagagcaatacagagactggcaatacattggcgctaccctcagagaaaaaatgcagtcgaataactga

SEQ ID NO: 227884 - DNA, 195 bp, Klebsiella pneumoniae
atggaagaaaaaagtattgattcaaaaatcctgactggagaacgccttctggtcattagctctgaaattctcgcagttttaaaaagtgagctttcctccagaggattaaagcccacttccagtaatttacgcgttgtgatgaatattatttatcagtctcttcctgattcactcagcgatttttttattgaataa

SEQ ID NO: 227885 - DNA, 279 bp, Klebsiella pneumoniae
atgtatcaggacgaatatttccacgtgactatgcccacggtttttgctcgtgaggacgccccgtggattaaagagcagttggcaacactcccggcaggtatgcgggaaaaaatcgcgatggcgtatgcgcaggcgtaccaggaagcgtttgatgcagagccggtgtcattccggcagcagaacgccgcacgacggacggcaaaccgcagattgcgagagttttgcacgaggtataccccagcggttaggggatatacgtcgctcccacccagggtttga

SEQ ID NO: 227886 - DNA, 243 bp, Klebsiella pneumoniae; identical to SEQ ID NO: 220800

SEQ ID NO: 227887 - DNA, 822 bp, Klebsiella pneumoniae; identical to SEQ ID NO: 139181

SEQ ID NO: 227888 - DNA, 309 bp, Klebsiella pneumoniae; identical to SEQ ID NO: 139182

SEQ ID NO: 227889 - DNA, 402 bp, Klebsiella pneumoniae; identical to SEQ ID NO: 139184

SEQ ID NO: 227890 - DNA, 1719 bp, Klebsiella pneumoniae
atgaaactcaaaaaaaaaatatgcatccaatatcttatagcatttactctgctaacagggtctttttcctggatgtacaataaatacttttccactgagcacaatatcagttcggctggcccccaggaaaactacgcatggactatagcgaaatttgccatacgccttgctgaatttgaggccagaactgagcgccagttacgattaacgtcgctcagtaacagtgatatgaaaatggaactggatttcttattttccggttccaacgtattgatgacaaaaggtgatgccacccagtatctttacaaagaacagggttacgatgaaacgatttcatctatacatcagatgcttgaagttattgataatgagatgaaaaaaaacaaaccaaattataacattattctttccacggttaataaaattaaagataaaaacacagaccttatcttcatagccgatcacgcggaggtcaatcaaaggactgctatttttgaagactaccttaaaaaaggcgattcttttaaaatcccgataattgttacgtatatattgttacttattatgctagtcatttcctttaggcaactgacaacactcaatcgactgctggaatctgaaaaaaaagcattcaataacaaaaacgctttcctgggtaaattgggtcatgaacttagaacaacactacaggctatagttggttcgatagagtcaatcatatactcgcctcaaaaagctccggatcaaaatacattgcacagacttgagaatgcagtttctcaaatagaacgccaaatgaatgacctggctgagtatgctaaaattgacaacggtgcacttaaaataaacaaatcaactattaatgttgctgatttagttacaaaggttgttaacgattgcaacgccaagtacaccaataaaaatatagaggcatcggttgttaatcttccctctgtcaacattaacacagatggaatacgtctttctcagattctggaaaacttgctcaccaatgcatttaaatatacagagcaaggatcaattaccgttgatgttacaactaatcagtcacatcacagctcataccttcatattaaaatttcagacacaggaataggtatagataaagaaaagcaaacaataatttttcaaccatttgtaagaattgaaaatggttcctctcttatcccaggctctggaatggggctggctattgttgagggtatcgtcaaagcgatggatggcaaaattagtgtcatcagtgaaccaggtaagggaagtatatttacagtatcactacccgttgaaattaatagcatcgatagtacgacaaactccactccattgaacgtcatggagacttctttgaagggactgtctgtattacacatagatgatagcgaattaacatgcagaacaatggcctcaactttaaggagtgttggatatagagcagagtcaaccagctctgttaacagagcaattgaaaagcttatgcgtattccttatgacattatactatgtgacttacaaatgcctatcatgaccggtgacgagctggtagactacattcgtactcgtgaaggtcctaatagaaatacacctgtaattttcatcagcgcttatcctgacaactacttacatgcagagataccgcttattgttaaaccagctagaattgcagatatcaataacgagatatccaaagccataagataa

SEQ ID NO: 227891 - DNA, 504 bp, Klebsiella pneumoniae; identical to SEQ ID NO: 136293

SEQ ID NO: 227892 - DNA, 996 bp, Klebsiella pneumoniae
atgaaaactgaacttgtagaaaacaatggaagtcttcttgaaaaccatacacatatcacttcttcatttgatctttcaaaaggatcaaatgagggagtgataaccaaactcgcattagataatgtgctaaaccattctgtaaagggattcaggaaaaattatctaattgagaaaaacctaaacattatcaatgggatgggcgttacgcttggtgattctataattggaataaatgcactggattgcataaaaaagataaataaaaacatacagattacgcttatacgaccagccacctgccactcttacgtagaggaaatatatagtattgccagcaatctaatagatagattggaatatatgccctatgatataaagcacctaagacgcgatgcggtaaacattgatatcggtaatcaactatactggcacgattttaacaaccttgaaatgcatgatttttttctgaaaaatcttggggttgactttgaattaattcctgataactggaaatgcaatcactggttacaagacagcttcccaaaaaaaacaaacaataaaaatcaatatgtgcttttctgtccgaaagcaagtactagtttgcgttctatcccggaaaaattccactatcaaattattgataatttatatacatcttttaacttacctgtccatggatttagtcccatcaaacatccgatgtacaaggacattagtaagacgtgctcaaatacagctgattttataaaagcaatagctcatgctcaacatgtttatacatgtgattcctctgccttacatgttgcttccggttacgatattcctactacctgtatatttacagcaataaatcccgttcttagaagcaggtattataaaaactgtaaatctatctatataggtgatgaaattactcagaatctgcatgagtcggaagaccctgcaattattgagcatgtagtttcacgatttgaggctttttatgaaaaaatttaa

SEQ ID NO: 227893 - DNA, 846 bp, Klebsiella pneumoniae; identical to SEQ ID NO: 136291

SEQ ID NO: 227894 - DNA, 306 bp, Klebsiella pneumoniae; identical to SEQ ID NO: 136290

SEQ ID NO: 227895 - DNA, 306 bp, Klebsiella pneumoniae; identical to SEQ ID NO: 136289

SEQ ID NO: 227896 - DNA, 297 bp, Klebsiella pneumoniae; identical to SEQ ID NO: 136288

SEQ ID NO: 227897 - DNA, 576 bp, Klebsiella pneumoniae
atggaatacagattaaaagcatccaataaccgcagtttagccattagcatagtaatattgcttctaatagctattctcgcattgggtgtatgttttcggcttataaaggttaatcagcaactgactgaggacttagttaataaccgacaaattattattcaaccactgggggcaaataaggaatttgcattcagtggagccaaaggtgatgctcgctaccttcggttaatcgcgctgagttttctaaatttaaggctgaatgtcagtaaagaaacagttcaggctaaccatgatctcctgcttgcctatgcctgtgaagggcagcgtaaagtcatgctgcccgtactggcagaggagaagaaacgtatcacattaacggagggcagttcagtcttttacccccaggttctgcgtgtggccgccgatacggggcttgtagatattaccggggaccttgttttcacatatggcatgaaatcatcggacccactgccaaagcactaccagatcagaatggacacccgtaatgatggactttgctataacgcctttgtggaggtaaccgttgaaaattaa

SEQ ID NO: 227898 - DNA, 720 bp, Klebsiella pneumoniae
ttgaaaattaaactggcattgctcatatcggcatctctcatatccggatatgtttctgccgattcgatcaccgttaattccttcgccaccatttctaccggggtaagtaacaataatcccaacagcatcactgtacctgatgaccgaatcacttccctgcagtcaacgcagggagtgcttacagcacgtgaggccacagcaaacggaagcgttgtgttttcaaccttagcaactaaacctttcacgatgtttgttcagacggagtccggctttagttttaccgttaacgcaacccctcgtaagcaacagggcatgtcgctggtcgtgaacaataaagaggtaaaagggacagaagatgctacgacctgggaaggatcacaaaatacttatagtgctcttataaccggtctaatttcacgatttatcaacaacgataaaccccagggattcgtatttagtaagaatactgacgttcagttatcaccttcagtacaaagttattttaacgttcgcccggtaacagcatggcgaggcgataaattgaggattatcagactagagctgacatctcgttcttcttcccggcttgagctgaatgaaagatggttctggcaagccggtgtaatggcggtgtctttctggccacggctggatgccatttcacctggaggtaaggtctcagccattattctcttgcgtgagaatggaggggaacaatga

SEQ ID NO: 227899 - DNA, 1332 bp, Klebsiella pneumoniae; identical to SEQ ID NO: 136285

SEQ ID NO: 227900 - DNA, 390 bp, Klebsiella pneumoniae; identical to SEQ ID NO: 136284

SEQ ID NO: 227901 - DNA, 531 bp, Klebsiella pneumoniae; identical to SEQ ID NO: 136283

SEQ ID NO: 227902 - DNA, 2622 bp, Klebsiella pneumoniae; identical to SEQ ID NO: 136282

SEQ ID NO: 227903 - DNA, 378 bp, Klebsiella pneumoniae
atgtcttcgttgataagtgatgtgaaagaatctgagctgattaaatataccctagtgataatcgtttcttgcttgataaccgttattgtttcgtttgtcttatggtctgcatggctaaaaccgcctgttattgttagtttcgatattaaatccacaactaataaatttcttttgcaaagcgcgaagctgacgttaaacgatgagcaacgtaaggaacttgttcaacgctttaatagagcattaacagatactctggcggactatgccgcagcgaacaatgtcgttgtcattgttcaacccgcagctgtctccggcattcaggatgtcacacctcagatacgaaccgagctttccaaagctatgtcccgtaaccagtaa

SEQ ID NO: 227904 - DNA, 633 bp, Klebsiella pneumoniae; identical to SEQ ID NO: 136280

SEQ ID NO: 227905 - DNA, 999 bp, Klebsiella pneumoniae; identical to SEQ ID NO: 136279

SEQ ID NO: 227906 - DNA, 1938 bp, Klebsiella pneumoniae; identical to SEQ ID NO: 136277

SEQ ID NO: 227907 - DNA, 771 bp, Klebsiella pneumoniae; identical to SEQ ID NO: 136276

SEQ ID NO: 227908 - DNA, 555 bp, Klebsiella pneumoniae; identical to SEQ ID NO: 136275

SEQ ID NO: 227909 - DNA, 1365 bp, Klebsiella pneumoniae
atgaagtattcgacagcagctgcgctgttaactgccctggcgcttattactacgcagtcgcaggcaggcgtaaatgatgatttgaataaattctttgaccagatgggaggaggtggcgctaacgtctccgtgccggcggcgtggaaggggcaagcggcaggatatctgaccggtggcaatctctttttgcggacaccagtcagaaacatccagctgatatctgtcaccctgccagacgtgaaatcaggttgtggtgggatcgatgcttatcttgggtcgttttcatttatcaacagcgaccagatcaaaattatggggaaacaaatactgagcaacggccttggttatgcttttgatctcgggctggaaaccgtctgcccccagtgcaagtcggtcaaagattaccttcagaaactggccacggatgtgaacaatatgaacatatcgacctgccaggcttcacaggccatagtgggaggtctgtggccaaaaacgcaggaagccagcaagaagatctgtcaggatattggcggcgcccatgatgtcttctcagactgggcggcttctcgccagggctgcggcgttggcgatgaaaccgataaggtattcagtaaagctacccctgaagaaaaaaagcgtatcccacgtaaccgtaaccttacctggtcaactttcgaaaaaataaatcagttcatcagcaatgaccgcgaattgaaagaactgatcatgtccctggtagggaccgtcatttatgacgataaaggcaatcccacttttctggcgccgcgcgggggcagtgattcaattttcgacactttactgaatggtggtactgcgaagatttatcactgtaacgataatactgattgcctgaagccaagtgctgcagagttcacactaagttcgtcacaaggtatgacaaaccgggtaagaactatgctgcagtccatattcgctaaagggcgtaccgacacaaaacttaccgataatgaaaaggcattaatctccagcacacgggtaaaaatacttcgctatgcaattgactcggcttctttaggaatggacgacagtgttctgacgagtctttcagaatatattgccagtgatatggtaatgtcatatatcggtgggctaattgaccttgctgaaagttcctcctccggaacactgaacactgaagatgaaaatgcccgattccgggaaaatcttctttcagtaagaagtcaactgggccagcgtgtatcacgcattcaggtgcaacaaaacgggttaattgaatttgataataacctgaatcaaatgcgtcagcagctctccagcaatatgtcagacaaagtattatctaattatgattacggtggctaa

SEQ ID NO: 227910 - DNA, 2871 bp, Klebsiella pneumoniae; identical to SEQ ID NO: 136273

SEQ ID NO: 227911 - DNA, 564 bp, Klebsiella pneumoniae; identical to SEQ ID NO: 136272

SEQ ID NO: 227912 - DNA, 2133 bp, Klebsiella pneumoniae
atgagccttaactcccgggactttactcagggtggacaggtattgaaatacatgatcggcatgtttttgcaaatcatgaatatcgccacctactatatattaatgctttcagtgcttgtttttttaggctggttattgataaggatgagttttcagcaaatttggcatgggctctgttactggcttattagatattgcgttataccgatgcgggaacattcagttaatcaggagtggagtccctacgtttttcactttacgaaatctaccggcgaggtgattgagttctctcgcaccgccatccaggttatggtcgatccatactttattggcgtggccatgaagttgaaagacacggctttctggggttggggattagcttcatttacctttgtaggcggaattctggctgtcacctggtatctgggtgctaaagggaagaaacaacgaagtgatgaaatacttggtggcagagacctggttgatgatgtcaacgtggttaacaaacaattaaaaaaagaaggtaagtattctccgcttaacttatctggactgcattttccaaaatattcagaaatgcaaaactacgctctacacggtactgtgggttcggggaaaagtactacaattaatgactttttggctcagatccgagctaagggtgacagggttattatctatgacaaagggaataactttatcccgatattctaccggcaggacagagatgtgttgcttaatccaatggataaacgctgcgcagcctggaacctttgggatgaatgccagagcgcagtagacttcgagaactttgctacaacactccttccagattcaggtaatggtgaccccttctggttactttcagcacgtcatttatttgtggaaaccgcccgacggctggcaaaggaaggcgaccgttctatttataccctgctgaataagttgctctcgattacgcttgcagatctccgtgaatttcttaaaggaacagacgcatcaaacctggttgaaggtagcattgaaaaaaccgcgatgacaattcgaacagttttaaccagttatgttcgttcactgcgatatttacaagggcttgatgatcaggggaaacgaccttttaatttacgtgactggatagctacggaagatccagagggagataattcatggatttttattagcagcgatggccgtaaccataatgctttaaaaccgcttattacagcatggctttatatgtctatggtaaatatcctcggcctgacagccagcagggaaagaaggatatggttgttccttgacgaattaccatcccttcataagttaccgaaccttccggagttctgcgcagaagccaggaaatttggtgggtgtacttttgttgctattcagaacttccctcagttaagacaaatatatggtaaggatttcgctgaatccatatgggatttactcaatactcgtttcttttaccgcgctccaagtggaccagtggctgaatttgtcgaaacagaactcggtgagaaacgaattaaaaaattccgtgatcagtactcatatggtgtagacattatacgtgatggtgttcagttctcgaaagatgatgtgcgcgataagctggtttcgtattctgatattcagcgacttaatgacctgcaatgttacgtgaccttaccaggtgattaccccgtcgtaaaactggacctgaaaagaaaagagtatagagatattgctattgggcatattccaagaggcgatgattttcttgatccggaagtcgaaaagcagcttgaagacgcttcggaagatttaataggcaatgcgtctgttattcttaatcgacttttcagttcatctcgtcaggaaggcgaatctgttttgaatgtggttaatcaaccaaagcattcccgaaacaattctcaaggtccgggagagggagactcttcagaaaacaacgctgaagctgaagggcggggaaataacctgaacgctgaacaagctgtccaggaattacccgaggatactgaccctgttaaaaacgaagcacccgcagaagaaaaattacctgagcgcgctgatgaaactcaaatcaacagacgtattgaaataggggctgaattggagaggtggtaa

SEQ ID NO: 227913 - DNA, 1455 bp, Klebsiella pneumoniae
atgctttccgtttctacggtaaaaagtgcatcaaaagcatccgtttattattttgaagaagacaattattacttccagggcgaacaatccacagcctggtatggagctggcgccgaatcacttggacttgaagggccagtaaagcaagaaatgtttaagcaggttctggaggggaaactgccagacggcagtgatttaactcatatggttggcaatgaaaataagcaccggccgggttacgatcttacattttctgcgcctaaatccgcttcaattcttgccctggtatatggcgataaaactgtcctcgatgcgcataaatgggccgttgaacggaccttagacgaagtggaaaaactcgcatcgactcgtacttacagtggtggtgaaaccacatttgaacaaactggaaaccttgtaattgcgcagttcttacatgacaccaaccgtaattctgaaccacacatgcatacccacacggtcgtggccaatgtaacgatgaacggaagtggctggaaaacattatcttcggatactaaaagtgggaagggatttaccgatactgtctggaaccaccaggtagccattgggtcaatctatcgtcgcttttataaagggaaactggaagccgaaggttatcccattgaggagaagggaccacgtggtgaatgggatattgcaggtgtgcctatcgatgatttatctacgcgccggcaggaaataatcgaaaaagtgggtgaggatgccagcgccaaagcaaaaagtgtcgccgcgcttgatacccgaaaaaccaaggatttcaccgatatcgaaaacgtcaggaaaggctggcgggaaacaatggaaaaggccggtttcgattatgaacaattcgaaactgaacgtcaggaacgtgtgccaggaacatctcaggttcccactttgaccgcgggtagtgatcctcaaaagggaaatgcgccagcagacccccacagagtgaatattacgccgcaaaatgtacccggagtggtgcatccgggggctgatcgctccgagcctcagcctgtcctggaaaagcaagctaaagagaatcccctgtcagctattgttgataaggctatcgagcaggtttcaagcaagaatgtcaggtttacctacgacaacgtactgaccaacgtgcttaaccagaccgaaattaagaaaggtgtgtaccaggaagcgcgccaggcgcttgatgccgcggtcgagaaggggagtcttatcgcagttgatacaaaacagaccctttttacttcggccatgcatgttcgagacgaacaaagactatcccaaattgccggccgtatggccgaacaatccgctgggcttacggcagatgttaatgcccgggatatcacggcaaaaattgcagaccgtgatcgtgctctgacgctggtcgatgccagggggggggggaatttcagagcaatttattaa

SEQ ID NO: 227914 - DNA, 591 bp, Klebsiella pneumoniae
atgttttaccatattgttcccaaactatttcatttaatggcaaataagtgtacgttggaatcagtatcagtgcctgaattaaaactcacactcgaagctgatgcaataaaaacttgccggccatttcccaataaaaacatatggagtggaatgattaaaggcagaaaaaccgttaatggaatattgataaagagtgatgagattttatcggattttacagtgcagtatatctggaatattgaggggatgggcctgataaagcataaagtgactatctgggtggaggatcaagagtatgacctggtgtctcaggacatactgcttaatcacgcttttgcaaagtgggagagtcgtacgcacgccagttatcgtactgaggcaccggtatatatacagccaatgatggaatcctatctaaccagaaagcattcaagagagtctcatgacgtgtggacagaatatgaatgggggaacttcctgaatgaacgagaagagagccttttgcttcatacaatccagtcagaaagattatcatcagatttttctgtctttcataaagtcccttgtttacacgatgcgttaacgatttaa

SEQ ID NO: 227915 - DNA, 549 bp, Klebsiella pneumoniae
atgaaatcacaattaattacccggagaatgttggtagggctaatatctctgaaattatttactactcaagtactggcggccgaaacggaaattggtttttcgcctgaaggtagcgcgctacagctggtactcaacaccatcaattcatccacagaaagtatcaggctgatggggtattcgtttacgtcaccagaagtcgccggcgcgctcgtcagagcaaaacagcgtgacgtcgatgtgaaagtggttctggacgggaaagaaaataccggcaagcaacaccaggcgagccaggcggccatgaatcttctggccaatgccggcatcccggtccgcacagtttcgcagttcaaaatcatgcatgacaaagtgatcattgctgatggccgtgatgttgaagtgggttctttcaactacacccgcgctgcagatcgctctaactctgagaatgtgattgtgatccgcggcgacagagccattgcacagcgttatctccagcactgggaaagccgctggcaaatgggtacagactggaaaccaacgtactga

SEQ ID NO: 227916 - DNA, 267 bp, Klebsiella pneumoniae
atgtcgcagatagtcaatgcagttacttcctcaacgaatgcaagacgtggttaccgaaagggcaatccgatgagcgctgttgaacgtcagcagaatcatcttgccagaaagaaagaaacgcataaggaaatgcgggtatacgtcaccagtgaaattaaagatgagtttcgccggatgtgtgaagctcaaggggtgacgcaatcagaaatgattgaaaagcttataaaagatgctgttagccagcacaatggctttgttaaggattga

SEQ ID NO: 227917 - DNA, 909 bp, Klebsiella pneumoniae; identical to SEQ ID NO: 98059

SEQ ID NO: 227918 - DNA, 348 bp, Klebsiella pneumoniae; identical to SEQ ID NO: 98058

SEQ ID NO: 227919 - DNA, 432 bp, Klebsiella pneumoniae
atgtctaaaaacctcgaattatttaaccaacagacggcggaaatctttgcggtgctatgggagaactttcccgtgtcacaggttattacctacgaaaaatttagcgccgcgctccccgacgactactttgaccaacttaactcgccagaaatgaaatcattaagagaactccgtagtgtggttgaaggcacattcacttttcttggtgaaaatgggtacatccagtacaaaacagaccaccaggcgtattttcaagatgtgcgcctgaccgaaaaagcacttgcagtgctcaacaaaaagcctgaggcgcttggtgggaatgaaacgatgggcgataagattatcagtgcagtgaaagacgggacaccgggtgtcattgccggtgcggtgaccaacctgctgacactcggtgtcaatctagtaacctgctaa

SEQ ID NO: 227920 - DNA, 1092 bp, Klebsiella pneumoniae
atgggttatgaagttgattttttagctgtgggagaaaaaaaaagcggtgatgctatctgcatccgatggggtaacctgcatggttcaagagatgagcaaaaggtcgttgttattgatgctggctatgcaagcacaggagagaaagtaattgagcatcttgaaaaatattacaaaacaaagactattgatttactcatatcctctcatccagatggagatcatgttggaggactcgctcatgtacttgaaaatgcagaagtaaaagaattctggattcataagccttgggagcataacgagaacctttcaaatgagtttgctgatggcagaataacagatgcaagcattgctaggcgcatgcaggaaaaccttcagaaagcttatgatgctgtcaaaatagcagaaaaaaaagaaataaagatagatgagccttttcaagggaaaacatgggatgaagcgaagctcatagtcattggcccaactttagcttactatgaaacattaatacctgacttttcaagaatgcctgaaaaagctgaggcaatggatggtacagagagtttaaaatccgcctttaactttgtcgttgcgaaagcaaaaaaagtaattgaatatgtagccgattggttctcagatgaaggtattgatgataacgataccacttctgcacaaaataactcgagtgttatattaaaacttgaaattgatggtaaaacgttagtcttcacaggcgatgccggtatcaccgccctagatatggcagcagaccatgtagatagctcatcaatttcatttattcaagtcccccatcatggaagccgacggaatgtcggcccagaagtattgaataaaattgttggcaacatcgtcagcgaaggagaaaaaagagcgcttactgcattcatatcatgcgctcctgattcagccaagcaccctcatcaggccgtaattaatgcatttactcgacgtggggctaaagtgattacaacagaggggtctggaaagtatcattataacaactctccggcaagagagggatggtcatcagcaacaccgagaaattatgtagccaattataatactgaagaataa

SEQ ID NO: 227921 - DNA, 486 bp, Klebsiella pneumoniae
atggataatctgtgggaaaaaatatcatcatataacatctttaacaacctttttccgggagctctttttatatacctgctagagcgttcaaccagtgtggtattatctacagatgatattgtgaaaaacgttgtgctttattattttgtaggtcttattattgggcgggtaggttcaattgtgtttgagccaataatgaaaaaaatacgccttataaaatttattccttatggggagtacatagctgcatgtaaaaatgacaataaaatcgaattgctacaagaaacagctaatatgtatagaactttattttcaatgtcattattgctcattatgtctctatatattgcctcgactttcacagggcatagttatgtcttgtcaaagtgcgcggccttgttctttgcagttattttcatagtgtcctatgttaagcaaattaactacatcgtactgcgggtgggaaatgctaataagctgccgtga

SEQ ID NO: 227922 - DNA, 219 bp, Klebsiella pneumoniae; identical to SEQ ID NO: 136571

SEQ ID NO: 227923 - DNA, 2313 bp, Klebsiella pneumoniae
atgagtttcaatgccaaagatatgacgcagggcggtcagatcgccaatatgcgctttcgcatgtttggtcagattgccaatattattttctacgtgctgtttattttattctgggtgctgtgcgggctgatgctgatgtaccggctcagctggcaaacctttgtgaacggctgcgtatactggtggtgtacgacgctggggccgatgcgcgatattattcgttcccagccggtatacaccattcagtattacggccagtcgctggaatatacctcagaacaaatcctggctgataaatatactatctggtgcggagagcagctgtggaccagtttcgtctttgcagccgtggtttctcttgttatctgtatcgtgacgttcttcatcgccagctgggtgctgggccgccaggggaaacagcagagtgaggatgagaataccggcgggcgccagctttccgataagcccaaagaagtggcccgccagatgaagcgtgatggtatggcctccgatattaaaattggcgatctgcctattcttaaaaactccgaaatccagaacttctgcctccacggtaccgtaggctccggtaaatcagaagtgatccgccggctactgaactacgtgcgtgcacgtggcgatatggccatcatttatgatcgctcctgtgagttcgtcaaaagctattatgacccgtcactggataaaatcctcaacccgctggattcgcgctgcgcggcctgggatttgtggaaagagtgcctgacgctgccggacttcgacaacatctccaacacccttatcccgatgggtaccaaagaagacccgttctggcagggctccggtcgtactatctttgccgaaggcgcgtacctgatgcgtgaagacaaggatcgcagctacgagaagctggtcgataccatgctgtccattaaaatcgacaagctgcgcgcctatctgcagaacacgccggcagcgaacctggttgaagagaaaattgagaaaacggccatctccattcgtgccgtgctgaccaactacgtcaaggctattcgctacctgcagggcattgagaagaacggcgagccgttcactatccgggactggatgcgcggtgtccgtgaggaccgacccaatggctggctgtttatctcctccaacgctgacacccatgcttccctgaagccggttatctcgatgtggctgtcaattgctatccgcggcctgctggcgatgggggagaaccgtaaccggcgcgtgtggattttcgccgacgagctccccacgctgcacaagctgccggacctggtcgaaatcctcccggaggcgcgtaaatttggtggttgttatgtgttcggtattcagtcctatgcccagctggaagatatctatggcgtcaagcctgccgccacgctctttgacgtgatgaacacccgggccttcttccgctccccgagtaaggagattgcggagtttgctgccggtgaaattggtgagaaggaaatcctcaaggccagcgagcagtattcttacggtgctgacccggtgcgtgatggtgtatcgaccgggaaagaaaaagagcgggaaacgctggtcagttactccgatattcagacgctgcctgacctgtcctgctatgtcacgctgcccgggccgtatccggccgtgaaactggccctcaaatacaaaccgcgtccgaaaattgccgagggatttattcctcgcactctcgatgcgcgggtggatgcgcggctcagtgcgttgcttgaagcgcgggaagctgaaggcagccttgccagggcgcttttcactccggatgcgccggcatccgggcccgctgatacaaacagtcacgccggtgaacaacctgagccggtcagtcagcctgcgccagcagacatgacagtatctccggaaccggtaaaagcgccgccgacaataaagcgtccggcagcggaaccttccgtcagaacaacggagccttccgtcctgcgggtcacgaccgtaccgttgatcaaaccaaaagcagccgcagcggccgctgctgcctcaacagcatcctcttccggtgcccctgcaacagctgcaggcgggacacaacaggaactggcgcagcagtcagcggaacagggacaggacatgctgccggccggcatgaacgaggacggcgtcatcgaggacatgcaggcgtatgacgcctggctggcagatgagcagacacagcgggatatgcagcggcgtgaggaagtcaatatcaaccacagccaccgtcacgatgagcaggatgatgtcgagattggagggaatttctga

SEQ ID NO: 227924 - DNA, 594 bp, Klebsiella pneumoniae; identical to SEQ ID NO: 92407

SEQ ID NO: 227925 - DNA, 369 bp, Klebsiella pneumoniae
atgcagcaaaacgaagaggctagaaaggctatttgcgacaaggacgcgatatcgatttcagctgcactgattaagctgaatacatttattctagataacaccgatattgataaagttcaggtatggggaaatggtgcaacgtttgacaacgtcattctgcgttccagctatgaccgtgagtttatcccctgcatctggaaattttggaatgaccgcgatgtgagaacaatcgttgaattaggtcgggctattggcatcaacccacgtcgcgacattccatttgaaggtgatatgcataacgcgcttgctgatgccaaacaccaggctaaatatatttcagcaatctggcatcgtttgattcccgcgtaa

SEQ ID NO: 227926 - DNA, 963 bp, Klebsiella pneumoniae; identical to SEQ ID NO: 98277

SEQ ID NO: 227927 - DNA, 894 bp, Klebsiella pneumoniae; identical to SEQ ID NO: 98276

SEQ ID NO: 227928 - DNA, 1746 bp, Klebsiella pneumoniae; identical to SEQ ID NO: 98275

SEQ ID NO: 227929 - DNA, 1086 bp, Klebsiella pneumoniae; identical to SEQ ID NO: 98274

SEQ ID NO: 227930 - DNA, 1299 bp, Klebsiella pneumoniae; identical to SEQ ID NO: 98273

SEQ ID NO: 227931 - DNA, 1770 bp, Klebsiella pneumoniae; identical to SEQ ID NO: 98272

SEQ ID NO: 227932 - DNA, 186 bp, Klebsiella pneumoniae; identical to SEQ ID NO: 98271

SEQ ID NO: 227933 - DNA, 360 bp, Klebsiella pneumoniae; identical to SEQ ID NO: 98270

SEQ ID NO: 227934 - DNA, 948 bp, Klebsiella pneumoniae
atgacaatttccctgcataatccccggacaagcgcccctaacaccgcagcggcgaccagcatatccccgctggacccgtcaggctcctcaaaaacgaaattttctaaaaccagaacggatatttatcagaccgttaccgacagcatcattgcagcgctagaagccggtgtgaaaccttggtcatgcccgtggcagcgtgtatccggcatgtctggtctgccatcgaattacgccaccagcatagcctacagcggtatgaatatcatgttgctatggtgcagtgcatcaaaacagggtttcagcgattcacgctggatgacctacaaacaggcacaggcagcaggtggacaggttcgcacacgtgaacgtggcacaacagccattttctacaccaccctggagaaggaaaacgccgccggagaagttgaacatattccgatgctgaaaacctttaccgtgtttaacgttcagcaaatcgacggcctggccctgacaactgaaactgtcagcccggaagcaacctttgacccggtgccgcaggttgagaacctgttacggaagagtggcgcaaacatcatcgagaaaggacaaaacgcctttttcagcccatcaacagatgaagtctggctaccggagcgccatctgttttcagatgcggctaatttctacgctacaggtctgcatgagctgattcactggagtggtggcaaaaaacgtctgaaccgtgaaatgaaagggaagtttggcagtgcggattatgcagaggaagaactgatagcagagctgggaagtgcctttctgatggctgatcttggcattgagggagaggtacaacatgaaagctatattgcttcctggctgaaagagctgaaaaacgacaagcgttatattttcaaagcggtcagcgcagcctctaaagcacatcgttatttgatggacaaaatctga

SEQ ID NO: 227935 - DNA, 732 bp, Klebsiella pneumoniae
atggcaaatttcgaggactggtgtgattcgacagagcgtaatatcagcgaccattatttgcagtcaataacggccagggatgccgagtgtatgttcggcgttcaggttatggccgcgctaatacctgaacactatgcgtcaccaagaaatatcgctaacgcatttgaagctctaggtaaaccggggctggcggcatacattgctggaaaattgcctgaaacgaaacagattcgttccggtgatttgggtgagatatttgcaactgaatggataaatgcacgtagcaatggctataaaacgcctataaaaagattgcgctggaaagatcatcgcaatatgtcgatgcgtggtgaggacgtcattggtatttacatagatcagtcttctcaacaactttttttccttaaaaccgaagcgaaaagtcgcgccaaaatgacgggagaggtggtttctgaagcccgcgataacttgaataaagagcaagggctgccatcttcacatgccctaatgttcatagcagatcgcctgaatgaacagggtgaggagcttttggctaaagcgatcttaaatgcaacgcttcggcaaggaattgttccaggatgcgtccggcatcttatctttctattatcgggcaactcttcagaaactatgctgaccacttcaattgaaaagtatacaggtcaaaataatcagtggggtgaagtggtcaacaaaaactggccaccgcgttag

SEQ ID NO: 227936 - DNA, 219 bp, Klebsiella pneumoniae
gtgaataaggtcgaactgcttcagaagatatcggcactcgctactgaatgccacacgctggcctgtgagcttgatattggtgatgagcgaaccgaaatgttcgaaatctacagcgtgctacacaacctcggtcgccgcgggtacgcctgccaggtagggcggcgaatgaatccattgctcgcatcctgcgatgacgacgatgatgaggatgatgactga

SEQ ID NO: 227937 - DNA, 618 bp, Klebsiella pneumoniae
atgactagcagcctgttaccgccggggtcgtctgcgctggagcgcaggctggcgcaagcctgttcaggtatcagtgatttaaacgtgccgctgcgtgacctgtggaacccgtggaaatgcccggcaacgttcctgccttatctggcgtgggcggtttccgttgacggctgggatgaagactggagtgaacaggagaagcgccgcgtcatcggtgaatccttctggctccatcagcgaaaaggcaccgtcgccgcccttcgccgggtggtggaaaacatggggtacagcctgtccattgaagagtggtggcaggtggctgaccaggcaggcacattccgaatcaccattgatgtgaacgatataggtattacagaggcgctgctaaccgagctggaaaggctgattaatatcacaaagccggtcagtcgccatctttccggcatcaccatgctcacccggacggcgggagacatttattacggcatggcggtgagtgagggagatgttatcagcgtctggcctgcggactatgagccggatatgagtattttttataacggtcgtcagtattttgacggcgaatgtgtgtttaccgggaatgccagcgatgaaaattaa

SEQ ID NO: 227938 - DNA, 489 bp, Klebsiella pneumoniae
atggaagaacattcaccttttgtggtgtttttacaataccttgccagttcaggcattttagctatcatgacagccataattggttgggtttttgtatataaaaactcacgtgcattacaaaagagaagtgagacttggtctatagtgaaaaatgtttccgataatttaaaggaaatagagtcttcatcaagaaaattttgggttcctagtgaatcaaaagaaatggatgcgatgtcttttcaaaatgaaattactgcgcttctcgctgagactgagcgctggttaaatcatttgaagcaacgtatcgaaattaatggtgatttcaagccattgattactgatttgtttaaagacgctactgctaatatcgaaaaggcccacacttttgataagagccaaagaacaagagtcagtgtgttagtttcacggagaacaaagataattaaggccctcgtggatgagtcatatcaaacaaaatttttaagttaa

SEQ ID NO: 227939 - DNA, 321 bp, Klebsiella pneumoniae
atgaacatcaaagagatacatattgctgaggatttttcagacgtaccttatggacgctacgatactgatggtcctgacaatgggcaacgtttccgtgaagagcatcttctgaacgccattcgtgactatgatgaggttcatgtgtacctcgatggagcaatggggtacggttcatcgtttcttgatgaagcatttggtggtttatataggactgatggtattgaaaagtcagttataaaaagaaaattaagggtattcactgagttagatttcctcaaggatagtatttggggatacatagctgatgccaagaaggagtaa

SEQ ID NO: 227940 - DNA, 1068 bp, Klebsiella pneumoniae
atgaagcggctaacagaagaacaaatagaatactctttaaccagggcaaggaagatggctcgacgagaggccaggaagcagtctggtggacgaaggatgctcttgcctatgcgagtcttttctcgcgtgagaatccctgcaccaagcgccttagatttgtttaatcctgagaattataagctttttatagagtttataaccttaatcagagattttataaatgatggtgaaaaagtattgattgactttcgaaatacaaacgctatcaaagcatgtgctgttatcgtgctgtatgcttacatcgattttttgcagagacaaacaaaagataaaactgtaattgctataactacttgcggatcagcgcgggttaataattggtttaaaatatgtggtatatggggtattacagggtttcaacgtgttaccgctgataagttaaactcaatggaaattgtttcagctgttgccggtaaaactaaaaacaatcaagaaagcgctgaggccagagaaaaaataaaaaatgtattgaaatacattaaaggtactatctatgagggaaaaatatcagtatcagacgggcaaaagctatatgcagccttaacagaatctattagtaatgtggggttgcatgcatattcaaatgaaacgcaattttctgagtttattgctgatatcggaaaaaggtggtggatattagcccataaagttgaagagcaactttacttaatggtttatgatatgggtgaagggattcctgttactcttgtaaaaaaagattttttcacactaattgctcagatatttaatcccaagactgattctgataaaatatatgctgcagttcagtatggggaaactagaatgaatagtcaaaaacacggtaagggattgccagatatgaaaagatatgttgtagataaccctgaaggtcaattacacatttttagcggcatggggagatattcctataatgctgcaaacaacgccgaagagcaatttgatctgccatactctataggtggaacccttattcaatggaatgttagtttgagaggtactgaatga

SEQ ID NO: 227941 - DNA, 510 bp, Klebsiella pneumoniae; identical to SEQ ID NO: 183454

SEQ ID NO: 227942 - DNA, 699 bp, Klebsiella pneumoniae; identical to SEQ ID NO: 183455

SEQ ID NO: 227943 - DNA, 351 bp, Klebsiella pneumoniae; identical to SEQ ID NO: 183456

SEQ ID NO: 227944 - DNA, 204 bp, Klebsiella pneumoniae; identical to SEQ ID NO: 183457

SEQ ID NO: 227945 - DNA, 681 bp, Klebsiella pneumoniae
atgccagacctgaaagaaattttaaaaaatagtctttttaatcaagtcgatgatagcgtttctgcgcctatatctatccgccttccgaccattttaaacaacgagttggacgaactatctttaagccttgatcgctctaagagctcgctaatcagcgaatttatcaaggccggggtagttgctgcgaatgagttactaaaggagcactctctgattagtgctgaaatgaaagagcagctagttgatcagcgtgaagacagcgcagccagcttccatgataggaaagccttcatgttgaatacgaactacaacaacgatgtagaaacgcatttcgatatggttaaaaaccaagaggctgcggctttttgcgaaggttggaaggagtacatctgccagctttctaaaggtgataaggtctatctgtatcagagtggcgtaggcatcattgcttctggtgttgtggatggtgagcttgtgaaaagcgagcattacggcgtagctgatgataaatacgctaagccactcaaagattttaaaaccggcttcaaagctatctccgcgcgtcgctttaaagagttaaccgggggaggggctaatttccgtagaacgatgattgaactcacttctatgcaggctcatgctattgctcaagagattgagaaattaacagctaagaagtga

SEQ ID NO: 227946 - DNA, 1029 bp, Klebsiella pneumoniae; identical to SEQ ID NO: 183180

SEQ ID NO: 227947 - DNA, 411 bp, Klebsiella pneumoniae; identical to SEQ ID NO: 179336

SEQ ID NO: 227948 - DNA, 504 bp, Klebsiella pneumoniae; identical to SEQ ID NO: 179337

SEQ ID NO: 227949 - DNA, 285 bp, Klebsiella pneumoniae; identical to SEQ ID NO: 179338

SEQ ID NO: 227950 - DNA, 510 bp, Klebsiella pneumoniae; identical to SEQ ID NO: 179339

SEQ ID NO: 227951 - DNA, 1026 bp, Klebsiella pneumoniae
atgttactgaaagtcggcgaactggcacgccgttccggtattaccgttcgcacactacactactacgacaatattggtttgctgatcccttctgcgcgctccgactccggctaccggttgtataaccgggccgatatcgcccgtctgcatcatatccaggcgctacgccgcatgggattgacgctggccgaggtcggggcgattctggaacgttcggatctggcgctgccaacggtgcttgagcggcagattgccatgctgaaccagcaactggcgcaaatcaccgcgctgcgcgctcgcctgcagacgatgcagctgcaattgacggcgggcgatgatccggaactgaacgactggctgacaacgttggagttaatgactatgtatgataaatatttcactgctgatgaactggcgcagctgccgttttatcaggccgatacgcaacgccagcaagaatgggcggcaatggtacagcaggtgcatgaactgatggcaaacggcacgccggcggaggatccgcaggcgcagcgcatcgcgcgccgctggatgctaactctggagcgcgacactgccggcaatccggcgtttctcacgcgtctgaacgccatgcacgccgatgagccgtcaatgcgtgaacagatcggtatcacgccggccatgaccgactatatcacccgtgcatttgctgaaaccaagctgacaatttatcagaaatatctgtccgaagaagagtatgcctatgtccgcaaacactatttcgaccgcatgcaggagtggcccgcgctgatcgctcgcctccaatcagccctcaacgacggcatcgcaccggacagcgcacatgcccgccaagtggccgccgactggctggcgctgttccgttcttacgccggtgaaaatccagccacgcagatgaaaatccgccgggcaatggagcaggaacccacgctgagcgaaggcacctggcttacaccaccactactggcttatttgcgtgaagctgtcgtaaatttgaatcaaaaataa

SEQ ID NO: 227952 - DNA, 804 bp, Klebsiella pneumoniae; identical to SEQ ID NO: 179342

SEQ ID NO: 227953 - DNA, 411 bp, Klebsiella pneumoniae; identical to SEQ ID NO: 179343

SEQ ID NO: 227954 - DNA, 1650 bp, Klebsiella pneumoniae
atgaaaattaatgacatgcgtgtcagcacccggcttagtgccggtttttgcctcgtactttttatgatgcttctgatgggtatcagtgcctggatgtttaccagggaaaatgtacaggatgtggacgaaatgataaatctcgacctgcgtaaagagcgcatggcggaagaatggctgaccctggtggacaggaacagcggagcctcaatggcggccatgggaacggaaaacagagcgctgcgggagaaaattctcagtgctattgctaacgactcagcgaagaccactcaggtgcagtcgatgctgaccccgctcatcaagctggaagaaggtaaagcccgtctcggtaaaatggtcgccttgcgcgaaaaatacatcacactccgtggtgaaggtctggctatggctgagcggggtgaaaatgacgccatgaatgacttcatttccggacacttcctgcccgtcaccgaggaataccagcaggctgtacaggctttggtggactttcagaaagaggtgatcgatgacacacatgcaggaatacggcagacctcagaaaagacagagatgctgatggtattgtttgttgttctgggcattgccctgggaatatttacagcctggtatattacccgcagtattacccggccgcttaaagaagcggttaacgttgcgggcaaagtggcccatggagatctgacgatccaggtgcaggtccactcccgggatgaactcggacaactgatgcattccctgaaagacatggtcagcgcgctcggagtcacggtcagtaatgtccgttccggcgcagaaagcatcgcgcttgcagcggatgaaatcgatgcaggtaatcaggacttagcctcaagaacggaagagcaggccgctggtgtggaggaaacagcagctacactggagcagctgactgccacaataaaaagtacagcggagaatgcccgtcgcgtgaacaatatgtttactgaaacgggacgggtagtaagaacgaacagtgagcgtatgcatgaagtctctgctgccatggacgatatccatcacgccgcacagaagatgacagacatcataacggtgattgaagggatcgcattccagaccaacatcctggcactgaatgccgcagtggaagctgcccgcgccggcgaacaggggcgtggatttgctgtggtagccggagaagtgagagcgctggcgcagcggagttcatcctcagcaaaagagatacgtgacatcatcagtgcttcggtaaataaaattactgacgggcgtgggcttgtatcagaagcccacaacggaatgcaggcaatcgttgagaatgtttcccgcgtgcagcagctggttgatgaaatatcgcaggccagcgatgaacagagtgatgggatcagccagataaacgtcgcgatgggacagatagacaccaccacccagcagaactcgtccctggttgaagagtcctcagctgccagcggctcactgaaagaccaggcaggcctgcttcttgacagtatacggttttttgtacttcgggacgcagggatgaaaccggataatgcccgcataaaggcggccggtatggaaaccactgtcagtcaaccgaagaaaaaaattgccagtgaacaccgggaaacattctga

SEQ ID NO: 227955 - DNA, 855 bp, Klebsiella pneumoniae; identical to SEQ ID NO: 179346

SEQ ID NO: 227956 - DNA, 2691 bp, Klebsiella pneumoniae
atgtcccagccagtgggtgatctggtcgtaaaaattgatggcgacagcgcaaaatttgatgaagaagtcacacgcctgaaccgtcagctggctggcgttggcaaaaatgcaaataccagcagtgaacaggtaacaaaagcatttgcgcgtgaagaactggcagcgaagcgtgctggcatatctgtggggcaatatcgtgcagcaatgagaacactgcctgcgcagtttacggatattgccacacagttggctggtggtcagagcccatggctgattctgctacagcagggagggcaaattaaggattcctttggcgggctgagacccacattcagcgctctcatggggtctcttaatccggtaacacttggcattaccgcgcttggagcgacagttggtgcactgggatatgcattttataccggacagtcaacgctttctgattacacaaaaacactggagttaacggggaataaggcaggacagacagcgaataatctgctgtttgttacggagcaactggaagactctggtagttcatttaccaaagcaaaggctgccgtcatcgctctggccagtgccggggcagacctggggggaaattaccaggccattgcctctgatattgcgcggctttctgatgtggcaggggtagaagtcaacaaactggctgaaattttcgggaaaataacatctgatcccgaagccgggcttaaggccatgtcagaacagtacgggcatgtgactgccgcccagcttgattatgtccattccctgcaggaagccggaaaatatactgaggccctgaattatgccaatacgttggcagcgagcggctttaaggatatggccgataatatccagcagaatatgggctttctggaacgggctgcaaatgccgtaggcgatgcattttcgtggatgtggaataagcttcttgatcttgggaaacaggattctcttcagaagcaacttgcagatgcaactgaccagttatatgaactggacaaagctctgcgcggcaatgtacagggccagcagcgtataggcttggagagagctgcagaccaggcccgtaaagcggttaattctatcaccgatcaacttcatgccgaacaacggaaatcagaggagaaagagcgtcaggctgccctggaacgcagctccctggctaatcaaaaacattttcaaagtattgctgatgcagggctgacgaaagaacagcagcgcgcacaggaataccagcgacttaatcgctacattgaagagcgtaaaaagctaaatcaggcgctgagtgctgaagagattgctcagtataaaaaaggaattgaagaaaaatataaagacccgaaaaagccaaaacagaaaggcgtaactgtatccgcaggcgacagaacttccgaccagaccagcgccgaaaccctgcaattgatgacccagttgaaagtacttcagcagcataaaggtctaaacgatactatcagcgaggagcggaaaaaactatggtctttgcaggcaaaattcaccgttattgaagaggcggcacaaacccgcgctctcagcaaagaggagcagtctttacttgccagcaaagataaggttctggctcaggcggaggttaatgcaaagctgggggaccagatttccgctcaggagcgcctgaataaactgcaggataactcgctgaagtatgttactcagatgcgggaaaaaacagcagctatcaccgagagcgcaggcttaagcgacagggacagtcaacggaatattgagcgtgcacagttgcggcagggctggcagaaccagggtggaaacctggaagatgaaggctacaagaaagagctgtctgctcttgagggctattatgccgctcaggatgaaatgcggagtaactggctggctggtgtagagtcttcctggcaaaattatgccgatatggccactaattataaccagattgcagcggaggcgaccaatactgcgctgagcggagttacgagcactcttcagcagggtttatatgaccttgctactcagtctgaagatgccggtgatgccctgagtaatatgatcgaaggtttcggaaaaactgtcatccagacgttgactcagcttgctgctcaatggttggtatatcagggcattcagctgctagtaggaaagaccactcaggcaacggccgtttctccgatgatagctaatgctcaggcaacagcgctgcaagctcaacttgcggcatatgcctccaccgcagcaatcccaatcgttggacctggccttgcgcccgctgcactggccgcagccgctggcgtcacaacacctcttgtcgcagctatatccgcatcagcattagcaggtatggcccatgatggtattgataaaatccctgagacgggaacttggctattgaaaaaaggagaaagggtaactaccgctggaacttctgccaaactggatgcgacgttagaccaggttcggcagcaaaggactactggtggccgtccaattgtagctgaatttcataataccttttctggtaagccagatgatgcaatgcttgcctcatttgataagcggcagagagagtctgaaaagcgtcttgtgaaatatctgacctctcaggttatggagccgacagaagaatatgggcgcgcgataaggtcagtatatccgggacggagaatgaaataa

SEQ ID NO: 227957 - DNA, 318 bp, Klebsiella pneumoniae
atgaaactggccagggaatttggtcgccctgactggcgtgccatgcttgcagaaatgtcctcgcgtgaatggctggaatggggggagttttatcaggaacaccattttatggatgaactgattgacagccattttgccagcctgagtcacctcgccgtttgcctgttcaccgatcccagtaaacataacctttccgtcgccgacttcagcctgttgggaatgttggcagacgtcagcgatgaattatctgatgaacagttaatgtcaatagctgaaagcatacccggaggagtccgctatgtcccagccagtgggtga

SEQ ID NO: 227958 - DNA, 390 bp, Klebsiella pneumoniae
atgagcaaacttaaaaaggatgttctcactgctggtgaggacatggtaacactttacgaattatcagcgctaaatcgcattgaatatctggaatatgtctttgatgcgaaaaatactctccctgctgagggagcatcgcaagatgaaacagttaaagcggttactttgttggccattcgtgattatgccatgcttgtggcgctttcgctgtcccaggcttctgatgaaaatcgcgatatcccggagctgatgaacgaagttctgagtgattatggtaccgatgctctgacacgtgcggcgacgatggtacgggaattgtcaggaatggctgtaacggaacgtagcgatccagaagaagatatggagccgctttctctggaaaagtcctga

SEQ ID NO: 227959 - DNA, 246 bp, Klebsiella pneumoniae
atggcagagatcacacctgcagaacagattcgactaaatctactctccaccctgaactacgacaccgcggccgcggctaaggcgattgagttcgttcaggatagcccgctcaagtatcagctattcatccagcagtacaaccgcgtgacaactgaatctgaagtggtggcccggactattaaagcccttcaagagtcgacggaagcgttggtgctgtttggaaatagtgccgaacaatccagctga

SEQ ID NO: 227960 - DNA, 318 bp, Klebsiella pneumoniae
atgtacggagaggagaagtcggactcgctcatagtagcggcgaagcaggcgaacaacccgaaaggagcggagtcagtggagcgaaggagcggggccaaggggaacgcggaacagccacacatgcgccggacacagagccgggaaagcatgtcacagaggctgtcacgcgtgcgggaagctgcgaagcagcggaagaaagaacggtttacagcattgttccacctgctgacagtcgaagcactggaagccgcattcctctccctgagcaggaaagcggccgccggtgaagtggtcaacaaaaactggccaccgcgttag

SEQ ID NO: 227961 - DNA, 366 bp, Klebsiella pneumoniae; identical to SEQ ID NO: 138227

SEQ ID NO: 227962 - DNA, 987 bp, Klebsiella pneumoniae; identical to SEQ ID NO: 105543

SEQ ID NO: 227963 - DNA, 183 bp, Klebsiella pneumoniae
atgccaaatatattgcttgcgcttttttctgctcatttatggtgcctgctgaagcaaagttctatgatggtcaacagctatacctatattctcaggagtataaaaaagctgaacaaggcagacgccgtacgcctgataatcagcttcaagctggcgtattcatgggatatgtggcatcaatga

SEQ ID NO: 227964 - DNA, 297 bp, Klebsiella pneumoniae
atgaaaacgaataacactgacgaagagttgtttcaggaaatccagagaatcatcgaaaaagcatcgttaacagaacagatcgcgttaaccgaattgctgcaacgttatgagttggctgtatctgtggccaggtacgcattacctggttttccattaggggttttagactttctctcggccgcaataaaaccagccacctttctttcctctcctcaatcgtctgatctgcattgtaacgcccaagataaagccgatgagaaatcagcactagcacccaatggggataaataccactaa

SEQ ID NO: 227965 - DNA, 381 bp, Klebsiella pneumoniae
atgtttaaccctgataaataccgttcagttacctggctgaagggcgggcgcgtatacccgcaactcgactgtttcggcattgtgaacgagatacgccgcgacctgaatttacccgtctggcccgattttgcaggggtcaccaaagacgacggcggcctcgaccgggaagcgcgcaggatgatgcttacccttgagcgctgcgagccctgcgaaggggctggcgtggcctgctattccgggtcgaccgtcacccatgtggggatcgttgtcagtatcggtggcctgctgcatgtggcggaatgtaatccgcgaacgaacttcaccttcctgccgttgccgcggtttaagcgccgatttgtcaaagtggagttctggcaatga

SEQ ID NO: 227966 - DNA, 1380 bp, Klebsiella pneumoniae
atgaaatttgaaataaaaaatataggacttatagacgatgcaacaattgaaatagccgacataacatgcatttgtggattaaacaacacaggtaaaacttacgtcacatatgcaatatatgggttcttggcaatgtttaaagaacttagtcatcaagtccttactcaacgagtcatgcaaacaaaaccaaaagatgggttaatcgatcttgatgatatattcaagggtggcacagacagcatccttaaggatatgtcttctatctatgttcattacctttcggatgtttttggtacaaaaaatttaataaaagagaacagccaatttagagcttatatgccaaatcaagacattgactacttgagctgtgaaatgcaaaggctggtaactccaaagtcaaaaaatcaagatggctcaatcaacatcctgaaaacaccaggcagtaaatatatagagttcattgcagatgcaagtatcatagaaagcttcgagattagaaggtttgctccttttatagtaacatttttgcatagagagatcttagaaaagatcacacctaaagtatatatagcaagtgctgaaagaacaggggctgcaatttttagagatgagcttgatttcgcaaagctaagacttttcgatattcttaaaaataaacaagataaaaaagatattagcgatgccttaatgaatgaagcgtttggcggaaattatagttacgcctggccaattgagcacaatgtagacttcgttagaaaaatagaaacaatgtataaagactctggttacttttacgaaaaacatccagagataatagctgactttgaaaatatcatcggcggttcttataaggtaataaagaatgttctcgtttaccaatcaaacagcagcggaaaacaaaaatttgctatgagtgaagcatccagttctgttagggctttactggatataggtttttacatcaggtgtaaattgtctcctggagatctacttatgatagatgagccagaacttaatcttcacccacgtaatcagcgcatgcttgctcgacttttagctaagttagtaaatcatggtgttaaagtattcctgactacacatagtgattttattattaaagaaatgaatatactcataatgttaagcaacagcaaaaaaaacaaaattgttgctgaaaaatacaaatatagtgaaagtgaatttttgagcagtgagcaagtttcaatttacgtgacaagtaaggaaaaacagtcaagaaaatggataaacacgctaaccaaggccactataacaaaagaatttggagtttctttgccaacgtttgataacagcattgaagaaatgatagatatccaatctgaactttattttggagagtaa

SEQ ID NO: 227967 - DNA, 612 bp, Klebsiella pneumoniae
atgctcacggaagatttaagtcatatgttacaaagaatttcttgctctagttttaatgggaagtcatttactgacattatcataaaagaagatgatgagaaatcaacaataaaaagcatacatatcaaagagatagaatcatcatctccgaaggattggtttagctttgacccagacagaggcagagccggtggaactatttccaaaattttatcagaatcaataaaccaatctcatgttgttggtaaggctatagataatctctaccatcataaagcctgcgatcaaatcatgatcattaataacgatggcaaactccatgttatttattttgagttgaaatgcggagcgactggctataattatcaatttaaaagctcgcaatgtttcgttcgctatctcgtcaatatatgcaatatattgggaaataagtcgtttgaaattgaaaaggagcgtttcattgttttccatgccatttcgtccttaagtaataaatcgttatcatttcaatcgcagattgattcaataaaaaaatcaaaaccagataatccacataagatatatgtttctggaaaaacaaaagaattatattttggttctatttatgcataa

SEQ ID NO: 227968 - DNA, 270 bp, Klebsiella pneumoniae; identical to SEQ ID NO: 145692

SEQ ID NO: 227969 - DNA, 390 bp, Klebsiella pneumoniae; identical to SEQ ID NO: 145693

SEQ ID NO: 227970 - DNA, 165 bp, Klebsiella pneumoniae; identical to SEQ ID NO: 145694

SEQ ID NO: 227971 - DNA, 1194 bp, Klebsiella pneumoniae; identical to SEQ ID NO: 145695

SEQ ID NO: 227972 - DNA, 858 bp, Klebsiella pneumoniae; identical to SEQ ID NO: 145696

SEQ ID NO: 227973 - DNA, 231 bp, Klebsiella pneumoniae; identical to SEQ ID NO: 185380

SEQ ID NO: 227974 - DNA, 228 bp, Klebsiella pneumoniae; identical to SEQ ID NO: 195746

SEQ ID NO: 227975 - DNA, 282 bp, Klebsiella pneumoniae; identical to SEQ ID NO: 61246

SEQ ID NO: 227976 - DNA, 612 bp, Klebsiella pneumoniae; identical to SEQ ID NO: 61245

SEQ ID NO: 227977 - DNA, 276 bp, Klebsiella pneumoniae
atgccccattcacctgaagataaaaaacgcgtattgacccgggtacggcggatccggggtcaggttgaggcgctggagcgcgcgcttgaagcgggcgagccgtgcatcgctatcctgcaacaaattgccgcggtacgcggcgcggccaacggtttgatgggcgagatggtggaaatccatctcaatgatgaactggtcaatggcgaaaccacccgcgaacaacgtgcgcagcgtatggatgaaatcggccatttgctgcgggcttatctaaaataa

SEQ ID NO: 227978 - DNA, 330 bp, Klebsiella pneumoniae
atgagacccgtttttatcttactgggcgttttaactctggcggggtgcgcgaaaagtgaagagcctgttcagtgtaaaggtttctccacttttatacctgtgcccaacaatgaaaatgtgaaaccaaaaacggccagcatggtgcttgataagttacggcaaaatgcaaacgggacctgggattttcatcggatcaatggcaaaggaatgacatctcagtcgtcgtggatgaaaccgacagagtatgagcgcatcgaatgcaccagcggccccacagaacaactcaaacaggtaaaaacccggacagggcaaccgataataatcctctga

SEQ ID NO: 227979 - DNA, 225 bp, Klebsiella pneumoniae; identical to SEQ ID NO: 202565

SEQ ID NO: 227980 - DNA, 624 bp, Klebsiella pneumoniae
atgtgtttccactacgacccgctggccaatcgcgtgcagcgctcgattaccaatatggccatcgagtgtcgcctggccaccgagtccagaagcggtaacctgtcgatcacccgagccacccgggcgctgaagtttctggccgagctggggctgatcacctatcagacggaatatgacccgcagattggttgtaacatcccgaccgatatcacgttcaccccggccctgttttccgcgctggacgtttctgaggttgctgtggtggccgcgcgccgcagccgtgtggaatgggaaaatcagcagcgcaaaaagcagaaactgaaaccgctggagatggacgaactgatcgcaaaagcgtggcggttcgtgcgtgagcgttttcgcagctaccagtctgaacgcaaaagtcacggccgaaagcgggcgaccgccaggcgggatgcttcacggcagcgtaaggatatcgagacgcgcgtgcgtcagcaactgacccgcgaatacgccaccggccgcttcaggggcgatcatgaagcgctcaagcgtgaggttgagcgtcgtgtgcaggagcgcatgctgctgtcgcgcgggaacaactacacgcgactggccacagtccccatataa

SEQ ID NO: 227981 - DNA, 675 bp, Klebsiella pneumoniae
atgtgcggacgtttttctcagtcaatgacgcgggaagagtatctttctctcctcgccaatgaagccgatcgaaatattgcctacgaccctgaacccatcggtcgctacaacgtcgccccgggtaccagggtgttacttctgagcgaacgcgacgaacagctgcagctcgatccggttcactggggttacgcgccagggtggtgggataaaccgccattgattaatgcccgggttgagaccgcagccagcagcaggatgtttaaacctctttggcagcacggtcgggcgatctgctttgccgatggctggtttgaatggaagcgtgaaggagacaagaagcagccctatttcatccaccgtaaagacggccagccaatcctcatggccgcgatcggaagcactccgtttgagcgtggtgatgaggcggaagggtttctgattgtcacggccgcggctgataaaggtctcgttgatatccatgaccggcgcccgcttgtcctggtaccggacgccgcccgggagtggatgaaacaggacgtttcgggtaaggaagctgaagaaattgctgctgatggagctgtgtccgctgatcatttcatatggcatcctgtaacgcgcgctgttggtaatgtgaagaatcagggaccagagctcatcgagcctgttggctgttga

SEQ ID NO: 227982 - DNA, 324 bp, Klebsiella pneumoniae; identical to SEQ ID NO: 202557

SEQ ID NO: 227983 - DNA, 738 bp, Klebsiella pneumoniae
atgcgcgaaaaaaaaataaatcccttatcgttgctaatagcgaaaacaactactaaattagtcaaagaggatagcattaaaaatggttcatacacttttttgaatttttattcttattttatttaccgaaagcaaccatcaaactacactttttttaagcatatctattgtgatggtattctactgcaaaaatgcctaaatttgttgggcgtcagttgtcaacgccagagctttgacatgacctctgttgcacctaaagtatttgaatattgtttattaaaaaaagcaaaggtttatattattggtagcaaagaggaatatataaatacttttattcacaaaattaatcaaaaatatcctattgattgcgtaggctaccgcaatggttattttaaagatgaacaagacaaagaaacagctttgaaagaaatttgtatactcaaaccagatgtgcttatcgtgggtatgggaacacctgctcaagatattttcctaaaagagttgaatgaattaggttgggacgggattgcttttacatgtggtggttttattcatcaggtggcctctggtaagttaaattattatccagaaataataaataaattaaatcttagatggttatatcggatatatgatgaaccaaaactttttaaaagatacttctgttattatccattgtcaatgttgttaattttatatgattatttgaacatgagattaccacatgagaaatattga

SEQ ID NO: 227984 - DNA, 1125 bp, Klebsiella pneumoniae; identical to SEQ ID NO: 227222

SEQ ID NO: 227985 - DNA, 417 bp, Klebsiella pneumoniae; identical to SEQ ID NO: 139220

SEQ ID NO: 227986 - DNA, 312 bp, Klebsiella pneumoniae; identical to SEQ ID NO: 139219

SEQ ID NO: 227987 - DNA, 225 bp, Klebsiella pneumoniae
atggaatacgagaaaggaaaaatccagcagggggcagggaacgcctattatgcaggaatgcagtggcgcggtattacactcggacacgccgatgctgcagcgcttaatcagtttgatatcgatatcagcaaagctcaggcacccgaagcacgcacctggttgctgcagaacaaagcagaattcatcgctttgatcctgggcattgaagtcgtaaacgtcgggtaa

SEQ ID NO: 227988 - DNA, 207 bp, Klebsiella pneumoniae
atgattacacgaaataccaacctcaaaactgccgctcaggaaacttccccatcctgttttgaaccaaaagcggaaaaagtgatcgcttttcacgggaaggacgccagctatgcatacaacgtgctggccgatctgaaagccgcaggtgcctcatatacccgccggaatatcatcgccgatatgttccgccgtctgggtgtggattga

SEQ ID NO: 227989 - DNA, 561 bp, Klebsiella pneumoniae; identical to SEQ ID NO: 104073

SEQ ID NO: 227990 - DNA, 213 bp, Klebsiella pneumoniae; identical to SEQ ID NO: 139643

SEQ ID NO: 227991 - DNA, 249 bp, Klebsiella pneumoniae; identical to SEQ ID NO: 139642

SEQ ID NO: 227992 - DNA, 489 bp, Klebsiella pneumoniae
atgttggtgactatgacagacaaagaactttaccggcttggcatcattcagcgagtatttgaccgggctttgcttcagcgcgacgcagcagacatacttaagctcagtgttcgtcaggtgcagcgtcttgtgcgtctgtaccggacagatggcgcaaccgcatttgcatcttcccgccgtggacgtcctgcaaacaaccggatcgatgaagaaacacgctgtaaagccctggatttgatccggtgccactattcagattttggcccaacgctcgcaaccgaaaaactggctgaacgccatcatatatatctctccgttgaaaccatccgtaactggatgacagccgacggtctctggcgtcctcattcccgccggcgaacccgggtttaccagccgcgctatcgtcgcgactgtttcggcgaactggttcagatcgatggctctcaccatgactggttcgaaggaagagccccaaaatgcggggtctga

SEQ ID NO: 227993 - DNA, 312 bp, Klebsiella pneumoniae
atggcaaagcatatgcaagacaaagaaagcatggccggaatcacctggctggctctgctgatcattgctggctggggcggccttgtccgattcctgatggatgtgaagcagggcaaagcgaaatggagctggataaatgcttttgcgcagattgtggtttcggcttttaccggggtcattggtgggctcatcagcattgaaggtggcctgagtatttacatgatactggccactgccggtatcagtggtgctatgggttccgtagcgctcacgtatttctgggaacgaatcaccggagtgaaagcacaatga

SEQ ID NO: 227994 - DNA, 540 bp, Klebsiella pneumoniae
atgacagcagacaagactatcgaggggatcctcggaaaagagggtggttatgtcgatcacccctctgataaaggagggccaacccgctggggcatcacgcaaaccacagctcgcgcacatggctacaccggtgatatgcgaaacctgcccagggaaacagcaaagcaaatcctgctgagcgattactggactggcccccggttcgaccaggtggcgagtttgtctacgttactggcagatgagctttgcgacactggcgtgaacatggggccatctgtcgcaagtaagtttttccagcgttggctgacggcaatgaatatgcgcgggaagctttatcccgaccttatcccggatggcgcgattggaccccgaaccatcactgcgcttaagggatatctttccgcccgcgggaaagagggtgaacaggttctgttgcgtgcgctgaattgcagccagggcgcgagatacctcgaactggccgagggccgcgaagccaacgaggattttctctacggctgggttaaggagcgtgtcctgtga

SEQ ID NO: 227995 - DNA, 372 bp, Klebsiella pneumoniae
atggctgtggtggccgcgcgccgcagccgtgtggaatgggaaaacctgcagcgcaaaaaacagcaactgaaaccgctggagatggacgaactgatcgcaaaagcgtggcggtttgtgcgtgagcattttcgcagctaccaggctgaacgaaaatctcacggccggaagcgggatactgcacggcgggatgcatcacggcagcgtcatgacatcgagacgcgcgtgcgtcagcaactgacccgcgaatacgccaccggccgcttcaggggcgataaagaagcgctgaagcgtgaggttgagcgccgtgtgcaggagcgcatgctgctgtcgcgcggaaacaactacacgcggctggccactgcccccctataa

SEQ ID NO: 227996 - DNA, 345 bp, Klebsiella pneumoniae
gtgagttcagtcgaaacgcccggttatcgctttctgggctacagcggcacgatgaaactcacgcccgaccgtatcacggactacaaagccccgacagcggaggaagccagcgacgcgaagaaagcggcgaagcgcccaccgatcgtcaactatccgggggaagggttccgggaaatgacaaaggccgagtgggcgaaattacccgctgattataaaggcgtgcggggtgctgcagaaaccgaaacacacggcgcttaccgcttccgccggtgcatgacgcacggctgtacgcttgtgaatgtgtatatcacagacatgaaaaccgttgaaattccgaaaaaatga

SEQ ID NO: 227997 - DNA, 258 bp, Klebsiella pneumoniae
atgaatatgatatttgaactgattggattgttacttgtagtcggatgcgcattcttcaccacttttttcttagccgcagtagcaggcactatggtagttattcttggatggggaatttctattgtcaccccgaaggtggttacctgtactaatgattgcatcactactgtttttgatgccaaaccctttggctggcttctgattgtgttttcattaaccatgatgttctttattatcagaggtatgattaaacgttag

SEQ ID NO: 227998 - DNA, 1371 bp, Klebsiella pneumoniae
atggcctatcagacggtgaatcctgcgaacaatcagcttattaaaacgtacccggcgcacagcgatgcggacgtggaggcagcgctgcagcaggcggatgcgctctaccattctgcctgggcaaaaggcgatattgaaccgcgcctggcggtactgcataagctggctgatctgattgatagccgggcggaggagctggcaaaaatcgctagccaggagatggggaaactcattaagcagagccgcggcgaagtgaaactttgcgcgcagatcgcccgctattacgccgataacgccaaatcgttcctggcgccggtgaagtatccctccgaactgggtgaagcctgggttgagcaccatcccattggcgtcttactggcggtggagccgtggaacttcccctattaccagctgatgcgcgtcctggcgccaaacctggcagccggtaacccggttatcgccaaacacgccagcattgtgccgcactgcgcggagacctttgcccatctggtgcgtgaggccggcgctccggagggggcgtggaccaacctgtttatctcccaggatcaggtggcgaagattatcgccgacgatcgcgtgcagggcgcggcgctaacggggtcggagaaagccggcagcgtggtggcggcgcaggcggcgaagcatattaagaaatcaacgctggaactgggcggcaatgatgtgtttgtcgtgctggacgatgccgacctggagcgcgcggtgaaaatcggcgtccaggcgcggctgaacaacgccggccaggtgtgtaccgctgccaagcgctttatcctgcacgaaaatatcgcggatgcgttcctgacaaaatttagcgaggcgtttcgccaggtgaaaatcggcgatccgctggatgaaagcaccacgctggggccgctctcttccaaagatgcgctggataccctaagcaaacaggtggacgaggcggtgaaaaatggcgctaagctgtatctgggcggcaaagcggtggctcgagaaggcaatttctttgaacccaccattttgaccggtatcacccgtgataatccggcgtacttcgaagagttctttggcccggtggcgcagatctacgtggtgaaaaacgatgaggaggcaatccagctggccaatgattcccactatggtctgggcggcgcggtgttcagtcaggatatcgaacgcgccaaacggatggcctccgccattgaaaccggaatggtttatatcaactggctcaccgataccgcgccggagctgccgtttggcggcgtgaagcgttccggttacggacgggagctctccgatctcggcatcaaagagtttgtgaaccagaagctggtggtggtgcgccgctaa

SEQ ID NO: 227999 - DNA, 384 bp, Klebsiella pneumoniae
atggctgtagtgcagataactgccgagcaggtaaagcagcagttgtctgcgctcggctataccaccgtccctgacttcatgattgacgcctacctctgcaaactgtcgagcatccaggcatgcttagatggcgctgggtacgacgagtgcgaccagattctgattcaggcttacgcagtgaccctgatggtgctgacggcttattcgcaacgaattaagtcgcagggcgcgccgtccggagcgtcacgctcgtttgaatacggcgacaacgttctcaacatgcgtgacgcgctgcaggctctggataagtcgggatgcacctcggaattgccgatcgacgttggtcaaaaggttggcctgttcctcgttgttggtggctgctga

SEQ ID NO: 228000 - DNA, 204 bp, Klebsiella pneumoniae
atgattactcactacatcgcttactacgaaggccttgatgaaaaaggtaacgtaattatgaatggcaacattgcagccgatgctgaaaacctgactgactctggcgcgttcatgaattatctcaccgataagacccttgctgacaccaaggaaaatcagccctcagttacacgcatcgtattgaaaggcgtgttcaaactgtaa

SEQ ID NO: 228001 - DNA, 1008 bp, Klebsiella pneumoniae
atgatcctctttccgatgacccaggagcaaaggagtaaagtcggcacgccgataatcccccgcagcaaagtagacccaacgcaatcagcaaagcccgtgagcaagatgtttcaggatatcgaaggccggtatctggatatcaagcgcaggttgaaggtgctgtttgaccaacggctgactggccgacagcaggaggttaacggcgatcgttcatggctgatgtgcaataacgaaggtgctgagccgtcgctctaccaggttaacgccggcacctacatttatgacatgactgcggcgcagttagccgaccttctccagattgtgcaaacgattctggacgatgccctgctggacggtggcagccagaacctctgggcactggattacgtcgccgcagagtatgagcgaggaacgcagcaggccttcacgaatttgtctgtgcagtcgccggtatacgccggtcagactacattgcagcagttgctgtccagccctgcatatcagaaccaaatcgctagtgcttacatcagcacatacagcgactggaaggggataagcgacaccgcgcgcgccgacctcgctaacgtcattgccgacgcgataggccgcggcattaacccccgcgaaacagccagcattgtcagcaagcgattagacgtttcaatgtctcgggcgaagaacatcgcacagactgagcaggttggcgcgctgcgccaggcgcaatggaacgaaacggactgggcagcggatcggcttggcctgaatactggcctgctgtggctatctgcgctcaaaccgacgacacgtagttggcacgccagccgtcacggaaaggtctacaccaccgagcaggttcgggacttttacgccgagaatggcaaccggtacaactgctactgcagccagattccggtgctgctgaacgacgacggcagcatattcaacaaagggctggctgagaagctggagaaagagcgtaaacagtggactgaaaaagaggcagcatga

SEQ ID NO: 228002 - DNA, 1440 bp, Klebsiella pneumoniae
gtgagtaacgatacagaaatgcaagtcctcgctgggctgattgtgaatagtctcaatgaggtttcgcgatctcgacagctttatgcggctggcttcaataaatcaggcaatacgaaacgacatcacctgtggtgtgaatttggctatcctgagcgactagactttgaccacttctataacatgtatgagcgaaatggcgccgcgttcggtgctgttcataagctactggatgcatgttggactgataatcctgtaatagtggatggcgacgagacgaagaagtccaaaaagtcgacgccatgggaaaagaaagtcaccaagctcatgaagaaatactgggcaaaggtgaaggacgcggatagaagaaaccttgtcggtcactactctgctctcatcctccagtttgcagatagtcgtgaatggtatgagccagttaatcgtgacgtaatgcgtaattcgcgcgaacgcggcctggtgaagatgattcctgcatgggaatcgcaggtgaagcctggggaattagagcaggatcagaagtcccctgattacgccatgccgaagttttattatttccaggagcagcccgtcggggatagcggcaatattgtcgggcctatgcgttccatcaaaatccaccctgaacgtatcatcatattttgcgagggatcagaagatgaatcctcgctggctggcatccctttcttgcgtgcaggctataacgatctgctggacatggctaaaacctccggcggcagcgcggaagggttcctgaaaaatgccagcaggcagctcggcattaacatgtcgaaagacaccaagattgaaaaaatcatggaggatgccaagaaagcaggttattcagggttggctgaggcgcttaacgctgctatccagaagcttaactctggtacagattccgcgctggtcacccaggacggcgaggcaaaagtcctttctgtcgccgctgccgatccgagcccaacgtggacagtgtcagcgaaccagttctcctcttcagttcagatgccattcaccatcctgtttggtcagcagacaggaaggcttgcatcagatcaggacaaaaacgactttgccaagcgctgcaatgggcgtcggaacggattccagagtgaccgcgccagcgcaattatcgaacgcctgtggacagtggaggttatcgagccgccgaagtcgggcgaaatcactttaacttggtctgatcttcttgctccaagcgagaaagagaagattgccaacatgaaggaaatggctgcagtcgcgaaggatactcagcaagcctacggaactccagctgttgatgagaacgaagtgcgagaggccggagagcttgagccgcgtgaagatgttaatcctcctgaccctggaaaaaaggtaacaaccgatgatcctctttccgatgacccaggagcaaaggagtaa

SEQ ID NO: 228003 - DNA, 1563 bp, Klebsiella pneumoniae
atgaattacaaagctgtatggaagccactgcctggatctcagtctctggctctgagttgcccttgtaacgaaatacttttcgaaggaactcgcggacccggtaaaactgctgcccagctagctcggttccggcgcaatgttggcgtgggctatggctcgttctggcgtggcgtcatcttcgataccgaatacaagaaccttgccgacattatcacgcagtcgaagcgtatgtttcgtctgttcaacgatggcgctcgatatctgtcatctgcgagcgaattacgatgggtatggccaacaggcgaggagcttctattccgcttcggcaaagaggcagacgactactgggattttcacgggcaggaattcccgttcattggctttaacgagctgacgaaacagcagtcccctgaattctacgaaatgatgttctcctgccgacgctcatcgttcaggccagagaactacccgctggataatggcaagttactaaagccgatcccgctggagacgttcagcacgaccaacccgtttggcatcgggcatacctgggtgaagaaacgcttcattgagccagcgccgcgcggaaccgtgcagcgcgaccggcaaatggtgttcaaccctcagacagaacgagaagaggaaatcacgcttacccgcgtagctatccacggatcgtttaaagagaacccgtacctcgacccgcagtacatcgcgaccctgatggccatcaaagacccaaaccggcgcaaagcgtgggtagaggggtcatgggatgtgaccagtggcggtagatttgaccacctatggaatgaagctctgcatgtcattaagccgttccgtattcccgatagctggaccgtcgaccgctcccatgactggggtgagtcgaagccgttctctaacctctggtgggctcaggccgatggcacagccgccgagctacctgatggtcgacagttctgcccgcctgccggttcccttatcctgattggtgaatggtacggatgcccgcctgacgagctcaacaaaggcctgaatatgtcatccaccaacgtcgcgaaaggcgtagcgtggattgacaagcgactggttggcgaagacgtcgacgagccgggagagattcaaatcgacggtgtcacgcagggccagctgaacattgttcctggaatatgctcggaagttatcccgggcccggctgatagcgccattttcaacactggcgacgacgagttatcgatcggccagaaaatggaaaatcagggcgtcgaatggctagaggccaataagaagccgggctcgcgagtcaacggagcctcggtattcgccgatatgcttgaggctgtcgttgagggcaaaaagctggaatctggcatcccggagaagcctgccttttatgtgttcgagcattgccgtggctggattagccgcatacccgtgctggttcgcgacagcaaaaacccagatgacgtagatacccagcaggaagaccacgactgggatgcaacccgttaccgcgtgctgcactctcctcgccgttcaggggcgatattcttcacataa

SEQ ID NO: 228004 - DNA, 585 bp, Klebsiella pneumoniae
atgaaagttatcaagtattggacagttcaacttctgcagctttctcaaccttccagcattatcaacgaccgcaaactagtcgaaagcctgttgtttgaggggtactcaaaagataaaccgaaaattaatctcggttccggagtaaatattgagttgtttacagcgcccgattcgctggaaacccgtacctttcgtgaccatctcgttgacagtgttcgttgcttcccggtgtttgaagatgatggcgacaaaagtgagagggtagagattaccatccaccttgagcctcaggtttacaattgccgagccgtcatggggggcgcgggcgcagcaaaggcgccagaaaaaatccatgaccatagctgtattaactgcttccttggtcgcggtccgtgccttggtgactgccacgtgactgacgttaataaggcccgaagttcttccttcgaagacgttatgaagccggtaatcaaatggctaaacgaaaacgccaaccctcacgcatcggtcaccgttgattgcaccagtgctcagttgcttaccggagagatcggcatccacaccgaagagttcattaaggactga

SEQ ID NO: 228005 - DNA, 324 bp, Klebsiella pneumoniae
atgcaaaagagcagatcgcactggacgcatcgggagcctcggctgatatccgggttgctgttgcgaatgatgattgcactaatcgccctgtgcctgttggcgcagttaagcggctgcaacaattcgcgaacggactacgtcaaagtgccggtggtcccgttaccagccagcctgacggctgacactccgcaaccggaaatccccgacaatctgacgtggggccagagcctcgatttaaacgtcagtctgctatcagcgcttgggcagtgcaaccgggataaggctgacatcaggcaagcagagaagaaacgtgcctcgcaatag

SEQ ID NO: 228006 - DNA, 522 bp, Klebsiella pneumoniae
atgcctaactggaatgaaatattctcaatcgtagatggcaaccttgtatgggccataaagccagcaaaccgagtcaagattggtgacattgcaggtcatcttaataatggatacagaagagttgaatatgcaggagggcaatatcaggcccatagaattgtatgggaaatggtgaaagggccaattcctgaaggtctggaagttgaccatataaaccatgtccgatccgataacaggattgaaaatcttagactgataattcagtcggataacatgcgcaataaatcacttcctagcaccaataagtcaggtgagattggaatccattggaataaaaaactcagcaagtggcatgttcagatcagcgctgatggaaaaagaaaattcgtgggtgtttacgagagcatggaagctgcaaaggaggctagagacaaggcaaaggctgaacatggttaccatgccaaccatggactgcctaatagtcatagctatcagcaactgcagcaaaagcaggaggcctga

SEQ ID NO: 228007 - DNA, 183 bp, Klebsiella pneumoniae
atgacaaacaaaaaaatgacagctgccgaaaagctcaaagcatctcggcaacggcataaaaaaatctggcttcaacttgatatcgctaacgccaagcgatttggcgagaaagaagtgctttccgttgacacctacagatcgccctatgaaacgcgcaagaaaagagggaggaccgcagattga

SEQ ID NO: 228008 - DNA, 204 bp, Klebsiella pneumoniae
atgcgcaccattgaagaaattggcaagcgcgcagcattgctgaagtggaagcgtcagtttggaccatttgagaaatgcccggtctgctacgggcttctttcttcctgcgaactgtgcagaggaagtggcaaggtaattcaggaagatattgacgcatggaataacccaatcgccaagatgagacgggaggtgaaaggtgagtaa

SEQ ID NO: 228009 - DNA, 597 bp, Klebsiella pneumoniae
atgacaactgatatcaccgaactggcgcagagcctgaaagcggcagcaaataaagcaggtgctgatgactggcaggcaaagaaaattagcggtgagttttacgttattcgcaaaggtagttacagttccaaatgtggctatcgtacttatcaacccattgcagaaatagaccataagtcaacaagggattatgtcgctatcgctagtcctgccaacatcctcgcgctggtagaggcgctggagaaggcgcagcaggtggacgaagagctttgcaagctgcttcctccaggcgttgagtacatggacccaccagacggcggagatgtaacaccgcttgagggagtgcgtcgaatggtggctgattaccgccagctcatcgccgagctggagtcccgcaccgtgaagctgccgaagccacacgctcacttaatctggattcaggcaggccatgcaccagacgattactgggatgacgtagcggtatctcacagtgagaaagaccgctgttgtgatggttccgagcgctacccagtttatgcgcgctgggagattgaagagatgatgtccgccgctggcatcaaggtggaggctgagtga

SEQ ID NO: 228010 - DNA, 231 bp, Klebsiella pneumoniae
atgagcaatgaagctatgaaaatggcattggcaaagcaattaactattgctatgcaaaatctcggagcacccattgaattgctctgcattgttggtagttacggggatacccagactgacgctgacactcttgaaatgctcgaacaatacaacgatcgcggaacctgcatggaagagattatcgctcccgcattcatctggtcgccaaaggagagaaagaatgacaactga

SEQ ID NO: 228011 - DNA, 402 bp, Klebsiella pneumoniae
atgactatcacattacaggcagtaaacgagctcatcgcctccctggagagcgcaggcgagccgtcgatcagagagacaaagtttatggcgctggcgaaagcgtaccagcagctggctgcggagaatgtggcgctgaagaagttctgcaaaaacgctgcatttgatgccgactatgaagtcgaacttggcatggaaaggggcgggtttactgacgctctcaacaatatcgaaacccccgccaccgatcgcatcgtggccgggattaaggctgatggggtggaggagtttgcggcaaaacttcgaattcctggtgatgaccagttttttgacgctttagcaaaaggggttgcacttgctgctgacgacttcgccaagcagctgcgcgaggtggcagataaatga

SEQ ID NO: 228012 - DNA, 591 bp, Klebsiella pneumoniae
atgaacgattctgaaaaaccaaagttcgcccagtccatggcagcgatcggcgagatttacggaaaggatatatccgaggtgatggtgggtatttactggaatgccctcaagccttacccggttgaagatgtgatgcgctccttccaggggcatacccgcgataccgacaacggccagtttttccctaagcctgcggatcttcttcgtcacatcgaaggcaacaaagatggcaaagcgctgatggcctggtcgaaagcatacagggcaatctgcagttatgggcgccgcaacagcgttgtgtttgatgatccgatcatccatgcggtcattgccgatatgggtgggtggattgaatttgctgggatgagcgaagaggaattgccgttccgttcccgcgagttcgaaaagcgttaccgctcttacctgataaccggcgtcagcaagtgcgaaacggtgatgatcggcatggatgatgcgcagaacatgcgcgcgggattccagcgcgaaccaatgccatttctgattggcgagaaggacaaggccaagctcattcgcaacggacaggcgcttcttgagaacaggtggcaatga

SEQ ID NO: 228013 - DNA, 1020 bp, Klebsiella pneumoniae
atggcaaatactgccgaagtaatcaatttccctgtgccggaaaaggtacagcaggagagtcgcatggctgatctggacaatggctatctgcgccttgctaaccagattcaggacgccttgtgtgtagtggagctttcggggcgcgaatttcgcgtgctgaatgcaattgttcgcctgacgtatggctggtcgaaaaaagaagaccggatcgctaacagcctcatcgctgacaaaaccatgctggcggttaagcacgtttctgaagcggttctcagccttgcttatcgcaacatcatcaaggttcgcaggattgggcaaacacgatacatcgggatcaacacctgtctggatgcatgggcttataccaaaccgaaatgccctaaatgtccggtgagttttccggtcgctgaagttgaaacgcaggttatcaccatccctgaaattagggatagcagaatagccgcgccaaccatccctgaaaacagggataaccatccccaaaaacagggaaaggtatccccggaaacagggaacaccaaagacattctttcaaagacaaatataaaaacagatctaacccctatagtccccgctggggacgagtgtggaaaaccagatcccgatccggttattcaggagcagccgaagaccgaccctgtaagactggttttcacccactggcagaaagaacatgaccacccgtcagcaaaactcgacgacaaacgccgcaagcgcatcaaggcgcgactggcggaaggcttcactgtggacgagctgtgccgggccataactggcgcaaaaggcgatccgtggcttatgggaaagaacccttccagaaagcgctatgacggcattgagacgctcctgcgagacgctgctcaggtcgaaaaacttcgtgatatggccggcgatgctcacgcaatggcaattgctcagggccagtactcagccacaacggctcgcaaccttgaaaccctccagcgctgggctggcggcactgattcaggagaacttttctga

SEQ ID NO: 228014 - DNA, 972 bp, Klebsiella pneumoniae
atgagcgaaataatggatttagtagtcatcgagaaaaagaacgcgatggcggttttcaccaataacgaccagctcgacccgcttatcgaactaatcgaaaaagaggctcgcagcctggtgccggacgtgaccacgaaaaaaggccgcgatgccatcgcatccatggctcacaaggtcgcgcgctctaaaacctacatcgacaacgcaggcaaagacctggtcgctgagctgaaggcgctgccaaagcaaattgacgaaagccgccgcgttgttcgtgaacgtctcgatgcgctgaaagatgaagtgcgtcgcccgttgaccgaatgggaggcggagcaggaacgcattaaggccgaagaagccatgctcgcccttcacgtcgaagcactggccatgaatgaagacttcgatcggcagctggctgctcggattgagtctgaccacgaaatggccctgttgatgaatgacgctttcgaccgtgagcaggccgagaagaaagcagaagccgagcgccagcgcattgcccgcgaagaagagattaagcgcctggcagaagagaaagcgaagcgtgaagcagcagaacaggcgcagcgtgaaattgacgccgcagccgcccgagaacgcgaagcgattttggccaaagagcgagcagaacgtgaacagagagaagcagctgagcgtgcggagcgtgaaaagcaggccgctgttgaagcggagcgccgcaaagcacaggaagaagccgatcgcatccgccgcgaggcagagcaacgcgaacaggcccgcctggctgaggagaagcgcaaagcagatgagcaggcgcgccgcgaatccgacgttaggcaccgcaaggctgtaggcactgaaatcgtcaaagctcttctggccaataccagccttacgcgggatcaggctatcgaggtgctcaccgcggttaaagacgaccgcattcctcataccggtatcagttactga

SEQ ID NO: 228015 - DNA, 228 bp, Klebsiella pneumoniae
atgagtaacgaagcgatgaaaatggcattagcaaaacagttaactattgccctgcaaaacctcggggcgcctgttgaattgctctgcattgttggtagttacggggatacccagactgacgctgacactcttgaaatgctcgaacaatacaacgatcgcggaacctgcatggatgtgattatcgctcctgaattcacatggaaaccaaattctggcggtgaagcatga

SEQ ID NO: 228016 - DNA, 594 bp, Klebsiella pneumoniae
atgagcagaaaatactctctgatttacgccgatccgccctggcttttccgcgataaggcagccgacggcaagcgcggcgccgggtttaagtacccggttatgaacgtgctggatatctgtcgtctgcctgtgtgggaacttgccgccgatagctgcctgctggctatgtggtgggtgccgactcagccggttgaagcgttgaaagtcatggaggcctggggcttccgcctgatgaccatgaagggattcacctggcacaagacgagcaagaacaaaggcaacagcgccatcggtatgggccacatgacccgtgcgaacagcgaagactgtctgtttgcggtgaaagggaagctccctaagcgaatcgataagtcgatctgccaacacgtcacggcgccacgcctggagaactcgcgcaagccggacgttatccgagagaaactggtgcagctgctgggcgatgtaccgcgtattgagttattcgctcgccagtcgtctcacggtttcgatgtgtgggggaatcagtgcacggcaccggcggttgagttgctgccaggctgcgccatcgatgttgtgaagacggaggcagcatga

SEQ ID NO: 228017 - DNA, 999 bp, Klebsiella pneumoniae
atgaaatcgttttccgggaaagcgtctttaatggccacgctggttgccgcgctggtcggcgccagcagcgcgcaggcagcggaaattaaaattggggtggtattacccctgagcggcgccctcagcggctatggccagccgtcgcagaaagggctggacattattcaggccatcaccccgacgttaaaaaatggcgataccatcaagcttatcgttatcgatgataaaagcgataaagtcgaagcggccaacgccatgcagcgcctggtctccagcgataaagtggatgccgtgatcggggaagtcacctcctccaacaccctggcgatgaccaaaatcgccgacgacagcaaaacgccgctggtctcctctaccgccaccaacgaccgcgtcacccgcaaccatccctacgtcagccgggtctgcttctcggacagcttccagggggtggtcggggccaatctggcctcccgcgatctgaaagccaaaaccgccgccatcgtgtttgacagcagcaacgactactccgtcggcctggcgaaagcgttccgcacccagttcctgaaaaacggcggcaccattcccatcgaggtccaggccccgggcggcagcaaggactttaaagcccagctggcgagcgtcaaggcgaagaatgtcgacatgatttacatgccgatctactacaccgaaggggcgctgattgccgtgcagtctaaacagctggggctcaacaaaccggtggtgggcggcgacggtctggccgcggatcaggtcttcttcgatgtcggtaaagacgcggtcaacggctatatgaccaccgattattactcgccgaacgccaaagagcagaccccggcgggggaaaccttcatcaaagcctgggaagctaaggaaggtgcgaataagcaggtcatttcttcccaagctgactcgctgattaaaatttcgcggatctgggccgatttttttcccgcaaacacatcgaatcagcctatttag

SEQ ID NO: 228018 - DNA, 960 bp, Klebsiella pneumoniae
atgagaaatttcatcctgaggcgcctgctgcaaacgctgccgatgctgctgctggcctccttcattatttttttgctgtttgccaaaacccccggcgactttatcgatggcaatatcaccctgaccgctgcccgcgccgcggagctgaaggcgatctacggcctcgaccagccgctgttgacccgctacctccactggctgggacagttgctgcgcggtgatttaggcttttcgctgcagtatcagatcccggtcagccagttgctcaaccagtacatctggaactcttttctgctggccagcgtcgcgctggtcttttactggggcatcggcctggcggtgggcgtggtttctgccctgcgccctggctcctggtttgatcatctggtgagcgtcgcggtgtttgccgccatgtcgttccccacctttttcctctgcctgctgctgattaaatggttcgccgtcgatctccactggctgccggtaggcgggatgaccaataccggcagcgacgagagcggctggcagtatgtgctgcaggtggctgcccacctggcgctgccggtgctggcgctggtgatgctgcaggcgggcagcctgacgcgctatgtgcgcgccagtatgctcgacgtggtgaaaatggattttatccgtaccgcccgcgccaaggggttgcaggagcgcacggtgatcctcaaacatgccctgcgcaacgccctgctgccgattatcaccctgctgggcttcgagctgccggggctgttctccggggcgatcattaccgaaaaggtattcaactggccgggggcgggccacattcatatcgactcgctggccgcccgcgactatccggtactgatggggtttaccctgtttctggcggtgctgacgatcgtcgggaatctgctcgccgacgtgctgtacgcctgggccgatccgcgtattcgggtgaggtcataa

SEQ ID NO: 228019 - DNA, 600 bp, Klebsiella pneumoniae
atgttggtttttttatctggagtaaacaagagtgtatttcatgaaaaagacttcaaagaggtaagagaccggacgataagagccatagtaagagactcaactatttttaatgatttaaccgatgaagcaagagtttttaaaagaaaagataaaagaaaggaattaataataccatcaactgagaacatagaggccaagattgattttagacatcacagcaagtatcaagaaagcattatcaaagcaatatattttcatataaacaacattccattacttgacgagttagtcatcataccaacatcattaatttcacttgaaagtaaagacaaccaaacagtggaaaattttaatgctgcattcggatttgatacatttgagatagaagtaaagaagaacttaagaactttaagcaaaaacaaggtatttcaatttaaaaatgaatcaattggcgatttaagtataatatcagtatgtctttatggggaatattttttctatggtatttatggaggaaatgaaaaaatgaaggcaatacgcaagatattttcacctagtgataatttcgaagagttcttcattcctgcatataagcgatag

SEQ ID NO: 228020 - DNA, 483 bp, Klebsiella pneumoniae
atggataagttcgacagggaattgcagcgtgaaatactcaaagtatgcatagaggcctatccaaggactgttgatgaacttggcaatgattatgtatctgaaataatcatgtctgcacctttggataaactacttgcaaacttgttttatctttctggtcacggcctcataacctttccaagaatggggagtaacctagacgatcagctcgcatttagcattcttgatatgtcttctgtaacctgcaaaggcattgacttcatgctcaacgacggcggtctctccgcaatcctcaacgtacagaccatcaagtttcatcgtgaagcagtagtcgtcctcgaagacctgatcgcgatttcgaacatggacgttgagcagaaggaaaaagccaagtcgactctcggcgaactatcgacggaagcacttaaaacggtagtgcaggctgctactaatgcaggactctccaagctgctaggtcaataa

SEQ ID NO: 228021 - DNA, 486 bp, Klebsiella pneumoniae
atggctgagtatgttgagggtgttaactacctttctgttgaagatttagtctatataaaccgtagacttatcgaaacccagacaccaaatgagcctatagaggttcttagtgaaggtaatcttagctcttctcaagccagacctagtatgatcaggtggtataggcagacagatgatatgttcgtattgtctgcctctcttattgagagcctgattcagaatcatccattcgccaatgctaacaagagaaccgccatgatggcaggttacatttttctcttactgaatggttacgaactaacagctcctggtgacgatttggtaacaatggctgaaggattggcacgtaaagaatacgatgttgacgatttagagaattggctttgtcactggtctcgcgagtatgacgccagagagttgtgtgtaaatcattcggttaacgtcatagaagtcatatgctcacagcaagttattttgaataaatag

SEQ ID NO: 228022 - DNA, 180 bp, Klebsiella pneumoniae
atgagtcacgcattgaagaaggcagatcgcttgtacattccgcctcgtgacaaatccacggtggcgaaacctcgtgctgcgatcagcgaaacctgttcccacaccggacaagtcaaaaatgcctttgattttggcttctcacgctatgaaaaagcgatggaagatctatctaaggtatga

SEQ ID NO: 228023 - DNA, 363 bp, Klebsiella pneumoniae
atgctgccgctgtcctggcgtcactcaatctgccgactggccactatcctgttgaggattttccacaagaggactgggatcccagggaaaactcagcattccttcaaagctaccagtagcgactcgctcaatctccgcagagatctgactcagtcgctcctcaagagcggctttttctgctatcagacggttgaagtgggcaagatagattttctgttgcccaagccagtcttaaagctgttgagtggtcatgcccgggttaaaaaaatatggctgctgcatcgcttcccccagaaaagcaaaaccccgccggttggcagggttcagaatcagtttcatttggatgtacgtatccatgattag

SEQ ID NO: 228024 - DNA, 498 bp, Klebsiella pneumoniae
atgagcagttcgccgcctggcggtaatccgctgccgatgggattccccccgctcgcgctgcgcttagcggggctacgaacggagcggtttgtgttttatgtaggccgggtcaggcgtaagccgccacccggcaaaattgccgcatcacccggtagcccggataaggcgccagccgccatccgggagctccccacactcgcgctgcgcttagcggggctacgaacggagtggtttgtgttttatgtaggccgggtcaggcgtaagccgccacccggcaaaattgccgcatcacccggtagcccggataaggcgccagccgccatccgggagctccccacactcgcgctgcgcttagcggggctacgaacggagtggtttgtgttttatgtaggccgggtcaggcgtaagccgccacccggcaaaattgccgcatcacccggtagcccggataaggcgccagccgccatccgggaactcccacactcgcgacgcgcttag

SEQ ID NO: 228025 - DNA, 267 bp, Klebsiella pneumoniae
atgtctaaagctatgaaactatccatgaccaaagagcaactcaagagcatcatagaaactgaccatgtgcaatgcggagaggctgcggcaatggctggcactttattgcgcatccttgagcagaagccagtagcctgccgctatcgaaccaatatgaaaaacgtcactgacaactggatgtttactgatgaaaagtggcgaacgaaagagagtattacgtttgagtctgagccgctgtataccttatccctgacagtttctgattga

SEQ ID NO: 228026 - DNA, 903 bp, Klebsiella pneumoniae
atggaacaaagtagaagtgattttataaaagctggctgggaaagagggtcttttgtcagtttgtccggcaatgactttttacttgcacacttaccctcagaacttgaaaagtgtatggcgtcatatgatgccgaggacatctattttgttcctgttttgtacgattgcgcattgatttctgatgactttgttcaagagccttgggtaaatttaattgtttgttggaaatgtagaaaaattggtggtgatggcaatttcaaatattgcaaaaacccgcggaagtaccatttccccttagaggttaaaggagaatcggttttttttgaaactaatgccgtatcaataattcatatgagacgggatgtttttctgaagtcatcaatcaatctaaatgtcaaatggccagtttttggccttgagacaatgttaaattggttaactgaacgaatcagacagccagtattccctgatgaatggaacgagagattaaagagtaaaaagaaattgttagaaagattttactcagatcaaactctagttgagaaatgtgcaggtgtgtttttccgtataactccatttagacaaatagataaaactgaacgctactctgtgtcagcacttattgtcacaccagctatagaaaatggtgctgaacacaggaagtttaatagggaaattaaacctaaactagatgaattgaaggagcaattacgtcaaatacttcaaagcattgaaaatgtagatgttgaaactgtttcggatttacaagaggatcaatttactcgtaaagaagaacgattgtataagcgataccagcttgaatttatgacatataaatcaggggaggtagatagtttgacgttacccgctgatttacaattttcttttgtacagtctaagtaa

SEQ ID NO: 228027 - DNA, 600 bp, Klebsiella pneumoniae
atggactatgttgattatgattatcatacagaggattacgcgcatgcctcatatatgcaaactgacaaaaaaacaggatggagtagcattgttttttttaaaactatgttgttctgtgctgctgcaaccgttttaaatagcggtgctacatcttcagttgatcaactggcgattgagtatcaaataaacaaaggaattcaaaataacgattctactttcgtttctgaagagattgataacaataaatctcaaatacactctctaagttctgacttgcaaaagaaatttggttttaagaaagcgcaatgggcaaacgtgcttagtgttgaaagaaaaactctctataactgggaaaataatcctgaatcgacgcctcatgctaaggtttgggataatttgaaaacactcagtaaattcgctgatgagattgataatgggcatgcaccttacatttcgaaaatgacttttggaaagggacgcaaggaagagtttactcaggctttcacaactcaaccgctttcgtttgagtcaatgatttctgtatatgaaaagtattatactgaaattgacggtttctacaaaagacaacttctttcttga

SEQ ID NO: 228028 - DNA, 762 bp, Klebsiella pneumoniae
atgagtaacgatcttgtattcgcattggctagagtgcagtttggcgaagtcacacatacgaagtttgcgcaagttggtgatgctattcaagaaaacttgcgcgcggaatatcctttttttcactcagcgcaagatgctgaaacttttgagatccagtttggtcctgatggtcagaaggttaaaaagattgaaataccaactttgacacttgtctctgccgagagagattggggaatcagagtaacgactaaagatttgtttttatacacaaatagatacgatagatttcaaagttttgaagtcagaatgagagaggctctaggcactctagcgaaaatattcccgatttatcatactggtttcttgggcatgaggtttttgaataaatttccttatgtgggcgaacgttcatttacgaaagtatataaaaaaccggagtttctacaaccaactattgaaaactacaacccggcgggttcaaatctttcggctaagtacaaaacggatgttggttggatgaatcttaacagcggtattactgtgggtggagcacttttacctccagacattgaacagttttccgccacattaaatcctaaagatgtaaacaaaatctgcgaagggccatgggcacatttggatatggattcccataagccaagcaactccctgattaagtatgatcttgacaagattgtcgagacgctatcagaattaagggagcgtgcaaatatcttttatagcgagattattaagatttaa

SEQ ID NO: 228029 - DNA, 213 bp, Klebsiella pneumoniae; identical to SEQ ID NO: 206920

SEQ ID NO: 228030 - DNA, 294 bp, Klebsiella pneumoniae
atgaaaacaaccaaatccaagaaaacacaatacaacggtgaaatcacgctgatcgaatttctcaaagctaattctgatttgactacgcgtgaaatcgccaatgcgctggggcgcggtatgtcgtcagtgaatggccagcttcgccagctgcatggagcaggtcagattgtccagagtggcctacgcaacggtgcagctttatggcggtttaacgatatgccgtttggctgcgcaaaccgcttgcggatgatgtttgaaaacctcttgagggaatgtcgcggagtggctcagtga

SEQ ID NO: 228031 - DNA, 1077 bp, Klebsiella pneumoniae
atgaacaatcaggtttttgaaattgttcaggccatgtcggggcagggcaactgcataacgatccccggaccgtatctggattactttgcaggagacaggcagcagcatttgctggcggccattctcaatcagctggtgttctggtcgggcaagtcgagtctggaaaatggctggttttacaaagagcacgcagcgcttgcgaaagagatccgcgctaaagacggcgatgtggtcagaaaagcaatgttcaagattacagagcagtacctggcgggagttattgaggaagaacttcggcaggtaagcggcacgccgaagaagcattaccgcgtcgatcaggaagcgttaatagccaagattttcccgcaagggggaaattcaaataaaccattgaaagatatggattcggctcaagagccgaatggaaacggcttaagagccgaatcgaagcaagttattgaaagtaatggaaacggctctcaagccgaatgcattcgtcccaagagccgaatggaaacggcccaagagccgaatcctggaaacggctctcaagccgaatcctatctctatacagatcttaaaaacagatcactacctacagatcataaaaaccacgcgggagagatttctcctgtggataacttttctgaatcgactcagaaaacagtcacgccggaagcaaacattcctgatgctaccgaagacggaatcctagctaccgatgacgatttcgatctcgcgatgtggttctggtcgaccatcatcgagctgtacgaacgcgccgccgaattcgacggaactctggccaaaccgagagagccaaactttgtcgcatgggctcaagaggttcgcatccttcgccaggagcacggctgtaaccacgaccaaatccgcaccatgattgagcgcattcagcgagatcagttctggtgcccaaaagttcaaactatgaagacattgcgcaacaaatggccagagctggcactgaagctgtgcccggcaaatctcgcaaacggcggcaacctcggttttagcggcaagattcagacagatattcctaaaggtttcaggggctaa

SEQ ID NO: 228032 - DNA, 255 bp, Klebsiella pneumoniae
atgtgtaaccagtctgctgctgaattgattgctcgcctgaaacgagcgtatccggcgtatgagccgtctgaaggagattgtgcaggcactggcatccctaaggccggttctcgcttccagcacagacacaaaggccacatggtgacggtactcacagcgacagagaaagatgtttcctaccgcaaaccctgcggggctattggctgggtgggattgagagagtttttacggctacacaatgaggtttcggaatga

SEQ ID NO: 228033 - DNA, 426 bp, Klebsiella pneumoniae
atgaaaatcaggcatgaacgcattcgcgaggccatgaatgcctgggcgctttatccaggcggacgtaaaacgcctgtatcggcgattgtcgacgcttacttctccatggggatgaccgcgccagagttgtacgacgaaagccaccctgacgcactgagccgcaatatccagaagatttaccgctgggttgaaagtgattcacctgcatcaatcgaaaaaattgcgcagcttctcccggcaattgaacgggctatgccgccgttactgctggcgcgagtgcgtagttattactccgcaactttccgggaacttcttcaccgtaaacagcgtgtcgacgacgaaatggaagcgctgttcggagcaatgattgctatctctgaccggattgctgatggcggcccctccggtaacacgctgattcactga

SEQ ID NO: 228034 - DNA, 228 bp, Klebsiella pneumoniae; identical to SEQ ID NO: 180115

SEQ ID NO: 228035 - DNA, 324 bp, Klebsiella pneumoniae
atggaattcaaagatctccccctgaaggtgcaggaaatcgcagcgcagtgcctagcagataaaatcagttacgtgtcaggtttcgcggaaggagcagtgaaaaacgagcctgcgaaagaccaggcccgtcaggtaaaagaagctttcgttgagctttattgcgaagaacatcgagaagaggaagaggctaaacaagccaaaccctatgccctcttcccacatatacgcaaagttatggatgaactggaacgctcaccgaaaactaaagatacaaatgatcgctttcttgctgaattaaagttcgtcgagacccagctgaaatag

SEQ ID NO: 228036 - DNA, 294 bp, Klebsiella pneumoniae
atggcaagatttatggttcgcatcgaactcagagattcaaagccagcagattacgaagaactgcatacaaaaatggctgagaaacatttctataagtttgccaaattccccggcaacgacagcttcctgcgccttcctgatgccgaatatcatttctatagctctgaaggtctggaaaacgctatctctataggttttctcgccaggtcaactgcagaacaagtaagagcaaacccaaaagttgttgtaattgagatacaagacctatttcagctgggtctcgacgaactttaa

SEQ ID NO: 228037 - DNA, 306 bp, Klebsiella pneumoniae
atgaaagaacttaaattttacggtgccagtgatgaccttttcgaatgcgaaggcgctatcaggaaagaaatctgcatatacagtaatccaggcgtttatcacctcaaatccgctgaaggtgagatgctcgttattgcctgctatacagacgaaggctgctgggctattggcgtgggccaggttaaagaagaaacgccacttccagcatggtccacatctttcacccagcacgaacgcggctatagcgttgagctcacgattcaggttcctgacgacacagaactggtactggaggatgacaaatga

SEQ ID NO: 228038 - DNA, 357 bp, Klebsiella pneumoniae
atgagctgcggatatcaaggttatgaatttggtgcgcattacccggatagcctttgctgcgatggttatctgtgggattgcgacgcatacgaagatggcatgctgacgaatggtggtgacattccttgccctgtctgtaatcgcaagcagtggctggctttctaccgcgatcacatcattgagtgcggaatgatgcaatcagagcgcaagcgtggacctaaaacagtgaaatacggtggtttccctgagcccgtacgtgatgatgcaaaggctatgcgcaccatccgtcgctggctgcgtcgcggttggtatcagggacgtaagttcgatgcggaagcgcacaaggtggtggtatga

SEQ ID NO: 228039 - DNA, 240 bp, Klebsiella pneumoniae
atgcttcgacaatcagatataaatcaggcctttcgtgagtcgatccttcgaaactcgaaaggctaccagtacctgcacactcgcgattttgtttcttctcttgtgtgccgaggaatccacttatcttattccgaggctaaccggtggatagagcgctatcagtcgtgcttcgctgacaaaactccggaccacaccgaaaacaggctttggattttaaggaatatggggaggatcatgtaa

SEQ ID NO: 228040 - DNA, 294 bp, Klebsiella pneumoniae
atgatggttagttcgtttccttcacctgctgctgattatattgagtctgctctgactgtcacggctgcgtgcaacattggtgcgaactctcagattatagagactgatcgcggcttcgttgttcttgacctgtcgttaaaagtgacgcaaggaagcgtcctgctcatccgcttggctggcgaactgcagtttgcaaaattgatggggcgttcttttatcacagccgaaggcgagagcattgaaggtgaggcgctggaagatgtggaagttctcggcgtagccacacacgattaa

SEQ ID NO: 228041 - DNA, 2115 bp, Klebsiella pneumoniae; identical to SEQ ID NO: 212780

SEQ ID NO: 228042 - DNA, 2046 bp, Klebsiella pneumoniae
atgccaacgttgtccacccggatactgcgcggtgttggcctgttgctgctgctgttgagcatctctggcttagccgtcagcgacgataaagctatcaccgaggcgtcgccactcccggccaatgcccgccgggttcccgcgtatgaacatattctctttttcgattccctggcgcgttttcagccaaacggcagcatggagatgcgggaaaatatcaccgtgctgtccctcggaaaggagattcggcgaggcattttccgcacgctacctctctcctggcaccggcaggacggcaaaatttttagcgttgattacgtcatcaaatcggtctcacgcaatggactccctgaaccctacagcctcgatcgcacaacaaaagcgctgaccgtgcgcattggcagcgccgatcgcaccctgaagccaggtatttataactatgaaattcgctatcaggttagcaaccatttcagccgcttccatgactgggatgagctgtactggaacgtgacgggcaacgactggagctggccaatcgggaaagcccgtttccagcttgtactgcctgacgccgccgggcagctgaatgcggatggcagagatgcaaggttgcgcaccattgatgtttacactggtcgtcagggggcgaaagaccaccatgcgatcatcctgcctgatggcagcatacaaacttcccgcccccttgccaccggcgaagggctaaccgtggtctatacctggcctcgagatattctggcaggcgccgccgcgcccgaagcggtctggccgttggtccatttactggtgccgacgctggccaccagcgttatctggcttcccctgctactgctcgttggctactacgggctgtggtggcgcaaaaacgtcacggcggcggggttaaaaatgccgccggtgacgccgctattttcgctgcccgccgcgatgtcgccaggctatctgcgctttattacgcaacgtaagtatgacgatgtggcattcagtagcgatttgctggggctggttgccaaacgagcaatcagattgacgagtaaaaaaagccaaaccaaaggcgcgtggtcttcatcccctgttgatgagcaatggctttcccgccagccagacgaaaaacataagccgctgaaccccaatgaaaagcagttgatgagcctgcttttcagcgctaaacgtaagaacatcaatctcagtacgccgcatcaaacgttgatgcaaaacgcgcgcagatggctggaaaaatgttgtgaagagcagaaaccgcagctgtgccggacatggggtaaaccgctgcgtcattgtatctatattgctctgctgatcccgatcgtttgcggcatcggatttagcccggcggcggcggcgctcaccgttcccagtctgctgtttgtatcggtcggcggggtgatgacgtatttgtgcctgaggtttttacgcaacccgatgaaaaccctgcgtagtttgggaccagttatgatcctgatggcgctggtatttagccctttcgccaccgtggcgggcggtgttttcctgcttggcatgctacccctcacccaacttcctgccggctatcctggcgccttgttaaccgccatcgcactgtgcgcgttcgtcgcctggaaaacgccacgctatacgcagaagggtttaaacgatctggccgtcgccaaagggttgaaactgtatattaaaacggccgaagagaagcgttatcagacactttatccacctgaccagatggtcgcgcactttgaaagcctgctgccggtcgctctggcgctcggcgtaggaaagaccctggcgaacacttttgcccgatacttaagcagcaccggcgcgatatcggaagtgttacagcagacggactggcgggatatgcatcatttctaccagagctgtcattccgcggccagtgagaagccggtggagcgttcagagggtggctcgtcaggttccggctatagcggctccggctcttccggtggcggatcgtcaggcggcggttccggtggcggtggcggcggtggctggtaa

SEQ ID NO: 228043 - DNA, 1059 bp, Klebsiella pneumoniae
atgagcaacccgctgctttcgcttcttgatattgattatcccctgattcaggccccgatggcgggcgtctccacccccgcgctggctgccgcggtaagtaatgccggcgcgctgggctcgctggggctgggcgcttcaaccgttgcccaggcggaagcgatgatagtcgccactcgccagctgacggaccgcccgttcaatgtcaatctgttctgccatgcgccgccccggcgcgacgcccggcgggaagccgactgggcaacaacattacgtccccattttgcccgctatggcagtacgccaccggattcgttaagcgagatctaccagacatttgtcggtcatgcgccgatgctggagctgcttctcgacatctcgccggcggtggtgagctttcattttggtcttcctgaacgtgagacgatccagcgtctgcgacagcaggggattgtcaccctggcgacggcaacctcgctgcaggaggcgctgctgattgaacagcaggggatcgacgtagtggtcgctcagggctatgaggcgggtgggcaccgggggatctttgctccgcaggcgcctgacgctcagctgagcaccttcaccctggtgcaacttctgcggcgtcgactaaccatcccggtggtggccgccgggggcatcatggacggagcggggatcgccagcgtgatgcagttgggggcgcagggcgtacagctcggtacggcgtttttactgtgtccggaatcggccgccgacgccggctatcgcgcggcgatccacaacagccttgacgggcgtacggtgctgacctccgcgatatccgggcgtccggcacgctgtctggcgaatgccttctgtgcgctgggggaaggctatccggcgagcgccgtgccggattatccgctggcgtatgatatcggcaaagcgctggccgccgccgcgaaagcccagggcgtccatgagtatggcgcccactgggccgggcagggggtggggttgatccgcgagtgtgacgccgccactctgatccgccagctggcggcagagagcggctggaactaa

SEQ ID NO: 228044 - DNA, 288 bp, Klebsiella pneumoniae
atggccggcgtcggcgcctttctcaccggttcgggtttctcgctggtctttccggctttaggagttgaggcggtaaaacaggtggaagagcaaaatcagggaaccgccctcggcacctactcggcgtttcttgatctggcgctgggcctgaccgggccgctggccggctgggtcgccgggttctacgatctcgccacgctgtatctgctggcggcgatcgtggtggcgctcgcattcctgctgattttccgcgtacatcggcaacagcggcttgtcgccagagagtag

SEQ ID NO: 228045 - DNA, 1746 bp, Klebsiella pneumoniae
atgacgagtactgatgcacgtcgtcccgctgctttgccctgttccctgcgcctggcgatcggcggcgctctgatcgccctgatgagcctgaacgctcaggcggaagacggcaaaaccgcgccgcccccctcgccggatattctgctgggcccgctgttcaatgatgtccagagcgcgaagctgtttgccgatcagaaaaccttcgccgacgctatccctaacagcgatccgctgatgatccttgccgattaccggatgcaaaaaaaccaggccagcttcgacctgcgccacttcgtcgaactgaacttcacgctgccgaaagagaacgacacctatgtgccgcccaaagggcaaactctgcgtcaacatatcgatggcctgtggccggtcctgacccgcagcaccgtcgaggtggaaaaatgggactcgctgctgccgctgcctaagccctacgtggtgcccggaggacgtttccgcgaagtctattactgggacagctatttcacgatgctgggtcttgccgaaagcggtcactgggataaagtcgaggatatggtcgccaacttcgccgcggaaattgacgcctggggccatatccccaacggcaaccgcacctattatctcagccgttcgcagccccccttcttctcctttatggtgagcctgctggcgacgcatgatggcgaccaggtgctgaaaacctaccagccgcagctggagaaagagtatcgctactggatggccggagcggacgcgctggctcccggcagcgccgacaaacgggcggtgcggatggcggacggcgcgctgctcaaccgctactgggacgataacgacaccccgcgtcccgagtcctggcttgacgacgtcaaaaccgccaaaagcaacccgaatcgtccggcaaccgagatctatcgcgacctgcgctccgccgccgcctccggctgggatttcagctcccgctggatggacaatccgcagcagctcgccaccattcgcaccacctcgattgtcccggtcgatctcaatgccctgatgttccatctggagaaaaccctcgcccgcgccagcaaggcatccggggacagcgctggcgctacgcagtacgatgcgctggctaacgcccgccagcaggccatcgagaaatacctgtggaatgataaagagggatggtacgccgactacgatctgaaaagccacaaggtgcgcaatcagttgaccgcggcggcgctgttcccgctgtacgtcaatgccgcgtcacgcgagcgggcgacgaaagtggccgccgccgccgagtcgcgcctgcttaaacccggcgggctgaccaccaccaccgtcaacagcggccagcagtgggacgctcccaacggctgggcgccgctgcagtgggtggcggtcgaggggctgcaaaactatggtcagcagaagatcgccatggaggtcacctggcgcttcctgaccaacgtgcagcatacctatgacagtaagcaaaagctggtggagaagtatgacgtgagctcgaccggcaccggcggcggcggcggggaatatccgctgcaggacggctttggctggaccaacggcgtcaccctgaagatgttggatctgatctgcccgcaggagaaaccctgcgatgcgctgcccgctacccgtccggcgacaaccccttcaccgcaggacaaacctgttgcggcgcccgcggctaacgaccccgcccctgcggaaccgcaaaagaccggctcctga

SEQ ID NO: 228046 - DNA, 387 bp, Klebsiella pneumoniae
atgaaaaaattctttctcttactgctgctagcctcggctagcgttacggctcagacatctaacgaatccgtcttgcaaaaatctcttaaaccttggcggcccctctcgataaacgacaatggtggcatcatcactatggtcacgaacgaagaccgtgttacacctcaggtttacgaatccataattcttatgggggtttgcgtgccttttctatcacaaaatgcccatgtctggtatttaaagaataccagcgaagtgcgtgtgctgaatcgctttgggcacaatggatttgcattcgaatccccaaggaaatcatgtaaagaagtcgccaaatccaagggggatgatgcgggattggttatatcaacctacactcataatctttag

SEQ ID NO: 228047 - DNA, 249 bp, Klebsiella pneumoniae
atgttcaagtgtcccatttgcggtgccgttgccaaaacgcgcaccagtcgtccattgagtaacacaaccgttcggcattatcaccagtgccagaacttcgagtgcagcatcactttcaccaccctgaacagtgttgaaaaactggtgacaaagcgtggtcatcgcgaaaagttgccacctggctttatccccgcagatgcgtttcctgcctcgcattacggcaacgatcagcttacttttgctatatga

SEQ ID NO: 228048 - DNA, 1155 bp, Klebsiella pneumoniae
atggcactgacgacagacactatcgacaaagcaaaagcgctactggacgaaggggcgcagcgattccaggactatcagtccgaactgtcgcgcgtgccggcgttcagtatcctgatgggcggcaaagcactgacgcagctggatcctcgcatcatttcactggagctgaccgacaaccgcggctttgaggccgacgagttgaccattgctatcgacgacagcgacggcttgatcgagctaccgccgcgcggtgccgagctgtcggtatccctggggtggcagggcgagccgctggtttacaaaggggtttacactgttgacgaggtcgcccattcggggccgccggacaggctggagataaccgcccgcagcgcggattttcgggacgagtttaacgtcaagcgcgaggtgtcctggcacgacgtgacggtcgagcggattgtgtcggccattgcccgacgctacaagctgacgccggtgatttcagagcaactgatgaatgccgagattgaccacgctgatcagacccaggaaagcgatatgtcatttctgacgaggatggccgacctgctgggtgcgattgctaccatcaaaaacggctgtctgctgttcattctccccgggggaggcgtcagtgcgaacggcaaagcgttaccagagtttgcgatcacccgctccagcggtgacaggcattcattccgcattgccgaccgtgacgcttacaccggcgtgcaggcgtactggctggatatggagtttggcaaaaagaaaaaagtgactgtgaaaactcgcaagaagaagacccagaagaagccgcgcagtagcgccagggaaggggattatatcgcgggcgaagacggtaacgtttttgtattacggacaacgtacgccagcgagactgctgctcaacgcgccgccgcagcaaaatggcaacaactcaagcgcggcgctgctgaatttaatatgacgctcgcccgcggccgtgcggatctgtacccggaaatgcatggcaccgtgtcgggctttaaagcagatattaataatcaggactggataattgcgaaggccacgcacacgatcgacgagggcggatttaaaacgcaacttgagcttgaagcgaaaatacctgaatggattgcagaaagtgagagttaa

SEQ ID NO: 228049 - DNA, 1182 bp, Klebsiella pneumoniae
atgaccgacaacttttttcacggggcgcgcgtcaaggaaaataccgacctccagacagcaatcaatgacattgattcaacggtcattggtctggttgcggtagccgaagacgccgaccccctcacctttccacttaacgctccggtgcttgtgacgcgtgttatcagcgtgctcggcaaagcaggtaaaaccggttcgctctacaaatcgctgaaggccatttccgaccaggtcagcacccgcgtgattgtcgtgcgcgtggcagaggccggaaccggcgagaacgatccgacacagtcgcagctgattatcggcggcacgcaggcggacggcagttacaccggtatgtttgcctttctgacggcggagcagaaaaccggctatcgcccgcgcattctcggcattcctgagtatgacaccgccgaagtgaccgcgcagctgcgggttatcgcgaagcaactgagggcgttctcatacagctactgcgacggctgcgacactattgcggaggcaaaatcctaccgcgagacgtttgcggagcgtgagggaatgctaatttggccgaacttcatcgcatacaacccagcgaccggcgccaatgaagagtttcccgccgttgcgtatgcactgggtctgcgggcgctgatcgacaacgagcagggctggcataaatcactgtctaacgtgccggtgaaaaatgttctggggattgcgaaggatgtgttctgggcgcttcaggcggaagactccgacgccaacgagctgaacgccaacgagatcaccacgctcattaagcgcgacggcttccgtttctggggcaaccgcaccaccgacaccgaagaatttattttcgaggtgtacacgcgaaccgcgcagatcctggcagacagtatcgcagaagcacagttcaccactgtggataccccgctaaccccggcgaacgtgaaagacgtggtgagcgggattaacgccaaacttcaggcgctggtcacggcgggcaagctgattggcgcggcctgctggtttgatattgtcgataacccaacagtaggcctgcgccagggtaaagctatcgtgcgctacaactacagcccggtgccaccacttgaagacctgacgatgattcaaacattcaccgatcagtactacgaatccgcttttgcatcgctgggaggtgaatag

SEQ ID NO: 228050 - DNA, 516 bp, Klebsiella pneumoniae
gtggctattcctaaaaaactccggctgtttaccctctttgttgacggggaaaacttcatcgggaaagtgccgagcgtcacgctcccgaaactcacccggaaaacggaagactaccagggcggcggcatggtcggctcggtggcggtagatctgggtcttgactccggggcgctggatgcgtcgatggtggtcggcggtgtggtcgaggcgctgatcctgaaatatggcggcgatattgacgaagtacgcctgcgttttgttggtgagatttacagcggcggtaccagctcattgctggaagttgagatgcgtggccgcattaccgaaatcgatccgggtgatgcgaaacagggtgatgacaccaaccacacttacgctatcaaaaatacctactacaaagagtcggtagacgataagccgctgctggaaatcgacctgctgaactttatctacaagcgcaacggggaaaatctctacccggatcgcattatgtcggcgctgggcctcggcagctga

SEQ ID NO: 228051 - DNA, 1275 bp, Klebsiella pneumoniae; identical to SEQ ID NO: 208535

SEQ ID NO: 228052 - DNA, 222 bp, Klebsiella pneumoniae
atgaacaatgagcaaattaaaatttgttatttctgtggtgaacttgcgacatcaaaagaacacgtgcctccacagggattatttccaaagaaagatatttacagaaacaatctgattactgtcccctcatgtactctccacaacaattctaaggaaggtgcgaacaagttcctgatcatgtacagaaccttaagcggcaagcgaattaataataccgtctaa

SEQ ID NO: 228053 - DNA, 234 bp, Klebsiella pneumoniae
atgtgtaataccgcaactcgtaccactaaaaccacagtagataagtctggccttaaccagttgctgacggacgcgcggatgcaagagcgccgcgcgcgcgcggaagttatggcaagccgtatggttaacctcgctaaccacattaaaaccaaccaactcgacattaacgaggcgctggagctgttgttgcaggaaagcgaaatttaccgccatcaggctatggagatccactaa

SEQ ID NO: 228054 - DNA, 801 bp, Klebsiella pneumoniae; identical to SEQ ID NO: 207905

SEQ ID NO: 228055 - DNA, 582 bp, Klebsiella pneumoniae
atggcgaccgggtcgtcggtgctggagcagcgagccgccacagcgtgtgccgtcatcagcgacttatctgtcccgctgcgtgatttgtggaatccgtggaaatgccctgcaacatttcttccatatctggcatgggccttttccgttgatagctgggatgagaactggagtgaacaagataaacgtgcagttatcagcgaatcattctggttacatcaacgtaaaggaacaataggcgcacttcgtcgagtggttgaaaaaatgggttattccatgtcgattgaagagtggtggaaatttgctgatcctgctggaacttttcggcttgaggttgatgtgaatgatatcaaccttacgtcaaaaatgcttgatgagcttattcggctggtcaatatctccaagccagtcagcaggcatatggcgcagttcaatatcgcagccagggtaaaaggtgatatttacgtcggcacttcgctttgttgcggggaaataatcagcgtatatccaccggactatgaccttgccgaaaatattttttataacgggattattttccatgacggaaactataacttcggatga

SEQ ID NO: 228056 - DNA, 1947 bp, Klebsiella pneumoniae
atgacggaaactataacttcggatgacaccgctatgaccaatattacagaatctccgtcgtgggaagaaagcatcagcctgatagccagaaacgaacgcgtgacaggtggtcaggatggtgtggcaaacagaccattgaagggcctggctaacaggacacgctaccttaagaaaaagtatgatgaggtagcggaggatgtttccggcaaagttgaagccgtgaaaacatttgcagaaggagcaacactcctctcaccgcgtgatgaaattgtgtatggaaattatcgccttgtctggacgggggaatttcctaaaaatgtcccggctgacagcactcctgccagttcaggtggtatcagcgctggagcctgggcttatacgtcagacgggccattgcgccgggatattactgcacagactggcgcatccatgattggcgggttgagttttctgaccgtcgaaatgtattcgtatctcgccgaagggagagactggcggaaggcgattcaggcagctattgacaaggctcaccagaattatcttgcagggagtggtccgacaaacattctcattggtggcgagctcactgttactctcaatccggattcaacattaatccccggtgaggttgctgcgggccgtggtgcgctgtgtatgcgcagtggtgtaaccctgatgggcggcggaacaataactcttgatggcagttttaccggctcatccagcggtgcaatcatcactaactgggaaggcgctgccgataactgcaagattcagggggttacgcttaacggtagccgtggtaccgctgccggaacgggaatcacctgtattaatatcgtggactcggacaacgtcaccgttgataacgttaaggcgtttgacagtacatcgggcggcatttatctgcggcgtgcaaataatgcagtttacgggtgttctaattctcggatattaaactgttatgtgcataacgtagggtatataggcattcagtgtgagcgccccaatgggatgaccattacgggatgtaccgtaacctcctgcggtgataacggcattgatatctttggtaatgtaaccgacgaaaccggtcagggtatcgcggaaaatgttgttatagctaattgcacggtaggtgatatttccgttggaatctttatcgaatcctgcggaaacgccactatctccgcatgtgtcatctttgggtttccgaactctggaattttctttaaccggataaatacagcggcgtataactgttcggttacggggtgcacgattacggggaaagatatcactaccagccagggcatccgctggaaaaacgcagtaggttatacgcgcgtatataacaatacgttaaaaaactgcattgattcctttgtgacaaccggaggcatgatttacgttgatatcggggtaaataatcacaaaaacatcggtcgctgtttcttgtatgtacctaaaacctcaaacggctgtgtatatacccgaatggcgcagcaggtctacaacggggttcagacagacggtataccctacaacaccacacctcgcggctggccatcagcgaacaatacccggtactaccgttgctcattcactgcaccttacatgatgtactccgcgaccacaggcgaggataacttcattcgggctactggcaaccttccgtctaacagtggttgggggccagcttattcgctctataactccatcgtggcaggtgagactgttattgctatgagtagtgcgcttttagctgcgggtgagttcatgctgataaatggaagttactactctgttcacagcgtaacatcatcttatgcagtcgtcaggaaatgggatattaacagtcaaaactacatagcaggcgattacacatcctacctgaatagcgcttatacctattcaattttcagaacagcatggggagcaatatga

SEQ ID NO: 228057 - DNA, 255 bp, Klebsiella pneumoniae; identical to SEQ ID NO: 206906

SEQ ID NO: 228058 - DNA, 135 bp, Klebsiella pneumoniae
atgaactcaaaagatatcaatatttttaggcaggaaaaacagaggagtgattatatcattacccctcatcacggggatgagggggttagctattcaagtattaatacttctttactgaagaaaaacaacccatag

SEQ ID NO: 228059 - DNA, 999 bp, Klebsiella pneumoniae
atgaaaacacgttatcttggaaaagagaagtttcaggtttccgcattaggtctcggatgtatgggtatgagttttgcctatggcggcgctgaaacgtcgcaggcgataaatacgatccatgccgccatagacatgggcgtgaccttcctggataccgccgaagtatatggtcctttcgataatgaagttctggtcggaaaagcgattaaaggttttcgcgataaggtgcagattgccaccaaatttggatttcgtattttgccgaccggccagggtctggagcggatggccggcgttgacagccgtccggcacatattcgcgaatcagtggaagggtcgctgaagcgactgaatgtcgagaccatcgatctgctctatcagcaccgcgtcgatcccgcggtaccggtggaagaggtggtgggcactatggccgatctggttaaagagggtaaaattcgccatatcggtctgtcggaagtatctgctcagacgctgcgccgggcctgcaaggtacatccgatcgctgccgtgcagacggaatattcgctatggagccgcgagccggaggccggtattctccacacctgccgcgagctgggggtcggctttgtgccatacagcccgcttggccgcggcttcctgacggggacaattaccgatcccggcgttttggcagcggatgatttccgccgccatctgccgcgcttccaggccgaaaccatgcgcaaaaaccagctgctgcttgagcgcctgcagcaggtggccacccgctatgacgcgacccttgcgcagattgcccttgcctgggtgatgagcaaaggcgaggatatcgtgcctatcccgggggcgaggaaaattgctcacctgcgcgacaatgccggcgccgcgaatattactctcgcgccggaggacatcctcaccatcgaacatattttcactgccgacaacgtcactggcttacgctatacccagggcgactttgatttaatcgaaaaataa

SEQ ID NO: 228060 - DNA, 2538 bp, Klebsiella pneumoniae
gtgaccggaaccgcaagccagctgcttggtgtctccttactcaatacggtggatgtctccctgctggcggcgaactccacgaagttctcggttagcgaaggaacaactgaggatgtgacgatagcggtcactggttcaacgttgctgagtctgcagtcagtactggcactggtggggcaactggtgggcggcgcttcatccattactgccgatctgtcgatagtgaataccgacaccggtgaggtggtgcagattattccggatgccgtgagcctgacgccgtctctggcgctgctcaatctggtttactccggcagcgcgaccttcagcgacctgccggccgggaactacgcggtggtggtttcttcaccgcaggcttccggcggtctggccgcagtggttgatgaactggcgtcagcaaatctgctgtcggttgcccaggcgacaatcacggattctacgcagtacacctcgacggcaattgccggcaatgtgctggttgcggatgcagggggtgatgtagcagacaccggtgacggcattacggtaagcaaaatcgcctccagcgtgcagaccacgccgcttgatgtgacggctgcaggtgttgtgataaatggtctttacggtcagctgacgatccatgcggacggcagctatacctacaaggcgactggcgatgcggatgctgttggccaggccgatatctttacctacacgatagtggatgcggatggtgatacggcaacggctacgctgacgattaatatcgtggcaggaagtgatatcggtgagtcggatgctgatgtagattccgacagcgactccgattctgacagcgattcggattctgacagcgactcggactccgacagcgactcggactccgacagcgactcggactccgatagcgactcggattccgacagcgattcggactccgacagcgactcggattctgacagcgactcggattctgacagcgactcggactctgacagcgactcggattctgacagcgactcggactctgacagcgattctgactcggacagcgactcggattcggacagtgattcggattccgttgaggcaatacctgataccaatagttctgaggttgtgcagcagtacggcaatcttaatggtactgaaggcaatctctcgcaactggttggcgtctcgctgctgagcacgattaatgtgtcgctgttgtctggcagtagcttccgcttcaatgtggacaacaacacaacagaggatatgacggttgatgtcagcggcgtgtctctgctttcaacggctgggctgttaacgtcgatagtcaatctgctgggggctggaaatacgctgacagccgatctgtcggtgattgatatcgcgactggacgcgtagttgctatcgacgcgggaagcgtgagtattagcgcaacgttgcttggtgggttggtctatagcggaacagcttcctttgagaatctgcctgctggtagctatgcgctggcgatatcctcaccaaattccgatggagttctggtgagcctgatcaacacgctcgcaggtgcaggagtagccacctttgtagaagcaacggtaaccgattcgctcggttatagcggaagtaccgttacaggcaatgtgctggagggatcggataacggcgatatggccgatagcggtaccgaccttacggtaacgtcggtaacggccaccactgctgcaggtgagactttctcagtgaatggcggcaccatatcggtaacgggtgcttacggcgtactgactattaacgctgacggcagctatagctaccaggcatcaggtaaggccgggtcggcaggtaatgcggatgtatttacctacaccattacggatggtaatgggctgcaatcaaccaccaccctgactatcaatatcggtcaggaggtcgagaccgcccaggctaatccggatacgcaggcttattacgtcggcaacgtcgaagataatcttgatatccagggaggcaatgtcgttcaggtggcgggcctgtcgctactgaataccgtgaatgtcgcgcttccgaccaatggctttaagtttgtcgtggctgaagggactgaacaggatgtgacgttaggcgtttcggggtctactgcccttagcatcgcgctaggcgccgttaccctggatctcattctgatcaataccgacactaaccagatagtcggcgttattaaggatggaattacagcaacgccgacaggtttccttggattaagccttgaatacgcgggaggaggggaatttgaaagaattggcgccggtaactatatggttgttatttcgtcgccgactactgaaggattgattggttcgatactgaatctgaatttgggcaccagcattagtatggaggtgacagattcgactaaatacgtgacggggaatgttctgcacaccgatagcgatggcgatgttggcgatacaggtaatgaaattaccgtaagcagcattcagtttggatcgcagatcgaaacagtcactgccggcggcgtgtaa

SEQ ID NO: 228061 - DNA, 1590 bp, Klebsiella pneumoniae
atgagtcaggactatctcgcccgtatcaccgcgctggaagaagaacttcgccggaaagacagccagctcagtctcgttgccgagactgaggccttcctgcgctctgcgctgacccgcgctgaagaaaagatcgaggaagacgaacgggagatagaacacctgaggtctcagatagaaaaactgcgccgtatgatgttcggcacccgttctgaaaaactgcgccgcgaggtggcacaggccgaagcgctgctgaaacagcgcgaacaggcgagcgatcgttacagtgggcgggaagacgacccgcaggttccccgccagctccgtcagtcccggcaccgtcgtccgcttccggaacatcttccccgtgagatactccgactggagccggaagaaacctgctgcccggcatgtggcggtgaaatggcgtacctcagcgaagtcagcgcggagcagctggagctggttgccagcgccctgaaagtgatccgcacagtgcgggtaaaaaaagcctgcacaaaatgtgacggtatcgtggaagctcccgcgccgtcacgtcctgtcgagcggggtatcgccggaccgggtctgctggcccgtgtgttaacagccaaatactgtgaacatctgccgctgtaccgccagacggaaatccttgcccgccagggggtggagctgagccgcgcactgctctccaactgggtggatgcgtgctgccgtttaatggcgccgctggacgaagccctttatcactacgtgatgaactgccgcaaactgcatacagatgatactccagtgccggtgctggcgccgggcaggaaaaagacgaaaaccgggcgtatctggacgtatgtccgggatgaccggaatgccggttcgtcagatcctccggcagcgtggttcgcgtactcaccggaccggcagggaaaacacccggagctgcaccttcgctccttccgtggcgtcctgcaggcagatgccttcgcggggtatgaccggctgttcagtacatcgcgagaaggcggcgtgctgacagaggcggcatgctgggcgcatgcccgccgaaaaatccacgacgtgtacatcagcagccagagcgccacggcggaggaagcgctgaaacgcatcggcgaactgtacgccatcgaagcggaaatacgcggcatgccggagacagagcgtctggcggccagacagtcgcggagtgcgccgctgctggcgtcactgcatgagtggatggtggagaaaagtgcgacactgtcgaaaaaatcccggctgggagaggcgttcacgtatgccctgaaccagtgggatgccctgtgttactactgccgtgacggtctggcggaacccgacaataacgccgcggagcgggcgcttcgcgccgtctgcctgggaaagaaaaactacatcttcttcgggagcgatcatggtggcgaacgtggtgcactgctgtacggactgatcggaacgtgccgtctgaacggtatcgatccagaagcgtatctgcgccacatcctgagcgttctgcctgagtggccttccaacagggttggtgaacttctgccgtggaacgtggctatacctgcctga

SEQ ID NO: 228062 - DNA, 372 bp, Klebsiella pneumoniae
atgggaaacggatggcatgaatggccgctgatggtctttacggtattcggccagtgcgtcgtaggcggctttattgttctggcgctggcgctgatgacaggcaagctttcccgtgagcaggagcagcgcgtggtgggcagcatgttcggactgtgggtattgatggggatcgggtttattgcctcgacgatgcaccttggctcgccgctgcgggcctttaattcgctgaatcgcgtgggagcctcgtcgctgagtaatgaaatcgccagcggggcgatcttcttcgccgtcggcggaattggctggctgctggccgtgtgcaaaaagctgcctgccggcctgccggcctgcggagcctgtggctggtggtga

SEQ ID NO: 228063 - DNA, 1821 bp, Klebsiella pneumoniae
atgaacgcaggagagattggaattgaagccgggcgtatttttgaatacaacttaccaagccattggattttccgaagtcaagaggatcaaaatgattttggtattgatggagaaattgaactcaaagatggtagtggcaaagctcttgggaaagagagtgttttcaaagttcagattaaaggtgaagagaactcaacctttattcatgacaatagcttattatcatttactctcaaaacagagcgtttgagatattactttgaatttaaagtgcctgttattttagttgtggtagagattacgtcagaaaaaatattttggctcccaataacaaacaatgcgatattaagaaaaaaagcttcaaaatctaatcagaatgatacagttcaagttcatatcccaattgaaaatacactggtcagaaaagacatagcatcagcaaataaaatattagacgcagccatagattgttgggattacttgaacattaagggacttaaagattctgttgtcagatatccaatcattagcccttcaactctcgataagaaaattgaagatataggtgaagcattatataaagcgtatcatcagcagttggataatcttttatctgaaaggaaatatgatgctgtttttaaacgctctaccgaaataagccattcaccaatagttcctgcaaaagatagatttatagcagttttatattacttacaagcattccaaattgctccttatactaatattaaaagagaaatttacagagaaaaattttatatttgccaacatttaatattattagctagagagcaaaaaagccggattcacagattaattgcttttggtaaatcacggaaagcaaaatttaaggctcagttggatcagcttcatgcgacccatcattccgtcaatcactttgaagaaaaatctttagagcgttatattttcaatgatcaaactcaaataatgtatagagactgctgcatatccctacaaaagatcattgagttatgtaacaggatgacaagaaaccagcaatatcacatacttgcagatttttttgttgatatctatgcgtctattttaatattcaaaggaatccatgaagcacggggttcgaaggaaacaattgattttctagatgattggcatgaaagaatgtcattattagtaatgacatattgcgtattatcaaaagatattgaaaaaattgaaaaattatacttccttactgccaccttactaaaacaaaaccctaaagcaacccaaccccatcggaagatgattctttcaacttttcctgattttgaggaagccctaacagaaatagagaatcatgttatccgtcttgacagtcaaaaagatttttatgatcttacaactgaagagcaaaaagaatacttcttgagtatggccaaaaatctaggaatggatcctgatgacccacaaggagaatatcatgaattccttaaaattggatttgctaattatgaccccacaaatataatgaaaaattgtgagtatttatttgttcattatcgccctggtggagtatttgcccaatcattaagaatgcattctctaggtggtatgcatcttttgatctgcttaaaacaccgacatgcacaaggaaccggaaatttattaagtcaattatatgatagtactggtagctatgatttcggtaatagtttcaaacaatcaaattgtgataactgcacggattgtaaacccagagaggatggctggtcatggagtctcaaatggtattcaaaagaagtcgaacgttataaagatcttcttaataagtataaattttaa

SEQ ID NO: 228064 - DNA, 123 bp, Klebsiella pneumoniae
atgtatcatactgatggacagataaaaagcgtcaaccaggggctttgtggggtggttaacattaatcgatgtgaatttaatatgctcggaataatcactgatattctcaagcttctcgactaa

SEQ ID NO: 228065 - DNA, 189 bp, Klebsiella pneumoniae
atgaaaaacagtgagatagaaaatgacttagagcaatttcaggaattactgaactgccccgaacaaaactggttgcttggtgcagggataagttattccgcaaaaattcccttaatgtaccccctgacctcgaggattatggagttgatccaagaggatgccgaggccgtaaatcttataacaaaataa

SEQ ID NO: 228066 - DNA, 1899 bp, Klebsiella pneumoniae
atgaaattcaaaccaatagaagagttaaaaatagggcacgtagtagaagtgaccggtacaaaaataagagtagaactgtccagcaatgtagaagagttgactagaagttattgtggtaaagtttatgcaataggacaactgggtagtattgttaagataaacttcggaagaaatatcatttttggttttgtaactcttttaagaatgagatcggatgaattacaacctaactctctaccaatccctccagaagcagaccaacgtatcatggaggtagagttgttctcgcacggttactggtcgccatcaaatcagaaattaacattcaaccgcggtgtaaaaatatatccattgcctcagcagggcgtttatctcctaactcattctgaatcagcagagctcttcagtgctgcagaaggtgcaagagacaactcgtgtaaccctttagtgccattcgctcactattcaagtgcaaattcaataccttgtagggcaaatattgacaaattatttggacttcattgtgcagtattaggctcgacaggatcaggaaaatctggtgctgtcgccactattcttcatagcatattagaacactcaagcattgagggcaaaatcctatctcctcgaattgtaatgatagacccgcatgatgaatatgggttagcctttaaagatagagggataacttatcaagcttacagtgctcttgaaaatgatgaaagtaaaaaaaacataaaactcccatactggctaatgtcaagtgatgagtttagaacattaataattggcaaaactgaaaaagaagcaacgtcccaaaacaatattatatacaaagcgctatctcatgccaggatggttacgtgtggaattacaactcatgcgccagataactataactggcctctaccgacagatggtcaagctctagatgaaccgaggccgacagaaggccattctattgaagaaatactttcatttgactctgataaaccaattccgttttgtttaaatgaatttgaaaatcacataagatacattcaagcagccagagtaaaatcagggaaaatagaaaaagaaacagaatcaacatttgctgagaagtttaaatcaattttagataaattatcagtattaagacgagatccaagaattaaattcatgatggaaaactggtctccgaagaatgactgtaatcttgagaaaatattagaccagctagttggcgaaatcattattgaagaaaaatataaagatatacgaatcattgatatatctggcctacccaatgaagtcgctggcccattagctgcaacacttgccaggctactatttcaatataaaatacatcaaacagcatctgaaagaaataaagatccatttcttctagtctgcgaagaggctcaccgctatgttcctaaccatggtgaagcccaatacgcagctgcacaatccgcaatccggcgaattgcgcgtgagggcagaaaatatggtttgggactaatgttaatcagtcaaaggccagctgatattgaaagcactgtcatttcccaatgcggctcatgggttgtgttaagattaacgaatgcgacggatcaacagcatgtctcaacatttttaccggatggcctttcaggtttagtcgcgtctttgcctagcttatctcagcaggaatgtatattcgttggcgaagccgctgcattaccatctagaattaaaattaattttctaccggaagatagaagacctcggtcagagaacgtgagtttttctgagggatggtctgaaccgagatttacagtagaacaattaaagggtattgcagacagaatgtctggccaagttaaaatatccgataatgtgcaagttaatgttcaggtagatgatttacctttttaa

SEQ ID NO: 228067 - DNA, 534 bp, Klebsiella pneumoniae
atgcagattcgctgcactaagtccgaagataaaccctatactcttggggatcggcaaggcttgtcattgtttatagaacctaatggaagcaaaagctggcggttccgctatcgctttgtcggtaagcctaaaatgatctcgcctggtgtgtatcctacgatcacacctgcagacgcccgttctcgtcgtgacgatgcccgaaaactgctcgcggaaggaaacaacccgagtaaagttcgaatagagcagaagatcgctttgcaaacggaatccgaaagtgcgttcgaaaagatagccacagagtggcatcagatgaagtccgccaaatggtcggcaggatatgcatcagatatcatggaagcgttacagaacgacattttcccgtatgtggggacaagacccatttgtgaaataaaagcgctagaactgcttaatgtgctgcgtaaaattgaaaaaacgcggggcgttagagaagatgcgcaaagtacgacagcgttgttcagaagtgtttcgttatgcaattgtaacgggtag

SEQ ID NO: 228068 - DNA, 870 bp, Klebsiella pneumoniae
atgcacgttcgctattctctgctcgcctcgcaggcgacaacggccctttttgtgctgctgtggggcagcgcggccatcttcacccgctggggcctggataacgcctcgccgatggcgctgctggtctttcgttttctggttgccctggtcgcgctggcgccgctggctatcgtccgtcggcgctggctgcccgcgccgggcacccgcctgcagacagctgccaccggtctgatgctgattggcggctattcggtctgttacttcgaggcgatggccaacggcgtgacgccgggacttatcgccaccatcatggggatccagcccatccttacgctttgcgtggtggagcgccgcctgcaggggcggcggctgtcaggactgctgcttgccctggcggggctggtgctattggtgtggcgcagcctggcggcctcgccgatggcgacggtggggatcctgtttgcgctggcggcgctgctgctgatgacttttggcgcgctgtggcaaaagcgcagccgtcaggcgccggcggatgtcctgccgctgcagtatgccgttagtctggggctgtgcctgctgattgccccggtcagcggcttccggtttaccgttaacgccgggttgattattccggtgctgtttctcgggctgctgatttcggtggtcgcccagctactgctgtaccgtctgctgagcgcgggaaatatcgtcaatgtcaccagcctcttttatctggtgccagcgatcacggcgctgctggattatctgctgctgggcaaccggctgccggcggcggcgatagtcggtatgatggcgatcgtcggcgggatcgtgctggtgttccgcaccgcgaaggtccgcgccggctga

SEQ ID NO: 228069 - DNA, 240 bp, Klebsiella pneumoniae
atgctcaggcaatcagacatcaatcaggcgtttcgggaggcaattcttcggaactcgaaaggctatcagtatctacacacacgagacttcatctcttgtttgatgctgcggggcattcatttctcagagtcagaagctaaccgctggattgagcgttatcagagctgcttcgctgacaaaacgccggaccataccgagaatagattatggattctgcggaatatggggagggtgatgtaa

SEQ ID NO: 228070 - DNA, 327 bp, Klebsiella pneumoniae
atgactgccagctattttccttcacctgctgctgattatattgagtctgctctgactgtcacggctgcgtgcaacattggcgcgaactctcagattatagagactgatcgcggcttcgttgttcttgacctgtcgttaaaagtgacgcagggaagcgttgtacttatccgttgtgcgggcgaactgcaattcgcaaagctgatgggacagtcgtttatcacagtggagggagagagtattgaaggggaggcgctggaagacgtggaagttctcggagtcgcaacacatgcgattaaagacttgagacaggatatgagtcctgtttga

SEQ ID NO: 228071 - DNA, 906 bp, Klebsiella pneumoniae
atgtactgcgccaacaatggccggtactacgagacgccgatcagctggtacgggctggcccgccagtttggatatgcgagctggcaccagtcggcgctgttcttcaagcgcaacgtgctggccgggtgcttcatcccgcacaggctgttgtcgcgtcaggcgttctcagcctttgcgcttgactggtttgtgttcggtaacgcgtatcttgagatgcgccgcaaccgcctgaatgggccaatgggctttcgtaactcgctggcgaagtacacccggcgtggttctgacctcgatacctactggttcattcagtcggggcttgatgatcaccagtttgaaaccagctcggtgtgccacgttatcaacccggatatccaccaggagatctacggcatgccggagtatttcgccggcctgctgtcggccaacctggcccactccgccgacaagttccgcaagctctactacgacaacggatcgcacgccggttgtattgtctacgtcagtagcgcagtggccgacggcgagagccttgagaacctgaagaagacattgaccgatacccggcgcggcggggcatttaaaaacatcctgctgagtgcgcccggcgtcggcaaagacgccgtgcagatcctgccgttcagccagatatcggcgaaggatgagtttgtcggggtgaagtcttccacgcgtgacgacatgcttgcggctcaccgcgtaccgccgcagctgatgggcgccatcccggaaggcaatggatcattcggcgacgtcgagaaggcggcgcgagtattcgcggtcaacgagctgacgccagtgatggaagcgatgaagcatgttaatgactggctgggcgaagaggtgatccgcttcaacccttacgccctgctggaaaccccgaagtga

SEQ ID NO: 228072 - DNA, 315 bp, Klebsiella pneumoniae
atgcctaaactcactgaaagtgatttgatctataaagatgactacggcaacacagcaaaagacgcgtcagatgatccaaaagtaatattttcagataacaaacgcctgagcaggagtgaaaaatacgaagttttgcattttttaaatgctcttcatgggccaaataactctgatttatcaaggaaagtccgtcgtatatgtgaatggatgcttaagaatcacgttccctctaacattgagagcaccaccaagatcagggagtggattgtaaacaatatcaaggattacatggataagtatccatttaaggactga

SEQ ID NO: 228073 - DNA, 705 bp, Klebsiella pneumoniae
atgagttatctggggagcaaggcagcgagcggtgtttatcaaaaaatcattgccgaaatgccgccgcatgatacctacattgaaacgcacctgggcggcggagctgtgatgttgcgcaagcccccggcgcggcataattgggggatcgatatcgacccggaaaccgtcgaggcgtttaaccaggacaatcatgattttctggatagactggcggaaactttgtttattgatgttggcgatgctgtcgagttcttgtgttgcttcgattacgcctctgctggccgcgtcttaatttattctgatccgccttatttacctgaaacgcgctccagctccgcgcgctatcgccatgaatacaccgttggcgatcattaccgcctcctaggcttactttgttcgatgccggaaaacgtgagcgtaatcgtgtcaggttatccctcttcggcttatgacaacgccttaccgggctggcgcagcaaggaatttcaagcaatgacgcgcggtggcgttcgcacagagaaaatctggatgaactatccagaggggcgagcttattcgcataccttcgccggtaaagactacaacgaccgctatcgaatcaagcgaaaagcgcaacgctggaaggaaaaatttgcagcattaccgccagcagaacggttggcgatcatggcggcgctcggcgaggtggatgatcaccacttttga

SEQ ID NO: 228074 - DNA, 2502 bp, Klebsiella pneumoniae
atgaccgccgcagcaagagagcgacgcgctccggcgtcacatcttccgcaaccgggaggcgcaccagccgtcacccggtacgactacgagtggcagaagccaaaggccgccatttatgttgataagactcctgctgttgatctggttgagctgggtcaagagcaggagtttttggcatgggtaaaaaataccctttcaccgctacctcgttttattcgccagcgtctggcttcccgcattgatagcattcacaccatgaagggcaggcacatagcccgcctgacgctgcgcgatatcatccgcagggatctgccgcctatcaacgcggtgaatgagcaatatgcaattgcactgaccgatgaggccaaatctcaggccgatacggcattcaaggggctaaacccgctttatcacacgtttaacactctgcatggactggttgagcgctttaatcgcctgccggatttcacgccggaagatgtagaactgctggcgcaggatatcgccatctatatgcggtctgtgctgagtgaagttcacgaaaccgtagagacgcaaagtgatcgcaaatatgccggatacctttacaccgaagcagccattctcgcgcggcttttcttcctgacgccgccgagctggggaaagtattgtcgcggcgcgttgtttattgatgaggctactaccggcatcagcaagatgctggatgatcgctactggcaccgcaacttgaaaaagtacgccacgcgctggcgcgagcacctgcacattgcttttggcgatgtgaaacggggtgctgcaccgtactgcagtaagcaccacgttgacgagtgggacgccagacgcaagcgcagccgcgcgatcatggcccgccttgagctggaagatcaggacaccaaagagcgcatttcgcttattgagcagatcgataagagcatatctaacccggcattacgccgcgttgaactcatgacacgcatcggcggctttgagaaagtcgccaccgaaagcggctacgcgggccagttttttaccctgacagcaccatccaaataccacgcatatagcgtattcggtcatcgtaatgccaaatggaacggcgccagcccgagagccacgcagcgctaccttaaccgggtatggcagaaaatccgcgcagagctggcccgccgcgaaatcccggtttttggtttgcgcgtggccgagtctcaccacgacggtacgccgcactggcatggcctgctgttctctttgccggaacattccgccgagctgttggaagtgatggaagactacgccacccgcgaggatgcggaagagttgcagggtaagcacggcaaccagccgcgctttgacatgaagcctatcgatcatgagatcggcagcgctaccggctacgtggtcaagtacatcagtaagaatattgatggctatgcgcttgatggtgaaaccgacgacgagagcggccgaccactgaaagaaacggctaaacacgctaccgcctgggcttcgtgctggggcatccgtcagtttcagtttttgggcggtgcgccagtgtctgtctggcgcgagttgcgccggttccgcaatcaggaacaggccgacaagataaacccgctgtttgccgagctgcaccgcgcggccgatgctggcgactggcagcaatacacccaattgcagggcggcgcactggttgcccgccgcgatctgccgctgcgcatctggtaccagcaaaaagacgagccgaatgattacggtgaatatcgcgaccttatcaaaggtctgatgatgccagccgttcagatcccgcccattgaaacccgcctgcactcctaccgaatcgtaaggcagaaaccggtgattctggacggctcagggcaggccgttgactttgattttgaccttccgggcgcgtccgcgccctctaggactcgtgtcaataactgtaccgaggctaaaaaacgaacaaattcaccgcccggatcaccgccattaatgacggtgtcagctgatggggaggagccagaacagtttgagatcggccaattaacacgcgatcagcgaaaacaggtgtttgagagcattcgtaactacaaaccgcagcggcaaaaatcgcctgctgatgagtttgaggcgctggcgcacagcattaccgtcggcgactgctccgaatatgacacccagcgggcagaaagttacctgaaagctgcccacgaaatcaggcggcaggagcaggttttatcaccggaaatcgccggagtggcggggctggtgcagtcgtgggcgcaggttaaaaaaattcagatcagtaaacctcaggccatacagctggcgcggggcaatgaagtgacagtgctggacacggtatatcgcgcacatccgattacgggtgagctgattattgccggtattgataagccatggcgtaaaaccctggcggatcataaagccggtgacctggtcacgcgctggaagaaggcagctaaacggaaaaacgagaggtaa

SEQ ID NO: 228075 - DNA, 864 bp, Klebsiella pneumoniae
atgaccttatcggattcaatcagtgtcatttcttcgccgggatcggcggatggtcgcttgccctgcgtcgcgcaggatggccagacagtcgcccggcatggacagcatcatgcccctgccagcctttcagcgcggcaggcaaaggacttgggtttgctgacgagcggcacttatggccctccgcacattggcttgtcggccagcgccgccctgtcgtggtctttggcgagcaatctggcagcgctgacgcgaacgactggatcgaccttgtacaggctgacgtggaagccctgggctatgcattcggggcggttgcgtttccgtctgcgagcgtcggcgcgccgcaccagcgagatagagcttattgggtggccggcgccgatcgccagcaatgggagaggtgcggggaatttcaaccgacagggggggggaaaccttcagacagcagcgttattagctggctggcccacaccgacagcaacggacgggaagggcggttatcagggcggacggatccgcaacgggaagctatcgacagacaggctcgacgtggctgcgcagcttgcgggctggccgacgccaaccacgagcaacgaccgttcaccctgtccgcaagaagctatgcggacatatcgcgaaaatggaacaaagattcagaagagacttcaggatgtagcggcgttatgcggcccggcccggttaacggtttctggcgagatgctgactggcttcactgccgggatggaaagtggcggccagttagacccggatcattcccgctggctgatggggttcccgccagagtgggaagactgcgcgcctacggaaacgccatcaacattgaagcggcggcagcgttcataa

SEQ ID NO: 228076 - DNA, 153 bp, Klebsiella pneumoniae
atgaacgaaaccaattaccgccggttctggcgaaaccttgttatctgctgcgcgatctgctcgctgctgttctggctcccgatgggttatctcgcttttcgtgttttctctgttatgtggggggcgctgtggttgcttattacaacgaaatag

SEQ ID NO: 228077 - DNA, 174 bp, Klebsiella pneumoniae
atgaacaccattgatgccatcgtgacccgcgttctggacgttcgcccatatcgccatttctgggtcgtcgaggtggaggcgttgagctggggcagatacagcaacacgaccatcatccgcgacagcgaaaaagaagcccgccacgttaatcccggcgacacagtgacgatctga

SEQ ID NO: 228078 - DNA, 279 bp, Klebsiella pneumoniae
atgagtgagccagtctggttagcagtagatcccgccgatgaatcaggggattgcaccatcgtgtcagcactgatttaccgcataaccggtagtcagcagtgccacaccttcaccctgattgattttagagcattcatccttgatgcgagtgtaccggtctccaggtcatgcgtatccggtacaggctacgcggaacagggcatcagaaaaggtggattcgtgtcgctacagcttccttccgacctgatgaggagtcgccattccgatgaacaccattga

SEQ ID NO: 228079 - DNA, 948 bp, Klebsiella pneumoniae
gtgattaagtcacccatcaaatgggcgggcggcaaaacccgcgtgatgccggagttgctgaagcacctcccgaaagctgattgcctggtagagccattcgtgggcagcggtaccgtgtttatgaatacggaataccgccgttacgttctctgtgataccaatccctcgctaatcaacttttttatcgtgctcagggataacaccgaacaactgatcgcatctgctcgtagcctgttcatgcgcgggaacggcgaggaaacttattacagcgaacgccagttttttaatagccttatgcgcgatccggaagagggcagcgcagtgatccgcgcagcgttgtttttatacctcaatcgccactgctacaacggtctgtatcgcgttaatgcgtacggcgagttcaatgtgccatttggccgatataagcaaccctatttccccgaagctgaaatgcgcttattcgccgaaaaggcgcgggataccgatgcgctatttctttgtgatgattttcgatcttcaattccgtacatcgcgaagaatcgtccggactcagtaatttactgtgaccccccctacatcccggccagcaaaaccgccaacttcaccgcctacggcaagccttttgccttggacgatcatcgcgccctggttacaacgctgctcgatgctcatcaccagcacggtacccgctcggtgatatccaacagcgacaccccggaaacccgcgaaatctactccgctttcaatctccacgccttcagcgtccgccgctctgtcagcgccaaaagccgcgatatggccggggaggtgattggcgtgcgtcgtgtctgcgatggttgcggccgctctggcggtggtaactgcccggactgcgggccagtgatgggcgcttccacttacggcgcaatggctgcggcgggtgtattcgacggggcggagggattctga

SEQ ID NO: 228080 - DNA, 195 bp, Klebsiella pneumoniae
atgaaatggtcgcctgaatacgcccggggcgcagtagctgcacttaatgaagccaaagtgatcaacctcgcaaacgcgacagcgatcggtgtacttgaggggctagcggccgcgaagaccttcattagcctgatgagtctggcgattgacccgttaatcaaaaaatacaccgatatggaggtgaaaagtgattaa

SEQ ID NO: 228081 - DNA, 228 bp, Klebsiella pneumoniae
atgtatccgcgtctctccgttgtttgcagtgcaccgctgccagtctgcgccagggcgcttgccgccctgaaatgcttttcgcgcggtcaacacaatttctcccgcgttaaaccgcatgcctatctcgtgatccgcattggccgccgctggcgtctgctgagtaagaacggcggcaagcagtggcggctgatgactcacgaaacatacaaccaggagtaccgcaaatga

SEQ ID NO: 228082 - DNA, 582 bp, Klebsiella pneumoniae
atgaaccatttaatgatcgacattgaaacactcagcacccagccgaatgcagtgatttgcgcgatcggcgcggttttcttcgaaccatcaaccggcaaaaccggcccgtcgttctatcagaccattgatccgcgcacctctcagaatcgcggcgcccatatcagcgccgacacggtgatgtggtggcttaaacaggacaaggaacctattagcgagctggtaagcgcgaagtcacatgaaattgaggtgatgctggatttcgccagattcattgaaggcgcattccccggggaggccacgaaaaaaaatctgaaggtatggtgcaagggtggctcatttgattttccgatcctcaaatctgcatttgagcgctcatcgctcgaaggcgttcccatgctgccgtggcatttctggaatgagtgctgcttcagatcgctactcaccgtggccggtgttatcggttacgccccccacccgcgccgctatgtcgcgcacaacgccttaacagacgccgtctatcaggcggagcaggtttgcgagatctggcagcgcctgacctctccgtactttgaatcgctgtga

SEQ ID NO: 228083 - DNA, 225 bp, Klebsiella pneumoniae
atgggggttaagtcaatcaagctggaaagcggaataagcgatccggattttgtggaaataagcaccaacgcacggaaacacgaacgctctcacctgctgggcctgctgcgtatttatgtcggcctgctgaaaaaggaaagcgccaccccggaagagatttatcaatcaatcgaacggtgggtcgatgcccgcgaattaactattaccgaggaaagcaaacaatga

SEQ ID NO: 228084 - DNA, 279 bp, Klebsiella pneumoniae
atgagtatcttcaccgaagagaaaacatcatgggaacaggagatgctgatccgtgaggcgatagaaaacgccgaacagggatttacggttcacctgagaaacggtgcgcgtattgccgttagccctgacagcccgtcaattgacttaattatttacggtctggagaaaacaattcgcggtaatcatgagcgtgcgcgaatgacctttattgattttctgtattactggcatgagagggtattcaagtcaattaaacgaaagccacgccctaaccactaa

SEQ ID NO: 228085 - DNA, 240 bp, Klebsiella pneumoniae
atgaaacgcctttatgctgaacagattaataaaatgctggaagattattatttcaatctggaaaacaacccacagggccgcgagtcgcattacggcgtattagctagcggcgtccagcacgtttacggtgcagccttctgcatgaatgatgatgacgccctcagcgatcttcgtccgttcgttagcgccattatgaatggtgagataccgtcaccagcagttgtagggcttgctgtatga

SEQ ID NO: 228086 - DNA, 231 bp, Klebsiella pneumoniae; identical to SEQ ID NO: 183074

SEQ ID NO: 228087 - DNA, 267 bp, Klebsiella pneumoniae; identical to SEQ ID NO: 183075

SEQ ID NO: 228088 - DNA, 300 bp, Klebsiella pneumoniae; identical to SEQ ID NO: 183076

SEQ ID NO: 228089 - DNA, 969 bp, Klebsiella pneumoniae
gtgagcattaaatctcttaaagatggctacatggttgacatgcgcccgcagggtcgcgaaggccgtcgtatacgaaaaaaattcgccactaaatccgaagcccagcagtatgagcggtggatcttgtcttcgcagcataataagggctggctagacaaagctccggacaagcgcccattctccgaactcatcgagttatggtggcgcatcaaaggccagaccatgaaatcaggcgaaagcacacggcgtaagcttgagcgtgttaatgaggcgatgggctttcccgtcaccgacaaggtaaataaaaacacttgggctgattatcgcgctggccggtacgccgcaggcataaaggccaagacgctcaatcgcgaacaggaaacgctttcttctctgttcggtacgctcattgaaaccgggaattatcaccacgaaaacccctttaaaggcgtctcaccgctaaaagtacacgcgcatgaaatgggctacctgctgaagtcgcagattaaccagcttttgactaccctgcctgagccggaaaacctcgcggcgcgattaagtctggcgaccggtgcccgctggggtgaggtcgttaagctaagacgaacgcatcttgctcattctaaagcgatgtttattaacaccaagaacagcaaaaacagaaccgtgcccgtcagcaataagctgtttggtgagctgtgcgagcggggaacaggcgatatttttgcggacgtggattacgagttgctgcgtcggactatcaagcaggtagctccggatctgccggacggccaaggagttcacgttcttcggcataccttcgccagccatttcatgatgaacggcggcaatattctgaccctgcaaaaaatactgggtcattcgaacatacaacaaacaatggtttacgcgcatcttgcacctgattaccttcaggatgcagtgcggtttaatcctctggagaattaa

SEQ ID NO: 228090 - DNA, 474 bp, Klebsiella pneumoniae
atggataacttagaaatacctgatgatgagctaaaaaaataccttaccaagctataccttgaggaaaatctcaataaaaaagctgatgaagattcacagaaaattgtgaagcagcaaacagaaaaattaagacaaattacgcctatgttgtttttccagtttctcgctgagaaaggtgtttcaggaaaatgcatatcatgtggctctgaaaagctatcagtcccgcaagcattctctctggaaggaattaaagctccagctatagaaaatgggaaaataaatgacgacttgttaaggtcgcctccctacgttcagtatgtttcttttgacgatgtagaccagccgaggggaatactaaatagctactatcagatgaattgcttaaattgcggtcatctcacactttaccgcgctagtgttgtccttaagtggtttgcacgtcaggaatcaaaagaggcggaaggcaatgagtaa

SEQ ID NO: 228091 - DNA, 453 bp, Klebsiella pneumoniae; identical to SEQ ID NO: 183079

SEQ ID NO: 228092 - DNA, 1551 bp, Klebsiella pneumoniae
gtggaaatttcttatggccgcgcgctgtggcgcaattttcttggccagtcgccggactggtacaagctggcattaatcattttcttaatcgtaaatccgctggtgttcgccgtggcgccgtttgtcgccggctggctgctggtggtcgagtttatctttaccctcgccatggcgctgaagtgctatccgctgctgccgggtggtctgctggctatcgaggcgctgctgatcggcatgaccagcccggcgcacgtccgggaagagatcgccggcaatctggaggtgctgctcctgctgatgttcatggtggcgggtatctactttatgaaacagcttttgctgttcgtgtttacgcgcctgctgctggggatccgcagcaaaatgctgctatcgctggccttctgcctggcggcagccttcctctcggcctttctcgatgcgctgacggtggtggcggtagtgatcagcgtcgccgtcgggttctacggcatctatcaccgcgtcgcctcggcgcgcccggacgatagcgacctgctcgatgacagccatatcgagcagcactaccgcgaggtgctggagcagttccgcggctttctgcgcagcctgatgatgcacgccggcgtcgggaccgcgctcggcggcgtcatgaccatggtcggcgagccgcaaaacctgattatcgccaaagccgcgggctggcattttggcgagttctttcttcgcatggcgcccgtgaccctgccggtgatggtctgcggtctgttaacctgtctgctggtcgaaaagtatcgcctgtttggctacggcgaaccgctaccgccgacggtgcgcaaggtactgcaggagtttgacgatcgcagccgcgcccagcgcagccgtcaggagcgactgcggctgattgcccaggcgctcattggcgtttggctgatcgtggccctggcttttcacctggctgaggtcggcctgattggcctgtcggtgatcatcctcgccaccacctttaccggcgttaccgatgagcacgccattggcaaggcgttcaccgaggcgctgccctttaccgcgctgctgacggtcttcttctccatcgtcgcggttatcatcgatcagcaactgttcacgccggtgatcgagtttgtcctgcaggcctcgccgcacgcgcagctgtcgctgttttatctgttcaacggcctgctatcgtccatttcggataacgtgtttgtcggcacggtctacatcaacgaagcgaaagcggcgctcgaacatggcgccatcagcctgccccagtttgagatgctggcggtagcgatcaacaccggcaccaacctgccctcggtggccaccccgaacggccaggcggcgtttctcttcctgctgacttccgccctggcgccgcttattaggctctcctatggccgtatggtgtggatggcgctgccctacaccatcgtactgacgctggtcggcctgttatgcgtcgagttcactctgatgccagtcaccgactggctgctggcgcacggctggctggtgacgcccaccctgccttga

SEQ ID NO: 228093 - DNA, 870 bp, Klebsiella pneumoniae
atgctgaccgggctctatattaccctgcgctttgggcactttatctccctgatgctggcttttggctgcgtgctgtatggcgcctggtgggcgcaggtaccgctgagacgcgtgctgatgctgcgcttttatccactactgcgcccgctgctactgatcggcgcgatctctacgctggcgctgtatctcctgcagggaggaataatgggcgagggctggacggatgtctggcgacccgccgtctggcaggcggtggccgggacccgctttggtggagtgtggatctggcagatcctactggcgtggatcgcgcttgcggtagtgtggatccgtccccgtcacggcgcccgccagctggtggccctgctggcggcacagctgctgctttccgccggggtagggcacgccgctatgcacgatggtctcaccggcgtgctgcagcggacaaaccacgctgtgcatctcttctgcgtcgccagctggttcggcggtctgttgccctttatctattgcctgcgcctggcgcaggggcgctggcggccggccgcggtcaataccatggcgcgcttttcacgttacgggcatctggccgtcgccggcacgattgccagcggagcgctcaatgcgctgttgatccagggaggattgattggcgcatcgccgtggggacgcatgttgttgatcaaatgtgcgctggtcgccgggatggtggtaattgcgttagtgaacaggtatgttctggtaccgcgcatgtcggcaagcggttcgcaggcggaaagcctgatcctgcgaaccacgcaggctgaaatagggctgggcgcgctggcgctgctggccgtcagtctgtttgccacctgggaaccttattga

SEQ ID NO: 228094 - DNA, 612 bp, Klebsiella pneumoniae; identical to SEQ ID NO: 61245

SEQ ID NO: 228095 - DNA, 282 bp, Klebsiella pneumoniae; identical to SEQ ID NO: 61246

SEQ ID NO: 228096 - DNA, 822 bp, Klebsiella pneumoniae
atgcgtttagcatcccgatttggacttactcattccattcgtcaggaacgcccactgactaacgatgaattagtcaaggttgtaccttctgtgttttcagaagaaaagcataattcacgtagtgatcgctatacctatattccaaccattacactgctggataaattacgtgaagaaggtttccagccattttttgcctgtcagtcacgagtaagggatgaggataaacgggggcatactaagcatatggtaagacttcgccgtgaaggggccaataaaggaacagaagtacccgaaatcattcttcttaactcgcatgatggatcgtccagttatcaaatgatcccgggtatgttccgttttgtatgcacaaatggccttgtgtgcggtacgtcgtttgatgagattcgtgtacctcataaaggtgatattgtgggaagggttatcgaaggtgcttacgaagttctgggaattttcgataaaataactgaaggcgttgatgtcatgaagtctattgccttaaccaaggaagaacagcgtctgtttggacaagctgcattaacctaccgatatgaagatgaaaataaatctccggtcagtattgaacagataattcatccgcgccgttatgaagataaaaaagatgacatctggactacatatcaaagggtccaggaaaatctgattaaaggcggtttgcctggccgaactgaaaaagggaaaagaacaacaacccggccagtaaaagcaatcgatggtgatgttaaactcaataaggcattgtggttaattgcggagaaattccgcactcttaaaggctaa

SEQ ID NO: 228097 - DNA, 270 bp, Klebsiella pneumoniae
atgaatgagccggtctggttagcagtagatcccgccgatgagtctggggattgcaccatagtgacggcgctggtttaccgcataaccggtagccagcagtaccacaccttcaccctgattgatttcagggcgttcatccttgacgcagatgtaccgctctccaggtcatgcgtttccggcataggcagcgacgaccagagcattaagaggggtggacttgtacgcctgcaactcgtttccgagagtcctgatgaggagttgccattctga

SEQ ID NO: 228098 - DNA, 558 bp, Klebsiella pneumoniae
atgaatcatttaatggtcgatttgataaacgtcaatgagaaacagacttcatctttgctcgctatcgaagccgtgttctttgagccgtcaactggccagatcggtagaagcttttaccacccgatcaatatccagaaggaagctgactcgatcagcgttgacaccgcctttgagtggatgaaaaaggattcccactggcgcgctgaattaatgagtacgaccgagggagaagaagatgtgttgtacggcttggcggacttcattgccgaaagcactgagtatcagtacgacagtttatttgtgtggttcaaggacaccccggaaaagctggcttcattacagcatgccgccgcgcgtaaaaatgtgcacagaatcttccctgctggtacaaaattccgctgcattcgttctcttctcgatctcgccgccgctactggctacgcccctcacgcgcgaaaagcccttgcgcgctacaccctgaccgacgccatctatcaggccgagcaggtttgcgagatctggcagcgcctgacctccccgcaccttgaatcgctgtga

SEQ ID NO: 228099 - DNA, 273 bp, Klebsiella pneumoniae
atgttcactgaagagaaaacttcatgggcacaggaaatgctgatccgcgaggcagtagagaacgcagagcagggttttactgttcacctgaaaaatggttgcgtcattggcgtaccagcaaacagcccgtcaattgatttaattatttacggtctggagaaagaaattcgcggtaatcatgcgcgcgcgcgaataacctttattgattttctttatcactggcacgaaaggttattcaagctggctaaaagaaagccgcgccctaaccactaa

SEQ ID NO: 228100 - DNA, 408 bp, Klebsiella pneumoniae
atgaaaagagaatacgccgacaaaattaactcactgctgcaatgcttccatttcaataaagagtttctggaatggaaccacgattattcacatcaacttttacgccacggcgtgtcccacctttatcacttcgccatgctccagggcgagaacgatgaagccacgctggaagagctgcgcaacatcatcattgcgatcactaacggtgatatcccaaagccatacgatctgctgtcaatagacgcagagccgcacgatgtcgaaaccaaaacactgatgtttgctaaacctcttgcggtgtctattgaggtgacaccggagatgatgcagcagctgaaagagacaatggcgaatatggcgggcatcccccgccgaatgagaaaaccacaactctactctcgggggtaa

SEQ ID NO: 228101 - DNA, 1788 bp, Klebsiella pneumoniae
atgtcgcaaatggtgtcggaatatatgcggctggagtctcgtctggcgggaatggcgattggggccgaaggggcggaccacgatgaggtgcgcctgcgtcttgagatcatgatgagccagatcgagcttctgcaagagggcgatctgggtaaatttatcaataaaagcgagcagcggaagacggtggttgcgacgctgattcgtaatcttcatctgctcgataaacaagttgataccatgacgccggagcaggtcagacagatcctgccggtgttaagcgagcttgatggtccgctgacctcaatggccgccgccaccctgacgcaagatatcaatatcgttaatatcacccatgataaaatccagcatctctattatatctactcggtgatctccattctgctgatcgccatgtgtataactctcggtctgctgatgctccgacagaataataatctgcgtcgcgcccatgttcgtatgaaaacgctggccaacgatctgcaggcctcgaaagagaagctgcaggtgcagaaccgccggctgcagtacgatgcctaccatgattcgctgaccggtatgcccaaccgtctctctttctggcagcggctgcaggagatcgtcaaccaggtgcgtccgtataagggatgcgccgtggtgatgcttttcgacctcgacagctttaaggatgtgaacgatacccttggccatgatgctggcgataagctgctgcaggatctggccagtcgcctctcttttttccgcaaaacctccgagacgctgtatcgccttggcggtgatgagtttgcgatgctctcctacgatctcactgaggagatggcccttgagcgggccaatgttatccgggagaagatcagccagccctatcagatctacgatgcgcagattaatatcgacgcctgcattgggatcgtgatctctgacggtgaaagtcgtaccgattatctgtacaagtgcgccgacctcgcgctgtatgaggcgaaaaaagagggtagcggccatgtgcaaatcttccggccggggatgctgcagcgcctgcaggagaacaaatcgtttgaagacgatctgctgcaggccctggcccatgacgagttcaaagtctactatcagccgatcgccgataccgtcacgcgcgaaatctacggctatgaagcgctggttcgttggttccatccggtgcgcggcgccgtgccgccgacggtgtttattccggtggcagagaaaatcggtcttattaatgcccttggcgagtgggtgctgaaaaccgcctgtgccgaagcggccagctgggcgacgccgctgaaggtctcggtcaacgtttcaccaattcagttgatgaatacatcgctgaccgacaccattatcgaggtgctgcatcagaccggcctcgatccgcgacgtcttgatctggagatcaccgagtcggacgtattcaatgagaacacccgttcgctggaaattctcagccagctgcgcgagcagggcattcagatctccatcgatgactttggtaccggctattcttccctgtcccgtttaagctacttcccgttcgataaaattaaaatcgaccgctcgtttgtcatcaatattccggaacaaaaagacgatctggatatcgtccgcctgattatcagcatgggaaagagcctgcatatgcgcattgtggcggaaggtgtagagaccgaagagcagttggcttcgctgcaggcgctgggctgtgacctggttcagggatatttaatcggcaaaccgagtccgctgcgctaa

SEQ ID NO: 228102 - DNA, 2028 bp, Klebsiella pneumoniae
atgaccttgcatggcgatacacgcatcgataattattactggctgcgcgacgatgagcgcgcgcgacctgacgtgctggagtatctgcacgcggagaacgcttacggcaagcaagtgatggattcgcagctcagcctgcaggagcgtctgctgaaggagattatcgaccgcattccgcagcgggaagtctctgccccctacagtaaaaacggctttcgctaccgtcaggtgtatgagccgggctgcgaatacgctatctaccagcggcagtcggtgctgaaagaagagtgggatgagtgggagatcctgctcgatgccaaccagcgggcggcgaagagcgagttctacaccctgggcggactgggcattgcgcccaacaaccagctaatggcggtggcggaagattacctttcccgccgccagtacggcctgcgcttttgcgacctcagcaacggcgagtggtacccggaaatcctcgaaaatgtcacctccggctttgcctggagcaacgattcacgctttgtttggtatgtgcgtaaacatcccaccacgctgctcccttatcaggtctggcgccacaccgtcgggacaccggcgcagagcgacgcgctggtctacgaggaaaaagatgagaccttctacgtcagcgtgcataaaaccacctcccagcagttcgtggtaatttatctctccagcgccaccaccagcgaagtgctgctgctcaacgccgaactgccagacgccgagccggtctgctttctgccacggcgtaaagatcatgaatacagtcttgatcactatcagcacgctttctatcttcgttccaaccgggaggggaagaatttcggcctctaccgtaccgtgctgcgtgatgaagaacagtggaccacgctgatcccgccgcgtcacgacgtgatgctcgaaggatttaccctgtttaccgactggctggttgtggaagagcgtcagcgtggcctgaccagtctgcggcaaattaaccgcaagacccgggaggtggtggggatcgcttttgacgatccggcctatgtcacctggcttgcctataatccggagcccgaaacgtcgcgactgcgctacggctattcctccatgactacgccggatacgctgtttgaactggatatggataccggcgaacgaagagtgatcaaacagcaggaggtaaaggggctggatacgagctgctaccagagcgaacacctgtgggtgaccgcccgcgatggcgtcgaagtcccggtctctctggtctaccatcgcgaacattttcgcaaagggagcaacccgctgctggtctatggctatggctcatatggcgagagtatcgatgccgatttcagcgccagccggctgagcctgctcaaccgcggctttgtctacgccatcgcccacgtccgcggcggcggcgagctgggtcagcaatggtatgaagacggtaaattcctgtgtaagaaaaataccttcaacgactatctggacgtctgtgacgcgctgcttgcccaggggtacggcgatccgcggctctgctacggcatggggggcagcgccggcggaatgctgatgggcgtggccgtgaatgaacggccagagctgttccatggcgtgatagcccaggtgccgttcgtcgatgtggtgaccaccatgctggatgaaactattccgctgaccaccggtgaatttgaagagtggggaaatccgcaggatgaaacctattatcattatatgaaaagctacagtccctatgacggcgtgagggcgcaggcgtatccccacatgctggtgactaccggtctgcatgattcccaggtgcaatactgggagccggctaaatgggtggcgaaactgcgggaactgaaaaccgacgataacctgctgctgctctgcaccgatatggattccggacatggcggaaaatccgggcgctttaaaagctatgaaggggtggcgctggagtacgcctttttcatcgccctagcgcaggggacactgccgggaaaagcggcagtgtag

SEQ ID NO: 228103 - DNA, 930 bp, Klebsiella pneumoniae
atgtctgatcccgattttaatttgctggtagctctcgacgtattgctgagtgaagcgagtgtcgcaggtgcggctcgtcgtctgaacctcagcacttcggccatgagccggacattaagcaggttacgcgatgtcacaggagacccgatcttggtacgcgccgggcgtaacatggtactgaccccgtgggccgaagcgacccgggatcgcgccaggcgtgcagtgcacgatgccagggcggtattacagccctcaactgaaacgttcagcgcgcaaaatctggcgcgtctttttaccatcagggcaaacgatggttttgtggtggcgtttgggcctgcgcttatagcagcggttgccgacgcagcgccggacgtctgtatacgcttcgcgcctaagccggaaaaaacgtcgcgctatcttcgggaagggctggttgatctggagattggcgttcagagtaatatggggccagaaatacggctgcaacgactgtttgaggatcggtttgttggcgtcgtccgtaaagggcacccgctggctaagcaggctgaaataggcgtgagtgattatgtcgcctggggccatgtggtagcgtcacccgagggcgcgttgcacggatccgttgacgatgcgctggccgaactggggacaaaacgtaaaattgcaagcgtcgtaccgggatttccgacagcactttccgtggcgctggaatcggatcttatcgccatgatacccgcactctatttactcaatcagcaggtaacggaccaggtacaccttttcgagctgccgttcaaaagccgtcgtattacggtatcgcagatgtggcacccaagaatggaacgcgaccccggtcaccgctggctgagagagcaaattcttgcgatatgcggtgtggcccggtcagtcatgactaaggagcctgtatag

SEQ ID NO: 228104 - DNA, 1092 bp, Klebsiella pneumoniae
atgggcatttacgttaggaaaagcattcgcgttggaccgataagattcaacctatccaaatctggagtcggcgcatctattggcataaaagggctgagattcggtactggtccaagaggaaattacatccatgttggtgctggcggagtctattatcgtgcttcgctttcaccaagcatgatcccagagagcggtaaaaaggtccaacgtgtacctaatgaatcccctgcaaaacatgacaaaacacatgcgcctcttgaggaaatcgaatcatctcatatttcggaaatcgttgattccagttcccgagaactactggatgagttgaataagaagcgtaagaagtttcaaatatggcccttcgccattttcatttcgattgcgatattactctacggtttttcagaggcatggcctgagtggtgcctagctataggatttatcgtaggaggagtagtctcggttttttcttacatgtacgatcagcttagaaagaccactgttcttttttatgattttgatgaccaaatgatgacatgttaccagcaacttcatgacagtggagccaaactcgcaagttgctcaaaggtatggcacgtagaagcatctggagccgtttatgaccctaagtatcatgccggtgcaggcaacttactacgtagaaaagccacctctatcagcaaagcaaagcccccctttgttaaaacgaatattgagacgattgctatcaaagttggtcgtcaaacattgcatttctttccagatagagtattggtttttgaccctgatggtgtcggcgctgttggttatgatcagctattcgttaacgttggtgatagtcgattcattgaaagcgaaggtgtacctggagatgccatagtcgttggcaggacatggaagtatgtgaacaagtcaggaggcccagacagaagatttaaagacaattcagaacttcctatatgtctgtatgaaaacctttcgcttacaagtcattctggactaaatgagttattacaactgtctaaaactggctatggagaaaacttttcacattcaattgaaacacttagcaaaaaagttgtttcttcttag

SEQ ID NO: 228105 - DNA, 1893 bp, Klebsiella pneumoniae
atggctgatattgattctcgatacaaactaagcgggtctttaaaccccagttcgcttcccatacttgctgctgacattcttaaatggtctcttggtcatactaaggttcgcattcttgatggccctggcgatggtagaagagatatactttcaataactcctgaaggtataccgcatttaacccaatgcaaacaccactctgacgacacaaaatctgttagctcacgagaaacagatgaaattgttatagctttggcaaagtttggagttaagtctgctttattttttacgaatggccgcatttctccacagggaaagcgtgaatacattgataattttccaggttattctctggactatattgacggcgacttaatgttgcaatatgttgaagaaagcccgttactatcgcgaatgtggctccatggttctaccttgggaatgattacccatcgcttgcttatccccttcatcattaggaatgtaagtgacgatagcactgtaaaattaaatgcaaatcaatataaagatatttctagctattggggaccacgtgaattatttgaaccattccgagcatcaattaagtctggaggcattggtgatttgtcggctaattcgattagcggagagcgtagactatccctgacagaactacctagtgctattgctgatatgaaacaaaatgtattgcaaacattgaagggaacttattctggagtgactgtaagatttggtaaacccgctttgattaaccccaaatctaataatgaggacgacaatatttggataggagggattgagccagagagttacatcataaattttaatggggagataaagactgaaaaggaatggcttcttcctgaactgggagaggactggcaattccctgataatatttcagtagctgaagttgagtgggccggttggttttcagaaaatcatgatgcattcttgatgtacgaactcctatggccttatgtcactggaagcaatcacctagttgatgtttatgagcattctgaacgagaggccgttaatcaatcactttttgccgctgtaaatgacgaacaacttgaattgatacttcaagctcttgttcctcaacctgattggtttgaaagcctgggaggggaaactgttctaggatggctacatccttttttgtgtcataataaaaaagagcaacaaagaagtatcaaagttgaagatggaaaatatattccttatcatcctgaagcagaaagattttttgtagaagcagaaaatattcgtcatcaacttaaaataatgggtattgatgagtttgaacctgctcgagcaattcatttggccgctgcattagcaagaccactggtctatacaaagtcatttgatagagcacctgcagcacagattttagaatattacgataatataccatcacctatttatttactcgatcgtaacatgacttacttacaaatgtgggaaagctttgatgaatctgtttttgaagtggatatagatattagagctttagaagcccaacttccggatgggttgacacttaagctggatgtcaaaatgggaaggcgcacagaacggttatttgcaatggtgatgttaatagctaaaagtataggtcctgaaagtgccacccatcatgctaatcgattaatgaaccttgtgagttatatgactccaacgttgaaagaaatcgttgaatcaatttggcctggagctgtgttggcgacaaaacgtttttggcgcgatgaagtaggcatgttttttgaaggcggtaaatttataggccgtccatgggttatgatgatgcctcctgacaacgctaccgatcagtctccggagctatatattattcgccccgatcagttagcagaaaacaaatag

SEQ ID NO: 228106 - DNA, 1236 bp, Klebsiella pneumoniae
atgaatagcacattaaaagaacttgagagaaattgcgcaccaatagattttattgaaccactggctcgattggtcttggatgatttagctatgtgggcaaatgataatatatactcaaaaaaatctgggtgtttaacttatgaactccctcttgatggaaacatcaatgcagcttgtacaagttatcatgattcacgctatcgaacccatattgaaattaaccttggaatggttcaggaaatctacatccagtcatttacctatccaggttacattaaaaatctagaaagcggaaattggcatttcaacgctcttgatgagccctttagtgatgctgaatttttattcgaaggtggtatccccccaagaatcagcgcgtctgacacggtcgctcatatggtcgagctatacaaaaatattcctaacaacagaaataccatgtggactgatgaagaattaatttgccgttttgccatgtttgaattaatgattgcgtggatattttttcatgaacttgcacatcacgttcaagggcattacaagataaaaaaagaaataaaagaatcggttacttatcatgaactagattactcaagcaacactaataattccaatcctgaggtaactcccagcgtcatccaaaagaacattgaccagcatgccagagagatacttgcagacctcgaaggcatgtatttaacactgaggatgatggtgagaaatgatacattaacaccacctaacacttttttgcttttatatgtccaaacttcaatgtttaatgtattctataaattatctgagggaaagtatacggaattagatagcgttaaagtttctcacccccaccctgtaattagaaacaaatttgtgcacgccctgtatgtctctgtgatgagttgggaattgggtaatgagatataccaagattatcgtcaatctgttagccgaggttttgaatattatactgtaaaatcatcattattagctggaatgatatgggcaatgagacaatctgattacagtccggatgcaatgccccaatttcttaaatttagtgatgagaccgagtattccacagattataactaccttagagaattgaccttaagcgctgaaaggcaatcatccatgatatcactcttgcatatcatcgataatgattcagataatatttttaaattaacaaaattagacaatctattcactcattttttaaatgttaatgaagaataa

SEQ ID NO: 228107 - DNA, 402 bp, Klebsiella pneumoniae
atgagaaataatgtttttataagtagggctatgttcaaattaccacgagttattaaacgaggtagtccctatgggttcgcttacaaacaaatcattagcgcaaagattggcgaggatggtgatgcgaatgaaggaaaatatggaaatgtccatatcaccatggtgaatggtggcccggttattgagcttttttgtgagccagatgagtctaaggaagaaagtgatggcgatatcggtcagttgaatgcattttttgacattctggaattagagccggaatcaacagagcgatatcagttaaccaatatagatggagaagacgcgtttatccgtattggttccatcgctatggtgcgagtcccacttgatgtgctggagcctgtcgaggaagatgatatataa

SEQ ID NO: 228108 - DNA, 345 bp, Klebsiella pneumoniae
atgaaggagggcaaaaagatgccactaactgatgcaatacagtggggattacagcgaagtgtcacgccgtgttttggcgcaaggctggtgcaggagggcaacctactgcactacctggctgaccgggccagcatcaccggtaaatttggtgacgccgaatgtctgaagctggaagcagcattcccgcattttatccgccacatggagctgatgctgagcactggcgaactgaatccccgccatgcgcactgcgtcaccctgtatcataatgacctgacctgcgaagccgatactttcggcagttgcggccacgtctatatcgtcatttatcccactcaacgttaa

SEQ ID NO: 228109 - DNA, 471 bp, Klebsiella pneumoniae
atgatgatctcatatcaggaacttgttcgcaccttccttaacaccgctacgcctatcggatttggcctggctttctttattgccaaactgctgcgtaaaaatatctataaccgtgaagaagtggaaaccttaaaatcagcggttccgatggggattgtgaatatcgttgagggttctattccgatcgtcatgaatgatattgtgcgcggtatcgcggcggcggctatcggcggcgcgtgcggcggggcggtcaccatggtctatggtgcggatgcgacggttccttttggcggagtattgatgatccccacgatgtcacatccgatggcaggcatcatggccctgctggtgaatatcgttgttaccgccacggtctatgccgtcatcaaaaaagatatccctcgcgacgtgattgttgataatgattacgaagaagaggatatcgacctggatgatattaaagtgagctaa

SEQ ID NO: 228110 - DNA, 420 bp, Klebsiella pneumoniae
atgaaaagagccgaattagacgttgtggttttaagtgaggatttaccgaatgaagggctggtaaaaggaacgcttggtacgattgtgatggtttttaatacgccaacaactggctatctggtcgagttttgcgacgagaaaggaaaaacaatcgcaatgccagttttattccccgcccagctaaagcgctatttcacgattggtaacctgaagtcgctgatggttgaaggtaattatcccgtagccgaccctgtagacccagacgtcatggcagatttaatgcacaaagtcgcgcctgctgaatgggaggacaagaaaagaagggtctatgaggatattcaacgactattgattagtcggccggactacgcggatatgttcaatattatggatgggggtgagtacaatggcatgacatag

SEQ ID NO: 228111 - DNA, 1032 bp, Klebsiella pneumoniae
atgactgacgaaacgaacggatacgtatatatattggaagtttctgatattgacttacctgtatgcaagattggaatgacgacaagagatccaacctctcgatgcaatgagataaataaaagttcaacaggggattttatttgggcagtttctcactctttttttgttagtgactgcaaaaagctagaaagattaattcacgataaattaagcccattgcggcaaaaaagaagagagttttttaatttacgcgcagatgatgcattcaaagcagtaatgtcaatttttgaaagtcaggatgagataaaaataatgactgagttggaatcgaaacccttatcaataattaaaccaaaccataaagttaaaaaaaataacagttatctgtccagacacagatccactgagtatgcagagatattgcagtctttttgcgaaattctgggtgtgaaaggaagggcttttggccagctcaataaaccattttttggcatgagcgatggaaatgaaggcgctcaatggaatatttctgtgtgtccgcaaaataataatatccgtatgggtgttaatcttgaagggaagaagtacaaagattggcctatagctaagcttattacatcagagttggaagtccctaggttgttaagtgtaatacaagacttagatcctgagaacgaaattaacatggctttttatcgggatgcctggcaggtggtttctagacctgaaattagagagaaatatataggtggcaaggaatttaaccttcatgagttgactcatggagaatggaggcgtattttaaatgaagctttaaattgcttggataaagaacgtggttataaagggagaaatacccaggatgttacgatggtaaacaaaaatgatggtgttctagtccgtaccatgccagtttctcctcatttaacaatatggtctccattaataattaaagctaatattgatagctcgatccgaaataagtttaatcaattgattccaattcatcgttggatgatgcagttaagttga

SEQ ID NO: 228112 - DNA, 1242 bp, Klebsiella pneumoniae
atgatgcacaggatttcccactggctgagccgacacgccgccgcgctgttcttcccggcggcgttaattctgtatgatttttccgcttatctcactaccgatctgatccagccggggatcctgcacgtggtgcgggatttcaatgctgatgtggcgctggctccggcctcggtgagcctgtatatggccggcggcatggcgctacagtggctgctggggccgctctctgaccggataggacggcgtccggtgctgctcaccggcgcgctgattttcaccctcgcatgcctggcgaccctgttcaccacctccatgacgcagttcctgattgcccgcttcgtgcagggcaccagcatctgctttatcgccaccgtcggctacgtcaccgtacaggaggcctttgaggaaaaaaggtcgatcaggctgatggcagtgatcacctccgtcgtgctggtggcgccgatcgtcggcccgctctccggcgcggcgctgatgcatttcatccactggaaagcgctgttcggcattatcgccgccatgggattggtggcctggctcggcctgctgttgaccatgccggagacggtgcgccgcggcgatgtgccgttcagccccctgggcgtgctgcgcgattttcgcaacgtctttcgcaaccgcatctttttactcggcgccgccacgctgtcgctgagctatattccgctgatgagctgggtggcggtatcgccagtgattttaatggacgccggcggactgaccaccagcgagttcgcctggagccaggtgccggtcttcagcgccgttatcatcgccaacctgtcggtggcgcgctgggtaaaagaccctacccgcccgcgctttgtcctcagcgcggtgccggtacagatgctcggcctggccatcctgatcgttggcaatctggtatggcaccacgtttggctgtggtcggtgctcggcacctgcttctacgccttcggcatcgggctgattttcccgacgctgtttcgctttaccctcttttccaacgacctgccgaaaggcacggtctccgcctcgctgaatatcgtgatcctcagcgtcagcgcgttatcaattgaaggcgcgcgctggctgtggttccatggcggcagactccccttccacctgttggcggtggccgccgggattgtcgccgcctgctgcctggccggactgttacgccaccagcgcggacaagcggtgatcgaagcccggcagtcgtga

SEQ ID NO: 228113 - DNA, 951 bp, Klebsiella pneumoniae
atgatgccgaaatttcgagtctctttgctcagcctgaccttgctgctggctgtgccttttgcgccccaggcgttagcaaaaaccccgacggcggtgaccgcctcgcagccggaaattgcctccggcagcgccatgatcgtcgatctggccacgaaaaaaatcatttatgccagccagcctgatctggtgcgcccgatggcgtcgatcaccaaagtgatgaccgccatggtggtgctcgatgcccatctgccgctggatgagatgctgacggtggatatcagccatacgccggaaatgaaggggatctactcccgcgtgcgcctcaacagccagattagtcgccgcgatatgctgctgctggcgctgatgtcttccgagaaccgcgcggccgccagcctggcgcatcactatccgggcggctacgacgcttttattcgcgcgatgaacgccaaagcccaggcgctgggcatgacccatacccgctacgtggagcccaccggcctgtcggtgcataacgtctccaccgcccgcgatctgaccaaactgctgatcgccagcgagcagtatccgctgatcggccagctgagcaccaccaaagaagagaccgccaccttcgcccatccggcctacagcctgccgttccgcaacaccaaccatctggtgtatcgcgataactggaacattcagctgaccaaaaccggcttcaccaacgctgccggccactgcctgattatgcgcacggtgattaaccaacgtccggtggcgctggtggtgatggatgccttcggcaaatatacccacttcgctgacgccagccgcttgcggacctggattgaaaccgggaaggtaatgccggtacccgcctcggcgctgagctataaaaagcagcgcgaagcgcagatggcggaggcgatgctgaaaggcggcgcgcagaccgcgcagaacgattaa

SEQ ID NO: 228114 - DNA, 1794 bp, Klebsiella pneumoniae
atgagacgtagagatttgcttagaagcatggcattatcacctttggttataagcattccttcaaaaggtaaagaaggttttaaatctcatcctgaaaaccttggatgccaaattaatacagactcagtaacacctgaaatgtttggtgcaaaatctgatggtgttttcaataataaagaggctattgaaaaagccctacaatatgcttatattaatggattaagttgtacttttttaaaaggtcaatattacagcgaagatatttctattgatttccctataagaattgttttacaaaatgggtgttgcttaaattttgagctttctattattggtgggctcttttattctgaaagcgaatttataataaatcaagattggaaagctttttctcgcggaactcgctctttttctaataaaaactctaaaatgaataaaggtgatatggtttcagtttcattagattatcggcatggtggtagtgctcaaattggtaatgaaaatggcatagatattctgaatgttgttgatgttaatgaaactgcttttatagttaaaaatggaactagatttccatatagttacccaatcataagtaaacttaaaagcgttatcgcttttaaaggcgaaataccaaaagagtcatatacaattaatggtgacttcataaataaatttagccccggagatgttattcgtatcgaaaatgtagacggtacagatagtgttggtggcggtaagtattatttcgaatatgttgaagtcaaaagcgttaataactctcatatcattttgagtgcccgaactgtatattctcactctaatccgtggttaataaagaccaattttataaaacatgttaatttaacaggagaagggcgcataaaaaaaattgttttaaggaatattaaagacgtaaagctttcttctttatttattaaccgccttattatatctaactgctatggagtcaacgttagtaatttaactttaactggtcttggcgaaccgtctacagtcaacataacttattgtttcgggaaaagtatttttcagaacctacaaatttctaattctgaaagtaacagtgataattcaaccttaaaaatcatgagttcacctcagattattttatcgaatattacaataagtgattcaaattcatcctcaaaaaaacaaagtaattattccctatttgtcgattctttatacacaccatattcctgctggaacgataatataattgttaataatgttatttgtgagcgtccaaggtcacatttcaaacgtggagtatggttttatggtctacgacgttcagtcattgactcgatcgtcggggctgatgtgtttcttcaggggtcagttgactgttattttaaaaatttcaatgtatcaaactacatgttagaaattaaggatttagtaagatgtgatgtgactgctaaatgtatgagcgctgttactagaggtggtatagacaatgtattaaggcttgaatttgatggacgtttaaccggagatttttcggacaagagttattactgtaaatttactgcgggaacaatagatcctgaaaaaggggttaattattcacaaggagatggtaattatctttatttcaactctcctactttaaattctactgacaataaaataaatttaagcgtagagtttcagaaaaacttaattattgaaccaactagattatcgttggttagacaaagagagtctttgaagatgggtaaagatgtttcaaatatctatattaagaataactttcaaaaaatttaa

SEQ ID NO: 228115 - DNA, 912 bp, Klebsiella pneumoniae
atgaaatactatattgccataccaacttataatggtggggatttgtggcgtactaccgtcgataatattaaaaaaaatacgcctgcaaatacattggtacacgtaatcgattctggtagtaaggatgatacagccaccgtagctttaaataatggttttgatgtgacatctattcaaagctcagattttaatcatggtggaactcgtaacgaagcaattaatcaatatattgaggattacgatgtagtcatattcctcacacaagatgctataccagaaccgggatttattgaaagcataataactgtttttcaagatgaagaaattgtatgtgcctatggaaggcagttaccacatactgatgctaatccattggcacaacatgccagagcatttaattatccagataaagggtatattgcgtctaaaagtagcatacctaagatggggttgaaaacagcatttatgtctaattctttttcagcctatagattatctgtatttaaaaaaataggcggcttcccgtcgaatacaatattatgtgaagatatgttttacacggcaaaagcaatattggcaggatacaaagtagcttatgtgcccgaagcaaaagtacatcattctcataattattctccatcagaagagtttaaacgctattttgacataggtgtattccatacggatgaaccttggattaggaatagttttggaggtgcaggtggtgagggcaagcgttttattatttcagaattcaaatttttgctaaaaaattatccacactggatacccgcctcatttttatataatgttatgaaatttataggtttcaaggcaggtaaaagttatcagttcttaccaaggtttttgattaaaaaattcagtatgcataagagattctgggggcattaa

SEQ ID NO: 228116 - DNA, 2169 bp, Klebsiella pneumoniae
atgtcaccagttattaataaacaagcatctcaggaatctgatgaaatcgattttggtcgcttaatcggtgaattgattgaccatcgcaaattgataatatcagtaacgtctctatttaccgttattgcattgatttattccattttttcaacaccagtgtatcaggcggatgcgttgattcaagtggagcaaaaacagggtaatagcattttaaataatcttagccaaatacttccggatagtcagccgcaatctgcacctgaaatagcattattacaatcgagaatgattttggggaaaacggtagatgatctaaacttacaggcagttattaagcaagattatttccctgtttttggtcgggggttggctaggttgctaggggacaaaccaggcaatttaactgtcagacggttatatataacaggtagccatgatgaaatcccgaaaattaaaataacaactaatgataataatagctatacggtagaatataatgatgaaaagttcaatgctagcattggaaagttagtaaataaaaatgatatcacaattaaaattgataaaatagacgctgagccaggtactagttttactgtatattatacttctaaattggatgcaataagtgcgttacagaagaagttcaatatttcagaacaaggcaaagatacgggtattttaaacttgactcttacaggagaaaatccaaaacaaattaaagaaatcatcaatagtattagtgagaattaccttgcacaaaatatcgcaaggcaagcagcgcaagatgcaaagagtttagcattcttgaatgagcaattaccaattgttagaagtgatttagataacgctgaaagcaaacttaatcagtatcgaaggcagaatgattcggttgatttatccttagaagccaaatctgtacttgaccaaatagtaaatgtagacaaccaattaaaccaactgacttttagagagtcagaaatatcacaactttataccaaagaacatcctacctataaggccttacttgaaaaaagaaaaaccttacaagatgaaaagttaaagcttaataaaaaagtgtcagccatgccggcaacacaacaggaaatattacgtctaaatcgtgatgtcgaatctgggcgtgctgtcttcatgatgttacttaacaggcaacaagaactgaatatagcgaaatcaagtgcaattggtaatgttagaattattgataatgcagtaacacaacctgaacccgtaaaaccgaaaaaaattctggttgtcataggcggttttgttcttggctttctgatatcaattggtattgtcttattacgtgtatttctgcgaagaggaatagaaacacctgagcaactcgaagagttgggtataaatgtttatgcaagcattcctatttctgagttacttacccagaaagctactaaactagagggtttaagaaggaaagaacaatacgagcctcaaacttttcttgcgattgaaaatcctgctgatattgcaattgaagcgattagaggattacgcacaagcctgcactttgcaatgatggaggctagaaacaatattttaatgatatcaggtgcaagccctaatgcaggtaagacttttgtaagttcaaacttatcagcagtaatagcacaaactggaaaatctgttctatatattgatacagatatgaggaaaggatatgcgcataagctctttgagttagataacaataacggcctttctgaaatattgtcagggaaagttgaagtatcccaagcagtgaaaaaagtacatagcgctggtttcgatttcatttctcgtggacaggttccacctaacccggccgaattacttatgcacagacgttttggagagcttttagcatgggcagaaaaaaaatatgatattgtgattcttgatactccacctattttggctgtcactgatccggcaattattgggcattatgcagggacaaccttgcttgtcgcaaggtttgaaaaaaacacagccaaagaaattgaaattagtgcgaaacgttttgaaaatagtggtgtaatagtaaaaggttgcatcttaaacggcgtggtgaagaaagctagtagttattatggttatggttataataattatggttactcatataatgacaaggataagcactaa

SEQ ID NO: 228117 - DNA, 849 bp, Klebsiella pneumoniae
atggtgctgttaacctggacccagccctatgactgggcgtggatggttggttttctgcaggcgcgcgcggttgccggcgtcgagcgttttcacgatgggggctacagccgcagctttggcgtggaaggccaccgcgggctgattcatctgacgccggacgaagaggcgcagggcctgcgggtgaccctttccccgggactgcagccggtggctgagatctgctatgcgcgaattggccagctgtttgatttagcctgcgacccgcgactggtcgctcgcacgctgggcgatctggcgcaggcgcggccggggctgcgcctgccgggggcgctggatgccttcgagcaggcggtgcgcgcggtgctgggccagctggtgagcgtggcgatggccgcccggctcaccgccaaagtggcggctggctggggcgaaccgctggcggagtcgcccggctatgtcttgttcccgacgccagaggcgctgtcccgtgccgatccgcaggcgctgaaggcgctggggatgccgctgcgacgcgcggaggcgctgatccacctcgcccgggcggcgctcagcggcgaactgcccctgacggcgccggcggatatcgacgccgggctgcgtcaactgcaaaccctgcccgggattggccgctggacggcaaactactttgccctgcgcggctggcaggcgaaagatatctttttgccggatgattacctgattaaacagcgctttccgggaatgaccccggccgccatcgcccgctatgcccgccgctggcagccgatgcgatcctacgcgctgttgcatatctggtataccgatgactgggcgccggcggcggaatag

SEQ ID NO: 228118 - DNA, 1155 bp, Klebsiella pneumoniae
atgaaaagaaaaaaaatattgatcgtaggcgctggtttctctggtgcagttatcggtcgccaacttgctgagaagggacatcaagtccatattatcgatcagcgtgatcatattggggggaattcctatgatgcacgggacgctgaaacgaatgtgatggtacatgtttatggaccccatattttccatactgacaatgaaacagtgtggaactatgtcaacaagcatgcagagatgatgccctatgtgaaccgggttaaagcgacagttaatggtaaggtattttccctgcctattaatttgcatactatcaatcagtttttctcaaaaacttgttcgcctgatgaggccagagcgctcattgctgagaaaggggacagcactattgctgatccacaaacttttgaagagcaagcgttacgctttattggtaaagagttatatgaggccttttttaaaggatatacgattaaacagtgggggatgcaaccctcggaactgcccgcatctattcttaaacgtcttcctgttcgttttaactatgatgataattattttaaccacaaatttcagggcatgccgaaatgtggttatacgcagatgattaagtccattctcaatcatgaaaatatcaaggttgacttacagcgggaatttatcgttgaagagcgaactcattacgatcacgtattctatagcggtccattagatgcgttttatggctaccaatatggccgtctgggctatcgaacattagattttaaaaagtttacctatcagggtgattaccagggctgcgcagtgatgaactattgttctgttgatgtcccctatactcgcatcactgaacataaatatttttctccctgggaaaaacacgacggctctgtttgttataaagagtatagccgtgcttgcgaagaaaatgatattccttactatcctattcgtcagatgggagaaatggctcttcttgaaaaatatttgtcactggccgagaatgaaaccaatatcacttttgtcggtcgtcttggaacctaccgttaccttgatatggatgtgaccatcgccgaagcattgaaaacggcagaagtctatttaaattcactcactgaaaatcagccaatgcctgtgtttacggtttctgtacgatga

SEQ ID NO: 228119 - DNA, 783 bp, Klebsiella pneumoniae
atggcggaaaataacgttatcctgcaggtgcaggacgtcaccatgcagttcggcggcctgcgggccatcgacaacgtcagcttccatgttgacgaggcggagatctttggccttatcggccctaacggcgcgggcaaaacgaccctgtttaacgtcattaccgccaactataaacccaccagcggcagcgtcaccctggcgggcacgtcgctgaaggggctgaagcccaaccaggtggtgaacgccgggatcgcccgcaccttccagaatatccgcctgtttaactccatgacggtgctggagaacgtgatggtcgggctcgaccgcgccagccgctactcgctgctggaggcggccctgcatattggtcgctactttccggccgagcgggcggcgaaagccaaagcgatggccatcctggaggatatcggcatcgcccacttcgcccatatgcaggccacaaacctaagctatggcaaccagcgcaaagtggagatcgcccgcgcgctggccaccgcgccgaagctgctcctgctcgatgagccggccgccgggatgaacccgaaggagaccgaggatctggcggagctgatcttccgcatgcgccatgactatcagctaagcgtcctgttaatcgagcacgatatgcccttcgtcaaccgcctgtgcgagcgggtgatggttctggagtacggtaagccgttgttcagcggcctgatggccgaggcgatccagcatccggacgtcatttccgcttatctgggagaagccaattatgcttaa

SEQ ID NO: 228120 - DNA, 864 bp, Klebsiella pneumoniae
atgagtgatacaccaacggtatttattgcttcttcagcggaagcgagtcaggtcgcagaagctgttcatattaagctttcatcggaaatgagggtaaaaaattgggagaatgctttcgatttgtcctctgtaaccatcacaaaacttattgagataacaaaaacagtagattatgctgtttttgtttttcatacggacgataaaatatttattagagaaaaagaatatagctcaacaagagataatgttgttcttgagcttggaatgttcattggcgcattgggattagagcggtgttttattttggtgccaaaatcagcagaactaatattccggttaccaacagacctggcaggtgtcaccgctagttattatgataataatgaacctaatatggtagatgctgttacagcaagttgtgcaagtgtaaaactatcaattagaggtcaggaggctgcgaaggctaaaacagagaacacgagtgaagcagccatactgagacaacaactcaattctgcgcagtctgaaatatggatgaaaaatcatgaagttcaatcattaacaacgcaagctcaaactattaaaaaaacaattgagctcctatttttttcaatagcaaaacgtgcaacccctgcggaaataaattcttgggaggaaggagctagagatagccaacttaaagatgtaaaaatagcaccagacaatgtttattttgtcgacaaagacgtaatcataccccaattgtacggagctcaatccgtatcagtaattgttggcaatggtgtaaaagtctttggcgcagataggaatagccataacagaatatattacatggatggatttagagcagatagaatactgtga

SEQ ID NO: 228121 - DNA, 4080 bp, Klebsiella pneumoniae
atggcctttaacccggagctggggagcacgtctcccgcagtgctgctcgataacgccgagcgtctggataagctggtgaatggtgatgcgctgaccgaaccggaccgcgctggcgttgatctggatacctggcgcggattcatggcgaaaaatgacgagattcgtcagaaccttgtgccattgggtaagcagtacatgacgcttgaagcggctcaggctgatattgcaaacatcccggatggctcaacaacctatgtacgcagccctgatggcggcacactggcggatgagtacattaataacggtggcacgctggcggctacgggcagagctatgccgtcgatgaacgctctgaaaacgggctacattacaggggatgctaaaagcgatgcggaaattgttgccggactggtgatatatgctgatggctctactgcatcgagtcctacatggaatgcctggtatctgaaagtcagggcgggcgagagcgtcacctatagcggaacagtgggttctaacattgccggcgaacagatggcgtatcttatccagctggacgccaacaaagcattcgtggcatctctggctgagtggacatcaaccgggaacgtaacggataaagccacgctgtcagcagttgcgactcaggacgggtatatttacgtccgggtgagggatacagcagaattcactctgacgcagcgcaaaaaaacggttctggttgaatccgatattgacgtcagtggtggtgtggcgagctatgccagttatcagaacgtgctggcgaataaaccgcttgtcgatattacttcatctcaaagtactgcatgggtgatcgggcgggtgatttatgccgatggtacccgcacagattccgccggggagtcatggcgtgctgcttacgttcccgtaaaaaagggggatgctctcgaatatcacggtgagattggtagcgctattcccggcgagctgatggcgtacataattcagctcgacgccagccttaatgtggtggggaatctggcgacttattcgtcggaaggagtccaaaagacaggtgttttatcgggcgtggcaacccaggacggtttcgcttacttccgtgtgcgggtgacaacgccggaagcggcgatttatcagagcagagagcggttcacacccggcgcagatgtattcggcgtcaaaactgtaacgtctgtgaatgcggccaaccgcgtgactacggatgtcactaatgcttcaaccaccacatatattatcgggcgtgtcatgtcagcggatggttcggtggtggacaacgcaggagttagctggaaagcagcttatctgcccgtgaaggcaggagaggttattcagtatcacggccaaatcggcaccggcacttcgggccaggtactggcttatatcatccagctcgacagtgcgctgaaatttgtggcgccactcgccacctatacttcgcccggctcgtccagcgctggtgttatgactggtgtcgccgcacaggatggttttgtttatgtccgggtgcgtgtgactgatccggcagcagccatcacaaagacaacgcaactgttttccctgcccggcaacatatacgctgtaatgaacccggccgatattgctgcggctaacagaacaaccctagacgtgaccagtgcaccggatacatacactatcacggggcgggttatatactccggcggactgatttctgacaccgcaggtgagaactggaaagcagcgtatgttcctgttcgcgcgggggatatcgtgcgctatttcgggcaaatcggctccggcacggcaggcgaagttattgcttatatcattcagctggatgctgcaatggcagttgtggctaatcttgccacttacacgtcaccgggtgtcaccagtaacggcgtaatgtccggtgtggcaacccaggatggtttcgtttacgtgcgcgtacgcgtcaccacacccgcggcaaccataacacggacgtctcaggataaagcccttgcatcagacctgagagggccggtaaaaactgtcgactataccactgtggcaccagtcattgctgataactcagtgatgtacagcggcggtaatatcgtctccggctctgcttacagtgcctggcggatgtattacatcccggtgcgaaaaggcgactctgtcgagatgtacgggcagtacggctccgccaccgtcggagaacttatcgcctatatcatgcaatgtgacgcggacaaggggtgggtgtcggacctcttcaccttcaaatcgggcggcggatatgtgacggcaacgtatcgcggagtggccacacaggacggttacgttgccgtgcgcgtcagaaaaacaaccgatcccgtatacgccgtcaggaagatttatcccaatcaggtcgccagagtcaatgacgtatccgccatgattgagcagtccacacggagcagccaggcaaaagcaaaagtttttaacgcgccttaccatgtcgatttatccgggctgcctgaaaagacgcctgacttcgacagtttcagcaaccctctggaatacactttcactaagcagtgggcgcgtcgcgatttttacaatgccgctgactcgttcatgctctctttcatggacctggaaaacaatccctggaatctgcagagcaatatttacgatatcaccgccgggaatgtgtttgcttattcctggtcagcaggaaaggtctctttccgtaacccgacagcaaatggccgggtggtgatgttcgcggatcgctatatgccctttgcaaccagtgagattgcgatcgacaggctggcaggcaatgccacgatggggataatgttcgcggatgttgaccagcagaacagtgtttcggtccgcgtctcgaacagccaggttatctgtgaaatctacgccgcagggagtctgcttgataccaccacgttcaccggttcggatatgaccggcgcagtgcttcaggtgcaaaataccggggtgtcactgctgctgaaaaaagtgaacgctgacgggacgtggaaatggattggccgctatgagcactatgccatctttgatgcccgcaggctggaatacctggacacgtggaaaacgtacgtgttcgcacaaacggatgcatattcggccagtgatgttgctgtctttagtggtttttcaaaccgaattgccagcggggcgaattccgtctccattcgctttctgacctatgaagacggtacgtttattcagcgcggtaactggctttattatctcgttgagggaacagggaccactatctccgacctgtacactcagatagttcgtatcaacttcaacagcggtgaagtccagatgattggcgcgattttccaggtgcggactgacggaaccgatgaggatgtcgtactgggtgatgacagtatcaaggcggtgtatgaccggaacagtcagagctggaagggtatctcttgcggtatggactatcaggggagagggctggccgataacaatcggccaaaactgtactttgagacgaaacaggacttgctgcagggaggcgtgatcatcgtcaaaaactccgtgcaactgaagaacgccaacggcagttttttcgggatcggggcaaactacgtggaggatattgatttctactatgaagcttcgagcagccagtgggtgatgacgggaaacaccatatccagtggatgtaaaaccttccggagcccgacgctgtacgacggcattgttcaggaatatacgacagctgaagtccctgctggcgtgcgcgatacaggcaaccagtttgtgcatttcggtgaaacggtctatctgacaagcgggggaacggccaaccggatgcatctgcgcaagtatgaggcaggtctgacgttcctgggtgagtttgttcaggatgtgtatctggcccctaatactacagggccgtggtgcacgctggtcccgttcactaatggagatgaaacggagcttttcatgctttcctttgaccgttccgatttgtatgaggggctgggtaacggcgcatcgacatacgatcacggtggcctgtattgctggaaggcgaatctctaa

SEQ ID NO: 228122 - DNA, 1170 bp, Klebsiella pneumoniae
atgaagagaccaatagcgcacaaaaatgaccgcctgccagcgccgagaacaaatcactttacccctgaagtgaggcagcgagttatcaatggacttgttgcgacagctaaagttgacttcgtatccttagttcactggctgaaaacaggtaaacagaatggtgaacctattcctttagataaatgcgaaagtcttcgaaccactattcttaatcttggaacccttaaagctggtgtacaaaccgactggaagcatgcgatccagttgatggaaaaagaaatcaaaaaaagccaccaactgaatgcctcggttcctgcaccctcacagcttgttactggtgtcctgagaaatcttaatgatatcagcgagaagatcgcagcgggtaaagctgttcccgagatgcttggcaggctcgaaaatatgcagcaaatgattgccaacctcaagggtaatgaggggctcattaaaagtatcagcattctaacccgaagcgcacaggatgctttgcgtggctatagcaataagcagccaaaatcaaaaattaggaggcctgaaaaagcaaatcctctccttcgtgaagaacaatcctttcgtgccgagtgtgccccactaatcggggaaaacgatattttcataatcgctagttgccttatttcaatgtcggctcggttgggacagtcccctgttagcctggctaaaagagcagtcgcgttaaaaggtgtcatcaaaactgggcttttgcccgaactgctggagttacttcagcaggatgtggagttgaatgccttagttccgctcaacatagacaaagatgacattactcgtagtgatggtggtaagcttgtgggattgacaggggtcgttgaggggggctcctctatcggtgtggaagcgcagcgtattattaccgcagaacttaaaaagctcgcgtatatctccgcagttcagcgcgtttatctggatacagctcgtttaggactggctttggaaaacgatacttttaaggttatcgaggaggtaaaacgtattgctgagaagtacaattggagtccattatcggttgcggtgtatgcgacttccaaaacgcctggcataaggccggatatcgccggagatgtgattactttactggcacaggatgagatcctttcagcgaccgtcaaacgataa

SEQ ID NO: 228123 - DNA, 1392 bp, Klebsiella pneumoniae
atggcgaagaaacgcaaggcgaaaaactacataacacctgagcagattgcagcacgcaagcaggaagaacagcgtcataagcaagccgatgaggttatggccaacctcaagatcgggaaaagtcagtacttgggcgtttctatttggaagaatatcaccatccagctggcacgcggaaaaaacgtcgctgaaatcacgtacgatatggaacgagatacgttggtcggccagtgccgtactatagaggttaaacgtcttcgagccaaagaacatcaacagcaaagcagagccagtgcggaaaagattgtagcatcgcgcgtcccgccgctagccacaccggctaccgtggataaccgccagaaaccgggcaaactcagagccaaaacccttcatctgctgaaaaaaaagcccgctagtagcaaagtggatgcgtggacgattgcacgcgacgtgtcacggtcatccgcacctcaaaagaaattgacctttggagctgttttacatcagaacccagtagctaagcctgaagttatcagctttagcggaaacgagaagcggttagagggggctgacacgccagcggctaccattaaaagatacgatcttccgctgcctaagcctagagaggccaccatgaggcgcaaactgacgggtattgagaaggccatgaagatggttcccgttgcaagccgtcacgagtttgcgatgttcgtacataaacaccatgaaagtggttacacggcagaacaactgctcgcacagtacttggctgctgcaattactgtacctggagcaaatgattcagttgttgtcgtgccggagattattaacgaaacggccgccgtagagttgaccgcaccattaccggtatctcacgatccatttaaagaagcgcgcttaccaaacctccgccagacgctggatatcagcatcgaaacgccgaaaggtatggacgagctgggagagcaggatatcactacggtcaacccgctgcgcgatggccgcgagctgaaaggcggctcctccgaacgtctggtgcgtcagcgcgatgcggcaatccaggctgagtttaaagcagagctttgctacaacttcggttaccgttgtgccgtgtccggtaaacatctgggcggtgtactggatgccgctcacattgaaagcgcggccaaaggggattacagcgcgagcaacggcattctgctgtcacctactctgcaccgcctgtttgacgcgaacaagatgggaattaatcctgagacaatgactgttcatttcaaaccaggcattgagtttgaggaatatgaaggccgtgtgatcgccccaatgcattaccgcctgaacaaagacaaactggctgctcgctggggtgaatacctgagagatgcaaattga

SEQ ID NO: 228124 - DNA, 492 bp, Klebsiella pneumoniae
atgcacccagttattaacttcagtcatgttacaaaagagtatcctctgtaccatcatattggctcaggaatcaaagatttaattttccatccaaaacgcgcttttcagttgctgaaggggcggaaatatttagctatcgaagacgtatcctttacagttggcaaaggtgaggctgttgccctgattggacgtaatggggcaggaaagagtacctcgcttggcctggttgccggcgtgattaagccaactaagggaaccgtcaccactgaaggacgggtggcatcgatgcttgaactcggcggaggctttcatccggaacttaccgggcgtgagaatatttacctgaatgctactctgctgggccttcggcgtaaagaggtccagcaacgtatggaacgtattattgaattttcggaactgggagaattcatagacgagccaatcagagtgtactcaagcggaatgctagggaaggtgcgaacaagttcctga

SEQ ID NO: 228125 - DNA, 768 bp, Klebsiella pneumoniae
atgaagtacaatttagggtatttatttgatttacttgttgtgataacaaataaagatctaaaagtgcgctataagagcagcatgctaggctatttatggtcagtagcaaatccattgctttttgccatgatttattattttatatttaagctggtaatgagagtacaaattccaaattataccgttttcctcattaccggcttgtttccgtggcaatggtttgccagttcggccactaactcattattttcattcatcgctaacgctcaaattatcaagaagacagtttttccacggtccgtgattccgctaagtaatgtgatgatggaaggcttgcattttctttgcaccatcccggttattgttgtctttctttttgtttatggcatgacgccgtccttgtcctgggtttggggtatacctctcattgctattggccaggtgattttcacctttggtgtttcaatcatcttttcaacgctgaacctgtttttccgtgacctggagcgctttgtcagtctggggattatgctgatgttttattgtacgccgattttatatgcgtctgatatgattccggaaaaatttagctggataattacctacaatccgctagcgagtatgattcttagttggcgtgatttattcatgaatgggactcttaattatgagtatatttctatactctattttacgggaatcattttgacggttgtcggtttgtctattttcaataaattaaaatatcgatttgcagagatcttgtaa

SEQ ID NO: 228126 - DNA, 1167 bp, Klebsiella pneumoniae
atgaaaattactatttccggtacaggttatgttggtttatcgaacggtgtcctgattgcgcaaaaccacgaagtggtggccctggatatcgtacaggccaaagtggatatgcttaaccagaagatctctccgattgtcgataaagagattcaggaatatctggcagaaaaaccgttaaatttccgtgctaccacggacaagcacgacgcctatcgtaatgccgactacgtgatcattgcgacgccgaccgattatgatcccaaaactaactacttcaacacctctacggtggaagcggttattcgcgatgtcacagagatcaacccgaacgcggtaatgatcattaaatcgaccatcccggtggggttcacccgcgacattaaagaacgtttagggattgataatgttattttctctcctgagttcctgcgtgaaggccgtgcgctgtacgacaacctgcacccgtcgcgtattgtcatcggtgagcgctctgcgcgtgccgaacgttttgctgatctgctgaaagaaggcgcgatcaagcaggatatcccaaccctgtttaccgactccaccgaagcggaagcgatcaaactgttcgctaacacctatctggcgctgcgcgttgcctatttcaacgagcttgacagctatgctgaaagccaggggctgaacagcaagcagattatcgaaggggtatgcctggatccgcgtatcggcaaccattataacaacccgtcctttggctacggcggctactgcctgccgaaagataccaagcagctgctggcgaactacgaatcggtcccgaacaatatcatcgcggctatcgtcgatgccaaccgtacccgtaaagactttatcgcggattctattctcgctcgtaagccgaaagtggtgggtgtgtatcgcctgatcatgaagagtggttcggacaacttccgtgcctcttctattcagggcattatgaagcgcatcaaggcgaaaggtattccggttattatctatgaaccggtgatgcaggaagatgagttcttcaactcccgcgtcgtgcgcgacctggatgccttcaaacaagaggcggatgtgatcatctctaaccgtatggcggaagagctggcggatgtggcggacaaggtttacacccgcgatctgtttggtaacgattaa

SEQ ID NO: 228127 - DNA, 1431 bp, Klebsiella pneumoniae
atgacattgctttcaaatgctaaatggaacatggcatcacaatttatcaaaatgttagtgcaactaacaaacatcgtctatttagcaaaaattattcctccaagcgaatatggtttaatggctatggctcttgttgttgtgaacttaggtatcctgttacgagatttaggcacttctgctgcattaatacaaaggaaagaccttactgagtctctaattaatactgttttttggttaaatctcctcatgggattgactttatttgttctggttttttcgggctcgagtgtgatatccagtatctatcatcagcctaaattaactttagtattgatgttgcttagttttacatttcctctttcgagctgtgcggcagctcaccttgctttgcttgagagagactcgaaattcaaaacagtctccaggatagaaatttcttcttcacttgtttcattagtactagcgattactttagcaaatatggggtttggtgttttcagtcttgttggtcaagctttaatacttaatctgatgtctgctatacaattctggcttgcatcaaattggaaaccttctattagggtttttattaattataaggatttgaaaagtattttcagttttagtgcaaatttatcaatgtttaattttataaattatttttcaaggaacgcagatagctttattattggtaaattcatgtctgcttcaattctcgggagttataatcttgcttatagaattatgcttttcccattgcaaagtcttacctttgtcgcaactaggtcactttatccaatattaagtaaacaacaaagtaataatcagcatatatcaaaaatatatttaaattgtgtctatgttgtgttgtttataacatgtccattgatgtctggactggcattttatagtgagccttttatccgattgatattcggtgatgaatggtatcttacgggaatagtattaaaatggttagcgccaacagcaattatacaagcggtacttagtacttctggttcagtttttatggctaaaggtcgtacagatattttattaaagctaggcattattggaatgatcttgcaagtgggagctttcatcataggtgttcaatatacaataactacatttgctatgtgttatcttctcgctaatgttattaattttttccctgtcatgtggtctttaatgagtttgttaggggagagtctcaatgttttttttaaaaaaaactattcaattgttttggctacattagtcatgttaagttacttaaaactcatcgattatttctttttccccaatgctattgcgagccttaatattttagtactattatccttttctggcgccgttgtttatttattagcctctctcactctttccgcaactcttagaaaatttgtgctatcaaagattaaaaaatga

SEQ ID NO: 228128 - DNA, 1005 bp, Klebsiella pneumoniae
atggccgatcccctgaacctacagaccgacgtcgtccggcagcacacggtgccacgttttttactgaagcacttcagtgcgccgggaaaaggtaagcgccggcggttgcacgcctttgacaaggcccgcgggggcagttacgccaccacgcccgacgacgccactgtgcgcaacaccttttacaatcttgacggtcaccccgagcgcttgagtctggagccactgctggggatttacgaacaccatgccgcgccggtgatcgccgcgctcctgcagcaccgggatatccgccggctgaccgaggaggagcggtacaaactggccgtgtttgtggccgtgcagcgtgcgcgtacctttggcgagcagcagcgtatagccggaatggtctctgtgctttcagataaattggctggtatcggcgcgacagctgaccaggtgaccgatgccctgggtatatcgtcagaacgcgatacccggcacctgtttctgcatttgctggccgatcaggcgcctcatattgaccattacctgaataaagactggtatctctttgagaccacagccgatcatccgttctacgtgtctgataacccggtagtcctgcagaacagtaatgacttcgggccatacggcaacctcgggctggcagttcgtggtatagaaatttatctgccgctgtcttccacgctgatgctcgccatgtactgcccttccaaacgggaaggaatgcttcagcgccggcaggagattgaatttttagtggcacgcgcgccgaatcgcataccggcacatatgcgcccgtttgagatgcttgagcatatccggcgttttacggactatctgtcttttccgctgagccaggagaatgtcacccgttacaattcgctgcaggttcagttttctgagcagtatgttttctgtgaaaggaatgactttactctggttgagaaaatgctggcagatgacgagcgataccggatcggcccacgttttaaggctggctga

SEQ ID NO: 228129 - DNA, 864 bp, Klebsiella pneumoniae
atgaccttatcggattcaatcagtgtcatttcttcgccgggatcggcggatggtctctcgcgctgcgtcgcgcaggatggccagacagtcgcccggcatggacagcatcatgcccctgccagcctttcagcgcggcaggcaaagggcttgggtttgctgacgagcggcacttatggccctccgcacattggcttgtcggccagcgccgccctgtcgtggtctttggcgagcaatctggcagcgctgacgcgaacgactggatcgaccttgtacaagctgacgtggaggccatgggctatgccttcggggcggttgcgtttccgtctgcgagcgtcggcgcgccgcaccaaagagaccgtgcttattgggtggccgacgccgattgccagcaatgggaggggcgcggggaatttcaaccgacaggagggggtaaaccttcagacagcggcgttattatcgggttggcccacaccgacggcaacggacgggaagggcggttatcagggcggacggatccgcaacgggaggctgtcaacggacaggctggacgtggctgcgcaattagcgggctggccgacgccaaccacgagcaacgatcgttcaccatgcccgcaagaggctatgcggacgtatcgcgacaatggaacaaagattcagaagcgcttgcaggatgtggcggccctgagtggcccggcccggttaacggcttctggcgagacgctgactggctctactgccgggatggaaagtggcggccagttagacccggatcattcccgttggctaatggggttcccgccagagtgggaaaactgcgcgcctacggaaacgctatcaatattgaagcggcggcagcgttcataa

SEQ ID NO: 228130 - DNA, 1572 bp, Klebsiella pneumoniae
atgggtgggcaattcttagttaaaaaaataaagtttaacgatagacatgtaaatgtaataaatgaagatttgatgttgtgtaatgataattatttttcaatagtggttggtaaaaatggatgtggtaaaagtagtcttttagaggctattgccagaggttgtttaacattacaagcacttccgaacagtgagagggaaagttctggggaggatgaatgcaatattgattattacactgttaaaaatgactctctttataaagaaatagaaatgcattttagcttcgagggcgaggggtatatagctttgacaacgcatgaggatgtcagagggaatggtatgcctatgtttacgacaaaatataaatatcttatgccaactgaaatccctaacgtaatatgtatttccaatggtttttttaataggtttcctgacttcgaaaaaaactttttatgctctagaaataactctgaggataagttcagtaatctttcattgactcagtcctttgtaactaaaccagggcgaaggctgcgaggtttgcttgatgagtccatatcccatgaaataatattggcatttttttcattgcgattgaataataccttgctttttttaaggaattttggcgttgctggtcttgttcgagtgctcataaaaccgaatagaatgctacgtggggttggggaaaaaggtattgttaatgaattggaacttgataattctttgcgtgatataggtgagtttagacaagctaaaaatagcgatgagattctaccttcgcttaaggtggctattcatgatacatttgagactcttttttctaatatacaattagagctgagacaaatagatattgaaagagagtttaattatatctgttttccattttcgtttttattaaatactgccattgataatgattgggggagtgacggtgccgagcttgccaaaaatataacgttgttatcagagtataatataattcaagttgaagatgtctttttgcccaaagggtgggatgatgttcgtttaaaaaaaatgagctctggtgagttatgtatactgctgatgctttttaaaataaattctaaaataaaagacaattcactaatattaattgatgagccagaaataagtctgcacccagcatggcaaaaagaaataatcccatctcttgagaagtgtttttcatcatataaaggatgtcatttcattattgcaacacattcgccacaaattgtctcaggtattcctgaagaaaactcatgcgtcgtcctccttgaggaaccaggcaaggttataaagggaaaggatgtgcatggtaaatcatctgacttccaattgttcaatacattaaattttgctggggattctaatgaatatattatcagggaattgttgttgataatatctaaaattgatacatcacagactttaagtgatgaggatgagagatttctgatgcatgcggctcatttattaaaagatgccgaggaatatgatacagccaaatatttattgttacaagcagtagctttggttgaagggcgcaaaaataatggaaaataa

SEQ ID NO: 228131 - DNA, 714 bp, Klebsiella pneumoniae
atggaaaataaaaaatgcttgcttaaccctattgtgttttctaaagatttgctgcattttattaattcctatgatggtaaagattatcatatgtgggggcgggactgcgaggaaatgaaaaaaataagaagcgagttgcgtgagcattatcggccagagcaaaacaatttatgttcatattgtaggcttgagaatccacagtcacacggactaagttgggatgtggaacacatcgcaccaaaaaaagatttcccgcaatacttattcgagcctcggaatctttctctttcttgtaaagattgtaataattataaaaataagaagcctgttgtaaatgatgagctgatcaagaatgatgcaccttatcctgaaagtggtgatgtttttaatataattcatccacactatgatgagtatgaatgtcatatacaaacaactaaggtggataataaatatatttataagccggtgtctaaaaaaggctgggcaacatatgagcaatgtaaattatcaaggttcgctacttaccacagccataatattaataatgctaatgttgctgaggcattactactcaggcttcaagaattgagccgaagcggaaaaatagtaatatctgaggtagatatgagtttgatagaagatgaccttagtacgaagcctcttgaaatcgtagtcgaaacggctttcaaatctcatttttcagaagagtag

SEQ ID NO: 228132 - DNA, 780 bp, Klebsiella pneumoniae
atgaataacctggttccagttggatctccgcaatctcccggaacattgctcccggtggccatcgattaccctgccgccctcgccctgcgccagatggcgctcgtgcaggatgaactgccgaaatacctgctggcgccggaagtgagcgccctgctccattacgtgccggatcttcaccgcaagatgctgctggcgacgctgtggaacaccggcgcgcgcattaatgaagcgctcgcgctgacccggggggatttttcgctggcgccgccgtatccgttcgtgcagctggccacgctcaagcagcgcaccgagaaagccgccagaacggccggccgagttcccgccggtagccaggctcatcgcctggttccgctttccgatcaccactacgtcagccagctgcagatgatggtggccaccctgaaaattccgctggaaagacgaaacaagcgcaccggcagaatggagaaggcgcgtatctgggagatcacagaccgtaccgtgcgcacctggcttagcgaagcggtggaggccgcagcggccgacggggtgacgttctcagtaccggtaaccccccatacgttccgtcattcctacgcgatgcatatgctgtatgccggcataccactgaaggttttgcagagcctgatgggccacaaatcgattagctcgacggaagtctatacgaaggtgttcgcacttgatgttgctgctcggcatcgagttcagtttcagatgcccgaagcggatgcggtagccatgctgaaagggaatatttaa

SEQ ID NO: 228133 - DNA, 258 bp, Klebsiella pneumoniae
atgaaacttgaaactatacatatagataataccgtaagaagtggtcttaattctttcactgacggggtgatttttcgtgatacaaaggtattgatcacgctcaatctcccggatggacagaaaaccactattgagggggaatggcggcatatgtcggacgccaacaggttgtcagaacgtattacgatgcttcagcatgcaatctatgagcagtatgaggaatacagagcagatattcccgtcagctggtccagataa

SEQ ID NO: 228134 - DNA, 603 bp, Klebsiella pneumoniae
atgaatagctcacttctcccgccgtctgccaccgcgtggatgcgcagtgccgagagcgcatcggccagactatcagccattacagtggcgcttcgcacgctgtggacgccgacggcatgccctgtagatttgcttccatacctggcgtgggcgctgtcggtagaccggtgggacaaaagctggccggccgctaaaaaagtggcagcgattcagcagtcgtactggctgcatcgcagaaaaggcactcgcgctgccgtgcggcgggtgattgaagatatgggattttccgccacgtttgcggagtggttcgacgttggcgacgagccgggaacatttcggattgaagtggatgtgaatgatgtcggtctgacgccgaaaacactggatgaattaaaccgtctgatcgctgatgcaaaacccgtcagcagacacttatcacgaatgactatatcgaccagttcacgaggggatgcctggacggggctggctttatttgacggggatgttatcagcgtttatccgccgggttatcagcctgatggcagtattcactacgacgcacagcagtatttctacggcggtataactttttcaggacagtaa

SEQ ID NO: 228135 - DNA, 900 bp, Klebsiella pneumoniae
atgccgacaattgacctgtcccaacttccatcgccgaccattatcgaagagctcgattacgagacgattctcgtcgctgtcaaggcggtcatggtggcggcatttccggaagacgagcagtcagccgttgccgctgcgctgggtctggaatcagagccgctgaacatcatcgcccaggcgatggcgtaccgtgagctgctgctacgccagcgtatcaacgagggtgcggccgcctgcatgctcagtcatgcgactggcgacgatctggataatatcgcggctaatctggacacggaacgcctaaccatcacggcggcaaccgacaccaccgacgcagtaacggaaagcgatgaagcgctgcgcctgcgcgcgcaggccgcgtttgaggggatgagcgttgccgggccgtcagcagcgtatgagtattttgcgcgcagcgccagcggccaggtctctgacgcgcgagcaaccagcccgtcaccggctgaagtggtggtggcagtattgtccactgaaggggatggcaccgcgtcggcggagctgctggccgccgttgccgccgccgtcaacgacgaggaagtgcgccccctgggggacagggtgacggtgcaaagcgcggagattgtcgggtacgagattgacgccacgctgtacctctatcccggcccggagtcggagccgattattaacgcggcgatggcgtcacttcaggcgttccttgccgataacgataagaaaattggtcgcgatattgtgcgctccgccatctctgccgctctgcatgtgcagggggtgcaacgggttgtaattaatgcaccggctgcagatctgcagatcgacaacacccaggccgcacggaataccggttacaccgtggacaacggcggaacggatgaatag

SEQ ID NO: 228136 - DNA, 642 bp, Klebsiella pneumoniae
atgagtcatgatgatgcgctgttcagtcagcttgatgcggtatttgcggccattttgtcgggcatgtctccggcagggcggcagcgaaccgcacgcagcgtcggcaccatgttgcgtcggagtcaaagccagcgcatcggcaggcaggaagcgccggacggggcaaagtttccaacccgccgccgccgcgtattgcgttcacaggccgggatcggctttgtctggcagggtgaaaaccgccgcctgcgtaactggcgggccgttcgtggccgtcgcggtcgcatgctgaccggctttgatgaagagcgcggcgcagttcgctcgttctatcgcgaagacattgagcggtatctcgatatcaactttaacgagacgcgtcgcaataccacgaaagccgatccaatgttccggcgtttgcgtaccgcgcgttttctgaaaacccgcgccaccgctgacggtgcagaggtgggttattccggcgtggctgcgcgtattgcccgcgtccatcagctcggcctgcgcgacaaaatcaatgacagcggcgcaatggcaacgtatccccgccgcgagctgctgggcctgagtaaagccgatcgcatggcgatagcccgccaggtaattgactcgctgggggtacgctga

SEQ ID NO: 228137 - DNA, 603 bp, Klebsiella pneumoniae
atgagtaattcactgctccccccgtcttccaccacctggcttcgcagcacagaggcggctaccgccagattgtccgcgattacggtagcccttcgcaccttgtggacgccgaacgcctgcccggtagatttactgccgtacctggcctgggcgctgtcggtagaccggtgggataagaactggccggccgttaaaaaggtcacggctattcagcagtcatactggctgcatcgccgaaaaggcactcgcgccgccgtgcgacgagtgattgaagatatggggttttctgccacgttcgcggagtggtttgacgtcggcgacgagcccggaacgttcaggcttgaagtggacgtgaatgacgtcggactgacgccaaaaacactggacgaattaaaccgcctggttgctgacgcaaaaccggtcagcagacatttatcccgaatgaccatatcgaccagctcacaaggggatatctggacaggactggccttgtttgacggggatgttatcagcgtttacccgccgggttatcagcctgatggcagcattcactacgacgcgcagcagtatttctttggtagcgtgactttttcaggaaagtga

SEQ ID NO: 228138 - DNA, 900 bp, Klebsiella pneumoniae
atgccaacgattgacctttcacagctgccatcgccgaccattatcgaagagttggattttgaaaccattctcgccgaggtgaaagcggtcatggtggccgcgttccctgatgatcagcagtccgctgttgcggcagcgatgacgctggagtccgagccgctgaacatcattgctcaggcgatggcataccgcgaactgctgctgcgccagcgcatcaatgaaggggcggcggcctgcatgctgagccactcgaccggcgacgacctggacaatatcgccgccaatctggacacggaacgtctggtcatcactgaagcgacggacaccgccgacgctgtaatggaaagcgacgaagccctgcgcctgcgcgcgcaggccgcgttcgaggggatgagcgtggccgggccgtcggcagcctatgagtatttcgcccgcagcgccagcggccaggtctctgacgcgcgggcaaccagtccgtcaccggcggaagtggtggtagcggtgctgtctaccgaaggcgatggcactgcgtcggcggcactgctggccgccgttgctgccgccgtcaatgacgaagaagtgcgccccctgggggacagggtgacggtacaaagtgcagagatcgtgccgtacacgattgacgccacgctgtacctgtatcccggcccagagtcggaaccgattattaacgcggcgatggcgtcacttcagacattccttgctgataacgataagaaaatcggccgcgatattgtgcgttctgccatctccgccgccctgcatgtgcagggggtacaacgtgtggtgattaatgcaccggcggacgatctgcagatcgacaacacccaggcggcacgtaataccggttacaccgtggacaatggcggaacggatgagtaa

SEQ ID NO: 228139 - DNA, 585 bp, Klebsiella pneumoniae
atggatttcgtcgaactgcttcgctcgcttgagaacgtcgtacgcaccggcacagtaatggaagtcgacgaggaaaaatggcgagttcgcgtgcaaagcggcggacttgaaaccgcatggttacgctggaacgcgcagcgggccggggcgtttaaagtctgggtgccgccgtcagtcggtgagcaggtctggtttttgtgcctgggcggcaacaccaacgtagctttaatcggtggcagtttgtacagcgacgataacccggcaccgggtgcatcgcgtaacgagatggtggtgacggcgccagatggcgcgacgtttcgctatgacgcggaggcgggcgcattgcaggtgaagggcatcaaatcggcagtgattgaggcgtcggtgatcgtcactctggatacgccagaagtgaactgtaccaacctgttgcgcgcgaaaaatcttgatatcgctgaaggcggagaaatgcgcggcaacttcactcacaccggcggtaagttcacgtccaacggtgtgcaggtggatgatcacagtcacggcgaggttgagcgcggtggcgactggacggtgggcacaaaatga

SEQ ID NO: 228140 - DNA, 642 bp, Klebsiella pneumoniae
atgagcaataacgacgcactcttcagccagcttgatgaggtatttgcgaccatcctgtcgggcatgtctccggcagggcggcagcgtaccgcccgcagcgtcggaaccatgctgcgtcgaagtcaaagccagcgtatcggcaggcaggaagcacctgacgggtcgacgttcccgacccgccgccgtcgcgtgctgcgctcacaggccgggatcggttttgtctggcagggtgaaaaccgtcgtctgcgcaactggcgggccactcgcggccctcatggccgcatgctgaccggatttgatgaagaacgcggcgcggttcgctcgttctacagagaagacattgagcgctatctcgatatcaactttaacgagacgcgccgcaataccacgaaagccgatcctatgttccgccgcctgcgtaccgctcgttttctcaaaaccagcgccacacctgacggtgtcgaggtgggatattccggcgtcgctgcgcgtatcgcccgcgtccatcagctcggcctgcgggacaaagtcaacgacagtggcgcgatggcaacctacccgcgccgtgaactgctgggcttgagcaaagcagatcgcatggcaatagctcgccaggtgatcgactcgctgggggcgcgctga

SEQ ID NO: 228141 - DNA, 459 bp, Klebsiella pneumoniae
gtgaaaaaagcggaactgctgcgtgctgcgctgattgccggtaacacatggtgcaaggccaacccggagatgatcactgtctgggtggaaaaaggccatatccagatcgaggcgaccggcgaagcgtcgttcatgtatcactacaccatccaggtactggcgatggattttcccggccagattgacgatctgatgttgccgttgctggcgtggatttggcagcagcaacccgatctcctgctgaacccggacaataaccgcaaggtggagtttgacgccgatattatcaacgacgacgtcgccgacattctgtttaaagtgccggtctgggagcgcgtcatagtgaccacggaaaacggtacgcagaaagcggagcacctggccgaatcgcgcccccgctttagcggcagtgagtgggaaatggtcttcaatccggaatcgggaggcgcgctggcatga

SEQ ID NO: 228142 - DNA, 300 bp, Klebsiella pneumoniae
gtgaaaacatcaaaaccgcactggccggtaacggctgcgccgctgctcctgtgcctgttgttggtgctgacagcctgtaccagcgagccgaagaagtcagtaccgcagattattcaggagcctttaccggaaagtctgacggcaaaaactgacgttccaccaccaccggacaggccgatgacgtggggcgggctggctgtctggacagattcattgcttgacgcactggatacctgcaacgccgataaggcgggcattcgtgaactggaactgcggcgtatcgccagggggataaagtga

SEQ ID NO: 228143 - DNA, 768 bp, Klebsiella pneumoniae
atgacccttgaaattgtaccgggcagcctgaccagccctgacccttccattaaaaactatgccccctacgctcccgctattggcgtgaccggttataccgaccgctggcgtccggcgctggattttgcagtcagcgcagtcggtgatgcagtcaccacgtatcccagcccattgatgccggacaacatcctcgtaggtgacacaaccaatcatcctgtgattgtcgaacaatccggtattcgtatggtcgactgcgcgacacctggcgcactggcggcactgacagacattaaccggaaattcggtgatgtcagtttgctggcggtatggtatgaagtacacggctccgcatcccactccattctgaccatcggaggattgcggttcagccgtgcaagtgccagttggggtctgtccaaaatgtccggtgctgcggggagcacgctgagcatctccaacgatccggctgccggaggcgtggctatttccgcgcgtcgttatgccgctattctgaccataccgactgatggtgctgctgctgtaactatgcaactgatcggcgcaggaacggcagccgtaacgaaatcgggtgtggtgacgcgaggtggttcaatggatgaacagcggcgtctgcgtttcggtaaggattcgggcggctcggcgaataccggcccgcagtttgccgaaatggttatttgggaacgcctgctgactatggaagaaatctcggacgctgctcactatgcctcagacaaatacagtctttga

SEQ ID NO: 228144 - DNA, 1263 bp, Klebsiella pneumoniae
atggcaagcattgtacttttttttgtttacgtaatgttttttataccgaaaatggatttgatttctctgggtggagggtttaatgctggcttaaggattgatgatttaatcatctgcttattgtttttctttttcttcttatatgcagcacagaataaaaagacaaaggtcagtaaaactgaattttatttcatattgtttttattcgtcacattccttggttcattctttagttcgacgcaatatggcaggggaacggttctttttccaattcgtttctttgaatattttgcttttttctacatgggtttctttttatacaaaggtggagcaaatataaggaagttacttttgcttttgcttattgctaactctgtagtagccatccttcaacactttggagttgttggtgggttcaacgtcagaggctatcagccaaatatgtcagaacgtgtaataggtcttacgagcgggccttgggagcttggtgttatacttaacttcattacatgttactttttggcagaggaaagaagcgaattcaagaaatacgtcatctttggcatagccacattaatcatcatgatgactggctcaaggatgtctatgcttgcgcagattgctgttctgatctggtatatgaagctaagtgccagcctggtaaccatcatcaaaagatgcctcgtggtcattcctttactgttcgcggtctatttcttctttagtgacagtacggtggcgactcgatctgatagtctcatgaacagtgataatattgaccagctattagactcatattcatcggttagaattactgaatcagtcccttcatggggcgatctgggcgttctttcccgtggtgatgaggttgatgccagctggagcatgaggggtattaaatggatttacgccgttaaactatatctgtcacaccctatgtactggatgatcggcgtgggagctggctcttttggtaacgctcttgacggtggctggctgaggattacgacagagacaggaattataggtttaatactatttattctttttcttcttcgtataaagagactatcaccaacaatgtcgttatgtgttattgcattctgtataaacatgctgatgattgatatctacatgtcttataaggtaatgtcgatgatgctccttcttgctggttattaccagaagaagaaaaaaacagaaagagcgctaatcagacaagaaagtctaaataatcaccactctacatttgttaagagctaa

SEQ ID NO: 228145 - DNA, 1311 bp, Klebsiella pneumoniae
atgaaaaataggcgtgaatttataatttcaggtgcaagtgcagttggattgttagcactctcgacacaagcaaaatcagggccacaacaggtaccagcttatcttaaggtggcgtctgagatatcacagacgggcatggccagcatcaggagcttccttcctgcatcgtttaatgcatcagatccaaacgccgattgcacgaagtatatacagaatgcaatcaacgagagggtgcaactattcatacctgcaggtgtttacaatgtatcgcctaaccctgattcacctgagataaaaaacgctcagtccaaaggtggaagttgcatcaatttacttcctgggtgcgcaatcatcggtgttggaactataaggcttctgtctggtaactatgcaggtgttggttcaatcataacaaattgggatgatgacgatttatcagatgttataatttcaggtgtgaggattgatggaaactctcaaaacgttgacggggccataaactgcattaatattatcggctcaagagggctaacgatagataatgttaatgctataaatcctcccgcaagaaaaggaaatgggggaataggaatagggcttcgttcatctaaaaataacaacgggccagttgatagtaacatcactaactgccgcgtagaaaactgcggatatattgggataagcattgataggccaaatggagttatcatcagttcttgcacagtagatgggacaaatgataacggaattgatatttttggaaacgattatagcggtggacggttcaattcaggagagtcgcgtaacgttattgttagcaacagtataataaaaaacgctaaaggctcaggtattttccttgagtcatgcggtgatgctgtaatttccgcgtgccatatagataatccggggtctaatggaatcatacttaaccggatgaattcggcttcattagacaatgttattagtgctgttaagattaagggcaacggaaaaggcattggagttaagttcaaaaatactacaggaagcactcaattatctggaatgcgttttgaaaaacttgaaagcagctatcacatggatggggcagagtttgtatttattgataaaggggtgcataaggacatatcaggtgaattgatcaagatcaccaataaagacaaagtaagacttaatagctcgcttattgaaaggcaggtgtaccaaggaagtcagcagccgaagctactcaatgccgaatattccagcgccatagctaacaccacaaccgatgggattcactggctaaataacaataaagttatatga

SEQ ID NO: 228146 - DNA, 333 bp, Klebsiella pneumoniae
atggaaaagaccttcactcctgaacaaattgacattatcaatcgtgttgtcttcagccatatcgataaaatgactgaggaagtggctaacatagttgaaaaaacagagaaagcagcgcaccaagaaatatcagatcacggcataaatatggcagatttttatcctgccaatcagccatttttaatgatgacaatcgtacagacattgatagaccgtgtgcatggtggggacatggctcttgctcaaaaaatgataactatggaagcgaaaagactgaatgtcagcgtaagtgttgaggcggataaatcaggggtatcgaacatgaacgattaa

SEQ ID NO: 228147 - DNA, 606 bp, Klebsiella pneumoniae
atggccgggcgctggcccagcgatcgggagctgccaggcttccggcagacgatgctcgggtttgagtcgcagtgctggcagctggggatgaagatcctctcctgctttgctttgaagctcggttttccggaatcgtttttcaccaccgcgcacgatccgcagcgtgacacctatcagagcaccttgcgcatgctgcattactatgcaaccgagcagtcgcagcaggggatgtggcgggccggcgcgcacaccgattttgactgcctgacgctgctgttccagcgccccggccagggcggcctgcaggtttgtcccggtaaagaccgcgaaagccagcagtggaccagcattgagccgcgggaggaggtgatcacctgcaatatcggcgatatgctgatgcgctggagcgacgaccagctgccgtctaacttccatcgggtgagaaatccgctgccccatgaatatcaggggcagcgctacagcctggcgtttttttgccaggccaataaagatgtcgagatcctcgggccgcagaggaagtacccgcccatcagcgccgaggattatctgcagcagcggatccaggccaattttgccaaagggtaa

SEQ ID NO: 228148 - DNA, 318 bp, Klebsiella pneumoniae; identical to SEQ ID NO: 152574

SEQ ID NO: 228149 - DNA, 678 bp, Klebsiella pneumoniae
atgtctactcccgctaactttaacggtgctcgtccggtgattgatgttaacgataccgcaatgctgttgattgaccatcagagcggtctgttccagaccgtcggcgatatgccgatgccagagctgcgcgctcgcgccgccgcgctggccaagatggcgtcgcttgccgggatcccagtgatcacgaccgcctccgtgccgcaggggccgaacggtccgctgatcccggagattcatgaaaacgcgccgcatgcgaaatacatcgcccgtaaaggtgagattaacgcctgggataacccggaattcgtcgccgcggtgaaagcgaccggtcgtaaaacgctgattatcgccgggaccatcaccagcgtctgcatggccttcccggctatcgccgctgtcgccgacggttataaagtgtttgccgtgattgacgcttccggcacctacagcaaaatggcgcaggagatcaccctggctcgcgtggtacaggccggcgtagtgccaatggataccgccgccgtcgcctctgagctgcagcgcacctggaatcgcccggacgccgcagaatgggcggaggtgtacaccaaagtcttcccggcctaccagctgctgatcgaaagctacagcaaagcgcaggacgtcgtgaagaataacgaacagctggattcccagcgctaa

SEQ ID NO: 228150 - DNA, 1722 bp, Klebsiella pneumoniae
atggcgactgaagaagcattcatcatgctgcgggcacggcagctctactggcaggggtatcccccggcggagatcgcgcgcctgatgggtatcaatcagaatacgatttactcatggaaaaaacgtgacgaatgggacaccacgccaccgatccagcgcgttacgacgtccattgatgcacgactgatccagctcaccagtaaggacacaaaaaccggtggcgacttcaaggaaattgacctgctgacgcgacagctcaagaagctggacaacggaacgccagcgacgcaaccgaagaagaagatccgcaagaaacagaacttcttctcagaggcgcagatctccgcgctgcgggccaacattatcgactcactgcactggcatcagaaaacctggtatgagaaccatcaccaccgcaaccgggccattctgaagagccgtcagattggtgcgacctggtactttgcccgcgaggcgctgttgcgcgcgctgtctgatgaggtgaagtacaaacatcagcgtaaccagatctttttatcagcgagccgtcgtcaggcgtaccagttccgcagcttcattcgttcggcagcggaagaggtagacgttgagctgaaaggcggcgacatgatccagttgtttaacggtgcagagcttcactttctcggtacgtctgccgcaaccgcgcagtcgtataccggcaacctgtactttgatgagtttttctgggtcgggcagtttgccaacctgaagaaagtggccggcgcgatggcgaccctgaaggggctgacgcgcacctacttctcgacgccgtcagcggagagtcatgaagcgtaccccttctggtcgggtgaagccttcaacaaaggccgcagccacggtaagcgcgtggagttcgacacgtcctggaaaacgctgaacagcgggttgatgtgtccggacaaaatctggcgccagattgtcacgttgcaggatgcagtcgatcacggctgggatctcactgatattgatgaaattcgcgaggaaaacagcccggaagagtacgacaacctctacgcctgtaccttcatcaagaacggtgaaaccgcgtttgactacaacatgctgctgagctgcggtgctgacggctatgacgagtggccggactggaagccctacgccatgcgcccgatggccgatcgcccggtatggattggatacgaccccaacggagccagcggcaaaggcgacagcggggccatctctgttaacgcggcgccactgatcccgggcggtaagttccgcacgattgagacgcagcgcatacgcggcatggagttcgaggcgcaggccgccatgattatcaacatgctcacgcgctacaacgtgcagcacattggtattgatggcagcggtattggcgaggcggtttaccagctcgtgaaaaaacgtttcccggcggcggtatgctaccagttctccccagccagcaagcgcatgctggtacttaaaatgctgcaacttgttcgcgccggtcgctgggaatatgaccggggcgagtatgacctgatcaccgccttcagtgccgtgcgcaaggttgtcacgcccggcggcgttatcacttacgacactgaccgcgcccgtggcgtgagtcacggcgaccttgcctgggcaaccatgctcgccactgttaacgagccgctgggtcaggaaggcggtaacacaatgactgttatggagtactga

SEQ ID NO: 228151 - DNA, 573 bp, Klebsiella pneumoniae
atgcgcccacgcatccatttgcgcgtagctgacggcgtagtcgtagttggttttacggcacagatagttgtacggatccatcttgtcgttagcgccgggattgcggcggttggtggtgctgttgttgacgcccgccagcgggcctttgctgccgatcaggattttctggccgatctgctcttcaacgccaaagacgttaatcagcttcagaaaggcatcatcctgctgcgcggcagcttcaagacgctgctgtacggtcgggtcaacgctgaactgtgccgcaacggcagcggcgctgacgccgttaagctgcgcctggcgggcaacgtagctgtcaaacagcttacgggtagggtttctcatgtgcgggatctctcgttatggatatcagtagtcagcgagctgcgcgctgtcgccaccgccggccggcgggcgctggctgaaattgccgtccgtcccttcaagctgctggcgaagtgcggcaagttcagtggtcagcttctggatagtggctttgtcctgctggcgttcctgttcggcagtactgaactgctcgccaagatcaacctgtga

SEQ ID NO: 228152 - DNA, 147 bp, Klebsiella pneumoniae
atgatacatctgaaagtcctgaaggcgtttaagccacaaattttctttgacgatcaggatgtgcatttgatcgcggctgcaaaggttgtaccttctggaaaagtcccttatgccagtaactccgaacttgcagaacgtgaagcatag

SEQ ID NO: 228153 - DNA, 591 bp, Klebsiella pneumoniae
atgacaaagaaaaacaatgtagaaattttacacaaagaaaaaactaatattgaaaacgatagtgagatcgaacataaaaagaacccgtttgttttcaatatgtctattgatactaaaaagaaaaaactaactgttgatcggggttcagaagtagaaacagaagagggggttttcacaacaacaatatcacaaattcaagaagttgatagggaagaatttttaaaaatttttacaggacaaatcaaattctattttgatttgtctcaaaccggatttaaattgtttttcataattatgggtttgtatcaaaaacagataggcggtgacgaaatttatttaaatttcgaaacagcaaaagaagaagctgaaaaatacgagtcagcaatttcaaaagctgtctactatagaggtttaaaagaattattagaaaagaaaatgatcgcaaaatctgtaaaaagatacattttttatattaacccggcgatcattttcaatggcgatcgtgcaagatttgttaaagaaattaaaattaaagaagaagaaaaacaacaagaagaaaatttaaaaattcttcgctcaaaatatgcttaa

SEQ ID NO: 228154 - DNA, 714 bp, Klebsiella pneumoniae
atggcaacaaaaattgaaaatgacgaagtaattccagatgaggaattaaataaaataatagaagaaataaacaatgaggaagataaaagaattaaagtaattgttgatgactatcaacaacttacgcaaaacggttttttcgttcttgatacggaaacaacagatcttgttggtgaagttgttagtttttcattgattgacgacaaaaacaatatattaataaatgaatattgcaaacctactagaaataagatttcaaaaacagcacagtcaatacataatatttcaaataaaatgatcaaagatagtagaaatataatttcaatatacgaagattttttagaaataataaatagagaagaaaataaaaataaaactatttttatttataatgagggttttgatctttcaacaatttatagatctttaaattatgccggatataaatataaagaaaataacgatttcgacgatgtagaatttagatctcgttgcgtaatgaaagactttgcctattattacggagaacataatgagtactatgatacagataaatataaatggaaaaaactcgaattcgcagcaaattattttaatatcgaaacgaaaaacttagaattgcataattccgccgtcgattgttatttgactttaaaagtaattgaaaacattagagatcattttaaaaaagaaaacgagtatttttctgtgtag

SEQ ID NO: 228155 - DNA, 744 bp, Klebsiella pneumoniae
atgggtaattcaaaaagaaatataaaaaaactaaatgataattttcgagagagtattttagattatgcgatttcgcataacctaaaatgcgctaacgccttgatcgcattatatgcgactgggtgtagaccagacgaaatagaaaccggaattaaagttaattttgatagtaaaaacaataagttaagtttcaaaattataggttcaaaattaaactatcaacaaaaaagaggtattagaattagagaagttacgataaaaatcacagataaaaatcttcaatattacaaacctataatagatatttttgagaaaaaccctcaggcatatgatttaaaaattaaaactgaaagttctaaagcattctccggatatattacaaaaataagtaaaaaactttggcccagaaaaaaacatcatgtttctgcatatagttttagacatgcaaaagcaacagaattaaaaaactcagagaattttgataaggaagaaatcgctaaaattatgggccatgcctcgatcagatctcaagaaagttacggaagaaagaacagcagaagcaaaggtggatttgacgacattacagatgttgaaacaagctctaagccccgtggtggcgatagattgcttcgtttcaagattgccagtaaacagcagacagccgcaaaaatcgcggctatttccacccctccagatgtagcaagtccacctccaacggctcccgttcgttcattaaaacgctga

SEQ ID NO: 228156 - DNA, 2916 bp, Klebsiella pneumoniae
atggatcttagtattcgcgttgcgttcagtgcaattgataagctcacccgcccggtcagtgccgccagtaaagcaattggcggcctttctgactccctcaaaaaaacacagtcttccattaaagacctggagaaaggtgcagcgtctttcgacaagctgcgctcgcaagctaacgacacagctctgaagctccggagcactcagcgcgcctttgatggtcttaaccagaagcagcgcgaaggcggccagcttaccgaagcgcagacggcacggcttgaaacgctgcgcaacaaactctcacgcctgactgatacctacaataagcagactacccaactacgctctgctggtcaggcagtgcgccagcacggcgttaacctcaatgccggtagcggtgcggtgcaatctgccatccggcgaacagaacaatacaaccaggcgcttgagcgtgagcgacagcgcctcgcggcggtaactcgcgcgcaggcaagctatgagaaggcaaaagaaaccggcgcgaaactgcgcggcggcggcacgatggcggtggccggtgcagcggcggcggggtacgcgggtgggcgctttcttgctcctgctgttggctttgatgaggaaatgtcgcgcgtacaagcactgacacggcttgataaaggtgattctcagcttgctgcactgcgtgcgcaggcgaaaaagcttggcgcggaaacggccttcactacccgtgatgccgccagtggccaggcgttccttgcgatggctggctttactccgcaatcaatccaggcagccttacctggcgtactgaatatggcgctagctggcgggatggagctgggtgaaagtgccgatatcgggtcaaacatcctttctcaatttaccctccccgctggcgaaatgaatcgcgtcagtgacgtactgaccgccgcattcacccgcaccaacaccgatctgcgaagtctgggtgatacgatgaagtatgccgggcctgtcgcgtcaaagcttggtatcagtctggaggaggcagccgggatggcaggcatcctggccaacaacgggcttcgcggtagcgatgctggtacagctatgcgtgcttcgctggcccgcctcgcatcccctacagccggggcggcaaaggcattaaaacagctcggcgtatcagtatctgatgccggtggcaaaatgcggccaatagaaactattctttccgatctctacaaggcgacaaaaaaatacggacaggttgatcaggtcagcttttttaaagatatcgcaggggaagaggcttttgttggtctgcaaacactggttgctggcgctggaagcggggagttgcaaaagctcgttcgcgaactaaagggcgcgggaggcgaagcatccgccgtcgctaaaaaaatggctgacaacctgagtggcgatctgaagaacctcgatagcgcctgggaaggatttcgcattcaggttgaagaaactattgatgggccgcttcgtaaattaacgcaaggtttaagcgatgcgattacaacagcgattgaatgggttaaagccaacccacgtctcgcgcagaccctattgcttgttgcgggcggtgcgctggcgttgactgtcgctgttggcgcgctctcgcttgctgtcggcattctgattggcccactggccaaactgcagctcggcttcacagtgttaaccggtggtcggggtattctcggcacaattgccgcattccgcactctgggtactgccgctggcccggtgatggcaagtatgcgcggctggcccgtcgttgtatcgggtgtcgcatccagtttcgggaggatctcaacaatacttcccgctatccgtgcaggattgttaggtgcatttctcgcgcctggtgctgcgttgacctccctgggtaaaaaccttgccatgctgatgctcagacttaccggcctccctgcattatgggggatgattactggtgcggtatctgtgctgggtggcgcactatctttcctgttaagcccaatagggctgattggtgcagcatttgtcgccgccgggctgctgatctggcgctactgggagcctatcaaagcctttttctctggcttcttttctggtgtgtggcaggcgctaacgcctgtcagaagcgccttttctgcactgtcgcctgttttctccgcgctgggtaatggcatcaaggctatctgggagtggttcaaaaacctgctaaccccgatgcagaccagtaaggacacgctggataagtgcgcgtcagcgggtgaaaccttcgggcgcgtgatggggacagcgcttagcgttctgctctggccgcttcaacagttaatgaatggcgtcagttggttgcttgaaaagttggatcttattcctgacgggatcgaaagagccaggcagcaggctgacaaagcccagcaggcgcttgaagcatcagcggttgcgctggccgggcatcagctccccctcgctcaggctaccgtgtccgcaggtactaagccaccggttatcactggcgacaacggcacgctgaggcgcctgaataacatcgccgataacacgaaagcaacggccaacaacacgaagaagatcggccccggcgatattgtctttaaaaacctgccgcgtgcgctggcgctgcgtgggccctatcaggaagcgcgggttattccgcaatcggtgccgcgcgtttctgcggcggcggctggcggcattctgtcggtaccgacggcaacgcaaggggcgacgtctgcgccggttgcagcagcttcaggcgccgcgccgttcttccagcttgtcttcaacgacgtcggtaagcgctcggatcaggaacttgaaaaaatggttcgcaacgctgtgcgtgatgcaatggccggcacccgcaaaactaaccgtggttcattccgcgatcgggagtaa

SEQ ID NO: 228157 - DNA, 777 bp, Klebsiella pneumoniae
atgattatatatgttattaaaaataaaaaatcattatggttcactttttttattatttctatttttgttctgctcgttactagaaaaatgattatggtatcctttatacaattaggaatgatacatctaatcacaacaaaaattaggccaaaaacaatttttttagtcgttttgtctgttttgttagtgtttctattgtttggatatattggtgatattagaactggcagacaactatttatacaattggctcatccaagttttgaatatcccgactggatgccaagtgggttcatgtgggcgtacatttacattgtaacgccaatagtaaatttaactaatgctattcacatgggacaaacagatacaaaccttaacttcttatgcagccttttgccaaaagttgcgcgaggggcattagaatgtgttgtaacagatgaagatgcatttgctagatcttatcaaataagtggtgcgtttaatgttggaagtggatatattgaaattttcctatcccagggaatacttggaatggttgtttttagctttgtacatggcctaatctcatcttatgtatttaatcgtgtaaaaaagaaaaaatcagcaattttgcttttctctgttattagccagataaatttgctcttaatttttggaaatggatatttcaatctcaatgtattagcacagattcccatggcagttttattcttcaataataaaaaattgaattatatttatgactctaataaccttgatggagtgattcgtgaataa

SEQ ID NO: 228158 - DNA, 495 bp, Klebsiella pneumoniae
atggctatattgaatgctataaaaaatttttcaatacacaagggaaaattaacatcaccattatttacgttttgctttatatggtttggtgtttttatcctctatactctaagtttatcagatttattgatatttcctattagtgaaattgcggttacagtaacaatcattattgtgcctttcttggttgggtattctctctttacttcaataaataagttggcacctaagaagaaaatagatgtgaagtatagcgttgttgatttcaatactggagctgcaaaggttttaaggaaaacgagaaatttgactttcattttttttgctctcgtattagttgaaattgcaattgctggttatataccattaatatcaatggctacaggacgcacagtttcccaattcgcatttgggattccatcattgcatggttttgttcttgcatttggttgtcttttggttgcatctaattattatgattatatatgttattaa

SEQ ID NO: 228159 - DNA, 702 bp, Klebsiella pneumoniae
atgtgtataagagacagtcataatatcgaggttatcgtagttgatgatggttctacagatgggtctattgatagattaaaaggtttaaatataaaagttttgcatactaatggaagaaccggggcatgcaatgctagaaatataggaatagaagctgcaacgaatgagtgggttgcttttaacgatagtgatgacttttggagaattgataaacttaattatatagagggagctattaattcaaataacggtaatatagattacatttttcatccttttattcgtgttattggactaaaatcaataataggtggggtttatcattctgcatccggtgctatcaaaaacgattttctaaaaaaaatgttagccaataatatgatcagcactcaatgcttaatttcaaaaaaaaatacattaattgattgtggatattttgatattcatttaaaaagattccaagattgggaatttgcattaagaatagcatgtaaatctcaaggcttctatatatcggaacctttagctttatgcattgaatcctctgactcaatatctaaaggttttaaaaagggtattgcagcacgagagtatatattcgataaacatcgatcgatttatttaaataataaatcttccatgtataggtttttattctcattacaacttagaaagattgttagtctattgaagagagactga

SEQ ID NO: 228160 - DNA, 498 bp, Klebsiella pneumoniae
atgagccttgtagccggtcgcactgttaccccctcctcggaggatgtgccggacactgacgacggtggcgaaaaagtcaccgccgggagtttctggccggaaatcgccctgagcgatgtgcgcatggagatgcgtatcaatggcgcggtgacgacctcgcgactgaagcaggccgtgatcgaaggggtatctcataccctcgatcagctcgctgactggcaggccgtccagctggcagcgggttacacccggctggccgacgtgccggcggtcagggttaacgacgagagcgtgaaggttcaccgcttccgccgtgcggtattcagtatcgcccgcgcccacatcctcggcactaaccgggatgtggacaccaccggcgatgcaggcgagaaacgcgccgtcgcgctggcgtcgcaggcggatgatatgtggcgcgatgcgcgctgggcgatctccgacattcgcggcaccgttcgcaatactgcggaggcgttctga

SEQ ID NO: 228161 - DNA, 201 bp, Klebsiella pneumoniae
atgaaagtgcaggcattgcagggcgataccgtggacttgctgtgtcagcgccactatggcaccacgcagggcgtgaccgagatcgtcctcgccgctaacaaagcgctggccggtcagatatttctcgacgccggccaggtggtggagctgcccgaaatcagcagcaccgcgacgcaggagactgtacagctatggacctga

SEQ ID NO: 228162 - DNA, 282 bp, Klebsiella pneumoniae
atggacctgattaaccgcatctggaatggcgtgacgtactcctggtcaacgtttctgacgggcgttggcgtcatgacgcaaaaggactggctcaccgccgccggcattctgattggtatcgccgccgctgcgttgggcgagatgcaccgccgccggatggcgcgtattcaggagaccaacaacacgctactgaacgaactgatcgacgccatccgcgacgacaccgagaaccgccaggacgttaaagagctgatccgcaccatccgggaggcaccgcgatga

SEQ ID NO: 228163 - DNA, 552 bp, Klebsiella pneumoniae
atgaaaaaacgcattattgcctgctcaaccgccgcgatcatctcgctggccgccacgctatggccgcaggcgctgcgaaccagcccggaagcacagctgaaaatggcgaagtatgaggactgtcgcaagaccccgtattactgcccggcgggcgtgctgacggtgggaattggctccacctcaaaggtagaaaatcgccagtacgccgagggcgagatcgccgagcgctgggttaacgatctgatacgcgccgaaaaatgcacgaaccgcgagtttaacggcaccgccgcaccgcagaaggttttcgaaagcatgaccgacagcacgtttaacgtcggctgcaccggtctgggctggtacaccaacggcaaaggccagaaggtgagaaccaccctctggcgccacgcgcaggcgggcaactggaagggagtttgcgagcgactgactgactttgtgaactctggcggcaagcgcctgcaggggctggtcaaccgccgggaagagttcaaagcctggtgcttatctgatccggcactgaagggggcaaaatga

SEQ ID NO: 228164 - DNA, 552 bp, Klebsiella pneumoniae
atgaaaaaacgcattattgcctgctcaactgcggcgatcatctcgctggccgccacgctatggccgcagacgctgcgaaccagcccggaagcacagcagaaaatggcgaagtacgaggactgccgtaagaccccgtactactgcccggcaggtgtgctgacagtggggatcggctccacctcaaaggtagagaaccgccagtacgccgagggcgagattgccgagcgctgggttaacgatctgatacgtgccgaaaaatgcaccaaccgcgagtttaacggcgccgcagcaccgcagaaggtttttgaaagcatgaccgatggcaactttaacgtcggctgtaccgggctggggtggtacaccaacagcaaaggccagaaggtacgaaccaccctctggcgccatgcgcaggcgggcaactggaagggcgtttgcgaacggctgacggactttgtcaattccggcggtgagcgctcgcaggggctggtcaaccgccgggaagattttcaggcgtggtgcttatccgaccccgcgctgaagggggcgaaatga

SEQ ID NO: 228165 - DNA, 894 bp, Klebsiella pneumoniae
gtggtgattgcagaccaggcaaataacgtcatacgcgcggaactgctgatacctcctcaggtgggcggattctggctcagggaagcggcgctatacgatgatgatggcaattgtctggcggtggcaaacatgccggagtcatacaagcccttactggcagaaggcgctggccggtttcagacggtcaatctgtggatagccgtcagcaataccgccagcgtcgagcttaaagccgacccgtccgttattatggcaacagtggaagaagtcacccgcgccaaaaacgaagcaaaagattacaccgatgaggtggctggctcgctgaataccgatattcagcaggtcatttcgaacgcgatcacagcggcaaagcgtgatttctgggaagacgacaatccggtcggcacggtgaagttttacgcgcagaacgttaaccctaacgagcgttatccgtggtcggagtgggtttataccggcgagaacaaaacgatccgcatcggtaaagctgacggctcggacgtcgggcagaccggcggcagtgataccgtcacgctccagcaggccaacctccccgccgtgcagattgatgtaagcggtgaaaccagcgagcaaccggcgcgggaactggcggccagggcggcaggcgggcataaacatcagggcgggatggcggcaccgggtgaagtgtgggacggggattatgttgttggttccgataatgacagccaccgcacccgcaattacacaagtgaagccggcgatcacactcatgttgttgatgagccagcccacaaacacacgacaagtggcaaaaccgccaacctcggcgacggtcaatcattcagcgttgtagaagcgcacattctgctgatgtgctgggcaagggtggcgtga

SEQ ID NO: 228166 - DNA, 489 bp, Klebsiella pneumoniae
atgatgatggtattcgggatgtttgtttttacactgcgcactgtcccgtatcagcagctgcgccactcgcaggaatggcggcacgttaaaaatgacagggttaaccagtcggcagcctggcagtacatcgggccaggtgacgacacaatcacgctcgacggcgtgctttacccggagattaccggcggccgctggtcgctggcggcgctggagacgatcggctttgccggtcgcccctggccgctgattgaaggtgatgggcagatttacgggatgtacgtcatgacgcggctggagcgaggaaaaacggagtttgaccgctatggcaatccaaaaaagattgagtttacgatcagcctttcacgcgctgatgcggattttcgcgagaagctacaaacctcatcggtcagtgatgtactggataacctgaagaccagcgcgaccaaagcggttaactctgtgtcaaactccctcagtagcctgttttaa

SEQ ID NO: 228167 - DNA, 888 bp, Klebsiella pneumoniae
gtggtgattgcagaccaggcgaataacgtcatccgcgcggaactgctgatacctccgcaggtgggtgggttctggctgcgggaggcggcactatacgacgatgagggcgtctgtcttgcggtggcaaacatgccggaatcgtacaagcctttactggctgaaggggcgggccgcttccaggcggtcaatttgtggatagccgtcagcaatactgccagcgtggagctgaaggccgacccgtccgttattatggcaacggtggaagaggttgcccgcgccaaaagcgaagcgaaagattacaccgatgaggtggccggctcgataaataccgacactcaacaggctatcgcagacgccatcacagcggcaaagcgtgatttctgggaagaagataacccgatcggcacagtgaagttttacgcgcagaacgtcaatccgaacgatcgctatccgtggtcaacgtggacgtataccggcgaaaacaaaacgatccgtgtcggtaagtctgacggctcggacgttgccaccactggcggcagcgataccgccaccatccagcgcgttaacctgcccgcagagcaaattagtatcagtgggacaaccagtgaaaaagcggcacaggagctgattacctcggagagcggtaatcacacacacggcggagtggcgagtcgggttaatccgtgggaaatcggcggtgatatcagccagcgcttcaacccggcgaacctgggcgaaaccgacgaagcgggaaaccataaccatacggtgaccgtccctgcgcataatcataccgtgtcaggtaatacagagaatctcgggagcggtcaggcaatcagcgtggtggaagctcatattctgctgatgtgctgggctcgggtagcgtga

SEQ ID NO: 228168 - DNA, 489 bp, Klebsiella pneumoniae
atgatgatggtattcgggatgtttgtttttacgctgcgcactgttccgtatcagcagctgcggcactcgcaggagtggcgtcacgttaagaatgaccgggtcaatcagtcggcgggatggcagtatatcggtcccggtgacgacacgatcacccttgacggtgtgctctacccggaaatcaccggcggacggtggtcgctgtcggcactggagacaatcggctttgccggtcgcccctggccgctgattgaaggtgacgggatgatttacgggatgtacgtcatgacgcgtctggagcggggaaaaacggagttcgatcgctacggcaaccccaaaaagatagaatttacgatcagcctcagtcgcgccgatgcggatttccgcgagaagctacagacgtcgtctgtcagtgatgtgctggatgacctgaagaccagtgcgaccaaagctgttaactcggtatcaaactccctcagtagcctgttctga

SEQ ID NO: 228169 - DNA, 834 bp, Klebsiella pneumoniae
atggctaatcaggcaaccacccgtaagaaattcaaggtcatgacgtccggaacaacggtcgatggccgcaatgtcacccgcgcccagcttcatgcgatggcggcagcgtacaacccggcagtctatggcgctcgcgtcaacatcgagcactatctttccccgtttcctgacagcgtattcagcgcgatgggggacgttgtcgctctgtccgctgaggatatcaacgaaggcccgttgaccggcgaagcacacctctttgcagaaattgaacccactcagcgcatgaaggacatgcttgccgacggcaagaaaatctactccagcactgaaatgcaccccaactttcccctgacgaaaggaccgtacctcatggggctggcgatgaccgacactccggcaagcctgggcaccgacaaactgaaattcaccgctgaaaaacgcgcagagatcatgcgattcagctcgcaggatgcagaagtcaccatgtttaccccttcttttgaggctgaactggtgcaggaaaatcagagccgaaatgattcgggtaaggaatggttctcccgcgtaatgggcattctaggcaaagggcagaaaaccgacgatcagcgctttagtcaggtgcatcaggccgttgaggcggtggcgcaatctcaggttgatcttggcgagcaattcagcactgccgaacaggagcgccagcaggacaaggccgccatccagaagctgactaccgaccttgccgcactacgtcagcagctggaaggtactgacggcaatttcagccagcgccagccagcgaacggcggcgctagcgcgcagctcgctgattactga

SEQ ID NO: 228170 - DNA, 393 bp, Klebsiella pneumoniae
atgcgcccacgcatccatttgcgcgtagcttacggcgtagtcgtagttggttttgcggcacagatagttgtacgcgtccatctggtcgttagcgcccggattacgacggttggtggtgctgttattgacgcctgccagcgggcctttgctgccgatcaggattttctggccgatctgttcttcaacgccaaaaacgttaatcagcttcaggaaagcatcatcctgctgcgcggctgcttcaaggcgctgctgcacggtcgggtcaacactgaactgcgccgcaacggcggcagcgctgacgccgttaagctgtgcctggcgggcaacgtagctgtcaaacagcttacgggtaggatttctcatgtcgggatctctcgttatggatatcagtaa

SEQ ID NO: 228171 - DNA, 768 bp, Klebsiella pneumoniae
atgacccttgaaattgtaccgggcagcctgaccagccctgactcgtccattaaaaactatgcaccttatgccccggctatcggcgtcaccggctataccgaccgctggcgtccggcgctggattttgcggccagcgtcgccggtgatgcggtgtctacgtatcccagcccactgatgccggataacgtccttgcaggtgatacaaccaatcacccggtgattgtcgatcagtctggtgttcgtatggtggactgtgccactccaggcgcactggctgcgctgacggacataaaccgcaagttcggtgacgtcagtgtactggctgtgtggtatgaggcgcacggctccgcatcccactccattttgaccatcggcgggttgaggcttgctcgcgccagcgccagctggggtctctccaagatgtccggtgctgccggtacaaccctgagcatttccaacgatccggcggcaggaggtgtggcgatttcagcacgccgctatgcggctgttctgactattcccgccgatggcacggctgctgtaacgctgcagcttattggcgcaggtacggccgccgtaacgaaatcgggtgtggtgacgcgcggggggtcaatggatgagcagcgacgcctgcgttttggtaaagattcgggcggctctgccaataccggcccgcagtttgccgaaatggttatctgggaacgcctgctgacggcggaggagatcgccaacgtgaccgcttacgctgccagcacctacaacctttag

SEQ ID NO: 228172 - DNA, 417 bp, Klebsiella pneumoniae
atgctgcgtaccttcctgctggccgggaagccggtgccatcagcagcactctggcatatggctgacaccctgcgggcgctggcttacaacccggatggttcggtatggagtatggactggcgggagcctgtcggcgaactgtcctatgcaccggcgattgcctacatgtttgctgacccgcgccaggactatatcgatacgctgctgcaccgcctggcgatttttgccggccagcaggacgacaccaccggggcgttgcctgccggggcgtttaactggccggtgtatggttcttcccagcctggcgagttcctgagctatatccgtctgtctgaccgcatgctgagtccgctgacctgtccgcgagccaccaatgcacattacaccagccttgccgctatttaccggagcgtttaa

SEQ ID NO: 228173 - DNA, 1005 bp, Klebsiella pneumoniae; identical to SEQ ID NO: 95280

SEQ ID NO: 228174 - DNA, 768 bp, Klebsiella pneumoniae
atgacccttgaaattgtaccgggcagcctgaccagtcctgacccttccattaaaaactatgccccctatgctcccgctatcggtgtcaccggttataccgaccgctggcgtccggcactggattttgcggccagcgcagccggtgatgcgatatccacgtatccctgccccctgatgccagataacatccttgcaggtgacacaaccaatcagccggtgattgtcgatcagtccggtgttcgtatggtcgactgtgccacgccgggggcactggcagcactgacggacattaaccgcaaattcggtgacgtcagtctgctggcggtgtggtatgaggcacatggtggagcgtcccactcaatcctcaccgccggtggactgagatttctccgtgcaagtaacgggtggacgattacaaaaatgtccggcaccgcaggagccatactgagtatttccaatgatccggcggcaggaggtgtggcgatttcagcccgtcgttatgccgctattctgaccatcccggctgatggtactgctgctgtaacgttacgacttatcggtgccggaacggcggcagtatcgacgtcaggcctggtaacgcgaggtggttcaatggatgagcagcggcgtctgcgtttcggtaaggattcaggtggctcaaccaataccggcccgcagtttgccgaaatggttatctgggatcgcctgctgacgacggaagaaatcgccatcgctgctggctatgccgcgagcgcatacagtctttag

SEQ ID NO: 228175 - DNA, 795 bp, Klebsiella pneumoniae
atgcaccggctgcgcatggatcagagtgcattaaggcgagtgcagtctgaccaggcgaaagcggccatgaaacggcagttgctgccgcattacgagggctggattgagggcacgctcgacggcgacagtggccgacaggatgaggtgattgtcaccctgatggtctgggcgattgatgccggtaattacgcgctggctgcccgcattggtcgctacgtcgtcacgcacggcctgctgatgcctgaccgcttcaaccgtaccgccgctaccgttctggtcgatgagatttgcgatccgattctggtgcaggtcaaggcagacgataccaccgacgtcacgccatatctggcggtactcggtgaagtggcggagttcaccgccggcagtgatatgcccgacgtggttcgcgccaagctctgcaaggtgcgcgcctttgcgctgcgtaacggcacaactgaagagcaggcgaccgcgctggagttgttgcgccaggcgctgacgcttgatgcgggcgccggggtgaaaaaagagatcgaccggctggctcgtgtggtgaaaaaagccgccgcgcagacaggcgctgacgggactgagagcaccgatggttccgatggcactggcgatgctgacggaggcgccgcagcggacagcgcgggggcgggagacgctgcagcatcgtcaaatccggcggtggcggccagcgccacagcgacaaaagccacccgaaaaagcacaacccgtaaaccagcggcgcgcaaaacaacagcgaaaaaaacgcctgccgccaaaaaataa

SEQ ID NO: 228176 - DNA, 300 bp, Klebsiella pneumoniae
atgtccgttattctcagtaagccggttaagcgcggcgatcaggaaattatcaccatcaccattaacgacaccatcaagcaagccggatcgctgcgcggcctgcgcctcgttgatgtgctgaacttcgatttcgatgcggtctccactctgctgacgcgcaccaccagtccgcagctgaccagtaccgaaattgccacgctggcaacgggtgacttcaccgcgctctgtgaagagatcacgccttttttgacgaaaccggcgccgtccgtaccgagcgaagcggagacggagagcgagtaa

SEQ ID NO: 228177 - DNA, 417 bp, Klebsiella pneumoniae
atgctgcgtaccttcctgctggccgggaagccggtaccctcggctgcgatgtggcatatggccgacaccctgcgcgcgctggcctacaacccggatggttcggtgtggagcatggactggagggagcctgtcggcgaactgtcctatgcaccggcgattgcctacatgtttgccgagcctcgccaggactatatcgatacgctgctgcaccgcctggcgatttttgctggtcagcaggacgacaccaccggggcgttgcctgccggggcgtttaactggccggtgtatggttcttcccagcctggcgagttcctgagttacatccgtctgtctgaccgcatgcaaaacccgctgacctgtccgcgggccaccaatgcacatttcgccagccttgccgctatttaccggagcgtttaa

SEQ ID NO: 228178 - DNA, 1056 bp, Klebsiella pneumoniae
atgcaaagcttaacctctctactgggcgcgatccctgcgcctgatgaaaacgcgatggcgcgcgcccggcttcatattgatggtctgctgaaaccgcccggcagccttggacgccttgaagatcttgccgtgcagctggcgggtatgcccggtcttgacggcgtgccgcaggtgaaaaaaaaggcgctgctggtgatgtgcgccgaccacggcgtgtgggacgaaggggtcgccatttcgccaaaagcggtgaccgcaattcaggcggcgaatatgacgctgggcaaaaccggcgtttgcgtactggcggcgcaggcgggcgcgaagatgcacgtgattgatgttggaatcgatgccgagctgataccgggcgtcatcaacatgcgcgtggcgcgcggctgcggcaatatcgccgtcggtccggcaatgcgccgcagccaggcggaagagctgctgctggaggtgatgcgctatacccgggggctggcggaggatggcgtcaccctgtttggcgtcggggagctcggaatggccaataccaccccggcggcggcaatcgtcagcgtcctgaccggcagcgatgcccaggaggtggtaggcattggcgctaatctgccgttggcgaaggtcggcaataaagttgaggtggtacgacgagctatcgccgttaaccgccccgatccgcatgatggtctggacgtgctggcgaaagtgggcggttttgatttattggggatgacgggggtaatgctgggcgcggcctcctgcggtctgccggtggtgctcgatggcttcctctcctacgccgcggcgctggcggcgtgccgaatggcgccgcaggtgaaaccctatcttatcccgtcgcactattcggcggagaagggggcgcgtatcgcgctggcgcacctggagctggaaccgtatctcaacatggggatgcgcctgggcgaaggcagcggcgcggcgctggcgatgccgatcgtggaagcggcctgcgcgatgtatcacgaaatggggatgctggcggcgagcaatattgtgttgccgaagggctga

SEQ ID NO: 228179 - DNA, 546 bp, Klebsiella pneumoniae
atgctgactttagtcaccggcggggcgcgcagcggtaaaagccgccatgccgaagcgctgatcgcccatgcgccgcaggtactgtatatcgccacctcgcaggtttttgatgacgagatggcggcgaggatccagcaccaccgcgacggcaggcccgcgcactggcgcaccgccgagcgctggcagcagcttgatgagctgatcaccccggatatcgccccagaggaggcgattttgctggaatgcatcaccaccctggtgaccaacctgctgtttgcgctggggggcgacagctcgccggacggctgggattatgcggcgatggagcgggcgatcgacgccgaaatcgcggtactgattgccgcctgccagcgctgcccggcccgcgtggtgctggtgaccaacgaggtagggatggggattgtgccggaaaaccgtctggcccgtcatttccgcgatatcgccggacgcgtcaaccagcgcctggcggcggcggcagacgaggtgtggctggtggtgtcgggcattggcgtaaaaatcaaatag

SEQ ID NO: 228180 - DNA, 1524 bp, Klebsiella pneumoniae
atgacgctggcaattatgttacagggcaccgcttctgacgtcggcaaaagcgtgctggtcgcggggctgtgccgcatcttttatcaggacgggcagcgcaccgcgccgtttaaatcgcagaatatggcgctcaattccggtattacgccggatggcaaagagatgggccgcgcgcagattttccaggccgaagcggcggggatcgcgccggacgtgcgcatgaacccggtgctgcttaagccgaccagcgaccgcaaagcgcaggtggtgctgatgggcaaggtggcgaccgatatggacgcggtgagctatcacgaatataaaccgcgcctgcgggaacagatcctcgcggtttataacagcctggccgccgaacatgatgtgctggtgctggaaggggcgggcagtccggcggagatcaatctgcgcgatcgcgatatcgtcaatatgggcatggccgagatggcccagtgcccggtgatcctcgtggcggatatcgatcgcggcggcgtattcgcctctatctacggcacgctcgcgctgctgcacgatcgcgagcgcgcgcgggtcaagggcgtgattatcaataaatttcgcggcgacgtggcgctgctgtattccgggatcgagcagatagaagcgctcaccggcgtcccggtgctcggcgtcatgccgtggctggacgtcgatcttgaagatgaggacggcgtcgcgctgcaaaaagggaaatatctgcgcaccgacaggcgcgatattgagattgtcgtgattcaggtgccgcacatctctaattttaccgatttcaacgcgctggcggcgcagccggacgtccgcgtccgctatgttcgccagccgcaggagctggcgggcgtggatatgattatcctgccgggcagtaaaaatacgctcggcgatctgggctggctgcgcgagagcggcatggcgcatgcggtactgcaggcccggcgtcagggcgtaccggtgctggggatctgcggcggctatcagatgctcggcgaaaccataatcgatgaggtggagtcggggcttggcacccagccggggctgggattgcttaataccgtcacccactttgcgcacagcaaaacgacgacccaggtcacggcgactctggctccggcgctgccggcgtggctggcggcaacggcggggctggcggtaagcggctacgaaattcatatgggcgaaaccgagttgcgcgacggctgtcgttcgctgatgcaattacataaaggcggcctgagcgtggcggacggcgcggtcagcgatgacggcctggcgtttggcacctatctgcacagcctgttcgatagcgatgcctttacccgagcgctggttaacggcctgcgccagcgtaaagggctggcggcgctggatagcgatttcgagtatgcgcagtataaatcgcgccagttcgatctgctggcggacgcgatgcgtcagcatattgatatcgaaaaaatctacaccatcatgcgccaacatcaggagcccgtatgctga

SEQ ID NO: 228181 - DNA, 816 bp, Klebsiella pneumoniae
atgcttgccacgaccgatctctggtttcgctatcaggacgagccggtgctgaaggggctgacgctggatttttcccatcacgccgtgaccggactggtaggggcgaacggctgcggaaaatccacgctgtttatgaacctgagcggtctgctgcgcccgcagagcggggcggtgctatggcagggaaaaccgctggactacagcaagcgcggcctgctggcgctgcgtcagcaggtggcgaccgttttccaggaccctgaccagcagattttctataccgatatcgacagcgatatcgcctttagcctgcggaacctgggggttgcggaagaggaaattgcccgccgggtggacgatgccctgactctcgtcgatgcccaggggtttcgtcaccagccgattcagtgcctgagccacgggcagaaaaagcgcgtggcgatagccggcgcgctggtgctgcaggcgcgctatttactgctcgacgagccgacggcgggtctcgatccttcgggacgcgcgcagatgatcgacatcattaagcgtattgccgatcggggcaaccacgtggcgatctccagccacgatatcgatctgatctatgaaatcagcgatgcggtttacgtcttacgccgcggcgaagtgctggcgcacggcgaacccggggaggtgtttgcccgcagcgaactgatggcccgggccgggctcacccagccgtggctggtgaaactgcacgggcagctcgggctgccgctgtgtaaaaccgaagaagaattttttacgcggatgcgaagcaacgcgatgaaggaggcgtcatga

SEQ ID NO: 228182 - DNA, 678 bp, Klebsiella pneumoniae
atgaccgggtttgagcgactcagctatcagagccgctggtttcacgtcgcgccggagcgcaagttcctgttctggctgctgctgatggtgctggcttttaccctgcctccgctggggcagggtatcgaaatggcgctgattgccgccttaacctgctggctgctgcgggtctcgccgtggcgatggtgccgttggatggcgctgccgtttggcttcctgctgatcggtgtgctgaccattctgtttagcgtcagccgcaatccgcaggatctgctggtgagcctgccgctgggcagcgtctggctgggcatcacatcggaggggctgacgaccgccaatcagaccttctggcgcagcctggcggcgctggcgtccaccttctggctggtgctgaatctgccgttcccgcagcttattgtgctgctcaagcgtgggcgggtgccgcggctgctgaccgagcaaatcctgctaacctggcgttttatttttattctgttagacgaagcgctggcgattcaccgtgcgcaaacattacgttttggctaccgtagcgtgccgaagggctatcgttcgctggcgatgctggtaggactgctgtttacccgggtgatgatccgctaccagcagatgagcaccacgctggatatcaaactgtatcagggtgattttcacctttaa

SEQ ID NO: 228183 - DNA, 282 bp, Klebsiella pneumoniae
atgaaaaagacactgatattgttcgccatggtggtggcgctggtgatcctgccgttctttgtcgatcacggcggtgaattcggcggttcagacggcgaggcggagagccagattcaggtggtcgcgccgcattatgagccgtggttccagccgctgtacgaaccggcgagcggagaaattgagagcctgctgtttacgctccagggctctctcggcgcggcggtcattttctatattctgggctacagcaaaggcagacagcgccgtgatgaccgggtttga

SEQ ID NO: 228184 - DNA, 738 bp, Klebsiella pneumoniae
atgaaacgtgaacaacagctaaaacagctgtctttcagcgggttagctgcggcgctattgctgatagtggttcccgaaaaggctttcgcgatgcacatcatggaggggtttttaccgccgatgtgggccctggcatggtggctgctgtttttaccctgcctgtggtacgggctggtgcgcctgcgccgcattgtgcaggaagataacaatcagaaggtgctgctggcgctgtgcggggcgtttatttttgtcctctcggcgctgaaaattccttccgtaaccggcagctgttcccacccgaccggcgtcggcctggcggtgattctcttcgggcctggcgtggtggcgatccttggcgccatcgtgctgctgttccaggcgctgctgctggcgcacggcgggctgacgaccctcggcgcgaacggcatctcgatggcggtcatcgggccggtggtcggctatatggtgtggaaaatggcctgccgcgcgggcattcgccgcgacgtcggggtgtttctctgcgcgatgctggcggatctggtgacctactttgtcacctccgtacagctcggcgtggccttcccggatcccgccgctggcgcgagcggatcgatcgtcaagtttatggggatcttctgcctgacgcagatcccgatcgccattgctgaagggctgttaaccgtcatgatctacgaccagttgaccaaacgtcagctgattaccgcacaggggcattaa

SEQ ID NO: 228185 - DNA, 714 bp, Klebsiella pneumoniae
atgagcggcaaactatatgccttaagtaccggccctggcgccgccgacctgatcaccgtgcgcgcggcgcgggtgctgggcacgctggacattctctacgcgcccgccggacgtaaaggcggcgacagcctcgcgctctccatcgtgcgcgagtatatcggcgaacggaccgaagtacgctgctgccatttcccgatgagcgccgacagcgcggaaaaagaggcggtgtgggatgaggttgccgccgcgctggttcaggaagtggaagcgggcaagcaggtcggctttattaccctcggcgacgccatgctgttcagcacctgggtattcttacttcagcgtatcggctgcccggagtggctggagattgttcccggcgtcacctcttttgccgccattgccgcacgttcaaaaacgccgctggccatggagcagcaatcgctggcggtgatctcctgcaccgcgccggaaacggaaatcgagcaggcgctgcgccagcatgaaagcctggtgctgatgaaagtgtacgggcggtttccccgcatcaaagcgctgctggcgaaaaacggtctgctggatgccgcgctgatgatgtctgaagccacgctgccgggcgagcagtgctggcgccatctcaatgacgtcagcgacgaccagccgctgccctatttctcgaccattctggtcaataaacagtgggagtatgcagaatga

SEQ ID NO: 228186 - DNA, 795 bp, Klebsiella pneumoniae
atgaaaaaagcgcttctggtggtcagttttggcaccagctatcccgacacctgtgaaaagaatatcgtcgcctgcgagcgcgagctggcggccagctgcccggaccgcgacacctttcgcgccttcacctccgggatgattatccgcaagctcaagcagcgcgacggtatcgagattgatacgccgctgcaggcattgcagaagctggccgagcagggctaccaggatgtggcgattcagtcgctgcacattatcaacggcgatgaatatgaaaagatcgtccgcgaagtgcaaagcctgcgcccgctgttcctccgcctgacgctgggggcgccgctgctgagcagccatcacgattatgtccagctgatgcaggcgctgcgccagcagatgccgccgcttgccgccgatgaaacggtggtctttatgggccacggcgccagccatcacgctttcgccgcctacgcctgtctggatcatatgatgacggcgaagggatttccggcgcgggtcggcgcggtcgagagctatccggaagtcgatattcttatcgatagcctgcgccagcagggggtgaagggcgtacacctgatgccgctgatgctggtggccggcgatcacgccattaacgatatggcctcggacgaagaggactcctggaaaacgctgttcaacgccgccggtatcacggcgacgccctggctgaacgggctgggagagaatccggcggtgcgcgcaatgttcgtcgctcacctgcagcaggcgctgagcctggcaatggaggaggcggcatga

SEQ ID NO: 228187 - DNA, 786 bp, Klebsiella pneumoniae
gtgagccacggcgaggtgctggtgatgggcggaaccagcgacgcgagggcgctgtgtcagcagcttgacgcggcgcaggtcccctacaccctgtcggtggcgacgcccaccggccagcagctggcgggggatattcgcggccaggtgcgctgcgggcgcctcgagctggaggagatgatcgcctggctgaaagctaaccggacccgctgggtgatcgatgcttcgcacccctacgccgaagcggtaagccgcaatatcgtccgggcctgtgaaaccgccggcgtgctgctgagccgctatcagcgcccagagcagctgagcggcctgacgcatccgctgctctataccgtggagagcattgaacaagcctgcgaggtggcgcggcgtttcggccagcgcgtgctgctcaccacgggaagtaaagatctggcgcgctggcgggcgggattaggcgacaaaacgctgctggcccgggtgttgccggtcgccgatgtcatcgcccaatgcgccgggctggggttcggcgttggcgagattttcgccctgtgcgggccgttcagcgccgaattcaacgccgctttctaccgccagtgccgggccgacgtggtgatcaccaaagcctccggcgccgaaggcggctatcaggaaaaagtacaaccctgtctggatgccggtatcccctgcatcgtgattacgcgcccggcgccgctggtgacgggtgaagagttactggaaagtcaggctgcctttgcccggcgcttagcgcgctggctggccgctgcttaa

SEQ ID NO: 228188 - DNA, 726 bp, Klebsiella pneumoniae
atgttaagcgtaatcggaatcggccctggctcgcagtccatgatgaccatggaggccattgaagcgctgcaggcggcggaaatcgtcgttggctataagacctacacgcacctggtgaaagcctttaccggcgataagcaggtgatcaaaaccgggatgtgcaaagagattgagcgctgccaggcggcgattgagctggcgcaggccgggcataacgtggcgctgatcagcagcggcgatgccggtatttacggcatggccggactggtgcttgaactggtcagcaagcagaagctggatgtggaagtccgcctgatcccggggatgaccgccagcatcgccgccgcctcgctgctgggtgcgccgctgatgcacgacttctgccatatcagcctcagcgacctgctgaccccgtggccggtgattgaaaagcgcattgtcgccgccggggaagccgacttcgtgatctgtttttacaacccgcgcagccgcggccgcgagggccatctggcgcgcgcctttgagctgctgtcggccagtaaaagcgcgcagaccccggtgggagtcgtgaaatccgccggacgtaaaaaacaggagaaatggctgaccaccctgggggagatggattttgcaccggtcgatatgaccagcctggtgatcgtcggcaacaaagcgacgtatatccaggatggcctgatgatcacgccgagaggctacgtgctgtga

SEQ ID NO: 228189 - DNA, 1056 bp, Klebsiella pneumoniae
atgaataccgtaaagcctgaatcaatcgcgcttttctgcctgacgccagggggcattcggctggcgaaacggctggcggcgatgctgccgttaacctgttttaccagcgagaagctgctggaagaggggtttctcccctttgaaaacggttttgccagcgccgcgcgcgaggccttcagcagctattcggcgctgattttcatcggcgccaccgggatcgcggtacgcgtgctggccccgctggtcaatgataagttcagcgatccggccgtggtggtgatcgacgaacgcggccagcacgtcattagcctgctttccggccatgcggggggcgcgaatgccctcagccgctatctggccgggatgctcggcgccgacccggtgatcaccaccgccaccgacgtcaacgagttggcggctctggatacgctggcattccagcttaatgcccggatgagcgacttccgcgcggcggtgaaaaccgtcaaccagatgctggtcagccatcaccgcgtcggcctgtggtgggacgacgagctggatgaagacgtccgccactgcgaccggcgggggtttatcaccgtggccgatctgcaccagcttcccgagctggatgcgctggtctgcgtcacgctgcgcaacgaactgccgccgatcgccgtcccgcactggaagctggtgccgcagcgggtggtcgccggcattggctgccgccgcgatacgccattcccgctattagcggcgctgctggcgcgccagcttgaggcgcagcgcctggatccgctggcgctgaaagctatcggcagcgtcacgttgaagcagcacgagcaggggctgattcagctggcttcctgctgtcgcgtaccgttcgaaacctttcccgctgatgccctgcgcgagcatgagcatcactttcccgcttcatcgttcgtcagaaaaaccgtcggcgtggggagcgtatccggtccggcggcctggctgctgagccatgggcaactgttaggcgaaaccctgcgcgaacagggcgtcactattactttgggagtttcacactga

SEQ ID NO: 228190 - DNA, 774 bp, Klebsiella pneumoniae
atggctgagacatttgacccccgttgtgtgtggttcgttggcgcagggccgggcgaccgtgagctgattaccctcaagggctaccgcttgctgcagcaggcccaggtggtgatctacgccgggtcgctgataaacaccgcgctgctggagtactgcccgcctggggcggagtgtcacgacagcgccgaactgcatctggagcaaattctcgacctgatggaagccggcgttaaagccgggaaaacggtggtgcgtttacagaccggggacgtgtcgctgtacggctcggtccgcgagcagggcgaagagctcaccaaacgcggtatcgactggcaggtggtgccgggcgtcagcgcgtttctgggcgcggcggcggagctgggcgtcgagtacaccgtgccggaagtctcccagagcctgatcatcacccgccttgaagggcgcacgccggtaccggcgcgcgagcagcttgaatcatttgccagccaccagacttcaatggcgatttacctttccgtgcagcgcattcaccgggtagcggagcgcctgattgaaggcggctatccggcaaccacgccggtggcggtgatctataaagcgacctggccggaaagccagaccgtacgcggtacgctggcggatatcggcgacaaggtacgcgaggcggggatccgcaaaacggcgctcattctggtcgggaatttcctgggcgctgagtatcactactcaaaactctacgcggcggactttagccatgaataccgtaaagcctga

SEQ ID NO: 228191 - DNA, 1140 bp, Klebsiella pneumoniae
atgagcgagcaatccttcgacgccccggtgtggcacaacggcaaggcgctgcgcaaaggctataccaccggatcctgcgccacagcggcggcaaaggtcgcggcgctgatggtgatgcgccagcacctcattcatcaggtctccattgtgactccttccggcgtcaccctgtgccttaacgtcgaatcgccgcacgtcgaagggcagcaggcgatcgccgcgattcgtaaagacggcggcgatgacgttgacgccacccacggcatgctgattttcgctcgcgtgacgctcgacgattccggcgagataaccctgcgcggcggcgaaggtatcggcacggtcacccgcaaagggatcggcctgcccatcggcagcccggcgattaaccgcaccccgcgccacacaatcgagtcggcggtgcgcgaagcgataggcccgtcgcgcggagcgacggtagagattttcgccccggaaggcgaggcgcgggcgcagaaaacctataactcgcggctcgggatcctgggcggcatctcgattatcggcaccaccggtatcgtgacgccgatgtcggaagagagctggaagcgttcgctgtcgctggagctggaaattaagcgcgcggcggggctggagcgggtggtgctggtgccgggcaaccacggtgaacgcttcgtacgcgagcagatgggcatcgactcgcaggtggtggtcaccatgagcaacttcgtcggctacatgattgaagaggccgtccgcctcgggttccgtcagattgtgctgattggccatcccggcaagctgattaaagtcgccgccgggatcttccatacccacagccatatcgccgatgcgcgcatggaaacgctggtcgcgcatctggcgcttttgggggcgccgctggcgctgctgcaactggtgagcgaatgcgataccaccgaagcggcgatggagcacattgatgcgtacggttttcagactatctataaccatcttgccgaacgcatctgcctgcgggtgatgcagatgctgcgctttaccaaaacgccgcccgtctgcgacgccatcatgttctcctttgataacaaggtcctcggcagtaatcgcccgatcgccgagattgcgcgggagatgtcatgttaa

SEQ ID NO: 228192 - DNA, 633 bp, Klebsiella pneumoniae
atgcactatatccagcaaccgcaggcgattgaggcgaaaagcttcgacattataggcgacattattgcgcagacccgcccggactaccgctttgccagcccgctacacgaagccattatcaagcgggtgatccacaccaccgccgattttgactggctggatatcctgtggttttcacccgacgtgcttcctcgcttaagcgccgccctgagccagccctgcacgctttataccgataccaccatggccctgtccgggatcaataaaaccctgctggcgaaattcggcggcgagtgccgctgctatatcagcgatccgcgggtggtggcggaggccaaagcgcaggggatgacccgctcgatggcggcggtcgatattgcggttgccgaagagggcgagaaggtgtttgttttcggcaatgcgcccaccgcgctgtttcgtctgctggagcatgatgtcgcggtcaacggcgtgattggcgtgccggtcggtttcgtcggcgcggcggagtcgaaagaggccctgacgcagagcggcctgccgggcattgccgcgctgggtcgtaaaggcggcagcaacgtcgccgccgctatcgtcaacgccattttataccacttacagggggcgagatga

SEQ ID NO: 228193 - DNA, 960 bp, Klebsiella pneumoniae
atgacgctgctggcatggggcgttgcctggctcctcgattttatcatcggcgatccgcagagctggccgcatccggtgcgctggattggcagcctgatcgccgccgttcagcgcggtgtgcgccgctattgccgcagcgatgtcgccctgcgcgtcggcggcggggtgatgtggctggtggtggtcgggctaacgtggagcatctgctggggcctgctgacgctggcacagaggattcatccgtggcttggctggctggttgaggtctggatgattttcaccgtgctggccggacgctgcctggcgcagtcggcgcgggacgttgagcgtccgctgcgcgcgggggatctggcggaaagccgcgtcaaactctcatggattgtcgggcgcgacacgacgcagcttgcgccgcagcagattaatcgcgcggtggtggaaaccgtcgcggagaacaccgttgacgggattatcgcgccgctcttcttcctgctgctcggcggcgcgccgctggcgatggcctataaagcggtcaacaccctggattcgatggtcggctataagcacgaaaaataccgcgccatcggcatggtcagcgcccgcctcgatgatgtcgccaactttatccccgctcgcctgagctggctgcttatcagcctcgccgctctcctctgcggtgaagcggggggccgcgcgctgcgcatcggctggcgtgaccgctacaaccacagcagcccgaactgcggatggtcggaggccaccgtcgccggggcgctcggcatccggcttggcggccctaacgattactttggacagcgcgtggagaagccgtggattggcgaggcgacgcgcgacgtttccgtagacgatatttcccgaacgattcgactgatgtgggtgtcttcgaccctggcgctggcgctgtttatggcgatccggttctggctggtcggcgcagcctga

SEQ ID NO: 228194 - DNA, 1380 bp, Klebsiella pneumoniae
atggcagccaggcagcacgcatttattctcgcaggaaccggcagcggttgtggtaaaactacggtcacgcttggcctgctcagcctgttgaagcagcgcggcatgcgggttcagccctgcaaagtcggcccggactacctcgacaccggctggcacaccgccatcagcggcgtcgcttcccgcaacctcgacagctttatgctcccggagccggtgcttaacgcgctattttgcgaacagatgcagcgggcggatatcgcggtcattgagggcgtgatggggctgtatgacggcttcggtaccgaccctggctactgcagcaccgccgcgatggctaaacagctcggctgtccggtcattttgctggtagatggcaaagcggtttccacctccatcgccgccacggtgatgggatttcaacacttcgaccccagccttaacattgccggcgttatcgtcaatcgcgtcaacagcgaaagccattatcagcttctcaaaggcgccattgaacgctattgcgggctgccggtgctcggctacgtaccgcgagtggaaggggtggcgttacccgaacgccatctggggctggttaccgcccgcgagtcgctggttaaccagcagccgtggcgcgattttgcccaaacgctggcgcaaacgctggatattgaacagcttcttaccctcagccagctctccatcctgcccgccggggagtggccggcgctgccgtctcctgatgctggcgcgggcctgacgctggcgctggccgacgacgaggccttcaacttttactacccggataacctctcgctgcttgaacgctgcggagtgaatatcgtgcgcttcagcccgctgcacgatagcgagctgccaccgtgccagatgatttggctcggcggcggctatccggaaattcatgctgccgcgctggcggccaatacaccgatgctggcgcagctgcgggaggcgcaccggcgcggggtggcgatttacgctgaatgcggcggtctgatgtacctcggcagctccctggaagacgccagcggcgacatctacccgatggccaacctgatccccggccacagcaagatgggtaaacggcttacccgctttggctactgcgaggcgcgggcgatgcggcaaacgctgctggcggcgcccggcgaaaccctgcgcggacatgaatttcactactcggattttactcccgagtccccggcggttctggcctgccgcaaggtccgcgacggtatgacccttcagcagtggtccggcggctggcaggtgggcaacacgttcgccagctatctgcacctgcactttgcgcagcgccccaccatgcttaaccactggctggctgcggcaaggagcgcgctatga

SEQ ID NO: 228195 - DNA, 285 bp, Klebsiella pneumoniae
atgcaacaagaagcactaggaatggtagaaaccaaaggcttaaccgcagccatagaggccgctgatgcaatggttaagtcagccaatgtgatgttagtgggctatgaaaagattggctccgggctggtaaccgtcatcgtgcgcggcgacgttggcgcagtaaaagcggccaccgatgcgggcgccgccgccgcacgtaacgtgggtgaagtgaaagccgtacacgtcatcccacgccctcacaccgatgtagaaaaaatcttaccgaagggaattagccaatga

SEQ ID NO: 228196 - DNA, 813 bp, Klebsiella pneumoniae
atgagcagcaatgagctggttgaacagatcatggctcaggtgattgcccgcgtggcaacgccggaacagcaggccatccctactgaaaaccatccaatacgagagacggctatggcagaaaaaagctgcagtttaacggaatttgtcgggaccgctattggcgacaccctgggtctggttatcgccaacgtcgataccgccctgctggacgcgatgaagcttgaaaagcgctatcgctccatcggcattctcggcgcccgcaccggcgcaggcccgcacattatggcggcggacgaagcggtgaaagccaccaacaccgaagtggtcagcattgagcttccgcgcgataccaaaggcggcgcaggccacggttcgctgattattttaggcggcaacgacgtttccgacgttaagcgcgggattgaagttgcgctgaaagagctcgaccgcaccttcggcgatgtttacggcaatgaagccggacatatcgagctgcagtacaccgcccgcgccagctacgccctggaaaaagccttcggcgcgccgattggccgcgcctgcggcattatcgtcggcgcaccggcctccgtgggcgtgctgatggccgataccgccctgaagtcagccaacgtagaagtcgtggcgtatagctctccggcgcacggcaccagcttcagtaacgaagccatcctggtgatttccggcgactccggcgcggtccgccaggcagtcacctccgcgcgcgaaatcggtaaaaccgtccttgcgaccctcggttctgaaccgaaaaacgatcgcccgtcctacatctga

SEQ ID NO: 228197 - DNA, 174 bp, Klebsiella pneumoniae
atggtaacgttaacaaaaaacaaagcgcagggggattcgctgcgttacatgatgttaatcacaaaagttaacgttaacataatgaagatgcgatcgcgatcaaatattaaccgcggcagcgtggaggacgaggctagcataaaatcgtttcacgcttttacatcagcgacttag

SEQ ID NO: 228198 - DNA, 594 bp, Klebsiella pneumoniae
atgcaaaaagtcgtcctcgctaccggcaacgccggtaaagtgcgcgaactggcctcgctgctggaagattttggtctcgatatcgtcgctcagaccgagctgggcgtcgagtctgcggaagagaccggcctgacctttattgaaaatgcgattctgaaggcgcgtcatgcggcgcagatcaccggcctgccggctatcgccgacgattccggtctggccgtcgatgccctgggcggcgcgccgggcatctactccgcccgctatgccggcgtcgacgccagcgaccagcagaaccttgagaaactgctcgacgccctgcaggacgtgccggacgaccagcgccaggcgcaattccactgcgtactggtctatctgcgccatgccgaggatcccacgccgctggtgtgccacggcagctggcctggggtgatcgcccggaaagccgcgggtcagggcggtttcggctacgatccgatcttcttcgtcccgtcagaaggaaaaaccgcggccgaactgagccgtgaagaaaagagcgccatttcccatcgcgggcaggcgctgaaactgttactggaagcattacgtaatggctaa

SEQ ID NO: 228199 - DNA, 1008 bp, Klebsiella pneumoniae
atgaaagaggcatggaaaacgctcaccgtcctgatgatcgcttccccttgttacgtgctggcggatgccaacacgccaacagacgacgtggtgaaaaagcagtttgctgaacagactggcgggattatgcgcttgcaaagtgtgacgctaaagcagctcgacgcccggggaaatcaggcgacctatatgctggaaggcgatatggccgccgcggaagatctctatatttgcgtcggcgtcgcgggagattactttttttatgagcgagtctggaccagggggcggccggtaaagttctccgccatgatgaccgcggtagggaccaaagactccggctggcagaccgaattcttttcgctgcaaatggcggcgaagaggggcgggagaaccttgaaggaaatcggaggggatgaaagtaaaaacctgatcgttaatgaccacaaatttatggcgcaatttgccaaaattaacgccagctttgccgccagcaaagccacgatgaagacgttgcaagggcaacaggatgcgctgaaaaccgagatcgccgcgttagaggagcagattaaccgttcatggggtacggatgcgaacggcaagacgctcgatcgcagcgacgtgcagcaggcgatgctggaaaaaatgtatgaagtagatcggcaaaacgatccgctgaaattcgagaatcattactacaaaactatctatgaacccgccctgaccgcctgtcagaaaaaagcggtttgcgatgccgggccgctgcgcgccgagcgcgatgctgtgctgaatgagcagaagcgtaactattatcgccagcataaagagatgagtgaaaatatcaaagcggagatggccgcgcgcgataaaaagatagcgccgctgcagaagcaaaaaggcgaactgagcgcgcagctgatggcgctggagatacgctatcgggatttggctcgcgacgaaaaatactggcaggaggggctggagaagatgcgccgcgacggggtccttaagtag

SEQ ID NO: 228200 - DNA, 717 bp, Klebsiella pneumoniae
atgcgtaaaacgctgctggcggtggcgctctccgtcaccgctttgtctgcccatgcagactaccagtgtagcgtcacgccgcgtgacgatgtgatcctcaccccgcagcaggtccaggtgaaaggggaaaatggcaatctggtgatcaaaccggacggtaacctgacctttaacggcaaggcctatgccctcagcgccgcccagcgcgagcaggcccaggattatcaggccggtctgcgcagcagcctgccgtggattgacgaaggcgcgcgttcgcgagtcgaaaaaggccgcaaggcgctggataaaatcattaccgaacaggtcggcgccgacagcagtatgcacggtcgtctgactaagctggacgcgcagctgaaagaacagatgaaccgcattattgagcgccgcagcgatggcctgaccttccactataaagccatcgaccaggtgcgcgccgacggccagcagctggtgaatcaggcgatgggcggcattctgcaggacagcattaacgagatgggggcgaaagcggtgctcaaaggcggcggcaacccgctgcagggcattctcggcagcctcggcggtctgcaaaccgcgattcaggacgagtggaaaaaccaggaggccgatttccagcagtttggtaaagacgtctgcagccgagtggtctcccttgaggacagccgcaaagcgctggtgggctcgttaaagtaa

SEQ ID NO: 228201 - DNA, 813 bp, Klebsiella pneumoniae
atgtcagatttagttaatcactcaatgttcattgagggaagcgttattgctcattaccttattctcggggtgatcctgctggttattgcctcatttatcgcgggctatattgatgcgattgcgggcggtgctggactcgtgttaattccagcctttatcctgacagggctaccacctcagcttgcgctgggacaggaaaaactggtcagtactataggcaccatcgctgccattaagaactttgttaaaaataagtctgttatctggcgcgttatccctgcgggattaatttctgccctggcgggagcctatgtgggcgcgaaggtgatattacttttgcctgtggagaccttatcgatcgtcattgtggtgctattacccgttggtttactcgcagcaacgattaagggaaaaattaaagagtccgcagacgactctgccaggactaactttctggcaatctttgtagtgtgttttatcgtgggtttttatgatggtttttttggccctgggaccggtagccttttcatcattgcattaacggttattaataagtttggactgctgcaggcatccgcgaccagcaaaatctttaattttgcatccaatataggggcgtttgttgcctttgcgattgccggtaagatggcctatttaatcggcattccgatgattattgccagcctggctggtaatcacattggcagtctgcatgccattaaaaccaatggtgaaattatccgcaaagttctctttgtcaccgtgggtgcgatgatggtgacgctttcagtaaaatattttacaggagtgtga

SEQ ID NO: 228202 - DNA, 921 bp, Klebsiella pneumoniae
atgtttatgaagaatggaattattctatcaatcgccgaccgtatcaaagatgcgcttcccataccaacagacgaattcaggaaaaggcttgaagaggactgttatgtaatatggaaattgccacactttgatgcacaagaaatcactcaaacccccgttgttccctcttatgctgattatgtcgagtcaaaaaatgcagcgttacatggcgcttatctttctgcacattttcaggccggcctatggcccgtcgtctatcagggcgaaaataacggacatcttataaggcatgtctgcccgatgctccaggcagaagagaaaataagttctcagggggctaagtatgacttttacccgcatgtcgataatcccgatctgtacattaccggcgagacgccgtctaacagacttggcggctgtcctgacactctgagtttgttgtgtctcaggaaagaggaaggcgttcacaccagtctgttaaaactggatcagattctgaaggggctttctgataaggatatcgctattcttgccagccctgccttcaggattaaacggccagccagctttacagagggatccagtattgagaaggtgccgattattgtgagcgacaacggtgtctggtattcacgatttgactggcacaatactcaaggtatgactctcgaagccgaagccgcgctggaaaaaatgcgatttatcaccctggaacatgacctgtggttcaatgttccgctggagccaggctatgcagtgacttttttaaaccaaagaacaatgcataccagaaatgcttttgaacctcgttttgatggcacggacaggtggttattgcgggtttttgctatgaaacacagaccaactgatacgcagcttgtcgattcttcactttgtctccaccacctgcgcacactataa

SEQ ID NO: 228203 - DNA, 354 bp, Klebsiella pneumoniae
atgtcgctttcaccgccgggcgtacgcctgttttacgatccgcgcgggcaccatgcctgcgccatcaatgagctgtgctgggggctggaggagcagggggtcccctgccagaccgtatcctgcgacgaaggcggtgacgccgatacgctgagcgccctggcggccagaagctcgacgctgcgggtgggcattgggctcagcgcagccggcgagatcgcgctaacccatgcccagctgccggcggacgcgccgctggcgaccgggcacgtcaccgatagccgcgatcatctgcgtacgctcggcgccaacgccgggcagctggtgaaagtcctgccgttaagtgagagaagctga

SEQ ID NO: 228204 - DNA, 999 bp, Klebsiella pneumoniae
atgaagctgaagcttaactgggaaagcgcgctgctggcgttgttagtcgtggaaatcctgctgttcggcgcgctgaatccgcgcatgctggatctcaatatgctgctctttagcaccagcgactttatctgcatcggcatcgtcgcgctgccgctgacgctggtgatcatcagcggcgggatcgatatttcgctgggctcgaccatcggcctgtgcgccatcgccctcggggtgatgacccaggcgggctggccgctgtggctggcggtgtcgctgacgttgctgctggggctgctgtgcgggttaatcaacgccgcgctgatccactacaccggcatcagcccgctggtgatcaccctcgggacgctgtatctgtacggcggcggcgcgctgctgctttccggcatggccggcgccaccggctatgaagggattggcggctttcccgacagcttcaccgccttcgccaatttaaccctgggcgggctgccgctgccgctggtgctgttcgcggtcatcacctttctcttctggctgctggcccatcgcgggcgctttggccgccatctttttttactcgggcaaaactcgcgcgccgcccgctatgccgcgctgtcggtcaacggcatcccatatgtgctgtatggcctggtgggcgtggcgtcggcagtggcggcgctggtgatggtctcctattttggctcggcgcgttcggatttaggccgtgatctgctgatgccggcgctgaccgcggcggtgctcggcggggccaatatttacggcggctcgggatcgatactgggtaccgcgctggcggcattgctggtggggtatctgcaacagggtttacagatggtcggcatccccaaccaggtgtcgagcgcgctgtcaggggcgctgttggtggtggtggtgatggggcgttcgctgagcctgcaccgtgaatgggtgcgcacgacctggcggcgtcttttctcgcgtaaaacaatcggagcataa

SEQ ID NO: 228205 - DNA, 408 bp, Klebsiella pneumoniae
atgacaaaagtatcacgagctatattattgaccgccgccgttgcaggtttttcgctggcggcgcaggccgcggaagtgactgcgccagcacccgctaaggaccctatcgtccagcacttaaaactgactcccgatcaggtgagcaaaattaacagcctgcatcagcaaatggaaaaaaacgttgagcagatttcacagcaagacattaaagatggcgcgctgattaacgtgattgattccggtaaatggaatgagaaagcggtgaaggatcagttggaggcattcagtaaaattgatcaacaggtacgttattatcgcgtgaagtactattttgatgtgaaccaggtactgacgccggagcagcgcacccaggtgaaaaaagatcttgccgacgcgctgagtgaataa

SEQ ID NO: 228206 - DNA, 864 bp, Klebsiella pneumoniae
gtgaaaaatgtagtattattcccgcagctcaaatcggcaatagcctggcttatcggtcatggtgaaacaattatgcagtttgcctggaatatcgtggcagcgctgattattctttttgtcgggcgaatgcttgcaaaagtccttgctaaagccttcgagaaaattctcttacgacgcaacgtcgatgcgacaatcgttcatttctttgctgcgctcgttcgttatattacgatggcttttgcgataatcgccgcattaggtcgggtagggattgagacgtcttccatcatcgcggttattggcgcggcagggctggcaattggtctggcgctgcaaggttcgctttctaactttgccgctggtgttctgttagtcactttacgtccttttcgggccggcaattttgtacaggtcggcgcgatttctggtatggtgcagtccgtacatgttttttcaacaacgctactaaccgttgataataaagaagttattattcctaatggtaaagtcatcgccgacagtattgtgaattattcctgccatccttttcggcgaatcgatctgaccctcggcgtggccagcgagactaaaattgtgcaggttaagcaggtcattcaggctatcattgatagtgaaaagcgaatcgatcaatctcgtggtactacggttcgtctgcttgaaatgatgccgggcacacttaacttcactgttcgtgtctgggtgaaaaatagcgaatattgggagacttattttgattttcttgaagcgattaaagaagcgctcgatgaacatcagatcaccctcgccgcgcaacggatggatattaatttaacctcctcgacgttatcggacctaaaaaaataa

SEQ ID NO: 228207 - DNA, 549 bp, Klebsiella pneumoniae
atgccttatccggcctacacagttctcccgtcgtttcgccccacccaggaccggcaagcgcagcgccgccgggcaggatatcaggcacggcaccagtattcttgccgggtggcggctgcgccttacccggcctacggttcgtgctgtgcccgccatgatgccgagcggcctgttgttgatatacccacttgcgcgactgaaactgccggtgctggcggcctcaaaatcgctgagacgttcccggaaggccggggcagcccgcatggatgcgggctgagggccgtgttttgcatggacgctgcctcggcccgacccgaagcctgcagggataagtcgaaggtaccgcgtagcggcgattttgctggccggagcccgggggtacagggggcggcggcgactggccgccccctgtgcgctccctgcgccataagagacatagcgcagaggaaatatcgggagcgcaatctgcccggacataacacgggagtggtagccctgctaagcgtagcgcgagcagggaaatttacggttgtgccgttatttctgtag

SEQ ID NO: 228208 - DNA, 183 bp, Klebsiella pneumoniae
atgcgggtgatcagtggcatcgataagggtagcctggactgggagagatgcgagggggaaagcggcatcaggtacggcgtaagcgagcgagtcgccggagccgcaatttataaggctggtttatcatttaagcggctaagccgtataaatatttacgaaaattattgttttttagtgatgtaa

SEQ ID NO: 228209 - DNA, 699 bp, Klebsiella pneumoniae
atgtcgaaacctgacgccaacggccagaattcccggtcattaccctcttttttttatggacgacgaacaaaaccgttacctgcggtggaatccttattatccgcgttccggcctgtcagcaccccttttgaactggcgcagtcaaactattaccattttcccttggcccaaagcgaatccggcttcattctcctcgaagaaggcgtggcttcagtttgctttgcggaaaatcaactggtgatatcgacggtcctcgccccggctatattgggattaattgataattatggcgtgtttaacggactcccggatatacgccacagttctctgtttgctgagacggatttaagcgggcgctggatagcgcatcaggctgcggtcaatatcctgaatgagaaaaacctgtggcaggagatggcccatatcctgacgcagcggttgatggtgttgagcatgcgcgagcgggagctgctgggggtggactcttaccagatggtgcgcatcctgttaatggagctggcggtctattcggagacgtaccgtagacagatcaatgtattaaggtttatccagcggcgtaccaacctgtcgcgtagccgcattatgtcgattctgtcggagctgcgcaaaggcggttatattattatccaccgcggggtgttgatgactatcgcccaaccgcttcccgccaatttttga

SEQ ID NO: 228210 - DNA, 141 bp, Klebsiella pneumoniae
atgggcacaattcccttggcggcaccacagatgggtaccggttacattttttatcagcctttgccgcaggaagatgaattaggtcattatcagaatatgtttcatgtattttgcgatcgcgttagcctgaaaagagtatga

SEQ ID NO: 228211 - DNA, 195 bp, Klebsiella pneumoniae
atgaaagatcctgttttgtccgtcaaagagaaaaatggctacggcatcatgggcgacggcgccaccctccccattattctcgccttgttcaccctcatttcggcggagagggtttttttattccatttttgtacaaaaagtaacattcatttcagtctggtgactcaggccgcagacgctattcctgaacggtga

SEQ ID NO: 228212 - DNA, 1701 bp, Klebsiella pneumoniae
atggacactatctttgataaagtcattagagaatttttcccaaatacaaatatacccttttggaaaaaatggcttttcaggtccgctttcggcaataagaaatttactcgtataatatataacgatcggttagttaatcaaagtggagtcgaatgggttaattcggtcgtcgatctccttgaattgcaatgtgcaaccgaacaacatcaatttaataacatacccgaaaatggggcagcggttgttatttcaaatcatccaactgtcatcgatggtcttgctttaatacatacggtctcccgggtgaggaaagatataaaaataattgccaaccacattttgccaattatatttccacaggtggcagaactgaccattggtattgaaaatatggccggtaagatgagccataaaaaatttagagagatgaacaatcatctgcgagagggaggcgtattaattatatgtccagcgggtaaactggctaactggtctctttcaggtttacaggagcataagtggaaccccggttttttacagctggcgatgagaaataatgcggcgctggtgcctattcatattacgggtaaaaacagtaacgtttattatcttactgcaacgatctggcggcaactgtcaaatataatggttattcgtgaagctctccgccatcgtggaaagaccatgggaatcaatatcggacagcaaataaccttatcttcattgcaaaaatacaatgaagatctttctgcagcagctaatgtatgtttgatgcacctccagagcatagggaagaatggagcagctcttgtcgatacgatttcgccacaaggactaaaagaagatagagaggatttaataagtgcgatagatgagtgcgaaatattaagacagtttgatgatggaagaaaattattgatttatcgctgcaatactggccgtttctcaccaattattgatgagttaggacgcttacgcgaacgctgttatcgcgatattggttcagggtccggtaaagatagagataatgatatttttgatgaaagttattatcacattttattgtgggatcctgctgaaacagaaattctgggggcgtaccgtctcgttcctgttggcgagcaactcgcccgccatggaatagctggcctctatagtaatagcttatttaaatatcatgatagcgcctatttgtgcttagagcagtgtgtagaaataggtcgtggctttatccagaaaccttatcaaaaaggtaatgttcttgattatttatggcaaggtatattcgattttataaaaagataccccaactataaatatttattaggtgtgttgactatcccaggatcttttcctgaagaggtacagaaactgattgtgagtttttataatatgtactttcccaccacgactgatttttgtacaccaatagccctgttcacggtagaaactacacaaagcgatagtccttttagtggaaacgattttagcgaagactggagtatgttaaatcatcttctgagagaaaaaggttataagctgccctggccttttaaacagactgctaaatggttctctccaggtgggtcgtcgattatttcatttactaaagatgaggcttttaactcgatagctgggttaaatctgagcgctattgataaattgaatgaagtatacgttaaacattatttaaaagactga

SEQ ID NO: 228213 - DNA, 213 bp, Klebsiella pneumoniae
atgcatgaacaccataagcgtagcctcttacttgttgaaaatcaacacggtaggcgaggagtgccgcgaaactatctgttgtttggcttaatagtgatttgcttcactgttttattattgacctggatggttcgtgattcgctatgtgaattacagctcaggcagggaaatattgagctggtggcattcttagcctgtgatagtaaacagtaa

SEQ ID NO: 228214 - DNA, 1194 bp, Klebsiella pneumoniae
atgtgtatagttgattccagcctgtttgccgaaaaggaacccgacatgttgaccccttttaccgttttgatgcctgaaaatattcgttttggccgcggtcaggcccagagcgccgccccctggctggcgcagcagggcggtccagttctgctggtgcatggcgccagcccgcagcgggcggcgtttctccgccatcagctggaggcgctgcagctggcggtcacgacgctggcgataagccgcgaaccctggcttatcgatattgagcagggcgtccagctggcgcgcgagaaagggatcagggcagtggttagcctcggcggcggcgcggtgattgacgccggtaaagcgattgcggcgctggcgcccgccaccggcccgctggtcgactatctggaagtcgtgggaaccggccgtcagctggaagccagcccgctgccgttcgtggcgatccccaccaccgcgggcacaggcgcggaagtcactaaaaatgcggtgatcaacgtcgtggaacagcagcggaaagtgagcctgcgcgacgaccggatgctgcctgacctggccattgtcgacccggcgctaaccgacaacgcgccgcgcagcatcaccctgagctccggcctcgacgccctgacccaggtgatcgagccctggctctgcagccgggccacccctttcaccgacgccctctgtcagcaggcgatcccgcgcggcatccgcgcgctgaaggttctgatggaaaaagagtgcccggccagccgcgacgagatggcctgggtcagcctgtgcggcggagtggcgctggcgaacgccgggctgggggtgatccacggcctcgccggcccgctgggcggcctgagccgcgcctcgcacggcgccttatgcggcagcctgctgccgtttgggctggcgctgaatgagtcgcagataaacgaccccgccctgcgccagcgcttcaacgacgttcgccgctggctggccgaggggctggaggtcccggcggatcgggtctgggacagcctgcgggaatggagccatcgcgccggtctcggcaccctgcgcgacctcggcgtggcgcgcgacgccctggagccggcggcgctggccgccagcacctcctcgtcgatgaaggctaatccggtcagcctgagcagcgaacagctgctggagatgctggaggcggcgtgggagtga

SEQ ID NO: 228215 - DNA, 993 bp, Klebsiella pneumoniae
atgcgcgagaagcaggtcagcggcatggtggtggcaattattcatcataacggcccggcggagtttcactgcttcggcgtgaccgatgaccaacatcgctacccgataaccccgcatacgctgtttgccctcggctcgctgagcaaaggggttaccgccgaagtggtcacgatgctggtgaacgaaggccgtttccactggcacgacacgctgcagaccctgctgccgccgggtaccgcgctgagtgaggatgcccgtaagataaccttgctgcagctggtgacgcatacctcagggctgccgcggcaaccgatgaatatgctgtcgcttgagcacctgctggcctatctcaacgatggcgaaaacttctaccatgagctcgatgccgatggcgtactgagttatctgcagcatttccaggccccggcggaaccggcgccgagttactccaacctcggctacgcgatcctcggctatcttctccagtaccagactggcgaatcgattgagacgctggcctcgcggatgatcttccgcccgctggcgatggggaacaccagcttcctgccgcaaacgctgcgtgattatccgcggcgggcgctgggccatgctggcgatcagccgaagtttaaaccccgcggcgcgctgacgccggactggcagttccgtcataacatggtcggcgcggcgagtttgtacagcgacgccggggatctgattcactatgcccgcgcccacttcgcgcccaccggtcaggcggcgctggaccaggcgttccgcgacgttagcgtcgactattatccgcgacggattgaagcggcgaatatcgcctgggtaacagacacgttcggcgagcagcaattaacctatcaggtggggtacatcggcggctattcgagctatatcggttttgataaagcgaatcagaattgtagcgcggcgtttttttttgcatcaaaaagcaataataaatgcattaagcgagaggtgtag

SEQ ID NO: 228216 - DNA, 2694 bp, Klebsiella pneumoniae
atggcttctttagatgacaaggctctttttgaagaaatttttcgccttgagaatgatacccccgcagaggcgatagggcctgaaggtgatatttcatttgcaaatttacaagctcagcaacttgcaaaccgaactcgctggcttaggactcaactagtatcaattagtgacttcagggagtatacgtttttcaaaaccgctgaagatcctgacggaaccattgccggacgagccaatacccctgacggtaaattatttagggtttcacaaggcgacggtgatgagcttgcttttaaatattatttacacaaagatggcattgcagttccagataccgctttaattggtattggttcaatcaaaaacacaatccgtgagttccctacactggcagcggcccaggcagatgctgaagctggcaatataccgaatggctcaactgcttactaccgcaaccctgatgatggtcctcttgctattgaagttatcaataacgctggaacactcgtgcctactggccgaaaaatgccatctcagcagtcagtagaacatgctcagtttacagctgacctcgcagtgacgtcagttatcagcggtcttaacgtgttgtttgatcccctgtgtgagattctgttatctaacccgacaattggtggtaaaactcacgttccgctcgggacattaacagcggcgctatcaactaactcaaagcttggatttccggctatcattgccggcccggctgcgggggcgatttctgcacgtactgtctggctatctgattgcgctgttgcagtcggggatgttgttaccattaaggttatggcatggtatgccaatgcaggtggcagggttgcgtttgttttccgtgactcatctggtacgcagatcggaacacagcaactacaatatgctactgccactgggattaataaatttactattgcgcttactgtaccaacgaatgctgtgcgcattgatattcgggtggagaatactgctaatgccgggctcattgagctggctgctgtatttgtcatgacggctcaatcagttgcgaacccgtccgttccggggcgcccggtgtcgccatatccgatcccgcttggtagtaatgtagtcacaacggcagctcttcagaagcaggcagtaacgattgataaagcggcattttttattccaggaaaaaacctgtttgataaaagcgccgttacgaccggttattatgtaaataactcaacgggtaatttgattgcaaacgcatcgtactcggcatcagattatatgcctgttatcgcagggcagaattacactcaaagctactcgcatcagaccgctttttacgatgcaaataaggtttacatttctggcgtattagcccttggcaccccaaccacgccgaggaccctacttgctcctgctggggctgcttatgtcaggatgacagtggcaaacacagttcttgatactacgcaattcgaaaaaggaagcgagtcaacttcttatcaggcatatagcttataccttgacccaacacgaattgatacttccagcctcaatattaattcagtacctgaatatattgagcgagcgtatcagcttagggttgccagaatgaagcttgctcagcttgaatccggggcgtcagctatcctgaccatcggaatctttggtgattcctggccaactcagccaaaccggttttcacagccattagcgaaggcgttgagagcaaagtatggcgcgggcccaggggttgggtggacgtcgtttggaaggcatgccacatcggataacatcatcaacggtaacgtgttttctccgagcagttcagacgtattgaaaacattgttcacatggacgggtaactggttatttagctacagcggaactaaaaatcccacaaacagctctccggatactgccgtggttacgtcatccacaccaggggatgcactgaaggccacggtacccggcacctctgacggcgggtggtcaacctgcagactgggctttgtgggtacaagtgacggtgttattcgatataactgggatgggggggcatggacgacgctcaacgtacagggtagcggactgctgtttgttgatattaacccaccggctactgtaaacgcgtcgaacgtgctcaacattgagaacgtgtccggtaccgtttcactctgcggactaaaaccaatcggcacgggggcgggggtacgtgttcacaagttaggtgcatccggttcaagtcttgcttcatggctgtcaatggacgcaacggattttggaaaggctctcgctgagatggcgttggacaccgttatcatccttaccggcaccaacgaccagaggatcaccggcggggctacggcgttcgaagccaacctgcgctccttcattgctcgcatccgggcgacattgcctggagctgacatccttttcgtcatgccgtgtgagaatgagcggactgacaacccggtaacgatggcatcaatggcggccagggccagggctgtagcctcagatctgaattgcgcgtttataaacctgcaatacatctttggcgaaaatcctgctgattatgcatatggcgccgtgcattcctggtttatgcctgacggcatccacccagaccccgcaactggaggttacctgatcaaggatgccatttaccgcggtataacgtatcgataa

SEQ ID NO: 228217 - DNA, 537 bp, Klebsiella pneumoniae
atgaaaccactaattgatcccatcggtaccgatgacggccagtttcatggaggaaaccagcttaccggtactaagggtacaatcgtcacgcctgactggctcaacgatattcagggagcgacccgctcagttcagcaggaaattatcgctgtgctcaccgctgccggcctggttccggctgaagaaactgcaggacagctgttaagcgctctccagtcgctgtttacaggtaccggcagttttggaacgacaggttatatacgccttcctctaattgtcggaggcgtgaaacgaacgttaattattaactggggtcaggggtcaacaaccagtgaaggtaaagtgacggtcacattaccggcggcatttccggttcaggctatgtgtgctttcatgacgaataatgcaggtgcaacgccttcaggatttggtgggatttccgtcaatctgactactgtcaccttatattcctccagtgcatctggtattgccagcggcgcaggcgtttcttataactatattgcattggggtattaa

SEQ ID NO: 228218 - DNA, 642 bp, Klebsiella pneumoniae
atgatatcccggcgtgatttactggcaatgcttcttcccccggtggcttacgataccgcccaggtgtctcttaatgcagaattaaccgccgagggtaacgtatttgataaaacagataccacagcaggaaatgtattaggtggcgtcacgcctgtattttcaggggacctgttaactgactgggagcgggttcttggattaacaccagacagtgatgattcatggcagaaacggcttgagtcagtacttatcaaactgtctgaaactggcgggctgagtcgtgagtatttcattcgtctggcggggtctattggttacaccatcaccattgatgagcttgatccattccgtgccggtcagggacgtgcaggtgattacctttacgaagaggatattatctgggtctggcagataaatattattggttcggaaattccttcttatctgtttcgtgcgggtgaatcatatgccggtgaatccctccaggaatatggtgactctgttattgaaacctggttcaacgatttaaagccagcgcacacactttgcatttttacttatcgccgccgttctacagggccattcttcgacggctcttgggtatacgacggaacgtttgattacactgtgggttaccagtga

SEQ ID NO: 228219 - DNA, 1062 bp, Klebsiella pneumoniae
atgccgtttgtcacgccgacgttcgacgaaatccgaaacgatattctgcgcgatattaagaacctgaataccgatgcagatattggcgttgacagcgatttatatattcgtgccagtgcggtggccagcgttgccacaggtatttatcagtatcagggatggatagttcgtcagatatttcctgacacggccgatactgaatttctcgaatggcactcgcgcacacgcggcctttatcgtaagtcggccactacggccagcggccctctgagcgttaccggtgaacccggtgcctctgcggccgcaggttatacagtgacccgtggtggactgacctggaccactactgaggccgtgacactggatagcgaggggaatggctccgtcgcagcaagctattcgactgccggcgctgccggtaataccacggccgccacctcaggcacattcaccagtacacctacagggttcgacagcaccgtagttatcggagttatgtccggcgggactgaccaggagtctgatactgaactgctggcccgtctgctggatattattcgtcgtccacctgcaggcggaaataaatatgattatcgccgctgggcaatgaacgttgatggtgtgactgctgcctatgtgtatcctttacgacgcgggctgggaactgttgatgttgtcattacctcatctggtggtgctccatctgctgagataattacagcagttcaggcctatattgacgatcagcgtcctgttacagctaaagattgcctggtgctggcccctacatttaaaaccgtcgatatctctgttggggtttcagtttccggcgtgacctttgccgaagcctcagaaaatattattgctgcgctcaccgactacgtagcccgactggcccccggagaagcatttattaaatcccaggctgaaatgattgtttctcaggtaaacggagttattgaccgtaatatgtcatcacctgcaggtaatgtgttgcctgtggtagatgactcagtcgtggaatggatccgtaatggaacgctggaggttgtaccattatga

SEQ ID NO: 228220 - DNA, 1314 bp, Klebsiella pneumoniae
atggcatgggaaacggatctgcaggatgccagctttcggggcatcgccttcgatatcatcaacacccgcgacagcatgcagcgggatatcgcccagcacgagtatccgtaccgcgacggagccaatattgacgatctcggcgctaaacctcgcagcctgcagtgtcaggcggttttcttcggtgacgactacgaaagtcggctgcaggcgtttatggcggccatctatacccgtggaccaggcgagctgatacacccggtgttcggggtcatgccggacatgctgtgctacgtttaccaggtgaatcacgaggccgagagccccgactactgcactgttgatctgcagttcctgcagtcaggtctggatgtgaagttcttcgtacgcgaatggccactcagtcaggcagatgccattttcaaccaggctcaggggatcctcgacagtaccgccacgttactggataacgccatgaagccgctgagaacggcgcggcagtatatggctcgcgccaaagcgctgggtgtcacagcgctgaacatggcagccattctccggagtgaaatcacaggttttatcagcagcacgactgattttgtcaatttcccggctgcctttatgactgaccttcagtctgcgctgagcctgcagagctcggcagcgaccagttccatcagctcggactctgcggtatacgcttccgtgccgtcggtcatccttgctgactggtcagcggtgaaaacccaggccgatgaggtagccgtactgccggcaagtcttgtcaatggggatgcgacggcttccgttgaaatgccggcaaacataagcaccaccgatatccgtgagctgattgccatgacacagctggcggtcgcccttgagttgtcgcagcaggcggctgaccttctgagcgatgagaccgtcaccgctgcgttaagccccaatgatatcagtcttatcaccggtgatgcccgccgggtagtacagaacgcaatcgacagcgtgcgcagtacctgggccgctgagatggagaccgtgagcagctcaacgacgtcgatcgcgctggaatatgagccggttattaatggccttcgtgataccgcgctttccctgcagtcgatggccacggcactgatacaggccagacccccactgattcagcgcacggtggccagtgccacgaatctgcatttgcttgcccacctgtggtatggcgattacagccgggccactgagcttaagctccttaatccgtcccttcgtgaccccaataacatcatcgcgggagacgtcctgaatggctacgcagaatag

SEQ ID NO: 228221 - DNA, 2178 bp, Klebsiella pneumoniae
atgcgttctctacagcttgccatgaccctgctggccagagaccagggctctaaggtactacgtcaggctctggccgatattttaaagcagacaaatgccaacaaaaaagccgaggaagacgccggtcgagctcgcgagcagtcagcgcaaaatggtatccgtgcatcccgaacacttcagcaggaatatcagcgggccgccagtgcccgttcaacattaggcatccgttccgagcgcgatattcagcgcgagatagctcaaacacagggggcctacaatcgcctgctacgcaccggtacgctgactgcaaatgagcagactcgcgcgtttcgcgcaatgacgaaccaggtcgcgcagctgcgcaccgagcttaatggtgccggtcagtcaatgtcacgcatggaacgtgcccgcatgtggggtggaaatgtgacagcgatcgccgggggagtgactgccgcggccatgattattaaagaccctgtccagcggcaaatggcttatgaggcccgcaatgcggaaatagctaacaccggctataacgagattcccccagatgaacggttaaaaaaaataccaattctaaatgcagcaataagaaatgctgttcgatatggtggaggaacaccagaactcactcaggaggcattgaatactttgctttctaaggggtcagtagataaaaacactgcgatgaaaattctgccggatgttatgcgttattcgacagcatcaggcgctaagcctgaagatctggctaaaattgcctccgctgctatcgccaactttggcattaaacctgaagaacttcctgcccttttcgataagctcattcgctcaggagaaaatggggggtatgaactggcagatatggccaaatcaatgccaaccactatgactaaagcgaacgctattggtatgtctggccttgcggacgtcgataaacttgctgcttggtatcaggcaaactcacttacggcgggtgacaacagtcaggccgcaacaaacgtcgataacttcctcgataaaattaccagcgctgacactcagaacgcattaaagccttataaattccgtgtgaatggcaaggtcatgaactacaccgattatctggcccagcagcgtatcaatggcgtcagtaccccagatgcttttatgaatgcggtctcaggtattgtatcgagtgataaacgggttcagtcgctaaggggtgatgcgaaaaagtataaaggcacagacagggaaaaagaaattaatgccgcgctggatgtcgttgtagcctcgatcatctctaagatagttgcggatcaacaagcgggtatggctctaaaaactaacattttgatgagggattatattaaggagcagcaatcgggtactcgtaattccgccggtgcaggtgcggcatcattcagtgttatttcgtccacgaatgctttcaaatcacaacagcttgaatctgagaaggtctttgcagaacaggatgccatgaaacccctggctgacctgtacggagatttatcaaccaagcttgttgattatgcgaaggaatatcccgcgttaaccacggctatctcaggggcaacgaccggtattaaagcgatgactgcagctgcggttgcctttgcgactcttaattttcttacgggcggcaaaatcattccctcgacttccccggtacctccaggaaaactaccaacagggggggctggcgcatggggatggggcgctaaattacttggtgcaggtatgtcagctacagcaattgcaacattcaccacccgcgatgaagatgatgaaattactaacggtccggctaagtggtctgccttacgatcccgttacagtcaggagcgtattgataaagcgagaaagctttatcagccctggtaccagattggcaaaggctatgccagtgaaaacgaagagtggctatcccgtctggataaagatgaagcgaacggaacggtgccctcatggtggacgccaccgacaaacatccgcgttcctgagtcagccaacggctatccggtgcctccgttcgccaggacgccggcacagcagccgcctatcaatattacgaccaaggttgaactggacggccgggttattgctgaggctgtgaatgaagtcaatggccagtcagccgcccgtggcccacagggaggaccgcactga

SEQ ID NO: 228222 - DNA, 396 bp, Klebsiella pneumoniae
atgaaagcatctggaaaactactctacggcgtgcagatcggtgacgttatccactatgactacaccgtttccctgcctgtaatgaaacatactgttaaggctctggcctccactatggatgcacttggcgaaacggatacgcctgccgcatatgtacattatcgtgtggcattgctggcagaagtccttgaatcccttggctcgatgagtaaagacgacatcaccacggatttccttctggagaacctgattgaagatgatctggatatcctggatgcggaactggccgggcttaaaaaaaagcggatgcctgttcctccaaacttgccggcctcaggagagccaccctcatcctcggacgctttggcatcagcgcagaacgcatcgaaggaatga

SEQ ID NO: 228223 - DNA, 399 bp, Klebsiella pneumoniae
atgcctgaaattacgattacctccaagcgcgacggtttccgtcgctgcggtgtggcacaccgtgacgtgccggtaacctggcctgatggcagttttactgacgagcagatcgccatcctgcgtgccgagccagcgctggttgtccatctcggcgctgtcagcggcgatgacgacaaactaaaaatcgctcagggacggattcaggagctggaggccgtcgtgctgcagctcaacgacgacgcggctggtctgaagagtcaactggctgaggtgaccgctgaccgcgatcgtctgcaggaagcgctgacggccgcaggcagtgcatccgtctcagaagtgaaggaaaacgctgctgacgataccgctgccgcagagtcttcagcgaaagcgaaaaagtaa

SEQ ID NO: 228224 - DNA, 435 bp, Klebsiella pneumoniae
atgaatctgcaacaggtaacagagctactgcccccggtagtcattcagatagctgaccttatcggcttcccggccactgaacgcctgctttcagcgttcggtggtaccacctttccgatcggaaaaggtctccgcgctttcggcggccaacgcgccgctctcctccgcgataccattggcgaccacaatacaaaattgttgttccaaaaatttacgggtgaacctctgtatctccctcgttgtgaacgagctttacgcgagttgcgcaatgttcgtttcctcgcagaatttgatgaagttaatcagaacggcacttcttcgctgatggccatgacgttactgtgccctaaatatgggttcagcgaccgtaccggctggcatcttctggcgcagcgcaaaagtgcaactgagaatgatcagggggcactattttaa

SEQ ID NO: 228225 - DNA, 162 bp, Klebsiella pneumoniae
atgaaagcattatcattttacgatcggatcatgctcaatccttaccttcgtccggtgactttaactttatgcgttttattttgcatcgctgtatggggcgcaggtatttactacagcctgaaaatgattgagctgttattgactttatttaagggggcttaa

SEQ ID NO: 228226 - DNA, 342 bp, Klebsiella pneumoniae
atgtcagtaacagtcatagatgaaatgctatttaaggtttttggctctgttgaaaaaagcaatgatggcacagagctcatttttcgtaataacggatgggatgaaatatttactttcttccatgagcaggattgctgtgaaagcgtctggattgaagatatcgaaggtgacctgagcgaccttgaatattcccccattcttgaagcagaggtggtaagcaataaagaaactgatgattcctgcgactccagaacatggactttttcaagtttggaacagcaaaaggacatgttgttgttcgctggtgtggtgaaagtaatggttattattcagagagtgtaa

SEQ ID NO: 228227 - DNA, 174 bp, Klebsiella pneumoniae
atgcaaagcatttttgagtgtgtcgggtttgagaccggcattctcagagagacctcgcatcgtgacgccccgtttgtgaagagcggcgacaatgtcaattcggtgccagtcagcagacataacttcttttctttccattattcgtttaccctaaaaagttatccgcgcggataa

SEQ ID NO: 228228 - DNA, 570 bp, Klebsiella pneumoniae
gtgagtgcagacaaagaaaccattcttactatttccccggatggaaaagaaagcatgcgtgatcggataaaatctctttttcgcggacgctcaatgcgtaaggtagcttctgattgggggctggcgtactcaaccctcaataactacttttcgcgttcaggtacgcccaacatcgaggttttgatcataattgccatgaaagagggggtctctcttgaatggctggctactggaagaccaccagtcaaccatacagagagaaatgactcaaaaaaccagattgaggtcaatgtgacctcaaatgcgttaatggcaacttggcaaactttgtttgattcgcttaaagaagaggaagttaaagcacttctgtctctcattatgcgtatgggtgttaatggcgtgctggagttagctgaaatgaagacatcgattgacagtgcgtttttacgcctagatgaaggcgaaaaagagcgcttatgggcattgcatgaagctaaaaggggggcacctgaaagtaatggtgtaaatgatcgtcttcacccacaagccaaagataagcaggccagttga

SEQ ID NO: 228229 - DNA, 2043 bp, Klebsiella pneumoniae
atgaccaatccattactgacgcctttttccctgccgcctttttctgcgatcaaaccagagcacgtggtcccagcggtcaccaaagcgctggaggattgccgggccgcggtggaaagcgcggtggcgcacggcgcgccgtatagctgggaaaatctttgccagccgctggcggaagtggacgatgtgctgggacgcatcttctcgcctgtcagccatctcaattcggtaaaaaacagcccggaactgcgtgaggcctacgaacagacgctgccgctgctctccgagtacagcacctgggtcggccagcatgaaggcctgtataaagcctaccgcgatctgcgcgatggcgataactacgccacgctgaataccgcgcagaaaaaagcggtggataacgcgctgcgcgatttcgaattatccggtattggcctgccgccggaggcgcagaaacgctacggtgaaatcgccgcgcgcctctctgagctgggcaaccagtacagcaacaacgtccttgacgccaccatgggctggaacaagctggtgaccgacgtcgccgatctggccggtatgccggaaagcgcgctggccgccgctcaggcgcaggcccaggccaaagagcaggaagggtatctgctgaccctggatatcccgagctacctgccggtgatgacctactgcgacaaccaggcgctgcgcgaagagatgtaccgcgcctactccacgcgcgcctccgaccaggggccaaacgccggtaaatgggataacagcccggtgatggcggagatcctcgccctgcgccacgagctggcgcagctgctgggctttgacagctacgcctttaaatccctcgccaccaaaatggcggaggatccgcagcaggtgctcgatttcctcaccgacctggcaaaacgcgcccgtccgcagggcgaaaaagagctggcccagctgcgcgctttcgctaaagccgagttcggcgtcgaagagctgcagccgtgggacatcgcttactacagcgaaaaacagaaacagcatctctacagcatcagcgatgagcagctgcgcccctatttcccggaaaacaaagccgttaacggtctgtttgaagtggtgaagcgcatttacggcattaccgccaaagagcgtaccgatgtcgacgtgtggcatccggaagtgcgcttcttcgagctgtatgacgaacacaacgagctgcgcggcagcttctatctcgacctgtatgcccgcgagcacaagcgcggcggggcgtggatggacgactgcgtcggccagatgcgtaagctggatggttccctgcagaagccggtcgcctacctgacctgtaacttcaaccgtccggtcaacggcaaaccggcgctgttcacccacgacgaagtgatcactctgttccacgagttcggccacggtctgcaccacatgctgacccgcatcgataccgccggggtttccggcatcagcggggtgccgtgggatgcggtcgagctgccgagccagtttatggaaaactggtgctgggagccggaagcgttggcctttatctccggtcattatgaaaccggtgaaccgctgccgcaggcgctgctggagaaaatgctggcggcgaaaaactaccaggcggcgatgtttattctgcgccagctggagttcggcctgttcgatttccgcctgcacgcggagtacaagccggagcagggggcgaaaatccttgagaccctcgcggagattaaaaagcaggtcgccgtggtgccgggcccaacctggggccgcttcccgcacgccttcagccatatcttcgccggcggttacgcggcgggttactacagctacctgtgggctgacgtgctggcggcagacgccttctcacgcttcgaagaagaggggatcttcaaccgtgaaaccggtcagtcgttcctcgataacatcctgagccgcggcggttctgaagagccgatggtgctgttcaaacgcttccgcgggcgcgagccgcagctggatgcgatgctggagcattacgggatcaagggttaa

SEQ ID NO: 228230 - DNA, 795 bp, Klebsiella pneumoniae
atgcgatgctggagcattacgggatcaagggttaagtctgcggtgaagatctgcttaattgatgaaacgggcgccggagacggcgccttatctgttttagccgcccgctgggggctggagcaggatgacgataacctgatggcgctggtgctgaccgctgagcatctggagctgcgtaagcgcgatgagcccaaactcggcggtatcttcgtcgatttcgtcggcggggcgatggcccaccggcgcaagtttggcggcggccgcggtgaagcggtggccaaagcggtcggtattaaaggcgattatctgccggatgtcgtcgatgccaccgccggattggggcgtgacgcctttgtgctggcgtcggtcggctgtcgcgtacggatgctggagcgtaatccggtggtcgccgcgctgctcgacgatggcctggcccgcggctatgccgatgcggaaatcggcggctggctgcaggagcggctgcagctgatccacgcctccagcctgacggcgctgaccgatattaccccgcgtccgcaggtggtctacctcgacccgatgttcccgcataagcagaaaaacgcgctggtgaagaaagagatgcgcgtctttcagtcgctggtggggcccgatttagacgccgatggcctgctggccccggcgcgccagctggcgaccaaacgggtggtggtgaagcgcccggattacgcgccgccgctggcggaagtcgccacgccgaacgcggtggtgaccaaagggcatcggtttgatatttacgccggcacgccggcgtaa

SEQ ID NO: 228231 - DNA, 1497 bp, Klebsiella pneumoniae
atgctacatttatttgccggtctggatttacataccggactattattattgcttgctttagcttttgtactgttttacgaagcgattaacggtttccatgataccgcaaacgcggtggctacggttatctacactcgcgctatgcgctcacagctcgctgtggcgatggcggcgctcttcaacttcttcggcgttctgctggggggtctcagcgtagcctatgccatcgtgcatatgctgccgaccgatctgctgcttaacatgggttccgcacatggcctcgccatggtgttctctatgctgctggcggcgatcatctggaacctcggtacctggtacttcggcctgccggcatccagttcccatacgctgatcggcgctatcatcgggatcggtctcaccaatgccttaatgaccggtacgtcggtcgttgacgcgctgaatatcccgaaagtcatcggcatttttggatcgctgattatctcgcctatcgtcggcctggtgatcgcgggcggcctgattttcctgctgcgtcgctactggagcggcaccaagaaacgggcgcgtatccacctgaccccagcggagcgtgaaaagaaagacggcaagaaaaagccgccgttctggacccgtatcgccctgatcctgtccgctatcggcgtgtcgttctctcacggcgctaacgatggacagaaaggcattggtctggtgatgctggtcctgatcggcgtcgccccggcgggcttcgtggtgaatatgaacgcctccggttacgaaatcacccgtacccgcgatgcggtcaacaacgtggaaaccttcttccagcagcgccctgacctgctgaagaaagccaccggcgttgaccagctggttccctctccggacaccaataccgcggccaacggcgagtttcattgtcatccggcgaacaccatcaacgcccttgaccgcgtgaagaccatgctgaccggcgttgagaactacgagtcgctaaaaccggaacagcgcggccagctgcgtcgcatcatgctctgcatctccgacaccaccgacaaagtggcgaaactgccggacgtgagcgctgacgaccagcgtctgctgaagaaactgaaaaccgatatgctaagcaccatcgagtacgcgccaatctggattatcatggcggtcgcgctggcgctgggtattggcaccatgatcggctggcgccgcgtggcgaccactatcggtgagaagattggtaagaagggcatgacctacgcccaggggatgtcggcgcagatgaccgcggcggtctctatcggtctggcgagctacaccgggatgccggtctccaccacccacgtactctcctcctcggtagcggggacgatgctggtggatggcggtggtctgcagaaaaagacggtgacgagcattctgatggcctgggtactgaccctgccggcagcgattatcctttcaggcgtcctttactggctctccctgaagctgatttaa

SEQ ID NO: 228232 - DNA, 381 bp, Klebsiella pneumoniae
atgggcggtaaatgctggattttgctgtggttgccgctgtcgctgctggcggccgggcgcgatcctttcctgccggttgaagatccttgccgcacggcgcagctgtcgcaatggcgctatggcggcgcggccggcgatggcgcaggctggacggggtttttgcaggatggaagcggcatgtggcgacgggtacgcctggatgagcaattgcccacgggctggcgggtgagtcggctgacggccggcgagctggacatcgtcacgcttccgggatgtgaaccgccagcgtggcgctggcaacgtgaaggaaaacaagatgatgcgatggataagcctgctgcttctgctgctaccgctggcggtggtcgccgcgcgaaatga

SEQ ID NO: 228233 - DNA, 345 bp, Klebsiella pneumoniae
atgcatcatcccctcgtcattgcatcgatcgccttgatcgcggccattatcattggcgtctggagccagcgtgcgctacctgaatacgccgatagccgaccgatcctcttcctgctgtgcctgttgattggcaccggcagcgcgttgtgcctgctgctggatggcttagccctgctgtttaccggtcaggtcgcgacgggcggtgtgcgggtatacggccccatgctgctgctggtggtgctgtggaaacccctcaacgggatcttcggcatcattgaagattttgtgcaacggcgagccgaaaaagggaaggacaaaggccagcgcgacggcgggcgacgctga

SEQ ID NO: 228234 - DNA, 828 bp, Klebsiella pneumoniae
atgaatcacgttgataatgataagaactcgcgtggagtgcagtcggttgaaacagccgccttgatgttagagttcctcacaggccaacagggtggtgtgccgctaaaaaagattgcccaggctgtcggtatgagtccggcacgggctttcccgtatcttataagcctggtacgtagtggactggtgacaaaggatgatgcacgagggctttatctacccggagaactgtcacagcagttaggaatgctggctctgcatttacaccgtccttacgataccgctgaacatacgttgaagatcttaaacctggaatgcggacatagtgctgccctgagcgtttgggggaacatgggaccaacggtcgtgcgcgttgaagagagtcgttatagcgtatatccggaaattcgaatcgggtcggtgatgtcgctggagcagacctccattggtcaggtattttccgcctggatgccagaggagatcgttcgcgaggcatgggaggcggagtattggcgacgtgagcaccgtgcggcgccgaaaacggctatggcggcattctttgcgaagttagaggctgttcgtcaggccgggtgcgacttcaagcaaaatgttcctgcgccaggattgagttccgtgagcgcgccggtttttgatctcagtggttcaatagcttacgcgttgaccttgtttgatgagagtggggtcattgatgtgagccccggcggtgcagcccaacaagtgttgcgccatcatgcatactgcctgtcggcagcgctggggctacggattgattatcccactggtgatttagcggttacctcaacgcgttga

SEQ ID NO: 228235 - DNA, 774 bp, Klebsiella pneumoniae
atgaaatcagaatcgcgtgggatccagagcgtggaaatcgccgggcaaattttacgagtactggtggaccattcccgtcccttaacgctcagcgaaatagctgagcgggcagggacaacttctgcgcaaattcataactatctggtaagcatgacgcgcgtgggtctgcttaagcgtgacccacaaagtcagaaatttgaaccaggggcactagccctccgtttaggcgtcgcagccctacatagccagtcggtagtggaagaggctattgctcatattgcagcgttgggacagcgtttaaacgtcaatatgtttctttctgtgtggggacgttttggcccgctggtcattgactatcgtgagcatggtgcagtgatgaatattggttttcgcctgggaagcgtactttctctgacccagacagcgacaggaaaacttttcgccgcttatcacgatcgcgaacagtgtaccgagataattaaccagcagatgtttacgcgcgataagctggatgattatctctccccggcttttcagcaacaattggccgccatcaggagagacaaaatatcgattgcacagtcttatccgttggcatcaattaccagccttgctgtcccggtgtttgcggctgacaactcgcttaccctgacgatcagcgcgtttgcggccgctcatgatttgataggtgagcgcttaacgatggtgagcaatgctcttcaagcgctcgccgcctccctttcatgcaatgagatcgcttatgaatcacgttga

SEQ ID NO: 228236 - DNA, 756 bp, Klebsiella pneumoniae
atgcaaattgcaccattatttgatttaagcggtaagaaaatactcattaccggggcggcaaaaggtaatggcgccgccttagcgcgcgggatgtcggatgctggggcagaagtcatattggtcgatgtcgatgacaaaggcgtgcagcgtttagcagatacgtttagagcagaagggcgattagccagtgcgtaccggcttgacgttagccagatcgaaggatgtctgcagcttgctgaggaggtaggggatatcgatgtattaatcaataatgcaggactgttgaagcggatcccctttgcatcggcatctgtttacgaggcctttgccgtcacgctcgccgtgaatgttcatggtccttttaatatgacccgtgcatttttacctgccttaaaaagacggcgtggaaatattattaatattgcttctatccagtcctttgtcgccgcaccaacctcacccacctatgccatctctaaaggcgcgctggcgcagttaacccggacgcttgctgcggaactggcgacggataatatacgtgtaaacgccattgctccgggaatgatcgcgacagaaatgtcggcaagtacaagggataatgaagaggttatgcagcgttttttgcagcacgtgccgatgaagcgtgccgcgcaacctgatgaacttattggtcctgcgacttttctcgcttcgtctgctgccagctatgtgaccggtgtgatattgcctgtagacggaggatatctggtgagctga

SEQ ID NO: 228237 - DNA, 1737 bp, Klebsiella pneumoniae
atgactaaagagcaagagtttcactgcgacgtactggtggtcggtagcggtgcggcaggtatgtcagcggcagtaagtgcggcacatcaggggctgaatgtactgattgtggaaaaagcagcgcgtttcggtggcactgctgcccgatctggtgggtgggtatggatcccgggcagcgatcaggctaaagcctggggccatcttgattcaattgagtcggtgaagcgttacttaaagcatgaagggggagccagctataacgaagaacgagtggatgcattcttgcgtcatggcccgcaagccgccgccttctttagccaggataccgcagtcaaatttgaaatgcctctcactttccctgattaccatgctgaagctcccggggcagcgcagggaggacgctccatggtggcgaagccgttcgatgctcgtcagttggggaaacatttggcccaattggaacctccgctacctgaattgacagtgtttggcatgatgattgggtcgggcaacgatattcgccactttatgaaagcgacgcgttcgctggagtccgccatctacgccacgaagcgtttaactaaacatttttggcaaacgttgacctgtggacgaggcatgaccttaaccaacggtaatgctctgatgggcagattagctaaatcggtctttgataagaatgtgccgctctggctgaattcacccgtcagggagttgatccttaaagagggggcggtcattggcgcaaaggtagaaaaagaaggatcgttatatacggtctacgcatcgcgcggtgtggtgctggccgccggcggtttttctcatgatattaagagacgaagcgaacactatccccatacgccaaccgggaaggaacactggagcccgacagccgaaaccaataccggcgacagcctgaatatgtttgaaaatatcggtgggagagtcgatagccatttgccaaacgccgccgcatgggcaccgatatcgttaacccgacgaccggacggcggtcagggagtgatgccacactttattgatcgggcaaagccaggcgttatcgcggtgactcgtcagggacgccgtttcactaacgaagccaactcctatcatgatttcgtgcaggcaatgatcaacgttagggatgctaaaagtgaagtttgtgcctggttagtttgcgatcgccgaactctcagacgctacgggctgggatgtgtcgcgccatttccgctaccgttgaaacgccatttgacctccggctatctccttgaagggcgcacgctggaagcattggcggaaaaagcgggcattgaggtggcacagtttaaggcgacggtggaggaatataaccgttatgccgcctacggtcaggatccgatctttggtaaaggttcaaaagcctataaccgttatcagggcgatgctttgcataatcctaatccttgcatcaataccattgagcgcgggcctttttatgcggtgaaggttttacctggtgatatcgggacctacaacggtatcccggttgatgcggataaccgtgttctggatcagcagaagaagcccatccgcggcctgttcgccattggtaacgatgccactagcatcatgggcggtaattacccgggggcaggtattaccctgggaccggcattaactttcggatatgccgtgggtcagtatttggctcactgcagcaccccttcagtctccgagacgataaaaaaagcatcctga

SEQ ID NO: 228238 - DNA, 342 bp, Klebsiella pneumoniae
atgaacgttgaattacatactgagcagggcgtcaaaattatcgtgcccctggtgcgtcgactggatgcttccgttgtctcggcgtttaagcagcaggtccttgaggccatcgacggggagacgaaaaacgtactgctggatctgagccatgtcgagtttatcgacagcagttgcctgggtgccctggtatccatactcaagagcatcagtgggcagggagagctggtgctgtgttcgctcaacgggacgatccagaacctgttcaagcttacccgtatggatcgtatcttttctattaaagagaaccgtcaggaggcgctgaacctgtttgctcagggatga

SEQ ID NO: 228239 - DNA, 768 bp, Klebsiella pneumoniae
atgagaaatacaaaagtaatgctggctttggccgtttccgccacgttgttggcaggttgtaaaaatatgcaggggatggacaccaacgccctcgtcaattcaggaatgacggcttacaaagcggcgacgctttctgactctgaagtcaaaacgctttccgacgatgcctgtaagcaaatggatagtgaaaataaactggctagtgcatcaagtaagtacaccaaacgtctgaataaaattgccaaagcgttaggaaataatatcaacggcacgccggtaacctataaggtttacatgacatccgacgtcaacgcctgggcaatggccaacggctgcgtccgcgtctatagcggcctgatggacatgatgaccgataatgaagttgaagcggttctgggccatgagctgggtcacgtagcgctcggacactcgcgcaaagcgatgcaaaccgcgtatgcgactattgccgcacgcgatgcaatttcagcgaccagcgaagcggctgcaagcttgtctaaatctcagttgggcgatatcgctgagggaatgatcaactctgcgttctcccgctcgcaggagtcggatgctgatgatttctcttacgatctgctgaaaaaacgcaacatcagcactcaggggctggtgggcagcttcgacaagctggccagccttgacgccggccacagtaaatctctgttcgattcacacccgccttcagctgaacgcgcgcagcatatccgcgaccgtatcgctgcagataaaaagtaa

SEQ ID NO: 228240 - DNA, 1140 bp, Klebsiella pneumoniae
atgttaacaaataagcaagagggcgtccgccagctgcgaaccgagctgtgggccaccagagataatgtccagcgccatgcgctatccatgagtatgccctggctggcctttgtcaatatcgcttttgcgttaatggttttcttccgcaattttatctttactcattttgataagaagctgttaacgcaccaggcggttattccttatgtcgaagtcgcgctgatcgcggttattattatttcggtaattttagccattattgccgtcacgccgcgcctggcgcaggggcgctatacgttgagtattatcaccggcctgcagctggcactcagcctgtgctggtccctgagtaattactgttttatctttttctggacactgcccttcgcctggccgctgctggtgatattaatgaccaccggcctcgccgcgctgtatcaccattggcccggcattatcgcttttatgcttccgctatggggaaccgccctgctggcgggtatacagaaccaccctcacactgaggtccgctttttgatcctgtggggcatttttacggcgattttactctatggcaggcgtattcttaagcgctggtatgatgaggcctggaagacgcatcaggaaaatatgcggcttattcagcggctggaaagtattgccaaccaggatgcattaaccgggaccgcgaatcgccgggcgctgaatgcctatctggcggagatttggcagcaaaaaacgccgttggcgctgatgatgatcgacgtcgattactttaagcgttacaacgaccactatggccatcaggctggcgacgattgcttatcgactgtcgcccaggtgcttaaaatggcggtacgggcagagggcgatctggtcgcccgctacggcggcgaagagtttgtcatcgcgctgccgggggtttccttagcgcgagccacctccattgccgagcgcattcagcagaaaattagcgaggcggcgatcccccatgaggcttcggcggtggcctcggtggtgaccgtcagtatgggggtcgtcgcctccgacggcacggttccgatggagacgctgatcgcccgggcggacagcgcgctgtaccaggcgaaaaataaaggacgaaatcgatggtcttattaa

SEQ ID NO: 228241 - DNA, 222 bp, Klebsiella pneumoniae
atgccgggcggcggcttacgcctcgcccggcctggatttaataatgttcccggatggcgctacgctaatccgggctacaaactggtggcctcaaaatccccggtggcgctaccgcttaccggggctacagcactgtgcggtttggtagcccgggtaacggacagtttcagtaaccatgggtacaagatagagctcttaagctcacaatggcacggaccgtag

SEQ ID NO: 228242 - DNA, 882 bp, Klebsiella pneumoniae
atggctacagtacgtaaactcccctccggtaactatcaagtacgtatcgttgttgatggtgaaaggttatccaatacctttgccactgctgaagctgctcatgcttgggtagaccgtctagagaagcccactcaaagtacaatcctttcctttaagaatgactacctgtcagaggttatgattcgtgatggtaagaagagaggaggctatgaagcgatatcatacaagcttgatgcattgggtaggattattgataacccgctggaatctattaacagtgttgatgtatctcaatacaaggttaagcgtagtagggaagtatcagcaagttctgtaagactagagatgcaactcctttcccggttcctgagatgggccaacactgagaaaggaattgaatgcacagacgtagtgaaaggtgtgaagcttccagatgcagggaaaccccgtagcaagattatcacccctcttgagtatcaaatgattctggagaaggttagcgatagagcacgacccatagtgatacttgcatgggagacggctatgagaagaaatgaacttcttgctatcactcctgcaatggttgacctgaaaaagaagattatcagcttaccggatgaaatctgtaagaatggtgagggtagggatgttccactttcatccaaagctgtagagctactgaaagcgctgtgtgatggtaaagagaaaggtaaggagttattcacactcacaccgtatgcaatcacacaggcgtttagaagggctgcaaggttgtgcaaggtaacagatgtttgcctacattcactgaggcatacagcgatttctagatgggctgaactaggtttcagtactgtacagctacaggtgataagcggtcactag

SEQ ID NO: 228243 - DNA, 243 bp, Klebsiella pneumoniae
atgactgatttaactatgtccattcgtgaaattgctgaactgactgaaaaagaacatcgtaatgttctccgtgatgttcgttctatgtttagtgctctcaatttaggtgtgctcaattttgagcagacttatttagatgttcagaacaaagagcaagttgaatatgtgttgccaaaagcgcatgtattctgtctcatgggtggttataatgttcaactgcgtatgcgtattaatttcttttga

SEQ ID NO: 228244 - DNA, 126 bp, Klebsiella pneumoniae
atggaacacactttatctttcttactgtttactgttcttgggatgatagcagccaataaaagtgcaagagctatcatcaaagatatgattcttactcagtggcaccttatcaaacctgataagtga

SEQ ID NO: 228245 - DNA, 558 bp, Klebsiella pneumoniae
atggatacccctgaaaaggttgtggtgaaaatctacagtgggttagatgaggatcagattgaaactctgtacaagtcgctcaatagtccggctactgctgaaacagccaaagaacgtactctacatatgaataaaaccattgggtttgtagctaagtctggttactgccgtggcaacttcaaaactgctgtagagaagtgcggtctgtcattggtgtacacacctgaagtgatggaaatgcttgaacctgctttgatggtggtcgatgggtggaacatcccatacagccgcaagggggagggtaagttagttactcagaatggggttaaacgcgccctcatagcttctttgggtcagcgtacagaagatggggtggtgttctctaaaaccccctcagacttctttaagttggttctcagcgcagatgaaactgtacctgaagtagccaaactcatggtccaattggacaaggtgaaaggggaaaccaaccatcaggaggaaactactttctactactccgcatggctgaagagaatcacatcctcaatcgccgcttaa

SEQ ID NO: 228246 - DNA, 1278 bp, Klebsiella pneumoniae
atgtctatcaataataaacagtggctcggtttacccctgaacctgctctggggatacatcgccattgccgtatttatgaccggcgacggttttgaattagcctttctctcgcactatatcaaagcgctcggattctccccggcggaggcctcctttgcctttaccctctatggcctggccgccgcgctgtcggcgtggatttccggcgtggtggcggaaattattacgccgctgaaaaccatgatgattggcttcgtgctgtggtgcgtattccacgtgctgttcctcgttttcggcctcggtcacgccaactatgcgctgatcctggttttctacggcattcgcggcttcgcgtatccgctattcctctactcgtttatcgtggcgattgtccataacgtcaaaagcgacaacgccagctcggccatcggctggttctgggcggtctattccatcggcatcggcgtcttcggcagctatattccgagtttcaccattccgcacattggcgaaatgggcaccctgtggctggcgctggccttctgcgttaccgggggcgtgattgcgctggcttccctgcgccatattaaaacgccgcagcatatgcagaatctgaccacccgcgagaagttcgccgagctgggccgcgccgcgacgctgctctataccaaccgcaatattctgctgtcgagcatggtgcgaattatcaatacgctctcgcttttcggctttgcggtgattatgccgatgatgttcgtcgatgagctgggctttagcacctcggaatggctccaggtgtgggcggtcttcttctttaccaccattttctctaacgtgctgtggggcattctgggcgaaaaactgggctggatgaaggtggtgcgctggtttggctgcatcgggatggcgctctccagcctggcgttttactacatccctcagcactttggccacagctttgcgatggcgctgatcccggccatcgccctggggatctttgtcgccgccttcgtgccgctggccgccgtgttcccggcgctggagccgaagcacaaaggcgcagcgatttcggtatataacctgtcggcggggatgtcgaactttctcgccccggcgatcgccgtggtgctgctgccgttcttcagcaccattggggtcgttatcgcctataccgcattgtacgtggtggcctttttcctctgtgcgtttatccgcgtcgagcagccgggattttcccacaaggaagcgccggccagcgagcaggtggagttctcttaa

SEQ ID NO: 228247 - DNA, 663 bp, Klebsiella pneumoniae
atgagtattcaggcagtgatttttgacatggatggcgtgattattgattccgaaagcctgtggcggcaggcgcaaatcgacgccctcgcgcagtggggggcaacggcgagcgtggctgagtgtgaaaccctgaccaaaggcaagcgcctcgatgagatcgccggcacctggtgccgctattttcagcttaatgttgccccgtcgctgctggaagacgccatattgcagcgcatcaccggcctgatcgccgccgaaggcgagccgatgcgcggggtgcatgaggcgttacgctattttcgccatgccggctataacattgcgctcgcgacctcttcgtcccggcaggttatcgccgccgtgctgaacaagctctcgctgtggcactattttgatgtgatttgcagcgcggacgatgaagcacagggcaagccgcatccggcggtgtatctgacgacgttggataagcttaatctcgacgccagccggtgcctggtgatcgaagacagcttcaacggcttttgcgcggctcaggccgcgggtattcctacggcggtgattgccgaagatagccagcacgcgcgttttcaggccgccgtgggccgctatcaaaccttacctgaactgctggaagccctcaccgccgagccagaggcggcggtttaa

SEQ ID NO: 228248 - DNA, 897 bp, Klebsiella pneumoniae
atgatgtctacgtttactgccagcttactgatccttaacggcaaaggtgccaatgaaccgcagctacgcgaggcggttaacctgttgcgcgacgaagggatcgatatccacgtccgcgtcacctgggaaaagggcgatgccgtacggtttatcgatgaagccctgcagctgaacgttgaaacggtgatcgccggcggcggcgacggcaccattaatgaagtggcgacggcgctggtggagcgcggcagcaggatggcgctggggattttaccgctgggcacggccaacgacttcgccaccagcgtcggtattccgcaggatctggccagcgccctgaagctggcgatcgtcggccgcgatgtgccgatagatatcgcccgggttaatgataagaccggctttattaatatggcgaccggcgggttcggcacccggatcaccaccgaaacgccggaaaaactcaaagccgcgctcggcggtgtctcttatttaatccacggcctgatgcgcatggataccctgaagccggaccgctgcgagatccgcggggagaactttcactggcagggcgatgcgctggtcatcggcatcggcaacggccgccaggcgggcggcggccagcagctgtgtccggaggcgttgattaacgacggcctgctgcatctgcgcattttcaccggcgaagagctgatccctgccctcttcagcaccctggcgaatccggaaaactcgccgaatattgtcgacggcgtctcctcgtggtttgagatcaccgccccacatgagatgacgtttaacctcgacggcgaaccgctgaccggcaaaactttccgcatggagctgttaccggcggccctgcgctgccggctgccgcccgactgcccgctgttgcgctga

SEQ ID NO: 228249 - DNA, 1014 bp, Klebsiella pneumoniae
atgacaattaagaaactcgatgatggtcgatatgaagtggacgtcagacctgcagggcgcaacggaaagcgcatccgcaggaaattcgataaaaaaagcgaggctatcgcttttgagaaacatactcagtacaaccaccacaataaagattggttagcaaaaccggcagataagcggcatctgtcagagttaacaaaaatatggtgggagttgaagggcaagcatgagactcatggtcgagattatttaggcaaaattgagttattcaccaagattacaagtgacccatgcgcctttcagattactaagtcattgattagccagtacggcacagtgcgccgctctcagggcatcaaaccatcgagcatcaaccgcgatttgacatgtcttagcggaatgtttacctctttgatagatgcagagctatttttcggtgaacaccctttcagggggctaaagcgattgaaagaggacaagcccgaaacaggctacctgacacaagaggagatcgctgatctactgtccaaagtggacggggataataaaaaaattgcgatactttgtctgagtaccggtgcgaggtggagcgaggcagcaaaactgaaagcggaaaacataattcaaaatcgcgtcacgtttgttaagacaaagaccaacaagccgcgaaccgttccgatatccgaggagctggcaacaatgatcacttcaggaaagcgtggttatcttttcactaacgctaactatcctgcgttcagacgactaatgaaggagttgaaaccggacctgccaccgggtcaggctacgcacgcattgcgtcacagctttgcaactcactttatgattaatggagggagcattatcacgcttcaacggattctcgggcattcacgaattgagcaaacaatgacctacgcgcatttcgcccctgagtacctgcaagatgcggtaacgcttaatcctttacgcggtggcactgacgttaagagtgtccacacattgtccacgctagaatga

SEQ ID NO: 228250 - DNA, 174 bp, Klebsiella pneumoniae
atgatgaccgagccccgttgcattgcacagttactccgtaatgaaagcccacgaccggtcaaccccatcatcacccacggcaaaggtcgcaaaggcatcattatccgcacccgcaagcctgggataatcgccacggcaaaaagctacctcaaatcaaaaggattggcattatga

SEQ ID NO: 228251 - DNA, 501 bp, Klebsiella pneumoniae
atgacggttatgactctggcattagttcaaaaacagcctcaatctctccgcgttgtaatcggtaggcatcttgcagaacctcgctggcatgactcctgtgatttttacaatcagatgatggaacgcgatcgcctgacagtctgttttcatgctcagcttaaacagcgtcacgcgaccatgcgttttgaagaaatgaacgatgtagatcgtgagcgtctggtctgcgcgattgacgagctgcgcggtgcgttttctaaacgccgtcaggtcggagccagtgaatcgacgtatataagttatctgacagtaagccagcgtcgcacattattccttcatgccggattaactgagaaagagtttaaccagccttactggcgcgttaatgaagattcttgttattggcgagagcagttattccgcgcattgcgtgaactattcagcttgtttgagtatgccccaactattttgacctcggttaagcctgaacaatatttgcattaa

SEQ ID NO: 228252 - DNA, 216 bp, Klebsiella pneumoniae
atgaataaagatatatcagtacctcgtagcaatatgaaagccctgttagcgcaggccagcattgaggctcagctagtcaccgcgacgcgtttcgcatctgcgcttgattctctgatagctcacatttgcaagtctgaaatgaaccggacggagattatcgagctgttggggcaagaatctgaaaagcttcacaattctattttgaataagcaataa

SEQ ID NO: 228253 - DNA, 276 bp, Klebsiella pneumoniae
atgagcattaatattgttatcgataataaattcgtaattaccagcgaccaattccagtttattttgcaggaaaagaaggtcgctaagtctggaaaaaatgccggtaaagaatggctcgataccattggtttttatccaactatcagcaagctcgtttccggcctagtgctacacaacattttaaccggggaagctcgtcagttttcggagttagaaaagcaggtcgagcagttaggtcaaaaatgtctggaagcattcacagctaatggccattga

SEQ ID NO: 228254 - DNA, 2271 bp, Klebsiella pneumoniae
atggccattgagaaccgggggcgcgttgccccctcgccaccacctccgttttcaaagagcactgacgaaacctttgtcggtgcttatccgtggaacaaacctcgtgaggccataggccgtgacagaccccttacacgtgacgaaatgcgtcaggtgcaaggcgttttatcgaagattaactaccttccatatttcctcagctcgctctttacctctcgctatgagtacatacgcaggaacaaaagccccgtgcatgggttgtatttcctcaagtcgacatttctgcgacggttgtggccgcgcattgagcgtgtaaatcagcgtaatgaaatgaatgtcgatacctcgctgttgtttctgagtgagcgagataattacgctcgtttaccgggaatgaatgacaaagagctgaagaaattcgcctcccgtatcgccgcacagcttttcatcatgtacgaggagttaagtgatgcatgggcggaagcgcatgacggcaaagaatcgctgtttacagatgaggcacaggctcacctttatggtcatgtcgctggcgcagcgcgtgcattcaatatcacgccgcttttctggaaaaaatatcgtaaaggtcagatgacaatccgccaggcattttccgccgtagcgcgtctcatcaatgatgagtggtgggttaaccagtttaaggcgcagcgtatgcgttggcatgaatcgctgctcatcgcctctggtgaagtgaataaagaccgctcaccgtatgccagcaaaagtgctatccgggacgtgcattctcgccgtttggctaacctcgaatacctgaaatcctgtgagctcgaaaataaagtcaccggtgagcgcatcgatctcattagcaaagttatggggagtatttcgaatcctgagatccgccgtatggagctgatgaataccattgccggtatcgagcgttatgctgccagtgaggggcatgttgggatgtttatcacgcttaccgcaccgtcgaaatatcacccgactcgtcaggtagggaaaggacaaagtaaaacagttcagcttaatcatggttggaatgatgaggcctacaccccgaaagatacgcagcgttatctctgtcatatctggagcctgatgcggacggcgtttaaggataacgatttacaggtttacggaatgcgagtggttgagccacatcatgacggaacaccacactggcacatgatgctgttttgcaaacctggccagcgcaaagatattaccgaaatcatgcgccgctatgctttgaaagaagacggtgatgagagaggtgctgcaaaacaacgctttcaggcgaagcatctcaatcagggtggtgcggcaggttatatcgcaaagtacattgcaaaaaatatcgacggttacgccctcgatggtcagctcgatcatgacaccggcaaaccactgcaagataccgctgccgctgtgacggcctgggcgtcgacgtggcgcatcccacaatttaaaccgattggcctccccacaatgggcgcttaccgcgagctgcgcaagctacctcgtggtatcagcattgcttcagaatttgacgagcgcgtcgaagctgctcgtgctgctgccgatgagggggagtttgatttatatatcgtcgcgcagggtggggcgaatgtaccacgcgatagccagaccgtcagagtagcccgcaacgtgactgatgaggtcaacgattacgaagaagacattgagcgtgtcgtcggtatttttgcccctcacctcggtgcaaatcacattcacctaacccggtcagcggattggcgcattgttccaaagcttttgaccgttgagcctttgactttaaaaagcggtatcaccgcgcctcggagtcctgtcaataactgtggaaaacttacctgcggtggcgatatagttatggttccaacgccatcagagcaagctgcagcagtgttaagcttggttgagcgcggagttatcgcttgggatgaccccgaagtcgtttctgtgcttagtagtgctgtaaaacataactcaatggggtgtcacaggaaaaagaggataagaatgtcgctaaaaccttatcaaatagcgccttcagcacgaataactaaagcggagcgtgcattgattcctcgtatatgcatggagcttgctcaattgcgcatcaccccactgagatgggagcttcacgtgttggcacgtggcgccacattcatgtatggagatgaacgaattacctatcgaataacgagtgaatggaatggattttaa

SEQ ID NO: 228255 - DNA, 1719 bp, Klebsiella pneumoniae
gtggaaaggatatttaaagctaggccgtttaaaactcgaaatgcggatgagtatgatatcaataccctccttaatttgttcgtaaatcctttgagtggattatcaaccccattcgattatgagaattctataattaaagggcgaatggggtcagggaagacgatgtatttgagggctaatcaagctttttatttgtcttcgcttctccctactttgatttctggtggtgatgaagttatattgccaattatgataaaattaaatgactttcagcatataactgatcccgatgaaatatatcgacaagtgataattaaaattgtagaagagttggcatcaattcatctttattttgaaggggtgaagaatcttattggaatacacagtaatttaaagttaattccaaggaatctaattgagaaacacaaaaatgcagaagttatgttgaagcttgctgcattaagcagtgatgagtatctccagaaagtatcaattgacaagcaaagtaaagctgggatgaaattaaattttattgaggcatcagttgactggaagaaaaatcatcatcaagaatttaaaaataaaccaagtccaggaataaaggatattgaggagtgttataagtatcttctacaagatacagatggcaagatacttttgcttatcgatgaggcaggggcacttgataaaggtttttttcggggagaagaggataaaacaggtttgtttgaggtcctaatgaatcagtttagaacagcgtcgtttatccgtacaaaagtagctgtttatcctaattcatactctgacatgctcacggaaacgcgttatggtgatgtagttccattagagaatagtgtgatggaggaatctgattacaaacgcttaagaaacaaatctattgacatcataaataactatattaatccgcaaggagatgagagtttaccgtttcgggctagcgatgtttttaatatttaccaagatgctatttatggcgacgctcttgagttgattttatatgcttctcacggaaatatgaggcgcttaatacatttgttagatatggctatggactctgcttattcggaagagggatatgccaaacaggtagacaagcataatgttattgaagctctcaaaaaacatgcaaaaaataatgagggtgctttatctccccaggatagggagtttttggatgacttggttaaagtttgccgtagtcgttctgcttataaattcacgtttccaaatgtccctctttataaatatacaagtagatcgaaggagtataatattatcaacattgatgagcctggctcaggtcgaaaagcaacggtttattcctttgatttttccttctgcgtcttaaaggatattccgactcatagaatgaatgatgatgaaaaagtttataaagaacgttcaggagataatggccgatggtcgtcaaggaaagcaacaattactaacgcaatgatacaacaagctgcgattgaaaaggttgatggggtgattagttggtattctgctgataaagagtgtggctttgtggtagtcgagagtgctggcgcaaaggagggggtgaggtgtttctttcagtgtaaggaaatcattgctgaagatagaaagaaattcattcatgtcggttctcgactccgcttttatccatttgagctgtctgatggggatcttggcgcctttattatcgaagttttatag

SEQ ID NO: 228256 - DNA, 3336 bp, Klebsiella pneumoniae
atgacaaacatcattgaacaatcggtatgggaaggcagcattcacctgttatcgcgtgctgaaaaagtggaaggcggtctgacaggttccgcaaatattcaggctaaacaactggcaaaccgtacccgttatctgatggatagcatggatgtgattaaaacaggtgagtccccgtactggtcagaggatgccgcaatatctgctattcagcagggaattatcccggagggtgcattattctcagtcaggagtcagaacgggctgacgtgggtggatgaatatcgaaatgtgaatggcgtcccggttgctactggcaaatccctgcctgatgcctccgctattattccgttcgtggtgccaaatgaagccgacccgacaggaacgattaccgggctgtcactgacgcgcggcgggcaatatttcatcgtgcgccatgatgatgacgaatatccgatagcgtattacctgaataataacggcgtggccaaaatcgtagaccgggtgccaggagcatcaacggttaatcagatacatcgtgatatcagaaaggctaatatttattcgtcaggaaataacctttttaacaaagatacagtaatctctgggtattatttatatgaaggttctggcgagccgcgagtaaaccctgattattgttattcggactatattggcgtgaaagctgggggcgtgtactgctctgataaaaggattcgtatcgttacgtattacgataaaaattacaattatatcagcgatgtaatcaatgtatattcgtttacaacaccagataacgccgtgtgggtgcgactgtctgtgtcgcttcccctcattgacacttttcagctgtcgtttggtgccggagtgcttccttacgaacgttatcagatggtgctgccgcagaatgttcaaactgccaggatgaatgttattgaagcgctggactttacaccgggaaaaaacctttttgatccggctgctgtgatgaacggtgttcacctatcctctatcgggacaatatttactgatggtgattacaccacgtcggtttctgcttatattgctgtttcgccagagggtagtatttgcattaatcagcagtttaaagcagctgcctggtatgatgaaaatggcctatttatcagcagacagtatgatgaatcatttttggcaaaacctatcggcgccttagtcatcccggaaaatgccgcatttttacgcgttgaggtgccgacggcggtcgtcaaagcaacaatggttgaacgtggcgaggtggcgacggagtttgagcctttttgtctggtatcacctgatgtatacgctggccgaaaggtgaagtttgggcgggggattcagaatgaaaactcattgcttttcggtgctggagttaacctgtttaataaaaataaagtaagcgctggatatattaacgagtatggctctgtatacccgattcagggatcgtcaggcgcggagtatgtctattcggaatatattcccgtgaaagagggagtgaaatataaatcaaacctccagatgcggtttgttgagttttcagacgcagataaaaaatttttatcgaccatcgtcagggtgacaggttttaccacacctgtcggtgcgaagtatgtgcgcgttacgatgctgaaaagcaatgcgccgtcaatgtctctggttgaaggtgagcgcctgggtcaacaagatgaatatgttcacctgatggccccaaaagctaaagacggtacgcctgtacgtataccgggggaaatggtccttgcgaatgaactcgatattgattttgtacagcatggcctgctggtatcagggaaaaacctttttaataaatataccaggaagtcagggtatattgatgagggtggagtaatccgtgagcctgatgatcgttatgattattcagatttcattgctgttactccgggtaatacttatgccttaaaccccggagccagatttgtcacgctatatgcgaaagataaagcgtttatcaggactgtggctgatgccagtcagaatattaaatcaattacgccggacgccgattgttgttttgtccgggtaacagtcagcgtggcctttagtgacacgttccagatggaggaaggtaccgcatcgacggcttacgagccgtttgcttattcgttactttccgctatgcccgatggaacgccggtagccggtggaggaagccagccggagccgcagccggaaacggtgattgtcccggatgtttacgggatggagcgactgcgtgaaatccgtatgcgaatgactaaaatgacgttcgcccaggcggttcggctggtcgtggcgatgctgggcgatagctacaccagaacgtcagcgcgttatgtgctgaaagtggcgcagatattatggcgctatttcaacaatgcaggcacggccgccatagtgccacccatcgggtacggctggcgctcgtttggttttgaccctaacggcgataacactgatgttatcgggacgaaggtcaaccgcagcggcttcacctgcgcttataacaccggccacggcccggatatttcgtcagtgacggcagcggccagcggcgcgacgatttcatatagccaggatttttcgcagggatttgattcgttcctgttcgcggagggtggttcaggtgtgattcagtatcaggctacggggggagagccggtcacaattgacctttcgacctatccggccgggatgcagatttttccgctcgcgcttccgattaccggaaacggcactgtgacgtatacggtcatcaccgcgccggtaacgctttacggcgtcaacatcctcaataaaaccgcatcgggtgtgcttatccacaaaatgggcggtagcggttcgaactcccgtcactgggtgacggcgatggatgcacgctggcttgcggcatttgaaagtcttggggcggatctggttaccatcatgctgggtacgaatgaccagggggcgaagctgtctgcatcgacgttcagggataacattctgacgatgattgataacgtccgttcagttcgccccacggccgatattttgctgatttgcccggcggaaaataaccgcgacggcggaaacagtattcccatgaccacttacgcggaggtgatgtacaaaatcgcacgtgatgacagggatgtggcgtttttaaatatgcaggcgtcatttggtgaaagtcatgaggattatgccgccggttcagcgagaccgtggatgattggcgatgggcttcaccctgacccgaataccggcggttatgcgattgccggtgcaattactcgcgcaataggtctgccggtcgtttaa

SEQ ID NO: 228257 - DNA, 1182 bp, Klebsiella pneumoniae
atgagcgattttcatcacggcgtccaggttgtcgagattaacgacggcacccgcgtcatttccaccgtatcaacggcgattatcggcatggtctgcacggcaggcgatgccgatgccgccaccttcccactcaataagcctgtactgattaccagcgtgcaaagcgccatcgccaaagcaggtacaaaaggcactctggccgcatccctccatgcgatcgccgaccagtcgaaaccggtcattatcgttgtgcgcgttgccgaaggtaccggcgacgatgccgaagcgcagactatctctaatatcgtcggcggtaccgacgaaagcggcaattacaccggcctgaaagcactgctcacggcggaggccgtcaccggcgttaaaccgcgcatcctcggtgttccggggctcgactcccttgaggttgcaactgctctcgcgccgatttgccagaagctgcgcgcctttggctatatcagcgcatgggattgtaagaacatttccgaggcgatgctctatcgcgagaatttcagccagcgtgagctgatggttatctggccggattttctggcatgggataccacggcaaacgcgaccgagaccgcctgggcgaccgcccgcgcgctgggcctgcgcgccaaaatcgaccaggacaccggctggcaaaaaaacctgtcaaacgttggtgtgaacggcgtcaccggcatcagcgcgtcggtcttctgggatttgcaggaatccggcaccgatgccgacctgcttaacgaggctggcgtcaccacgctcattcgtaaagatggtttccgcttctggggtaaccgctgctgctccgatgacccgctgttcctgtttgagaactacacccgcaccgcgcaggttatcgccgacacaatggccgctggtcacatgtgggcggtcgacaagccgatcactgccacgctgattaaagacatcgttgcgggtatcaatgcgaaattccgcgagatgaaaacggcaggctatatcgtcgatgcgacctgctggtttgatgaatcagccaacgacgcggcgaccctcaaagccgggaaactgtatatcgattacgactatacgccggttccccctctcgaaaacctgacgctacgccagcgcattaccgataaatacctggcgaatcttgtgtcatcggttaacagcaattaa

SEQ ID NO: 228258 - DNA, 276 bp, Klebsiella pneumoniae; identical to SEQ ID NO: 215748

SEQ ID NO: 228259 - DNA, 2442 bp, Klebsiella pneumoniae
atgagtaacgacgttaaattgcaggtattactcaaggctgttgaccaggcgacccgcccgtttaaatccatccagacagcgagcaaaacgctgtctggtgacatccgggacactcaaaaatcactgcgtgaactgaacggccaggcatcccgtatcgacgggtttcgcaaggccagcgcgcaacttgccgttaccggtcaggagctgaagaaagctaaacaggaagccgccgcactggcgatccagtttagaaaaacggaacagccgacgcgcgcgcaggcgcaggcaatggatgccgcccgaaaaagtgccgcagcgctccagctcaaacacaacagcttgcggcaggctgtacagcgccagcggcaggaactcagccaggcgggaattaatacccgtaccctggccgcggatgaacgccggttaaaaaccaacattagcgaaacgacagcacagctcaatcgtcagcgtgaagcgctggcgcgggtcagcgcgcaacaggcaaagctcaacgcggttaagcagcgatatcaggccggtaaggagctggccggaaatgcggccgcaatgggtgccgccggtgtcggtatggcgacgacaggcacgctggccggtgttgcactgatgaaaccgggttatgattttgcgcagaaaaactccgagttacaggccgtgctcggcgtggcgaaagaatcaaccgaaatgatggcactgcgaaagcaggcccgacagctcggcgacaatactgccgcctctgccgatgatgcggccggagctcagattatcattgcgaaagcgggcggcgatgcggcagcaatccaggctgcgacccccgtcacgctgaatatggcgcttgctaaccggcggacgatggaagagaacgcgcggcttttgctcggtaccaaaaacgctttccagctttcaaatgaccgggtagcccatatcggcgatgtgctttcagcaacgatgaataaatcagcggccgattttcagggattaagcgacgccttaacctatctggccccagttgccagagctgcgggagtaagcctcgaagaagccgccgccatgacgggtgtgcttcatgataacaatatcacaggatcgatggccggtaccgggagcagcgctgtcgtcagccggttacaggccccaacaggtaaggcatgggcggcattaaaagagctaggggttaagacggcagacagcaagggcaacatgcggcccgtatttaccattctgaaagaaatccaggccagttttaaaaagaataagctcggaacaagtcagacaggcgaatacctgaaaacgatattcggcgaggaagcgctgaaatcgtctaatgccctgttagacgctgcggccagcgggaaactcgataagctgacagcggcatttaaagcctcggacggcaagaccgaagagctggttaaagtcatgcaggataacctcggcggcgacttcaaagagtttcagtctgcgtatgaggctgttggcaccgacctgtttgaccagcaggaatcctcattacgcaaactggtgcagactgcgaccggctacgtgctcaaacttgataaatggatccagcgaaataaagagttcgcgcagacgcttggggtgattaccgccgtggcgcttggcgtggtgggtatgattggggccattgggctgattgcctggccggttataacgggagttaatgccatcatcgccgctgcgacggcgctcggtaccgtatttacaacgatggccggcggcatcattaccgctattggtgcgatttcctggccggttgtcgctgttgtggctgcgattgtcgcaggggcattgctcatccgtaaatattgggagcccatcagcgcatttttcggcggagtgattgaaggaatacgggctgcatttgcgccagtagctgaactgtttgcgccgcttaaaccgatgtttgactggctgggcggaaaactgaaagctgcatgggactggtttaacaatttgattgcaccggtcaaatcatcgcaggaaaccttaaacagttttcgtgatgccggtgtgttgttcggtcaacggctggctgatgccttaacgctgccgctgacggtatttaataagctgcgcagcggtattgattgggtgcttgagaaactcggcattattaataaagagtccagcacgcttgaccagactgtcgcaaaagcgaacgcagccacgcagggtaactcttatattccggcaaccggcacttacggtggctatcaggcatatcaacccgtcaccgcaccggcgggacgttcttatatagaccaaagtaaaaacgaatatcacatcgacgttcaggggggcggcagtggtacgcagctcgatcgccaactacaggatgcgctcgaaaaatttgagcgtgaaaaacgcgctcgccagcgtgccagcatgaaccacgacggatag

SEQ ID NO: 228260 - DNA, 480 bp, Klebsiella pneumoniae
atgatgctcgcactcggtatgtttgtttttatgcgccagacgttgccacaccagacgatgcaacgcgatgccgaatatcggtggccgtcaaactcccgcgtaggtaagcgggattctttccagtatctggggccgggggatgaaaaaatcaccctggccggtgtgttgtacccggaactcaccggcggaaagttgacgatgacgaccattcgtttaatggctgacgaggggcgcgcctggccgttactggatggtaccggcacgatttacggtatgtacgtcatcaataatatcagcgagacaggaagcctgttttttgctgacggaactgcgcgcaaaattgattttacgctgacgctcacccgcgtggatgaatcccttgcggtgctgtatggcgatatcggcgaacaggcaaaatcactaattggtaaggcgggaaatatggcctcgtcagtggccggcgtggtggggattagctga

SEQ ID NO: 228261 - DNA, 222 bp, Klebsiella pneumoniae; identical to SEQ ID NO: 202031

SEQ ID NO: 228262 - DNA, 630 bp, Klebsiella pneumoniae
atgcccctgtttaaccgctttacgcggatttctgccgggtggcgcttcgcttacccggcctacaaaaccatctacctatcagaaggttactcaacaccccaggcccggcaagcgccgcgccgccgggcaaggacagcgggcgcggtgccgcttctgtgccgggtggcgctacgcttacccggcctacaacgccatttacctatcagaaggctgctcaacaccccagacccggcaagcgccgcgccgcccggcaagcgcagcaggcgcggagccgcttgtgtgccgggtggcggctacgccttacccggcctggagttcgtgcgacctgtcgttaattttttcaccagccttgctgaaactgccggtgctggcggcctcaaaatcgctgagacgttcccggaaggccggggcagcccgcatggatgcgggctgagggccgtgttttgcacggacgctgcctcggcccgacccgaagcctgcagggataagtcgaaggtaccgcgtagcggcgattttgctggccggagcccgggggtacagggggcggcggcgactggccgccccctgtgcgctccctgcgccgtaagagacataacgcagaaaattaaccgggagcgcaatgtgcgctga

SEQ ID NO: 228263 - DNA, 123 bp, Klebsiella pneumoniae
atgaatggtagcgattatattgccgggctggcgatgattggcagaccctggcggattgacaactccggcatgataaaacacattgtcccctctgaaggggcgccggttgccagctcagtttaa

SEQ ID NO: 228264 - DNA, 234 bp, Klebsiella pneumoniae
atggaaaaacatagcagaaatttatcgattctggttgatggatcattgcttgccagcatcgacaccagcaaggctgttgcagctgattacatcagctttatgcaagcggttactgaatccctgatgcataccgaatcacttgagcgtgaagcaaatgcatcagggaaaaccattaagcacgatagttttagtacttttggtgcgataccgattacagagaccaaaggtctttga

SEQ ID NO: 228265 - DNA, 627 bp, Klebsiella pneumoniae
atggaaactgtcgggcagcgaatcaaatcactcagacgcatcaccaagacttctcagaaggagctaggacgattttgtggggtcagtgatgttgcagttggatattgggagaaagatgtaaatgtcccaggcggagaatcattatcgaaacttgcaaaatttttcaacacatcaatagattacatcctttatggtacggagtttgaaggtaatctaattacaaaaatgaggagagtgcctgtcatatcatgggtacaggccgggtcatttacagagtcaaatgctgaagatgtcctacacgatacagcgaaatgggtcgaaacctcactccgtatcggtgataactccttcgcgcttgaggttaagggcgactcgatgactaaccccaatggcttgccaaccatacctgaaggcgcaaccgtgattgttgatcctgatatcgagcctttacatgggaaaattgttatagctcgcatagatggtacaaacgaagctacagtgaaaaagctggtcatagatggatcacaaaaatttctcgtcccactaaatccccgctaccccaacatagccatcaatggcaactgcactattatcggtgtagtcaaaggcgttcagtacgaactctaa

SEQ ID NO: 228266 - DNA, 216 bp, Klebsiella pneumoniae
atgaccaccgatgatgttgaaaagtactttggtaatgctgaaaaggtagctgagttcttcggcataaccagcgaagccgtttatcagtggaggaataggccaggccgcttaatccccaaaggcagggcggcggaggcagcataccgcacgggcgggaagctggttttccttccagggctctaccaaaagtctacccaatcaaaagttaagcagtaa

SEQ ID NO: 228267 - DNA, 606 bp, Klebsiella pneumoniae
atgtggcaaggcgtaccattcaaattactttctggcaatctttctgagacgacttctatcattgtcagcaaaattccgcatattattgtggaatcaaatcctgattatcttagtcaggtattaactacttctgctgcgctttttggtggtgttataacggcctttgttgcattgaaagctataaacgcaaataagaagcaaatgttgcaacagcaggccattatagagcggcaaaaattcattgatgaacttcgttctaggcttgcattatttctagcaaacgctgaaaacctttgcgtaaccgtggacagagatgtaaagcaaagaatgttaatggttagcggagcaccttttgatacacgtgagaagttgtctcaaatagcttatgagttagatatctcgtatcattaccttgagttaatgcttggcggtaacaaaaatttcctggatgtaattgagttaattcatgttatagagaaaagaattgctaaaatgctgcagaatggtccattttatgatattgacaaagatgctgctgcgttaaaagagacggccattagatgtatacaggatgagtgggagagtgtgcactcatcctttaagtag

SEQ ID NO: 228268 - DNA, 231 bp, Klebsiella pneumoniae
gtgaacgttgagaacctaagtaacgcgcattacatctataatgagatgaaagaactacagcggcagaaaggcatactggaaagtggtgctgggcttggcgtgacaatccaggctacctatcaggataatacctttcttgaggctatacgcccgcatgcagtagctgaaattgaccgccgtattgaggaaaagaaagccgtgctggttaattttggagtttccatatcttaa

SEQ ID NO: 228269 - DNA, 540 bp, Klebsiella pneumoniae
atggatattaaggataaaatcaataccattctgttatgtgacattgccattcacctgggtatcgaaactgatattgatccgcagcttgttaaatatgttatgtcatcaggtaatgattgggttctcaaggccgaatattcatctttggatgctggcgaaccaagtaaagaagcccgggattttgttactgctgtattaaatatgtaccgcggaatttccaaagctttcagggaacttagtgatgacgagcaaaatgaattagtccgtgaccatcatcttaaaatacatgacggggtaattcagatcccaggttttgatggtaataatgaatgcgaatacttcagtatcattgaggcgtatcagaaatttgatcgttaccctgaacagcaacagcccatcgccaatactcattcacatacagaacatctatataacgcaatgcttgatgagctcaagaaaattgatgctgtaaatcgagactgggatttatcgaaggaagagctggcttccattctttcaactgctccacgcagtttctaa

SEQ ID NO: 228270 - DNA, 306 bp, Klebsiella pneumoniae
atgcctggcatgcagttcctgatggcgctggcgctccggatgggccgcacgctgggcgaactgcgacaaaccatgacggtcggtgaattcaggatgtgggctgaatatgactgtatcagcccaatcggcgatattcgcggcgatattctcaatgctcagctggtatctgcggtttacggagcgcagggcggtaaagtcaccattgaagatgctcagcttcagtggagcacagaagaggatgaggtaagcgacagcggcgatccctttgcaggcttagaggcagcactgcttgctgcatctgcttga

SEQ ID NO: 228271 - DNA, 477 bp, Klebsiella pneumoniae
atgaccatactcgaaagactctatgccagcagcggatcggaagccattcacgatacgctgcaaattgcagccggcgatcaaaattactggctgaccagcggctgggataatgtttccgttacgctcgaaaatggtcaaacggcgacgtttgagggatgtgcgattgacatcgcgttacccgcccgcaatgccgatggaacgcaggatttaaaatttgcgatcagcaatatcgatggtgaagtatctggcgccatcgataatctgctcgatgaaatgaagtcagcaacgttgacgtttcgccggtatatctcaaccgatttatcagcccctgccgctgcgccttatacccttgatgtaaagtccggctcctggacacaaacatccgttcaggtcactgcggggtatatgaacatccttaaaacggcgtggccgcgtaaccgatacaacctcgccgagcatcctggcttacgctactga

SEQ ID NO: 228272 - DNA, 381 bp, Klebsiella pneumoniae
atgtttagccctgaaaaataccgttcagtcacctggctgaaaggcggtcgcgtatacccgcaactcgactgtttcggaatcattaatgaaattcgtaaagatctcgacctgccattgtggccagacttcgctggcgtcacgaaagacgaaggaggcctcgaccgcgaagcccggaaattcatgaaatcgctcacgtgctgcgaaccatgcttaggcgccggtgtggcctgctattcgggatctactgtcacacacgtggggattgtagtgcagttggataaccagctgcaggtcgcggaatgcaacccgggaacgcacgtcacttttttgccgctggcgcgcttcgttcgacgatttaaccgcgtggagttctggcaatga

SEQ ID NO: 228273 - DNA, 3075 bp, Klebsiella pneumoniae
atgacaatcaggattttcccctcccgacttccgggggagccgctggagcggcacgaacacggcaccctgactttgcacgaatggatgtcgaaaaacgtcccgagttattcgctggaaaaagcgcaccctatcactattgagctcggcggtcagattgtaccgccgaatgaatggccgttatgttacctgcagccagacagtgatgtcaggatataccctgtcccgtacggtaccgggctggaaatcgcggtgtgggtatcgatcgctgtctcgatagcatcgacagcctatgcgctgtttttcgctccaaaacccgagctgggcgggttttcatctaacaatggcacctcgcttgacctgaacccggcaaaagcgaacacggcaaagcttggcgacccaatcagagaggcgttcggtcgcaacaggatttacgcggattatcttgtacaacccatgacccgctttgacccgaacgacccgaccataatgcgcgtggaaatgtttgtttgcctgggctatggccggttttcttatgctggtggtgattttcgggtgggtgaaaccccggcgcttacgctgggtgatggttttagtttcacagggtacgggcctggcgaaaacgttgctggcgatcatcgtagtgaatgctggtttaattctactgaagtgggcggtacatcgagcggatctgggttggatatggcccagacggcaccagaaaccagcgatattatcgctgactcaatgacagtatccggtagctctgtttcgtttattggccttgacgttgatgacgataacgacagtaacaatgatgcaaacaagttgcctccatcctgggttgaaggggcaattgttacattgctggctccgctcaatattcaggtatcgaccattgccggcgtgaacgtgctggccagcgacatgctggctgagtgtgccccgtatgtcggtatgcccgtgacgctgaacttcagcggtgttgattatgacctgcagattgcatcgtttacgccacaacagaatgccgtgccgggcgttggtggaactgccgcggtgctgcgcgggaatgcggcgccgaccacttatgatttttccggtgccgggcagacgtttaccgtgacctggcaggggactacgtataccgtttcgctggtggctgattacggcactatgtcggggttgctcgcggcgattaacggcgggctgaccgggtcggggttggtcgcccatgatgacggcggcgtggtgcgcatcgtggagttatcgagcccttggcgcgggggttccatcacagcttcaccgctcccggtttccgtttttggtgattcgccggaatttactgccggtacggcatccagtggcggtacgccggcgattacagcaaatgtcaccctggcgtatgagtcgggaacctccttctccggtcttccagacggaaccctgcgaatagctctggcccaccgcggcaatgaatacagaatttcatcggttgatggtccaactgcatctgttcagcgctttgttaacggagctgtcgataatacctggcctggatttgcgacacgtaccgtcgttgatttttcggcatcgggtattaacgacaacaatacgtggatggggccatttttggcctgccctcaaaacgaagtgatcgatgcgttcgaggtgaatttttcgtttccaaacgggatatgcggcttcaataacaaaggcggcaagcgtattcgtcacgttgagtgggaaatccagtaccgcgtatatggctctggttccggctggaccagcaaacagggggtctatgccctgcagaacgtcaatggcctgggttttactgagcggtttaatcttgacatgccaggcctcgttgaggtccgttgtcgccgcaggaacgagcaagggacgaacaatgcgcgtgatgccatgttctggcaatcactttccgggcggttactggcgcgccccacctcttatgcgggcatctctacgatcggtatcacggtagaaaccggcggccagttggctgcccagtcagataagcgcgtcagcgtggtggcaacacgcaactatgacggcggtggcgaccggactatcagcggtgcgttttatcatcttgctcatagtctgggctatcgggacgatcagatcgacatggctaccatcaacatgctggagtccacctactggaccccgcgaggtgagtatttcgatcatcaggcatacctcgacagcacgtcggcgaaagatattttcgacaagatagctgaggccggcatgggctatttcctgctttcagatgggatgctatctgtcggcagggaaggcgtcaaaaactggaccggtattatcacgccacaggatacggttgaagaaatgcagacggcgttccgtgcgctgactgacgatgattttgacggtgtggacgtgaaatacatcaaccccacaacatgggcggaggaaaccgtgcagtgccgcgcgcccggtaatccttacccgcgcaagatcgaatcgtacaaaatcgatgtggtgatgagcgcagacagagcataccgcattggcatgcgccgtctcatgaaatatctgcatcaacgacggacctacacgacgacgaccgaaatgctgggctggtgtcatgagtttggcgatcacatcattctttctgacgatatcccgaccgggaaaacccgcagctgtttaattgacgcgatgatgtatgacacgcaggaaatcacgatgcatgttaccgagcctctcgactggagctatgcgaatccgcggtgctggatacagtttcaggattccggggcttcgcggttactcacaccacagaggatcgacgattataccctcacagtaccgtataacgacgatctgcacccggaagactgggttatggatgaccctgatattgatccaccgcggttgctgttttgtgacagcgagaagggcgcccgtcatgggatagttcaggatatagccccagtgggcgatggtaactgccagatcactgccccggaatataaagaaattttctatcagtacgacgacgctacctaccccggcaacgtcgcttaa

SEQ ID NO: 228274 - DNA, 2484 bp, Klebsiella pneumoniae
atggctgcagataacctgaatccgccgctgggcacgacgacgccggaaatttttatggacaacgtgaagcgcgccgatcggctggtaaacggcccggcggatacggtacctgaccgcggcggggctccgctggacacctggcgccagatgatggcgaaaaatgacgagatccggcagaacatcattccgctcagcaagcaatatatgacgctggcggcggcgcaggcggatatcgtgaatattccggtggggagcaccacgtattaccgcagcccggatgacagtgcgctcgcagttgaggttatcaataacgccgggacgctgcagccaaccggccgaaaaatgccctcccagcaggctgtggatgccattatcagggctgtttttggcggtcttaatgtgttgtttgatccgctttgcgaattacttcttctttatccttcccttggcgggaaaacacatatccctctggggtcaatcacagcagcggcgaacacaaattcaaggatggggttcccggctattgtggcggggccagcagcgggaggtgtggcagcgagaacggcatggcttgctgattgcggtttgaaggcgggggatgtaatcagtacgagagttactgcgtggtatgccaacgcaggcggacgcgtggcctatgttttcagggatacgtctggtacacagattggcacgcagggattgcaatatgccaccgcgacgggcgtgaacagttttacaaacacgctgactgttcccgccggggcagtcaggttagatattcgggtggaaaatacggctaatgccggactggtagagctggctgttgtgttcgtgattactgcaaacgcttccgctaacctggttgttcctggacgtcctctctctccttatcccgtccctctcagcgcgggagcggtctcgaccgatgcgatacagaaaaaggcggtgacagtagaaaaagccgccttttttgttcctggggttaacctcttcgataagagtgcggtgacacctgattcatatgttgatgcctcaacgggcacaattaagacaaatgtaacttatgatgcctcagattttatcccggttgttgcagggaacgcctatacgcaacactatgctcatcaaactgcatattacgatgcaaacaaaaactatttgtcaggtgagcaggcatctacatctccggcaacaccccgaactttaacaataccgacaggtgccgcttacatcagaatgaccgttgccaaaacggttctgaacacaatgcagtttgaaaagggaagcgaggcgacgggttaccagccctatgctgttcagcttgatccactgctgatacctcagacgaacactgcagttatttctgactatgtggaaagagcgcatcaaatacgtgttggtcgtatgaagctaagccagctggaatcaggagcatcaaccattctaaccgtcggtatctttggtgactcctggccaacgcagccaaaccggttttcacagccattagcaaaggcgttgagagcaaagtatggcgctggatcgggggttgggtggacgtcgtttggaagacatgcaacctcagagagcataattaacgccaatgtgttttctccgagcagttcagacgtattgaaaacattgttcacatggacgggtaactggttatttagctacagcggaactaaaaatcccactaacagctctccggatactgccgtggttacgtcatccacacctggggataagctgaaagctactgttcccggaacgtctgatggtggatggtcaacgtgcaggcttgggtatgtgggtactggtgacggtgttattcggtataactgggatggtggggcatggacgacactcaccgtacaaggtagcgggttgaagtttgttgatattaacccaccggctacagtaaacgcgtcgaacgtgctcaacattgagaacgtgtccggtaccgtttcactctgcggactaaatcccctggcaaccggggcaggcgtacgcgttcataagcttggcgcatccggttcaagcctcgccagctggctaacaatggatgcgggtgattttgcgaaggcgctgacggaactggcgctcgacacagtaatcattctgacaggcacaaacgaccagcgaattacgggaggagcgacggctttcgagaataacctccgctcgttcattgcccgcattcgggcagctttacccggtgcagacattctgttcgttatgccctgcgagaatgggcgcacagataacccgactacgatggcaacaatggcaaaacgggcccgtgccgttactgctgagcttggctgtgcatttataaacctgcagtacatttttggagataatccggcagattatgcctatggctcgattcactcctggtttgccgaggatggcattcacccggatccggcaactggtggttatctgattaaagatgccgtctttcgtgctttaacaaatagatag

SEQ ID NO: 228275 - DNA, 852 bp, Klebsiella pneumoniae
atgaatacaatcattctcgccgtcgttttgattagtggctacctctacgtcacacgatcagtctctgcgagatataaatttaagcgttccgaaggctgggacgcttatttttatgtagctgcatggggcgttctgttcacgcttgccgcatggcttttatgttcgttcatcagcgtgttgggaattttccgttggatatatggcttcttgttatctcatgattttattggggaaagcaccataaagcgcgtcttccctctttcccccgcagagcaatttaaattcgctgatttcaaattcgcagtttttggtgtgacgtcgatgtttctggcatgggctgcaggacatggcatgagatggtatgtctgtagcagtactgaccggaggattgaggcattggttaaagccgtacatcacgaccctctagaaagcctcctcattgaggctgccgtcagaaagatgccggtgatcattactctgggatcgagaaaattttacgttggtatagtggattgccctcagtttgagcatggcaagacggattatttgcagatgttaccgttgttgagcgggtatcgtgataaggataatctaacggttaatgtcaccacgaactacaagcgtcactatatggatagtggcattcatggtggcgccagtgatggtcaggttactcttgctgacttcaggacgctggttccaagggatgaaattgaaggtatctcgttttttgatacagacacatattcgcaattcaaagcaaaagaagagtcggataaggtgggttcaactgcactatcacccagctttgttccgagaaaaagtaataatctgccaccgcaacagcaataa

SEQ ID NO: 228276 - DNA, 216 bp, Klebsiella pneumoniae
atgtcatttacattcggattgtcactatccggggctatgttcagttcgaaagagcgactgaccaaggctctgaaggacaacaaaaacagttacaccattagtcgtgatggttatgtatctcttgacctcaacaaaaaagaggtcgtagatgcaatcactcgccagattgagaaactcggcgatatcaaggaagagtctggaaagaaaggtgaatga

SEQ ID NO: 228277 - DNA, 891 bp, Klebsiella pneumoniae
atggcagatgacatccagaaaaaatatctcaaaatattgttaataaagtctacgtataaaacattactgggtcgccccgcagatcctgacggtcttaaaaattattaccatgcaatttctgacaagtcgcttgcagaatcagcacaacttcttaacgcatcgctgatgcatagtgacgagttcaagggattaacaccatccagaatggcattcgagaatgtatgtatcccgccacatcctgtatcagggattgaaactcaaggacaatgggctgtgaagcacattgtgtcattaggaagccattgtttaacgtcgtggacactgaaaaaatttaatctgaaaaaaatctctctgccttttgactggattttttcctgcccggcgatggtcatcgattgcctgagggacgattttcagacttttttagacaaaaacgaatatagctcattaaatcgccagtccaaagaacccggcgcccaccacaataaatataaagaaaaatataacctgaatgatatcttcacccatcgcgatcccaccaccccagccgattatgcgtattacctccgggcagtaaagagattcaggaacatattaaaaagcgcggatggcaagctttttgtcatttgctgcagagaagagatcgaccttgccaaggcgctcccggcattagtcgctgaacttgctcagcacacgacgaacttttatctgttagctttttcactgcggaaaccctctcaccttcagctggagcgcatcgcgtccggggagaattattcgctatatcgttttacccctgagtctgaagaaagatttaccggcaaattcccctcgcttacggatgagatggtatttatatcgaaagtactttctttcaacctcgaactatag

SEQ ID NO: 228278 - DNA, 597 bp, Klebsiella pneumoniae
atgagccagcccgatattgttgtacccgttgcgacggttgacaccagccagtgcatgattaccgcgccctggtttgttcaggatacggaatatccgccggcgctggcgacctacaaaccgctggtgaatggtgaggaggcttttgccgctgtttatcatgccatcgcgaacgcacaaaaaacggtggatatcatctgctggggatttcagccttcgatgtattttattcgtgatggtaagtcgctgtgcatcggtgagttgctttgtaagattgcggaagaaaagaaagtgcaggtgcgtattctgggctgggaaatgccctgtaatgccgccggtgggggaggagaggccaacttaccaggtaagggagctattcgctataaagaccggaaaggccaaagtactacggatgaacgttatgcctatgaccgacaatggttcagtcagtattctctgtcaggggaatggtccgatcatcagttaaaaaagggacaggccgggatggcggaaattgcttccgcacccatagcgcaacgacaagaaaaattaaggaaggtgcgaataagcaggtcatttcttcccaagctgactcgctga

SEQ ID NO: 228279 - DNA, 720 bp, Klebsiella pneumoniae
ttgagcataaaatccattcaaaaacaaaatgttgtaaatgaaatttatgatcagatctgcagcaagctgctggacggcagctgggcgccaggtagtcgtttaccttcggaagcggagctaactgcctcatttaacgttagccgtgtcagtgtacgtagtgcggtacagcgttttcgtgatcttgggatagtggtgacacggcagggtagcggcagctacgtgagcgaaaacttcactccacacatgttgagtaacgagccccgcccaatcatgcacctgagtcgcgaagaatttcacgatatgatgattttccgccaaaccgtggaatttaaatgtgtggaactcgcggtcttgcacgctaccgaagacgatattcgtcagctcgaagaagcattgaacaatatgctgatcaacaagggtgactataaaaagtattcagaagcggattatgagttccatctggcaattgtcaaggcctctcataatagtgtcttttacaatgttatgagttcaattaaagatatctattactattatcttgaagagctcaaccgtgcactgggtattactcttgagagcgtggaggctcatattaaggtttacatgtccattaagaaccgtgatgctagttctgctgtacaagttctcaatgaagcgatgtctggaaatgttgttgctattgaaaaaattaaatctatagatatctctggggataaataa

SEQ ID NO: 228280 - DNA, 1287 bp, Klebsiella pneumoniae
atgattcatagtatgcaaaaaaaattagctccgattcgctggaagaaactgattccactggctttcattacctatagccttgcctatctcgatcgtgccaattacggatttggtgctgctgccggtctggctgaagatcttaatatcacgccagggatttcctcattattaggtgcattgtttttcctgggatattttttctttcaggtgcctggcgggatttacgctgaaaaaagaagtgctaaacaacttattttttggagtttaattctttgggggatattagccacggcaaccggtatggttcatgatgttaaaaccctggcagtcattagattcttgcttggtgttgccgagagtgtggtaatgcccgctatgcttgttttcttaagccattggttcaccaagaaagaaaggtccaaagccaatacattcctttttctgggtaaccccatcacggtactctggatgtcggtattatcagggtatctcgtggatgcttttggctggcgtggtatgtttattatcgaaggcgtacctgcgattatctgggcaattatctggtgggtgatatttgttgaccgacctaaagatgcaacatggttaacagcgcaagaaaaagaagatattgaagcagcgttggcagcagaacaaaccaatattaaagaaataaaaaactacactgaagcatttcgctccggtaaagttttgtccctttcatttattcattttttctggaatattgggatgtatggtttcatcatgtggttaccctctattttgaaatcggcttctgggctgggcatagtcgcaacaggttggctatcagcagcaccctatttattagccgttccattgatgctagctgcatcatggtattcagataaatttcttaaccgtaaaattattgttctgttgtttttaggacttggtgctatctgctttattggatcgtttaccattggagcatcaaacttctggctctcatatgttctgctgatgattgctggcggcgcgatgtataccccttatggaccattctttgcggccattccagatatgatcccgcgtaatgttgtggctggcgcgatggcatttatcgtgagttttggcgcgttggggtcatttgtaggttcatggatagtgggttatctgaatggtataactggcggcccaggtgcttcttatgcctttatgggaatctcactggtgctggcagtgctgctcacctcccttacttcgtttagtagtaaagaatccaggcaagcgaaagcacaaacttgctaa

SEQ ID NO: 228281 - DNA, 768 bp, Klebsiella pneumoniae
atgaacgctttatttgatttaaccgggaaaacggcgctggtgacgggttctgcacgcggactgggctttgcctacgctgagggccttgccgctgcaggcgcacgggtcatcctgaatgatattcgcgacacactgctggccgaatccgtggatacactgacaagcaagggttacgacgcacaaggcgtggcttttgacgtcaccgatgaacaggcgattgaggcggcttttagcaaactcgatgcagaagggatcagtgtggatatcctgatcaataacgccggtattcagtaccgtaaaccgatggtcgaactggagctggaaaagtggcagaaggtgatcgacactaacctgaccagcgcatttctggtgtcccgcgcggcggcaaaacggatgatggcccgcaacagtggcggcaaaatcataaatattggctcgcttaccagccaggctgcacgaccgaccgttgccccgtacacggcggcaaaaggcggtatcaaaatgcttacctgctcgatggccgcagaatgggcgcagtttaatatccagaccaacgccattgggccgggctacattctgacggatatgaacactgcacttatcgaagacaaacagttcgacgcctgggtgaaaagcagcaacccctctcagcgctggggtcgtccggatgagcttatcggcacggccgtcttcttatcatccagagcatccgattatatcaacgggcagattatttacgtcgatggtggctggctcgccgtgctgtaa

SEQ ID NO: 228282 - DNA, 1254 bp, Klebsiella pneumoniae
gtgagtaacctgaaaatcaccaatgtgaaaacgattctgacggcgccgggcggcattgatttggcggtcgttaagatagaaaccaatgagccggggctgtatgggctgggatgcgcgacctttacgcagcgtatcttcgcggtaaaaaacgcgattgatgagtacatggcgccttttctgattggcaaagatccgacccgtattgaggacatctggcagtcaggcgcggtgagcggttactggcgcaatggcccgatcatgaacaatgcattgtccggcgtggacatggcgctgtgggatatcaaaggtaagctggcggggatgccggtttatgatctgctgggcggcaaatgccgtgatgggatcccattgtactgtcacactgacggtggcgatgaagttgaagtggaagataacatccgcgccagaatggaagaaggctaccagtacgttcgctgccagatgggaatgtatggtggtgcggggaccgatgacctcaaactgatcgccacgcagctggcacgtgcgaagaacattcagccgaaacgttcaccgcgcagcaaaacgcctggcatctactttgacccggatgcctacgccaaaagcgttccgcgtctgttcgaccacctgcgtaacaagctcggttttggcatcgaatttattcatgatgtccatgagcgcgtcaccccggtggccgccattaaccttgcaaagacactggaacaatatcaattgttttatctcgaagacccagtcgcgccggaaaatatcgactggttgaaaatgctgcgccagcagtcttccacgccaatatccatgggcgaactgtttgtcaatgttaatgagtggaaaccgctcatcgacaacaaactgatcgactacattcgttgtcatgtgagcaccatcggcggtatcacgccggcgaagaaactcgctgtctatagcgaactgaacggcgtgcgtaccgcgtggcacggtcctggtgatatttcaccagtcggggtctgcgccaatatgcatctggatctgagttcaccgaacttcggcattcaggaatacacgcccatgaacgacgcgctgcgtgatgtcttcccgggttgcccggagattgacctcggctatgcctacctgaacgataagcctggcttgggtatcgacattgatgaagccgaggcggcgaaatacccgtgcgagggggggattccttcctggacaatggcgcgcacacctgacggcacggcttcaagaccgtaa

SEQ ID NO: 228283 - DNA, 207 bp, Klebsiella pneumoniae
atgctgatggtggccctttttttcagcgccgggggagtgtatttgaagaaccagatctttctgccgaatggcttaatcaacaacgccagcccgtcgccatcgcgtagttgctactcggtattagtttggtatttcaattggttaggtatctttttgcaccatggttttttacgttatggcatcgtggtgcaaaacaagcatagatga

SEQ ID NO: 228284 - DNA, 552 bp, Klebsiella pneumoniae
atgaaaataaccaccctgggtctggcgatgctcttcgtcggactggccgccggcccggtttacgcggccgacggcacgctaaatttcatcggcagggtcgtgaacggcgcctgcaaactcgaaggggcgggcaataacggggtcatcgacatcagcatgggcgatattccgctgtcgagactgaaaaatagccagtcgggtaccgggccagcggtcggcgtcgatattcgcgtcaaagattgcgagaaaggcacctactacattgtggtggatggcccctctcccaccgccacgcctgaaaatcatgtgctggccctcaacgatagcggtaagccggccggcagcgtgggtattctgctcaccgaccgtacggggacgccaatcggcctcgatgcacacctcgatccacagcacgatccccgcattgagatcccggtggacggcggctccggcaccttcagtctgaaagccttctattacacctgggataaagcccacgtactccccggcgacggcaacgcaacggcccggtttaccattatgcaggaatag

SEQ ID NO: 228285 - DNA, 690 bp, Klebsiella pneumoniae
atgaaaatacagctggctgtgctgttgagcgccatgacctttcaggcctgcgccgggatcaccatcgatgccacgcgggtggtctactcaggaaaagacaaagccgccaccctgaacattcataaccgcagccgcacaccttataaagtgcagatctggctggacgccgggctcaacaggtcgcgcgtcggcctgccgatggtggcgaccccgccgctggtctatttatccccccagcaaaccgcccagctgcgctttatctatctcggcggcgggctccccgccgatcgggaaagcctgtactgggtcaatattcaggagaatccgccgccgtcagacggtaaccatacgctgcagtttatcgtccgcacccgcctgaagctcttttatcgtcctcccgccatcgccaccaccctcgccagagaggtgcgaaagctgcagtggcagcagagcggcaataacctgcgcttaactaactcaggcccactgcatatcaccctggtcaacggggcgctgatcgataataaaggccacatttcgccgatgagaaacgtgatgctccggccgtacagcagctataccgtgtcaacgaccgacagcgctcgcctgtacaagctgaactatatcgacgatgacggcgcggtggtggcgatcccccttcaggcggcctatgctccggccccacgctag

SEQ ID NO: 228286 - DNA, 1269 bp, Klebsiella pneumoniae
atgaccagtaaaagcgagctaaatcaatttactgcgactaaagcgacgcctgacgcattgccacaacgcgtcgctgagaggcggacgctggcgctgggcggccttggctggacatttgaaagctacgactcctttctcctttcattgctgttgccagtgctgggcgtggtgttcggtattaataaaaccgagcttgggctgtttatcagcgtcacggccggggggcagattattggcgggatcctgtttggttttatcgccgacaaaattgggcgtgtgaaaacggcgctgatctgtatcgccatctattcactcttttccggcctgttagcctttacgcacgatcaacaacatttcgcgcttttacgtttttgcggcgcgctgggtatgggcggaatgtggacctcgggcgcggcgctgattgctgaaacctggcgacctgaacggcgcgcgcgcggcggcgcgttgatgcaaatgggcttacctgttggcgcgattctggctatcagcctgacggcaatcgtcagctcggttaacggcggcctggagcagggtgcatggcgctatctgtttatgatcggcgcgctgccggtattcattatgagtgtggtcgcctggttcacaccggaatcgcaggtttggcttgctcgtcaacaggcgaaggcgacgagtcgtcaacctgccgtcaagctgggtaaacagaatctgcgaggtctgctgttggcctttgtctttatcttttttattcagtatctgttctggggcgtatttacctggacacccacctatctgcgggaagtcaaacatctggattttttgcacagcctgaagtttgtacttgcgctgcaggctggggccatcgcgggttttctggtgttttcggtgctggcggataagtggggacgccgtccgatgttcctgatttatctgttaaccggcgccattgccgtcgcgctgtaccttgtgaccacgcaacccttcattctgatggtggcgattttcatggccggtttcggggttaacggtatttttgcgggctcgggacccttcctggcggaaatcatcggggacacctcatcccggggcttcctgatggggctcgcctataacggaggccgtctgggcggatttattgcgccgctactgattggcgctgtcgccaacgctggcggtttcaccgcgggactggcgacgaccgtggttgctttccttgcggcgatgctggtggtgtggcgagcgccggaaaccagaggcatcaagctgaagtaa

SEQ ID NO: 228287 - DNA, 1056 bp, Klebsiella pneumoniae
atggagatcgttaccgcgccgcaccttgcggtcagaaacgagtggcttgcgttacatcgtgaagcgccattacaacccgagctgcccatcattgatgcgcatcatcatctttgggatcggcaaaccggccgctatctcacccatgagttcagcgacgatatccagacctcagggcatcgcgttgtctcatcggtctatgtgcaatgccgctctatgttgcgtcgcgacgggccggagacgcttaaaccgcttggtgaaatcgagtttgccagcggtatcgccgcgatgttcgccagcggacattatgcaaacgcgctcggatgcgaagccatcatcggcgggctcagtttactggcgggggacgcgatgcagcctgccattgagcgcgcgatagcgttatccggcgggcggctgcgtgggatgcgcaatccgttggcctggcatcccgatccgcgggttacctccagcccggttacgccactggcaggcctggcgcagagcgctccgttccgccggggcgctgcctgtctcgcgaggcatgcattgtcgctcgatgtatgggtttaccacacgcagctggaggagattgccgatctggcgcgggaaataccaacgttacagattgtgatcgatcactgcggcgggccggtcggcgttggaccctgttcagaacgggatccggacatgtttcagcagtggcgaaacggtatgcgacgtctggcggaactgccgaacgtatgcgtaaaaattagcggctttgggatgacggtcagggggtttcacttcgcagcggcagagacgccgccggattcgcaaatgctggcacaggcatggatgccgtggtttgagaccattgtttctcttttcggtgccgaacgctgcatgttcgccagcaactttcccgtcgataaaggcatgttcagctacggcgttttctggaacgcctgcaaacgcctggcgcaacaggcgtcccctgacgaacaggcgcagttgttctggcgtaccgccgcaacctgttatcggttaacctctgtggagaatatcaatgaccagtaa

SEQ ID NO: 228288 - DNA, 795 bp, Klebsiella pneumoniae
atgctggagataatctaccaggacgactggctggtggcggtcaacaaaccgtcgggctggctggtgcatcgcagctggctcgatcgcgatgagaaagtggtggtgatgcagaccgtgcgcgaccagatcggccagcacgtttttaccgcccatcgccttgatcggcccacctccggcgtcctgctcatggggctgtcaagcgaggcggggcgcctgctggcgcagcagttcgagcagcatcagatccagaagcgctaccatgcgatcgtccgcggctggctgatggaagaggcgctgctcgattatcctctggtggaagagctggataaaatcgccgataagttcgcccgcgaagacaaagggccgcagccggcggtgacccattaccgtggtctggcgacggtggagatgccggtggcgaccgggcgttatcccaccacccgctacgggctggtggaactggagccgaaaaccggccgcaagcaccagctgcgccgccatctggcccacctgcgtcatccgatcctcggcgacagcaagcacggcgatctgcggcaaaaccgcagcgccacggagcatttcggctgtcaccgcctgatgctgcacgccagcgaactgtctttaatccatccctttaccggtgagccgctgaccctgcgcgccggttttgacgacgtctggatgcgtgcgctgtcgcagtttggctggcgcgggcttctcccgctaaatgaaagggttgagtttgccgacgactgcggtcaggatgaagagaataaggtcaatccagggagataa

SEQ ID NO: 228289 - DNA, 1146 bp, Klebsiella pneumoniae
ttgactaactttcaggccggattaatccagtcggctttttattttggctattttgttattcccatccccgccgggatgctgatgaaaaaattcagctataaagcaggcattcttactggtctgtttttatatgcctgcggcgccgcgctgttctggcctgccgccgaagtgatgaattacaccctatttctgattggattatttattatcgccgccgggcttggctgtctggaaaccgcggccaacccgtttgtcaccgttctcggtccggaaagcggcggtcacttccgtcttaatctggcccagacctttaactcatttggcgccattatcgccgtggtatttggccagagccttattttgtccaacgtcccgcatcagccgcaggaggtgctggatagcatgaccccagaacagctcggcgcctggaagcacagcctggttctgtcggtacaaaccccctatatgattatcgtggccatcgtgctgctggtcgccctgctgatcgtctgcacccgcttcccgtcgctgcaaagcgatgaccacagcgacagcgcgcagagcacttttctcgcctcgctgtcgcgcctgatgcgcatccgccactggcgctgggcggttctggcccagttctgctatgtcggcgcgcagaccgcctgctggagctatctgattcgctacgctgtcgaagagatcccgggcatgacggccggtttcgccgccaactacctcaccggcaccatggtctgtttcttcattggccgtttcaccggcacctggcttatccgccgcttcgcgccgcataacgtactggctgtctatgcgcttatcgccatgctgctctgtttgctctccgccttcagcggcggccacgtcggcctgctggcccttaccctgtgcagcgcctttatgtccattcagtacccgaccatcttctcgttggggattaagcagctgggccaggacaccaaatatggctcgtcctttatcgtcatgaccatcatcggcggcgggatcgtcaccccggtgatgggctttgtcagcgatgccgccggcaatatcccgaccgctgagctggtcccggcgctgtgcttcgccatcatctttatttttgcccgtttccgctcgcaagcggcgacgaactaa

SEQ ID NO: 228290 - DNA, 582 bp, Klebsiella pneumoniae
atgagcgaaaggaaaaaaatcgaagatcaggctcttctctatcatttaacatgtatggataatctccctaatattttagacacaggattaagatcccgtgcgtcagtaaaaggcgagtttgttgatgtggccgacggagaaataataacaggtcgcgaagctttaaatttgcaaacaatggttccctttcatttttttactaaaaatccatttgatggaagagttttgaaagaccataaagaaaaatcattttgcattatttcggttagacgaatatttgccagtaaaaatggttggaaaattattcctaaacatccattatccgccagttctgctgtcagcctcttagattatgaacaagggatgactcaaattaactgggagcttatgaatacaagggattataaaaatgcagaatgcaaatctgtgtgtatggctgagtgtttatcaagtgtaacggtagagccggaaaatttttgttgcatctatgtcaaaaatgacgacgaaaaaaaatatgttgaagacttgataaaaaaacaaggattaagtatatttgtaacagtcaactcttatatgttctaa

SEQ ID NO: 228291 - DNA, 972 bp, Klebsiella pneumoniae
atgattaagtatgcaagcggaaatcttctaacttctacatctcaggctcttgtgaatgctgtaaactgccaaggagtcatgggaaagggtattgctttggctttcaaagaaagctttcccaataatttcgaagtttacaaaagagcttgtggcactggtacaatgaaaattggacaggttttacttgttgaagaaaagggaaagataatcgtaaactttcccactaaggatagttggagaaaaaaatcaacatatgattttatctcgcaaggccttgaatctttaacaaagtccatagtcgaaagaaaaatcacatcaatatcaataccacctttagggtgtggtaacgggggtctcgcttggaataaagttgaagctctaattttgaaagcttttcaaagtttagataatgttgaggtggtaatttacccgcctgcaactaataatcaactgtcaaaaaataaaaacattattaatgctaagcatcttttggttcactatgcctatgggaaattaaaagttaagcaaaaattctccctttatacagttttttatatttgcgaatgtattgaaaaagcaaatcttttcttattcgattttaaacatgggcggccatattcttctgagttagaaaatgttatgaaggatatagcaaaccttaaagtcgagttgcaggacgattttgactcttttattgaagattatattaacactcatcaatccaaagagttacaaatcgagtttggtaagctaatttcaactttaaagccaagtatcagtttgctcaatgagcttaaaaataaggttgattatacagatagcgtacatgtgatcacgagaattgccaatgaaaaaaatcatggcttgcatcttgatgatttcaaagaaaataaaaatattgtgcaacaattaattaaaaatggattagtaaccgaagatatctttaaagaactaaaaataaaggggagttag

SEQ ID NO: 228292 - DNA, 864 bp, Klebsiella pneumoniae
atgaaaaatatcaaggcaactgtcggtgttcacatgtgtactatgctgttcggcctgtcagcggttctcgcaaaagaactcttagtttcagcatcttctatcgtggctggtcgagcattatttgcagccatgacgttatttctcgtattagcatggacccgttcaaatattataagcagcctgacacgacaggatttgtttcattacatgatgaatggtgttctgcttgccctacactgggtgtgtttttttactggagttgaaaagggtggagttgctgtcggaacgctggggtttgcttgttttccagtgtttgtttccttgttcggatggtgcattttccggtctcatgtcggaatccgtgacattcttgcaatgcttttagtctttgtagggctaatcattatttctccagacgttatgtatgggggaagcgatcgcaatgctttgctttgggcacttgcagcgggagcatcctatgctgtaattgtattgtataacaattatgcgcgaacgaatggaacacctttgcaatcatcattgatacagtgtgcattttgtagcctggttacaatcccggctggaattggggaacttattcatgcagattcttctacccttattcacatcttacttattggggtaatttgtacgggtgtggcatacagcatgctgacatatgctctccggtatgttgctgctggaaaggctgcgattataatttcactcgaaccagtctgggcgattgcgttaagtatcctttggttcagcaccgttcccgacatcaatacattatttggcggaggagtgatcatccttgccgttattgtaagtgcattaccccgtcgcgcggcaagtatctga

SEQ ID NO: 228293 - DNA, 852 bp, Klebsiella pneumoniae
atggcacatgaagatctagaaattcaatggctgcgaacttttctgacggtaattcaaaagggctcaatgacggctgcttctgagcagctctgtcgctctcagtctgccatcagcatgcatattcgcaagctagaggagaacctggctgtcaggttattcaacagagataccaagaagctatccttaacggcagcaggtcatgagttattaggctatgcagaaaaactgcttctgctccactctcaggcgaaatctgccataaaaggttcagaactgcgcggaagggttagcttcggcattcccgatgactatgcatcggcttatctgccggagatactaaaatccttttcgtggcactatcctgccgttgagttgaacctgatttgcgaaccttcatctctgcttttgccaaaaattgatgcggggacgctggatgtagccatagtgacacgtgacgcgtcaggaagggggcattttctgacacgcgaaccccttgtctgggttggttattttcccgagggagcgttcagagatgcccctctgcccgtagcaatgtatgaattcggtagtgaagccagaaaaaaagttacgagcagactggaacaggttaagcagggctatcgagttatgtacaacagcccatacattgcaggccagatagcagtcgcccgtagcggtctggctttagccatccttactcaatgctgcgtgccggatggcatgaaaattattaacagcgacgaactgcctgagttacctgtactggatatagctgtcgtaaaaggttcgcactgcacagttgatcatcccgcaacatatctgacaaatatagtgatcgaaatgtttggctaa

SEQ ID NO: 228294 - DNA, 771 bp, Klebsiella pneumoniae
ttgctcgattatgctgcttttcctcaacagcgacaagcgctgatttgccagatcctgcaggaaaacggcagggtggtgtgtgcggagctggcggcgcgtcttcaggtgtctgagcacaccatccgccgcgatctgcatgagcttagccgcgaaggcgtctgtaaaaaagtctacggcggggcggtgttgagcctgccggaagcgggagattacagtgaacggaaagataaaaaccgagcaacaaaactcaggatcgcgcagcagtgcgcccggctggtgaaacccggcggcatccttttcattgataccggcaccaccaatctggcgatggccgaggcgctgcccgccgagctggcgctgacggtggtaacgaactctccggagatcgccgcggtactggtgaaaaagccgctctacgaggtggtgatgctcggcggccaggtgcagcgggcgagcgggggctgcgttggggccgcggcggtggctcaggtgcagggaatgttattcgaccaggggtttatcggcggctgcgccatggcgccagagtcgggcctgaccggctttgactatgccgactgtgagtttaagaaagcggtgattaagcagtgcagcgaaattatcatcggcctgacctcggataaaattccggcggtggcgcgattcgtggtggccgcgagcagcgatatcgatgtgctggtggtggaggagaacatcagtcgcgaatatcgcgttgcctttcagcaacacgatattcgcatccataccgtgtag

SEQ ID NO: 228295 - DNA, 396 bp, Klebsiella pneumoniae
atgatgaaagcctggatcgtcaacaaacccggttcgctggacaatctgcagcttgtcgatcttgccgaccccggcgcgccggcggcaggcgagatccgcgtagcgctacacgccacctccctgaactatcacgatttgctggtagcgacgggggtgattcccactgccgatcgacggatcctgatggctgacggcgcgggggtggtcgaagcggttggcgccggggtcagcgagtttcagccaggcgaccgggtggtcgctggctttttcccgcagtggctggatggccgtccgggcccgcaggtgaaggacttcagccagacgccgggcgacggcgccgaggttcgcctgccagtatgtagtcagaccggccagtcattttacccatgcgcctga

SEQ ID NO: 228296 - DNA, 252 bp, Klebsiella pneumoniae
gtgaaaatttttgcttttattctgctggctgtcggcaccgtggcgctgagctatggtaacgcgccggcaaaacgtattcagggctgtgagagcgcgggagtggggcaggccgtttgcgccgccgccgaatgggatagtgagaaagtgaatgttttgcctcattataaccccgcacttaacaaggctattatcgcaggccactcagcccgtatcgtttatgaccctaatataggcgcgagcctccgcacgtaa

SEQ ID NO: 228297 - DNA, 318 bp, Klebsiella pneumoniae
atgttgacttttattgaactacaaggcttcagtaaacgacgccaggcgctgttaccggatgatgaatttcgggcctttcaggaaatcctgatcaatgatcctgaggcaggtgacaccatttcgggaaccggaggttttcgtaaaatccgctggagtcgtcctggaacgggaaagcgcggcggcgtgcgggtgatttactataatgtaacgataaagggaagaatctacctggcgctcatctatcctaaaaatgaacaggatgagttaagccaggagcagaaaaagatgttaaggcaggttgctcagttattaaactag

SEQ ID NO: 228298 - DNA, 1572 bp, Klebsiella pneumoniae
atgtcacaggcaattcagcataattctcaggtctcgatgacccgccacccggattttctacgcaccgccgagacgctccggcccgcgctaagccggcaggcgtacccgccgatcgcagtggtggaagcccacgccgacgccacggcgctgtttggctggcgcgctgagccggtaagttccctggccgcgttttatcagcgcgagctgagcagcggcgatagcgtcattattgattttggcagccactttgttggctacctgcattttctctgtcagagcgtcgggagcccgccggacgctccggcccatctgcagttcaccttcggcgaaacgctgagcgaagtgtgtgagccgttcagcgattaccagggctggctaagcagcagctggctgcagcagcaggatctgtggcttgatgtcctgccggccgacgttgatctgccgcgccgctactgcttccgctatctgaaggtggaggtcaaagccgtgtcgcgcaagtttcgtctgcagttcaaccagattcaggtgaatgccgttacctccgccagcggcgcatgcccggcagcgacaaccgccgacccgcagctcaaggccatcgacagcgttgccgttctgactctgcaaaactgcatgcaggaggtgtttgaggatggccccaaacgcgaccgccgcctgtggctcggcgatttacgtttgcaggcgctggtgaacgatgtgaccttcgcccgtcacgatttagtacgccgctgcctgtaccttttcgccgggcatactcgtgaggacggtatggtatcggccaacgtgttcgtgcagccggatgtcattgctgatgatacctttctttttgattattctctgttttttgttgacgttctctacaactatctgcaaagcgcggaggatattgctacggcccgcgagctgtggcccacggcccgtcgtcagattgaactggcgctgaaacgctgcgacgcctccggggttgtgcgcgatagcgacgactggtgggtgtttatcgactggcaggcatcgctgaataaacaggctgcagcgcagggcgtgctgatttactgcctgcagcgcgccgtctggctggcggagcgtttcgaacctgagctggccgtccgctatcgccagcgtttacagcagcttaaagctgcggccctcgatgtcttatgggacgagcagcaaggcttctacatcagcggcgagcagcggcaggtctcatgggcatcgcaaatctggctggtactggcggaagtcggtactccccagcagcgccgggagatcatgcataatctggagcaaaatccccccgcgatcgccatgaacacgccatacctgcgtcaccactatattgccgctcttctgcagtgcgggctgcgcgacgacgctattgcgcagatcaaagcctactggggagcaatggtcgactacggcgccgataccttctgggaaatcttcgacccggcgcatcctgatttttccccttatggcagcaagctgataaacagttattgccatgcgtggagctgcaccccggcctggtttattcgccagtacggactttaa

SEQ ID NO: 228299 - DNA, 2412 bp, Klebsiella pneumoniae
atgaccaaccactgggtggatatcaaaaacgcgaacgtcgtggtggtgatgggcggcaacgccgcggaagcccacccggtgggattccgctgggcgatggaagcgaaaaataacaacgacgccacgcttatcgttgtcgacccgcgctttacgcgtacggcgtcggtggcggatatctatgcgccgattcgctccggtaccgacattaccttcctgtcgggggtcctgctgtacctgatcgaacataacaaaatcaatgccgagtacgtgaagcactacaccaacgccagcctgctggtgcgggatgattttgccttcgaagaggggctgttcagcggctatgatgcggacaaacgccagtatgataaatcgtcctggaactaccagttcgatgaaaacggctacgccaaacgcgatgagacgctcagccatccgcgctgcgtgtggaacctgctgaagcagcacgtttcccgttacacgccggaggtggtcgaaaacatctgcggtacgccgaaagcggacttcctcaaggtgtgcgacgtgctggcctcaaccagcgccgccgatcgcaccaccactttcctgtatgccctgggctggacgcagcacaccgtcggcgcgcaaaacattcgcaccatggcgatgatccagctgctgctcggcaatatgggtatggccggcggcggcgtgaatgccctgcgcggtcactctaatattcagggactgaccgaccttggcctgctgtccaccagcctgccgggctacctgacgctgccttctgataagcagccggatctgcagacgtatctgacggccaacacgccaaaagcgaccctgccggaccaggtgaactactggagcaactacccgaaattctttgtcagcctgatgaagtccttctacggcgaggcggcgcaaaaagagaacgactggggctttgagtggttaccgaagtgggaccaggcttacgacgtgatcaagtacttcaacatgatggataacggcaacgtcaccggctatatctgccagggctttaacccggtggcgtcgttcccggataaaaacaaggtggttcgcagcctgagcaagctgaagtacatggtggttatcgacccgctggtgactgaaacctccaccttctggcaaaaccacggcgagtcgaacgatgtcgacccgtcgacgattcagacggaagtcttccgcctgccatcgacctgctttgccgaagaggacggttcgatcgctaactctggccgctggctgcagtggcactggaaagggcaggacgcgccgggcgaggcgcgcaacgatggcgaaatcctggccgggatttaccatcgcctgcgcgaactgtaccgcaccgaaggcggtaaaggcgctgagccgctgctgaagatgagctggaactacaaacaaccggaccatccggaatcggaagaagttgccaaagaaaacaacggctacgcgctggcggacttgtatgacgccagcggtgctctggtggcgaagaaaggccaattactgaacagctttgcgctgttgcgcgatgacggcaccaccgcgtcgtcttgctggatctacagcggcagctggacggagcagggcaaccagatggcgaaccgcgataacgccgacccgtcgggtctgggcaatacgctgggctgggcctgggcgtggccgctcaatcgccgggtgctctataaccgcgcgtcagccgacatcaacggcaagccgtgggatgcgaagcggatgctgatccagtggaacggcagcaagtgggtcgggaatgatattgcggacttcaataccgcgccgccggggagcaacaccgggccgtttatcatgcagcaggaggggctgggtcgcctgttcgcactggataagctggcggaaggaccgttcccggaacactacgagccgatggaaaccccgcttggcactaacccgctgcacccgaaggtggtctccagcccggtggtgcgtgtgtatgaagaggacgccattcgcttaggtaagaaggataagttcccgtacgtcgggaccacctatcgtctgaccgaacacttccatacctggaccaagcatgcgctgctcaattccatcgcgcagccggaacagtttgtcgaaatcagcgaagggctggcaaaagcgaaaggcatcgccaacggcgaccgggtaaaagtcagcagccagcgcggctttattcgcgcggtggcggtggtgacgcgccgtttgcaaaccctcaacgtcaacggccagcaggtggagaccgtcgggatcccgctacactggggttttgaaggcgtggctcgcaaaggctatatcgccaacaccctgacgccgaacgtcggcgattccaactcgcaaacgccggagtacaaggcgtttctggtcaacatcgagaaagcgtaa

SEQ ID NO: 228300 - DNA, 324 bp, Klebsiella pneumoniae
atggcggcacaatttgatatctttcgtaacccatcatcgagaaccaatgcgtttcaaccttatttaatggtaatccaacatgattattttaatgaccttggcacacgtttaattgtgccgctgagctatcattctcatttgaccggccattatcatgctgccgccccggttattaatatggagtttgagaaactgttcatcaacacgccggcaatcaccagcgtggcaaagcaaaggctggataaaaaatattttatctgcaatttggctaaagaaagaacgaccgtgatatcagcgatggacgcattaatcactaacacataa

SEQ ID NO: 228301 - DNA, 189 bp, Klebsiella pneumoniae
atgaaacagaatgccgttaacaagtcacagactcgcgatcgtacaacaacgtttaacccgcaaaaccaggcacttaccatcgtcgatgcggacaaacgccgaaaagaccaggaattcattaaggcactgaatgagttcactgcccgtgcagggttgttgtcagaggatccttttttcggagggatttaa

SEQ ID NO: 228302 - DNA, 1092 bp, Klebsiella pneumoniae
atgacgctgagtcaggatattctggccgaactggcggagatcgccgccggttccccgctcgaccaggcgcgcgcagtccgcgatgccgctacccgacatgcgcagggaagttatgaagtgctgttcagccagcaggacgccgactttcccctcgatgaacgcttcgcggtggcggcaaaggtggcgaagctccatcaggcggacgcgctggcggcgcactatgccggcttcggcctggccgatccgaccacggatcgtctggttccggcgctggcctttgcccgcctgctgaccttcacccccgtcgaagcgacacccggcgcgctgcaggctctgacaaacgcgggctggagcctgcggggcatcgtcaccctggcgcagctggtggcctttgtcagcttccagagccgcctgctgctgggtctgcgggcgctcaaccaccagcccatcgtcagtgccgatacgccggtggtggccgggtactggcacaccaccccgcacgcgcagagcggtaaagcggcccccgtgcgcttcacccgcgaggagctgcactgggaaccctggctggcggataaaccgctggtggaatttagcgctgaagaacaggcgattctggccaaatatggccatagcgattcgccctacttccgcctgctggcgcgcaaccagccggtgctggagcagcggacgctgaccgataaaggcattttctataccccggggggattgccgcgcgccgaacgtgaactggccgccacggtggccagtaaaatcaacggctgtatttactgcgcctcggtgcatgcccgcaaagcggcgcagctggcgaaggacgagaccgccgtcgacacgctgctggcggtgacgccgggagaggatctgcgcggtgggcagtcgccgcgctggcaggcggaaatcgacgccgccgccgcgctatcggtgacgccgcccgcgctgaatgccagccatctggcagcgcttgatgaacagggcttagatactctggcccagctggatctgctgcagtcagcggcctttttcgcctgggccaaccggctgatgctgacgctcggcgagccctggcgtgagtaa

SEQ ID NO: 228303 - DNA, 831 bp, Klebsiella pneumoniae
atggaaagcaatgaaattatgtgtaatgtagaacgctggttggataatcaggctgttaattcaattggtatatgcttagatggtctaaacaccaccggcaacacgcatatttcgggtggttcttccgtgcttactggttctgccgcaacgcaggagcgtgaaattggtaaggaattaagccttattactgatattgatgaacttgcggaaaaactggtttccagccctgcaaattttgtcaccacagtcatggggatagcgcaaagtcgctccgggtggaaaccgcttgaacctgaaagtgcagacaatgctgagaatttcaaaaaatatattgatcagataatgaaattccctttaatgattgtaaccaaaactgacacgaccacagtgacctattccgaaggaaattatgattctttaattgataatatagccgacatttactccggcatgagcgatggagataaaaactccgttaaggcagggcttacatcactggcgaaaagttgtatgagtcgggtaaatgaaaagcaaaagaaagtgttatttactcaaagcacaatgtgtgtaaatgatgaagtgactacatccttttattcatctaatgttgcaatggagaagaaacacagtagcggcaagaatgctccggcagatgaatttagttcagaagtacaggtcagcagagtagaggttaaatttaaccgtatggcgctgaataagaatattgctaaaaaactatgttcacttctgttcaagtcaattgatgactggctcgaagagacaaatactaagcaaaccgataagaaaatcgaattttgttttggtgactaa

SEQ ID NO: 228304 - DNA, 174 bp, Klebsiella pneumoniae
atggttaagcgccacaccatcgcgctcctcgccacggagaaagcggttccgctgaaattaaccgccaggcagcaggcgctggtggacgcggtggcgaacagggcccctcctgcagagcccgatcccgtaccgcctgtcggcaaagcagacgtcaggaacaggagggcgcgctga

SEQ ID NO: 228305 - DNA, 774 bp, Klebsiella pneumoniae
atgccaggtagtatagataaagcgccaagacatgatgaatccacaggctggtccagtactgcgataagctatcaacgcggtgaggtagatcctccccatcatcatgttgaggggcagctactcttcgccaccagaggggtgatgctggtgcaaacagagagtgaccgttgggtgatccctcctcagcgggcattatggctaccgcctctgcatatccatagttaccatctgctttcacaaaccgatctcagggcgatctatttcagcagtagccttatcgcagaatgtatgagctttacgaagagtcaacaggtgcatgtgatcacggctacgccgttagtcaaagaacttatcgcaggcctgttcagtgaggactacgccagaccgattcaacggaagatagcgttgttgcttctggaaattctcagcgaggcgccacctttaacgatggcgctacccatgccgaatgatgagcgattatttagcgcggccagatcgctactggtcaatcagcgctgggaagcatcgttgagcgagctggcttttaggtcggccatgtcggaacggaccttttcccgattgtttatgaaggatacaggctttagttttcgaacatggaagcagagagccagaatttatgcttcgttggatcttcttgcgaacggcgttccaatcaaacaggtcgcttaccagcttggtttctcatgcccggcggcctttaccgctgcttttcgctgcattttgggggcaacgccgcgcgattatgtgccttaa

SEQ ID NO: 228306 - DNA, 714 bp, Klebsiella pneumoniae
atgaacgcgaaactagcgctatgcctgctcgtattaccgttgtattcatatgcaatgacctgtccttttggcataggattttcagcgccacaaggcggggtcaaaggggaagagccgtactttttcacgcctgaaggtgtttgtctcaatggccgcgatgtaagtcagcaattaaagagctatcccgacgataaaattaccggggcattctctttggcaaaaggggatggttcactgttttttgttagcgtctacagtgaaaagcattaccacggaagagttattcttttatctgctaaaggcaaagaggctgggtatgtagtcatcttccagaaccaagcaggggttagaacgaataacccaaaaatgtcagtagaaaaccttaccattaattattttgataatcagacgtcaacgctttacttcagtgctgatgcttgggctcaagcaagggccttgcatgccattatttgggaaaacccttcaaaccctctcagagtgacggagcggtttattcatgacggaacgtttcagggggtcttcaatggtatgccaatggtatctacgattgcgcatgatgaaaagggcgcatactttccttcttacgttgttagaaacgacggttcaatatactgcaccatcaatacgcgctcgaacttttggcaactgacgccatcatgcctttcacccggggatgactatcgggaaagatga

SEQ ID NO: 228307 - DNA, 639 bp, Klebsiella pneumoniae
atggctacgattaaggatttatcccggcaacttcagacgttgcagaagcaaatcccctatgccacagctcaggctatgacagccgttgttcgtcagattgcagcagcgcaaaaagtagctttgggtcggaagctggaatcgccaacgccgttcacggtcaatgcagtgggttcttcaggggcccgcaagaacgatcttcgcgcaaaggtttatgtgcgagatatagctgcgggttacctggggcctttcgagtttggcggcgatcataagctgaatagctcggcgctccttaacccaaaaaacatcaagctgaataaatacggcaacatgccgcgaaataaactttcgcaattgaaagcaaagtcaaatgtttttattggcgatgtgaacaatgtcaatgcggtctggcaacgtcgcaaaccaaaaccggcgaagaagaagagggctaagcgctctcccaatggcacgcgcaggcctaaaccaaaacagcggccacctaagctgctggtgaggtttggcgatgcacttcctgtaacgcctgtgttggggtatatggaccgctcgaaggctatggcagaggcgctgatgcctgctgcattgagtcgtgccatagctgatgccataaagacggcaaaataa

SEQ ID NO: 228308 - DNA, 504 bp, Klebsiella pneumoniae
atgacgccatcaatgaggaagaaactgattggcgtgatcgccggcggtggcggagccatagccattgcttctgcgctcatcactggcccaaccggtaacgatggtcttgaaggtgtgcgttatgacccctatcaggatgtggtaggcgtatggactgtctgttatggccacactggcaaagacatcatgctcggcaagaagtacaccgagactgaatgccgtgcgcttctcagtaaagacctgaacaccgtcgcccgccagattgacccatacatccagaagccgatccccgagacaatgcgcggggctctgtactcgttcgcctataacgtcggcgccggaaacttccagacctccacgctgctgcgcaaaatcaaccagggcgaccagaaaggtgcatgtgatcagctgcgccgctggacctacgccaagggcaaacagtggaaaggcctggtaactcgccgcgagattgagcgtgaagtttgtttgtgggggcagaaatga

SEQ ID NO: 228309 - DNA, 597 bp, Klebsiella pneumoniae
atggcgcaaacactgcaatttgagaagagttatcaaaacgtactgattcccgcagagccgggaaccagcgaatacctgcaacttatcccggtagggcaactgctttgcggtgagttccgcaagccccggaattacgcattccacaaaaaattcttcaagcttctgactctcgggtatcactactggaccccttccggtggtctcattgagcccgcggagcgtaccctcatatccgggtttatcgactttctctcatccgacctcgatcagcgcgctgcactccagaacgccgcggagatgtatctctcctcggtcggtatctcccgttcccgcgatatggcgctgctgaaacacttcgaatcattccgcgagtgggcaaccattcaggctggcttttacgacgaataccagatgcctgacggtagccgtcgccgtgtcgcaaagtcgatctccttcgccagcatggacgacagccagtttaacggcgtctacaaatcagtgctgaatgtgctctggaactacattctgcgtcgcaaattccactcgccggctgaggctgaaaatgccgccagtcagttgctgagctttgcggggtga

SEQ ID NO: 228310 - DNA, 357 bp, Klebsiella pneumoniae
atggactatacaaaactgaacgagtacgagcttgctgatatgcgcaacgcgatcgaaagagagcagaagcgtcgcgagcaagggccgaaagtgctgacttaccgcgtcacctcatgcatgacagagcatcgctactttaaagacctgaagtgcgcgttgctgtgcctcaaagaaaccgtcgacatggtgatcgaacattctcttgaagacgacggtgagtacgtcaaaaaatgtacaggtattgtgggcgtggttttccgtgtggaagaagtggcacaggctgatttcgatgctaaggaaaaagctaagtattacgatgacatctgctttgaggaccgaatcggagaattaaggtga

SEQ ID NO: 228311 - DNA, 1209 bp, Klebsiella pneumoniae
atgaccaaatcaaccataaccagagagcgcctgaaagagattgttagcgacccaatgattaatcagggcagcgagtttgcgatgatggcccgcatggcgctggtcgcaatggacagcgagtcttggcgtttgcctctcgactacttacagggacacaaagacggtatggagtgggccgctagactggcagaggccaaccaccctgaaaccggagactggctttacgatgaccctatcgagctggcaaaagctattcgcaaaggtccagatatgccgccagcgcagccggtagcggacagcgaaccggtggcagaaatcaccgaggatttggggcgtttgtttgtcaaaatccactacccaacaacgttaaaagctggcgacaagctctatcgccacgcgcagccggagacggtagtgctggacggactgattaaagccgtcgagttctatgagcaggttaaacgcgaaaatccgccagtcgaaacaggtgcatggaaagacgctgttgattgggtgctgacggaagcctgccgcgccgccatgctcagggctcagtccgacgacgacggcgagccaaccgacgatgaacgcattatggctattgagggcattcataactgcgaacggtgcggtgatgagggctggattgtcggtgagatgggtatcacgcgctgtgcgtgcggtcaggctgacaactctccagtatttcccggagcagagcaacgcatcgcggatgcagtagagctgctgaaaaaggcagctccggcaatgctggctgataacggcgaccctgatggccctctggctggcaggatgaagccagaggtaatttcggatggttacatgatggtgcctaaggagccgacagaggcgatgctgacagccagttacatgtttgcgcatgtagagtccccccgggaaagttgggcagccatgctcgcagccaccccgcagtcacccggcagtgaacccgctaccgtgccgggtaaatggattccggtaagcgagcgtatgccggagagcaacggcgtgtattttggctgggatggaaagcgagtgctggaggtttattgtttctttggtggcttctcggcaaatcaatttatccacggagagataacccactggatgccgctgccggccgccccgcaggaggatattaacgcattgattccgttagcatcgcggaatgagcaggaggggaagtga

SEQ ID NO: 228312 - DNA, 186 bp, Klebsiella pneumoniae
atgttgaaaaaagacgtcgttcagcattttggcagccagcgagcgatcgctaaggcgctaggactgagcgaatcagccgtttctcagtggagagacatcatccccgagaaagacgctttcaagatcgaaaaaatgacatccggtgttttaaggcgcgagcctgacctttatcgccggacggcataa

SEQ ID NO: 228313 - DNA, 636 bp, Klebsiella pneumoniae
atgagcgaacgcattcgtgcgcgacgcaaagagttgaagatcaggcaagtagcccttggtaagatggttggcgtttccaatgctgctatatcgcaatgggagcgcggagaaaccgaacccaggggtgataatctattggccttggccaaggctttgaaatgctcaccagactacctactcaacggagatactggtacatctaacgtagcttatcatgggattcatgaaccaaaaggcagttacccactgatcagttgggttagcgcagggcaatggatggaagctgtagagccttatcaccgcagagcaatagatagctggtatgaaactaccgttgaatgttcagatgactcattctggctagatgtccagggtgactcaatgacggcgccggctgggttaagcattccacaaggaatggtcatcttggtcgatccggaggtagagccaaggaacggcaagcttgttgttgcaaagcttgagcatgacaacgaggcaacttttaaaaaactggttattgacgcggggaggaaattccttaaaccccttaacccccagtatcctatgatagagatcgacgggaattgtaaaatcataggcgtagttgtcgatgccaagatcgcaaaacttccataa

SEQ ID NO: 228314 - DNA, 126 bp, Klebsiella pneumoniae
atgaaaaaaccgatcgtgttaccgttgattattgcgctgtgcacgctgttatcgggatgcattgttgacgatggctatcaccaccatcgccatcaccaccatcatcactatcatgacgatgattaa

SEQ ID NO: 228315 - DNA, 831 bp, Klebsiella pneumoniae
atgtttattcaggaaaataaaaccgcgctggtcaccggcgcatcgtcagggatggggaaagccattgcccgtcgtcttatccaggagggttaccaggtttacgttgctgcccggcagctcgggaaaatggaagatctggcttcgctaggggcccaatgcctgcagatggatctctcacggcaggacgatcgactggcggtcgtgaacaccattctgtctcagaccggaggggtcgatgtactggtcaataatgccggttttggcctgtatggcccggtcgaagagatcggcatcgatgaggctcgctaccagtttgaggtcaatctcttcggcgcggcacatctcacgcaactactgcttcccgcgatgcgcgcccgccgtcgcggatatattgtcaatatctcttccatgggcgggaagatgtatagcgtcctcggcgcatggtaccacgccaccaaacatgcacttgaggggtggtcagactgcctgcggctggaagttgccgacttcggcatcaaggtggttatcatcgaacctggggtgattgaaaccggcttcggcgatgcggccagtgaaagtattgtcaaacgttcggccacaggaccgtatggtcagttggtaaaaggggtcgccctgtcgatccaaaaaacgtacggccatggcaccggcagcgacccgcagacgatcgccgaggtggtcctggtcgcggtgaatgcctcaaatccacgcccccgttatgccgtcggtaagtatgccaaattgcttatccggatgcgtgtctggctgggcgaccgtcttttcgatcgtattatcctcagccagatgcgctga

SEQ ID NO: 228316 - DNA, 1008 bp, Klebsiella pneumoniae
atggcacgcaaccgcactttttctctcaatctccgttggcgagcgctgctcaaagacgcagggatggagcctgaacatcttctccgccaggccggtttgccggacgacaccttttcagacatcaatcgcggtctgactaccgatgagtatctgcgtttctggcgcgtgctggaaaaagaaagcgacgatcaggcctttcctttgccctttgtagaaagggtctctgcggaagtgtttgatcccccgctgttcgccgccttgtgtagtacccacatgatgcaggcggtccagcggctggccaggtataaactgcttattgcccccatggtgctggagacgacggtcgtgcagaacggcacgctgacagtgtctccgcgctggctgggagcaacagaaatccctgcctctctggaagtggcagagctggcatttttacttcgtctgaaccgactggccacccgcgaaccggttcaggccgtgaaagtaacgctctcacagcccctcacccgccagcagacccaccacttttcagccttcttcggcacgaccatacagcgtggaaagcgggcgaccatcagctttgccgccgctgatgccctgcggccctttttgacggtgaacgagggtatgtggcaggtctttgagccggagctgaagcgtcgtctcagccagcttagcgatcaggcctcaacggctgaacgtgttcatgcagtcctgctggagcttctgccgggcaacgacgcctctatcgacaatacggcgcaacgtctgggaatgagcaaacgcaccctgcagcgcaggctggagcaggagggagagaattatcgcgcccttgttcacgcttgtcgcgaagcgctggctcgccactatcttctcaataccacgctttccggctatgaaatcgcctttctgctcggttttgaagatccaaattccttctaccgggcttttatggcgtggaccggccagacgccagaaaacttcagagacatgatgcgcctcaactaa

SEQ ID NO: 228317 - DNA, 1179 bp, Klebsiella pneumoniae
atgcgccgtttgcgtgatttcagcctctgtctgtacctgctgctgctctggccgctggtggtgaatgccgatgacagctggcggcagacccagacggaagcccgtggccagaccgtctggtttaacgcctggggcggcgacccggccgttaaccgctatctgacgtgggtcagcgaggaggtcaaacgccactacgcgatcgacctgcgtattgtccccatcgccgacgccgccgacgcggtgaaacgcatccagactgaggtgcaggctggccgtcgccgcggcggttcggtggatttgctgtggatcaacggcgaaaactttcacaccctaaaacaggccaacctgctgctcaccggctgggccgaatcgctgcccaactggcgctatgtcgatcggcaaaagccggttcaggaagatttttctgtcgccaccgagggcgccgagtcgccgtggggcagcgcccagctgacgtttatcgcccgccgcgaacaaaccccgcagcctcccaccagcccgcaggcgctgctggccttcgccagagcccatccgggcagcgtaacctacccgcggccaccggacttcaccggtaccgccctgctggagcagctgctgatcgccctcaccgaccagcctgccgccctgcgccagccgccgcagacggcgactttcgcggcggtcaccgccccgctgtggcgctatctcgatgcgctgcaccctacgctgtggcgggcgggcaaggatttcccggcgtcgccggcgcggatggacgccatgctcaaccagggcaccctccgcctgtcgctgacgtttaatccgctccatgcccggcagaaggccgccagcggggagttaccggcggacagctacagcttcggctttaccggagggacccttggcaacgtccatttcgtgactatcccggccaacgcgcgcgccgtcgccgccgccaaagtggtggccaatttcctgctctcccctgaggcgcaattgcgcaaggcggatgccgccgtctggggcgatccaagcgttctggacccgcagcgtctacctgacaagcagcgacaggcgctggcggccaccctgccgcaggatctgccgccggtgcttgccgagccgcacgcggcatgggttgacgcactggagcaggaatggctgcgccgctacggtacccactga

SEQ ID NO: 228318 - DNA, 150 bp, Klebsiella pneumoniae
atggcggcgcattttgacgcccgggcgctcaccgagctgaccgccctgattggcctgcaaaatttatcagcgcggttcaacgccgcgatggcgatcccggcccaggggctgtgcaagatccccccctcttccccgcacaataaggagtaa

SEQ ID NO: 228319 - DNA, 144 bp, Klebsiella pneumoniae
atggcgcagggtctcctgcagcagatgcaggtgagtcagcagatcgtggagaccgacgcggtggctgataacggccagcgtggccgccagcgcgatgagtcccagccctttaccaatggccggatgatggcttctttttcatga

SEQ ID NO: 228320 - DNA, 1479 bp, Klebsiella pneumoniae
atgagtctgtggattaacggcgagtggcggcccggcgatgggccgcgcttcagcaaacaggatccggtcaacctgaaggttgtctggcagggagaggcggcggacgccgggcaggtcgccgaggcggtggcggcagcccgccaggcgttcccggcctgggcgcggctgccgtttgccgaccgccaggtcatcgtcgaaaaatttgccgcgctgctggaggccagcaaggcggagctgacggcgattatcggcgccgagaccggaaagccgcgctgggaggctgccggggaagtgacggcgatgatcaacaaggtggcgatctcggtgaaggcgtaccacacccgcaccggcgaacagcacagcgagctgcccgatggcgccgcgacgctgcgtcaccggccgcatggcgtgctggcggtctttggcccctataactttcccggccatctgccgaacgggcatatcgtgccagcgctgctggcgggcaataccgtggtgtttaaacccagcgaactcaccccgcacagtggcgaagcggtggtgaagctgtgggagcaggccggcctgcccgccggggtgctcaacctgctgcagggcggtcgggaaaccggcgaggcgctcagcggccaggcggatatcgacgggctgctgtttaccggcagctcgaccaccggttttcatctgtatcgccagctggccggacagccgcagaagatcctcgcgctggagatgggcggcaataacccgctgatcgtcgacgatccgcgggacgtcgatgccgcggtgcatctgaccatccagtccgcctttattaccgccggccagcgctgcacctgcgcccggcgtctgctggtccggcgcggagaggcgggagatgctttcctctccaggctcgtgacggtgagccaacggctgatccccgcggcgtgggacgccgagccgcagccgtttctcggcgggcttatctctgaacaggccgcgcagaaagtgcatcaggcctggctgcagcgggtcgccgcaggcgcagccaccctactggagccgcgcttattgcaggccgggacgtcgctgctgacgccggggattgtcgacatgagcgacgtggcccaggtcgaggatgaagaggtgttcggcccgctgcttggcgtctggcgctacgacactttcgaggaggcgattgcccaggccaatgccacccgcttcgggctctcctgcgggttaatctccccggaacgggagaagttcgatcggctgctgctcgaggcgcgggccgggatagtcaactggaacaaaccgctgaccggggcggcgagtaccgcgccgttcggcggcagcggggcctctggcaatcatcgccccggggcctggtatgccgccgattattgcgcctggccgatggccagtctcgaatcgccgaccctgacgctgcccgccagtctcaatccggggctcgactttcgggccggggaggcgtcatga

SEQ ID NO: 228321 - DNA, 663 bp, Klebsiella pneumoniae
atgcttcatgagctgatatcgttaatcaatgttgttatttggcccgctattgttctgttttttctatgtcgatttggaactgcaatcaaccggtttcttgaaaacctcagccgcctttccattaaaggtcccggctttgaagtcgagaccttcaataaaggggctgagtctagtgccaatcttgcagctgcattggccagcaaaggtaccattgctaaaggcgagggtaatgtagagcaaagcgttctggatgacgtcaacgtagtgactcaggctgtaacgccgagagtattgcgaagagcgggtgatgccgtcatcttatgggttgatgacagacccaatggtaatcgctttgaacgtcagtccatggaagctctgggcataaggtttgttaatgtagtatctaccgacgaggctctcgaaagactaaaaaatcagtcgtttgatgtgattatttccgatatgaagaggcctggggatgatcgtgcgggatatactctcctggatgagctaagaagaaagggcaaagacattccatacattatctatgcgagctccaatgctgctcagcataaggaacaagcaaaacagcatggcgctttagacgcgaccaataatccgccggaattatttcgcctggtcatgggggcgttaaaaaaataa

SEQ ID NO: 228322 - DNA, 516 bp, Klebsiella pneumoniae
atgatttatgacattcttctggcctcgattcttgcgttgatgatggttggctactggattctatgcaggaaaagagcatacgaatatcagaaaaaagcagcagggctgattaaggaatatttccttgatggtcaagtttcagacaaagacaagcaacatttgtatcaatgttatgtgttgcttcgtaagtggtacgtgtttccatttttcgcgtttgtaacccctttcatactgagttacatgcttctcatgcaaggaaaagtcgaagttagccctgcaaaaagaggtaatcaagagttgtatgataaagcctttgatcaactaatgaaaatggctttgagcaaaaaccctttgatttcagcgattagcatgtcattcacaggaatatccttcgccgtgattatccctattggattgttactacggaggatctacacaataccgacgaaagaacaagttactgatgtttttgaacagatgaccattaaggctgcacaaaaggctcatatccattaa

SEQ ID NO: 228323 - DNA, 255 bp, Klebsiella pneumoniae
atgggaatttctgtatttaagaatgaagtaagttttgacaaagcacctgagctggtcaaagagcttcgcattacgtggattgcagtgtatgataagtgccccactgcggctgtctttatattggtttctgtcccttttattgccttgtatgccatctatacttatggggggatacgcaaggctgaacgattaaccgataaagatgtcaaagaagcacacaagaaaagcaaaaagcaaaggaggaagaaaaaatga

SEQ ID NO: 228324 - DNA, 228 bp, Klebsiella pneumoniae
atgaatgcattagcgaaagccataaaaaatgccggtaacgcaaaaaagttagctgaaaaattggacgtatcctcaatgacaattagtcattggaaaaaacgttgtggagggcttgtgcctcaggggcgtatttcctctatttttcaggctacaggcgttactccccacgaattgcgccctgatctctatccaaacccaactgacggcctgccgaaacaggaaggctga

SEQ ID NO: 228325 - DNA, 468 bp, Klebsiella pneumoniae
atgaccagcaaattaaccaaagagcagcttcacaaacgcgcccgcgataatgtcaaagcgttgaaaatggcgtcacgccagcatgtgttcgaaagcgtgcgcgaagaaatattggctgacctgcagcttgctgaacttgcgctggccgcaatggacagtgagccggtgatgtatattcatcaagatgagctgccggagggatacccgtatgacgtcatgttcccattttcaaaagtggatatcgtacggctgtttccggtatacgccccgcagtcagcgctggtactaccgcaccgttccatagtcgaaaaatggtgggaatcacagaacggggcgtctcttgatggctgggatttgttacggacaactgacggttattgtgatgatggagttgatgggcagttcgaagcatggaacgcctgctgcgccgaaatcttggaaaccgcaaagcagaacataataggttga

SEQ ID NO: 228326 - DNA, 261 bp, Klebsiella pneumoniae
atggaaaatcgcatgagcatcactatgattcttgaaagagaaaaagagcttgatgatctggttaaggtttgcccggatgagcttgaggtgatagacatccatggtcaggtttactcaatccctcttgcttatctgacaaacgcacagcaagtggtacattgggtttggaaacttgctgagagaggagattacgccttggatgttattcgtaaatttacagaagttgcttctcatcatgtggggttcgacgctaaaaagtaa

SEQ ID NO: 228327 - DNA, 279 bp, Klebsiella pneumoniae
atgggtgtgtacgaacttgcagaagaagaacgcgaatttgccctctccgctttgcttagggttggagctctaacaaactgccgcattcataaggatgagatcttcgagggtagtggtgatgtcgaagcagcatataaatatgctaataagctattttcagacaatcccgggggcttgacgtttaccgacagaagagaaatgacggatactattcagtcgatttatctggaatattgcggctgtgatgaatgcccttcatgtagtagatatgacgattaa

SEQ ID NO: 228328 - DNA, 234 bp, Klebsiella pneumoniae
atgcgcaatgagagtgatgagtactacgatctggttaaacgttctacaggtgaagttgttggcagcatcagggcagcaggccgggttctggtatacacggcaaatggtatgacttctatgcgaccactgcttgaggatgagggagtatttaatctcaacgcaatgaccagttttctgcatcgcctcggctaccgagttatcccgccttctgataatatgaaatcaacggcctga

SEQ ID NO: 228329 - DNA, 969 bp, Klebsiella pneumoniae
atgaaaccagcagcactagaatatttaagtgagaaaggagtagatctagaaagtcaagttaaactgattgtaattagtcattttcatgacgaccatataaaagggatgcatgaaataataaaacagtgcaaaaatgcaaaagttgtcatcagtgccgcattgaatacgcaagagttcaaatcatatattaatgctttaagtgttaatggggaggaaatggcaaagacacaagaaataaaaaatgtaatgtcattactacctacacttctagaaaaaaaacagcttataatagcaaagcgtgattgtacgctatatagaagcaaagataatttagaagttaaaagtctttctccatctgataatgatatatctcgctctatcttggacttcgctaattggttaaaatactctaaaaatgcaaatggtgtgacttgttcagcaaggcttataaaccctaatcattattgtgttgttactagagtgttttcgcaaacttcaggcaacgatgaaatattacttggtgcagatcttgaaacatcagcgcattccggttgggatgatgtttgcgatgctatagatagcccgaggccaaataaagtaggactctttaaacttcctcatcatggttcacaaactggttttcatcaaaggacgtgggatgaacttattcgctccaagccgatatctatattaaccacgtacgatagatcctctctacctagagaagacatgattgaaaaatataaaaaccattcagcctcagtgtattgcacgtctaaaccaaaatcacatcaacagagtaaaaaggaagaaactagaattccttctgatgctttaaaaatgctctctaagttaaactcgactgtgcaaatatcaaggtcgctaggtaaatttggatatataacagttgaaaactgtttaacttcaaatccaaacgtaaaattgtaccatgcagctttagcattataa

SEQ ID NO: 228330 - DNA, 570 bp, Klebsiella pneumoniae
atgacaagtatatgctgggaaaacatcgatactacattaaattcaaatagtgaagaatctaccaaacaattcattaaacatagtttatttgatgaagaaatacctgctgcacagatgactaatctttatgattattctcaaacaaacatagcaactttttccactcatcaatctgcatgtttggatgatttaactagaattccagagatcacatctcaaccctcacttgttgataaaaagtccgataagggtttctttcgaaaaattttatcatcaacccaaacaaaaaccgtttctattgaaaaagttttagacgcttatggtgttattgacgaattaataaagaataatgaccattatgacgtctatgcaagagtttatgatttaattagtcatgaaatccttgacgagatcactttctcgtcaatcgagtttagtaaaagcgatcaaaaattacttattgaaaatgcaatattttattggttcgtaggcatggaaaatactaaatccggacaaagacgtagagtatcagaatttcgactaagaagaatctacagtcccaaaaaataa

SEQ ID NO: 228331 - DNA, 642 bp, Klebsiella pneumoniae
atgttttcgaccgagtggttccgacgtacagagttactgagagaggaagacattaatcatagtaaaaccaatattcaagagaatataatttctacagattatggatggttagaaattacatgctacccaactaaagcaatattccaattaagcaaggctgggcttgaacaatcactttctgatttaatgagctctatatttgcaatgtttgaaaatgcagaaacccacgcaattggcataaatactctttacgaatatgactttcataaccgtgaggaatggaatgcaattggagatgctttagtacccaaagcgttatggcaggaaaccaatcactctcgaattcttgaagacgacgttgatctaaattacgggatgagaaatctagttgtaaccttagagaataaaaaaacagaaaacaagctttataacgaaaggatcaatataacttatgctccaatacgtgaaaataacattgatggtttaagggttcattacaatcacgacatacaagttaaagataaaaatgatgctgtagaacttacagatcgcttcatcactcttatacatagccatatctcagaggcgtctctgaatgatataaaaagtcacgaatcaatgtttaatcggattttatcatga

SEQ ID NO: 228332 - DNA, 531 bp, Klebsiella pneumoniae
atgagagttccagaatggatatttataacttacatagttagcgtcttgcttttttcgttagcattacttttttattttttaaaggagatcgttgttgtatggcaacaaaagaaactaagaagaaaggtatatcaggctttattggctggtgatttaacattgtcagattttaagaatattcagttggtaattgggcttaatgataggaaagtacatgcggcactaattcacttaaaggctgatgttgactgtggggagtatgagtcacgtgacttagttaaaccccgcttggatacattaattgagaaatttaatacttacaagccctttagcgagttacctgaaggcttagttgaaccattgaatgaggcccgtatcaagtctacggaacctaaggtcattgaaaatctatcggaaaagattttgattcatttaaaaagacaggctaaaagtgatttatatataaaaattgcgacatatgttggcttgattgttggtttgattgggactttttcgggcttgttaaaatga

SEQ ID NO: 228333 - DNA, 2955 bp, Klebsiella pneumoniae
atggcctttaacccggagctggggagcacgtctcccgctgtgttgctcgataacgccgagcgcctggataagctggtcaatgggcccgccgcagatgttcccgaccgtggcggtgatcctctttattcatggcgccagatgatggcgaaaaatgatgagatacggcagaacatcattccgctcagcaagcagtatgcgacgctggcggcggcccaggcggatatcgcgaatatccccgaggggagcaccacgtattaccgcagcccggacgacagcgccctcgcgattgaggtgatgaacgttggcgggacgctgaccgcaaccggacgaaaaatgccgtccagtcaggctgtagattcagtgaggggattaatagacagccagggtgaaaacccatttgcagtggtgtttaaaaatggtctttcaccgttcggctacaaagacgggcgactgtatgccgatgaatttcagaagctctattcttcagattccgggttagagtttggcggcagcatcattgataacaatccgccggatggatggcgttttgtcatctactatcgaaatggtctggtgatgtgcggtcaacggactgacggcacgatgatcggtttcggtgagggcggcagcggtggtggttcgattgagccaggcgatacggcagcggactatgattccatccgtaactacacaggcacggcaacggtacgggatgtcgtaggtcagcgcactggcggccgcttcgtggtcaacccggatgatacgacctccggggaaataccgggcgggatactggtcgatgtgctgggacgccgctggtatcgccaggcggaatttgtcagctatgacatgtttatggccccccgcgttcctggtgctacgctcctttctgtgcaggtcgctctggcgctgggcaaccgttcatccgcgatagcatatctgtcaggcgttgaagctgccgatgccgctatccagaatgctcatcgttatgcgaacctgctcaatatcccggttcgtcagaatgatggtgccttcctggtattagttgaccatgaagcagaggttcggacaaaaacgtcactcggagggtcgataatttttacctctgctgactcaggtgttaacgaaatccgctgggggccactgcggctgcttgatccttcagcgcctgagccaaaacgtatattcaatatcaaggggaaagaacgtattgaactcactcctgctgagctggctacgttcaacaccagttactctcagtacctgaaaaaaggctctaactatctgccgtatccgaaactgtatccttattacggcgggatgttctatgcgctttctaatgaagtggagatttaccgaaacggaaacagggataaccctcgtgaccgggttttataccgcgaattctcccgtattggtagaaatggcgcgctgacggaacggattgtgaaagatattccgaccggctcaattggctacgctgcgattatcccgaaagaagatgattttctggaatttgaatgcccgcattttattgagctgggcgacagtcgtcgattcctgaatatcgaagtttccaggccgatggtgcgcattaaaaatctggtgcatacgtcatggcagactaacgcaacaagcctcgaaagccgcgtggttatttctgcacgagaggtttttgacgtattttgcgaatgcggagaaaccacctgtcacccggccgagaacggctcatatgtcatttgcattcgtgatacctgtaatgtccacattgataatttttacgggttgcatggctggggatttcaggggcatcacggaataaaggggctttatggcggacggaatattttcaaccgcgtggattttcacaccttcggttacgatattttcttcgacgacctgaccgttaaagggagacaaataaatctgcagggtggcagtcagtggtcgataaaaaaactccggctaaacattacacggagtaatggcgatgcagtggattacttcctgaattatggtatcggtatgcggcaggactatgcgagcgactgcgagtgtattcttgacgtcgaggatgtaaccgttatgtgggacagggggttgcctgcatggtacaacaccaccaggtcgtttgaccttgtcagaattattgatactgcagactcttcggatcaggggattgacagcaaattaccccccgttatcagaattcgcaatgtcgtgtttgaccttgctggcatccagaccggaagaccaaacgacaattttgagttctgtgctgttacggccttacgttctcagtttactgactatgctgtgaccggccgtaaaacgctgctacccgacaatatcaccgttgacggcatgacggctatcaacgttcagcccacgcagaacgcggtgatgtgcggcatcaaaatgccagaggacctctataagaacactgtgggctcacgcaacaaaaaaggtagcgacgggactaacgcccaaatttcacttcgaaatcttcacagcattatcaacaatcctgtcattgaaaaagatgcggcgcaaacagtagatatacctggcaattcagcgaactggacaagtgaatacctgtccagtgattacagctggataccgcgtatcactctggaaaactgctacccggccatcgtgaatatctcaggcgcaaaggctgttgtcgatattcatggcggcaagctggcgcgggtctacaccaacggcaatggcaaccgttgccgggtcactggtgctgatattgagctgatccctgatgcggcgggtgtgacctatttcgcagcagataaaacgctggtgacgggctgttcatggctgaatccggccagtggcgcgacctatccaggcacattgcgtggttcaggaaacgaaatgatcggagaaagtgctaaagcaccaaaccttcctgcaaaagcttttattgaggaataa

SEQ ID NO: 228334 - DNA, 123 bp, Klebsiella pneumoniae
atgctggcggcgaaacttgtagctggcaaaacggcgatcgcgcagctggtgccacaggcggcgctcctgcggcgtcaggtggcggcgcaactgccgggcgtcatttgtgctgttttccattaa

SEQ ID NO: 228335 - DNA, 1182 bp, Klebsiella pneumoniae
atggaaacaccggctattccccgacgcctcgccttcacggcgggcgctcagcaactgatcaactggggtatctctttttatatgcccggcacctttgccggggcgatgtcggcagataccggctggtcatccccacaaatctactcaggcctgacgctcgccatgctggtgatggccaccctctcgccgtttgtcgcccggctgctgtcgcgtgctggcgggcaacgcgtggtgatggcaggctccctgctgctcgccgtcggttgtctgcttatggctgacgcacactcgcttgtcgcctggtacagcgcctggctgttgaccggcatcggcatgcgtttgtcgctgtatgacgcgctgtttgccgcgctggttaatctctacggcaagcaggcgcgacggacgatctcccgcataaccctgacgggtgggctggcctcggtggtgttctggccgctgggggaggctctgctcgcggccatgagctggcgggaagcactgctgatctatgccctgttcggcttgctaagcgccgcgttaaccctgtcgctacccaataaaacaggctttatcgtcaataaacccgccgcccctgccgcggtacgggatcggcgaaacggctggctgtacgccgcgtttatcgcgctgatcacctttgtctctaatggcacttccacccatctgccggaatttatcataagcgtcggtctgccggttgccgtcggcatgttatggggcgttggacagactggtgcacggtttctggaggtggtggccggggcggggctcaccccgcttcgcctgacgctgcttaccgcgctggctatgccggtgtgctttatgctcggcctgagtagctcgctttttctctggtcagccgccggttttgtgctgggctacggggcgattaacgggctggtgaccatcgtcaaagccacgctgccgctgcagttgtttgcccctgaagcgtacgccagacgcaccggggtgctgctgatcccggcccagctgatggcggcggcctccccgctggcctatgcgtggctgaaccgggctttagggacgatcggggcgatgtggctgtcgtgggggttaacgctgctgattgccgtactggcggtggctatcgtcaaggggcaggcatcgcaccaggctgagggtatccctgcccttagcgactag

SEQ ID NO: 228336 - DNA, 726 bp, Klebsiella pneumoniae
atgaatcacgaaaaggtagcgttgattttcggcggcgcgcgcggtatcggggcggccattgcggcgcgactggcgcacgagggctatcgggttgccatcacctgggtatcacgcccggatcgggcgcaggcgctggtctcaacgattgagcaacggggcggtcaggcgatagccattgaagccgacagcgcagaccccagtgctatccaggccgcggtggataagacattacggcactacggcaggctggatgtcgcggtggtaaatgcgggcgtgctgcgtctcggtacccttgaggcctattcgctggacgatctggataccaccctggccgtcaacgtgcgtggtgtcttccttgccattcaggcggcggttaagccgatggcggaaggggggcgtgtgatcaccatcggcagtaataccgcggtgcgtaccggccatgtgggcagtagcgtgtatgccatgagtaaagcggctgtcgcctcaatggtgcagaaccttgcgctggatctggcgccacggcgcatcacgattaacaacatccagccggggcccatcgccaccgatatgactgccggaatggcggagcagatcgtcgggcgcattcccttgcagcgtatgggcgaaccggacgaaatcgcctcgctggcggcctggcttgccggtgaatcgtccggctacatgacgggtacaagcctgaccatcgacggcggctttgtgctctag

SEQ ID NO: 228337 - DNA, 462 bp, Klebsiella pneumoniae
atgatacgtccacatttactcttcacgctgttcgcgctgacatcaggctgcgcctgggctgcaccgcttagcggactcagcgccgcggatgttaacggccccgccgccgttgcaccgcccgaacagccccagccaccggcaacactgattgtggatccgccgctggcgggcccgctgagtaaaggtgcggtctttattcaataccgcgccgagaacatgcgtattgaaccggtgttcgggcccgaggcgctgaaagtggcgccgcgcatcggccatatccacgtcatcgtggatgacaacccctggcactgggccgacgccagcggcgagccggttattctggtgggcctgcctgccggtcatcacaaggtgacccttattctcgccgatccaacccataaacctgttgatcgcaagaccgtcgaattcatcgtaccgccgcatgctgcggttatgcactga

SEQ ID NO: 228338 - DNA, 255 bp, Klebsiella pneumoniae
atgaaagcattactgattgctgttctgaccttctccgccgcaatggcgtcttccgctttcgctgcccgggaaattaaccagcctcaggggctgcaaaaaattggcaccgtttccgacagcagcggcgcaacgtcgctggcggatctggaggcgaaactgcaggccaaagccgttaaagcgggcgccggtgcgtttcgcattacctccgccggggggaacaacaccctgtcgggcaccgcagatatttaccgttga

SEQ ID NO: 228339 - DNA, 750 bp, Klebsiella pneumoniae
atgaaaaaacagtctcttcataccttcgcggtgggcctgctgctggccgccgccagcggtaccgcactggcgagtagcaataaaaccgtggtgctggtgcacggcgcttttgccgacggcagcagctggaaccaggtgatcgacagactgcaacgccagcataccgaggtcattgccgttcagctgccgctcaactcgctgaaagaggatgtcgccgcaacccagcgcgccatcgcccgggcccacggggatgtggtgctggtaggccactcctggggcgggacggtgatcagcgaggcgggtaacgctgcgcgggtcaaatcgctggtttacgtggcggcgtttgccccggactcgggccagtcgactgcggatctggcggggagctaccctgccccaccgggcagcgcaggtattgctaaaaccgcagagggttttctctggttacctgaaaaatcggtacgccaggactttgcgccagatattaaggctgctgagcaaaacaggctgatcgccacccagggcccgatccgcgcggaggcctttaccgaaaaggtcacgcatgcggcctggcatgataagccgagctggtatgtggtcagcaagaatgaccggatgatcaatccggatctggagcgttcgatggcgaaggcgattgatgcgaaaaccactgaggtggcggcaagccatgtgtcgatggtgagccaaccggaggagattgcccgggtgattgagcaagcggtgaaatga

SEQ ID NO: 228340 - DNA, 189 bp, Klebsiella pneumoniae
atgaaaaaagtgtttaggataatcggaataataactggcctaattacatttttaagtgccgggttctattttgtagagaattctttcgataaccttttttacggcaatatctttatcaatatctcaactggtattgtctttattttctcattgatcggcctgtatttcatatggaatagcaagccgtga

SEQ ID NO: 228341 - DNA, 543 bp, Klebsiella pneumoniae
atgtgtgaaccagcaaccatcgccgccggcgcaacacttgtgataggcgctatgtcagcatacagccagcatcaacaaggtaaatatgcccaggctgttgctaaccagaatgctgatattgccgaaactcaggcgcaggatgccgttaaccgcggcaatattcaggctgaagaggtgcgccgccgaaacaggcagactgccggaacacaggccgcgactatgggcgccaccggagccgatctttcctctggcacatcactggatattttcggtgatacggcgcagttcgggacgcttgacgcgcttacaaccgtgaataatgcgcagcgagaggcgtatgggtaccaggttcaggggatgaatgcgatcgcagaagggaatgcagcaaaaagtcagtccaacgctgctgtaacccaaacgttactcacggcaccgctgaaagcctatggcgcgtatcagacgtttggtggcacatggagtccgttcacacagagcaaggccgcaccaatttctgctgccatcggcacgccttccggtcgataa

SEQ ID NO: 228342 - DNA, 690 bp, Klebsiella pneumoniae
atgaatttattagaacgtttgctgcatcgccgtctttgcaatgagcaacctgctgatggtggagctgcaccggcggcgtctgaaccatctgcaccaggcgcaggtactgcccctcagggcgatcagcctgcacaaccggatggtggaaacccttccgttgatggtgaaggccagcaagaaaagactgatagccaggacggagagcagcaaaaaaacgagaaagagcagaagcaggaaggcgcgccggagaaatacgaattccaggcaggtgagggcgtcgagctggacgctgaagcgctgaaggacttcgagccggttgcccgtgaactgaacctgaccaatgagcaggcacagaagctggtggatgcatacccgaaaattctggccggtgtgcagcagcgtcaggcagatgcatggcaggcacaaactgaagaatgggcagcaaccgtcaaggccgataaagagatcggcggcgataagttgacggccaacctcggtgttgctcagcgagccctggacaccttcggcacgccggcgctgaaagagtatctgaacggcacagggctgggtaatcacccggagctggttaaggcgttcgtcaaagtaggaaaagccatgtcagaagatggcgtggtgacaggaaaagaaagcggtcagcgtagtgcggccgaagtgctttatggcaaataa

SEQ ID NO: 228343 - DNA, 297 bp, Klebsiella pneumoniae
atgacagattttgatgatgaccagctggctgctgaatcggcacgagagaaggaaatccttcaacagcgtgacattgaagatatccgtttcgtcatgggtagcgagcagggccgccgggtgatctggtcactgctggagaaaggtcaggtgttcggcacttgcttcaacgtagaaccgaacatcgcagcattcaacgaagggcagcgcaacctggccctggttctgtttcagcgcgtcatggcgcactgcccggatcagtatctgaagatggccgcagaggccagtgaacaggagtaa

SEQ ID NO: 228344 - DNA, 918 bp, Klebsiella pneumoniae
atgctcgacttcattagagatctctatgcatcattcaaacaaacatcattagaaagggttaaaagccctgtacttggagcttttgttttttgttggcttggattcaactgggaaattttagctattttatttttcagcaaaaaaccaatagaatcgcgtataatatacatatatcaaaattatgacatattatttaatcttatgggtgcgatatctataaccacacttatatgctatttcctgccaagaataaataaattcgtaactaaaatacaggacgaaccaaatagcgaaactgtaatattgacccttacctcaaaaattaaaatcgcagagcagcaacaaaaaatagcagagttagaagcaagaaaaaaattagctgaaaaaaaagaagataaattcatcgacaacaacatctatcaaatcaaagaagaaaattcaaagctcgagaaggaaatagatgttcttaaggaacaaatatcatcattaaacacatcactcaatcaaagttatgtaacagagaatcattacaaagagatatcagacaaagcagaagcgacaaccaatggattgagagcgcaaataaccgaacttgttaacgcagagagaaaactaaaagaggaattaaccaaaaaagaaaatgacatcagcaatatggctgtaaacttaacaaattgctccgagcagatagtgcagttaacaaatgaaattgatcgaaaaaatgaagaaaatgctaatatgaaagctaatataaatcttcaagatgaaaaagttaagttacttgttaaaacttatccacgatattttacattactccctaccagtggtattccatcgctagaaataacacacaacctaataaaagattatatgaatgaaaaagagcatatgaatgataatcaaaactcatcaatttaa

SEQ ID NO: 228345 - DNA, 621 bp, Klebsiella pneumoniae
atgccaaaggatcccaagcgcaaatcaactcagtacaagccgttgacggtgatgcaggaagcctacgcccaggagtatgtgaaatgccctgaaaatcagacgcaggcggccatcaatgccgggttctcccccaagtctgcccacgtcaaagccagcacgatgatgcgtgatgagcgtatccagaaacgaatcgctgagctcatggaggagcgcaacaagcgcctgcgcgtcagcgccgattacgtgctgctgcgcctggtggaaatcgaccagatggatgtgctggatatcctgaacgatgacggcgggatgaagccgatcgctgaatggccgaaggtctggcgtacctctctcagtgctatggatatcgctaccatcaagacgacccaggcttctctgcaaaaagagaatggcgaggctgatctctctgttgaggatgtcgagcatatcctgaagaaggtgaaatggcccgacaaggtgaagaacctcgagctaatcggtaagcacgtcgacgttaacgcgttcaaagagcgcatggaagttaacgtgaacgtcactatcgccgaccgcatggccgccgcgcgcaagcgcctgaaagagcgcaatggtggtgaccagtga

SEQ ID NO: 228346 - DNA, 201 bp, Klebsiella pneumoniae
atggacaaaattgattctgattttatcgtcctgcaggaattggctgcccgcattgagcaaaacccaaataacgctggctggtacatgcacagagcctacatgcttggtagtggttgcagcgctgacgaggcgcttgtacatccaccacgcgactattccaggccaatgttgcatgtgattattgggagtaaagatgcctaa

SEQ ID NO: 228347 - DNA, 204 bp, Klebsiella pneumoniae
atgaaacgaattacccagcgagaggccattgagcaggggctcactcggttctacacagggaagacgtgtaagcatggccatgacagcgagcgatacaccatcagcggcgagtgcgttacgtgcaataacgagcgcgcgcgccggcaggcgcagatgagatcggagcgtctgaaagcagccagaaaggccagggaggcagcatga

SEQ ID NO: 228348 - DNA, 897 bp, Klebsiella pneumoniae
atgagcaacgatatcgcaatcacttctcagcctggcgctaccgtcggcaccgccgcggcaatcttcagcccggaagggatggatcgcctggtgcgatttgccaccctgatggctgacagcaaagccaccgttccggcgcacctcgctggaaagccagctgattgcctggcagtcactatgcaggcggcgcagtggggaatgaacccgttcgcggtggcgcagaaaacccatgtggttaacggcacgctgggctatgaagcgcaactggttaatgcggttgtctcttcctcaaaccttctggccactcgcctgaactacaaatgggatggagactggtcaaaagtaagcgggaaaaccgacaaatctccgagcctgacagtgacagtgtgggcaacccttaaaggcgaatctgagcctcgctccctgaccatcagcatggcgcaagccggcgtgcgcaactcccctctctgggagcaggatccgcgtcagcaactggcttacctgtgcgttaagcgctgggcacgcctgcacgcccctgatgttctccttggcgtctacacaccggatgagttgcaggaagcgcagccgcgcgttgagcgtgacattacgccagcaccagcaactgcggcaggcatgaacaaactgatcaacacgaagccagagcatagccaggaagagcgacagactcgctcacaagacgaaatacttgcaagttttactgatgcagcagggaaagcggaaaccgttgaaaaactggatcttatattcaacggaggcacatggccagatgggaaaaaacgccctggcgcatgcgatgctatgagcgataaatggcttgaaatggctactgatgtttacaacatccgacgcgaagaacttaacgaaattacgatgtaa

SEQ ID NO: 228349 - DNA, 675 bp, Klebsiella pneumoniae
atgaaagaacgcggaatgatttttaacgccgagatggtgcgggcattgttggatggccggaagacgcagacgcgccggattataaaggactgcacggtcggaagagacccaatttcaaaattcattaagatcgggaagaagtttatcggctgttacccggaagatgttcctgaactaatcagggaatgctgcccatacggagtaccaggcgatcgcatctgggtgcgtgaaacatgggcagatgctggagccagcgcaccggacctcaaactttatcgtgcgaattaccctgagcatgttccgtcgatttatgaaaacgtgccgccggctaaagaaattcgctggacgccatccattcacatgccgcgctgggccagccgcattctgctggaaatcaccgacgtgcgcgttgagcgtctgaacgctattagcccggaagatgcagagtcagaggggctggagcgtaccaactttacaggtttcggcgacgagcctggattacctagctatccagagccggatgtttatttcgacccgctgaagaaacagtggaaggaatatccgcctgaagcattcgcggggctatgggaatccatctacggcgaaggaagttggcaggccaatccctgggtttgggttatcgagttcaagcgcgttgaaggcggtgcagcatga

SEQ ID NO: 228350 - DNA, 885 bp, Klebsiella pneumoniae
atggaattgaggcacctgcgctatttcgtcgcggtggcgcaggaactaaacttcacccgcgcggcagaaaaactgcatacctcgcagccttctctgagcagtcaaattcgcgatctggaacagtgcgtcggcgtgtcgttgcttgagcgcgacaaacgcaaggtgacgctgacggcggcgggggagtgttttctgcaggatgcgaaggcgatactcgaccaggcagagagtgccaaaatgcgcgcgcgaaaaatcgtccagcacgataaccacctggcgattggttttgttccgtcggccgaagtcaatttgctgcccggcgttctgcccttgtttcgccgcaaacaaccgaatacccgggttgagctggtcagtcttatcaccaccgagcaggaagataaaattcgcagcggtgaactggatatcggactgatgcgccacccgatctacagtccggaaattgactatcttgagttgctccacgaaccgctggtggtggtgctgccggtagatcatccgctggcgaaagcagagaaggtgagcgccagccagttggacggcgttgattttatcagcactgacccggcgtactctggggcgctggcgccgatcgtccaggcgtggttcgaacagcaaaaaagccagccgcgtattgtccaggtggcgaccaatattctggtgaccatgaatctggtggggatggggctcggggtgactttgatacccggttatatgaatcattttaatactggccgggtggtttttcgtcctatcgccggcaatgccccgaccattgcgctgctgatggcatggaaaaagggcaccatcaagccggcgctggccgattttatcgccacggccagagagcatgcggctgcaggataa

SEQ ID NO: 228351 - DNA, 1362 bp, Klebsiella pneumoniae
atgaccatcaaaatgaaaaccgatgtctaccaactggtcgacccgcaaaacggtcgcgtcaccccacggatctataccgaccctgagatctatcagcttgagctggagcggatctttggccgctgctggctgtttctggcccatgaaagccagatcccgcgggcaggggatttctttaacacgtacatgggtgaagatgccgtggtggtggtccgccaaaaggacggcagcattaaagcctttttaaatcaatgtcgtcaccgcgcgatgcgcttgagctacgccgactgcggcaatacccgggccttcacctgcccctatcacggctggtcttatggcatcgacggcgagctgatcgacgtcccgctcgagccgcgcgcctacccgcaggggctgtgcaagtcccactgggggctcaatgaagtcccgtgtgtggaaagttacaaaggccttattttcgccaactgggatcctacagcccccacgctgcgtgactatctgggcgatatggcctggtatcttgacggcgtcctcgaccgtcgtgaaggcgggactgagatcgttggcggcgtacagaagtggaccatcgactgcaactggaaattccccgccgagcagttcgccagcgaccagtatcacgcgctgttcagccacgcctcggcggtgcaggtgctgggcgcgaaagatgatggcagtgaaaagcgcctgggcgaaggacagaccgcccgcccggtgtgggagactgccaaagacgcgctgcagtttggtcaggaggggcacggcagcggctttttcttcaccgaacagccggacgctaacgtctgggtcgacggcgaggtctcccgctattaccgcgaaacctttgccgaagccgagcagcggctgggcaccgtccgcgccctgcgcctcgcaggtcacaataacatcttcccgaccctctcgtggctaaacggtaccgccacgctgcgcgtctggcacccgcgaggaccggatcgggttgaggtctgggcattctgtctcaccgataaagccgcctccgatgaggtcaaagcggcgttcgaaaacagcgccacgcgcgcctttggtccggctggtttcctcgagcaggatgactcggaaaactggtgtgaaattcaaaaactgctgaaaggacaccgggcgcgtcacaccagcctgtgcctggagatgggattaggcgaggaaaaacgccgcacagacggcattccggggataaccaactatatcttttccgaaactgccgcccgcggtatgtaccagcgctgggccgatctgttaagcagcgaaacgtggcaggaagtgcaggaaaaaaccgccgcttaccagcaggaggtgatgaaatga

SEQ ID NO: 228352 - DNA, 519 bp, Klebsiella pneumoniae
atgagcgccttagtctctgctgaactgcactaccgcatcagccagttcctctacgaagaggcgcgtctgctggacgactggcagtttcgcgactggctgacgcagctggacgacgagatccgctacaccatgcgcacgaccgtcaacgcccagacccgcgaccgtcgcaaaggggtccagccgccgaccacctggatctttaatgacaacaaagaccagcttgagcgccggattgctcgcctggagaccggcatggcatgggcagaggagccgccatcccgcacccgccatctgattagcaacctgcagatcagcgaaaccggacaaccggatcgcttcgccgtgcgccttaactatctgctatatcgcgcgcaaaaggagcgtgacgagaccagctacgtcggcacgcggagggacaccgtccgccgtctgcctggcggcgagtggcgcctgacggcacgagagatcgtgctcgatcaggcagtgatcgcgtcccacaacctgagcgtactcttctga

SEQ ID NO: 228353 - DNA, 318 bp, Klebsiella pneumoniae
atgaatcgaatattcgcctgctccaccgtggagctgccggagggggaagccctccgcctggagacctctcccgttattgccctgttccatattggcggagcgttttatgccgttaacgatcgctgcagccatggcaacgcgtcgatgtccgaaggctacctggaagacgacgcgacggtggaatgtccactacacgccgccagtttctgcctgaaaaccggcaaagcgctgtgtctgcccgccaccgagccgctgaccacctataccgtgcacgtggaaggcggtgaggtgtttatttatattcctgaggaggcctga

SEQ ID NO: 228354 - DNA, 813 bp, Klebsiella pneumoniae
atgagcgatttacgcgataacgtggtgttgattaccggcggcggttccggactgggtctggcgctgattgagcgctttattgacgagggggcgaaggtcgcgaccctcgaactgtccggcgcgaaagtcgccagcctgcgccagcgctttggcgatcgggtgctggcggtggaaggcagcgtaacccgctacggtgattatcagcgcgcagtggatcagatcctcaccacctatggccgtctggactgttttatcggcaacgccggcatctgggatcataacgcctccctgatggacaccccggcggaggcgctggagaatggcttccatgagctgttcaacgtcaacgtgctgggctatctgctcggcgctaaggcctgcgccccggcattaatcgccagcgaaggcagcattattctgaccctctccaacgcggcctggtatccgggcggcggcggcccgctctacaccgccagcaaacatgcggcgaccggcttaattcgccagctggcctacgagctggcgccaaaggtgcgggtcaacggtgttggcccctgcgggatggcgaccgatctgcgcggcccgcaggcgctggggcaaagcgacaccacgataatgcactccctgacggcggagaagatcgccgccatcctgccactgcagtttttccccgaaccggtcgatttcaccggcccgtacgtcatgctggcttcccgacgtaataatcggacgctgagcggggtgatgatcaatgccgatggcgggctggggatccgcgggatccgccatgtcgccgccggactaaacctttaa

SEQ ID NO: 228355 - DNA, 1203 bp, Klebsiella pneumoniae
atgagcgaaccgatgattgccattatcggcggtggacaggccggggcgatggccgccgcggccctccgccagcagggttaccagggtcccctgcacctgttttctgatgaaccccatttaccgtatgagcgcccgccgctgtcgaaagcgatgctgctggatgcagatccgcagcgacagccggtgctccccgccagctggtggcaggacaacaacgtccagctgcatctcggtgtgacgctgcgcgatatcgatcgtcaggcgcagagcctgacgctggcagacaatcgcgtctttcactggcgacaactgctgctggcgaccggagccgccgccaggccgctgccgctgctcgacgcgctgggggaacgttgcctgaccctgcgacacgccggcgatgctgcgcgtctgcgcgcggcgctgcagccagggagcgaggtggttatcgtcggcgcaggcaccatcggcctggagttggccgccagcgctattcagcgcggctgtcgcgtcacggtggtggagcaggcgtcgacggtgatgggtcgcaacgccccgccgccggtccgcgattacctgctggcccgccatcgccaggccggggtacgggtgctgttgaaccgcgccatcgaacaggcggaacagggaacccacctcaccctcactttacagagtggcgaaaccctgcgcgccgggacggtcgtatatggcattggcatcgtggctaacgatgctctcgcgcgccgcgccgggctggagaccgacaatggcatcgtcgtggatgccgacggcaggacctcggacccggctatttttgccgccggcgacgtcacgctgacgcggcaatcagatggttcgctgtcgcgcgtcgagagctgggaaaatgccaatatccaggcgcagattgccgctgcggccatgcttggcaaaccacgccccgccagggcgccaggctggttctggaccgatcagtacgaagataacctgcagtttattggcgatatgcagggcgaaaagtggtggtgtcggggagcgcccgccgatcgcaaagcgatctggttccagctgtccgacggcgtgttaaccggcgcggtcaccctcaatcacggtcgcgagatccgcacgctgcgcaagctcatccagagtggtcaagcggtgaacgccgaaacgctatgcgatgaaagcgtcccgttaaaaacgcggtaa

SEQ ID NO: 228356 - DNA, 495 bp, Klebsiella pneumoniae
gtgacagcgagggagcgtttttttaagaaactgcagcaccagcaaaatccgccgcggacaaccacctacgatagggcggccgccgcggatattgcgatgtttcgccagcagatggcggcactcgcccggcaggtgaatcagtggtttgacggaacgggcatcgaggtggtggtttcgacccgccacctccacgatctgagcacccttggctacagcctcactagcggcatctgccgctacgatatccccactctccgcctgcaaaacggcgagcgcagcgtcaatatcgtgccgcagcagctgtgggatggcgtggaaaagggggtcgtgaccctgagccttgagacacctggcggggcgggctcccgggaggtgttttatctgagcctggccccggacggcggctggttgatccgtcaggcgcgccagcccccggaggcgcgacagattctcaccgaagaccgcttttttatggcgatcgacagcctggcctga

SEQ ID NO: 228357 - DNA, 1440 bp, Klebsiella pneumoniae
atgggatggtctctaccggttattccaaagaaaaacagcgcccaacagtggtcgccttggttatgcctcttaattgttttattaggttttgttctgtcgctaattattgcagtattggactctccggaaaacagatttctttcttttagtagcggttattggctgccaatgatactacaaactattatcggatgttttactgtagttaccttctacacgttctggtgggaggttcaagcttttgctgtatggcgctggaattcctggagacataatacgaatcttctgtggttcagaagagcacacaagcaccactttgtaagcttccattgtataataccagccaactctcaattgctccctaaaatcgctggtgtatcgtcggaaggcattgatgaagaaccgccgctgacactgcttcctgacgagccactaacgccgggtatttcgcgttttgaacaactatgtcgattactgtttgtcagtatcccacagaggcttcttgataagcattcgggtaatttaacggtgatattacttacctcttctagcgaaaaagaagcggaacagcgggcatttcgacgactctgggatagcgaaaaactctctggtttaccttatacattggtgctcccgaaagagttcgcctttaaagactggaaccagtgtgtatctactacatgcggcaacattctggtgctggcgatgcattatcggcagcctaatgagtcattaccagagtttgcaagcattttactgcttaaaccatcatctttagttaagcaaggtgaatataattttatccccaaaattttccatgcaatgccccttcgtggtaatgccatggagaatgaattaattgagtggcatgatatggggcaacaaccatcagatcaaagatatttagtctggcatagtggattaaacattacggcccaacaagaattgggtagagttttaaatacactaccattaccactggttgataatatcggagctgggggggtaattgattttgacaaggaatttggtgtttataaaaggcttgctggatggctgatgattgcgtcagcttgcgaaatgacacgttatggcccggcaactcatttacttttgtgcgaaaatgagaatgagggttgggctgtgacaataggaaagagttgtccggtgatttctccccaattaagagaattttatttatccccatttcctgctggaacagttatgatggcgttgttgtttagcgttagtattttcggtttgatagcaaattgctcaccctcgattgcattttcatggtctggcatgatgatattttcatttcttcttgtagtatctttttcttttatagccattcttacgcgcaatgtaatttcaaaactgctgtatcctcgttttgttaaggctgtcagacagcccaaaaaggaaaggttggaatga

SEQ ID NO: 228358 - DNA, 1935 bp, Klebsiella pneumoniae
atgaacactaaccctgaacctgtccgggaacttgaatgtaaatttgatgataatgggcatccttcctggcgttcattcccctctcataaaaattgccaaatcagaggcgggtgtgatttacctccacatttgcctggtattattatccttgtacatggtgttaactcgacaggagaatggttttcaattgcggaggagaaactttgcgaagggctgaataagaggcttggattaaacgagacagattatgaattggtggccaacaaatatctttctgacgagaaaatagattctgaacctctggtatcccgagatttacctgaagttgataaaaataaatctccagtcattcgcttttactgggggtatgcttcacctaaaggtaatgaagataaatatgttataccgctagccaatagaaaaggcgttgattaccatcagttaaaaagacaaggcctacctcaggaaaatattatggcgcagagcccatttttctggggcggcgggccattccagaacggcacaaataatctgcactctttatggagtgaaaaagggtttaaagagagagtcgcaggtatcaaagtccagtggtttaatgaagacaaagatcgcctgttaaccaatgccccaccgcgaaaatactatgcccatgcagcaaaacgccttgcagacttggttgacagtattcgtaataaatatcccaaagatacagtaaccattatttctcacagccagggaaccatggttgcaatggcagcggtagcgctagcgaagaatgcacctgatgcattatttgtacttaactcaccctatgcactggatcataacgatcttaatggtgcttcgcttccagcagaggaatgcatctctcctgaagggagacaaagcaccttatctgccattgttgacaaggtggcttccagaaaaaatcacctgtcatcacttggatatgaaggactttgcgtaggccagacagcggataaaaagaattggcgacctgatgtcactcttgccagtgaaagtggcagcagtcttgccgaacgagataaccacggccgcacctatatttacttttgtcctcatgaccgtgttatggggtcacgcccgctacgctcaattggctggcagggattacccaacaattctcagggacagcctcatcctctgctgaaaaagcatcaaggccatttatttcagcgaatgctggctcgcagtaccccatgtggcgaagccccaaatcccgcaacaccttttgcaaaattgccggatggtaaaccgttctgggatgataaaggcgacaagtatcaaagcagcagcttcacctatccggatcctccagaagggcaaacggtttttattaatgccgaaaaggtacctgaacctatagatgctgcaaaattagctggttttgatgcatcacgcgttggagctgaacacgatgacagacagatagatggttggggggaatttaatctggataaaaaacgaaaaaacgacaatacctatgacaactatatcaacctatatcctaatcaggacattgtgactggatttaaaaatgtgggtactgaatctgagccccgattggtacctgtgaaccgtaaggagacatttgaagaaaaggatcttcgcataagaacttatgtttctcagcctacggatcatagtactcttccaatgcatgctgatttcatgtctcaggtggtggcatatgatttgccaataggatattgcgatgcaacctgggataaagaatttatggctgatttacggcgaaaagcggattggacacaaggtgaggatccttatctcttcagcggaatacctgacaatgtgcctgagcctgatataattagtcgtgaaactattactgataaatttaataaggagaaatataaattacccatgtacaggtctgtcaataaggcataa

SEQ ID NO: 228359 - DNA, 945 bp, Klebsiella pneumoniae
atgggggcaagctttggggtggggctgggaggaatgagcggttctcaaaagctagaagagtcacgaaaagttgaaacagatgcaccggctcaaattatttatcgcatagataaaaatcgatacctgaccctggaaaactatatatcctgtgatgagggtggacaggtttattacaatgactctctgcggggaataaaaacccagctgggatgggatgacgatttttatgatttcgcatatcgccgggggaataacttagcagcttatagaggctctattataaatggggcggataatggttatctggcatttcccggcgcatctaccagacaatattgtggtggcggtaattccacaacaggttgtcctgtatttttcttcttttcagccgactatgggaaaacatttatatataaaattgtagctgaagaatacagcacccctgagcgtttcaataagcttaaggtagtagtagctaatgatggggtttacttaagggatgagtctcaaatagagaatgtatattctcaccctataggtcttcgcgatcttcgatcagtaaataaattaagattttcagacggcaatttaatcagtatttatgatgactggcagaaaaaagttcatgagttagtaaaagaagaactgataagaaaaaaaatgccctatgcagacgagtatgggccaaagtttcgtatattcgactatatcagaacattaacacctccgaaaaatcatgaggaaagtaatttaatggcaaatgaattatcagatattcgaatcaggattgaggatgaggtttatagtcacagggttgagttcccgaaactttccacgaaaagtattgatgctaaatatctgtgtgataaaagtattgaagctaaaaccatcacgtatacacttgaatcaagtggaaaaaagaaggtagagaaaaatgaacactaa

SEQ ID NO: 228360 - DNA, 1395 bp, Klebsiella pneumoniae
atgcttaaaaccctagcccgctgtctggccgtcgccgtcgtcctgctgcttatcgccctggcgctgtttggtcgcgaaggcgcggggtggcgctggctgactaaaggcggctggcacaccaccgcccgtatcagcagcctgacgccgcaggagcggacgtgggcgcagatcgcctggcggtacgtcgagaacaatacccagccgcaaaccgggctcgtcaacggcagcgacaaacagccccgcgcgacgctatggcagatgggcgacacccttatcgccctgctcgccgccagagagctggggctggtaaaggaagcggaattcgacgcccgcctgacgcccctgctcggcaccctcaatcgactgacgctgaccgacggcggttcgccgggcaggctatactccactcagacggcgacccctgtcgacttcagcggcaaaccggcgggcagcggctggtcagcgaaagatatggcgcgactgatgctcgccctgcggctcaccgccgaacgcgcgccgcagtatggcgagtacattgataaaattatcctgcgctggaacttctgtccggtgatcgataaagacggtgagctgtggtccgcctcactgcagaacgggcagcggacgatccgcgaggagctccggctgggagacagtgaatacgccgccagcgcgttccgcctgtggggatttccggccggcaaggctctctctcccccggcgcgccatgtgattatttatcagcgccgcctcgccgttgacgaccgcgacccgcgaaccacctggcaacccgtggtgctctccactctgcccgccatgctgccgggactggagttcggctggcagccgcctggcgtgtcggaagaggtacaaaaagccatgcgcgcccgggcggaagggatatggctcagccagaaaacgcgctggacgcaggataaggtgctcaccgcccgggccgatttttcgcttacccaggcgccctggcacgtagaagacaccgtctggggaaatggctacgcctggaatacgctcggggacgacgggaaatactacccccggctggcgcaggtgaccaccaaagcggtctttgtcctgtggacgctgtgggaaaccgagtataccgatgcgctgatggcggtcactacccatcttaacgacccgcagcgcggctggtttgaaggtcgggtcgaggccaccggcgacgtcaacgccaccctcaccctctccaccaacgccatggtgctggaggcgctgttttacaaacacaacgccgggccgttgttcaaaaacggcctcgcggatgacaacagctattttgcccgccgcgcgacggacgaatttaacccgccccgccgctgcctgccgggcgaacgggtcatgaggagcgcaccatga

SEQ ID NO: 228361 - DNA, 1203 bp, Klebsiella pneumoniae
atgtttgcattaagtaacacccgggcacactggagcggcgtcctggcgatgacgctctgcgtatttgtactcattgcctcagaatttatgccggtcagcctgttaacgcccatcgctggcgatttaggcgtcaccgagggattagccggtcagggcattgccatttcaggcgcgctggcggtgctgaccagcctgagcatttctcgccttgcgggagcacgggatcgtaaataccttctgttagcgctcacggcgctgatggcggtctcgggaatgatgattgccctggcgtccagctatccagtttatatgctgggcagggcgctcattgggatcgtcatcggcggcttctggtctatgtcggccgcaacggccattcgcctggtgccgcaacgtcaggtcccccgcgcattggccatctttaacggcggcaacgcgctggccaccgttgtggcagcgccgctgggcagctacctgggggccaccgtcggctggcgcggcgcctttttatgtctcgtcccgctggcgatggtggccttcgtctggcaatgcgttagcctgccgtctatgaaaagccagcgcgcaccacagccgcagggaaccgtgctgggtttgttccgccgctcgacggtattccttggattgctggcctgtgggctgttttttatggggcagtttaccttatttacctatgtgcgaccgtttctggagaccgtgacccgagtcagttcctctggtctgtccctgatattgctggcgatgggtaccgccggttttgtcggcacgctgcttatttcaagcgcgctgaacgcccggttttatccgacgctggtggctatccctttggtcatggccgcgattgccggaacgcttctgctggccggataccacccgggatcagtcgccgtactgttaagcttgtggggcctgctggcgacggccgcgcccaccggctggtggatgtggattgcgcggacgctgcccgaggatgcggaggcgggcggtggtctgatggtcgccgtgatccagctatcgattgccctcgggtcaacggcaggcggcctggtgtttgatagtctgggatggcgcagcaattttgcactgagcggtctgttactgctggcggcggcaggggcgacttttctgctctctgccaaaatcagctcatctcagcgcacgccaattaatgagctggatgcataa

SEQ ID NO: 228362 - DNA, 516 bp, Klebsiella pneumoniae
atgtgcttttcagaaaaaatcgtatgcgatatacttggcttaaagtatatggggtcagttatgaacgaaaacgcaagcctgtttgaacaaggggattttccgaagcttgaggattttctctgctttgccacttacactgctaaccttgccttcggtaaggcttaccagccttatctgtcagagctggggttaacatattctcaatggattacattgttggcattggcggaagaagatggactaaccgttaatcagttaggcgagagattattcttagcgtcaagcaccctcacgccaatgttaaaaattcttgagaaaaaaggaatcgtgatcagacagcgctcagtcgaagatgagcgtaaggttcacatctttcttacggatgagggcagagaattgcacaaagcaagccatcggtgcatgaaagtgttttattcactaggactgacacttgaagaggtgcaactcttgcagaagacaattatcaaggtaagaaataatttactgcaatcttga

SEQ ID NO: 228363 - DNA, 1455 bp, Klebsiella pneumoniae
atgaagcaaaaaagacatagcggcagaatacactctctttatgactcgctcgttcaccgagatttccacctggaagatattcttatcaggataattaatgaaggaattaaagcatttgatttagagatagggattataagcaggatagaaaacagcaaatatacaataattggctctagcggtcataaagatattcatccaggaatgatattcaatctcgaaaatacttattgccaagctgtagtggcagagaaaaaaatcataagcgtgaataatgcaggacatcacccattactaaaaaaacatcctgtttatttatccatgtcactcgaatcatatattgcagccccaatatttgtgagaaataacatttggggaaccattaatttctcatcaaaaaatgtcaaattagaaaattttaacagtgaagatcatgaattcataggtctaatggctgaaggaatagcatcacttttagaaatagatattttaacaaaagaaaaagagagtataattcaatctttagtagaatcaaatcagatacttgaaaagatatttaacaattccacaattgggacggctatcgtttcagaagaaggacgatggataaaagtcaatcaagcccttactaatatgcttggatatacaaaggaatatttactgtcaacaaacttccaaatgataacgtataaagacgatcttgaccttgatctcaagcttttagaatccttaaaaaatggtgaaataccacattacgaactcgaaaaaagatacatcaaatccgatcatgagtgtatttggtgtcttttgagcgtgtcaatgatgaaaaatgaagttaacaattccatatattatatatctcaaatccaaaacattgacgatcgtaaaaaaatggaattagatgttatacaaaaacaaaaggaactcaaaagagcaaatgaagagttagaaaaaatggcaacttttgattcattaactggtatttacaaccgaagaaagttcatgattttcttcagcgaagtaaaaatgaaggcagaatgtaaccttgaacctttctctctagccattatcgatatagattattttaaatcatataatgacgactttggccatcaggagggtgataaagcgttaaagtatgtagcactcaatttaaccgatacattgaataaaaaaggaattgttgcgcgattcggtggtgaagagttcattgctcttatcccaggcacaactgacagcgaatgcttaacggcatgcgaaaaattaagaaaatccatcgaagatatttcaacccttcaaagaaaaatcactgtcagcattggcgctgtaactatagttccgaagtcagattgtaacatttcatttgacgacatattcaaaattacagactcgaaactatacgaagccaagagatcaggtagaaaccgtttaaaacacgctcacttagagcattga

SEQ ID NO: 228364 - DNA, 156 bp, Klebsiella pneumoniae
atgaacttttcagcgcaagactatctgctgattcagcagccctcaaacatcctgaccatcgccaataactccatttttaccggttcgggaatggccaggggagacggtatccacctggccataatcggtattgttcccctcagtccatcagactga

SEQ ID NO: 228365 - DNA, 432 bp, Klebsiella pneumoniae
atgcataattatattgccaaaggtattgcgctggctgtagccatcgctgcctcaggaacggtgcaggctattgataaaaagaatcctgatccttatttttcaggggtcaagatttttgccctaaaggaggccgccggaagtgaatgggatagcgtgaccggcgaggcgaactatctggtgacctataaagttacgcttgataacttctctgataaaagcattgaacctggcaaagataacaaaatgtgcttctttttgtatgataaaaatggcaagtcatttatgagcacgggtattgaaatggagatgctgaaaaaatacaaacccattgaaagccgaacaggtaacgtgttcttcagcagcgccgatcctgaaatactgaatataccttttgtccgtctcgctttcggtaaagactgcttaacaaaataa

SEQ ID NO: 228366 - DNA, 351 bp, Klebsiella pneumoniae
atgaaaatattgctgatgttgcccaccctttttctgttaagtggttgtgtggatctgggggatgtgggcatacacccggaagaagaaacctattacgttaatcagggaaaaaatcaggtgatcgattgccttcattatgccgcctctaaagcgaatttatcgctggaatatgatgacacccttcctgaaaacatcgataagtacaacctgatgaatactgaaaacacgactgtcgcgtgggtggaaatcagtaacttcaacggcaggcagacttcggtagaattttattatgcgccgcatgccccggatatacatcggtcggtcacgaccattgctgaacggtgttcataa

SEQ ID NO: 228367 - DNA, 195 bp, Klebsiella pneumoniae
atggaactgacccgctggcagcgctggcgtttgctggcctttcggctgttcgccgttcgcgccgaccgtctgaaccacacgccgacgcgccacctttatgcgccggttctcccggggacgacctcagggaaagacgaattgttgcgggacgacccgcttcgctgtgagttccgcttatgtttgataccttactga

SEQ ID NO: 228368 - DNA, 816 bp, Klebsiella pneumoniae
atggcataccgtgtcgataaatacccgggtcttggcgggaaccagcgtgccgggcggcatcagggcataaacgctgaccttcgccgcgctacgccagtcgggcagcacgcggaccagttccccgcgctgcaccgcctggcaaaccatccaccccggcagcagtgcgatcccggttgcccgaataaccgccgtcagcagcgcttcactgatattggtggtgagggattccggattgtcctgtcctcacgcaataaaaactatgtggcggcgcaggccgaccaactgagagcggctggattagccgcggaaggtcgcgtggcggacgccagcgatatcaccagtatcgtggaactcattcgcgaggtagaggtggagaccggcggcgtggatgtgctgcacttcaacgccgcggccatgcatgacggtaatctggagacccagtcggtgacaggcttcatccaggatctcaacaccaatgttggcgcggtatatgccgccatcaaagcggtcactccgctgatggccgcgcgtggagcaggcgcgatcctgctgactggcgggatgtttgccactcagcctcatccggagtatctgacgctgagcgtcggtaaagccgggctgcttaacctgacgcatgccctttttccgctcttaaaagcgcagaatattcctctttccatcgtgacggtgggggcgtacgtcatgccgggttccgccgaagcccaggagattgccgaactgttctggcagcaataccgccagccatcagcgcaatggacagcggaagcgttttatcccgcccccctccatcagtaa

SEQ ID NO: 228369 - DNA, 438 bp, Klebsiella pneumoniae
atgattagagactggttaaccccggataaaattaatgtcattaacgcaatagataactggaaaaatgccattcgactctcagcagaacctttgctggcgcaggggtatatggcagagcactatattgaggcgatttttaaaagccatgaagaatttgggccttattatctattagccccaggattagcgatgcctcatgcccgccccgagcaaggtgcattgaggaatggattatcactccttcatattaaagagggcatctcatttggctcgactgagaacgacccggtatacgtggttattatgctatgcgcttgttccgggaatgaacatatcacgatgatcggtgaactggcagaactctttagcgatcggcaaaagctagaacgattgttaaaagccgatgatattaaggcaattcaggccgttattgactga

SEQ ID NO: 228370 - DNA, 1626 bp, Klebsiella pneumoniae
atgaagcaaattctgttcatttgtctggcgagcttgttcacgataacaagtttcatttcgcatgccgcagagccacgacaggaggcgacgccgcaagagcgtgcgcgtacggtatatatctttcatcagccgatagtcatgctgcaggctaaatttggacttaccacgccggaagagcgggtattgcgaattagaaatacgctgcggaatttcactgaggaggatgttcgccaacctctcaaactggtgtctgttacccgttataaccagcctggaaaactcatcgtgatgaacggtaagccagttatgctgcttaccgaaggtgatcttgacgaaggggatgatctcacgctcgatcaggccgcgcagcgggttatggcgcgtatggaggcacagagaaccgctctgcgcgaccagtataaccgcagctggctggtgctttccgccataaaagccgttggaggactgcttgggctagctgcgctttggtacggtgcataccgctcatggcgcagggtaaaacatctatttcggcgacgtatcatcgagaatcgtagctggatcccccaaagctggcgacgctttatcggtgctatcgaagcgcgactttatgccacattgatgatcttgctgggcgtcatagcactgtatgtctggctgagctgggtattaagcctgttcccatggacacgcgtatggggagcctcactgggcgattggtctgtgcgcgcttttcagggcatagcgcttgctgtggtatctgccttgccgggcctgatgattgtgctgattatttttatgctaaccgctgtgattttgaaactgcttaaagtggttctcaatcaggtggcagcagggcgtttgcaacttcctggcattcatccggaaacggtcggggcgactcgtaaactgatcgctgtggtggtatggctgtttgcgctgtcagcagcgtacccttttctgccaggcgctaactcactcgcgtttaaagggatcagcgtcttctttggtctgatgttgacgttaggttccgccggggtgatgaaccacgccatgagcggtcttgtactgatttattcccgtgcgctgcgcaaaggcgatgtgatacgcgtggccgataacgaagggctggtgagtgaaattggtatgttggccaccaagatcattacccgagaaaattacgtggtcacggtgcctaatgcggtggttgtgagtggaaaaatcaccaatttgagcgcacatgctcacggtggtggtatcaacctgaccatcagcgtgacgattggttatgacacaccctggcgacaggttcatgccatgctagagctcgccgccaaacgggcaagctcagtcgatccggctcaaccaccgctggtacgccagctcagtttgatggactggtatatcgcctatgaattacaggtacaactgaaagcagggcaatccttagccgcagcacgcaatgaactttatagccatattcaggatgtatttaacgaattcaacgtacagattatgtccccgaattatgttatgcaacccgagggttcagtcactgttgccaaagaaaactggtattcagccccggcggttcctcctgatggcagtaaaaatgtgagtgcgtaa

SEQ ID NO: 228371 - DNA, 1191 bp, Klebsiella pneumoniae
atgaaaaaaaaattgatactggtatgttttgggctccttatttcgcagaccacgcaggcgagcgcactctacttctacgaaattggcacagaagatacagcactggcaggcgcagggcaggctgctcgcgctcaggatgcatcaaccattgtcaccaacccggccgggatgactcgtttgcctgaccatatgtttaccgggggagttcaggcgatggacggtgatatatcttattcacttaacgatgacgccggacgtaagagccctggggatattatgcgcttcttccctaatgccagcgcattctatgcgcaaaaaatcaatgatgatctctttgctggcctcggcatttacggtaactacggcctggggattgactttggtcagtgggctggggacagattaatcaagaaaagcaccatggtggcgatgacactcagcccttccatagcttacaaattaagcgatagagtgtctgtgggcggctctgtaaacatcaactatggcttcctgtcattaacacgtaacgtcgataatactgatgaaacgcagaaggatcacgactgggcgttagggtatcgtcttggcttgctgatgcagctgacggaacagacccggcttggtatagcatggacgagtaagacagaatacgattttgatattgatggtaaggcgcgcttgccgaatttagccaacgttgagtacgagcttcctgtctctgcgcaggtacgcgcgcctcagcaaattatgctgagcctggtgcatgatatcaataaacgatggtcggttatgggcgatctcggttggcaggactggagccagtttggcgccccacaaattgccgtggtggggcaggaactggataaaaagagccgtctgaaggattcctggcatacggcattaggcgtgcagtaccgtcctaccgaacaatggcgtctcaacgctggtgttgcctttgacagcacggtatacgattcgcagagtaacgtagcgctgaccttaccgacgggtgatgaatggcgttttgccacaggcgcccagtaccagattacaccgcagagcaacattggcgtcgccgtctcctacttgcatatgcaatcgtctcatgttcagtcgcctgctatctatagcggtagctacaaccacccatatttatggtttgctaatgtaaactatagttatcaattctga

SEQ ID NO: 228372 - DNA, 624 bp, Klebsiella pneumoniae
atggttaacattgtaataaaagagtgggataccctctttaggcgtggactgacctttttttttaatgatttcttttctcagcacaacactaaagttaatttcagctttaactttacctcagaaagcgtgaaggtagcggacgttattgtgctggcattatgcccaggagaatgttttatttgccgccctgagctgcggagtcgaaaaaaaagcattgtgattggtattgttgatgatgacatgcgtgtctcagcgctaccctcttgctttcaggatattatctttctctctcgccgacattccgtgacgcagttacgtacagcaatgcataccgcctggcaccggctgcagcagacaaattatcggcactcaaccgggtcatgttgtgattgccagcttaccaaactgtcgccacagcaaatccgcatcatgagctatttaaatgaggggatgtcagtcatgcaaattgccgaagaactgatggtgagtgagaaaacggtctatacgcataaatatatggtgatgaggaaatttaacttacatagcgattatgagttaatgctcctgctcaataaactgacaataaatagcgactggcccaagggctttataaatgtaaattag

SEQ ID NO: 228373 - DNA, 339 bp, Klebsiella pneumoniae
gtgaagcgcattaacgaacgtgcctgggaagtgtttggtatctatggaagggtttgtgaaagctgctccggggcgatcgcattaagcctgttgcaggcgctggcgatgtttggttgccttgagaaaagagaggctggcgggttaacgctgtattgcattctgactttcatcgcctttgtggcgacgatcggtttttttgcctctctgataagtataggaagaactattcatatacaaagtgaaggtcataaggtagctgaattcctgatttcctgcgttttttatccggtcgttatcggtatcctgctttcggcgtttgcgacgcttcaatcaatataa

SEQ ID NO: 228374 - DNA, 279 bp, Klebsiella pneumoniae
atggttaaagccggtctctggatcccccgcaaacaacgtgcgccgaaaattcagcagtcacgttatcttcgggcctgctgcggcgaactgatccagattgatggttgcgaccacccctggttcgagaaccgtgcgcccgcgtgtaccgcgctggtctatgtcgacgatgcgacgagccgcctgatgcagtttcgtttcgttaaatcggaatcgaccttcacctattcatgccactttaaaatgatggcgtggaaatcgctctgtggtccttacgcctga

SEQ ID NO: 228375 - DNA, 918 bp, Klebsiella pneumoniae
atgcggctcagaaaattaaaactgaaaaacttcagaggctacagaaactctactgaaatcattattgatgaaggcatgacgggcattgtcgggcgtaatgactttggaaaatcaacgcttctggaagccttggctattttttttgaaacagaaggaatgaaggcagacaagaatgacatgaactgtttcagcctgagagaaggtgaggggcgttttgaaatagcctgtgaattcgatgatctacccgattttatcatgatcgacgacagggtgcagaccactcttgcctcagaacatttgctgaataaagacggcaattttgaaatcatgaaatcgtttaaagcaacgaccacaggaaaacctgagcagacctgcatccgctgcatccatccggatgaggaacccctgagaaatttgctgggcatgaaaatttccgaactcaaggcggtgggaaaagaagttgaaaaaaatgtggctgataaacgcactgcatcgttatggcgtcaggccatcagggaagccgcagctccctatacctgttcggaaattctactggatgtcgataaagagtttggaaccgacacaaaatcattatggggaaagatcctcgatttgctgcccacctatgcgattttcaaagccgacagggaaagtagcgatggtgattccgaagctaaaaacctcttacagcaggctgtaaaagacgctcaggctgcgttacaggataaaattacagcgctggaaaatgagattcaggacagtgttcttgatgtcgcacagagaacactggataaattacgtgaaatggcaccagaactcgccagtgaactgactccaagatggctcagttatctctgtatttacgtaacagtgcacgcctgcaaaacccggagtaagttaacagtcaacatgatttaa

SEQ ID NO: 228376 - DNA, 462 bp, Klebsiella pneumoniae
atgggctaccggattgactatgccaggacgtccactgcgggcgtcctggcctacagtgaggttgaacactacctcagccactgcggcctggatgaacaccttctggatctggtttacctgcgggtcagccagcttaacgggtgtgccttctgtacggatctgcacacgcgtatgctgactaaagctggtatcgggcctgagaagcttgcgctggttcaggtctgggctcattccggtcagcttttttcagcaacagaaaaagccgccctggcatgggccgaacatgtcaccctcatcgccgggccagctgccaggcgcggctctcatcccggaaatgcatcgttgttcactgaaaaagagctgtttgatcttacgctggcgataagcctgatgaacgcgtggaaccgtctggccattagcttccgtaatgttcctcagtccgccgctgagcataaagtatga

SEQ ID NO: 228377 - DNA, 432 bp, Klebsiella pneumoniae
atgaaaaataaatatattcttgccgctgtcgctctggcgtttaccttttcgggtaccgttctggcacacggcacggaagatcatggcacacaggaaatcgttaagccgaacttcacgcatgctttgcctaatgttccgggtaaaacgcttacggcggttgaggtcatctatccggcaggagcagcttctccgtcccatactcatgcctcttcctcatttatttatgcctatgtcgttgagggtgaaatcatcagccagatcgccgggcaaccggaacggacctaccgcgccggagagagctggtatgaggaccccggggcgcatcatgtggtcagccggaacgccagtaaaacagcaccggcaaaactgctggccgtgttcgttgctgacaccggtgacacgaaattaaccacgcctgacagcaagaagtag

SEQ ID NO: 228378 - DNA, 537 bp, Klebsiella pneumoniae
gtgaccgggggcgtatactggtggactgcccgcatgtcgtctctggccgtcaggcggctcctgcgggtgaaacatggcacccggatcatcggtaccctgccgctcgtagagtttaaaaaatccggtctgacgctgccgtttccggatatggacgagataatatcgccacggaaacaggataacgccgatttctgcggcgacatattttcctacgtcacaggaaccctggaacatgccgtgctttttcatctgctgggcgaatgcgatcaggacaggctgaaggggcttcccgtgagcgaggatgtaaatccgcaggagagcttttccatcatgatgtttaacagcgagtcggagaaagcacgatttatttccgtgctggaaaataatatcgggcgtttctttaatgattatctctctcgcaggagcgcagatgctgctgctgatgatcctttcagaaaagaaaaagtattttcccggtgggcagatgaacaatatgaccgtttcagacgggatatgtctgcacaggaaaatatctga

SEQ ID NO: 228379 - DNA, 648 bp, Klebsiella pneumoniae
atgctgcccggtggctatggcattatgcctgccagctatccaatgaacgctggtccggacacgaatgacgccccgctgtttcaggacaacctgatgacagcttatctcagggcagggcgcacgggcgcgaactgggaagttcttccggcgtccgcatccggtaccgcttacagggtttatgcgctgctgtcgcttgccaacgccgtctttcccggtgcgcgatacctttttatcgggtgcgaaggggacgacgacaggggggatgagatgctgtttggtgacctggcctgtgctggcggaataaatccggcattcaccacaagacgctgcatgctgctcgggaagcggtactacatagtggaaatcagcgattcatgcagcaagccctttatgcttgcggccggtgtaaatgactcaggcagaacgttaagtcccggggtggtttacgtccataccccggtcccggcgggcgatggcatcaggcaggcaacccagagcagatcgaggccatctggaatgaccggttcggactggggccctctgccgccgaatacgccacccgctttctttatgacagaacgttctggcatcaggcctcagcggacaggcgcatttatcgtccgagtccgcagtattctgtctcagtga

SEQ ID NO: 228380 - DNA, 456 bp, Klebsiella pneumoniae
atgagccaacgcattgattatactaaaacttctcctgccggtgtgaaagcgctgggcagcgtgtatgcctacgtcgcgcagtgcggccttgagaatacgcttgtggagctggttaacctgcgtgtaagccagataaatggctgcgcatactgtctggatatgcacacccgcgatcttctcaagaagggtctcagccccgttaaactggcgctggttcaggtatgggacgaagctggcgacgtgttcagcgagcgcgaaaaagcagcgctttcctgggccgaaacggtaaccagagtgtctgaaacccacgtcccggatgaggcgttcgaagccgcttctgccgtctttgaggacaaggagctggcggacctgacgatggctattggcctgatcaatgcctacaaccgtctggccatcagtttccgcaatgtgcctcaggaagcgacgggcgtctga

SEQ ID NO: 228381 - DNA, 1320 bp, Klebsiella pneumoniae
atgagcggcgtgctggcaccaggcgcaagactgccttcctggatagatctcgccacccagctgggtatctcacgcggaaccgtaaaaacggcctatgaacgtttatccgatgaacagctgattgtcatgtcacgcgccagcggttcctgcgtcgccgacagctttcctgtcagaaaggagacccgttcccagccggagcccgtaccggactctgaactctaccaggattatctgtttccctccggggattttcagatggggatccctgccagcgatgtatttccagtccccctgctttcccggcttttctcttccgccgcccgtcaggtcatgtcggcaagacagtgctacggtgacccgaggggggaaagtgagctgcgccgtgaaatagccgggcagctgctcctttcaaggggcatcagatgtcatccttcccagattttcatcaccaccggctttacgggcgggctggggcttatcctgcatgcgctgtccctgcacggacgtcaggcctgggttgaaaatcccgggtttcctcccgcgaggaaagccctgtctcttgccgggctgacaaccgtgccggtaagggtggatgccgaggggatggacgttgagtacggtatccgtcaggcaccggatgcagctgtcgccctggtcaccccgggtcagcaggctcctctgggaatgacgctgccgccggaacgacgtaagcttcttctggactgggcggatcagaacggagggtggatcctggaagatgattacctgggcgaacttcagctcagccgcagggctgcgccgtcccttctgtctcaggatacctgcggcagggtgatccatattggctccttcagcaaaaccatcagcccggccctgagactgggtttcgtggttgtgccagccccactggtcgcaacggtttcagacgtggcggcctgcctctcccctgcgcccgacccggcgattcagttggctgtccgttcatttttaagcgagggacacttcctgcgtcatctgcggaaaatgaaacggatctatcacgccagaagtacggcactggtggacatcatgaagggctacggttacacggccggcatacacgggttatcggttctgatagatctccctgaaggggcacaggaccgcaccattgcacactatgcctacggtttcggactcgccccttcgcctctgtccgggtggttccagccgggctccccgtcacgggcagggctgttgcttggcgtgtccggaaaagaaggtgagtcactgtcactggcctgcgaacggctgcatcgtcttatccggaagctggcgtag

SEQ ID NO: 228382 - DNA, 855 bp, Klebsiella pneumoniae
atgagcctcggtcatgaagtatggggaatgacacgccaggggaatggtgtagaccgcctgcgtgaaaccggcgcgaaggccctgtgcgttgacgcgatggatcgggatgccgtgttcgcggccgtcagggacatttccccggatgtgattatcgatcagctgacactgttacccgccgatccggcagacattatccgttctattccggcagacaccgagctgcataaaacggggggaacaaatttactggaggctgccgcagcctgtggcgtcagccggtaccttcttcagtcccgcgggttctatcttgatactcccgccggcgggctggccggtgaggatacgtcgctgcgcgttcgcgcgccgggcgtgatcggggagagctgccaggtgctgtctgattacgaaaaagccgtaacgacgcagcccggtatcagcggcagcgtgctgcgttacggtttcttctacggcccgggaacctggtatcgtcctggtggcgcggttgctgaacaggcgttaaggggcgaatcagccatcttcggagaaggaaatgcggtctggtcctttgttcacattgacgatgccgttgccgcgacggtggcagcgctgaaagccgaaccgggtatatacaatgttgtggatgatgatcccctgccggtggcggtgtggttacccgcgtttgcacgctgggtaggcgcgcctgatcccgcccggttatctagggaagacgccctggcccttgccggggaagaaggcctgtattatcacactgcgctgaccggcgcatcaaatcagaaagcgaaagaaaaactcggtttctctccgcgtccgctcctctggaaagagcacgcctga

SEQ ID NO: 228383 - DNA, 393 bp, Klebsiella pneumoniae
atgaaaaaacgggaaaatcggcaggttttcgaatttattctccgtgatggccggtacctgcgggccacactgaccctgaatgatgacggtagtttttctccggggctttctgaaattcagggagccagcgattcggctctccggacccttctttccccggtcccctgtgaaccgggaagtggtcactatgaggcgtttattcagctgcttggcgtcgtcctgtggaaggccacgcggacggacaccttgctgcaggagatccacataaaaagtggcgtggacagggactgtgaaaataccctcatgaggattatcgggcatttcgcgccgggagttaaactcgtgcgccagggggcagccgccccggcgctgtctacgggctgcgaatcctga

SEQ ID NO: 228384 - DNA, 477 bp, Klebsiella pneumoniae
gtggtggacgtagctgaacgtgctgatgaaaataaagatatcgtaatcgggattgtgaatgacactgaatttgaagcatggctttgtctgtggcagcagtatattagtttctatgaagctgatgttcctgagcatataacccgaaaaacgtggcaacggttttctgaaccggaagagccggtgttctgcgccgtggccagacagggggaccagattgtcggtctcgtacactacctcttccaccgttccacctggtcggaaagctattactgttaccttgaagatctttttgtccgtccggatatgcgtggtaaacacatcggtaagaggcttatagattttgtgcggttgcaagcctgcatataccccgcttcacgactgtactggcatacgcatgaaatgaatctccgtggtcagcgtctctatgaccaggtggcagtcaaaagcggaatgattgaatacaggatgagttcgtaa

SEQ ID NO: 228385 - DNA, 894 bp, Klebsiella pneumoniae
atgaaaatcagtgcactctccgaacgaatatcacaaaaaatcatggggttagtcgataatggcgaaattgctccaggctcacatttaagtgtaccgaagctggccgatatcttcgatgtctctcgctcccctgttcgcgaagcactcgtttaccttgaacaaaaaggggtgctactccagaagcaaaaccgcggtttttttgttaaagatgactacaccccgcaagccgataccaaacaagaactgtcagaagaactcgacttacccgaatattatcaattggctgaggactggctgcaggatgaaatcgaatctgaagtaaccgaacttttcctgatgaaacgctacaatctcaccaagagccagttgtctacagtgctcgccaggggcatcagtgagggatgggttgaacgtaagcaaggttacggatggcgctttctacccgtggcaaaaaccaagaccgcgctggagcagattttcagcttccggatggtcatagaacctatggccattctggaaccgacgttcaatgccccccaggagaagattaacgagatccgacgcgagctggaaatgctgctggagagcggaatcgaacgcctctcccctacccaactgcagctggcaggctaccgcttccacgaaacgattatcgctttttccaacaatcccttttttgaaatctcgctgcgcaatgttaaccgaatgcgtcggctgatggactatcgaatcatggatgaccgcaaccgttactacgctgaggtcaaagatcatatgcgcatactcgctatgatcgaagccgggcagcgcatcgaggcgtcctacactatgaaacagcacctgtctgttgcccttgataataaaaaaatgcgccgaatcagcgaagaaagttaa

SEQ ID NO: 228386 - DNA, 1338 bp, Klebsiella pneumoniae
atgctctcattcctgggttacggcatgatcgtggtctttatgatcctcatcatgaccaaaaaattatcggcgttgaccgccctgacaattattcccatcttgtttgcgctgattgctggtttcggtggcgagatgggcgaaatgatgatcgagggattaaagaaggtcgctcccaccgcgataatggtaattttcgccatcctttatttttgtactatgttcgatacaggattattcgatccgataatacgtttcttcttacgtattattgatggcgatccggtaaaagcggtgatgtgtacagcgttgctggcggccatggtctccctcgacggggacggttccaccacttacatgatttgcgttacggcgatgcttccgctgtttaaacgtattcgtcttgacccgcttgcactaacctgtgtggtcttcctctccgggagtgtaaccaacctgctgccgtggggcggcccgttggcgcgcgtctcggcgtcgttaaaggtggaatcgagtgaactgtttataccgctgatcccctcaatgatctgcgggctgatgggggtactggtgctctcctggtatatcggcattcgcgaacgccgtcggttgggcaagcttagcatccagacaaatgcgcatgggtcggttatcgaagaagatgccgaaagctatctgcctgctatcaatgaagtaaatgacgagctgcgtaggccaaaaatgttttggctcaatgccgcgctgacgcttgcgctgatggcttcgctggtgatggagcttctcccgctgtcggtgctgtttatggtggcgtttgccatcgcgctgctgattaactacccgcatctggatgcccagcgccagcgtatcgcgtctcatgcgcccgccgcgctaaatcagacgtctattttcctcgcggccgggatcttcgcggggattctgtcggggacgggaatggtgaatgcaatgtccaatacgcttctggacatcctgccgcagtcctgggggccttatctggcacctattaccgcgctgatcagcctacctggtaccttctttatgtcaaatgacgccttctattacggcgtgctgccggtactggctgaggcggcaaaagcttatggcattgatccggttgagattgggcgcgcgtcgctggtggggcagccagtgcatctgttaagcccgctggtggcatcgacctatctgctggtgggattggcaggggtcgagttcagcgaccatcaaaaatacaccttcaagtgggcgttcctgctgtgcatgatattcctggcatcgggattattgctggggctttatcccctctattcggtcgccagttaa

SEQ ID NO: 228387 - DNA, 744 bp, Klebsiella pneumoniae
atgacccaacgtatcgcgtatgtcacatctggaatgggtagtctcggtacggctatttgtcgtcggttagcgcaggacggcttcattgttgttgccggttgcggaccaaattcaaaaagaaaagacgtctggctggaagataacaggaagttagggtttgattttatcgcctctgaaggcaacgttgcagactgggattcaacggtaaaagccttccagaagatccgcgcagaggtaggagaggtggatgtgctaattaataattccgggaccgcgcgcaatgtcctattccgcgatatgcagccccaggagtggcaggcggttattgataccaatatgaactccttgtttaacgtgacgcgtcaggtagtggatagcatgatggcgcggggctggggacgtattattaatatttcttccctgaatgcgcagattgggaccgtcggtcaggttaactattcaactgcaaaatatgccgtgcgcggctttactcgcgccctggcgcgtgaggtttcggcacgtggcgtgacggttaataccgtttctcccggttatcttgctaccagcaaattaaaaaccgtcactcccgttcaggtcattgacaagattgttcaggaaattcccgtcaggcgtctgggatcaccaaaagaaattgcgtccatttgtgcctggctggcttccgatgaagcgggttatgccaccggggcgaacttctccgtcaacggcggtatgcacatgagttaa

SEQ ID NO: 228388 - DNA, 1092 bp, Klebsiella pneumoniae
atgacaacctatgcttatattggctgccgctcttcagcatggcgcggtgcgcgtggtaagggaatcagcgtctaccggatttccgattccggaacgtgggagctgttacaatccattgcttccgtacaggacaacccctcatggctgacgctcgatctgccgcgtaaccggctctacgttttgcacggcgatggcgaccgcgttgcggtatttaaccgcgatcctgactccggcctgctgagtctctttagcgatcaaaccaccggtccccgacacagcaacccggatctcgatcccgcccgcagaaacaatccggttggcgcctcgctgacgcctgacgggaacaccctgctgatcgccaatcatgagggaggtaacattgctgccctgcccgtaagcgtcgagggtctggagccaccagtacatcttgccactatcgaaggtcataccgccgcgcaggccacgctatcgcgcccgcatgaaatcgtttttgctccaggcagcccgctgtttgccgtgccggttcagggccgaaaggctggcaatggcatcgatatgatccgtctgtaccactgggagcagacccgctcctgcctggccgatgaggttcatctcccggaaggcagctggccacgtcacgtcgattttcatcccaacgggaaatggatgtatgccatcagcgagctgagcagcacggtcacggtttatcatgtcaaccaggaaaaaggtactatctcactcagacaaacccttagcgcgttgcctgatggctacgagagccggagcgatgccagcgagatagaggtgcacccatccgggcgctttgtctatgccgctaatcggggccatgattccatcgccgtgttcagcatcaatcaacaggatggttcgctgatgcctactggatgggtaccctgcggcgggaaaacgccccgcttcaccaccctttcgcccgatggctcacgcttcttcagcgcgaatgaagactccgacaccattcaggtgttcgacgtcgacagtgaaaccggcatgctttccgcgacaaaaatcgtcattgcaacggccagcccaacctgcatctgctttgcctga

SEQ ID NO: 228389 - DNA, 924 bp, Klebsiella pneumoniae
atgcgttttgatttggtctctttatctctctttgtggcggtcgcggagacgcaaaatcttacccatgcagcccgccgaaaacacaccgcggtatctgcggtcagcaaacgtatcgccgagctggagcagcaggtggggacgcagctgatgctgcgtatgccgaggggcataaccctgaccccggcgggtcattctctgctctaccatgcccgccaggtgttccgcaatctggaaaagatggaagaggagctcagcgattatgccgcgggcatccggggacatatccgtatttacaccatctccgcggcgctgatgaatcacctgccgcgggtggtgagcgactatctttcgcactacccgcagactgacattgaaattgaagaacagaccgggatgagcgttgtgcagggattactggctggcgaggccgatgttggcttcttctccagctggaccccgtcggcagggattgagtactggccctggcagcacgatctcctctctgtactggtgtggccctctcaccccctgacggtgcgcagcgcgttaagctttgccgatatcgtgaatgaaaaactgatcggctcgcaccgcaacagtgccgtgagctatatccttgaacgccaggcgcgcgctctgggtaagacccttaacgtggggctgcgcgtgagcagctttattgctatggcagagctggtggcgcagcaactggggattgcggtgctgccggtgaatgaggtggcatcctcaaccctgcacagcggcgtccgcgtcattccgttagcggagccctgggcgagacgggacctgcttgtcggcgtgcgggattacgggcaggcttcgccgtcggtgaaaaccttaatcggcagcctgcttccggcggagcaggctgcgcaacccgaaggagaggcagagcgacgctga

SEQ ID NO: 228390 - DNA, 2649 bp, Klebsiella pneumoniae
atgacatcaaccctggttctcgaacgctctgatctggtgattcatcatcagcgttatcattttgtggatctcacccagctgttacccctggcgcagttgcagacgctcccttacagcctgcgcgtactactggaaaacgtcgcgctgcgctctccggagtctctgccaccatttttgcagatgctggccgggacggctgacaaaggcgaagtggagttctatcccgatcggctgatgtttcacgacaccacctgtctgcctgcgctggcggattttgcggcgatgcgtgatttaacaaccgagctgggcggcgatgccacggcgatcaatccgcgcattccggcagtactgactatcgatcattcggtcattgtcgaaagctatgcctccgcctctgcgctggaagataacctgcggtttgattttcgccgtaacgctgagcgttaccgctttatccgctgggcagaaaagagcctggataacttccgcgtgatcccgccgggcaccggaattattcatttgatgaaccttgaaaccattgccgaggtggtgacggtggataataccgcgccggtgccgctactgcatgcggattgcatgatcgccaccgacagccataccccgatgatcaacgccctggggattctggggtggggcgtgggcgggctcgaagggcaggccgcgctggtgggggaacccgtcaccctgagcttccccgaggtgattggcatttcggtatcaggcgcgctgtcacccgatgtcagcgacagtgacctggccctgcatatcacccgcttgctgcgcgaaaccggcgttgtcggtaagtttgttgaatttaccgggcctgcgttagccagcatgtccgttgaatcacgggccactatcgccaacatggctccggaatacggcgcaacggtggtgttctttccctttgacgaacgcagcgctgaatacgtggcgttaaccgggcgtagcgaagagaaacagaacctcatcaacgcctacatgcaggcgcagcatctgtggcggacggcggatgcaccgcagcctgaattcagccagcttattgcgctcgacctctcgaccattgagccatgcatggccgggccggttaatccccatcaacagatcccgctgagtcaggcggccagcagcttcaccgacacgctcagtacgcaaatgcgggatcgctactggtcgcggtctgaataccctgaaccgatctgccagggcgcggtagctattgctgcgattaccagctgtacgaccacggcgaatccctggcttgtcattcaggcagccctctttgcccgcaatgccgccagacatgggctgcggcccaagccgtgggttaaaacctcgttttcgccgggttccagagtggtcaccgactacctcagcgcatcgggtttgctgatcgagctggaaaaagtgggctttgacgtcacgggctacggttgcatgacctgcattggcagctcgggtgctctgcaaccggcaatggaggcgctggtcagcgaggggctacaggcggtatgcgtcctgtccggaaaccgtaatttcccccgtcgcgtgaacccctcgctcgggcacggctatctcacctctccggcgttggtgattgcatgggcgatagccggacatatctctcatgacatggttaacgacccgctgggcgttgacgaggcagggcagccactcaccatgcgcgatttaatgccgtcccgggaagaggtggaaatgtggctcgaacggatcatgaaaccggagcactacatcaaacgccgggacattatctggcaggggaccccgcactggcagcagattgtggcccccggaagcgtgcattatccctgggaggcgacctccacctatctacgccgtccggggtaccttgaacgcctgccccgcgatcccgccgcgccgctgaccctctctggcgcgcatcctttcatgtggttaggggatgatgtcactaccgatcacatctcgccggccggggcgatcccgcttgcgagtctggcgggacaatggctggttgagcaccatgaggatccgcaggacctgaacctttattccacgcggcgcagtaaccacgaagtcatggttcgtggcgcgttcaccaataccgcgctggttaaccgtttgcttccgcaggcgcagcgcagcggcggcggcaaggcctgggatgcgcaacatcagcagatcctgccggcgtatgaagcggcgcaaagctggctgcagcgtgaaaccccgctggtgatttttgccggtgagcggtatggcgcaggctccagccgggactgggctgccaaagcccaggcgctgctgggggttaaggcagtggtggcgcacagttttgaacgtatccaccgcaccaaccttatcgggatggggattttgccgttacatatcacgcctgacgaggcggcgcgtttaccggagatggacgggcgcgaggagattaacgtagacgggctggatcagttacagacgggctgcacggccctgaggatgcagatccgacgcggcacaacgctgctgggcgaattcatgcttacgctgaccctcgattcgcagcaggagctgcgctatctccggcacggcggcattctgccttacgtcattcagcaaacacttaagcattaa

SEQ ID NO: 228391 - DNA, 678 bp, Klebsiella pneumoniae
atgtcagtcattgaacccctgcgttttgctattaatctgggtaatgctgtacttgcaaaggaactaccggacggcaggccgggcggcatcacggtggagctggcgcagagaatcgccgcggagtggggcagaacggcgcaattcaaaacctatccgaccgccggaaaggtggtggacgacgcgcagaaacggatctgggatatcgcatttctggcagtcgaccctcagcgcgaagaggttctgcgctttacccaaccctatatccagatccagggaacagttctggttaacgaaagcagcccgtggcaaagcgtggcgcaaatggataaaaccggggtggtgatcaacgtcgggaaaggggcggcctacgatctccatctgacgcgtcagctgaagaacgccaccctgaaccggcttagctcctctcaggctgctatcgatgcgtttctaaacggcgaaggggatatggcggcggggatccgtcagccgctggagcgtacagccgcacagcatgcgggatatcgggtcctgcccgataattttggtcagataaaccaggctatctgtgtgcctcggggcaacgaacagcgctaccaggatctcgttgcgcttctgacccgatggcaggcggaaggcagcgtacagctgattatcgacagagaattgggcgcagcgtga

SEQ ID NO: 228392 - DNA, 1380 bp, Klebsiella pneumoniae
atgacaactcccgactctgcttcatcaaaaaaaagaccgacgcactatcgttatatgattttgctgatggtgttcttaagtatcgcgttaaaccatggcgatcgcgccacgttttctattgccggacccgatatggtcaaagccgctggcctggatattgtggcgctgggttatctgatctccacctttacctgggcgtatgtgctggggcagtatccgggcgggtggttactcgaccgttttggctccaaacgggtgctggtcagcggagtctttacctggtcactgttcgtgtttctggtggggtttagcacctcttttgaaaacgtctgggtcacccgcatcatgatcttcggctttatttttatgatggggttaatcgaagcgccgaccctgcctgccaactcacgctttctcgccgcctggttcccggcgcgcgaaaggggtaaagcatccggttttaccacggccgcgcagtacttcgcgctggtggtctttttacccctgatgggttggttctcttatcgcttcggctgggagtcggtgttctggtttatgggcgggctggggatcatgattgctctggttatgcaccgagtccttgcagataccccgaaggttcatccgctggttaatagcgaagagctggattacatccagtcgggtggagggcttaccaacctgaaggccaccaaaaaaggcgacaccgcgggcaagggctttacccgcaaactgctgaccaaccgactggcgctcggcgtctatatggggcagttcttttttaccgtactctcgtacttcttcctgacctggttcccggtttatctggttcacgatcgcgggatgactattttgaaagccggattcgtcgcctctttacccgcactttgcggctgcgccggagcgctgctggggggcgtattgtcggattacatgctctctcgtggctttagcctctctgcggcccgcaaaacgccgattgttatcggtatgctgctggccgtcagcatggtgatctgtaactacgtggattctgcctggattgtagtggccatcatgtccctggccttcttcggcaagggattcggcgcaatggggtggtgtgtagtttccgacttctcgccgaaagaggcggttggcttgagcggcgggctgtttaatatgattggtaatatttcggggatcttcacgccgattatcattgcctacattattaaagacaccggatcatttaacggcgcgctggtcttcgttggcgtctgtgctttcctgaatctgtgctgttatttattcgtcgccggcaaaatccagcgcctgagttttgataccgaacataatgaccgtaaccgtctttcggaggagcccgatgtcagtcattga

SEQ ID NO: 228393 - DNA, 888 bp, Klebsiella pneumoniae
gtgaacaatgagaaaacagaggcagagattaaatacagccatattacgtctctgcccggaatcgtgttacctgcgaatagctgtgactgccatcatcatatttttgacaggcgttacccttatgcgcccgatgataaacgcaatttacccgctgccaccgtcagcgattatcgcgcgtttaaacactggctgggttttacgcgccacgtcctggttcaaccttcctcttacggtgcagataaccgctgtttactctatgcgctgaagtcctttggcccggtagcgcgcggcgaagcggtggtcacggataccgtcagcgacacggagctggactgccttgccgccgccggggtgactggcatccgcttcaattttggcgcaggcagtatcaccacgccagaaatgctgatgccgctggccgcccgggtagccgaacgcggctggcatgtgcagatccatgccaccgccgaccagctctgggcgctgcgcgccttgctgaaccagcttccgggccggctggtgatcgaccatttctttcggttgccgcagcccgaaccgatgtcccatccggcatggaagctcgcctgggatctcatcggaaccggccgctgctgggtaaagctgtcggcgctttaccatcagtcgcagcgggaggatgtatcggacatggcgggcgtgatcacaggttttttgcatgaagccaccgagcgcgtggtctggggaagcgactggccgcacccgaatctcattagcgcaaataagaagatgccagatgacgcgttaattctttcaaatatttttcactgggcaagtaatgagcgggttcggcaaaagttatttgtcgataacccggctgaactttacggatttaactcttcgtcttcctga

SEQ ID NO: 228394 - DNA, 654 bp, Klebsiella pneumoniae
atgagccaacgtattgtcctgatccatgccacccctctggccgtggcaccaatcaatgacacctttaagcagctgtggcctgacgctgaagtcagtaacctgcttgacgatgccctgagtgtggatcgcgcgaaagcgtccacacttaccccgagcctgaatagccgtatcaatgcgttagtggaatacgccatcagcattgatgccgcggcggtgctgtttacctgttcggcctttggcaccgccatcgaagccagcgcgcaggaaaaatcgctacccgtgctcaagcctaacgaggcgatgttcgaggatgcgctgaagaaagggcggaatatcgtcatgctggccaccttcgggcctgcggtaaaagggatggaagacgaattcagggagctgacgaccgcatgccactcagatgccaccctgagcagctatatagtgccaggtgcccgcgaagccctgaacgccggcaatgccagcctgcataaccagctgattgtcgaggcggccctgcaacaccaggaggccgacgctattcttctggcgcatttttctatggaaatcgcttacctgcaggtcagttccgccgtctcctgtgcagtattaagtagcccgcagtctgccgtaaataaattaaagcgtttgatgaattaa

SEQ ID NO: 228395 - DNA, 1071 bp, Klebsiella pneumoniae
atgcgcattctggttctgccatgtgacggtatcggtcctgaaatcacctcagctgcagtaacagtgctgaattcactggataaagccttcggcctggattttgaatttgactacgaagatgtgggtttcaagagtctggaaaaatatggcaccacgcttcgtcaggagtcgttagataaagcgaaaacctacgatggcattattctcggtacccagtcccacgcggactatccagcacctgaaaagggaggccgtaacgtctcagcgggcttccgtatcggtctggacctttatgcgaatgttcgcccggcccgcacgcgtcctttcctggcgtcgaacatgaaagaaggcaaaaccatggatctggtgatcatgcgtgaagccacagaaggattttacccggatcgtaatatgacgcgcggctggggtgaggtaatgccaagcccggatatggcgctgtctacccgcaaaatcacccgtcattgctctgagcgtattgcgcgtaaagcttttgagctggcgatgcagcgtaagaaaaaagtgacggctatccacaaagccaacagcttccatatgacggatggtctgttcctggaagcggtacgcaccgtggcgaaagagttcccggaagtgcagctggatgacctgctggtggatgcgtccaccgcgcatcttgtgcgtaatccggaacgctttgacgtgctggttgctaccaacttctacggcgacatcatcagcgatctggcaagcgaactctccggaagcctgggcttagcgggctccattatggccagcgatacccattgctgtgcgcaggcgcagcacggttccgcgccggatattcagaaccaggataaagccaacccggtttcgatgatcctttccgcggcaatgatgctggcctggtatgccgagaagcataaccagccgaaattcctgaaagcggcggatgagatcaaccgtgcggtggacgaagtgctggagaacccggagacccgtactcctgatctgggtggcacatgcggcaccaaagcctttgctgaaaaagtggctgcggctattcgctcctga

SEQ ID NO: 228396 - DNA, 1260 bp, Klebsiella pneumoniae
atgattaagttaggcgtcatcgccgacgactttaccggggccacagatatcgccagttttatggtcaacgcaggctggaaggtggtgctttttaatggcgtgcccacaagcgctttcgacgcgcaggatacggatgccatcgtgattgccctgaagagccgctcgatcccggtcaacgaggcggtagagcagtctttatcggcctcagcctggctaaaggcgcagggatgccagcgacagctatttaaatattgctccacctttgactcgaccgctcagggcaatatcggcccggtgactgatgcactgatgaagttcttaaatacgcccgccaccctcctctgcccggcggtaccggataatggccgcacgatagttcacggccatttgttcgttaagggtgagctacttaatgaaagcggtatggaacatcatcccgtcacgccgatgaaacattcctccctgaaaaaactgatggaggcgcagtccatggggctgtgcgggatgattaatctggataaggtgaaaaatcacccgcatgacatagcatctgagatggaaaaacagctggccaacaaagcccgttatttcatcttcgacgttcttgataatcaggatctgctgactgtcgcccgggctaccgcgaacttcccgctagtgaccggcgccgccgggctgggttatgccatcgccaccctggatgagcagaacacattgtccggaaaacaggccatgcacattgatgccagcggatccagcgtggtgctttctggcagttgttccgccatgaccaatcaacaggtggatttctatcagcagcgcgcctcctctctggcgctggatgtggaaaaaatcattcacgatcccgcctatctggagttcgtggcgcaatgggcaatcgcccatgccagtgagcctatagcaccgatggtctacgccacccagccgccgcagatcattgagctgatccagaagaactacggggctgagtacgtcagcgaccggattgaaaccttcttctcttcgctggcccaggcgctgacccgagctggttttaacaagtttatcgtcgcgggaggcgaaacttcgggcgcagtaacgcagggattgaacattgaggggatgattattggtgaatcggtcgcgccgggcgtgccctggacccaggtcctcaacaaacagcagtgggtgatactcaaatccgggaactttggtagccaggatttcttccagaaagcacaggaacattatcatgagtga

SEQ ID NO: 228397 - DNA, 639 bp, Klebsiella pneumoniae
atgagtgaaaaacagttaagagaggatatggttcgctatgcacgttccatgtttgagcgcggatacagcagcggtggcgcgggcaatatcagcctaaaacttccggacggtaatattcttgcaacacccactaactccagctttggcgatctcgatgcagacgagttgagcaaagtgagcatgcagggagagctgttgtccggccagaaagcttctaaagaggtgctgatgcatcttgcgatgtatcgccaacgcccgcattgtggcggcatcgttcatctgcactctccctggctcaccgccctgtcgtgcctgccaggcatcgatcctgaaaatgccctgccgcccattaccccttattacgtaatgcgggtgggtaaactgccggtggtgccttacattcgcccgggctcaccgataattgcagagcacgttgaaaagctggcggcggaacataatgccattcttttagcgaatcacggccctattatttctggaaaaactatccgcgaggcggtatttaatgccgaagagttagaggagacggcaaaactttatttcatgttcaaaccatttggcatgaataccctgacacaggaaaatgttgaagagcttaacgccacatttaccatgaagtaa

SEQ ID NO: 228398 - DNA, 1302 bp, Klebsiella pneumoniae
atgtctcttatgcttatcaccgggatagttatgtttattatattaacctggtgtcttctgaaaaacatcttccctcccagtattttatttatacttctgcctaccgcagccgcattagtgtgtggcttcggttttaaagagttaggcgaatatgtcgctcaagggttgaaatctgtcgtgggaacggcaacgctcgttgccttcagcgccatgttcttcaccctgatgaaagaagcgggtgtgttcgacgtgatcgttcgctttattctgcggttcattaccccctccacattttcagtcttactcgcgacgctggtgattgcctccatttgcagtcttgacgggaatgcctatgccaccctgctggtcactgtgcccgctctgctgccgatctatgaaaagatgaacatcagtaaaaagacgctgttactgctgatcaccgtgggtgtgggcgtaaccgggatcaccccttggggcggctcgctcaacagagcgatcgcggtgacgcatctggatattctggacgtctactatcggctgatcccgttgcaggcgattctgtttgtgctgggggttattctttgctggtttatggcgaggatcgaaaacagaagcggctcgggtatgtcgccggatgaattccatcttatgcgagccgatatgctcacgtgtaaaacaaatcataatttctggctgttgaaactgaattttgtcttagtcatcgccaccattgttattctggtctcaggtctggttgccggcaattatctatttatgatcgccttctctctggcgatcattattaattatccgaacgtgaagactgcgcaacaaaaaataaaagaatatgccctgacgatatttccggtgatcgttatatttttaactatcggcgtatttgtcggtattctgcaaaacacaagcattatacaagtgttggtgaacaacattgccgacatgttccccgccagtcttgggccgtatctgtaccttcttcttgcggccttcagcgtgccaattgtgattctgattggttctgatgcgttctactttgcgctgttacccctcgcggtcggcctgggccagagcttcggcgtatctcctttgtacgtcaccatcgccatgctcatcaccgagcagattggcctgctgctaagcccggtgatacctgccacgcatctcggcctgagcctacttaatttacgggttgatgaacatatacggcattctatgacgaaggtctggattatgagcgtctgcgccctcgtcgcagcactgggaatcggaacgatacctgtatga

SEQ ID NO: 228399 - DNA, 1206 bp, Klebsiella pneumoniae
atgtctaatcatagttttgataaccagatatcaccagaaacgtatctatgtcatggtccgttcgatcccgaagtatttggtggtgtggttaaccagcctgtatatcacgcctcaacggtcatcttcaaaaactgcaaagagctcaacgagcgccaccaggcgctgtttgaagatgcggaagatgaagtgatgtattatggtcgatttggaacgcctatcaccttcgccgtgcagaaagccctggccgaactggagggggggtaccgatctttactggtgcctactggacttgcagcctgcacaagtgcgttactggctctggttaaaaatggcgatcatatcctggtcagtagtagcgtttacggcccgacgcgtggattcgtcaataatgtgctggccaaaatgggcgtttcggcaacctttttcgatccgactattggcgatcgcattgctgaactgttccaggaaaatacgaccgtagtgtttacagaatctcctggctcccaaactttcgatatccaggatattccggcaataactcgcgtggcgcatgcccacaacgctaaagttattattgataatacctgggcgacaccgctgtttttcaagccatttgagcacggtgtggatgtctccgtgcatgctgccactaaatatatcgttggacattctgacgcgcagatggggttgatcaccacaaataaagaaacctggcttgccattcgtcgctttatctatctctttggtctgcatgctgcaccggatgatgtttatctcgcacagcgcggattgcgtactatgtctttgcgtcttggacgccatcaggattcagcgcttaaaattgctaaatggtttgaggaacgtgaagaagtggagcaggtgctacatccggcattaccttcctgtccgggtcacgaaatttggaaacgtgacttcaccggttccagcggtttgtttagcgtggtgcttaaacctcactattcaaaagagtccgtggagaagtttattgatagcctggagtatttcggcatcggtttttcgtggggcggttttgaaagcctggctattccgtttaacccgcgtaaagatcgtccggaatatcactggccgtacgaagggcactccttccgtttacagatcggcttagaagatcccgtagatttagtaaaagacctggatcgggcgctacgtcatctaaaggcgtaa

SEQ ID NO: 228400 - DNA, 1281 bp, Klebsiella pneumoniae
atgaccgtaggaattaatactgaagcaattaataataagaatattccctttaccatgtatgatttagggtgggtggtgctttgcatcggagctgccataggttccggaatcgtctttttcccgttacaggttggattgaaaggggtgtgggtctttgccctggccgttatcctgggctatccggcagtttattacatgcagaagctattcatcgaaacgatggcgcgcagcgatgagcaagattcctatctgagtatcatcaccagctacgttggcagtcgctggggcgtgctgcttggcgcgctttactccttcaccatgctgaagtcgatggtggagtatgctcttgccattaccaacgacagcgcctcgtatctgaaaacctttgggcttactaaccagacgctatccgaacactggtggtggtctctgctgttaatcgccgggctctcgctggtcgcgtcgaaaggagaaaagctgctcttcaaagtctcaggcagcatgattgccgtaaagctggtgatcatcgtagcgattggtttcgtggtgatccccttctgggatctgagcaatattggtgcatttccaaccgttagtcaccttgtcgtaggtacgttcccgacgcttccgttcgctatcttctccattatgtttgttgggatactaaatccgatgaacatcgcctacaaaaaacgtgaagaagataaggacgtggcaaagtataaaattttacgcgtacataaagtggcttatttagttcttgtcgctaccgtgctgttgtttgtcatgtccatcgtactctctatcagtgaagccgatgcgctacgagcctatcaggacaatatctcggccctggctctggccgctaaggtcattcctggtgccgcggtcaagtatatgagcgttgttctcaatgtgttttccatcgtgacggcgttcctggcgctctatctggccgtacatgaatctttcgtaggtctgatcaaagtcactgttgaaaaaatggttaagcctcaggcaaacaatagcaaggcgatttcagtggccgcttttgtcatggttgtactggtgctgtggttgatcgtgctaacgaactttcccattctgaaggtgttcgtgtttggtggcgtgacttacggtcttataagctgcatcattcccggttttattattcttaaaaatgacaagttttctgacctgcgtggcgtctcggtttactatgtgattttaatcggcatgctcatgtgcatcggtccttttgtcatgttattttcgcaataa

SEQ ID NO: 228401 - DNA, 1068 bp, Klebsiella pneumoniae
atgatgaatgctgaggtcatcattgtgggaggggggctcagcgggttatacgcggccagattgctggaaaaagcgggtattgactacgcacttctcgaaggtcgtgagcgtatgggggggcgtatcttacaggcgaatgccgctgaggcagatttaggcgcgacctggttctggccaacgatacaacctgcattgaagcagttattcagagaactgaacattgagtcattcagtcaccaggagaggggggacatgctttttgagcgtcccaaagatgccccttctcgccatcctggatttgtctcttcgcctgcagccgcccgtgtaagtggtgggatgtcacgactgcccaatgtattactggcggagttaaagcctgggcgcattcagaccggactgcaggttaaacacatcgaacagcaaaatggcaacctgaacgtttgcggaacttatgccgatggacgcccgtttagccggcaggcgcaacatgtactgttggccttgccccctatgttggctgcagggatcaattttttccccgcgctacccacaacgttattgcacgcatggcgtaacaccggaacctggatggcgccccatgcaaagtatgtcgctgtgtatcccgataatttctggaaaaggaagggactatccggggaggtaagaagcaacattgggtctatggttgaaattcacgatgtttcagaacctgacaggatgtttgcgttattcgggtttattggcgtgccttttcacgagcgtcataagataggtgacgcggtcctgagagatttatgcagaaaccagttgataagactgtttggcgaggaagccgcctatccccatgctgaatttcttaaagactgggcggcagatccctttacctccacctcgcgcgatctaaccctaccagcaggtcattctgtaccacccgccagcgcaaatcacggtccgtggcgtaactgtcttaccggtatcgcgagcgaatggtccaccgtctttcctggctatctggcaggggcgattgatgccgctgcggcaggcgtacaacacataatcgagaaataa

SEQ ID NO: 228402 - DNA, 675 bp, Klebsiella pneumoniae
atgttaataaaccacgatttcacccagcgcgttaccgtttcctgtgatgattaccactgggttcactcccctcagacagggattgatcgggttatgttggatcgtatcggtggtgagcaggcccgcgccaccagcgtggttcgttatttgcctcttacagtattcccgcaacatcaacatcccggtggagaagagatcctggttctgcagggtcaattctcagaaggtaaccgcgattatcccaccggctggtatttgcgtaacccaccgggttcttcccatcaacctcacagcaaaaacggcacgctgttgttcgttaagcttggccagatgacaacccaggaaactgttccgttacgtatcgatacccgtgcgcctgaaaattggcttgcggacggcggaatgtctgtttgtccgttatttgagagtgcacaagaacgtgtttgtctgctgcgtattcatgctggtgcgctactggtggaccctgcactgaagggaggggcagagttgttcatcgtggaaggaagcatgatagaaggcaaccgcattcatgcgaaggggagctggatacgcatcccgtccgggcagggaatggcgtttactgccgggatcgacaacaccctggtgtatctcaaaaaaggccatctcgacgttaagcaggtaacagtaccatga

SEQ ID NO: 228403 - DNA, 141 bp, Klebsiella pneumoniae
atgacgctggcgatgctgtgggtgcttatcactcaccataaagggctcgcgctcttgctggtcgtgataattgcactgctgtttattgcgcttaccccgctggtcaaaaaactgctgagcacccttcacgatcgttcctga

SEQ ID NO: 228404 - DNA, 288 bp, Klebsiella pneumoniae
atgtctccgctccgtctcgctctgttatgtctgtgtctggcgccgcaggcgtcctctgctgcgctttccggtcaggttcatttttcagggcgggtcatcaatccagcctgtcttatcgctccgcagcgcgatcgtatcgatgtttcgtgtcagtaccattcaccggaacagatcgccacgacagacaaccgccctggctatgccatgccggacaatcgcggtgaggtcagtattcactggcgaaatgcgcagcatagtgaagcagatgttattattcgctatcgctaa

SEQ ID NO: 228405 - DNA, 447 bp, Klebsiella pneumoniae
atgtcccaggaattcgccgatattgacgttatgttcattgcgggcttcggccctattacccaaagcaccgcgcaaagccgtgatttctattgtcaggcattgggattaccgctgaagccgatgccgggtaacgaggcgtatctgcttagcgagcaggatgccatcggcggggtgaagcattttgcgctgtggccgctggcgcaggcgtcgcagtcctgttttggtcaggagcagtggccggagacggagccggtgccgcaggcgtggattgaatttgaggtccgcgaccttgccgcggcgacggcgcggctgcagcagcaggggtaccatctccttgttgccgcgcgcgacgagccgtgggggcagaccgtcacccgtctgctcagtccggaaggtctgctggccgggcttaccgtgacgccgtggctgcgggcggaacaagcttaa

SEQ ID NO: 228406 - DNA, 300 bp, Klebsiella pneumoniae
atgacacaacaaactgatattgagaaaataaaagcggcactcaacgccatcgaagaactcgaacagattgcccgttcaacgcagccagccgatgtaaagaatttttgcgtggaatataacaaaacatggaaaaagaaagtggatgccgcgctggcgctgcttgacggttctacgggctcactgcttgttaagttcgttccgtacttacccatgctgctaatgattattaagatgcttaaagaaggagttgaacaatattgtcaattgcagctcgcggtggagcctcccgtagataaataa

SEQ ID NO: 228407 - DNA, 234 bp, Klebsiella pneumoniae
atgaatattcacgttaccaacggcgcgagtgacaggttaccagatgagatgatccgtgaataccgcgtcttcagcggcaatcacgttgacctcctgacccggcgcttcgtactacatcctttcccgaggacgtttggctatcaggacaagtgggcgctgagcgactacatcaacgactcttttgccagctgtcagcagcgcgatccggctcgtcggggaacatgggcgagctaa

SEQ ID NO: 228408 - DNA, 897 bp, Klebsiella pneumoniae
atgaacgtatcaacacgtattcatgttggcgttagcccgctctcctggactaacgatgtactcgaagatctcggtggcgacatcccactggaaacctgtctggcagaagcggcggtggctggctacaaaggaattgaacttggccgaaagtttccgcgatccatcgacacacttgagccattactgaatcaagctaagctgaagcttgcctctggttggtataatggcctgatggctgaacgaagttttgaggatgagttagcagcggtacacgatcatgccatgttattgaaatcactgggtgcaaaagtcatggtatatggtgagtgcggcgcaatgcccggactcacgccactcgatgagcccctgtcgaaatctcctgccttaggacatattaatctgcctcagtacgcagaaaaagtgaataagttggccgtctctttattgaagaactatggtttacgtctggcttatcatcaccatttgatgatggttgttgaaaccgacgatgagctgaaagccttcctgaaagcgactcatgacttagtcggcatcgtcctggactgtgggcatgcaaccgcggcaggcgtagatatcgaatgggtacttgaaaagtatggcaaccgtgtggcacatgtccatctaaaagatgttcgtggtgaagtactcgataacgtcattaacaataacctgagcttcaatgatgcagtaagagccggtctttttactgtgccaggcgaggggatagttaattacgctccggttattcattttcttaaaaactcaatctacgaaggctggattatcatagaagccgaacaggatcctgaaaaagcaccacctttagagacagtaaaaaaagcgcgcgcatgggttaaaagcgagctgggtatttag

SEQ ID NO: 228409 - DNA, 780 bp, Klebsiella pneumoniae
atgtctacttactcactgtcggtctgcgctgaaatggtattccttgatctgccattcattgagcgcgttgaacgcattcacgctatgggatttggcgtggagatttgggactggacccaaaaagatattgatgcgctggtgaaaaccggtgcccgctttacctcaatgacaggctacatctctggcaacctgaccgatgatgaagcaattgatcacctgctttccagcgccagtcagtcactcgaggccgctcgccgccttggctgcccgtctctcaacttgcacggcacaggactgaacaatgttggtctcccggtgaaaccagttgaaattgtaacgggtgaaatgtggctgaaagcgaaaaagacgctggatgcccttgcagctatgggggagaaaacaggcaaggtattcactttggaaaacctgaataccgccgttgatcatccgggaacacctttcgctaaagcagaggatactatggccctggtgagcgcagtgaacagcccatacctgaaaatgaatctggatatttatcacgcgcagatcggtgaaggtaacctggtcgagcttatccgcaaatgtgagaaacatatcggtgaaattcaggttgccgatgttccgggccgtaaagagccgggtaccggtgagatcaactataaggctgtagcccgcgcattgaaagggattaactatcaaggcgtggtcgcgatggaaggttgggcatcgggtgattccgtcgtcgcacttgaagccttccgcgaagcgttcacgctataa

SEQ ID NO: 228410 - DNA, 1008 bp, Klebsiella pneumoniae
atgtcagttaaaaacattgtacgcatcggtcttattggcgcaggtcgtatgggcagttttcatggtgaaactgttgctcaacgtgtaccaggcgcaactctgattgccgttgccgatccggttccgggcgcagcagaaaaattagccgccagactgggagcaaaaaaatcgtatacggatccgcaagatctgctgaacgatcctgaaatcgatgccgttgtgatcgcttctccggcacgtacccacgctgaactggtcgtcgccgcagccaaagcgggtaaaggtgtattttgtgagaagccaatggcagtcaccctggaagatgcagataaagccattaatgcggctaaaacagccggagttgctctacaggtaggtttcaaccgtcgatttgctagtggttttgctacagcgtatgaagagataaaagcgggtaaaattggcgtaccacaactgttgcgttcaacgactcgcgaccccggtctgggggatccaacgccaatcccgcactggaccattttccttgaaacactgatccacgattttgacatcctgctgcaccttaatccgggcgcgaaacccacccgtgtttatgcggttgccgatgcattagtgcggcccgattttaaagatcgtggcctgctggacaccgcagtcgtgaatatttgcttcgacaatggtgcgttcgccactgctgaagctaacttccaggcagtgtatggctatgacgttcgtggtgaggttttcggtagtaaaggtatgttacaggcaggaaatatcaatgtgaacaactgcgtgcgttacaccgctgacggtatctctattgacacagcacgtcgtgatactgacctacttcatgatgcctatgttgcagaagtgaccgacttcgtacattgcgttgcaacgggcgccacgccgaaagcatccggtgaagatgcacgtaatgcattggaagtcgcgctggcatgtatcgcatctgttcaacagtctcagccgattaagctctaa

SEQ ID NO: 228411 - DNA, 1452 bp, Klebsiella pneumoniae
atgtctacacgaaagcacaacgtgccttacctcatattcatatgtgccattgcatctattagcgggatcatactcggttacgatgcttccgttatttctggcgtcatagatccgcttactgaacatttgtcactctcaccagcggaaagcggatgggcagtttcaaacgtcattctgggttgtattgcgggtgcctggggggtcggacgcttcacagaccgttttggccgcaaagtaaccttgatcgtcacaactattctgttcaccatttccgctatcgggtcggcattagccaatgatctcacctggtttgttatctaccgtatgattggcggattggccgtgggtatggcatcagctgttacccctctctatatcgcggaagtatccccgaaagaccttcgtggtcggatgctgggaatgcagcagatgctgatggtaggcggtcaattagttgtttacatcgtaaattacctgattgccagaggaatggcgcatgaatgggtcgtgtctattggctggcgttggatgctggcatctgcactcattccctgcgtgctattccttgtgatggctttctttatgccagaatcgccacgctggtatgcgatgcgcaaccagagagaaaagtcactgaaggtactgacctcgctgtccaacccaggacatgccgagcgtttatatgctgatattcgcatctccatcgccaccgattctgctttgcagagtacaccaacatctcatggcattctgcgggataaaaaatcgtcttacatcctgtggataggctgcgctatcgccgtcttacagcaggtctccggcatcaatatcctgatgtactttgcgccttcacttctacaaaacgttaccggaaacacacaggattccctctttcagagtattttccttggcctcgcactattggctggagtgagcattgcgctggtggcctttgaccgcgtcggacgaatccccttgctacgctggggggcattgggctgtgctgccttcctgttattcacctcatgggcctttatgagtgaagcaaaagggtatctcccggtcgtcggcttagtcggatttatttttgtgtttggtatgtcctggagcctcggagcctggttactgatatctgagatcttccctaatcgcatgcgggccgttgccatgggttatgcgttttgctccctgtggatttcgaacttcatcgttactcagagcttcccgatgatgaaccgcaatcctgtattaatggagcatttccatggggcattccctctgctgttatgcagcggattcagcattatcgctttctggtttgttggccgttttctgccggaaaccaagggtgtttcgctggaacatatcgaaccgttaatgctttcaaaatcccgtcggtttggcggcgagcaggagatgctcgtcacgccaaaatctgtttcgcaaaaataa

SEQ ID NO: 228412 - DNA, 1989 bp, Klebsiella pneumoniae
atgagccaaagcatcagtgatatctgggatgaagaatgcgagcggattgcccggcttaaccatgaacaagattttgctcaatacaccgatgaactggatagagcctgggcagagttcgaaaagggggaaaaacctaaaggattacgctctgttgttcatgcatcatggctacgaagccataccaatggcatagatgcgcatcacttcgaatatcaattttgcgaacagggggaactgcgccgaatcatggcgagaaattcactactgatttccatcgctcgtgaaatcatgcgtaacttgctggcctacaaccctgatggacatatcaacctgacagatgctaacggagtgaccctacattattgcggccaggacttgacgccgatcggtagtattctttgcgaaacggtacaaggtacaaactgtactggacgttgtctcaaagagaaccggctggtctatttgctgagcgctgagaactataaagaagcgctacgcgtacgaggtaaacattgcgcggcagctcccatcagagatgaaaacggtggaatgcttggcattctgacccttactgctgatcctggttgtttccattaccatacgttaggcacagttcaggctgccgcagaagcgatatctcagcaacttattctgcgtcggttggtaaacgagcaggagtcggtgatggagtcacttaatgaaggggttttggttatcagcgagttgggggtgattcgtcagttaaattgttatgcccgtaaggtattaggtattcaggaagatgtcctttttcgcgatgttgacgaagtattatgcccagatggctgttcagttaaagcattaccagccagtaaagaccgtaatattacgttctgccccgtatctgattctcgtatttcatgtgtgatctctgtagtcatcacgcctgaaggtggtcgagtgatttcgatgcgtgacaaccgacgcgtacgcgacatggctcatcgtgttattggtagtaccgccatctacaacttcgatatgatcctcggtgagtcacgtgtgatgcaggatacacgcaataaggcccgaagcgtcgggcgaagcgatagtactgttctcctgactggagaaagcggaacaggaaaagagctttttgctcagtcaattcataacggtagtcatcgtaattcaggaccttttctcgcggttaactgtggtgctattcctcgagatctcgtgcagagtgaattatttggctatgaggatggtgcatatactggttcaaagcgaggtggtgcagcggggaaattcgagcttgctgatggtggtacactatttctggacgaaataggcgatatgccacttgaagcgcaggctagccttttgagagtattgcaagaaggtgaagtgatgcgtataggcggcaagcgtccgatgaaggttaacgtcagaattattgctgcaaccaatcgggatctaaaaaaagatatcgaacatggttccttccgccgtgacctctattttcgtcttaatgttattagcttgcctattccaccattaagagcaagaaaagaagatcttagagaactagtagaatggttttgcgaaaaaatcagtcgagcattcaatcgaaactgcgtgaaattttcagattcagcccttagtcatatggaaaactacgactggccaggtaatgttagagaactggagaacatcgtcgaacgaacaataaacctcacagaagctgaggtaataaatgataaagacttacccgatgaattacagaattctgtctgtaatgctttggctgttcatgatggacgcacaaaaaactataatcttaaggatagtgaaaaaatgatcattgaacgctgtctgatagagaaaaaaggtaatctgcgacaggttgctatcgcacttaatctttcacgtggagcactttacaataaattaaagcgctacgatattgaggcaaatgaatatcgaaaactcaatcctgagtgctaa

SEQ ID NO: 228413 - DNA, 234 bp, Klebsiella pneumoniae
atgcttggggaattctacagccagggcgtagcgcaacttaacctcttcgatgataacgctccacggaggaacagcgagaaactgatgaaagttctcgcccaactcaacgcaaaggacggaaggggaacgctgtattttgcagaacaggggatccaggctgcctggcagatgaagcgagaaatgctctcgcctcgatatacgacaagatttgccgatttacttaaagtgagatga

SEQ ID NO: 228414 - DNA, 1257 bp, Klebsiella pneumoniae
atggcgtatgtgaatcatctactgacgtttattgagagtaatccggcgctggcggtgggatttaaccttattctgctgctgctctctggcatatttgcccaccttttatgcaagttcttgctgattaaagtggtgcgtaaggtcttctttggcagccataaacaggacgtgccgctggagaaggatcgacgcatcgccgaaaagttgtccaatttcattccggttattatcgtctattacgttctgcagtttatgccagcgatgccggcatcgctggtgacggcgattaataccatctgcgggatcttgttttttatttttatgtcggtgtttttcaacgagatgctggatattgtcaacagctcttatctgcgaaaaaccaaacgtaaaaatcattccattaagggctatatccagataggcaaaatcttagtccacatcctggcggcgattatgatcctcgccgtgatgtcgaacaaatcgccgatcattattatctccagtctcggggcggtggcggcggtgctgatgatcgtcttccagcataccctgctgtcgctggtggcgaacgttcagctgtcgtccaacgacgtgctccagctgggggactggattgaaatgcctgacaagaacctcagcggtgaggtgacggatatcgcgctgcacaccattactatccgtaactgggacaataccatttcccgtattcccaccaaaaatttcctcaccgagacctataccaactggcaggcgatgttctcctccggggcgcggcggatcatgcgcagtatcgccatcgatcagcactcggtgcgttttctcaaccaggagatgctctcctcgatgctgaccatccgcggggtaagcgagcctctgaccacgctgcttgacggtcgggatcccggcggcgtggcggaccgctggtttgtcgataacggcctgaccaacctgaccctgtttcgccactacctgatgcactatctcgccgagcgaccggatattattaaggagatgtatattgtggcgaggacgctgaaaccgtcgccgtcgggcatcccgttagagatttactgctttacctcttcgacgctgtggaaagactacgagaatacccagtcggcgatatttgagtacattaccgcggtggccgggcaattttccctgcgcctctatcagtatcccgccgggcacgatttctggcgtctctcccaggagcacgccgcccgggcgggcctgccgccgtcggcggaaggctaa

SEQ ID NO: 228415 - DNA, 168 bp, Klebsiella pneumoniae
atgtgcaaaaatctcccgtccgccggggtggcggaatttgaagcgtcccacacttttgccagtttggtgaaaagtgcaatttttgtcgccattcatcccttctttttcccgtctgacttatcaaaaatgcaggaaagcacttttattaaacaaaaattatacaaataa

SEQ ID NO: 228416 - DNA, 405 bp, Klebsiella pneumoniae
atgaaatcactattccggctttcagccgggcttatccttagcgtgtcagttatcacctcggcggccgccaacgaccataagatcctcggcgtgatagccatgccgcgcaatgagaccaacgatctgacgctgaagcttcccgtctgccgggtggtcaaacgtattcagctcagcgccgaacgcggcgacattcagctctccggagcaacggtctactttaaggccagccacggcgccagccacaccctgaacgtgcccgccgggatcaaagagggccacaccaccggctggatctccctcaacagcgataacgacaacaagcgctgtgtgaaaaaaatcgccttctccggccacacggtcaactcctcagatatggcctcactgaaaattatcggcgacgactaa

SEQ ID NO: 228417 - DNA, 1917 bp, Klebsiella pneumoniae
atgggtaaaattattggtatcgacctgggtactaccaactcttgtgtagcgattatggatggcactactgcacgcgtgctggagaacgccgaaggcgatcgcaccacgccttctatcattgcctatacccaggatggtgaaactctggttggtcagccggctaaacgtcaggcagtgacaaacccgcaaaacaccctgtttgcgattaaacgcctgattggccgccgcttccaggacgaagaagttcagcgtgacgtttctatcatgccatacaaaattgttgccgcagacaatggcgacgcatggctggatgtgaagggcaccaaaactgcaccgccgcagatctctgctgaagtgctgaaaaaaatgaagaaaacggctgaagattacctgggtgaatcggtaactgaagcggttatcaccgtaccggcttacttcaacgatgcgcagcgtcaggcaaccaaagatgctggccgtatcgccggtctggaagtcaaacgtatcatcaacgaaccgaccgcggccgcgctggcgtacggtctggataaagaagtgggcaaccgcacgatcgcggtttacgacctcggtggtggtactttcgatatctctattatcgaaatcgacgaagttgatggcgaaaaaaccttcgaagtactggcgaccaacggtgatacccacctgggcggcgaagacttcgatacccgtctgatcaactacctcgttgatgaatttaagaaagatcagggcattgacctgcgcaacgacccgctggcgatgcagcgcctgaaagaagccgctgagaaagcgaagattgaactctcttctgctcagcagaccgacgttaacctgccttacatcacggcagacgcgaccggtccgaaacacatgaacatcaaagtgacgcgtgcgaaactggaaagcctggtagaagacctggttaaccgttccatcgagccgctgaaagtggccctgcaggatgccggtctgtccgtttccgatatcaacgacgtcatcctcgttggtggtcagactcgtatgccgatggtgcagaagaaagtggccgagttctttggtaaagaaccgcgtaaagacgttaacccggacgaagccgtggcgatcggcgctgccgttcagggcggtgtactgaccggtgatgtgaaagacgttctgctgctcgacgtgaccccgctgtcgctgggtatcgaaaccatgggcggcgtgatgactgcgctgatcagcaaaaacaccactatcccgaccaagcacagccaggtgttctctaccgctgaagacaaccagtccgcggttaccatccatgtgctgcagggtgagcgtaaacgcgcgtctgataacaaatctctgggtcagttcaacctggatggcattaacccggcgccgcgcggcatgccgcagatcgaagtgacctttgacatcgatgctgacggtatcctgcacgtctccgcgaaagacaaaaacagcggtaaagagcagaagatcaccatcaaagcgtcttccggtctgaatgaagaagaaattcagaaaatggttcgcgaagcggaagctaacgccgaatctgaccgtaagttcgaagagctggtacagacccgtaaccagggcgaccatctgctgcacagcactcgcaagcaggttgaagaagcaggcgataaactgccggctgacgacaaaactgccatcgagtctgcgctgaccgcgctggaaacttcgctgaaaggtgaagacaaagcggacatcgaagcgaaaatgcaggcgctggcgcaggtttcccagaagctgatggaaatcgcccagcagcagcatgctcagcagcaggcgggttccgctgacgctcaggcgagcaacgcgaaagacgacgatgttgtcgacgctgagttcgaagaagtgaaagataaaaaataa

SEQ ID NO: 228418 - DNA, 768 bp, Klebsiella pneumoniae
atgcctcggataaaaaatacgctattggcttgtacgatacttgcagcatccttgggctttagtcactccgtacaagcatctttggactaccaatattcttttggatcgattaatgcaggttatgctgactggaacagcggctttgtcgatgtaggtcgtggtgaggtctggaaagccacagctgattttggcgtcaattttaaagaagctgaattctattctttttttgaaagtaatgtactcaaccattctgtcgcggggcgtaaccatacggtttcagcgatgacgcatgttcgcctttttggctctgattatacgctctttggcaagatttatggccagtgggaaaatacgtggggggatgatctggacatgttttatggtcttggttatctgggatggtccgggaaatggggattctttaaaccttacctcggactccacaatgagtcgggtgattatgtttcaccaaaatatgggcaaacaagcggctggaacgggtatgtgctgggctggacggcagcttataacttcacgctatttgatgagaaatttgttctgtcagactggaatgaaattgaatttgagcgaaatgacgcctacgcggaacagcaacacgatgattatggcattaatggcggtttaacgctggcctggaaattttatcctcgctggaaggcaacggtaacctggcgttattttaaaaacaaattaggttatgacggctttggcgatcaaatgatttatatggttgggtatgaattttaa

SEQ ID NO: 228419 - DNA, 1494 bp, Klebsiella pneumoniae
atgaaaagaacagttgttgccagtatgattgggctggcgctatgtgccgggagcgcgctgtcaacagcacatgccgcaacagaaaagcgtcctaatttggttattattctggctgatgatttagggtatggcgatcttgcaacttatggacatcccattgtcaaaaccccgaatatcgacaaactggcgcaggaaggggtgaaattcaccgattattatgcgcctgcgccgctgtgctctccctcccgtgcgggtctgttaaccggtcgtatgccatttcgtaccggtattcgctcatggatcccggaaggcaaagatgttgcattagggcgtaatgaactgaccatcgccaatctgttgaaacagcagggctatgacacggcgatgatgggcaaactgcacctgaatgcaggtggagatcgtaccgatcaaccccaagcaaaagatatggggtttgattacagtctggtgaatccggcgggatttgtcacggattccacgctggataatgccaaagagcgtcctcgctacggggtggtgcatccgacaggatggctacgcaatgggcaacgaattggtcgcgcagataaaatgagcggtgaatttgtcagctctgaagtggtgaactggctggataataagaaagatgataagccgttcttcttatatgtcgcgtttactgaggtgcacagcccgctggcttcgccgaagaagtatctcgatatgtactcgcaatatatgagcgcgtaccaaaaacagcatccagacctgttttatggcgactgggctgataaaccgtggcgtggcacgggggagtactacgcgaacatcagttacatggatgctcaggtcggtaaagtgctggataaaattaaggcaatgggcgaagaagacaacaccatcgtgattttcaccagtgacaatggcccggtaacgcgtgaggcgcgtaaggtgtatgagctgaacctggcgggtgagaccgatggtttgcgtggccgtaaagataatctgtgggaaggcggcatccgcgttccggcgattattaaatatggcaaacatctgccgcaggggatggtgacggatacgccggtttccggtcttgactggatgccgacgctggcgaagatgatggattttacactcccgaacgatcgcacgtacgatggccagtctttggttccgctgctggaacagaagccgctggagcgtaataagccgttgatcttcggcgttgatatgccattccaggacgatccaaccgatgagtgggcgatcagggatggcgactggaaaatgatcatcgatcgtgaaaataaaccgaaatatctctacaacctgaagaccgaccgttacgaaacgctcaatcagattggcaaacggccggatattgagaaacaactgtacgatcagttcctgaagtataaagcagacatcgataacgattcgttaatgaaagcccgtggcgataagccgacgccggtcacctggggctaa

SEQ ID NO: 228420 - DNA, 1173 bp, Klebsiella pneumoniae
atgattaaaccgacaggttcagtatgcaatcttgattgtaagtactgcttctatctggaaaaggaaaagctctacccggagcgaaagcgcaactacagaatgtcagatgagatgctggaacgcttcattaaacaacatattgccgcgcaagaggttgatgaggtgatttttgcctggcagggcggagaaccgacgttgatggggctgcctttttatcgccgggcgatcgaactccagcagcgttatgctgcgggaaaaacgattgtgaataccttccagacgaacggcattttgatcgacgaccaatgggctgagttttttcgggccaatcaattcctggtcggtatttccattgacggcgatgcagccttgcatgacgaatggcgcgttacgcgctcgggaaaagcgacgcatgcgaaagttgaacaggccatacaatgtctgcaccgccacggcgtcgaatttaatacgctgacggttgttaatcagagcaatatgcgccatccgcttcaggtatatcgctatctgaagagcatcggcagccgttatatgcaatttatccctttggtggaaagaagcagcgaaaagagcggccttgggctggcgcaccctgaagacaggcaaacaaaaatgatgccgtggtcggttgatccgctacagtttggccattttcttaacgctatttttgatgtatgggtccgcgaagacattggcgacataggcatacagatgtttgaacagacgcttgccgcctggtgtgggttgcctccccaggtatgcgtattcgcgccaacctgcggcagcgcgtttgcgatggagatgaacggcgacgtttataactgcgatcattttgtttatccgcagtacaggctgggaaatattcaggatacaacgctacatgcgatgaataatagcgcgcaaaaccagcagtttggtgatgataaaagccactcaatggcgcaggagtgtcgctcttgtcagtggaaatttgcctgctacggcggctgccccaagcaccgcttcttgcaatccgcgacgggcgagagaaaccacaactatttgtgcgcaggctataaagcgtttttctctcatagcgcggtgactatgagcgcgatgaaaacactccatcagaatggtttttcaccggcagagataaaatcaatatttgtttga

SEQ ID NO: 228421 - DNA, 1269 bp, Klebsiella pneumoniae
atgttttctcaggttaatgtcgatagctgcaaaacgccaggctgcaaaaatctgggcgtgttgaacagcccggattaccagaaccaggggaaaaatgtgttatgcagggcatgtggttttcattttcctgtgatttcggcaagatcgctgaatctttttcgccagtcggtaaatcgggtatggaaagggttgataaaatcctgccccggatgcggcggcgtctcactaaaaaagtatggcttttccgcgcagggagagccacgcgtctgctgccagcagtgccataaaacatttctttatcccgtcagatataaaaccgatccgcgccaggattatcttgccgcactcatccaggatggggcttcgctggcggatatccgatccgcccttgcgttagacagtaccggactaagccgtgaattacagaagttatcccgcagggcaaatcaggcggaacgcgagtttgcctttcccgctttcgacattaccctcagcacccgcgcttttcgggttaaatttaacggcggtgacaattttctgtatgtgctggtcaccgccgaggagactaccggtcggattatatccgtaacaaccaattattcactccagcccgttgaagcggagtatcaataccactcttattacgaagagcgcctgccgcccggtacgctggtacatcttgtgcaacggaaagaagcgataacgatgcggcgcgcaacgctttttgatgtggattacggaccggcggcgttatacaaaaacgatccgggaatgctggtcaaacccgtattgccggcttatcgccattttgaattagtcaaaacactgacagatgcacgttccctcaatattcaacactacatcgatcaggaatgttttatattaggtggctgcctgatggcgaatttgcagcaggttcaacaggggcgatgccatatctcatttgtcagagagcgaggcatgacgccgccgctgcatgatatcccgccgcgcctgtttatgggcggagggaaccgcaacaatgtctggcggaccttctctacacgggactatgcgatggcggtttgtaacctaaccggcaataaaaaaacggccaatctgcggcacgctacgttaaatggcgcgacgaaatttattcaatacctgcacgcgcatccttttttgccgcagctaaatcgcctgtctccggcgaacgtgaccgtgacgctggattgtctgaaatatgaatataataaaagacagaaaatgtgggacgatctgcgcggttaa

SEQ ID NO: 228422 - DNA, 744 bp, Klebsiella pneumoniae
atgcgctttgccgttcagagcggcttaatcgactacaaccccgcgcaagagattgctggtgcggttgctacggcgaaaagacagcatcgtgctgctctggaacttaaccgcattcctgaattgcttcaacgcatctatcactattctggcaggccattaacccgactggcggttgaactcacattgttagttttcatccgttcaagcgagttgcgttttgctcgctggtcagaagtggattttgatactgccatgtggacgattccaggagaacgtgagccactggagggagttaagtattctcagcgtggttcgaagatgcggactccacatcttgtacccttatctcgacaagctctcaccattctggaaaagatcaaaagcatgagtggaaaccgtgagctgatcttcgttggtgatcacgatccgcgtaagccaatgagtgagaatacgcttaacaaggccttgcgagtgatgggctatgatacgaaaacggaagtatgtggacatggcttcaggactatggcgtgtagctctttgattgaatcgggattgtggtcgagggatgcagtagagcggcagatgagtcatcaggaacgcagctctgtaagggcggcttacatccataaggcggagcatttaggagagaggagactaatgttgcaatggtgggctgattatctggatgcgaataggatgaaaggtgttagcccgtttaattttgcaaaattgataatggactaa

SEQ ID NO: 228423 - DNA, 1245 bp, Klebsiella pneumoniae
atggataaatttcataaagtagatctggcatttgattttttggttagtaaagaaaataaccaagagttatttacaattcaagaattagcaggtgctacaggatggacaattccaacttgtaaaacttaccctgtgaaaaaatggaatagatacgtctcccgagatggagaacattacacttcatcaggtatcaaatatttaagtaaagaagactttagaaatattcatagccaaaaaaatgttgaaacagtgaaaagtgaacgcagtcttaatctaaaaaaggctagagaatttgcgctacttgctgttgcaacctataataatccattcactgagtttaaaacgcatgggtttattgttaatattactattgcttttactgctctatttcacgctatttatgcaaagaaaggtgtaaaatatttctatttaaatgaagatggcacaccaaaaattattgatggtgaagaaaaagcttgggagttaaaaacatgttgtgagaattattggccgggagaatctaagccggaaaagataaatattcagtttttgattgggttaagaaatataattgaacatagaggattacccgaaattgatactttaacatttggagagtgtcaggcggccattaacaacttcgaggatattcttgaaaaggagtttggtgatgatcatgcactgatggttaatttatctcttgccatacaacttacaagaatgtcacagcaagcccaagttgatgctttaaaaagattacaatcaaaaaattttgtagttgtgaaaaaattcattgatgactttaaaaaagatctttcggatgagatcattgaaagccaacaattcaggctcagagcactattggttcctcttgtcggaaaaaaagcatcaaattcagatatagccatagaatttatcaatgtcagtaacctttctgaagaggagttagagaaattagattcaggtatagctttcataaaaggtgtagagaatcaattcaaacttaaacctagtaaagtagtcgaaatggttcatagaaaacataaagacttcaatctgagtactcatgctaaattctggaaattttatgacgtgagaccaatcggtatagataagagctttaaaggtcaatattgtgggtatgtggagggattcgatgggtatttatacaatcaggagtgggttaaaaaaatactatctacctatgctgataatgaagaattccaacgtgttaagagaagctag

SEQ ID NO: 228424 - DNA, 3051 bp, Klebsiella pneumoniae
atgaaacttcattttgaacctaatcttgactatcagatgcaggcaatcgagtctgtatgtgatctatttcgtggtcaagaaatttgccgcacagagtttactgtgacgatgaaagctccgtcgcagagttcagaccagttcagcgtgacacagcctgagcagttaactttaggaatggccgaatccgatcttggtgttggtaatcgtctgactctacttgatgatgaactacgtcagaatttggttgatgtccaatttcgtgaaggattgccgccatcagaaacattaacctccggcgactttacggttgagatggagacggggacgggtaagacgtacgtttacctgcgtacaatattcgagctaaacaagcgatacggttttagtaagttcgtaatagtagtcccttcggtggcgattaaggaaggagtctataagactctgcaaatgacagaagaacatataaaaggactctacgcaggtgttccttttgattactttctgtatgactccagtaaacctggttcggtacgtaattttgccaccagttcaaatgttcagatcatggtggtcacggtgggggctattaacaaaaaagatgttaataatctctacaaagagaacgaaaaaacaggtggtgaaaagccaattgatctgattaaggcgactcggcctattatcattgttgacgagccccaaagcgtggatgggggtcttgaaggacgtggtaaagaagcgctggatgccatgaacccactgtgtacgttgcgttactctgccacccatgtgaataaacaccatatggtatttcgtcttgatgcggtggatgcctatgaacgcaaactggtcaaacagattgaggtggcctcagcaaccgtggaagatgcgcataataaagcatttgtacgcctgatctcagttgctaataaacgaggaactattagtgccagaattgagctggacatcaataccgccagtggtgtgaggaggcaagaacataccgtatctgatggtgacgatcttgaacagctcaccaagcgcccaatttatgcggattttcgtgtcggcgaaatcaatactgcaaagggtgaagaatttatggaactgcgctatcccagcggtgagatatttttgaaaccagggcaagcatatggtgatgtagatgcgttagcagtgcagcgtgagatgatacgacgcacaattcgcgaacatttagataaggaaaaacgattacgtccattaggcattaaagtattaagtctgttctttgtcgatgctgtagaaaagtaccgccagtacgatgcggacggcaatccagtaaaaggcgattatgcgcgaattttcgaagaagaatatcgccgtgctgccaaattgcctgcttatcagagtttgttctccgaaattgatttgaattctaccgcagaagaagttcataacggctatttttcacgagacaagaaaggccgctggaccgatacggcagagaacaatgcgggtaatagagagaatgctgagcgagcatataatctgatcatgaaggagaaggaaaaactactttcctttgatacaccgcttaaatttatcttttcccactcagctcttaaagaaggctgggataacccaaacgtttttcagatttgcacgttgcgtgacatccaaagtgagcgcgaacgtcgtcaaactattggtcgtggactacgtttatgcgttaatcagaacggggagcgtgtacgtggttttgaggttaatactctaactgttatagctaccgaaaactatgaacagtttgctgaaaaccttcagaaagaaattgaggcggaaacaggcatacgtttcggtattgtcgagaaacaccaatttgctcttatagctgttgttacgcctaatggacaaacttcccctatggggcttgagcaatctaaagtgttatgggaatacctgaaagcggcgggacatattgatgcaaaaggaaaagttcaggactccttgaaacaagcactaaaggaaggttctttagccttaccagccgagtttgaagcgcaaagaggacaaattgcagaagtgttgcgcaaagtatcaggtcgtcttgagatcaaaaatgccgatgatcgtggaccagtacctctacgtaaaggagcggatggtaaagctatctatcttagcgatgagtttaaagcgctgtgggatcgcatcaagtataaaaccacctatcgtgtacaatttgataacgctaagctgataaccgactgtattaatgtcttgcaaaaagcgcctgccatcgccaaagcgcgtttgcaatggcgaaaggctgatattgctattggtaaggctggagttcaagctacggagaaagcaggggcctcgacggttgtattagatgaaacagatcttgaactaccagatattttaacggagttacaggatcgtactcagctgacccgtcgtacaatcatcaatatcttgactggaagcgggcgtctggatgacttcaagtgtaatccacagcaatttatcgaattagcagctgaaataatcaatcgttgtaaacgactagccttagtggacggcattaaatatcggatgttaggtgaacagcatgtttacgcacaggaactattcgaaaaagaggaacttaccggttatctccagaatatgttaatggacactcacaagtcgatttatgaacatgtagtctacgactcaactacagaacgggactttgctgatgcgctggagaagaatgatgcaattaaactttatgccaaattgcctggctggtttaaagttcctactccactaggtagttataacccagattgggctgtacttgtcgaggaagataatgagcagcgtctttattttgtggtagaaaccaaaagcagcctctttgcggacgacttgcgtgataaggaaagtgctaagatcctatgtggcaaggctcatttccaggctcttgctatggaaagtacaggacttaatgagaatccggctcgttatatagtggcaagttccgttggtgacctcatggttgaagcctctaaggatagctag

SEQ ID NO: 228425 - DNA, 1932 bp, Klebsiella pneumoniae
atgactttgaaaaaaatcgatattaatgatccagaggctcagtctactgatttggtagctggcaatattgaacaactgaagaatttgttccctgagctgattaccgagggggttaacggtgtatcagtaaatgtggatgtgcttaaagcattagtgggtgacaaaagtgttacagaggcagatgagaaatacggcctcaattggcatggtaaacgccgcgcccggcaattggcgctgacaccaagtacaggcactttgctaccatgccctgaagagagtgtggattgggaaactactcagaaccttatgatcgaaggtgataacctcgaggttctgaaactcatgcaaaaaagttattctggtaagatcaagttaatttacatcgacccgccctataacacaggtaaggactttgtgtacccggataacttccaggacaatattaataattatctagaattaactgggcaggtagaaagcggtcagaagattagtagcaatactgaatcaagtgggagatttcatactgactggttgaatatgatgtacccaaggctaaagctggcaagaaaccttttaagagaagacggtgttttatttttaaccttggatgatacagaagtatcaaatatgagatgcatctgtgatgaaattttcggcgaagaaaattttttagccaatattgtttggcaaaaaaaatatgcggttgcgaacgatgaccctggaatcggggtaatgcatgatcatatcctagtctatcgtaaatcgagtgctttcattcgtgggctgcttcctaggacacaagagcaaaataatcgctattctaacccagataatgacccccgtggtgattgggcttcagacaattatgtcagcaataaatctaaagacgaacgtccaacgctatggtattcaattcgtcatccaaaaacgggtgaagatgtctggcctgaagagcatgctgtgtggcgatattcacaggaaaaacacctgcaaatcgaaagtgagaaacgtctgtactggggacctgatcaatcttatcgaaaaccacgcctcaaacgatatctcaaggaaatacaacaaggaattgttcctccaacatggtggacttttggcgactgtgggcataacgatgaagcgcagaaagagacatcagccttacttggtcgtaaggttttctctactccaaaacctattcgtttaatacagagaatgttaacaattgcagcgccagaaggatcaattgttttagatttttttgctggttcaggctctacagctcatgctgtcttaagtaaaaatgctgaagatcaaggtgagcgacgttatatcgttgttcaactaccagagccgttaagcacagaaaatagtgatcagaagagtgcggctctcttctgtgaccaaattaataaacctcgcactatagctgaattaacgaaggaacgcttacgtcgtgcagctattaaggtcaaggctgataatccagcatggcacggggatactggtttccgtgtttttaaacttgaccgttctaatattcgggcatggaatacaaaaccggataatcttgaagccacattgcttgacttcgaagaccatctcctcaaaggacgcagtgaaactgatattctttatgagttattgctcaaacttggtcttgatctttgtgtgcctattgagaagcgaattatcaaaaattgtgaggtgtgctctgtcggaggtggagtactgatgacttgcctagctgagcaaatcaatagcgaccttatagaacctcttgctctaggaattgttgattggcgcaaggagttaacaaccgctggtgatactacctgtgtattccgcgatggtgcttttaccgacgatgtggcgaaaactaacctcgcagctatcctggcacagcatggcatccagaatgtgcgttgtttgtga

SEQ ID NO: 228426 - DNA, 2124 bp, Klebsiella pneumoniae
gtgaaagcctcagaaactaatttgcttaaatttttacgcaagtctccacagttcgtcattcctatctaccagcgtaattattcatggacggaggcccagtgccaacagctctgggcggatttaatgcgctctgggcgtgataatgggataaatggacattttattggctctattgtttatgtggagcgcggcctgtccaccgtgactactcaagaggcactacttgttatcgatgggcagcaacggcttacaacctgtgccttgctaatcgcagccttagctaaacattttgaaactaatcaactccctgagttactcgatagtttttctgcgcgcaagctacgcaactactatctgcttaatccggatgaagaaggcgagcgtcactataaactcatattgtcagagaccgacaaagataccctgctggccattctcaaatctaccccgatgccattggaaataagttcacgtattgagcagaattacatgctttttcaagggttgatagagaagcatcaggatgagttggaagaaatatgtcaaggacttgctaagcttctgatcgttgaagtctcactggatcgtacacaagacaacccccagctgatcttcgaaagtatgaattccaccggacttgagctaagccaggcagacctgattcgtaactatattctgatgagtttagaaccgaagcttcaagctgagctctatcagagctactggcggccaatggaaaaggcgttcggccaagcggcctatgtgacgcattttgaccccttcatgcgtcattatctcaccgcgaaaacaggtgatatcccgaatgtacgagatgtttacaccgctttcaaatcttttgctcgttccagccaggttgatattacagtactggttgccgatattcatgcctttgcaaattactattgtgctatggcgcttggtgcagaaaaaaatccactgataaaacaagcttttcatgatcttcgtgagcttaaggtcgatgtagcctatccatttttactggatgtttaccacgattataaaatggaaaggttggggactgatgaattagtaagcattatccgtctggtcgaaagctatgtgttccgccgagcgatctgcgctattcccactaactcgctcaacaaaacctttgcgggcctgagtcgtacattgaagaaggaccgctatcttgagagtgtccaggccgctttcttactattgccatcttatcgtcgtttcccagggaatgaagagttcgaacgtgagattaaacaacgagacttgtataattttcgtagtcgaagttactggttacgccgcctggaaaaccacggacgaaaagagcggattgtattagaggattacacgattgagcacatcttaccccaaaatgtagagctgtcagctgaatggcgagcagaacttggtcctaactggcaagagatccagcaaacttggttacacaccttgggcaatctcactttgactggttataacagtgagtacagtgatgcttcatttgcttacaaacgtgatcaagttattaatagtgaaggaaaaaaaattggtttcaaatacagcgctctaaatatcaatgaaggactcggtgacattgataagtgggacgaaaatgccattaaagcccgagctgagcagctggccaaaatagcaacaaaagtatggggatcgccagccctgaagagtagtgtgcttgatgcttatcgcccaacaataaccgatgcaggcgtgcaatacagtatagacgatcacccatatcttaatagtggggcactgagaacgctgtttgatgccctgcgcaaggcggttctggagttggatccatgcattcacgaagaatatctcaaactctatattgcctacaaagcagagaccaactttgtcgatgttgttcctcaggctaaacgcttgcgcttgtcgctaaatatgccattcagcgagattgatgatcctaaagggctctgtaccgatgttacaaaccttggtcggtgggggaatggcgatgtggaaattggattatccagtttagagcagcttccctacgtcatgggattgattcgtcaatcctttgatcgtcagatgggaagaccagaggatgcttga

SEQ ID NO: 228427 - DNA, 807 bp, Klebsiella pneumoniae
atgacatgtcttgacgcgcaaaccgttatccaggcattggggcttcctgacagctgtcaggtgggtcaacgcgtccccaagaaaatattgttggaaaatattgcggctacggcagctgataagcgtttgatcactgataacatttctgaaatcaagtggttggcggcacttaagcccaatacaataggggtgccagactatcgggatacgaagcgtgagtatcttgagattacgattttatctgtgactttacgaggtgtcgtgaaaccagcaaaccgtgtccgtttggctgagctgctacatcgtgctgttccctatcctgttttattacaactggttgaaggtcaaattcagactctatttttggcccacaaacgatgggctcagaacgagtttggtaaagtagtacttgatggtagcttggtatatgcctcattttttcataccatggttgaagctcctgagactgcctgtctgacatctccggaagtagggcatgcttttttgcaatctttgtcaatctcgcgccaacctcaggccacactctatagtctttaccaggggtggatcgattgcgtacaaacactgttggctgcgcgtttgacagggatctatcgtattgtccacacccaagagcaggctgaggcgcgccggcaggcattgaacgattacgaaaggcttgaaatcgagattaaccgtttgcgtggattggcgctaaaagaaaaacaaatggcgcgccaggttgagctgaatctccaactacaagcactgctggcagagcgtcaacggatcgtgcttaatctctaa

SEQ ID NO: 228428 - DNA, 3234 bp, Klebsiella pneumoniae
atgaagttaatccataactccggtaaagatcgtgttattgacttgattcgacctcatttcaaatctggtaaccaactggggtgtgtgaccccatctttctctttatatgcttttgctgaaatgcgtgaagagttgtctgttattgatcaggttcaattgatcttaccctcagcagaaaacctactcgactacctaggagatgaaggtgaccgtagtgcgcgaaattgcctacagacacgatggttagctaaccaatgtgctaaatggataagtgaaaaagtggatcttcgtcgggcacttgggccggtgccacaaggtactgttgttatacgcaaacctgatgctacacccgagcaagtcgttttggggtcgttcgcatttagcacctctggtcttggattaacgcctggtaacccgctgagcttaattcaggcttcagaatcacccagtgaagccgccatattatcccaatggttcgatatgcaatggctgagtttaaatagagatggaaatagtatttcagcatctgatgataatgatcgcgatgctatgattgcagctttgaagtccataggtgaacaccgtgatccatctactgtttactcgctcatattgcacaacctatttcgtgatagtgagggggaaatggatgaggagcggatcgttaaatccgcaactggtatccgaaacacagtggtatggaaaaaacttttcaaattccagcgtgatggagtagtcggggcgattgataaacttaatcgttttggtgggtgtatcatcgcggatagtgttggtttgggtaaaacgtttgaagcgctggcaattatcaaatatcacgaattacgtaatgatcgtgttttagtgttagcgccaaagcggctacgtgacaactggactttataccaaactaacgacaagcgtaacattcttgcagctgatcgctttaattatgatgttctgaatcatactgatttgtcacgcgacagagggagttctggtgatatcgacttgtctcacatcaactggggtaactacgatttagtggtgattgatgagtctcacaatttccgcaataaaattacccataaaggtagggagtctcgatataaccgcttgatgcgcagaatcattaaggaaggagtcaagactcgagttctcatgttgtcagctacgccggtcaataatcgtctttcagacttgcgcaatcagattgcctttgtcaccgaaggagatgataccgctttgctggagcatggcataaccagtattgagacaactactcgcaaagctcaagctcaattcaaccgttggttgacaatggatgaacttgaaaaaacaccgtccagattgattgaaatgttaggctttgattatttcacattgctagatcatttaactatcgcgcgatctcgacgacatgtggagaaatactacggcattagtgagactggtcgttttcctgagcgcttacccccaataaatattaaggcggacgttgatcttgcaggtgagttccgtgctattcgtgacattaatctggaaatccgccggcttacgttggctagttatgcaccgcttcgttatgtcttgccacacaagcaagcagcatatgatgcaaagtacagcacccagattcgcggcggagaaagtttttttcgccaggtagaccgtgaagaaagtttaatcaacttactgcgtgtgaatgtactaaagcgtatggaaagttctgtgaagtcattcgccctgacagtgcagaggcaacttagggatgtggaatcaaccttggctcgcattgaattgcataccggagagcttgaagaaatagacatcacagatgttgatattgatgatcctgcttttgaagctcttctggttggtcggaaagtcaaagtactacttggtgatgtagacctgattcgctggagacaagatctgatcgaggatcgtaatcgtttagctacattgttgtcagctgctaaacaagttgatgttgatcgtgatgctaaactggcatctcttcgcaagatgattgaagacaaatgtcaacatcccatcaatagcggtaatcgaaaaatcattgtatttacagcgttctctgataccgcaaactatctttatgagcagcttgcccaatgggcgaaagggcagttgggaattgatgctgcactggtaactggtagctcaggtatacagaccaccttgcctggtttgcgtaagagcatgaatgatgtgttgtccgcgtttgctccaagagctaaagagcgtccggaggagcttactgctgaaggtgaagttgatctacttatagcaacagactgtatttctgagggacaaaaccttcaggactgtgattggctgatcaactatgacatccactggaatccggtccgcataattcagcgttttggccgtattgatcgtattggctcaccaaatcaatgcattcagcttgtaaacttctggcctaacatggagttagaggaatacataaatctggagcagcgggttagtggtcgtatggtactgcttgatatttctgcgacaggtgaagagaatttgatcgagcagcaatccggtaactctatgaatgatcttgagtatcgtcgtaaacaactgctcaaattgcaggataccgtgatcgatttggaggacctttctactggggtatcgatcactgatcttacactcaacgacttccgtattgatctggcaaagtatttaaagacttatcctgacaagcttgatgctcaaccactcggtgtatacgcagttaccactagcctggatccggaaataccaccaggtatgattttttgtctgcaggcttttgagaagaaagggcataaagtacttgttgaacaagcatcttcagattatccacttgcaccacactacttggttcacatcggagatgatggtgcggtgttattgccttactcacaggctaaacgcatcctcgatagcctgaaacgtctggcgcttgggcgtgaagttcccgacgatacagcgtgtgctagttttgataaaaaaaccagatatggtcaagacatgagtcacgcacaaaaacttcttaccgcagcggttgcatcaatagcgggtaaaaatgaagaacgtgctgttgccagtcttttcactccaggtggaacccaagccatcaagggggagtttgctgggagtaatgattttgaagtgatagcatttatggtcatcttgccagagagtgagtcaatatga

SEQ ID NO: 228429 - DNA, 615 bp, Klebsiella pneumoniae
atgaatcgtgccgggataaaggctcaggtcgggtaccggagcccgcgggcacacaaaggcgagatcagtatcgtatcgcccaacaggctccagcgacaattcaatccggatgctccggatgagcgttgggtaacggacataacttacatcaggacccacgaaggctggctgtatcttgccgtggttgttgacctgttctcacgcaaaattatcggctggtcaatgcaatcccggatgacaaaggacattgtcctgaatgcgcttctgatggccatatggcgacgtaatcctctaaaacaggtgctggttcattcagatcagggcagtcagtacacaagccatgagtggcagtcattcctgaaatcacacggcctggagtgcagcatgagccgtcgtggtaactgtcacgataatgcggttgcagaaagctttttccagttgctgaaacgcgaacggataaagaaaaagatctacggaacacgggaagaagcccgcagcgatattttcgattacatcgaaatgttttataacagtaagcgtcggcatggttcgagcaatcagatgtcaccgacagaatatgaaaaccagtattatcaacggctcagaagtgtctag

SEQ ID NO: 228430 - DNA, 1098 bp, Klebsiella pneumoniae
atgaaaaagcttattttatttttcattgtggtgctgatcccctcctacagctgggcgttatgtgaggggaaaaattatggcgatatctcgatgactaacctgccggaaaaaatacttatcaacgccggaaattataccgcgggtacggtgctatacgattccgggaaaatgaatcacgcgcaaacgtttatgctcaattgccaggggcaaatttacgcggtgtttgcctggtcttcgagcaatgccggggcgttggtcggcgataacatctataccacctcggtgcaggggatcgggatacgcgttaaagtgtggcttaatatcagtggtgaatatgagaacgatacagatgatttcactcccgactcgcaggtgcattatatcggcgatgccaactttaaactcggtgaacctaatggctttttagatttctacgcttccacacattacaccccggcgtatcagctgcagctggtagcgactggcggcgcgattgccagcaatagtacattatcctttaacgacccggtggcgacggtatcggcaaaggataagtcaggctcggtagcgatttctcaactgcatatcagcggaaccaccagcatccagatgatcccgatggggtgcgatgtcagtagcaataatcttagttttgccatgggcagcatcaataccggcgagtttaatagcgcgacgaaggtaggatcagcgcggcagtccatgaatctcttttgcgagccgggaaccaatgtttcgatgcgggtggtggcggcggaagcgagtggggataatccggataacaccgtaatggccttaacggcagaagagaatgttgccaccggggtgggggtccagttgaatctggatggcgaagcgctgccattgaataccgacatcagcctctatacctcgagccgtacgacggtaacgaacgacggcgcagatgccagctatagctatttcacccatcccgacagtcctggcggggcagccgctcagcagtcgctcgctttttccacaaactattataagacgggaagtatagtgacagcaggttcagcaaacgcagcaggggtgatcaccttcacctacaactga

SEQ ID NO: 228431 - DNA, 588 bp, Klebsiella pneumoniae
atggccgcacgttcgcaacaggaaaaaagggctgatatgagcattaaagactgcggagcagggggctgtgtactggctagccttttactgctctccgctcccgggttggcttacgagagcaacagcacggtcaattttaaggttacgggcacgatcgaagcgccctcctgtgaggtggctgtggagccgtcgaatcgtattgatttgggcaccgttccctatcagacgttctccggaaaagcgggatcgagcagcgccagcgtgccggttaagctgctcttttccaactgttccgcctatgcgtcggcagtgacgatcacattcagtggggctggtttcgatgaagcccatacttcgatctataaaagctatatgacaggcaatagcggggccagcggcattggtttgcaactgctcagcatggccgaccagcagccgctgggccccggtaaccagtatctcttcacctttgatagcgaagcggacatccacacgttcaccatggcggcacggatgtactcaccttatggccaggtgagtcccggcattgtcggttttaccgccacgtttgatgtggcttataaataa

SEQ ID NO: 228432 - DNA, 2592 bp, Klebsiella pneumoniae
atgattatggtatgtcagggaagaaatataccgctcttattcagtagcattgagccgctatttccaactaaaagtctctgcgtcgctatttttctgtgcctgagtaccctacctacttgcgctgaggccggcgaatatttcaatccaaacctactcgaagtcaccgctaatagtgcgacttcagttgatctgtcttatttttcgcaagatggcgtaccgccgggtacttattacctggatgttttcatcaatgataagtatgtcggttctgaatcgctcctgtttcaggtaaataaccctgacgctggtgcaaacgcaacggtgactccctgtctttctacggagtttcttcattcatggctcatcaataccgccgcctatccgaagctgttcgaggcaggagaaacctgtgctcagctgtcggcgatcccgggcgtgacgtttacggtttcacttgcccaacagcggatagattttaccgtcccacaagccgccatgctgaaccgccccagggactatgtaccggagagccagtggcagcaggggattaacgccggtattctcaactacagcatttccgggcagcgcaataccccgcgacataacggcgcgactatcgacagtcagtttatcagcctgcagcctggcgtgaacctggggccgtggcgcctgcgcaactacagcacctatagccacagcgacaatagcagtcgctgggagtcggtatactcctatatcacccgcgatatccaaaccctgcgcagtcaactggtggtgggcaacacctatacgtcgtccggcatcttcgacagcatgagctttaccggcctacagctcagctcagataaagagatgctgccggatagccttcacgggtttgcgccgacgatcaagggtattgcgcgtaccaccgctgaggtctcggtctatcagaatggctatagcatttataaaaccaccgttgcacccggcgcctttgaaataaaagatctttacgccaccggcagcgccggcgatctgtacgtcagcattaaagagtctgacggcagcgagcaaaactttgtggtgccattcgcctcgctggcgatcctgcagcgcgagggccagctggactatgcgctgagcagtggcagaacgcgctcaggtagctccgacgataaagaatataactttattcagtcctctctggtttatggcgtgaccagcaacgttactctttatagcggctttcagcaggcggaagataaatacaccaacttgctgttaggcgccggttttaatcttgggactatcggcgccctctcatttgatggttctcagtcatgggctgatgtcaacgccaacgccgcggccacatcgaccagtaaagaacaggggcaatcttatcgcgtccgctttagcaaaagttttctccagaccgggaccaacttttccgtggccggttatcgctactccaccgcgggatactattcgtttcaggattttatcgataacgcttccactcagtatgactgctgtaccagcaacggcagaacgaaaggccgttttgacgcctcggtgtcacagacgctgtttggctatggctcactttcgctgtcgctgatcaatgaaacctactgggacaactcgcgcatggcgtcggtcggggtgggctatagcggagcaatcggcaaagcctcctactttattaactattcctataaccgcaacgtgcagaacaccgatgacagcggtcataaccggccggccagcgatacggtcgtctccctgacgttaagcattccgctgggagactcactctccgcgaattacaccatgaaccatggccgccataacgacaccacgcacagcgtgggacttaacggttcagcgttcgaggatcgctccctgaactggagcgtgctggaagggtacaatacccaggataagagcacttccggcaacctcagcgttaactaccagggggcaaaaggcgacgtggcgggcggctatggctacgaccgctacagcaatcactacaattattcgctgcgcggcggcatggtcgcccattcaggtgggctcacgctgtcacgctttctgggggagagttcggcgctggtcgagacccccggcgtcagcgatgtgacggtgcgcggccagacaaacgtgacgacggatggcaccggatatgccgtggtgccctacgtccgtccataccatcgtaatagcctggcgctggatgaacaggaaatccccggcgctgaagtggataacgttgccagaacggtggtaccgacgcgcaacgcgatcgtcaaagtgcagtatgacacgcgaattggctataaggcgatgctcacactgcgcacccgcagtggggtggtgcccttcggcgcgctggtgaccctcgataacgctcggcctaacaccagcgtctcgcgcagcaatatcgttggcgatgaggggcaggtttacctgacggggttgcagaaaaaaggccagctgctagcacgctggggggacaaaagcagtgagcagtgcaccgctcattatgatttctccagcaccacgctgagcgacaatattcagttttatcaggccatctgccgataa

SEQ ID NO: 228433 - DNA, 138 bp, Klebsiella pneumoniae
atgatgggcgagaaaaactgggggcgcaaaggatcgtgtcccctgttttgcattaccgccgttgaaacggcctccagcacgcatggcgggaggccggggaaggtactctccggcgtcgtgggggttcacgccagataa

SEQ ID NO: 228434 - DNA, 525 bp, Klebsiella pneumoniae
atgcagattcgctgcactaagcccgaagataaaccctatacgtttggggatcggcaaggcttgtcattgtttatagaacctaatggaagcaaaagctggctgttcctctatcgctatgtcggtaagcccaaaatgatctcgcctggtgtgtatccgactatcaaccttgccgatgctcgccctcatcacgacgatacccgaaagctggtcgcggaaggaaagaacccgaatgaggttcgaaaagagcagaaggtcgctttgcaaacggaatccggaagtgcgttcgaaaagatagctagagagtggcatcacatgaagaccgccaaatggtcggcaggatatgtgtcagatgtcatagaagcgtttaaaaacaacattttcccttatgttggaacaaggaaagtgggaaagataaaaccgctggagctgcttaacgtactgcgtaaaattgaaaacgcggggcgttggagaaaatgcggaaagtgcatcagcgttgctccgaagtgtttctctacgcaattgtaa

SEQ ID NO: 228435 - DNA, 2745 bp, Klebsiella pneumoniae
gtgataataaacgataagcatttggaaaatattattcaagcctctgatgaggactcgttggctatttttgttggtgcaggagtttccaaatcatcagagagtgaaaatataaagctaccgtcatggtcggacctgattgatgagctaaaacttgatttaggcatagattacgaaattgattatttgaaagttgcacagctttattatctcgagtttggttctcatatatactttaagaaaattaagaagtacttccctgacaatgtaactccttcgaaattgcatgatttaatatttaatataaatccccattgtgtgattactactaactgggactgtcttttagatactgcagtcattgaaaatgcgtatatatatgacattgtctgcagtgataaagacttgatgaagtctagtctggataaaaaacttataaagatgcatggtgattttaaaaatcacaatattgtatttaaagaagatgactatattaattatgacgccaattttcctctagtatctaattacataaagagtgttctgtcgacccacacagtaatttttataggctattcttataacgatatagatattaagcaagttataaaatgggcccaaaatcactccactgtacgtcctccaatgtatcttgttgtatacgaagatgattatgctcaaagaaaatatttagctagccatggtattacgactatcaaagttagcagctaccagacggagttctttacagataagagaagctcaagcctttacggttttttaaagtcgataaaagaaaagagagtcagtaacaatgaagataaaaatataattaagcatgtatatactaaattgcaagaactcaactccctgaatgctattctagctgaacaaattactgaatgcttaggggattcaacacttttgtttcgagaagttaatggcgaaataatggcttttttaaagttttataactcagaggtaactcagaaaacagataagggcatgcggtatgtgtataaaagattcaaggatgtacttaaagataatgaagagtcaaaaaaatataacattcttctaactccaatttttgatattctttggaaagcagatatttccggggtaataattgatgacaaagatagcgaggctattctaactacagactttgtgcctgaatcaaaaaagttatcagataaagaaatatttacctttgagtataatttcgactttgattttagtaaaaaaaatcacacagggaaaagtgtcgattttgataattgtgatgtatatgcattcttccagataggaaattatgaaatggcctatcatgctattgaaaatgttatcaagcacgatttgaaacataaaaattatgcctcattacttatttcccttcttaattacaatatgatattgcatgtgcttaaatatcgtcttggtcgtaatagcaacaggtttttagatacagaaagttataatcttaaagaaaggtttgacagctttcctaaaaatgtaaagcggacattaagttcattattagatatagtaaccgttgattatatgtttaagtttatttattcagtagataaaatactaactaaaaataaagacagggaaggaaggaagcctctactttactgggatgcagatgagttcaagtctgattttttacataaaaatatattgcatttcattaagttaaatggctgccttatagatagctattctgagtttaaatatgcgataagtaaactgtttgagattaaatcggtaaagcgtaagtctcaggagaataatgaaaccatatattacactatagaagaattgtattcctctataaaatatctagataacaaagagttggctgaaaaattcaggtataaaaagcgcggcaagtatttaacgcttcaattggatacggaaagcagtgattggcttttgaatcatgcttttgaggaaatgtattgtgggtatatgaaaaaggcgagtaatagtgacttcaatttaaatgctttcaagaatgttattcttttgcttgcattttcagatgagccccataaagataaaagccctcttcacaagaaaataacctcgcttgtagaaaacggttttttctattccgatttaattgaatgtatttctgactacgtgacaatttgcttcaataataaaagagatggctttgataagagttttgtggctgaactgatgaactccatgataaagttatctacttctacaattgaaaatgagaatgaccatggttatcttattcttagaaaggctcataatattttcttgattgcatcagagttaagcgtggaattcaatgacattaatcaccttaaagaattaatatcctcgattagtgaattaccagttactcgacaggctagttacattgagtcattattatatgatttatttattgttggtgatgataaaataaagggtgatattaaggaatacgttaagaatatggggattgaaaagcttgattatgaaaagaaaaatagacttaagctttttttagttgcatcaaatataattgaaaaagaagaaggtttagaacatgaaatactggagatgataaggaagttacctgctaataaatttagcacggaattgtattccattcgtagtatgttggattttttagttagaaatggcgaagattcatttactgtagctcttgaagagctgaaagaaacgatagctaaattagaaaagaaattctttaattga

SEQ ID NO: 228436 - DNA, 627 bp, Klebsiella pneumoniae
atggttgtggagtcagttctttcaacagaaccaaaatcactcaagtatgaatcaaacatacgccgcagacagagcctactcacagctcctcatatgcagccgttaacagcgtatgtcgaaagcatacgtgaaaggcttggtgacaatgtattcatccctgactttgatcctttagatggtgggatcaatgccgaatttattttcctcttcgagaaaccaggcccccaaactgaccttagaaacggtggttctggttttatctcacgtgataataacgatgacacggccaaagcaatcttttgctttatgcaaagtataggcttggatagaaaacgaacgctgctgtggaataccattcctgcttgggataactcaagagcatatcaggccctacatgtccgtaaaggcattgaaattctagatgagctactccctttactatctaacctaaaaaccataattttggtaggaaaacaggcccaaaaagcgagaaaagggctaaaggctcgtggttatgatattgcagaatcctaccatccctcaccatgtgtcaaagctcggtatcgtcagaaatgggatcaaattccggcagcgtgggaagatgcgatttccgctaacaagagataa

SEQ ID NO: 228437 - DNA, 198 bp, Klebsiella pneumoniae
atggtgattggcgactttctaaatccgatggcttcatccgtggttatctactcgctttgtttttttcaattgtacgccagcccccgggatgacatggggccgccaaactttatagctacacaaaatttagaaagtttgacctcaagcatgaaaacccccacctacccccccatgaaggtggcttcgcactccctttaa

SEQ ID NO: 228438 - DNA, 816 bp, Klebsiella pneumoniae
atgaatgcaacggatagcatattgcgcttaggtagccgttttggggtactgatgctgatagctggcgcaatgttgtgggggatatatcactatggcgacaagattggattgaatacgctgcaagcgaaactctatttctgcctgggcttagggatccttattctgctttttcgttatggcggccgtattgtgcagttcatactcggccgccatctgaaggggcagggggcgccattgacaagtggtcagcatttgaagccggcttcccagagtcaccgcgccgttattgagatgaggcagacattgcgtcgccagtatggtcgctttggggctggcaaaatgaccattctgatgctcacgggaagcgtggcggatgttgaacgccttgcaccgggcctgagtagccagtactggcaggagaatggagacacattattgctttggggtggggaaccccagagcgcgtcggataatgactggctttttgctttgcgtaaacgctttcgcccccctgtgaatgggctggtgtgggtcacttctgcgtttgatcatctgcccgcagccaatcagcacgcatcccccgctttgttgtccatggaggatatagataacattgcccatgatctggctgaacgtttctcactgctagggtgggctgtaccactgtatgtctggtcgctgcatccccaggcggatgatcaggccgggcgcatcgtgcaatctgtcggcagtctcttcccgccagactgtcagtcgtcgcagatgcgccagttactgtcggcgttgccttcaagactgttagagactggagtataa

SEQ ID NO: 228439 - DNA, 2409 bp, Klebsiella pneumoniae
gtgttcagcccgtcatcgccgcaggcgtcgcacagcctgaagcatcattggcgccacgataaacgctgggacgtgctactggaatctctcagggcatccggcttaaaagcacgaaagaccggctttccctggcgaagagctgtctctgcctccgccgtcgccctgatcttactctgggccgccactctgctggtctcttttatcgccaaccgcgagctggtggcgatcgcacaggagcaggtgcggcaggcctcagcggagaaacagccgctgacggtccgtctgcatgccctgtctgaactgcagaaaacccttgcccggctggaataccggtcacagcacggagcaccctggtacctccgcgctggcctcagccagaatgatgacctgctggcggcgcttctgccgcgctatggcgaaagcgccttaccgctgctgcgtgatgcgacggcgcgccatctggaagggcaactgaacgcctttgtgcagcttccgccggacagtccgcttcgcgagaagagggcaaaaacggcttacgaccagttaaaactgtacctgatgctctcgcgccctgagaggatggacgcgtcctggtttgccaccacgctgatgcaggactggtcgcagcgctcaggcatcgccgacgccgtctggcagggcagcggcccttcgctactggcattttacgctgccagcctggcgtcgcatccgcagtggcgtctgcctgtcgatgacggtctggtcagccaggcgcgcacacggttaattcgccaacttggccagcgcaacagtgagtccacgctttatcagaagatgctcgcgcaggtggcgaaccagtatgcggacttgcacctggcggacatgaccggcgacaccgacgcgtcgcgcctgttcaccaccgatgaggtggtgccggggatgttcagccggaaagcttgggaagagacggtgcagccggccattgagaaagtggtcgcggaacgccgcgatgacatggactgggtgctgagcgacgcgaagcagcctgccgcgcagtcgacgtcgccggaaactctgcgagcccggctggcggagcgttatttcgctgattttagcggcgcctggctggattttctcaacagtttgcgctggcagcgcgcggcgaccctctccgatgccatcgaccagctgaccctgatggccgatgtgcgccagtcgccgctggtggcgctgatgaacaccctgagcgtgcaggggcgaaccggccagaccggggaagccatcgccgattcgctggtcaaatcgaccaggcagctattcaaccgtgacaacccacccgccatcgatcagcagtccggcgcgcgcggtcctctggatgcaaccttcgggcccgtactggcgctgctggacaatcgcgacggcgggacgcccaccagccgtcttagcctgcagaccttcctgacccgcgtcacccaggtgcgtctgcgcctgcagcaggtcaccaacgccaccgacccgcaggcgatgacgcgcctgcttgcgcagacggtgttccagggcaaggctgtggatctaaccgaaacgcgcgactacggcagcctggtggcggcgggactgggccagcagtggagtggttttgggcagacgctgtttgttcgcccgatggagcaggcctggcagcaggtgctgaccccggcggcggaaagtctcaacgcccagtggcgcagcgcggtggtggaggactggaatagcgcttttggcggtcgctacccctttaaaaataccagcagtgaagtctctctcccgctgctggcaaaatatctcaatagcgagaccggacgcatcgcccgctttctgcagacccggctgaacggcgtactgcataaagaggggagccgctggatggcggacagtatcaatgcccaggggctgacgtttaacccggcctttctgcaggcgatgaataccctgagccatctctccgacgtcgcgttcgccaatggcgaagcgggattgcatttttcgctacgtccgggcacggcggatggcgtgatgcagacggagctggtcatcgacagccagaaacttgtctacatgaaccagatgccggcctggcggcggttcagctggcccgccgataccgaagcgccgggcgccagtctgagctggatcagcacccgggcgggcacccgccagtatgcagatcttcagggggcctggggctggatccgcctgctggataaggcggtggtcagcgcttaccccggaacgagcagcagctggagcctgagctggaaagcgccggatggtttgtcgctgaactacaccctgcgtaccgagtcgggggaaggaccgctggcgctgctggccctgcgaaactttacgctacctgagacgatattcagcgtcagcagggggctgagtttgtaa

SEQ ID NO: 228440 - DNA, 681 bp, Klebsiella pneumoniae
atgatgaagaaatggcatatacggaataatctgacccgccagccgggcgtggtgatatcattactgattactttactggtcgtgaccggtttttttatatatcacaataatatttactcttattcacttaccgataaggaacagcagagggtcagtacacttttacaacagccagaaacccgatattttggttactattctgttgctttgcccgcagagtttatcccagcaccagagatgtttatggtcatacagggttcagatatgactaaaattgagagtaaacagcaatattatccaccttttgagcaatttcttgatagatataaagaagaacttaaaaatacacgaccagatagttctgatgatgcgccttatttgaaaaaaaccgaaatattaccatcaggaatgagtggggtattatttgagaggatggaggcacaatattacgctgatgtctcaagggttcttgaggcttataaatgggataatggaattacatttaaaataatgatgaaggccagagatggcagatcttcaaaatacgatcgagacagggaaatttttaaaagtagctatcgttatgatattccagaaaaaaatctattttactcagtgtattatcaggtctgcacccccggaaagataaccagcgcccgcaggggaacaatctggctataa

SEQ ID NO: 228441 - DNA, 393 bp, Klebsiella pneumoniae
atgacggtgaagtatctgaataaatatgggattgaaattaatttcagcatgggtaacggcccttacagggaaactcctttactaaaaaaagatcatcgggtaatggaagggtcctacggtaccacgctgtataaaggtagcaggaaagtgaatggttttgatgccgttgaatggctggtcagagagaatcggatctcggaaggtatccccatgaccagttatacctttacgctgataattaacgaggacagggttgggggagtgacaccgctggaagtgaatatgatatacacctcacaggaaaaaagctcggatgagctattaagtgagtctgaactggttgcagcctggcagcatataacagaaacactggagtaccataaatcctggtga

SEQ ID NO: 228442 - DNA, 177 bp, Klebsiella pneumoniae
atgacctcctgtttgagcataaaatttaagtctggaacgcaggcggcaggctatcaagccgatgatgagttaaaaatgaattttagtaattatctgaatagtaagtataaaaatagcgtaatcgcaaattataataaactaatcaagatatctctcgatacccgtaaacttaagtaa

SEQ ID NO: 228443 - DNA, 561 bp, Klebsiella pneumoniae
atgaaaaaatatagcaaaggaacggcatctttcgtcgcgatgatgatgctttctccggtagcggcgcaggctgctgatggcaaagtcacctttaatggtgaagtcatcgaaaatacctgtacggtagtgaataaagacaagacggtgactctgccgacggtccagcgttcggcgctcagcagcgcgggcgagacggcgggcgtcgttcccttcaccatcgatctgatgagctgtaccccgggatccgatgtctcggtgtacttcgagaaggatcaattcgtttccacggaggggcgactaaaaaacactctgtctgacggcacggaagcagaaaatgtcgatgtggagctgctgaacacccggtttacggcgattaacctcgcggagagcccgacgattgctgcggacggcaccgttgcccgcccttcggtgatcccggtggcggtcgctgagcaggatggttccgcttcgctgcctttctacgcccgctactatgcgaccgacgccgctacggctggaaaagtcgcgacctacgttaactttacggtggtctatccgtaa

SEQ ID NO: 228444 - DNA, 306 bp, Klebsiella pneumoniae
atgaaatcgtatctctacgctaaagatcgcctcatgctgatgatcctgagctggcttaacgccgacgagacgctcccgtcttgccacgattttcatcaggccgaggccctgctctgcacgctacatattccctatgtgctgaagcccgacctggaacagctaagggctacgctgcagccgttactcaccaccgccgggccgcaggtcggtgaggttaacgcatttataagcgccttgctgacgctgtatacccgactcaccgaatataccgccgttgagcactacctgctctcccggcacctctga

SEQ ID NO: 228445 - DNA, 294 bp, Klebsiella pneumoniae
atgaacatcaaattcgtcaccatctccgtattcgctgttgtgtttgtctttgcatcagatatttctatcgccaaatcgaatgccttaagcgatgatcaggtcaggcaaagaattattgatgactctgtcgcatcctaccccggcacctgtgcctgtcccttcaataccgcgcggaacggcagctcgtgcggtggccgcagtgcctggagcaaagcgggtgggtattcacccatttgctacaagaaagaggtaacaaaggagatggtgaaggcgtggcgacaagagaatcaatga

SEQ ID NO: 228446 - DNA, 393 bp, Klebsiella pneumoniae
atgcacgacgatcgcgttatcctggtcgccgtctttaagcatatcaatttcccgcttgagtttctcgttttgcagctcaagacgctcaatatcaagttgagcctggcgctcactggtcgaccgcaaaaggataaggcgagcaagctctttccgggcgctatccttatccgccgtcaggatttctatcccgaacttgcccagcttcacaccctgcagcagatagcgagcgtcaccttcaagatcgcgagtgtcagcaaagaaaggctctccgaccccttcgccattacagcgagggcactcaggatttggatcggcgttgtcgacaaagccaattccgccggatggatctggcggcgcagcgccatccgattcagccttgcgctcagcggatag

SEQ ID NO: 228447 - DNA, 504 bp, Klebsiella pneumoniae
atgttaatgagtaaagctgagtatgcacgtcatcgcggggtaagccgtcagacggtatatgactgggtggcgaaaggtgaggttgtgttgtctggtaataaaatcgacgtagaagcaaccgcacgcagtttgcaaaaggaacaaaaaaaaccgaatgaatgcgctccccgtgtactgagaatgacgtgggggcaatgctgggcggcagttaaggcattggacggcaaaaaaacgagaccttacagcaatgaagaggtagagcggcgtgtattgcgtgctgcgaatgagctgaactgggaagttgagtttctcgaagatggtggaatttacatgtgtgatggcgatacggagttttaccttacacaatacgatctcattcagaacgcagatattgcgattggactccttcgtcgtgatatctgttatggcgcctctgagagtaccgatgatgaggatgaatggagcgaggagggagtggaagcgctggccgagtgggcgaggtga

SEQ ID NO: 228448 - DNA, 717 bp, Klebsiella pneumoniae
atgagtattgaacaaaagctgaatttcagcagaaatctgaatacttttgcggataaaaaagttgagacggcattacaggtttcagggaagattctgcccgtgagtgttgtaagccagtcaggaaagatggtgacagtctcattcgacttacatgagacaccatttcttctgccacaattaacggtcccgatttttgggcctcaatatatccgataccctatgcagaaaggggataaagggatcgtaattccagcagatacctatctgggaggggttagtgggcttggtgggggagtggcagatcttactccaccagccaatttaagtgcgctgttctttttaccgatcagtaataccgagtggcaggatgtcgacggacaggtggtgacggtatacgggccggagggtgtaacgctgcgcgacagcggcagcaatactacttttctcctgaagcctgacagcatcgctatttccacacctgacagcttcaccgtcaccgttggcgggacagttttttcactgacgggtagcaaatggagcctttcaggagatgcaggtcacctgcaggactctgtggccagtaccagcccggcaatcatgcacgccgggtggcagtcgcttctgacatggcttaacagccatgaacactcaaacggcaacgatggaaaagataccggggggccgacttcaacgtttaacggaagtatcacagaatga

SEQ ID NO: 228449 - DNA, 1005 bp, Klebsiella pneumoniae
atgcgtttttatgagatcaacatatttgaagaaaacaaagtcattaaaaactattcaagtcataagaacggagtttacaaccccggcgctttaatggtggagttcgatatacagcaagtatgcttgtccacgcctgccggtgagagccgattaacaatatgggggataagtcccgccgacatgcaacaggcaagacttaactacaataacaaaaaaattcagattttcgctgggatggctgctggattccctttagcagggaagcatggtaaggggctggtcattgaaggagttgtgaaccaggtgtttggtaactggcaggggacggagttaaggctggattttgtaatatttgccggaccagcaaagactgacaaagatggagcagttagctctgaaaaaattacatttccctggtctgttggacagaagttatctgtggcactgacccagtgtattatgcggatgggagggtatagaccaaatataaatatcagtgatttactggttctcaattatgagcgtccgatgttttgcgactcaataactcttctggccagagatttaaaaaacttttctcggtcagtaattagagacccaggatactcaggtgttgagatggcaatagtcaatcaaaatgaaatcagggtttgggataatgactataaaaaccatccatctggcgttaatgagcgaaaaaataatcctctccagattgagtttactgacctcatcgggcagcctacgtggataagttatggtgttgtaagcattttatgtgtgatgcgggctgacatccacacgggagatcatattctcatgcctaaaaattcaaggcctcttatccaggcagcttctttttcccagtaccgtgatgattctgctttccagggacagtttgaagttcagtctgttcgctttttggggaacagtcggcaaccgacagctgattcgtggataacaatcattgaggctcatccagccggagagttgaaagcaaaatga

SEQ ID NO: 228450 - DNA, 729 bp, Klebsiella pneumoniae; identical to SEQ ID NO: 206000

SEQ ID NO: 228451 - DNA, 771 bp, Klebsiella pneumoniae; identical to SEQ ID NO: 205999

SEQ ID NO: 228452 - DNA, 249 bp, Klebsiella pneumoniae
atggctatggcccgcctggcggtagttccaccctgtaatgcggcagataacggagaggttactttctggctgggtgttctcgcatttggtaagcaggctgatgcgctggcgcggcatgtgaaaggcgaccttgtcagcgtggcgggcaatatgcagctcaaccagtggacggagcaggatggcaccgcacagcagggctataagtgttggccgacaactggtgaacagggcagcagagacagctactga

SEQ ID NO: 228453 - DNA, 1032 bp, Klebsiella pneumoniae
atggcgctgaagctattagccaataataacgcaaagagtgtgctcgctgcgggtattagcgcgtccgctaccgttattaccgtgggtactggagcgggagctttgttcccttcccctgtatctgggcagagttatttcaaattaacgataaccgacgcggccacgaaaacaatttatgaaattatgcacgtcacgtctgtatctggtgacgtgatgacagtaattcgtggtcaggaaggaacaacggcacgtgtatggtcaacgaatgacattgtcgcgaatttaatgaccgccgggtcattattatctttcctgcagatcggtaataacctgtcagaaattaaagatgccggagaggatgcggtaaatgaagcccgttataacctcggaatatctgattcctctggttttgtcggtcgttctcttggcgctccaaaagctttctatgcaaacggaacctatacgcgatctcctctggcccgttatgcaaaagtaacgttgaccggtgcaggtggcggcggtggcggctgccaggcctccaacaatacagaaaccttctccggtgccggcggcggtgcaggtgcgaccattgtcgtatgggttgacctgtctgctgccagttcttatgcgattactgtcggcaagggtggtaagggaggtgttggcgcagtaagcggttcggatggcggcacaacctcgttcgccagcctgttctcagcaccaggtggcaagggcggcgtgaagtcaggtgtttccaatactgccggcggcgcaggaggtacggcggcggccggagacatcaggatcaatggtggtaccggctcagatggacagacaggctcaagccttctgacgggcaacggcggggcgtcgtattttggcggcggtggccgggcgggttctcaggccggtattgctggcgctgctcccggctccggcggtggtggcgcgtatgaccttgggtttaccagcacggcttataccggcggcgcgggcgcggatggcattctgatcctggaagaattcgcgtaa

SEQ ID NO: 228454 - DNA, 279 bp, Klebsiella pneumoniae
atgagagacgcgcagcataaaggcggcgtcgtggaaggcctgctgcgccagcagggtcagcgcctgcggttccactttcagcacttcctggccgtcaaattcggcgacggagacgtgcgctttgctgagcagatagtattcggtatcgtcgtgcgccagcgggaacggatcctgataaacaaacggtttagtcgacataatcacttactccataaagataaaaccgccggggtggtcccggcggttatgaatcagaacatcatggacatccacggatag

SEQ ID NO: 228455 - DNA, 924 bp, Klebsiella pneumoniae
gtggaaacgacagacattgttcgaaaactttttgacggtgttgttcctgagagagcatcagagattgaatctatcgctaacgattatgatgcccagttccgactgattgctgaccgcgaaggatttaacttagatgctggagggttctccgcaatccagtacaccagcagatcaatgcgtcaaatgtggcttttcggttatgcgggaaggcaggcgttacattgttattcttcgttgatcgtattgttcaaatcattcggtaccactctcgacataaacgaaatcaacaagattccagatcaggcagcagaagatgaagccttcaagtcgatacttgatgcagtgaaagacctgagcactgcatttcatgaagacgactttgaatggccagtggctattcctgatcctgagaagggtaggccgtcagattcagagcgcgctgcagtatatgatctcacgtgcatggctacggcatatgtatttttacatgaactgaagcacgtaattttctcagctgaaggaaatgcaccggaagacccgaaggacgaagaatatctgtgtgatcagttcgctaaagatatgatgatatccaagatcgatcagtacgccgcaagcagtgggtatcccccggaaaaggttaggatgaagcgtatgatggggatcgctctagcatccgcctttatccttttcgcaacaggaagaaaccgcctcgcgggttcagagactcatcctcccatttacgggcgttggtcggcgactgtgcaagatgtcaatttaccggaagatgactggttctggctgtatttttcctcattcgcccttgcgttgctgaaatatcattcactaaccattcagccgaagatcgtaaaggattataaatcgctatgctttgacctaatcgcagatcttgaaaatggcatataa

SEQ ID NO: 228456 - DNA, 996 bp, Klebsiella pneumoniae
atgtttccagtcggcattgacgtaagtaaaaacaccctggatctttgcatgctttatgacggtatcaaaggacgcataaaaacccgtaacatccagaataacagacattcagttgaaaatattcttcgctggctcaggcttcaacattgcagtccggaagatgttcatgtggtaatggaagctaccggtgtttatcacgaacagctggccactgaattacatgatgccggtttccgggtttctctggccaaccctcaccgtagttgggagtttgcgcgtggcatgggaatcatgacaaaaacggataaggtggatgcgtatatgctggcctgttacgcattccttaagaagccacaccgctgggagccgccggcacccgaaatcagatatctcggtgcactcctgcgacggcgggatgttctgctgggtgatgccctgcgtgaggagaacagactggaaaaatacctgtcgacagacacacctgcagatattatcagttcctgcaggcgtatggcgcagcttctgcgcgaggagataagtaatatcgagcggcagataaaagcacatatcaaagccagccctgcactgaggcgtgattatacactgctgacctcaattaaatcggttggtccccagttggggatgcatatgctgatcgtgcttcgcagccataactttgtatcggctgagcaggctgccgcctttctgggcgtggtgccgatcgagaaacgctcaggcacatcggtccggcgccggccgcggatgtcgaaaatcggcccccctcagttgagagcgaagctttacatgtccgccctgtgcggaaaaatctacaataagcgaatgcgtaatatttacgatgagatgtgcctgcggggtaaacctaaaatggtggccattggcgcgctgatgcggaaactggtgcactggtgttatggcgtcctgaagaccggaaccgtttttaatgacgaagacctgaaaccggtactgtcaacctga

SEQ ID NO: 228457 - DNA, 1734 bp, Klebsiella pneumoniae
atgtcagcagtcctatttccggcgccgctgctctcggtcgagcgcctgtcgatccagtttggtacacagcgggtggtggatgacgtcagctttgcgctctggccgggaaaaactctgtgcattgccggcgagtcgggcagcggtaaatcgctgacttcgctggcgatcatgggtttgcttccggaggaggcacagattccaggcggcgcgattatttttgataaccaggatttgctcagcctgccggagcggcaaatgcagctgctgcgcggcaagtcggttgccatgatttttcaggaaccgatgacctcgctcaatccgctgatgacggtgggccagcagctggaagagacgctgcaacgccacgaagtgctgggccgccgtgaacggcgcagccgggtcagcacgatgctggacgcggtcaaaatcagtcatgtggagaagcgcctgcaacagtatccgcacgagctttccggcggtatgcgccagcgggtgatgatcgccatggcaatgctgtgccagccacaggtgctgattgccgatgagccgaccacggccctcgacgtcactattcaggcgcagatcctcgagttgatgcgcgaactgcagcaggcgttttccaccagcctgctgttgatcacccacgatatgggagtggtggcagaaatggccgatgatgtgctggtcatgagtcacggcaaaatcatggagcaggctccggcaaaaacgctgtttacctcgccgcaggcggcttatacccgccagctgttgcaggcggtaccggtgctgggccaggcgcccgcgctggcgccggtcgaggcgacgcgaccgttgctcagcgtccgcgacctcagcgtgcgctttccggtgcgcggcgacggcctgcgcgtgcgtcgcgaagtccatgccgtcgatggcgtcagcttcgatcttttccccggcgagacgttgggcatcgtcggtgaaagcggctgcggtaaatcgacgacggcaaaagcgctgatgaatatggtgccatttagcggcagcgcgcagcttaacggacaggagctgcacggcctgaaggacgaggcgttaagagcggtacgccgcgatttgcagatggtgtttcaggatccctgggcggcgctcaatccgcgcaaaactattttcgacctggttggggagccgctgctgattcatgagcagatgcccgcagtacagcgcacggagcgggtggcgcagctattgcagcaggtcggcctgccagcggaagcgatgcggcgttatccgcaccagttttccggcggccagcgccagcgcatttgcattgcccgcgcgctggcgctgaacccgaaagtgatcatcgccgatgaatcggtttccgcgctggatgtttcagtacaggcgcaggtgctgacgctgctggaagatttgcgtcagcgctatcggctcagctatctgtttatttcccatgatatggcggtggtggagcgcatctgccaccgggtagcggtgatgtttggcggccagctcgtggagatcggcccacgagatcgagtgttgcaccatccgcagcatccttatactcagcacttgctcagcgccgttcctatacctgacgttcagcaaagacggcaaccccgagccaccagcgcaatgccgataagaccagaaccgatcaaacccatcggctatcagagagtaccgcagcgctttaccgattttggcgacgggcacctcgtcgcctgctga

SEQ ID NO: 228458 - DNA, 1017 bp, Klebsiella pneumoniae
atgagaaaaatacttgtttttttatgtctactattttgttgtagtgaggcagttgcaaaatgtgattattttgattctactggaacggtgttattcaacctaagtccgaaaatcgcaacggatccaacaataccagtaggtacagttttgtataccaaaaaagtcggtaccgggcactataaaacctttgagtgtaataaattactgggggatcagtacattgttgattcaaccgcacctgaggtgccaggcgtcacgggtatcatgggtaagccggtttatgaaacagggattgatggtattggttttcaattttcagatattctggacagcaaacatgggtcaattaaaccagcagttgctcaatcaatgattgtacctataaagagatctaatgatgattatagattcatgacagtatggttaatcaaaacgaagcctgtcattgatacatccggtgtcagtaccaatccggtatttaaattctctgcgggtaacttaaacaccaaccccaggccatctgaccgccttttgctcacagcgaccctaaagttcaagagtatttcgtatagagcaacctcatgtgacatttcagtatcagggcctagccaaatcaccctgaatacaattgaaaaaaatacattaatgtcaatccctcggggcggcacaaccccatcacagaaaactatcacaatggacgtttcatgcccagcgggttcaattggtaataaactttactattggtttaacccagttggtggcaccagccctgcggggaatggtatcatcgataatctgctaacaggaagcggagcagcaagcaacgttggcattatcttcaaaaaagataatagcccggttatattttatgatgcagagacatacagttttgccagcgctcaagcatcgcaacaatttaaattcaccgccgattattatcgaatgagcgataatagcgctgaagtcacggccgggcatgtaaaagcgatgcttgaggtggttattcaggaagaataa

SEQ ID NO: 228459 - DNA, 351 bp, Klebsiella pneumoniae
atgcatcaattaactgtatttgaaatggaagaaatttctggtggcgcgctgactgatactttatctgatatcgcaacctgggcttttcaagaagttagcgccatcgcgcttggggcttctctgggagctcttgcaggtacagcatttgcaggccgctggggtggcgtaagcggtggtatctttggtatcggctccatcgggcagggcgtgggaatgatcgccggggttatccttggtggtgtttgctttggtattgcagcaggtgttgtcggttgggatttgaccctcgagtatgcaaaaatgggcgttggtggcgtgttcgacggcacctttaatttctggagcaactaa

SEQ ID NO: 228460 - DNA, 507 bp, Klebsiella pneumoniae
atgaaaaaaaccaagtttattaactcagccttagttgttgttatgttcacatctttttctgctagcgctcaatggcttacaaaagtggatgatgacctgtttaccggtgggaaaaaggctgtgatgttaggtagcttgtcatcctcaaactcaggactgattttcgattgcaccaaaaataagttgtcagtagcgtatgttgaaacagacaaaacagaggattctgttccgactgttgcaatggatttgatcatcaaagttgatgacaatccaatcaacaaacttgaagcgtctctatctcgacggaacgcccaatcaattgaggttgcagctgatgatgcagaaaaaataaccgttgtgcttaagcaattacaaagcgctaaaacgaaagttcttgtcggtgtgcagacgcgagatggcggtaaccaatcctcattttccggcaatgcatctggttcgaccactgcaacaaatagctttattaaagcatgtgagatatctctgtaa

SEQ ID NO: 228461 - DNA, 639 bp, Klebsiella pneumoniae
atggcaaccattaaggatttatcccgtcaacttcagcagttgcaaaagcagattccattcgccacagctcaggctatgacagctgttgttcgtcagattgcagcagcgcaaaaagtagctttaggtcggaagctggaatcgccaaccccgttcacggtcaatgcggttggttcttcaggtgcccgcaagaacgatcttcgcgcaaaggtttatgtacgagatatcgctgctggatatttggagcctttcgagtttggcggcgatcataagctgaacagctcggctctgcttaaccctaaaaacatcaagctgaacaaatacggaaacatgccgcgaaataaactttcgcagttgaaagcaaagtcaaatgtttttattggcgatgtgaacaatgtcaatgcggtctggcagcgtcgtaaaccaaagccggcgaagaagaagagggctaagcgctctcccaatggcacgcgcaggtctaaaccaaaacagcggtcacctaagctgctagtgaggtttggcgatgcacttcctgtaacgcctgtgttggggtatatggaccgctcgaaggctatggcagaggcgttgatgcctgcagctctaagccgagccatcgttgaggcaatccgcacggcgaagtag

SEQ ID NO: 228462 - DNA, 189 bp, Klebsiella pneumoniae
atggaatatgagtataaaggcatttttgtcaagttctttccgagtttttgctcgttttttgcatactacggaaatggccttagtttttttacttactccagaaccgacttagccgccaaattagccgaagaccttggttgctcatatgacatcgctgaaggtgctgtaagtcatcattatgggcgataa

SEQ ID NO: 228463 - DNA, 204 bp, Klebsiella pneumoniae
atgagtcaagcttatgtttcctattatgaggcttatgatgccaacggcaatgctgtctttggtggcaatgggtacgtgatagcgcaaggcgtgcagttaactaaggatgaattagaggggcacaccaactttgtcttgctggaggctaaaagggttgtaccagcatctaagtcaataatttttaaaggtttatataagttataa

SEQ ID NO: 228464 - DNA, 681 bp, Klebsiella pneumoniae
ttgaagtggctctgtaatgccttagttcatgaaattatttcatctgtctttgcgcagaaaacctttcacttagtgtgcattataaaaatgccaattgcggcatatctctgggaaattgaaatgatccataccgtacacttcatgacagatgtgacagttgcttctgtgtccagccttatggatgtttgcctcaaagcgatatcaagccctaaccaaccagcctctgaggtcaggatttacatctctagtaaaggtggagataccgttgcaggttttaccgcatacaactttcttaagtctcttcctgtaaaggtgaagacacataaccttagtaacgtggaatctatagcaaatgttattttcatggctggatctgagcggtttgctaatcctctctcgcgatttttattacatcctttacattggggatttgccgccccacaagcagatcacctcaggcttagggaatgggcggcatgtctggatgacgacttgcaaagatttgtgcaggtgatgaatatcgaggctctcgctgtagccccagatgagcaaattgactgggctaatttgatcacttctgcaaccatcattgatccgggaagggccaccgagttgggtataatccagaatgtcgaggctgcaaccatacccgcagattcgatcaggtggtgggttctgtaa

SEQ ID NO: 228465 - DNA, 270 bp, Klebsiella pneumoniae
atgcgaatgataaccagaaagaagcccgcctttactgagctgtatcagaccggcgtactgactcgcatagccgccgtaaaaagtcctgagggcggcggctggcgattgttcggcttgtggcggggtaaagatatagctgtgtttgtggaggctgctcgcggagggatttgcgagtggtctggtctggactaccttgctaacttctgcgcgagctgcggcattagcctgtgggaagttcacaacaaggtcgccgaaaaatcccctcaatga

SEQ ID NO: 228466 - DNA, 777 bp, Klebsiella pneumoniae
atgaccaataaccagttaacagatgcgcaaatttcaaacgcgacactcattcgtttaattcgatgggctgatgagcataaaagccactacgttgcagctgcgttgcgagagctacaggaacgccgcaaggccgacagcgagccggtggcgtggacatggcactatcgtgagcaatggcatgttacaaacgacgaacgacgcgcagaatttgtcgcaaaagatggtgatgtagctgtgcttccgctctatcgccacgcgcagccggtggcggaagtgccggaagatgtgctggacgcgttgcagaaggttgcacgtattcgcctcgacctgaatgacttcgacggcgatcgccgcggtattgctgattgcctgggtgatgccgaagaagcgctcatcgaggtggtaaaccgccgcgccgccatgctccaaggtggaagctctccggcgcaatccaattgctacccggcgcaaaacggcgtcgctccggcgcaaagcccattcgatcacggttatcgaccagagtgcgaatgctcagggtgcaaggccacagccagaatctgcgctgaattatctgctaactcttcggcaaacccggattgttggtgcctcacatgccgacctgtggtcttgaacgatatgcgctttgtggtgtgccctgattgcgggaacaagagatgcccccgggcaaatgaccatagaaatgcctgcacaggaagcaatgagcctggtcaggaagacagcgcatatccggatgccccacgggaggtgaaaccataa

SEQ ID NO: 228467 - DNA, 396 bp, Klebsiella pneumoniae
atgaacaacgacggattaacactcaaccaactggcagaacgtaatgccgtattggtcactgaggtcgagaaattacgtgccgagcgtgaccaactggctgcggagaatgtggcgctgaaacagttccctgaacagatagttcagtttatcggcggccttgggaccagtgagattggcatcgacacgaaagagaaaatcgggttggcggcaatccgcattaaaacccctgccaccgatcgcatcgtagccgggattaaggctgatggggtggagatgttcgctctgatgtttgctgaagaggcgatcaaagacaacaacatcacaaccggctggaaagccagagcaagcagagcggcctctgaatacgcagagttgctgcgcgagggggccaaatga

SEQ ID NO: 228468 - DNA, 564 bp, Klebsiella pneumoniae
atgatcattccgtcaaagttaatccgcgccgctctggtgtgtgtagccaaaaacgaccctcgttactacctgtgcgggatacatatcacaccgaaatatatagagagcactaacggtcgagtattgttgcgcatggaacatggtatccggacaaagagggatatcatcgtccagtttgaagggaagatgcctgctaaggctgagacaacagagtttgtctttaataaagaaccactcgcgattcatcgtgaccagtatctaaatcgactggctattaccggcattaaattgatagatggtcgttttccagatttgggaaagattatccctaaaaaattcaacctaagcgtcaatccagtcattcaggctgaatacctgggatatccgacaaagatgttcaattgtgaaggtaactttattcccgtgcaaatttggccatctggcgagcttgatgcagtgaaaataaagttcaacaaagaaatcgacaccacctatggcaatcctcaattcatcgttatgccctgccgtgatgattactttaaggttaaggaacaggaatcatga

SEQ ID NO: 228469 - DNA, 225 bp, Klebsiella pneumoniae
atgaaaatagaattcaatgatcaagggtcggattcagtcatcacactaacgagcactgtatttgaattccgccttcacaaccgtgctgttgacacggcgctatttcttgccccttccgttcgtgccaagcgtagcggtttctttgttttaaaaacggttattaccggtaaaacctctcacgtactgcgtgcgtataaagcgattaaagcggaggcatcacgatga

SEQ ID NO: 228470 - DNA, 276 bp, Klebsiella pneumoniae
atgagcgacttactcgaaatcaaggtaggccacacataccgggcaaagcggccgcgccctgctggcaccattatcagcccgctggtgaacgaccgtaccgttacctggttcagcaggtcacacgtccagtacgacagcccgtccgtttcgtttgggcggcattaccccacagtcaccatcgagaagtttcgctcatgggcttctcacgatgtgaccgacgaacttcctcagggtgagtacgccccgtggccaattaaaaaggcaggcatagcatga

SEQ ID NO: 228471 - DNA, 486 bp, Klebsiella pneumoniae
gtggtcgccgaacgccagcttgctggtaacgcgcacgccgtgggctttggtctgcacgccgttgaactggatcccctgctcggcatcgtaacgctcaacgccctgcaagccgtcgaagaaatcgaaatgccaccatgcgcgacgaaactcgccgtcggtgaccacgtgcaggccgcagtcgcactgctgctggaccagatgacggatagcgttattctcaatttcgcgcagctgaccggcgtcgatcagcccctccgccagctgctgacgcgcctgtttgatactgtccggacgcaaaaaactgccgacgatgtctgcgcggaacggggcctgttgacgttgcatgctgtctccttagcggtgggcgcgttagttgcccaccgtgatagttcattatttgaatttttagacttctggatggctatatgtccagatactggcatgcaggtcgacgggccgcaaacgagaatatttcatggtacatga

SEQ ID NO: 228472 - DNA, 732 bp, Klebsiella pneumoniae
atggatttattgattttattagctattagaaatatcctaatcccatatactgtaaatgctctcccccttaaaaatattaatattttgacaatcggcattactatgactaatattttcattaatactgaaaacatatttcttaatcgaggtgtttgtgaacttcttatcgaggtcgcaaaggaagaaaacatctgtacacctttttccattttgcaatactcaccagatactctcggtcagattgatatgctgtttacggaaatgacgaccggtgaacattatctatgccacccggttttcaaaaaaatccccgaacaaacgtctatttttattttcgttcccaccgatagtgctgtgcaagttgatcggataccgtattgtctacgtgatgctacttttattagtatcaacaccggattgcaccgtataaaaaatcagattgcgaaacatctcatggagtcaacagcgtcaattgatgatcaccaggtaaaagacagcagacgctgtgtaaaatgccctcgattaacattgaccaaatcacaactttatattatcgatgcgatcagaacgggaatgaataatcagcagatagcgcaagaactgggtatcagccataaaacggtcttttcccataaaatcaatatcatgaaaaaattccaaatagccaccaaacaagagttaacgaaattctcatccgttgctcttgcgctgtcctcaggaaggatcggttaa

SEQ ID NO: 228473 - DNA, 537 bp, Klebsiella pneumoniae
ttgcatattgagactcatcgcctgcgtcttcgccctgtcatggctgaagatgtcgccgatctttaccgaatttatggcgatccggcgaccaatacctttaaccccgcaggaccctacccggatattgactatgccagtacggttctccagcgctggcttgcccactggcacgatcgcgggtttggcaactgggccatatcggcgcgtgatgccccggaaaaaatcattggctttggcggcttaagtattcgccgctataacgatgtcatcatcaacaatcttggctatcgattcgcaacagaggcatggggaaaagggctggccaccgacctcgcgacctcggcggtaagatatggcttcgaggcgatcaaactcacggagatttcagcggtggtgagggcgaatcatctggcttcgcgaaaagtgctcgagaaagcaggcttgaggttcatcaacgagattgccgatatagaaaatgcgccgccgagtctgctttattcgttgaccttaagcgagtggttaagccagtcggggtaa

SEQ ID NO: 228474 - DNA, 894 bp, Klebsiella pneumoniae
atgatcgatgacatccgctacctgatagtctttgccaaaattgtcgagagcggttctgtttcaggcggcgccgcggcgttagggttgtcgaccgcaacagcaagcgcacatttatccaggcttgagaaaaaccttaacagcgctttgctctacagaaatacccgaaagctttctctaacacaagatggcgaaagtgtgctggagaccgccaggtcaatgctcgagctttatgaaaaaggcgtcattgagtttaagcaacgttcagtatccacagtcggtaagctgcgtatttccatacctgccgtttttttaaacagcccattcactcaccatcttgcaaatttcattaaagagaacgcggatattgctctgagcatttcttatagtgacctgcgcgaggacattattgccgacagtattgatgtcgcctttcgcattggcgagctccccgatagcgctctcaaggcacggcacctgtttgttctgccgcgaaagctggtggcagcaaagggctttctcctgcgctatcctcccgttgatcatcccgctatgcttgaatcaatgccgtggattgggctgacgatgagggagaatgtgcgcgagttcagacatcgcaacggcgaacgggcgataataaagtatacacccggcgtgtatgtcgatagtgttgaggccgcctatgcccttgccagacaacaaattggcctggccgctccaccgcgttttctctgcgaagaggatatccgccgcggcgacatgcaggaactacttcctgactggtcattagccccgctaaaagtgtatgccctatggcctggcaatatttcagttagcggcgcggcctataaactgattaattatatctataatgccgttgaacatcagccgctatga

SEQ ID NO: 228475 - DNA, 603 bp, Klebsiella pneumoniae
atggttttgatccttactatgcttatgtttgcgctggccctgtcattttcgccaggtccggttaatatggttattatctcttccggcgctgcgcatggattcagaaaaacattttctttcgtctcgggcgccactattggttttacattgttactggtttttattagttttggactctacgcggccatcgcaacgcacccccggttttttagctatctgaatatcgttggttcgttatttatcttgtttcagggctataaaattgccacttcacatccggaatggtcactgaaaaaagcacaggcgccggggtttgcgcagggttttttaatgcaatggctcaatcctaaagcctgggctgcctgtgcctctggcgtcgccttgttttctgaaccctcgtcgcgcctgagtatatcgctatttattatcatctacttttttgtctgctatctgtccctggcggcctgggcgatattcggtgataaaatgtcagcgattctcaaaagcagagcacagatccgcctgtttaatctggtgatgggcggattattgtgcatgactgcgggttacatactgtattcgcagtctattacctattcatag

SEQ ID NO: 228476 - DNA, 363 bp, Klebsiella pneumoniae
atgatttacgtcattacggacaaccagtttctgtacgtaggaattgagttacttctttgcaagcatgagatagctgcttcgcgactatcggtgaaccacctctccaaccatgtgatatgcaaggataatatttacttcattgaacgtcctctccatgaggaaaacgtccaatttctgagtaaactctaccgttcaggtgcgcgtttctgctttttactgcaacatgcgatagagagtgtcagaaatgatgacacacagtttatcgacatcacgacacggttaaatatttttacctataccgtgttgaaaactatatctggcagtgcaaatctgcctgcagcaaatatgaatcgccacggataa

SEQ ID NO: 228477 - DNA, 1539 bp, Klebsiella pneumoniae; identical to SEQ ID NO: 182325

SEQ ID NO: 228478 - DNA, 348 bp, Klebsiella pneumoniae; identical to SEQ ID NO: 182324

SEQ ID NO: 228479 - DNA, 507 bp, Klebsiella pneumoniae
gtgtcacccaacaggctccagcgacagttcaatccggatgctcctgatgagcgttgggtaacggacataacctacatcaggacccacgaaggctggctgtatcttgccgttgttgttgatctgttctcacgcaaaattatcggctggtccatgcaatcccggatgacaaaggacattatcctgaacgcactgctgatggctgtatggcggcgtaatcccgaaaaacaggtgctggttcattcggatcagggcagtcagtacacaagccatgagtggcagtcgttcctgaaatcacacggcctggagggtagcatgagccgtcgcggtaactgccatgataatgcggttgcagaaagttttttccagttgttgaaacgtgaacggataaagaaaaagatctacggaacgcgggaagaagcccgcagtgatatttttgattacatcgaaatgttttataacagtaagcgtcggcatggttctagcgatcagagtaagcgtacagcgtga

SEQ ID NO: 228480 - DNA, 279 bp, Klebsiella pneumoniae; identical to SEQ ID NO: 194241

SEQ ID NO: 228481 - DNA, 435 bp, Klebsiella pneumoniae
atgaaaaagatccttgtatcctttattgccatgatggctgtcgcttcatctgcctgggctgcagagacaatgaacatgcatgaccaggtaaataatgcccaggcgcctgcccatcagatgcaatcatccgctgaaaaaagtgcagttcagggggagagcatgaaaatgatggatatgagcggtcacgatcaggccgcaatgtcccatgaaatgatgcaaaacggcaattctgctgcccatcaggacatggctgaaatgcataaaaaaatgatgaaagccaaacctgagaacacccaagaaactgctaagccattttccgaaatgagcgagcatgagaaagccgctgttgtgcatgagaaggcgaataatggccagtcttccgttattcatcagcaacaggcggaaaagcatcgcagccagatcacccagaattaa

SEQ ID NO: 228482 - DNA, 225 bp, Klebsiella pneumoniae
atggcacacgtgaaaggaaaaatccagcagggggcagggaacgcctattttgcagggatgcagtggcgcggtattacacttggacacgccgatgctgcagcgcttaatcagtttgatatcgatatcagcaaagctcaggcacccgaagcacgcacctggttgcttcagaacaaagcagaattcatcgctctgatcctgggcattgaagtcgtaaacgtcgggtaa

SEQ ID NO: 228483 - DNA, 381 bp, Klebsiella pneumoniae
atgaacacacagaacgtcaacgtcaaaaccgccaccaaagaatctaccgaaagatgggttgaaaaccttctggccaacgcgattagcgagcaaaaaagtcttctgctgcatctggtagagcttaaaaacaagcgtctgagagaaagcgaaagaagtgaactggtgtggggaacgttgatgcgtatggctgataacgtcctgggggcgggagtggttgactggcacgcggacgttctgcaggtgcatttcggcgttgctcaaccgtggcttcagtcccggaaaatcgttgagcttctttttggtgataccggtaaggaagtgtggaatgacgcacgcaaatacattgctgactcaatgcgcgctgaacgccatatgccatga

SEQ ID NO: 228484 - DNA, 231 bp, Klebsiella pneumoniae
atgaacgtatccattgtttcaccttccactgaggctgtaaagccccgccgtcatcagcgcaacctgcgtgatgatatcgccgcacaggagattgacccggcgctgaaggctttcggacggcatattgcccggagcgttcgcaaggggcgtggtgtccatatccccgcgatgaacaacaccgccttcggacaggtgctccgcacgcttgaactcaaacgcgcatgtaactga

SEQ ID NO: 228485 - DNA, 528 bp, Klebsiella pneumoniae
atgaaggcagcggtcacaatgttgctccgaaaaaatggagatattaatgaggttagtgattttatgaactgtaaaattttgtctttttcgctgttgttcggcctgccgttcatggcatcaggaacatcccttatagtgtgcgagcctcaggataaaaatggcaatacagactccggaatctggcctgtaccttatctattgaataataaaatctgttttgatatgcgtattgactcaggtaacacctgcgcaggaaatggcagaacagcaaactggtttagtcgaggggtgattgtgaccgtcgataatgaatcgaaggggcggaatgatacttttttcagagtaataaaaccggtgataagcgataaagaaataaaatatattgtagaggcgtcaagagacggtagttcatggtttcaaatatcacatgtttcaattgaccggctttccgggaacgctatcgattggctgattaaagagcacggaggaacatcataccaatgccatctggaaccccccaaaatttaa

SEQ ID NO: 228486 - DNA, 1143 bp, Klebsiella pneumoniae
atgtcagatttacctaagagcattcaggtcatttttaacaataacccaatgctggagagactgattcccaacccagtttgcatatctaattccccattggattatgcattcgatcaaatccttaaaatacatagaattggaacggaaaaagatactttttacagggttgtttttaaaaaagactcatccagaaatctaatgaatattagcagtggtgagttgcgaggattgtcaacgacaacctgtattgagagagggaaaataagtgataccgcaggactggaaaaagtaaacatagataatacttattgggttatgccagcattacttggcataggtttgtataattctatttacactaaattatcctatatatctaatctttgttctgacattagaaaccatcaactcattgaagagcaatcaagatttgaaagggtttcagagacaattgttgataccttcagaagtataccagaccttgcgtttgaccgttcattgagggatatctatttatcccgaatagttaggtgcaatgacgattgttttgaaatatacatatcacaaagagagcaattcaagaaattattaaaatccgaaccagaataccactctacgggattaaacgcatatataaaagaaaacaatataaactattaccctagtgtattcttcgagttcgatgttctaacacactctgttttttcagtttttgaacgattagttgcaggtagaatttgcgaaataataacttgcagcaactactctgacaacaatattaataggcataaagattttatattaagaattaaacgtgaactagaagcattgatgaactatcgactaactgctttcaataacttcatcgaagaaaaacagtgtgaaattaacaacaactttaatctgagcgactatgagcgcgaagaattgaaaagcgaaataaatcggcagaaatgttttttggagaaaataaatgctaggttagatgatttactggactctaagtacaatagctttgacattctatctcatgtaatggagcaagatgaaataaatattttacttatagatggaaaagtattgataagcaatccagatttaacctcaaaaaagaatttaagggacatagacgatagatgctga

SEQ ID NO: 228487 - DNA, 588 bp, Klebsiella pneumoniae
atgtcactaatgagcgtcagtcagtacgcgaaacatgccggaatgagccggcaggcactgtataactgggagagccatgaaggatttccggcgcgggttgacgggaagattgaccaggaggcctgtgatacttatctggcccgataccgcagtgccagtgacccgcgcacgaagaatgccaggggcaaaatcaagtctgctccagcaggtcaggcgcaggggaatacgctggtggaaatgagtgttgcggagattaaacgcatcatagcgtcaggcgtcaccaaggtggccgggatggaactggacgaacgagcccaagttgctgcaaaggccgtagagctgtttgtaagcgaaggcccctataacccgcctgtgacgttcggcggctaccggctgtcgattgttgaaacgccagacgatgaaatcgggcagatcatcgcgggtggcgcgttcggcctgtcttcgtatgatgtggtttacgagtgccgggattacaccctgactctcatgagcgatgaaaccgaagaaacagccatgcggagggttataccttcgttgctgtatgccctggccgacgataccgactaa

SEQ ID NO: 228488 - DNA, 1875 bp, Klebsiella pneumoniae
atgagtaattcattcgattttgaactggttgccggtgatcatgtcagcgaagcaatagcacatatcgacgaggctgttcgcaatcttgaacctcaactggagaagacccggaaagggttacagttgggtggacaggagacgcttgatgggctgaatgggtataactccagactggacatcatggccagcacggctcgcgataacgttcagtttatcggagacatgatccccccattaaaaatagtgggggagatgtcgtctaaaattgccggaatggggctggcaggtggagttgttggggccgtcggtggcgtggcttacgcaacgggtaaacttgccgagagttacaaggaggcagctcggggcgcttatgacctggacacccatgcgaaaaatactgcgatgagcgttcaggatttttcccgcctttcaggtgcccttcagcttgtgggagccgatagcgaaagcgctgcttcttccattgagggaatctttaaatcactcaacgaggcgaacagtgcgggtaatgctgttgtcatgtctgctatggcgcagataggcgcacaaattgagaaaaacaaagatggttcggttaatacgctaaagacgcttgaatccatcgcaaggattttccctaaaattcgtcctgaccagcagaagtcgttcgctaatgccatggggttaacccctgaaatgttgacactgttgcgcgaaggctcgaagtatgcagggtttctggcaaaagcggataaggtaggattgacggtggatcccgcccttaaccagcaactgacaagcttcgatgttgcagttaaggaagcgagcgcttcctgggacggattcaaatcaaagcttgaacgtaaggtttatgcctctattgataccaatggccttaccgatatggtgaatggctttacggatatgctggcgaataatttcgacaacatttccatggggcggtttgccggacaaaacaaaggcgacgactcagagctgatgcgcagagcgctggcagatcctgaattccagaaaagacttaatgggaatgaaaaaaaccagctaactgctggcgttatgaccgatgaagcaaggaagaaatatcaccagtatttttataaccaggatcgatcccggcaactactgagggatgtcaacgctattacccgacccgctcctgtacgcggtcagatcccctatagcccggccagtaaaaacacaccgggatttcgaaatcataaccccggaaacctgaaagctgcacctaactcaaccgggaagaggggcaaattttccacatttgccagcgatgatgatggtctgtcggctatggctcgccaactgatgctttatggcgatcgtggaaataatactcccggtggaattattcatacgtatgctccgagttctgaaaacaacacgcgtgcatatattgacgatgtgacctcaagaaccaggtatggagccgatcaacggcttgaccttcataacccggaagttcttaagacgctgatggcctcaatgattcagcacgaacagggctcacagccctacactgaagagcaactgaaaaaggcgatacagtcagccattatggatgatcagtggtctggacagagaaaccccgaaaggttgacgcagcagcgtcgggatatcatttctggcgccggaggtggaggacgatcctcttccatactgtctcctgcggacggagacggtaatgttaacgtaattatcgagaatataacccgctcccttacggacgctcttgcagaacaaccattgagactggaaataacgatgattaacgataaaggcgagcggaaaacgtacaacgttgaaaataatgggaaaatcattacgcccatgaactattga

SEQ ID NO: 228489 - DNA, 483 bp, Klebsiella pneumoniae
atgaactttcagcacctcaacaagccgcaatctgatgcgcaggcatatggcttttccgggcgccgtatgcagcgcatgcgccagcttcagcaatcggttgaagaagaggaactccctgaatgcgcccattctgatgctcatctgatagcggtgagcaaagaggcaaaacaaaatccgatacaggcatttcatcttatcgcggaagggatctcacatcagcaggctattgccagactaaaaggcagcgctcgccagctcagtcgttttacccgtcgggctatggagaaaatttatcctggctgggagttccttgatgccgaagaccagaacatggcggcattccagcacagcatgattaacggtgacacaaacggctatcgtgcaggttttaatgctgccctgtcggcgctggagaagtttgtagagcccattacgtttgatgacatcaccaatagcgttaattcgctggtggaggaagcatga

SEQ ID NO: 228490 - DNA, 777 bp, Klebsiella pneumoniae
atgccgctaatgaaattacctacatgggcgctaaccatgttcggtatgaaagataagaaaaaacagccacaactctctgaggaaaacccatccatgttcgatttctcgcatctgtcaggaaaaaccaaagcgaaaggcgagtccgataacgggaatgcaccactgaagctggacagtgacgacacccggatcaccagacctaagcagcacagtcgcggccacaatgtcgcggtttccccggaggcaaaaaataacccggttctggcggttcgtttgttgaaggaaacggagctttcttcgaagaaaataaagctgcagctggcatcgtcgccgatggcgctttctgtgtttacccaaaagtttatggaagagaatgacccgacctgggaatttcaggacgacgaagagaaagctcgatcggcgctaacgttttcaacgcagaaccgtgatgcaaatggttactctgctgcccagagtagcgctctgaaggcgctgaagaagatggaagagcctctgacagacgacgagattaaagcattagccagcaaggcatctaagatgcaaaacgactatgaccctatgtcacctcagaatgtgaatgctcgccgtaaggctgacgaagagtaccgggaagaggtcgcgcaggcagctgcacgccgtaacgatcgtatccgggcatctggtgtgagcctgccgggagatacccgtcgcgtgaatggcaagattgaagggccagcaggagaagccgaacgccttaaatcacaggttcctctctga

SEQ ID NO: 228491 - DNA, 177 bp, Klebsiella pneumoniae
atggcagtaaccagcaaaaagccgattcttgtcgatcagccgattctcgaaggtttacagcgccttcgggatgatgaatgccgacgttctgccgttggcgcagccccaagcattcaggagctggcgcgtcaccttttgcgccagggcatccaccggcatgaggcgggcaagaagtaa

SEQ ID NO: 228492 - DNA, 1605 bp, Klebsiella pneumoniae
atgcatgaaagaaaagttggaaatatagggcagggggattttataaaactctgcggtgatgcaggtttagcatgtgggacatctcaaggtgatgattgcgctggatgggatttttttgtggatttcccattaaaacaacatgacagcatattgattgatggagatgatcgggctatagaatgtaaagtgcaggtcaaatcaagtgacaataagaataaatccgttcaggttaaattatcaaacttgaagcgtttttgcgattcaagtttaccatgtttcttttttattgcagagtataatgggaatataaatccagacaatatatatcttgttcatacagacgatgatttgatttttaaaatccttaaaaggcttagagaaaatcaggcgggagataaactcccattaaatcacataacaatgaacatcccttatggtaaaaatgatgagataaaagaattctcaggtaaggctttgaaggaaaaaatagagtcttacgtgaatgaaggaatgaatgcctacgtcaaaagaaaagaaaaacaactaaagacacttgggtatgaaaaattaaattatgaaatgaaatttgaaatagattcaagcagtgaactcatgtcacttgcaagagcctctcttggctatccagagaagattaatataagaaatatggtttcatggagtaataggttcaatataaaattattacaagaagaattaactcaagaaaaagcaattatagaaatattgaatgttcaaccagtcacaactggtgaggcggttttcgaaagtgctggtgagaccgtgtcttttccatgtgaatattatttttcacctttttcaaaaaaagcatctaatgctccagtgcttcgcgccaaatgtgataatgtcgacattttattcaacagtgacaatgtaggcacgaaagttacatttttggatcctggcaaggccattgatatatttgaaatgaggaatgtattacttactataaaaatgttatttattgatgagtcaccggtttcattatatctaaaaaagagcgatgaaaaaacatccataccacttacaattagaatctcggatagcgaaaataagaacaataaaaaagatcttcttttatcaattactgcaatagataatttaatatctcttgcagtcaaaaatagatttgaatcaaaaataaaactaagcatgaatacgctaaagaacaatgctgctaatatcattgccatttataattttataaatggcaatgatagtgttgaaagtaaatttccggctatcaacataagaactgaggatgatgaactattatttgatgttaaaaaggatatgtgtgtgatttttgctatatctttgtcatttgaatcaatatttttttcattcatattttcagcgcgaggctttttggaagaatgtgatgggaattatattcttgagcaatataatttgaaccttgagagaagaattacaggcaaaagtaaaaaggatgctttcggtgatcttaaaaaacaaataaatttaatctgcgaagaaaagatattgaaaaacgcttatgtttttaatggtgtaaataataaaattatgattaataatgatctctaa

SEQ ID NO: 228493 - DNA, 1749 bp, Klebsiella pneumoniae
gtgacagacaccgtaatcaaaccagaagaaatttccgacgcgctcttttcctgcgtgtattcctgggtcaatggccatgccatcgacaagaaaggggcagatgctgccgtagcacgccaccgtgacagtacttcgccttatggtgttctggcgcgtcgtctgtgtgaatttgttgccggtagtggcccaacttacgaagaattatgtgatttgggtctggtattgaccgatgccagcagacaaaaagaaaaccgcattgcgctggtggcagaggttatcggcgatgaggttaaacagcttctctgtgatgcagagcggattaaccggatattcccgcaaccgaagccggagaaaaagaagcgtgtcactgatgcggccacgtcctcactcaaccagatgggcccaagtcagcgcggggaggtgcttcttgatcactatggtggattactggcgcttcaccaggaatcggacacagtacaccactataacggggtgatatggacgccgatcagcgataaggcgcttgcccgccagatggcggcaatatttattgaggctgatgcgccatattccatgacggccatgaagaatgcggtcgatacgatgaagttgagcctgccgccgatgggagccacagaacgtaacctgattggcttctctaatggtgtttttgatacccggaagggggtattccgtccccatcagagagaggactggttactggtcgccagtgaggttgaattcgggaaggtgactcagggggagacacttgaatcccatgcgcctaacttctggcgctggctgcagcatgctaccgcaagaaatgacagaaaagcgtcacgactgcttgccgcgctttatatggtgatggctaatcgctacgactggcagttgtttcttgaagtaacgggccctgccggcagtggtaaaagcgttatggctgaaatctgtaccatgctggcgggtaagggcaatacgcagtcggccagcatgtcagcgctggagaatcccaaggaacgtgaattgctggtgggatactcgcttatcgtcatgccggatatgacacgctacgtaggcgatggcgcagggctgaaagcgataaccggcggggataaggtatcaatcaacccgaagtacagacagccctactcgatgcgtataccggctgtcattctggcggttaacaatgatgccatgcggttcagtgatattggtggcgggatatcaagacggcgggtgatttttaatttttcagatgtggtcagtgaggatcagcgtgatccaatgctggtggaaaaaatcgagtcggaactccctgtgattatccgccacctgttaacccgtttcgtgaaacaggacgaagtgaaacagcttttgcgtgaacagcaacgttctgatgaggcgatggaggttaaacggggtacagacccgatcatagacctttgcgcagcgctgttttttatggatgaggccaaaggactgatgatgggtggtggccattattctgcgctggagccgaggaagtatctttatcacctctatctggcttttgctgaatatcacggtattaagccgctggcggtcactaattttggcaaggcgataacagccgcagcgcgggaatatggccaggaatatctcaccagaacgattaaggggaggcgtcagaccaatgtcggtataagtgagctggctgatgaatttatgcccagagcatacggctctgaacagccaagggacgaacaatag

SEQ ID NO: 228494 - DNA, 372 bp, Klebsiella pneumoniae
atgcataacccggcagagttaaacgaatcgcttgaaaggcgtatagacctgctgactgaaaaggtgctgttccttgagcagcaggttaaatcactgactgacagccaggggggagaaatacccccgggtatggcgccggtatctactctggccgctgagttcggtatttccaccaaaaaggcggaagagctggcgaaaaatactggcgtgatgatggtgaagttaaaagcgggtggctttgttgcgccggaagagaaattcagagaagtggccaggcaggtgttgcgtagcgctaaacgtaaatacggatcggcgtactggtatcacccgttgttaggtaaattccagatgagtggagggatcccgaagtga

SEQ ID NO: 228495 - DNA, 198 bp, Klebsiella pneumoniae
atgtctaatctcgaaatattgaccccgaagaaggcgaaatcgcgagctttacagctttcaactctgcttatggtgatttcagagaactcggtgcaggagcacgaaagacagcatctggtcgagcttgcgtacgacatttcgtgtgagcttgcttccttcatgcttgatcaagaattgccggaggtaggccatgcataa

SEQ ID NO: 228496 - DNA, 279 bp, Klebsiella pneumoniae
atgtataaccctcagcctaaaaactttacctggctttttctggccacttacgccgatgctaaagcgctccctgtcgttctgcgtactcaggctaataccgaagatgaagcccgttcacagcttagtggcgatttttctctgacattcgcggcaaaaatccgttccgattgtcctctcacttgtcattggttggatcgggatagttctgttttgtggtctgtcatgggctgcaatgctgacgcctcacttcagcaaatgaagggggctcgcaatgtctaa

SEQ ID NO: 228497 - DNA, 201 bp, Klebsiella pneumoniae
atgagtgatctaaccgtccagcaggctgctgataaagcatatcaggcagaaattattctcgccctgatgcagggaaagtcggctgtgcgcatggaagatagcgaaattgacgcgctgatcgtgatggttaaagagttgatcggcgatgtaggtagttttcttggtgaagaagcatcacgtgaggaggtggaaaatgtataa

SEQ ID NO: 228498 - DNA, 207 bp, Klebsiella pneumoniae
atgcgtaaatcaataaaaatgcttgttgttcatttatggctacccgcccctgaaaatttcacagggaaagtgcttgtgaatgtcgaaaaaggcatagctattaacggatttccgttaagaccagatgagttcgttggttccgtcgatagctttattgaatgttgccgcctgacagggctccagattgtagaggtacaccatgagtga

SEQ ID NO: 228499 - DNA, 813 bp, Klebsiella pneumoniae
gtggaaaagaaaaaatttactgccttaactggcagcggccagactcaccctgaagccagcaagaaggataattccggcaataactttgcggcgcgaatccctgtaacgcttagcaatattggcgggaaagaaatccagtcagttcgtgggcgaaaacttcactcttttttggaggtaggccgagatttcaccacctggatcaaagcccgcattacccaatacggatttgttcaaggcgtcgattatgtgattgtcgaagatttgacctccccgaaacgggggagctcaaaatctcgtcaacgcattgagcacgattacattctctctttgaatatgggtaaagagctttcgatggttgagcgcaacgagcaaggcaagatggctcgtcagtacttcatcgactgcgaagaacgcctgcgccgggtcgcccctgaagaacatgaggcggcgttgctgacatggcgtaaaaatcgtgtagcagcttgcgaagatcacaaaagcatggccgaggcgatgaagggctatatcgaacgcactggagataagcagcacggctttgcctacagcaatgaatgcatcttcctcaatagccttgcgctgggtatgcacccgcgagcatgggcgaagcagaaagaaatcccgttaaagcaggtgcgcgaccacatgaacactgaacaactggcgctgctggcctatctggaaagccgtaactgcgctctgctagatctggataccagtacggcaacccgcaaggcgaaactcactgaacttgcacaacgttggctggttaaaagagtgggaggaacagcatga

SEQ ID NO: 228500 - DNA, 225 bp, Klebsiella pneumoniae
atggatgaaaaatataaaataattcgtgcgcgagaagttatgaatctgattggttttcgcgcaaggtccagttttgattatttttacaaagaccctgaaaatcacttcccggctccggtgaatataactaaatcacggtatggatgggtgtcatctgaagtggatgcgtggctggcggaaagactggaggccagaggccgtaacaactcaggcaaggatgcctga

SEQ ID NO: 228501 - DNA, 1014 bp, Klebsiella pneumoniae
atgctggccagagggattgatccgaatgcggtgaaacgtgagagcgccagagaagcaaaagaggctttatccaatactatccggcaggtcgcctttgactggctggaacttaaaagggagcaaggtatatcccctggaacctacaggcgtctcgccatgacggtcaaaaaccatattgttgaaaaatttggtgaaataccggtcagtcagattacgccaagaatggtgataaattccctgcaaccggttaaagctgctgggcatctggttcaggttgcacatattgcccaggtgctcaaccgggttatgagttttgccgtcaatacagggctgattgatgctaacccgttgacgaaaatttctgctgcctttccctcgccgggtaaaagtaatctgccagcaattaaaagtgatgaattacctgacttactggccgaaatgcgcggggttgaggctgacccgataattcatgcttctcttgactggctaatgctaaccatgacaaggccttcagaggcaatcgaggcccgatgggatgaaattaatcttgaagatcgtgtatgggttataccggctgaaagaatgaaaatgaggagagaacatatcgttcccttgtctgaacaagcaataaaagtgcttagtacaattaaaatatattctggcggggaggggtttctatttccgtcgccattgagtgtcaggaaacctatagcaagaggtacgataaacaaaattttttataaaacaaaattcaaagggagaatggttccgcacggctttcgctctcttgccagtacgacactgaatgaatgcgggtttaatcctgacgtaattgaggcagctctggcacatggcagtgggaaccgaattcgcgatatatataaccgaaccacttacatagaacaacgtagagtggttatggactggtggggaaagtatattgattccgccagagatggcgtaacgcttcaggttgatggttattgtgggctgcaattagttaataacgaataa

SEQ ID NO: 228502 - DNA, 318 bp, Klebsiella pneumoniae
atgggctttccatcacccgcgacggactacacggaacagcgattatcggttaactcgatctgcaatgtcggtccaaatacgctcgtcttcgagcaatctggcggttacgttgtgctggatatctccctgaagccaaagcagggtagtcaggttctgatccagcatggcggcgggacggaacttgccacgctgagaggaaagtcgctgattaccgaagatggagaagcgatcgagggcgaagccctggacgatgtaactgttatcggggtcgtgacgtttactatctgcgatgttagccaggacaacgaggttgtttag

SEQ ID NO: 228503 - DNA, 240 bp, Klebsiella pneumoniae
atgcttcgacagtcagacatcgccgcggctttccgcgagtcgattttgcgcagttccaaggggttccagtaccttcacacccgtgactttgttaccacgctgcgccggcgcggcatccacttttccgaggtggaggctaacgcctggatcgcacgcgagcagtcgtatttcgtcgacaaaacggcagagcatagtgaaaaccgcctgtggatgatggccaacatggggaggattctgtaa

SEQ ID NO: 228504 - DNA, 597 bp, Klebsiella pneumoniae
atgagtgaagaaaaacgccctgtactgagcctgaaacgaaaaccggcggagaacagtacggcacccgcggaggcgacacctgtccctggtgtggtgcgccgtaagaaggtcgtggtggtttcgtccccgccggcctggaaggcaaagaaagagaaacttgagaaggttaaacaagcggcagaagccgccgcgcgtaacgcggcgccggcgccggttaaagcggtaaagacgccacctcaggtgcgttatcttcgcctgctgccgccggaacaggccatcatgaccctgaaggcgttctggccacagctgttcgacgggaactccccccgtctgctggcaacaggcatgcgcgaacagctgtttgccgacattgtgaaccgtgacctgccgctgtcgcataaacaggtgattaagtgcctgaagagtctgacccggtctgcgggctatctgtcccggatgaaggtgggggcctcccgctatgatctgcaggggaatgccgtcgcgaccgtcgctgcagaggaagcgcagtacgccagcgagcgcatgatgaaagaactcctgcgaactgagcgtatgcggagccagtcagctggctga

SEQ ID NO: 228505 - DNA, 651 bp, Klebsiella pneumoniae; identical to SEQ ID NO: 216635

SEQ ID NO: 228506 - DNA, 369 bp, Klebsiella pneumoniae
atggctgatacttctaaccgcattgccggtactgcctatgtcaccgttaacggtgtgtcggtcatggttgaaggctcgttcaaataccagccctcaacggtaaaccgtaccacgctgaccggaatggatggcgtacacggttataaagaaaagcctgttgcgccgtacatttctgcccgcctgcgcgatagtggcggcacaaatgtgcagggctttaacaaacagaccaatgtcaacgtcatcgcggaactggcgaatggcaaaacaatcattggtcgagggctctggacggtaaacgtccaggaagttgaaagcgaagatgcagtgttcgatgttcgctgggaagggtttgaggtcacggagaactaa

SEQ ID NO: 228507 - DNA, 1512 bp, Klebsiella pneumoniae
atgaccgttccgttttcacgcgtccccagtaacctccggacgccgttgttttacgtggagtttgacaactccatggccaataccgctacggcaacccagcgcactcttctgattgggcagatgctgtccagtgggtcagctgtgcccaatatccctgttaaagtttcctccccgaatggagttggggacctgagtggcaaaggttctcagttgcatggaatgatgacggcgtatcaaaagaatgataccgctgcagaagtctggatcctgcctctggcagatgactctgaatctatgacagtcgctaaagggactattaaagtcacctcgcaggcttctgagactggggttatctcgctctatatcgccgggatccgcgtgcaaatgaccgtcctggcaactgatacgccagtacagattgccgcagcgatggtagcagccatttccaagaaaaccgatctgccagttactgctgccgtaaaatctgacgccactgataccgtcgagcttaccgcaaaaaatgctgggcttttgggtaatggcattgatattcgccttaactatctcggtacgcaggggagtgaggttacaccggctggcttgactctcacgatcacggcaatggctggtggggcaggtgctcctgattttgtcgatgcgctcggcaatcttcaggataaaacctttgactttatcgttaacccctacgacgacaccgcatctcttgatgcgatgaaggcgtttcttaacgatgcctctggccgctgggcgtgggataaacaactttatggccacgccttcggtactacgtctggaacttatgccgagctgggaacgaagggtgaagcgcgtaataaccagcacgaaacattgctgggagtttatcgttctccaacgccacgttacatctggtcagcggcgctggttggggctattgctccgagcctgcgcaatgatcctggtcgtcctctgcagagcctgcccatttatggtgttctggcgccagatttgtcagaccggtttgagctgaccgagcgcaataaccttctgtatagcggtatttcaacgtacaccgtcgctgatgatgggactgtcaacgttgaaaacgtcatcaccacctatcagaaaaacagctacagcgacgaagacgatagctatcttcaggtagaaacgttgttcagcctgatgttcgttacgcgttatcttcgcaccgccgtgaccagtaaattcgggcgaatgaagctggccgccgatggaacccgttttgcacccgggcagccgattgtcacacctaatatcatcaaggccgatcagatcgctgagtaccagacgctggtgtttaacggctatgcacaggatgccgaagcgttcgcgaaaaatattatcgttgaacaaaacgcatcaaatccgaaccgcgtcgatgtgttgtggccgggaaccctgatcaatcagctgcgtatttttgcgctgcttaaccagttccgcctgcaggctgaatcaacaggagcataa

SEQ ID NO: 228508 - DNA, 186 bp, Klebsiella pneumoniae
atgtttgtaaaaccaaaagatgggctcagcgtgcgctgccctgtccggggcgaagcattgcccaaagaaggcgctgacgtgccggataatacattctggcgccgccgactgaaggatggcgacgtaatcccggttcaggaaaaaggtgtgaagagtaccactcaaaaagagggcgacagtaaatga

SEQ ID NO: 228509 - DNA, 156 bp, Klebsiella pneumoniae
atgggtcagttattgtttgaaatcgacattgagcattatcaggggccggaagatttttatcctgttaacccgcctccgctcgaaggggtcgatatcactataaccatgcctgacggtacgccgcgtccgggaaccagtattaaccttcaggagtaa

SEQ ID NO: 228510 - DNA, 360 bp, Klebsiella pneumoniae
atgggcgtggactgggatttacatcttttaagtccgcttcatggtgtctttggtgatgagcatgagtaccgacctaaagtcggtgctccattcacgattaacggaatttttgaccgcgggtattcccaggtagatgaaaatcttgacggggattctgtgattaacacctcaagtccaatgctgggtgttcgtgatgccgaattccggcgtcttgggaagcctcagccagaagtatccgatcgggtattcattaaaactgtgggtggtcacgtcattaatcagttattcgtggtgtccaatatcaaccctgacagccatggcggatctcgcctggttctgaatgtggtgaaatcacgatga

SEQ ID NO: 228511 - DNA, 1050 bp, Klebsiella pneumoniae
atggacaatatttttgataccagtgtgctggtgggtgtagttcctaacctgctgaccagccagaactggctgctcgatcgcttctttcctaacgtagtcacctacgaaaccgaagaagtggccattgacgttgatgttggtcttcgccgtatggctccgtttgtttcacctctggtcgaaggtaaagtggtagagagccgtaaataccagactaataccttcaagcccgcgtacattaaagatttgcgtgcgccggatctccgcaaaccgattcgccgcatgatcggtgagcgtatcggtggcgaatatactgctggcgagcgtgaaatgcttaacctgcagttcgaaatggctgaccagattgacatgattcaccgtcgtctggaatggatggcctcaagcgcactggtttccggtacggttaccgtagtcggcgaagggtatgaaaccaaagtggtaaactttggccgagcttcagacctgacaatcacgctgagcggctcggataaatggcctcagtccgtagcggccggggccaccaatactcagccgtctgacgacattgaagaatggcagacgctaattctgaagaactccggtgctgtgccaaccgacctcgttttcacgaacaagtcatggcgtgcgttccgtctggataccactatcaaagacaacgccatcaccttcccgaacatgaacccttacaacaaccagatcaaccctggcgcccagattaataaaggggcggtctataagggtcggtggggtaacttcgacctgtggttgtataacgactggtacatcgacccgaccgataacgttgaaaaaccgatgatccctgatggcgctgtcattatgagcggcgccgacctgatggggacgcgtgcttttggcgttatcctggatccggagttcaactatggtccgctggcttatgcgcccaagagttgggttgaaaagaacccagcacaacgtctcatcctgatgcagtccgcgccgctggttatcccaagccgtgtgaatgcatcgctttgcgccatggtggtctga

SEQ ID NO: 228512 - DNA, 405 bp, Klebsiella pneumoniae
atggatcagtttggtcagaatcagttcgctccgggtatgaaaagctctctgttcgttcccgatcagcttgttgtcagcactcttcagctggttaccgattccggaaccattaccggcggtacttttctgcgcggtactgttctcggcaaaatcaccgctagtggcaaatacaccaaaagtgtaaaaactgccactgacggcagccaaaacccggtagcaatcctggttgataacgtcgacgcctcaaccacggatcaaaacggcggtctgtacctcatgggtgagtttaatcagaaccgtatcgtttacgataatacctggaccgttgctgacctgaaatctgcgcttcgtccgctggcaattttcctgaaagacagccttcaggcgccagtagccgcttcctga

SEQ ID NO: 228513 - DNA, 582 bp, Klebsiella pneumoniae
atggcaaagaaagcatttatttttgctcatcttctcggacgtggcgcgtcggcatccgaagaggaggaagataaaaaaaccaaaaaatctaaagctcgtcgtgctgaagaggatgagcgtgacgacgatgccgaagacgacccggataatgatgcggaagaagaagaccccgaagaagacgccgaagatgatggcgatgacccggacgcttccgaagaagacgatccggacgatgatggtgatgatgaccgcaaagaaagcaaagcagtgaaaaatgcacacattgccgagcgtaagcgctgtgctcgtatcttcggcagtaagcatgctgcagcgaatccggcgctggccgcctcgcttgctttcaacacagggatgagttctgctaccgctatcgatgtactggcctctacggcgccagcatctcagcaccagagcgcccgtaagcgcactctcgatcagcgtatgcaggaaagccataacgttcgactcggacaagatggcgaaaataagcccggcggtaaatcggcactggtaagcaaaatgaccagtctctacaactccaccaaaggagagaaataa

SEQ ID NO: 228514 - DNA, 867 bp, Klebsiella pneumoniae
gtgaatctacctcatctggcccagcgattatttaatacgccgctggcgctacacccaagtaaagccgaagtcattatggcatccgtgatggatcgatttggcatcaccaaaatcgaatcgtctctggctatggatgatgactggtacagcttcgatgacaaccgcgggcgggaatcacgtaacgaccccggatacgagaatgtgctgggtattgcggttattcccatctacggaacgctggtgcagaagctaggcagtctgcgcccttatagcggcatgaccggttatgacgggatccgccaggcatttctcacggctatggaagaccaggatgtttctggtatctgcctggatattgattctcctggtggcgaggtcgcgggttgtttcgacctggttgatgttatctacagctcgcgagggaaaaagcctattcatgccattctgacagaaagcgcttattccgccgcctacgctatcgccagcgctgctgaccatatttctgttccgcgaaccggtggagtgggatcgattggtgttatcaccatgcatctcgactggacgcagcgaattaaagatgacgggctgaaagtgaccattattactttcggcagccgtaaagcggagggatcgccattgcgcgaactttctgaagaggcgttcaatgccatccagcaggatattaatgccatgggggaattgttcgtaaataccgtcgccagaaatcgcggcataagcgcgaaggtgattaaaagtactcaggccgcctgttttatggctgctgatggtgtggaccttggactggctgatgaggtatgtcctccagatgccgcgttcagacatttacttgaaaagacaggagcctga

SEQ ID NO: 228515 - DNA, 1581 bp, Klebsiella pneumoniae
  misc_feature (1520)..(1560): n is a, c, g, or t
atgaataaagtgcaaattcttggcccggatggtactccgtatcgttccgcacggcccagcatgctcacaggtggcagtcggataccctatgacgctgctgattcgttcagtgatcaactggcgaactggcaaccggcattatggtctccggacaacgaaataaacatttatcgcgatcgcattgtttcccgtgcgcgtgatttggttcgaaatgacggttgggcatgcggcgccattacgcgtctcctggataatgctgttggtgctaatttccggcctattatgaaacccgattatcgggtgctacgtatggtcaccgggaataaggcctttgactctacgtgggctgaagagtatggaaaagcgctggaggcccactggcgcacgtgggcctatgacacaggccgatactgtgatgttgagcgcaagctaaccatccctcagatgcttcgcctggcctttaggcacaagcttattgatggtgatgcgctgcttcttctccagtaccggcctgacagattaggacctggcagagggcgttacgccaccacagtgcaggtcgtcgatccagacaggcttagtaaccctcagcagaatttcgacatgccaaatattcgcggcggtgtagagattgatgaagacggcgcgccagttgcttatcacattcgtgaagcgcatatcggcgactggtggagcggtgccaagaccatgacatggcggcgtatacccagagaaacctcctgggggcgcccgcatgttgttcatgattttgaccatgagcgaggtgctcagcatcgtggtaacggtatccttacgccggttgttcagcgtctgaaaatgcttgttaagtatgatcaaagcgaactggaagccgctattctgaatgccattttcgctgcctatatcgagtctccgtacgattctgaaatggttcaggccgcgatgggggagagttttgatgacaccagtctgggggcttatcaggacggccgcgttgagtttcacaatgatcgtcggctgactctgcaaaacggcgccaggatgccgattctttaccccggcgaaaaaatcacgacagtgaatgctgctcgcccttacagcaacttcgaagtcttcgaatcagcagtgttgcgtaacttttcttccggcactggactttcaccacagcaggtaacgcaggactggtccgatgttaactacagctccgcacgttcttcgctgctcgaagcatggaaaacgctaacccggcgacgtgatgatttttccatgggtaccgctcagcctttattgacggcctttgttgaagaagtccacgacaatgaggatttgcctcttccatctggcgccccagattttatcgacgctcgcgcagcatattcccgcgcgcgctggatggggcctggtcgcgggtgggtggatccggttgcagagaaaaaaggcgccattcttggtctggatgcaggtctatcaacgcttgaaattgaagtgggtgaaaacgtcggcgaagactgggaggaagnnnnnnnnnnnnnnnnnnnnnnnnnnnnnnnnnnnnnnnnnggactgggaggaggtgcttga

SEQ ID NO: 228516 - DNA, 264 bp, Klebsiella pneumoniae
atgttcaaccggaataccagtctgctggctggctcaatgactgatgagcagctcagggacgccctgcagaaagctcagcaggcatatattgatttaacaaccgggagtcgcggtgtttcattttcctattcgcagggagacgggacacggtcggtatcttatcagcaaagctccctggctgacctgctggcgctgattcagttactacaggctcagttgggtatcgtcgccagaccacggaagccagtgaggtttcgattctga

SEQ ID NO: 228517 - DNA, 585 bp, Klebsiella pneumoniae
atgaaccagtctgattttgccaaactccacaatgtcagtcgcaaaacagtcacgatgtggaaaagcaggggatggctgatcatgtcaggcgatgacattgatgttgctgcttcaaacgcacagttggaaaaatacagaaaatccgtcaaccgtccctctaaaaacgacgcactgccgccaaccaaaaagaacattacccctacgctgccggtcctgaatgatcgtgatgataatggtcttccatcactggaaaacattgccaaggatttcattctggaaaacggcgcagagttatcactcgatgaggcgcgtcgtgtaaaagaaaactacctggcactactgacaaaattagagtttcagcaaaaagatggtcagctcattgaaatgactgtagccgaggaggttctgttcaacgcctttcgccaacagcgtgattcctggctcaactggccgtcaagggtggcgccgttaatggctgctgatcttggcgtaccggcagacaggatgacagaggtgctgattgaacatgtccacaaacatatctcagtcctcggagagccagaatttaacccagcagaagactga

SEQ ID NO: 228518 - DNA, 231 bp, Klebsiella pneumoniae
atgcgcacagtttcgatatttaaaaacggcaataaccgcgccatccgtctgccccgggacctggattttgacggcgtcagcgagctggagatcgtccgggaaggggacagcatcattctgcgtcccgtccggccgacctggggctcgttcgcgcagctggacagggccgatccggactttatggcggaacgcgaggatgtggtcagcgacgaaggacgatttgacctgtga

SEQ ID NO: 228519 - DNA, 246 bp, Klebsiella pneumoniae; identical to SEQ ID NO: 101460

SEQ ID NO: 228520 - DNA, 219 bp, Klebsiella pneumoniae; identical to SEQ ID NO: 101461

SEQ ID NO: 228521 - DNA, 567 bp, Klebsiella pneumoniae
atgactcaggcgcgccgaccatcgccgctgcagcggcgggtgctgattgtgctggccgccctcgatgcgaaacgtccggggccggtggcgacgcgggatatcgagcgggtgctggagcagggcggggatgccccggtgtacgggccaaacctgcgcgcctcctgccggcgcatggaagccgcgggctggctgcgcaccctgcgcgccccgaacctgcagctggccgtagagctgacggaggccggtcgcggcattgcagaaccgctcttccaggcagaacgcgaggctgaaacggcacgacaacgactgacagacgtccggcgtctgccgttacgccagacggctgccggtgacgcggtggagttgcagctgggtgacggtcattactccctgcgggaagcggcctacgtgatccgtctggacggtaccacctgcctgcagctgacggatgccggcggcatacgccggataaaagagggcgatcccctgcaggtggccagctggtatcagacctgttttgatgcaggcctgccggtcaccgtccaggtgaatgagagccgggactga

SEQ ID NO: 228522 - DNA, 495 bp, Klebsiella pneumoniae; identical to SEQ ID NO: 217941

SEQ ID NO: 228523 - DNA, 258 bp, Klebsiella pneumoniae; identical to SEQ ID NO: 227655

SEQ ID NO: 228524 - DNA, 1059 bp, Klebsiella pneumoniae
atgactgtttctgttcctgaaaatggccttcgcctttctggttctgctgattccgggcgtgtatttgaattcacgcttatggttatcgagtcaggggtaaaagtatttgctataaccggcagtagtgcatcatcaaaaacggttaaaacaaactacctgaaactggtaagcactacggttcttagtaccatcgcacgtgttaaagctgaaatgcgtggggttagccaggcaataaaaacaataaaaagcacgataagtttttggtcaaatatggttaacagcaccattaatgaagtgacaaatatcagtagcgtgctgaaatcaacatttggtaatgagcgatatggtcgatatagcaaaggcactgtaggcggctcatcatctggattaactggtggaacatctgcagatgatgcggaagattttcagttattatctgatcaggtatctgctcaagccattatggacaggcagggaattactgacgccactgctacgctgaataactcaacaactattgatgattttatccagcgtacagccgacttaattaattatattctcaactgcacaggcggtgttaacgagcgtattacggcactggaaaaactggcaaatgcaaccagcaccgaatatcagaattcgacttcaagcgccgacattgcacagaccgttaatactctgattatcgtcttatgcagtgctgctatggcttcagcagcatcagattccaaccctaccagccgcgatgaagcggagcaaataacccggcgtgtagctaaccagcttgatgctgcgcttctggttgctggtgacagagccgatgatgatttatacggtgagttgttgctggtcagatcttcatttcttgaggctatgtcagccatttctggtggtttgagcgagttaatgcaatttaattcagcccagcctcttcctgcgcttactctcgccagccgcctataccaggatgcttccagagccgacgagctgattcaggagtccagcgttccccatccggcatttatgcctgtttcgatgaaggtattacggcaatga

SEQ ID NO: 228525 - DNA, 588 bp, Klebsiella pneumoniae
atgagcaagtttcgccattttgctaaccgtatcgccagcatgctgggtgtgggtcgaattactgcgatgaaagatgatggcggaacacagtccgtgcagtatcagacgcctctcgaagttgccagcgcccacaggctggcagagtttggcttttcatccggtcttcctgccgggactgacgttgtactcgcattcctgggtggcgatcgctctaatccagtggtcattgcaaccaaccatcagggataccggcattcaggactaaagtcaggtgagtcggtgatgtataaccagtggggcctgaatatcctgctgacggaagatggagttttcattgatgctaagggaaaaaacgtagaggtcaataatgccactaccgtcactatcaatgcttctgattccatccttgccaacactccaatgttcaagtgcaccggcgacattgtagacaactgcaattcaaacaccaaaaccgtaaaacaactgcgtgacgcctataacattcacgatcatgacgtgaaagaggttcagtcaggtgaaagcactgtcaccagtgaaaaaaccacagagaaggtatctgatgagtga

SEQ ID NO: 228526 - DNA, 450 bp, Klebsiella pneumoniae
atgagtgatatttcatccttctggaatattgatgagatgcaggccgactggcaggagaatttcggcattctcacctctgacaatgatatgcataccgccgtgttgatcagcctttttaccgatggccttgcgcgcgcagatgacccatatgagggtacagatcgccgcggatggtggggcgatctgggcaacgagaaaacaatcggttcacgtctgtggttgttgcggagagaaaaactgacccgcgacgtagctatgcgtgcagagcagtatgctgaagaagcgctggcatggataaaaagtgacggaatcgccagggaaatacaggcgacctcagaaatcgtttttccgaacaggctgaatcttatcatccgttatcttcccccggacggcgactggcaagaattcaaattcttctggttatgggagcaactgaacaatgccatttaa

SEQ ID NO: 228527 - DNA, 1149 bp, Klebsiella pneumoniae
atgccatttaaaagaaaaacgcttagtgagctgagaacagaaaatcaacagttcatgcaggcggagctggagaaggtcggcgctctactccggttcggaaatttgaaggtgctggcggatatggacgctggcatggcgcacttgcattatgcctatctggattatattgcccgacaatgcaccccttttacatcgacagatgaatggcttgctggatggatggcgcttaaacaggcctaccgtaaagcagccaccgcagctcgctcacctgaagcacaaatcaaaggtacatcagggaggacgttagatgcgggcgcagtaattaatcgcgcggatggttatcagtacacgacagatgctggtgtaacgatcggcagctctggcacagcaacagttgctgttaccgccgtattacctgacatcaccgaggatgtcactggtggtggcagcctgggaaatgctgatgccggtactatcctgacccttgatgcgaatgtgtctggcattgaaagcacggtcacgctcattcagccagccaccggcggtgctgatattgaggatgaagaggattttcgccagcgcggacttttgttgtttcaaaatcctccgcagggtggcagcgatactgattatcgtacatgggctctggccgtatcgggcgttacacgagcatgggttcgccgtagaggaatgggccccggaaccgttgtgatttacatcatgtgtgatggcaacgacaagacaaaccatgggttcccggttggcacggatggcgtatcgcagctggaagaatggggggcagtgaaggctacaggcgatcagggaagggtggccgattatatgtacccgcttgcccctgttacctccctgaattacatctgttcgcctactgagcgggttattgattttgaaataagtggcatctctgatgcgggtagcactacaactgctgctatagctgacgctattgatagcgttttgtttgagtctgctgatcctctcgggacagggaaaatctatctttcagaccttaaccgcgccataggggacgtttcaggtacggctggtttcattctggtttccccatctgcaaatattgagccgggaataggggagatggctgttcgtggcgaggtgaactatacatga

SEQ ID NO: 228528 - DNA, 642 bp, Klebsiella pneumoniae
atgcatggaattttaataactggctttattgttgctgtgacagcattaatgcaaaataatagctcttcgcaatatactatgcgccttacagtaggtgattcaagcacaatacctcttgctattactttaggtcaggcagctgttgtgaacgtgtactatataatgactcaaaagggcaaaaaaagtattccttatttaatatcattccttcctatcgtttatgcatttctcgccgcaaatacgagaagtgtagttattggatttattttggctttattgcttcttttatcgtcagataaattctctattgtaagaaagaattttggtaaagttttactagctataagtggaatggcagtttttatagggtatattataaccaataatgcagagttagtagctcgtttattttcaactttcggtcatatagccacggagcaatatggccaatccgaaagtgaacgaattgatgcttggcatcatgcaatagccacgttttatgagcatccaatacttggagagggagtgggaatatttattcaaagattcaacatgtaccctcataatatattctttgaatctgcagcagaaacgggaattgttggcatattattaactgtagtcctccaaggaaggtgttga

SEQ ID NO: 228529 - DNA, 243 bp, Klebsiella pneumoniae; identical to SEQ ID NO: 183453

SEQ ID NO: 228530 - DNA, 552 bp, Klebsiella pneumoniae
atggctagggttcatgcaattaaaagatctggtctacacatagacattgactatgtcgtacataaaaagatagcactcgatcgtgctgtaattctgcggtattcaacaaagaacccagattaccatgccgatttcgtcggcttaagtgagccggagattgaaagagaaaaagacttaatactaaaagaaaatgacacaacacattgccttttattgttaacagctattgaagcaatatttcgattagatgcagatcagaagtactgcaataaaaaaagagacccattatcaagaaaaataaaagagatatatgataaaacaaaaggagaaaaaataaaattagatgatgatttaataaataccagaatgaatgaagatgatgctagattaaaaaaagactacaacgatctaaaaacatgttttaaattcaggcattggcttgctcatggaagatactggcatccaaagagaataaagaatttttatttcgactctatactaatagtgatagattccattttaaactcaaccaaatacaattttgaagtttag

SEQ ID NO: 228531 - DNA, 567 bp, Klebsiella pneumoniae
atgaacatgaaaacgctgaaagatataattgaaaaacaaaaaaaagaagaagaagaacaaaaattcgacccagctgaacaaatagaagaatacataagccttgttgaaaaattatatactattacattagaatctattgacgaactaatcaaagatggattgataaaacaatcaagaaaaaaaatatcaataaatgaagagtctctaggtgattatgaaatcgactctctaatactcactataaactcaagtaaaataaaatttgagccagtaggaaccatgctaataggttcaaaaggaagggttgacgtcacagggccatttggaaaagaaaaattcattctgatcagaaaaggagtcaaaagccccagcgatttaataaaagtaagagttaacgtagtcggggcatataaaccagaaaaagataagaccgatgaagatgtgaaaaagccgtcaattgatgattgggaatggaaaacaatgcctagcgatagtcgatgggttaaatttgatgatgtgaattccgagaccattacgaatattattatgagaatgataaatggctag

SEQ ID NO: 228532 - DNA, 267 bp, Klebsiella pneumoniae; identical to SEQ ID NO: 125559

SEQ ID NO: 228533 - DNA, 1782 bp, Klebsiella pneumoniae
atgagtaattcattcgattttgagctgattgcggacgacagagtcagcgctaccattgatgagatcaacgaggccataaaaaacctcctccctcacctggatgagacacaagaaaagcttaacctcggcggcgatgatactgtcgatagccttgatgatgtcagtgagagattggataaaatgtcccgtagtgcgcgggataacgtccagttcatcggagatattattcctccattgaagattgttggtgagctggccgggaaaatggctggatttggcgctgtgggggttattggattcggcatgaaaaaagttgccgacggcttccgagatgcggcaaaagaggcatataacctcgaaacacatgcgcaaaatactgctatgagcactaaggagttttcggcgctatcgggggcattgcgcattcttggtacagatagtgagaccgcagctgcatcaattgagagcgtctttaaatccctgaatgaggccgccagtggttctaatgcaacagttgcgggggcgatggagcaaattggcgctcaaataatcaaaaataaagatggttctcttgatctgcttagcacactcaactctatttccagcgcccttcaaaactggagcccatcgcaacaaaaatccttcgctaatgctgtcgggcttactcctgagatgctaacgctgttacgtgaaggctcgaagtatgctggacttctggcaaaagcagagaagtttggattaactgttgaccccgagctaaacaaacaactctcagatgtcaatgtgacgatgaatgagctgggtgcttcctgggatggcttgattaataaggctgaaaaaaaggttctgaaatttgtcatgtccgatggttccgttaagaacggactggagggggtcacagatttactcactaacggtgattttaccgcattatcccatgcggttggttttataaatactgacgaggctgagaagttacgccgtattcagggcaataaagagctttataacaaactcactcgccgggagcgcggggcggtcgatgctggttttatgactgatgccgtgcgtaagcgttatgatgcagaatatggggctattgatgctgctgagcgtttgcgcggtgatatatcggtgattacaccgcaaaaaacacttgggaatgaaagaataccctatcgccagaacgatgcgacaagccagtatgacgatctcctaagcgaggctggaagaaagtacggcgttgatccacggctattgaaagccatcatgaagcaagagtcgggtggtgacccgtatgctattagccggtccgatgccagagggcttatgcagattataccctcgaattttaagtctaccggtattacagattggaccgatccgcgacagaacatttttgctggcgcgcagattatggcggaaaacatacgcaatgcaggaggtaacatcccattagcgttacgctactacaatggtggttatgatcggcgtcgctggggaagggagaacgaagcttaccccggcgctgttttagggtactaccagcaaatcatcaatggcaataatcaggagaacatcaaccagaagccgacttcaagcatcattcagccacccgtcgggacgggttcgatatctgcaaacgatattactaaatcgtttaaaagtgccatggaggatagcaagatgaagcttgaaatcactacgattaatgagaaaggggaccgaaaagtgtttgaaactgagagcggaggtcggataaccttacccatgatttactaa

SEQ ID NO: 228534 - DNA, 567 bp, Klebsiella pneumoniae
atgaagaaatctctttgctcatttatcgcagtggctatcggattcgtccatccagccttacatgcaactgactatactgacagagcgatgaaggcggttaaggtcggcgattggaatattgtagagtttgcggctgacaaacagatcatttataaggtggctactgaggcgctcaatcaaaaccttaaggaaacatatttaagtttttatctaacaacggcaggaaaatgcaaaccatctccggctgagatgagtatgtttttaggtggttacaatgacaacctcgcaaatggtcatgtacctttttcttataaaataccgggccaaaaagaggaaactgaagttgtagaaaccaaaatgcttcaaggcgaagagtacgctttctttaaattccagaagctatcattgagtaaactaatgaattcaggaagccgagggaatctagccatctgggttcctgcaagcggtgacggggaagtgcgcggatcatcaaacatgtatttttcccttaatggcctaagtcaagcttattctacggccaaagggatttgtagtgataacctgtag

SEQ ID NO: 228535 - DNA, 1875 bp, Klebsiella pneumoniae
atgagtaactcttttgattttgaactggtggccggtgatcatgtcagcgaagcaatagcacagatcgacgaggctgttcgcaaccttgaaccccaactggagaagacccgacagggcttgcagttaggtgggcaggagacgattgatgggctgaacggatataattccaggctggatattatggcccggactgcacgcgataacgttcagtttattggcgacatgatcccccccatgaaaatagtgggagaactggcaggcaagttggctgggctggggctggctggtggagttatcggtactatcggtggcgctgcatatgcgacaggtaagctcgcagaaagctaccgggaagcagccagaggcgcttatgacctgaacacacatgcgcaaaatactgctatgagtgttcaggacttttcccgactttccggggctcttcagcttgtaggggctgatagtgaaagtgctgcatcttctatcgagggaatcttcaagtctctcaacgaagcaaatagcggtaaaaatcctggtgtcatggctgcaatggcacagattggcgcccaaattgaaagaaataatgatggttctgtcaacacgctaaggacgcttgagtccattgcaaggattttcccaaaacttcgacccgatcaacaaaaatcatttgccgatgcgatgggtttaacacccgagatgctgacgcttatgcgtgaaggcgcaaaatatgctggtcttctggcaaaagcggataaggtggggttgacagtagatcctgtgctcaaccagcaattaaaaaactttgatgttgcagttaaggaagcaagcgcctcatgggacggattcaaatcaaagcttgaacgtaaggtgtatgcctcgctcgataataatggccttactgatatggttaatggctttacagatatgctggcaaataactttgacaatatatctttaagtcgatttgcagggcagaataaaggtgatgattcagaactgatgcgcagggccctggcagaccctgaatttcagaagaccctcaacgggaatgaaaaaaaccagttgactgctggcgttatgaccgatgaggcaaggaagaaatatcgtcaatatttttacagtcaggaccgttcaaagcaacttcttgacgatgttagtgctattacaagacctcaacttgaaagaggtcctgtcatttataacccagatgggaaaaatactctgggatttagaaaccataaccctggaaatctgagagaggcttcaaactcaacagggcgaaatcagggtttttctacatttgccagtgataacgacggactcgctgcaatggctcgtcagctaatgctttatggtgaccgtggaaataatacaccaagaggatttattcatacgtatgccccgcgttctgaaaataacacgcgtgcatatattgacgatgtgacttcaagaactgggtatggagccgatcaacggcttgaccttcataaccctgaagtcctcaaggcattaatggcttcactgattcagcacgaacagggctcacaaccctacacggaagatcaacttagcaacgctattcagtctgccattatggatgaccgttggtctgggctgagaagccaggaaaggttgacgcagcagcgccgggatatcatttctggtgcaggaggtggaggacgctcaccttccatactgtctcctggcgaaggagacggaaatgttaacgtgattgccgaaaatataactcgatcccttgctgatgccttggctgaacaaccgttaaaactggaaataaccatgattaacgataaaggagagaggaaaacctataaagtagaaaataatgggaaaattactactcccatgaattattaa

SEQ ID NO: 228536 - DNA, 492 bp, Klebsiella pneumoniae
gtgcgcgagcgcggcgacgatccggatgcgctggcgcgcatttatgcccgggtgctgaaccaggcgctggagggcaagccggccgatctgacggtgggcctgcacgtctgccggggcaacttccgctcaacctggatctcggagggcggttacgagccggtggccgaggtgctgtttggcggcgtcaatgtcgatgccttcttcctcgagtatgacaacgaccgctccggagatttcgcgccgctgcgctttattcgtcccggccatcagcaggtggtcctcgggcttatcaccaccaaaaacggcgagctggagaacccgcagggggtaaaagcgcgcctcgctgaggcggcgcaatatgttccgctcgagcagatctgcctgagtccgcagtgcggtttcgcctccacggaagagggtaacgccctcagcgaagaccagcagtggcaaaaagtccgtctggtgaccgccatcgccgccgacgtctggtaa

SEQ ID NO: 228537 - DNA, 1272 bp, Klebsiella pneumoniae
atgcaacgaagaacgttattaaaagcttttgcactctccgcctctgttatggctatgggtctctcattccaggcctatgccgccgacactattaaagtcgggattatgcattctctctccgggacgatggcgatttccgaaacgccgctgaaggacgtcgccctgatggccatcgacgacatcaacgccaaaggcggggtgttgggcaagaagctggagccggtggtggtcgacccggcctccaactggccgctgttcgccgagaaggcacgccagctgctggcccaggacaaggtggcggtggtgtttggctgctggacctcggtctcgcgtaaatcggtgctaccggtgtttgaggagctgaacggcctgctgttctacccggtacagtacgaaggggaagagatgtcccccaacgtcttctataccggcgcggcgcctaaccagcaggccatcccggcggtggaatacctgctgagcgaggacggcggcggcgccaaacgcttcttcctgctgggaaccgactacgtctatccgcgcaccaccaacaagatccttcgcgccttcctgcatgccaaagggatccaggacaaagatatcgaagaagtctacaccccgttcggctatagcgattaccagaccatcgtcgccaatatcaaaaaattctccgccggcggcaaaacggcggtggtctctaccatcaacggcgattccaacgtgccgttctacaaagagctggctaaccaggggctgaaagcgaccgacgtgccggtggtggccttctcggtgggggaagaggagctgcgcggcatcgataccaaaccgctggtcggcaacctcgcggcatggaactactttgagtcggtcgataacccgaccaacaaagcctttgtcgccgattatcgcgcttacgccaaagcgcacaagctgccgaatgccgatacggtggtgaccaacgatccgatggaagcgacctgggtgggtctgcatatgtgggcgcaggcggtgaccaaagccggcaccaccgacgtggacaaagtgcgcgacgctatggccggacaaaccttcaaagcgccgtccggtttcaccctgacgatggatgccaccaaccaccatctgcataagccggtgatgatcggtgaaattgaaggcaacggccagttcaacgtggtctggcagaccgatgagcccgtccgcgcgcagccgtggagcccgtggatccccggtaatgataagaaacctgactatccggtgaaaaccgtcagccagtaa

SEQ ID NO: 228538 - DNA, 153 bp, Klebsiella pneumoniae
atgacgaaagaagagacatggctgaaagagcagatagaagagacattctcaagagtagacaaaggagagatccgctattactcagaagatgaagctgacgaacgcatgaactccttcatctctaaaatcgaacatcaacacgaaaccgcataa

SEQ ID NO: 228539 - DNA, 396 bp, Klebsiella pneumoniae
atggcatttgttagtcaggttgataagtccagggctgcttcgagcaggattggtgattcgtctatagtggtcactcaatcatacaaggcgtcaactaaggctcaggagctatccattaggttgacatcgttagtgttatctaaaggaggcatgaaaattggtgattacgttgatgttctttatgacaaggatagtgatcgctggatgttaaggaagatggatggaggtttaaaaattactggtaaggatgatgcccctacggggttgattagatataccctgaaggatacacatgcgagatttaccgaagataaagagcacctccctattcgtaaatcctctattgaggattcactggagattgaggatgggcagattgtatttaagcttgattag

SEQ ID NO: 228540 - DNA, 264 bp, Klebsiella pneumoniae; identical to SEQ ID NO: 190407

SEQ ID NO: 228541 - DNA, 522 bp, Klebsiella pneumoniae
atgagaaaagtaggaagcacgactgatactgccgattctaatggtgaatacactaatggcaatgtggccaacggcgtaccgccaacaataataaatgctgaaatgcttaacactttccagcgagaattggttaatgccgttgaaggtgcagggattgaacttaacccaaatgatgatggacagttatcgaaagcaattggtaaaactattaagcaacaatctcaggcgcttcttgctaatgccggatatcagaaaatgccttcgggtttgatcattcaatgggggattataagcggaactggttccgcatctgtaacagagaattaccctttaaaattccctaatgatttatttcagagtgtggcaaccttgcgtgatatgtcgggtggggatgtgtctggagtttctatttatgccaactggattcaggatgataatgacaggaaaactaaaatcagagtcggggttgctggggcgaatattggtgagtggacagcgaagtatattgccatcggattttga

SEQ ID NO: 228542 - DNA, 876 bp, Klebsiella pneumoniae
gtgaaagctgcagagttgtttgaatcagcaaaaacgattgactccctgtataaggagtttttaggtcgtggggttgatcccgatggccttcgatatcatatgcaacatttcagaaagctaggattttcaaaaggaactcaacgttcagttaatatcctaatgaattctgatgaatttcagatcaacaaaatgcaccgtggcaagataatgattaaccatggaaataaaaaaataaatggaaaaccggtttcgcatataatttcattaggttctcactgccttccagctcttacattaagaaaatatggattgaaaggtaaaactttaccatttgattggacctacgccccacctatcgctgtgttagactgccttaaaaacaatttcacctcttttattgacaattcaaatatacataccattgagaaaggaatcaagtcaaccaatcttaagtattggtgggactcaaaattccatacatttcctcaccacgatcttaacattcaatgtaatattgaaaaatttgaaagatacatcactcgattcaatgagacgttgaagtcagatgacggtaagttattcattataatatcaagacgcatgtatgatttaaatgaatgcttcctgagcattcgagatgtattgttagagaaaacaaataacttccacctcataggcattcaattaattaacgacattaattatcagtacaaatttggtttatccagtgttacatcatctgaaaactgcgagctatacaatttcagctcacgctctctagaggagggatttggacagtaccaagatgcgtctgatgaattgttgttactttctttaattacacagtttgatcttgacttgaagattttctcataa

SEQ ID NO: 228543 - DNA, 657 bp, Klebsiella pneumoniae
atggtaaaatacaataacattgacaacgaattatttcaaaagatgtgtgaagtaaaagtatcagtcattactaagattgcttttatttatgaagcaataattcacattttgaaaaaaacagcaattccgcacattcgattcataatcaaaaaaaatgatgactatctgcttgataaagatattgtgttttatgagaccgtgccaggtgaattattcttacctaatgccaaatttatgaaatgtaaaccagccgggattttgtttatattgcatgattatactgatggcttttgttttgatgatgtaaaaagatttaagaataatacttttactttctcaatgaaaaacaatactgttgagcaactgataattactatcaaacatggtttgataaattacacacattcgcaatcttgttccatacgggaagaaaaaattgaaaaacgtgtgcgcattaatttatctaaaaaacagtcaaaaattactattcaactggcgagtggactggatcttaaaacaatatcttcactaaacaaagttactgtcaatactataaaatatcatataaaagaaataaagaaaaagatgaaactggctagcacatatgagttgtatcaattcgcgcatatgttaaaatccctcacggactcgacctaa

SEQ ID NO: 228544 - DNA, 537 bp, Klebsiella pneumoniae
atgacctgcttattcgcaccttccctagcacaaggaggggaaaaaccggtatatggttcaaacttaagagctgcatgcagaaagctcgaagaagcaggatttctcaatacactgagagcacggaatttgcaacttgctgtcgaactaactgaaacgggtaaacttatagcacagcctttacttgagaaggagaagaatgatgagctggataaaaaaaggattagagagtgtcatgtattaccccacaccatggcttcatggagcgaagttgcgcatagtatcgagatagatggaaaaacatattctgtatttcgctgtgcttacgtaattcgtttgaataaaacaaactgtctacaattatggactaataccaagaaaatagtgaaacttgaaggagacgccttacaaattggcgaatggtatcagaaatgttacgatgcaggaatacattgtcacattcaaattaatgaaggcgaatgcttaagcgagaggagtgtggagtatctcaatttcaaacatggtttattcactaaatag

SEQ ID NO: 228545 - DNA, 825 bp, Klebsiella pneumoniae
atgagaaaagttggaagcacaacagataccgctgattctaatggtgagtatactaatggcaatgtcgccaatggtatttctccaacaattattaatgcggaaatgcttaatacatttcagagagaattagtctctgtcgttgagggagcaggcattgcacttgatcctgaggatgatgggcaagtattaaaagctatgaataaaatgtttaacgatgggaggctgttaggcatcgttaggtttacctcttcagggacgtatactccatcagctggcgcaaaatacgcgagggttaccgttacgggcgcaggtggtggtggaggcggctgtcagggaacgtcagggacagagtcattatctggtggcggcggtggcgcgggtgggactgcaattggttactttgccctttcacaggccagttataatgttgttgttggcgctggtggcgctggtggtaacggtgctaatcctggtggcaatggtggtgcatcatcaataaatggggtctcaggcgcaggtggttttggtggtcaaaaaggaagtgccactaaccttgcaggcggggcaggtggttctgccagcggtggctctttaaatattcagggaggatttggatttgatggtcaaaatggctctttgattatggccggtaatggtgcttcttcatattggggtggtggcggcagggctggctctggtgcaggtatttctgggggcgcctacggaagtggtggcggtggtgcttatgatccgtcgatgtccggtggtgtatttaacggcggtaatggtgcttcaggtttagtatatatagaagagttttactga

SEQ ID NO: 228546 - DNA, 636 bp, Klebsiella pneumoniae
atgtttgcacttcttgatgattggataattcagtctgagttatctgaatattggcattccattactggtgattcttatgttgtagatattcgccgaattaaaaaagaaaaaggcttaggctattcaaaggctgctgctgaagtttgtaaatatgccctaaagtttggcgatctgtcagtagaaaatacatgggaagcgttcaaagccctaaagggtaaacgtcttagcggtgcatttggctctctttacggagtaaaaattcctgaaaatcttgctgatgaattaccagaggataaggatttaccttatttagagatgctttataaatttgtttacggaaaacaatcctattacgacctggccatgactcgtcatgttgagccgaaaaacaaggatactgacaacgacgacgaggaggaggtagcgacgaccgacggaggaggcggaagtagacgtggtttggctcaagcggttggacgaggacgggaggattgcacggagggctcgcacggtgaaccgcaccgcccacagtacaaacgcaaaaaacaacgctggcaagtatcaccgtacgtcaaagtacgtgtgaaaaatcgtataagaagatgggatggttatttgtgtgttatacacatgtaa

SEQ ID NO: 228547 - DNA, 348 bp, Klebsiella pneumoniae
atggccgcctgctgcggcgtgcctaccgggcgggtggatatgctggcctttggtcttggatccggtattgccgggctgggcggcgtggcgctgtcgcagcttggcaacgtcggcccggagctgggtcagggctatatcatcgactcgttcctggtggtggtcctgggcggcgtcggccagctggccggcagcgtggcggcagcctttgggctgggcattttcaacaaaattcttgaaccgcagatgggcgcggtgctgggcaagatcctgatcctggtgatgattattctgtttattcagaaacgcccgcagggcctgttcgcgctgaaagggagggtgattgactga

SEQ ID NO: 228548 - DNA, 396 bp, Klebsiella pneumoniae
atgaacataaaagagatcgggaacgtgtttcactgtgattgcggattttcctggcatcgcggtaaaaacggtaaccataactgcgctgatggtttgcgtgaaaaagtacggcaactggcggcggagaatatggcgctgaagaacgccattacagaccatagtcattcggttcacttctgcgaggtttgcggaaaggatgattcgtgcagcactgacgatgtttgttatgcgctgaaagatatccccgccaccgacgcctacctggccgggattaaggctgatgccattgatgaagccgcggtagagctcgaccgggtcgacactgtggcaagtaccagagtaatcgggttcaaactccgtgagtttgccaagcagctgcgcgagggggccaaatga

SEQ ID NO: 228549 - DNA, 135 bp, Klebsiella pneumoniae
atgaattttgaacctgagaattacagcaaatacaccctgcgtcggctcgccgccctgttagatgtgatctgctgggtgctgattgccgtagtaaccgttggtatctgcatgtttattgaatggtggacagcatga

SEQ ID NO: 228550 - DNA, 810 bp, Klebsiella pneumoniae
atgagcaagccatttctgaaatgggctggtggaaagtatacccagctggctgacctgttcgtgcatatcccggcagggaaacgcctgatagagccattcgttggtggtgggtcggtattcctgaacagcgaaaagcacgcagattacctgctggcggacgttaatccggacctgattaatctgtatcagatgttagcggtggtgccggatgaagtggaattgaaggcccgctggatgttcgagcacatgcggtcaccagatcgctatgagctgatccgttccgagttcaacgcacagacgctggatgctactgaacgcgcagctgcattcctgtatctcaaccggcattgcttcaatggcctgatgcgctacaaccaggcgaacaagttcaatgtgggctggggaagctacaaggccccgtattacccgctgggagaaatgaaatccttcgccgctatggcgcataactgcgtattcatgaccgctgactatcgccggacaatcagcctggccgggaaaggggatgtggtttactgcgatccgccttacgaaccgatgccgggaacaaccggattcaccgcgtacgccactggtgggtttaactgggagaaccaggtagacctggcgaagcaatgcgtatcagcctttcaccgtggggctcgggtagtgatttctaactcatccgccccgaaggttctcgacctgtaccgggagcatggttttaacctgcaattcatcaaagcgcgccgttcgatctcctgcaaaagcagtacgcgggaagtcgcaaaagacgttgtagcgatcctttaa

SEQ ID NO: 228551 - DNA, 744 bp, Klebsiella pneumoniae
atgaagtatgttgctggagcagcccaaggtaccatgctaattcaactctgtgacaagaatggttctgatcctgtttttggtgagttgacaacaggtaacctaagggtggaacccaagcttgcaggggaaggcatcgcagtgtcttgccatattgtgatttccactgctgttgagcctcattcagctgaccattacaaaacgcttgtagaatccgttccgggtataagtaaatctgttcttgaaccatttttaaacgcaatgctcaaagaggcgtttactggttgtgagttcagaaaccccgtaacgaaggccatgtgccaacataggccaaagctagatatatattctcatggctcacagacattgatggatgccttaaaaggggcgaaacttcataatgtcaagcttgtgagcacaagaaggaaaggtgggttggatcaaacagcgtacactgaactctcagaaaggtcagtcaggtacaaaatcattaagcaaccgccgttaaaagacaaagaaagattattagagattttgcgaaggaaaggtcagcaatcaggatactctaaagtatcaatcagttactctaaagacggtaaacaagccagcttggatctggaccgtaacgaggacgcagcaactaaactattcactaaaagtgagaaaatcatattaggcaatttaatcaaccaatgtgagagcagagtgcatcttcagctggaaacaaagatgattgggttgctttaa

SEQ ID NO: 228552 - DNA, 567 bp, Klebsiella pneumoniae
atgaaacttttttcgccgctaagctatctccttatcaagcatgaggaaaagaaatggtatgatttcagagtaccatgtgcggtgtcatttgttgtaacggttgtttatcattaccatgctaacaaaatagctctgatagcaaccaatggccttcttcttcaagttaatggtttgcttcaggttctgataggtttttacatagctgcgttggccgctgtggcaaccttttcaagcccatctattgatgaagtaatggctggtgatcccccgaccttagtggaaaaatttcgcggtcaaaaaatcacagtggagttaacccgcagacgctttgtgtgttacctatttggataccttgctcttgtaagcttcatgcttttctgtctaggaatggtttcaatattggttggtaagccgttccatttatggttactaacatttttgtctgctgaagtaatcatatggctgaaaactatcttcgtaggagcgtatttgttcatattaatgaatatcataactacgactctgcttggtctctactttcttgctgtgagatttcatcagtcataa

SEQ ID NO: 228553 - DNA, 690 bp, Klebsiella pneumoniae
atgtctagacaaggtacgttagatctgttgcaagaagtggaagaatgtcttgaaataatgaaagaaagccagcaaatcaagccagtaaaagttaagtcgctattagaaaacttgcggagctcattagagtatgtagctaatgatgcttatgataaatttgttgggaacaacaacacaatggtacgtcctaaaatctatttcccatatggaaagcaacaatttgttgacaattttttctcaaaaacactgaatataaaacagccatcctcaaatccattatacaaaacttttaactcgatacaagattatcacactggtaaaaattggctgggaatgatgtgtaaccttacaaatgaagttaagcatagacaacctatccctcttaaagaagatagttcggttaaagaaattagcattagcgcaggcggattaggattagttaaagctggagcttcatcaagcatcgttttcgagaataattatgttgatggtaaaaaaatacaggacttcactctcaaggatggaactttaaaaaaaagcggaaagggaatacctctaaacattgttataactgaagaaaagaaaataaaatttcatggtaatgattatgaagtaattcctttcattgaatcatgcttagtaaacataagaagcttcatcgttgaagcatatgatgagatagaaaaataa

SEQ ID NO: 228554 - DNA, 258 bp, Klebsiella pneumoniae
atgatcataactatacatagattttgtttatcgcctgttatcaatgatggtaaaagtagtttcataactacggaaattgaatatctctcggagaatcttgatagtattgaggaaaaacgcattttacctgtaaaagatgagaaaggtgaggtgatagttgatgaactcgatagccatgggctcatcaccacctacagaaatgaaggaaggtgccagacattgctatctaatgtgaggggagaacgatgcctacattga

SEQ ID NO: 228555 - DNA, 600 bp, Klebsiella pneumoniae
atgaatgaccgtgaaacgcgctgttacagcggggaggtcagagccgagcaacgcaccgatgaacctacccgcattctgggctatggctcggtgttcaacagccgttctgaacccctgtggggattccgtgaaatcatcaagcccggagcatttgacgatgtgctgaatgatgatgtccgcgggctgtttaaccatgaccccaactttattctcggacggagcgctgccgggacgctatccctgtctgtcgatgagcgcggcctgcgttacgacattacagcgccggatacgcaaactatccgcgatctggtgctggcgccgatgatgcgcggtgacattaaccagtcatcttttgccttccgggtatcccatgacggtgaaaattggtaccaggacgatgaagggatcgttattcgtgaaatatcgaagttttcccggctgtttgatgtcagtccggtgacttatcccgcatatcaggaggctgactccggcgtccgatcgatgaaagcctggcaggaggcgcgcgacagcggtgcgctaaagaacgccattaatcaacgaatggcgcgtgagcgcctgctgacccttcttaacgcgtaa

SEQ ID NO: 228556 - DNA, 270 bp, Klebsiella pneumoniae
atgtcatttaccctcacgcaaaatttgaagtcgtttcgtaccatcccatacctgaatctcgttgagccgcttagtgccgcgcctgtagctgtcacatataccgccaaaggggtcgacagtatcaacgggactactgcaacggtgctgtttgatacgcaggctgaggggctggaggctacaggccagctctactactctttcgaatttactgaccttgcaacaatttttgaggatgcagaaacggcacttaaaaaagagatttcagagtaa

SEQ ID NO: 228557 - DNA, 153 bp, Klebsiella pneumoniae
atgcagtggttcgaagccgcagacctgattgtcaaaggcatggaaggcgctatcgccgccaagaccgtaacctatgacttcgaacgtctgatggaaggcgctaaactgctgaaatgtagcgagtttggcgacgcgatcatcgcgaacatgtaa

SEQ ID NO: 228558 - DNA, 2139 bp, Klebsiella pneumoniae
atgaacaactacccgtatctcattaaagcgaaggcaaaagcaaacgaagcgaaaagtctcttctgctggttctctgctaaatccgattctcgcgccgagcgcaaaatcctggacatcctggaagacgctgaaattaacgttggccgcggcgccagccatcagctgccgatccgtaccaactggctcatcgttgatgacttaccggaagaaggtgtactggatgacacctggtgcgatcgctacgagcttggtggtgaagacgggctgacatggcaaaaaatcgttgcgccagcggctgctgaaccacagccctccagtaaaccagaaaacgatatctctcctgcaaatagcgatgaagaggactattcgaacaatgaagaagcactcttcaacctggcggaaatgtcattccgcgcgcagctgcttgcccagtatatggccgacgagcgtcacgtgtatcacattagcattcctcatcgtaaccgcctttcagcgatggaaatggatacggataatcacggtgtgcagaatctgctgctgacggcagaaaatattccggagcttaaaaaatatgatatgcctggcctgtggaaatttaccagtgcatttaagagcgtatttcctgtggggaaacgccatgagctcggcaagcaaattcagttcgccaaattgtggcttgaaacgtcgcacattgaccgcgggatccttacaaaggaatgggctgctggaaactatatcacctcaataaacaaaaccgatgccggcgccaatgctggcggcggtaacaaaactgaccgcaatccggattatcagcattcgctggatactctggatatagagatcgctcttgcaacgatgcctatggattttgacatctataattttccggcatcagtccaccgccgcgcgaaggaaatagtacagaagaaagaaagtccatttaaagaatggtctgcagcattacggagcacaccaggcatccttgattattcccgtgcagcgatttttgcactgatcagggaagcatccagtggaataactccttttccagatcggttgcgtggctacatcaacgcgaatctgactgaacataagcatgataccccaagcgctgaaacgcttaccaaggcgggacatattccatctgctgcagtcaccctggatgcaataaaccaagcaatcgccggagaggatagctgcgcaaaactggaaacactctcctccgactttaaagcagttggtaccgaactggtaaaagaggctcaaaagcaacgtccagacgctaatcaggttctggcagccgagtgcggcgaatatgttgaagggattagcgaccctacggatccgaggtgggtaaccgaagaccttaccaagaccaggcagcctgaagtttcaaaaattggggacggagtattttccattgaaggtcttgttgacgttacgggcaaggttaaccaaaaagaaaaaacagatgaagttgttcatcaaacggattctgtagatattgaatccggtcatcataataaggaggaagatcagccaattgattatgttcacgttatggttgatctggaaaccatgggtaaaaaacataacgcccctatcgtcgctattggtgcggttgtttttgacccagcaaccggctctattggagaaagtttctataaagtcgtatgccttgaatcctccgtgaactggggcgccgtaatcgatccatctgctgttatctggtggcttaagcagtcctccgaagcacgctctgcgatcgtaaatgatgatgctatcccgttgcaggatgcattactccagttcagagaatttgtttctgataatgtcgctggtgggagcaaaaaggcgcaggtatggggtaacggtgcgtcattcgacaactctattctgcgttcttcttacgattgcattgctgaagattatccgtgggaatactggaacgatcgggacgtacgaacaatggtagagctcggccaagccattagcttcgaccccaaaacaacgatcccgtttgaagggtctcgtcacaatgccctcgctgatgctattcatcaggccctctatgtatcagcgatctggcagcgaataattgccggcaatcaggtgctgcaaaaattgatgcaaaactga

SEQ ID NO: 228559 - DNA, 1266 bp, Klebsiella pneumoniae
ttgaataaaagaattttatccaactcagtttggatgatgtctgaaaaaataattactctttttgggctaatatttgtcacctcatttgttgcaaagtatgttggcactgaagtttttgggcaaattgcgtttgcgacatccctatttcaaattgcaatgattgttgctcaattgggtagcgatgttataatttttaaacgagtaagtaaaaataatgattctggcgtaaaattaatatgttcaactctttatctaagagcctttatatatatattagtgtcaatcccgataatttttattagccatgaaaaaaacgatgcaggcggaatttactttattttagcatgcgcgatatcgtgttttttcagtgcgatggatgtttttagtatttattatgatgctcgtttagaatcgaagaaaaataccatcattaatgtggtgggccttattgttagtttatgcttacgctgggttattgctttggtcaagcttgatcctatttatttatgccttcccataatgcttactggttttgttccatttattttacgttggttcgttttcaaaagagttttagataaaaatacaatatcttttaaaaataaagttaaatatatgaagtatttggtcggtgctgggattacttttgtagtatcgacgatctctgtagctatatacacaagaatttcaatgctatcgctaggcttcttttatgataaatctattgtaggtattttttctgtatctgtatcattagccgcatcatggtcttttgtctgtaattctctaataacatcatctctaccttcaattttctccgagaaaagtgatgagcgagccgctaataaggcatcaaaattaaatctggttgtcttaggaatcagtgttccgattatatttgcaacctattttttaggggctttttttatacggttgctttatggtgaaagttatattggggcttatgttccccttgttatcctttcattttcgaccatggtatctttgcttggtataatttctgcacggtttatagctaggttttcaggctacgctttcctgtcaaaaaaaatgctttcagttgtgattcttagtgtttttttaaatattccgttgatttatttctatggtatgcttggggcagcaattgcgactctcttaacagaattgttttcacttacattatttaactatctttttaaacgaggcattgtattgaaaatgcatttaatgactctacccttaaatatttttaaaaaaatatga

SEQ ID NO: 228560 - DNA, 1596 bp, Klebsiella pneumoniae
atgtggtttttttcaagaagagaactcattgcaaaaatattgccattaactttctttattaataataccgaagcgagtacaaccactgaagagaatgttccgaaagaatttataaatgttcaatgctatgatagtcttcgacaaataaaacctaaattcgttggacagcgcatatacttaaagtcttactatcctaatagcattcatggcggtggtatattcgttgcaattgcagataataaagaagaagactatggtgtaacttgtaaagttaatgatgactgggcttgggttcgaataattgacggacctataactccatatatgtttggagccttcgctgatggaattagcaatgattcattatatatccaaagagcagttgattactatgacggtctctactccactaacgaccgtgctccaagaggagagatttactttcccgctggtatctattgtattggagacacaatcactgtccgaaatgggcccataagttggcgtggggatggaatatggaatacgatctttgttccacttcaaaatgatagccgctatgacaatacatttttgtttaagttcgaaaatgaaaagtggagcagcaatcagtcaagatatttacatgaaataatgctatgtaaatttagtgttaaaggaaattatataaataggtcagctttttatttggggggatgtggttgggattgtattattgatgctgtgcacatatggggagttggtcaagccgcgtttgtttgttatgatttgatggatacaacttttagagatgtcaggattaatttgtgtggaatgctcgtcgatgcaagtaaagcggcggaaaattacactcatcctataatgttactaagtaggtatgattgttgcaatgccataagatttgatgcatgccattttgaaggaaatttcactggtgtgttatatattaatggaagagctaataatatatcttttgttaatatgtgtaagtttgaagagaatggtattggttcaaaatttggcttttcttatccagttatttttattgatagttcgctagcagaatctattcgttttaatgacatgtttgtgtctcatacatctaaaataaaaaattactttgttaaaagtaattcgaaacatcttattctcaatggtggttcttatattagcccctcagatgaatatgggtttaccggggcgaagtggtttcatattcaccgcaaagattggaatgataatactcgttgtataggagcaattatcaatatagatttgatatatgtaaattataaagataatgaggtgccattcaagttcgaaaaccaggtaatagttaatatcaatgcgttaagagtagctaaacctcgaaacttagctgttatatcgtattcttgtcagatttatataaagaacattacattccttgatgctgctgaacttagcaatgacacatcgttattcgagataggtaataaagcaggtaaagtggttttaaaagttgattcttttgaagggaatgctaaatatttgcggtgggtaaatgattcttccccaagaaaattaaatgcttcggagtttagttttccagaataa

SEQ ID NO: 228561 - DNA, 915 bp, Klebsiella pneumoniae
atgaaaacaaaaaacgaagcgtcagttgttatacctgtatataatagttcttcctatatcgctgaaactatagaaagcgtagcgttatcttgttctgaaataacatttgagataattgtggtagatgacgtttccgatgatatagaaaaactacgtagaatactcaaaaaatattcttatgtcaggctaattgaaaaatgtaataaatcaaatgcatccgaatctagaaacattggaattcaaaacgctcaatataattatatttttctacttgatgccgacgattttttcacgaaggactatgtcaatcataggcttaatttaatgcaaagtaaaaattatggtgttttttttggcgcttacaatgcggtaagcccaaatggaatagctaagccgcatattcttcaatactcagggaatgatatgcgagaatatttatttacgcagggtggagatattcgaacatcaacaatatctatcaatagagcacatcataaagatactctttttgatgaaaaacaatggaagcatcaagattgggggttcgggataagatgttttaataataatgaagatatatattacgataacgtcccattaataaatatatgtagtggtaggcattttcaaatgagcggaaaaatgaatatcgaagcgagtaaatacttcattaaacagtatctcaaagatgcctcctattatccttcgtttgtttttatgcactatttgaaggcagtaatacaatcagatcagaaagccatagaatattttgatgggctaattataaattgtgatcttacaaataaacaaaaaattaaatatactttattaaagtgcatctcatctgaatttttattcaagtacaaagtgaagtcactgaaattgataaaaaaaatgcgttccggatacatttaa

SEQ ID NO: 228562 - DNA, 1401 bp, Klebsiella pneumoniae
atgaccaaattacatcatcgaatacgttccaaagctaatgcatctctaatctctatagcccaacgcttctctgatatattgatcatttttctcggtctttatattgtttgtactgtaaataatattaactttgggatcaaacatcttttaagctgtttgttagtattaactatctttcaaatgataggtgggattactgatttttataggtcttggagaggagtaaaattaatcagtgagttagatctaattatcaaaaactggacattaagcttaatattgatggtcggtattttatcgtactcaaaataccttaattttaactttcgaatttcctttgaatggtacatcgttgtaagtatcggtgttattatctgtaggatgattatcagatatgtagcacgatttatacgtcatttaggatataatacaagaaatgttgcaatagctggctcaatgcccgttggtgtatctcttgcaaaaagttttaatgatgagccctggcttggtttcgttgttgttggtctttatgacatcaaccctccgaatactaacctctccgatatagaatataaaggggatttcgaacaattaatagctgatgctaaaaaagggaaattggatcgtatatatatagcaatgagtatgagcgaaaataatgagatgaaggaactgattaaatcgctcacagataccacctgttcagtactacttattcctgatatttttacttttaatatattacaatccagagtagaagaagttaacggtgtaccagttgtaccgcttttcgataccccgctaagcggtattaatatggtattcaaacgcgtagaagatattattatttcagctctaatattgatattgatttcgccagtattagctgttattgcactagcggtaaaaacgacgtcggctggccctattctttttaggcaaactcgttacggaatggatggaaagcctattaaagtctggaagtttagatctatgactgttatggaaaatgatgatacgatccgtcaagcgactaaaaatgatgtcagaattactaaagttggtaatatcctgcggaaaacatctctagatgagcttcctcaattttttaacgtccttttaggtgggatgtctattgtaggtcctagaccacatgcagttgcacataatgaacaatatcgtaatttaattgaaggctatatgcttaggcataaagtgaaacctggtattacaggatgggcacaaattaatggctggcgtggtgaaactgatactctggataaaatggaaaagagggtagagtttgatctggaatatattcgcaattggagtatatactttgatttgaaaataatattcttgacgatttttaaaggctttattaataaagcagcttactag

SEQ ID NO: 228563 - DNA, 909 bp, Klebsiella pneumoniae
atgaaggtattaattgctattccaacttataatggtggccgtatatgggaaaaggcggctgcaagcataagaaaatatgccggggatgaagtttatgtacaggttgttgattcaggaagtattgataatacggttcctgtagcgtatgaaaatggtttttcggtaaaaattataaattctagcgagtttaatcatggtggcacaagaaatttaattgttgatatgcatcgtaatgaatatgatatagtggtatttttgacacaagatgctatacctcagccaaattttttggataatattttaaaatgtttcgaagatcctatggtaggatgtgcatacggtagacagcttccacatgatgatgccagctatatttcaaagcatgcacgctcttttaactatccatctagaagtcatgtgtctactaaaaatgatatccctagaatgggtattaaaacagcatttacatcaaattcattttccgcataccgaattagtgtattttgtgaattatctgggtttccagaaaatacaattttaagtgaagacatgtattttgctgcaaaatgtattcttaacgattataaggttgcatattgtggtgactcaatggtaaagcactcacataattattcgcctatagaagagttcagaagatattttgatataggggtttttcattgtgatgaggcttggatcaggaaagaatttggaggtgctggaggggaaggaaaacggtttttatattctgaatttatttatttagttaaaaacagtgttgtttctattccccgttccttgctgcataattttctaaaaatattaggctataagttaggtcaaaattataaacaccttccaaataaaatgatccgatactgttctatgcataagaggtattggaaataa

SEQ ID NO: 228564 - DNA, 2163 bp, Klebsiella pneumoniae
atgtctcaaatgtcaaataaaccttcagttaaagatgaacaagatattaatttaggccgaataattggtgaattaattgatcataaaaaactaataatcgcgatcacatctttatttaccttaatagcacttgtttatgctgtgtttgcaacgccaatctatcaagcggatgctttaattcaagttgaacaaaaacaagggaatgcgatattaaataatatcagtcaaatgttacctgacagtcaaccaatttcagcacccgagattgctttattacaatcaagaatggtaatcggtaaaactgttgatgatttaaatttacaagcgataattgaacgcaagtattttcctttgtttggtaaaggttgggcaaggttaaaaggtgaaaagcctggtgccttaaaaatatcacgcttgtatattgctgaaaatcttcaggggaaatcctccgaattaagcatcattgtaaaagataataatcattatgaagtaatctataatgatcataaacttaatggtgaagtaggaaaattagtcagtgctccaggattttcaataaatatagaagaaattgatgcaagtaaagatgccgaatttaccgtaacttatgtttcaaagttacaagcaataaccgatttgcaaaattcattttcagttgttgatcaaggtaaagatactggaatgctgacattgtcgttagcagggagtaatgatgaattaataaaaaatattgtcgatagtattagtcaaaattatttagcgcagaatatcgcccgtcaagcggctcaagatgccaaaagcttagattttttgaatcagcaattaccgaaagtaagatcagagcttgatatcgctgaagataaactaaaccaatacagacgacagaaagactctgttgatttatcattagaagcgaaatctgtattagatcagattgttaatgtcgacaatcaacttaatgaattaacatttcgcgagtctgaaatttcacagctttatactaaggagcatccgacgtataaggcattaatggaaaaaagaaagactctgcaagaagaacgaaacaagcttaatcaaaaagtatcatcaatgcctaaaactcagcaagaaattttacgactgagccgagatgttgaatccggacaggcagtttatatgcagttactaaataggcaacaagaactaagtatagcaaaatccagtgcgattggtaatgtgcgtataatagatagtgctgttacacaacctgaaccagtgaaacccaagaaacttttaattatcatcttaggtttattaattggtggaattatttcaatagcagttgttgttgttcgcacggtattgcgccgaggtatagaatctccagaacagttagaagagttaggaataaatgtttatgcaagtattcctgtttcagaaactattaataaagaaactatttcaacaaaaaatcggaaggataataataataataaaactagttttcttgcaattgaaaatccagcagatctagctatcgaagcaattagggggcttcgtaccagtcttcattttgcgatgatggaagcaagaaacaatgttttaatgatttctggtgctagtcctaatgcaggaaaaacatttgttagtacaaaccttgctgctgtaattgctcagactggtaaaaaagtgttatttattgacaccgatatgaggaaaggttatacgcataaattatttaacacaaaaaatgcagaagggttgtctgattatttagcaggaagagttgaattaagcagagttactcaaactttggaaatagttaattttgactacatatctagaggttcagtacctcctaaccctgcggagttattgatgcattcaagattcagtgatctgatagcttgggcatgctctaattatgatattgttattttagatacaccgccaatattagctgttacggatgcagccataatcgggaattatgtgggtacgactcttctggtcgctcgatttgaacttaataccccacgggagatggatatcagtgttaaacgttttgaacaaagtggagtagtagttaaaggatgtatcttgaacggtattgttaaaagagcaagcaattattataattatgggtataaccactacggatattcatacgatgaaaaaaaataa

SEQ ID NO: 228565 - DNA, 195 bp, Klebsiella pneumoniae
atgtcgaaaaattatgcagccctggcgcaacagatagtcgcggcaatcggcggggtcgacaacgtcgccgccgttacccactgcatgacccgtctgcgcttcgtggttaaagacgacgaacaggtcgatagctctaccctgaaagggctggccgggtgctcggcgttgtgcgcagcgataaccagtgccaggtga

SEQ ID NO: 228566 - DNA, 1014 bp, Klebsiella pneumoniae; identical to SEQ ID NO: 212188

SEQ ID NO: 228567 - DNA, 2184 bp, Klebsiella pneumoniae
atggaattaatgaactggacagggaagaagcgccttcccctcattcgccaaacagaatcagctgaatgtggcctggcatgtctggcgatgatggcctgttggcacggtctacaaacagacttaaccacattgcgcgaacgtttcagtatcagtactcaggggatgaccctgcagagactaattgagtgtgcagctggtatccaattgtcatcacgtgcagtaaggttagagccggaagacctgaaatccctttctcttccttgtattctccactggaatatgaatcattttgttgtactttataaagttcgcaggagcagactggtcattcatgatccggacaagggaaagataacactttccttacaggacgcaggaaagcacttcactggtgttgcgcttgagttgattccatccagcgattttacggtcagggatgaaagaaagaaaattcaccttcgccaactgacaggtaaaacacccggcctgcttgcggctatgtcacgcatcattacttttgcactatcactggaaatcctgacgctgggaagtccccttctcaatcaattggtgatcgatgaagtcttggttgctgcagatcgaagtctattgactgtggttatcgttgcactgttgctattgtcactgacacagatgttgctatcactagcttgccagtgggctagtataaccctgtcagtcaattttaatatgcagtggacggcccgagtattcaaccatctggtccgcctccctctggcttggtttgatgcgcgtagcagaggaagtgttaatgcccgttttgatgcgatagataccattcagcaagcgctaaccacgcaggtactggaaggtattctggatgtactgctcgtagtgactgcactctgcatgatgttgttatacagccctgaaatgacattaatagctgtactggcagccgtcatttacggtgtaatgagaaccctgtggtatccatctctgagacagtcggcggaagatgcctgggacgctggagcccgggaatcaggttattttcttgaaactcttagcgggatcctgagcctgagaattaacggcgtgacaactcatcgagaagcagtctggctgaatcttaacgtcacccgcaggaatacgcagttacgccagagtcgactgcttatgtactatgatattgcgcacacccttacaggtagtgttgtatcggcaattattttgtggaaaggtgccggtgaagtgctgaacggtacattcacagtcggtatgctggttgcgtatttgtcgtaccagatgcgtttttcctcgagtatcagcagcctgactgataagttttttgcgtggcgtatgctcgatgtctataacgaacgtctggcagacattgtgctcaccccgacagaaggtaatcaacaacaaactgctcaggagaataatagcacttctaccactccctcaattttccaagacagagtaactgaagataccgatcttccgttaactcttactcacatagccttcagtcataagggaagtaataagccgatactccgtgatgtatcgttgaaattgcatactggtgaagtggtggcaattactggtaaatcaggatgcggtaaatcgacactggtaaagcttatcctgggaattcaccttcctaatgaaggtacaatccggacatttggcattccacatacacatccagattattaccagattcgtcgacgtattggaactgtactgcaggaggatcacctattcaggggatctattgcagataatatcatttttttcagtgaagaccgggatcatgaaagaatgattcagtgtgctcgcctggcgctcatcgacagcgatattatgacaatgccgatgggatatcagacattgatcggtgagaccggtggtgggctttcgggggggcaaaaacagcgtattttattggcgagggcattgtataaaaaaccgggttttttgctactggatgaagcgaccagccatcttgatgttgaaagtgaaatccaaataagtcagacactacgtcaactcaaggttcctgtactgctgatagcccaccggccggaaactattgcatctgcagatcgagttctatatctcaccgacggatattttactgatctgacgcaccaatacagaaatggttccgaatatttagttcgtatggactga

SEQ ID NO: 228568 - DNA, 1260 bp, Klebsiella pneumoniae
atgattatgggcgtattcagaagtgaggcattagaatatcatagtgatgccgaatacggtgatgttgtaatacctgcatcattaagtatgactgcatgtgctgttgcaacattattaatatttatttgcgtggtattgttcgtttattatggtagttacacccgtaaggctcatctgacgggtatcgttatgccctcatctgggttggtgaaaataacaccgcaatatgccggttatataacacagcttactgtctcagaaggtcagcatgttattgctggcgaacctctctaccatattaacggtgaacattttaacgagcagggagccggtacgctggcagccatgaatctttctctcagaacacagtatgcgatgctgtcgtctcaggagacgctggaattacgtgataatcagcagcagcaggctgcgataaagcaaagaattgcttcattgcaattacaagtcaaaagtgcggaacagcgattacaaatggctgaacgtcaggtcggactaaccacatcagtcatgggaagctataagaaactggccggtacgcattatgtatctgatattgaatatcagcagaaacaaatagatgtctctacggctcagcaaaacgttgaagatcagcggcaagggcttctgcagttacgcactgcaatagaagccgctaaagatgatcttaaccacctcatcatccttgggggaagccggaaggctgaattggacagacagctgcaggagatcagacaacagcaggaggagcttgctgggcaggagaacatcacgttgacggcaccggtatcaggtaccgttgctgcggtgttggttagacagggacagtccgtgagagcattagagccagccatgacagttgtgcctgataatgccagcctgcagatagagctatatgccgctagtcagaatgccggtttcattcggccagggcagcgggtagcgctgcgttttgccgctttcccttatcagaagtttggcgttcagtacgggactattcgtgaaatcagtcgtacaacgttgacaccttcggatttactctcagtatccccagtaacttggaaagagaatgaagggcgctaccgcgtcatcgttagacccgagaatccctttatcttggcctatgggaaaaaagaacccctgcgccctggtatgactcttgagggggatgtcaaccttgatactcgtcctttatgggaatggttgacagaacctctctggagcctaaaaggaaaactttaa

SEQ ID NO: 228569 - DNA, 642 bp, Klebsiella pneumoniae
atgaacaggcatgaaaatctatttgcatatagcaaatataatggcattgtttttcttgttgtggttattgtttcatctgctgcgacattggttccgtacgttttactgaattatgtgagccttgatattgctttttcctgcatgtttggctcggaatttttaattgcaactctgttgtatgtgttttatttaagaaagattcccgggtgtaagttacgaataaaaactaatgcggtgacagtcaagttttcagtcatcttattccttatgattattttgattcagctggtagtttactgctatagagattatttatataattacgagtcatcgcagataaatttaatagcagttttagtagcggtttttgtcgtaccttactatgaagagatcgtttatagggtatgtgcttttggttttctttgctcaatttttaagaaaaatctactcatcccaagcttgattacatctgtgtttttttgtgccatgcactcacagtattataatgttttggatcaactaattcttttcgtggtgtcaatgtgtttgttaaaagttagaattaagagtgaaggttttttttatcctgttctaattcattcgggcatgaatttattcgttataatattaaatgttatatga

SEQ ID NO: 228570 - DNA, 1149 bp, Klebsiella pneumoniae
atgcggcgcttcgctggggcttgtcgcttcgtctttaaccgtgcgctggcgcttcaaaacgaaaaccatgaagcggggaacaaatatatttcctacaccaaaatggcttcatggctcattgagtggaaatcacaccctgatacccagtggctaaaagacgcaccatcacagccgttgcagcagtcgctcaaagatctggagcgcggctacaagaatttcttccagaagcgtgcagcattccctcgtttcaagaaacgcggccaaaacaatgcattccgctacccgcaaggcgtgaagcttgatcagaccaacaatcgtatatcgcttcctaagttgggctggatacgctatctcaatagccgtgaagtcatcggggaagttaaaaacgtcacggtcagccagtcatgcggcaaatggtacgtcagcatccagacggaattcgaagtgcctgaaccggttcataaggcagcgtcaatggtcggtctggacgctggagtcacgaaacttgccacgctttctgatggcaccgtataccagccagtcaacagctttaaagcaagccagcgtaagctggctatgcttcaacggcagttaagccgcaaagttaaattcagtgccagctggcagaaacagaagaaaaaaatccagcgtctgcactcacacattgccaatatccggcgcgactaccttcacaaagtcaccagtgaaatcagcaaaaaccacgcgatgatcgtcattgaggacttgaaggtcagtaacatgtcgaaatcggcaaaaggtacggcagagcggcccggacgaaacatcagagccaaatcaggcttaaaccgttcgatactggatcagggctggtacgaaatgcgcagacagcttgagtataagcagctctggcgtggtggtcaggtactggcgatacctccggcatacacaagccagcgttgtgcctgctgtggtcatacggcgaaagaaaaccgtcaaacgcaaagtaaattcgtgtgccaggtatgtggctataccgagaacgccgatatcaacggagcacgtaacattttagcggcaggacatgccgtgcttgcctgtggagggatggtgcagtcaggccgcccgctgaagcaggaacccaccgaggcgagtcaggctccggtctga

SEQ ID NO: 228571 - DNA, 585 bp, Klebsiella pneumoniae
atgaaggaattaatgctgttaattcctctgggcagcgctttgctcttaaccgggtgcgcgggcacagagactgaatttcaatgtaatgccacgacgtcggatacctgtatgacgatggagcaggcaaatgaaaaagcgaagctgaaggaggaacgcagtgatgcaaagccggctgcggccgggttgccacaactgactgagggtaatttcagaaccacgtcagttaattcgtacccgttgccgcctcaacccaacctgaaccgggccagagtggcagcggagagagaacgagcacgtgcagtgtacctaaataatccaacggcaaagaatgagacaatatatttcgaaaccgagaaaaggctccagtctttgccggtagtgaaaatgtctttaccagtagtggcgtcaacgtttacgtcaccgtcaacaccgccaggtaattatccccggccattaagaaaaggggaggagacaacgtcattgtggatagcgccgtatgtggattcagatgatgtatatcaccagccggcaacggttctttttgtcgtaaaaccatcggcgtggggacagcctcgccttaattga

SEQ ID NO: 228572 - DNA, 1425 bp, Klebsiella pneumoniae
atggccaacttcaacacgctgatcaaacgtaagcaatatatctggctgggactcattctggcgggcggcgcggcagcagtcggaggcgggctgtatctgtcagatctgaacatgagctctgatgaggaagccccggctcagggcgaacccgcaccggatatgaccggggtggtcgacagcagcttcaacagtaaggtggagcagcacgcgacaacagaaatgcaggcgactgccgctgatctcaacaagcgttttgactccctgcagggggaagtggacctactgagtaaggcgcgaaccgctgaccagatacgtatcgacaaactcagcagtgacaatgaagccatgcagaatcagctgaaggcgctgggcgtgaaaccggctgtctctggtggcgagcccgcgccgactcctccgtcaccgccacccggtccggaaggggagccgcagccagccagttatccgccgcaaaccggcgccgcggtaccgcctccgacggcattctatccggggaatggtatgacaccgccgccgcaggtcagctaccagtctgtaccggtaccaaaccagatacagcgtaaaacgttcagttacgacaaaggaaaaaaaacgaagtcattgccgtacattccgtcggggagctttgcaaaaagcatgcttatcgagggggcagatgccaacgcgtctgttaccgggaatgaatcaactgtaccgatgcagttgcgtatcaccggtcgcgtggaaatgccaaacagcaaaacctacgacctgacagggtgttttgtggggcttgaagcctggggcgatgtctccagtgaacgcgccattgtccgtacccgcaatatcagctgtatcaaaggtgataaaaccatcgatcagcccattaacggccacgtttcctttatggggaaaaacggggttaagggagaggtggtgatgcgtaacggaaaaatcctcggctgggcatggggggccggttttgttgacgggattggtcagggcatggaacgggcttcacagccggctgttggcctgggggcaaccgcatctgttggcgccggtgacgttctgaaaatgggggtcggcggtggtgcatctaaagctgcgcagacgctgagcgagtactacatcaaaagggccgagcagtatcacccggtcattccgattggtgccggcaacgaagtgaccgtcgtgttccaggatggattccagctgaaaacgattgaagagctggaagcggaaaagaacgggcaacagcaggctcagaatcaggaggcggagccggcaccgcaggctgatgcacatcatcagacaggcggcggtatgaacggattcaatactgacgagatgctgaaaaagctgggcaaacttgatccgcgtgagttctctccgggcgcagcgccgcagggggaaaataatggctag

SEQ ID NO: 228573 - DNA, 720 bp, Klebsiella pneumoniae
atgtgtgcgaaggatcgtagtcaaattgctgtacgcagtcaaacagattccattcattctatgcgcgagatgcttaatatttcatcttgccctgcctttattcgtgattcccggggcgacgtaattcacaccagcccaacctttgataaagttttcttaacatctgggtgcgctggaacatttgatacacacagtgcacctggtaactggtttctggatctctcccttgaagtcaaactggaactgatgcagtcagaactgaaatcattttcagaaggttctgctgtactggtcaaaaaaatttggttggtagattctctttggactgtttttattgaaacgttcacaattaatgaggagacctacagtaaatgggtttttatcaaggaaggtgatcagattcctcagccttcaagagaatataatgaattttcgaaaaaaatgcagggatatatcgaaagaattcagcggtctgcaaaatctgactgggctatctttaatctatatgcggttgggttttcacatgcttctatttcaaaaattattggtatagaggtacaaacatcaaagaatacagttagcaaaataaaaaaagaattgaactttgatagtcgtgattacattattttgtcatcaatttatacattaagttatggaaggtttgtttcgaacgtgctgggtatattgaaagctggtgttaatggtttgttaaatcaatag

SEQ ID NO: 228574 - DNA, 351 bp, Klebsiella pneumoniae
gtgaaaaaagagatctcccgcaacccctctttcacaccttcgcctaagctgcgagcacatctgaactcccaccgggaaggggtgactgaacggctgaataatatctttgatcgctatgcgcatctggttcgcgcctgtgcccttcctctcgatgacgacgaaacacaggttctgcttaatgttctgaatggctccgttgtggaacccgcctttattgaatatctggctcaggaaattcgggactcggatgattatctggaagggatacccgcagctaaatcactgtacgaaaagtgtcagtcagcgacctatccgcaattgctggccaccatcgaacgcctgggtcgataa

SEQ ID NO: 228575 - DNA, 210 bp, Klebsiella pneumoniae
atgaaggtgttcagcgaacatggagaggaagggcttcgttctctccgtgtgggcaagaaaagggcacttcatatgattgatgatcctgttgcgcttgaggtagaactggagcgttcgaaagataaacgtattcaggagcttgaacaaaaagtccgccgtctggaattgcggatactttatttaaaaaagttgaaagccttagttcggtaa

SEQ ID NO: 228576 - DNA, 240 bp, Klebsiella pneumoniae
atgagtattgtcagccggaagtttgatcggaaggatgtgggaacagtatttcgccatgcagtgaccgggaaagtattgtgccgtctggaggtcaagctgactgcagaagacagggaagagttactgtccttaatcagtctggtgtatcgcgccggagagaacgccggtagtgagcaacgggcggctgaaatccggcaggcgctgggtttacagagagaaaacgagtcaggaggtgtttga

SEQ ID NO: 228577 - DNA, 432 bp, Klebsiella pneumoniae; identical to SEQ ID NO: 135566

SEQ ID NO: 228578 - DNA, 2058 bp, Klebsiella pneumoniae
atgtctgcaacagagtctaaggtaaaaactgcaccgaaaaccagcaaaaaaacgcttaagtctgccgaagctgaggcgcttaaagtggctctcgatgccgcacaggtcgagtatgtcccggtgacggcactggtgaagtctcccctgaacgtcaggaccattccctatccggcggagaaagtctgttcaatggcagattccattgaagccattggcctgttgcagaatctggtcgtgcataacctcccggatggtcgctgtggtgtggctgccggtggtcgtcgcctgaaagcgctgcagctcctgcagagtgaaaaccgtatcgatgccggatatcaggtgatggtgaaaaaggtacctgatgaactggctgttgcggcatcaatggcagaaaacgaacagcagatggcaatgcatccgtctgaacagatcgccgggttccgcacactggcagagcaggggaaaacccccgcgcagattggcgatttgctggggttcggtacgcgtcatgttcagcgcatgttgaaactgaccgaactggctcccgaaattctggcggcgctggcgaaggatgaaatcaccaccgaacactgccaggcactggcgctcgaaagcgatcagaaacgccaggtggaagtgctggaatccgcccgcaaacggtcctggaataatgaagtatcagtttcctcgatccgtaacctcattacctcagaagaggtttccacaaacggcgacaaattccgctttgtgggagaggccgcattcagtccggatgaaatccgggttgatctcttcagcagcgaaaacggcggctatgtcaaaagtgcatcgctcgataccgccctgctggaaaaactgcagaacatcgcggagcacctccgcgaagcggaaggctggtcatggtgtgatggtcgtcttgacccgatttcacactacgggaaggacactaaaatctggcgcctgcatgctgtcccgcctgtggaatataccgaagccgaatcagaacgtcttgcagagctggaagctctggaagctaagtatgaagacgagaaccccggcgtgaatgatgacgtcgtggccggggctctggaagccgtctgggaagaacagcagaccatcgcgcaccgggcaaaacaccgggcatggacggaggaaatgaagcaatctgccggagtggtggtttcctggactggccaggaggtgaaagtacagcgcggtgtggtgctgtgcgccgatgaaaaaatggaggagaaggatgcatccaccgatcaggcccctgaaaaagtcgatccgctggacgccgtcagtgtcccgttgctggcccgcctttcttctgaacgcacactggcggttcaggcggccctgttgcagcagccgcagaaagccgtcgcgctgatggtctggaaaatgtgtaactcggttttccataccacaacgtccgtcaaagagccgttctgcattagcgtgagtgtgtcgcattacgcgctgacccgtgaagcacctgacggtgaaaacagcgttgcgtttcaggccatccagtcagaaaaagaacgtcttgaagccctgctgccggaaaactggcgaaaggatatgaccaccttctttacgctcgatggcgcaaccctgatggcactgatggctttctgcaccgcctgctccatagatggtgtacagggcaaggatgaatttggtcgtaaacaccagagttcgctggatggggtggaaaacgccattcagtttgaccttcgtgactggtggaaaccgacggctgataaccttttctcgcacatgaagctgccacacattgtacaggcactctctcaggccggactggctggcgcagcacaggacgccgcgaagatgaagaaaaaggatgccgctgaacatgcagagcacttcctctcaaaaatccgttgggttccggaatggatgaccagtgctgacaatcagaaacagcttgccgcaaagtctgaactcagtctggcaacaagtcagaacgataccgacgctgatgccggcgacgtcaccgaccataacaacccggcctgcgccgcctga

SEQ ID NO: 228579 - DNA, 558 bp, Klebsiella pneumoniae
atggcgactgtgcttgtctcagccccggcgaatggactcaaacgggtgatacggcgccaggggaaaggagcaggcacccgccgcaacgacgaagagcgcgggcgcgaaacggcgttgccctgcagagtgccggcagtccttcgccggcacggtgaaagcggcgcggccggaacggtcgcagcaagcgctgccgttgaccttgaccttgacctcagacatcagacactagccgtcaggcccgaaaccgcctgcgggttcggcggagcccggcaggtgcgacagcagctgccctggcggagtgtggctcgacgactggacagcgcagctggccgggagccgaaggtgtccaatgtgggtgtgcttttaaagcctttaagggttaaaaagaggcatcacagcaggaagaggaagagaaagcagacagacagcagtgagcaaaccggaaacgtaaagatgcagactggagagaatatgttttcatgccgccggaaagaagccatgataaaccggcggcatactagacggggcgtcaggaacggagcttattttccttcctga

SEQ ID NO: 228580 - DNA, 318 bp, Klebsiella pneumoniae
gtgcgtatgtctctgatgtttgctgccgtgacgcttttaaccggtattaacctgttttttattccgtttcagcctgttccggccctgtggggggctatcctggccgttgcttttgttctgattaatgtcgtggcggataagctgcgcctctggagtggcattgcgtggattatcgttgccggcatcatcataacgctgatgctgaaggggaaagagccgggtgacgaatttcgtgtcctgatcaccgttttcgctttcctggcttcaatctggtatagcgttgcgcagttcaggaaggaaaataagctccgttcctga

SEQ ID NO: 228581 - DNA, 252 bp, Klebsiella pneumoniae
atgacaaatatcattctgtgtgatatgactgccagcatcagcgaacttaaaaacgatccggtggccaccgccagtgccggcggcggctacccggtcgcgattattgaccgcaaccgccctgttttttattgtgtgcccgcggctctgtatgaacaaatgctcgatgcgctggacgaaaaagacctggtgcaattgataacagaacgtcaaaaccagccgctgcgtgaagtggatctcaatcagtatctgtga

SEQ ID NO: 228582 - DNA, 306 bp, Klebsiella pneumoniae
atgggtagcaaaatcgcaggtgtggttttcttattcttcgctgtctggggaatggcttcagtgattgaattgcagtactggcgtaacgctgatacctatcctgtctgtctgacaaaacatctccggatctctcccgaaaataacgaaaagagcctgataaggatagaaatggaaacctttgacaaggtatgtggtgataacaggggcctccttgccgttacccaaaaacaaaacggtatgtttatgcgctgtgatgattccccgggatttttttcatggttcagcggcgtttacaaattcaattaa

SEQ ID NO: 228583 - DNA, 735 bp, Klebsiella pneumoniae
atgaatacaccagatgctgatctattacacttatttgaatcattaaccaccgagcaaaagattgatatcgcaagacgcttactacaaaacaaagaaataaaatcaacgacagttatttcttctgaagaagataaagctatttcgttttcacaaccttatgtatttgcttttacttccaactttcgtgttttctctgatcttgacatatccaagaatgaattccgagtattaacatatatcttggagtatatggagtttggaaatctgattaacctttcacaatcatctctgtgcaaagcattgaatatcgcttccggtaatatgtctaacatcttcaaaaaactcagacagaaaggaatactcgtcgagcatcatggccatctctatatcaactctaacattttcgcaaaagggatgagccatcaactggatcataaacgtaaagaacacctgagcaacgctcgcaatctttgcgcagaaatagaacagtatccagaaagttattcagctatgtcaaaaagtgaaagaagaaccctttccttagaaactgaaaccaaagaaatctatactgacgcatttgttttcagtaagaagaaaaagaataacgctgttcctaataccaacaatagcatacatattgataaaccacgaaaagtatataaaagaacgaaggaaaatgaggaagcaagaagaaacgctgttgacgcagactctcatatgcagaaagtatcctga

SEQ ID NO: 228584 - DNA, 801 bp, Klebsiella pneumoniae
atgaaaacactacccggttcgcttgagattaagctccacgcaaaactatccaagagtgatatactaaatatattggctgagcagatgactatgcttgaggaaacatttggcattcaggagtttaagattttctcttaccttgaatgctatattggagataagaaacaagcattatattatagaagtcgcaacagtgccgtagccacattcaaattaaagggtcttgaatcccctgtaaacacggctaagctcatatcaaaggaaaacggacaacgtattgtttcctttgataaagaactggatatagacagagtatctgctacagtccgaaatatacaaaacaataatccttatcaggggtggtctgaaggtatcagtgttgttccagcttcaatcatcagtaaaatgatccaagaggatataatacgagcgcaggaagaaaaaggcagactttaccgtattgaagaacagcgcaagaaagcggaacaaatacgcaaagcaaaagaaagagaggaatatgaacgacctttaaaggcttttatttcttcaaaaataaaagaaagtggtttatctgagaaggatttcaaaaagcaggtttgttcaagctgcgactatctgaaagatcgttccacaaaatcaagatactttattgaacgacctgacttgttagaaaaatattataatgaaaaattaatccgctattcaatcaaaagaccagatggtaaagttggtaaggtcgaaatctatactgaaatgggtgagtttatttttgaacaatataaaatacttcaccttatttaa

SEQ ID NO: 228585 - DNA, 225 bp, Klebsiella pneumoniae
atgaaaagaggggtgttaagtaaatgtttcactgaatcttcacatgtttcattgattttaatatttatatctgtttgtgttagctctctgattttatatgccatcagcattttatatcctgactttacaggatggaagagggatgtactaaatggagtgttggttttagtcgtctatgaggcgtgcagccgtatccaaaagatttgtaagcgctttaaactttaa

SEQ ID NO: 228586 - DNA, 288 bp, Klebsiella pneumoniae
atgagtgaaaaactgataaaagaatcccggaaggttttcatgcatatggcaagtttattctatgaaatgaaaataaatacgcttaaggaaattcgtcccgatgaagttgatgtgttaatggaagatgatgcattcatggaaggcatttataaagagagcattaaaaatgcaggtgcagcttttaaaaaagtagtcagggctgagtattatgagcaagggcattcagtaaaaatggttgataaggaggtggtattgataacactgcgtgttaatcataaaagaagatga

SEQ ID NO: 228587 - DNA, 387 bp, Klebsiella pneumoniae
atgaacgaaaaatgtttaggctggaatgaaatacccgttaaaatatccgcaagtaatgctgagacagcaaactttgctactgatgttgtaaatgtctacaatgagtttatacattacttatattacaatctaagggaggatgcttttctgaacaaattgaaggatggattttacagggagatattcataatggatattattaatctcacgttacaggaatggtttgaaagtcctgaagagataaagattaaacacatatcagtcccggaggttaaaactatactaagtagctatcatgagtttttgattaaatgttttagtggggatggttacgttctttattacaaaagaatagaaatcagcgcaaataaacagcgtgtaatataa

SEQ ID NO: 228588 - DNA, 312 bp, Klebsiella pneumoniae
atgaaaagtaaaaacgtactgccttgtgtggtgactgttacgaatgatgagacagaagtatttatggaaatggcaataaataactttagaaaacatcttcaggtcatgattgattgtatggggaatgattatgagcgccattttaaagacaggcgttatattgaagaagtgattgctaaagtgattgagcgaacaaaacaagagtttgctgaatcaatgaaagataataaaggggaagaatattatctgttcttggatgaggtgagaaggaatctgagagttatttattctgcgtatcgtactaactattaa

SEQ ID NO: 228589 - DNA, 249 bp, Klebsiella pneumoniae
atgattcaaaccaataaagaaaaacacccgaaacttatacggttgccggaagtaataagaaaaactggatttggcaggacatggatttatgagcttataaaggctggaagatttccaaagcaagtaaagataagtgaaaggtctattgcctttatcgaaagtgaaattgatgagtggattgaaaaaatgattgcgaaatctcgctgcgtatctgaatgcaaacattttaaacaaaaggggaatatatga

SEQ ID NO: 228590 - DNA, 843 bp, Klebsiella pneumoniae
atgaccaaagcggagatcgccagcgctgttaatgaatggttcaaaattgagaactacagcgtcctgcaaaatttgacagtggaacagcttttccaagagatagagaacaggattgtcgtctatcgtatggaacaataccgggctgagctgtctcctgagaatcttcgcaggcatcagaaatattacgaagagctgattgaaggcaaggtcgtgtttggtgatgttttcgggggggcagaaaaaagactgtcttccagctatgccgtcaagcctgtaacacaccaagggctatgggaggtggcgggttatgtggctgctttcgataaatacgttaaccccgaaggaaaacccctacctcatatggaagtctcgcattatctgaaggaagccggggcaaacaacgaagggttgatgctggttcaaattaatctggcggaaacgtcatccgaagaaatcatcaatcacctgaaagtcatggttcctgagtggaaacagcagctacaggctcctgagcccccagccagagattttcgttttggggtcagcaacctcaaaaaaatactcgattacaacattatccccatcatggatctgctgtactgggcgcaggatgaagaggtcaggattggtatgccacaactgaccagctttttataccctgatgagtttcaagacggtatccgtgatgtagataaggtgaaatcaacagatcatccattggcagtaaagtatctgacaaaccttgctcactatcgctcttttgtcgattttacatatagatacgacgacagaagacactggaaggttcaggatctcatcactgacgaactcggtgaggactga

SEQ ID NO: 228591 - DNA, 1248 bp, Klebsiella pneumoniae
atggctctcactgatgtcaaagtaagaaatgccaagcccgccgacaagcctgtaaagcttactgacggcaacggcatgcatcttcttatccatcccaatggctccaaatactggcgtctacaataccgctttgcaggaaaacaaaagctactggctcttggggtctaccctgcagtctctcttgctgatgcccgtaaccgtagagatgatgccagaagattaattgctgctggtattgacccctccgaaaagaaaaaatcagaaaaggtagagcaaagcggcgctcttgcttttgagtccgttgcaagagactggcatgcaagcaacatcaaatggtcagaaacacatgctgaaagggtaatgaacagcctgaccaatcatgtgttccctgttattggtaaacgaaacattaccgacctcaaaacccgtgacctactccaaccaattaaggcggctgaaaagtccgggcatcttgagattgctgctcgtctccagcaacgaatcaccgctatcatgcgatatgctgtccataacagtattatcgatagtaatcctgctcaggacttagctggagccattgcaacagcaaaacgagtccatcgcccggctcttccattcgaacgcattacagagcttctaagccgcattgagagctacagaggaagacagctaacccgccttgctgttcgactcactttactaacttttgttcgttcaagtgagatgcgttttgcccgttggtctgaaattgacttcaagaatgcgctctggactatacctgcagaacgtgaagaactacaaggagtgaaacactccagccgtggctctaagatgaaaacccctcaccttgttccattaagcaagcaggcaatagcaaccctgagagaaattcagaagctcagtggcgatcaggaaatcatcttcattggcgatcactatgcctataaaccaatgagtgaaaacaccgtcaacaatgcgcttcgtaaaatgggctatgacacaaaaacagaagtttgtggtcatggtttccgctcaatggcttgtagtgccttgatcgaatccggcttatggtcaaaagatgcagtggaacgtcagatgagccatcaggagcgtaataacgttcgcgctgcttacatccatcttgctgaacatcttgatgagcgcaggttgatgctgcagtggtgggccgattaccttgatgctaatcgaggtgctaccactagaccatatgagtatagatcccgataa

SEQ ID NO: 228592 - DNA, 1134 bp, Klebsiella pneumoniae
atgcctatatcaacattgatttttcaaggtttaaatcaaaattgtgatcatttatcatcaattcgtaatatgttatatgatcaaactgcaagcaaatttatcataagcgtagcttacgcccgagtaaatggtgttgagcaattgcgagatctgttattaaataataataataagattaccgcttatgtaggtatcgctaacggagttacttcgtatcaagctctttataatttgctaagttatggggtaaacgtttttggtatacatatgggaagtgattctaggatatatcatccaaagatatactcatcaatttcacaagataaaatgagggttattgttggtagtgcaaacctaacattttcaggtttgaacgaaaatgttgaaattagctgcgatatgactttagacaataacgaacctaatgaaagaaaaaatatcaatgatattataaacaccttttcaaatctggataaaaacttcccaaataatgtattccatattaccgacgaggctattctaaaaaaaatgctcaatgaagggcatttggagaatgagctaatcaaaaagtcagcaaacataactggccactcaaccacgtatgctccaaatgcaattataataccaccattccctaaatttaatacaagacaaagaccattacgtcgcgtaatagaaaataatttcacacaaacaaggttcggtgaggcgtggaaaagtaaggcattgactgagcgcgacttaaatattcctaaggcattaggaactaatccaactggatctatgtttttcaataaagggcaactcgaaaatattgatcaaagacattactttagggatattgttttcgggaatcttggctggaacaatgacacatcctcattatcaaaaatgcacttagagagagcctttgcatatttcgaaatcattataaatgggacttcttatggagagtttaaattgaaactaacacacgatagtcgtaccgatagtccatcatatttgcaacgtaatagtatgactcaagtacattggggtgaagctaaaccattagtttctcgtgtcgaacttcttggaaaaatagcagtgctatatcatgtaaaaaatgatcattatcagttatctataaattaa

SEQ ID NO: 228593 - DNA, 1635 bp, Klebsiella pneumoniae
atgaaatttaaagccgatcaaactgcgcaaaaattacgaggtggatattatactcctcaggaaattgcagattttgcaaccaaatgggttctaaaaaataatcctcgcaatgtgcttgagcctagctgcggtgatggagtattctttcaatcgttgttcaataataattgcgataaaaacattaacatcttcggatttgaattgtttgatatcgaggctaaaaaatctattgacctatgcaataaacttaaatttgaaaatgttaatatcagggagggagatttccttgaatggtttaatagtgaaacgcttaaaacgtcaactaaatttgatgctataattggtaatccaccatttatcagatatcagtttttagaaaaagaatttcagaaaaacactgaaaatgttttcagtaatttaaaccttaaatttactaaacatactaatgcatgggttccatttattatatctggcattgaattacttaatcccgggggccgtctcagcatggtaatcccttcggaaattattaatgtaatgcatgcacaatctctgagaacatttttaggcgagcattgttcgaaaattgtcattatcgatcctaaggaaatttggtttacagatactttacaaggtgctgtaattattctggcagaaaagaaaattgataataaattgaagagcgaaggagtaggcatcaaaagtgttagtggatttgattttcttgaaacggatccagaggaaatgtttgctaatactgatgctatcaatggtgaaaccgtcaaaggaaaatggactagagccgtattagaaagggatgaaatcgatttaataaaaaaaatagttacgcaccctcaggttcataactttgactctattgcaaaggttgaagttggcatagtaacaggagccaacgaatttttcttagtgaataaagctgtcgtggatgagtataagcttaatgacttcgctcatcccatgtttggaagaagtcagcattgtcaaggtatagtctatgatgaaatacaacataaaaaaaatgttgataataatctgccggtattctttctttacttcgataaagaatataaagatttacccataaaggccaaagaatatatcctttttggtgaaactcaagatttacatacgcgatacaaatgtagaatacgtaaaccttggtacaaggtgccatctattttcagcacaaaactagcaatgttaaaaagagcgcatgaagcacctcgactaatctataatgatttccaagcatacacgacagatactgcttatagaattgaaacaaaaaatgatattgatgaaatgcgggttgcgtattttttcatgaatccacttactgctatctttgccgaactagagggtagatcatatggtggtggtgtaatggagcttgtcccatctgaaattagaaaactatttattcctttaccttcaaacttagactttgatatcaatgagttaaatgatttgattttaacaagaagaatggatgaatgtcttgaagtacaaggacgtaagatcttcaacgccctcggttttgaaccagaagtcaatgatgcattaatgaatatatggcgaaaattaaaaaatagaagacaaagaattaccgaataa

SEQ ID NO: 228594 - DNA, 312 bp, Klebsiella pneumoniae
atgaatacggatgataaaaacagaaagccaagaacagaaaaaaccatcaagcaaaaaatagcatcagcgcagatgcgtttgaatcgtctcaagaccaaagataaatctttatccaagagtgctgagacacgcttgaagattatccttggggcggaagtggctaaagctgctggctgtaaaatagaagatgtcgataaggaatttatattaggcgtactattacagtctcagcacattagttctgaaagcaaaataaaattaaaaatgcgaggtaaaagatttcttgaagatatggccgggagacaatattaa

SEQ ID NO: 228595 - DNA, 660 bp, Klebsiella pneumoniae
atgaactctatctattgggtgcttatcatcggtctgctgatgaacataccatcattggctccggtgctgtttctccgtaagactcaaaagaacgtgaaggtatcgatggtggccagactgtttctgcttaacgctttcttggtgctgtcccttgtgacgctatcgcggaacattacgcaagaatatggcttgttcccggcatggttgctcgttgttgccataggattgtttgcggtcacgctagtaccaacggtaaaatttatgcgtaggcatttaaccgtcgggaaaagtcgggctgtaatgctctcatcattcctgattgtctatgctgtcaggttttatggcgtgttttcagatttgaatggaagtggatatacgattaacggctataacacagtatggacattcttcttcctgtttgcctgtctactggcttatcttggttgtgcagggagtaaaacatattctggttattctgcgtcttcatctgcatcgcaaccagattattttaagccgaccaaagaatatgagacgcaatcacagattgattacgatattgccgtgaaggggcggagtgttctatccgatcccaatctaagcattgttgagcaacagcgttatcgggatgctcttgagaaaaaagaaagagaagattggtaa

SEQ ID NO: 228596 - DNA, 555 bp, Klebsiella pneumoniae
atgcgcaaaattttattcgcagtgagccttgcttcgctgttagccggatgtggtgaaaaaggtgactacgagaaggcgatcaacgcgaagatttcacaatcaaagctgtgctactcactgcaggacaatgacattgtgttcaataagggcttccccatccgtgttaatcacggctaccgttctgcggggtatagtgccagtgatgaaatcttgaaaggtctggctaatcagggactgcttgatgtttcgcagcaacctaacggctttagcagcgttgatgttctggaagtaacagacaaaggccaagaggttgagttttgggaccgtgagaacggtgcctgtgttggtcatcgggcagttgctgaggttaaaagctggactgaaccgagtgagggtaatggcgttaaaatgacgcaagtgacctatacgtggaaactggatggtgtgccgggctgggttgataaaagagccttctctggcgtgaaagggatgtctgaaccagaagaagccaaaattgttctggtgaaaaccaataacggttggcaagcgcggtaa

SEQ ID NO: 228597 - DNA, 324 bp, Klebsiella pneumoniae
atgagccagcgagaatcccatagagacattttttgtaagcgcttaaaagaagcgcggcttgctgctggtttgtctcaaaagaagctgggcattgcagccggaatcgacgaatttgtagcaagcacccgcattaaccgatacgaaaaaggggtacatgaagcagatatccatactgctcagaaattagcacaaacactaaatgtcccattagcatatttttatgtggaaaatgatcaacttgctactattgtgatgaattttgataaactatctgaggaagatatagaaaatataattgtcaaaatcaaaaactataatcaatag

SEQ ID NO: 228598 - DNA, 1230 bp, Klebsiella pneumoniae; identical to SEQ ID NO: 79378

SEQ ID NO: 228599 - DNA, 141 bp, Klebsiella pneumoniae
atgaaagcactctttaatttatctatttccacatacttaattttactgatcccccccctcgtcattggaatgttcctcacacttatccaaaaaaatcctgtcattgataaatgtaacatgaataacaaaatgaatagctga

SEQ ID NO: 228600 - DNA, 273 bp, Klebsiella pneumoniae
atggtaatatcactactcatccggataactcggagagaagatacttgcggcctgtcaggtaaagagctgggggcttactctccggtggaaacgaactttaattacgattctaataaaattttgcgtcttaacgtctgtgtcagcaatatccttgataagcagatctaccgattttcagaaggggctagtccctataatgagttagggtgggcttattatgtggggggcggtagtttcattctgttcctaattattaagactaagcaagaataa

SEQ ID NO: 228601 - DNA, 1089 bp, Klebsiella pneumoniae
atgctcagccagcttaacctgcgttttcacaaaaagctgatcgaggcgctgaaagtgcgcgccggtcgcgaaaatacttcggtcaacgccctggccgaacgcttcctcgatgacggcctgaaaacagtcgcgcccggcgacgggtattttcagctggttgccgatccggaggctacggtccggcagctgtaccggcatatcattctcggccagaccttcggcaccgcgcccgtttcccgggacgagctgcgcttcatcctggcctatgcccgggaagcctttctgtgcggccggaacagggtggccacgctcccggccctgcgcaccctgctcgacatcacccgggacctgctggcctggcaggctgagaacgaccgtccggtggacggacattaccttaaagggatcttccgcctggccggggagagctggacggaagaatttgacgccttcctggcggcgctgagccccgtggtggatcagatgtatgccgaacacctgctgcgcccgctggaaagcgactgttttgtcctggcggacgtgccggacgccgtgctgggggaaatcttcaccctgccacggctgaaagccattttccccctggtcctgcgcgggctggactggagcacacagaaagcgacagcgctggcgcaggatctgcgcccggtgatcccggccgtgacgcaaaccatcgaagccggcaccctgcgcctcgatatccgcattgacggccagcatcccggcgagcgcccgggcgcctggtacaatacaccccgactgcacctgctcatcaccggccaggacttcgtggtgccgtacgggtgggaagccttctccgaactgctggggctgttcacgctgtacgcccgtcatcctgaagccctggcgcacggccaccagggtgagcgcgtgatgttctccccgccgggaaacgtcacgccggagggattcttcggcatcgacgggctgcgggtttttatgccggcagaggcctttgagttgctggtcagccagatgacaagtgacacggttaccggtcagctggcagacgcccttaacggcctgcgctgcctgtatggagatttgtga

SEQ ID NO: 228602 - DNA, 1284 bp, Klebsiella pneumoniae
atgaaacggtacactttgaaaatctactttggcgataaatctgcgcctgcttattttggtggtgacaggcaggatgattcatcgaatacgtcaccgtttcaagtggctcttaaaaagtcgcgagactgtaatgcatatgccgcttgcttatgtacgggtaaagaattgccactctctgtaaggctcagagtagagaaacatcatttagctcgattcccactcacgggcataaaacacagagaggactgcagattctatagtagcctcagtcctgaaggatcacaggggtgttatacacaggacgctttgaaagagaagccggatggaacaatcaatattaagcttgattatccattgcaggtcaccggtccgtcaggtcccatagatagttctccgtgttctggtgatgcttcacggaacaataaacgaaatacagtatctattcttggtcttctgcattttctctgggagacaaccaactataacacgtgggtgcctaaaatggacggtatgcgttcatccaccaaactgggctatcacttgtttaaacaagcagaaaagatagaagcaggtaaaacaaaattatctgacgttctgctcactccggcctacgctaactccagcgatagcagaagaaacagtataactgtagaacgtgcgaaagctgataaacaacgtcttgtggttattgctgagcttgctaagttctctgaaaattacatgaatggattaaatcgacttcctgtacgtgacttttccggcatgccttttctggggcttgatgattccagatggaagtctgcgttaaacagatttccaattgcggttaatggctggaagaaaggggtgaaggtatttgtaatagctatcactgatgttccaggtgcaagatcagcccaggttagacagttggccctgatgatggtaagtgatcgctacataccactcgattcattgaatgaaggggcgtttgaacaaaagttatacgagctggagcgctcgttttataaacccctacgttatgattcaaccactcatgaatatctcgcggatttttgtcttacagatgcttctacagaaaaccatttaccctttcctgtagaaatatggggaatgaatactcctaattatcaagagcatagaatggaaaaggaaagatggtacaacgcaaattatggcgcaactggttggtcatcatgggatgcaactcgaacatcgctagacagtattgaatcgcttttgcctaggaaaacggaatcattgtatcatgatattattaaataa

SEQ ID NO: 228603 - DNA, 564 bp, Klebsiella pneumoniae
atgagggcagattgtcacacttgttgccctgaacaggctatccgtgtgtgcctatacatgtggtgtttcctacagtcggggccgtccgcgaagttgacctgtttcccacagctctggccgtctacaaagttgacctgttccccactgctccggccgtccgcgaagttgacctgttttccacagccccggccatccgccaagttgacctgtttcccacagtcccggcagtcggctaagttgacctgtttcccacagtcccggccgtctgcaaagttgacctgtttcccacaatccgggccgtccgtaaagttgacctgtttcccacagaggatggagaactattcttgtgctgagcgtaagagctatctgcttgaacggttcattttcgcgccagttcgctcgctacgctcggttacatggctgcggcgagcgctagtgatagtcactgaggtagttgctcttttatctctttttttgttgcattgttctcattttgagcagctttgcggttttttgattactttgcgattttattgttgctttgcaataaattccaagatttaa

SEQ ID NO: 228604 - DNA, 324 bp, Klebsiella pneumoniae
ttgtacgccgggcttacactggacgaatgcgtcgaagcattccagctgactgtgtgtggtttcttcctcaggttcgtccgcacggcagaggtgactcatgatgttgactggttgcactacgttgcggcagttgcacagcctctgatagaattcctcagccaggtctggacggatgcccaatcgatgcatgccggtatccagcttcatccacaccgtaatggggtggggcagaacggtctgttcaagtgcgaaaagctgttcaatattatgcacgacggtttcaaagtgattctcggccagcaaaggaagctcgtctttggataa

SEQ ID NO: 228605 - DNA, 1164 bp, Klebsiella pneumoniae
atgtcgatgagagatatgtttaaaggattttatacaggcaacataaaggacaatcatgatatatacagggcagatgatacattatttgtttttgacaccaatgtcatattagacctatatagaaacaaccaggaaacaatatctgcgataaagaaatcaatagaacagataagagaaaatatatatctcccttattttactgcgttggagtatcagagaagaagattaggggttatcgacgatcagaaacacttgatatcaacaacaacatctcctgttgttgatttattatcttattcatcaaaactattagaaaaatgcaacaactccaaagcaaggcattacgaagggctaaacagacaagtatctgagttaataagaaaatccattgatttattaaactcaggactagaggatatgtatggaaaactcaatgaatcaattgatgagttaaatacaaaagacatacatagagaatggattgacaacatattctctggaaaaataggcgtaaaaaaggaccaagaatacattaatggattagatgctgaatgtaaatcaaggtatgaattaaaaacgccccctggattctgtgacgcagacaaggtaggaaagccagacaatatattctcttatgacggcattacttatcaaagagcttatggtgatttctacatatggaaagaaactctagagcatgccgcatcaacaggtgcgaaaaacgttttcctaatcactaatgatgcaaaagatgacttcatatttaaagttggtagagataaagaaaatagagaaaacaaaggtgttcacgctatattaagagaggaaatgctaaataactcaagcgttcaattttttgatgtaataaacacaaaagaactaatcttaaatataaacaacgcattcgatcttaaaataaacaccgaaaacctcaacatttcaacagggaatgggtatggggctggaagtaacacaagcaacagtgaacaccgagcactcctagaaaacagaataaaaagagaaaaggcagaaattgctggtctatctaaaaagctagaatctgcgacagatcctgagataatggctaaaattagacttctaatgaaaggaaagttatcttctattcagaagatgagctcaatcctttcatcaataacagagtaa

SEQ ID NO: 228606 - DNA, 384 bp, Klebsiella pneumoniae
atgcgcatcctgttaaacatgctgtgggatcgctatcaaaagccgctgttcattgccggaaacggcctgggtgccagagacaagcttaacgaggatatgaccgtcaatgatgattaccgtattaattacatcaataatcacctgtatcaggtttatgaagcaatcgaggatggcgtcgaagttatgggctatacagcatgggctcccatcgatctggtcagtaacgccaccgcagagttagataagcgttacggctttatctacgttgaccatgatgacagcggtgatggcgattatgcaagatatccaaaggatagtttttactggtttcgggatgtcattactacgaacggggaaaccctgatccctttccggtgtcgttga

SEQ ID NO: 228607 - DNA, 1011 bp, Klebsiella pneumoniae
atgacgagcgaaaataacaacttacctctcaatcttcaggaagtggacaagacaaccggcgaagttgttaagctggatgtcaacagtaccagtactgtgcagccggtagcgctcatgaggctcggtctcttcgttccaaccctgaaatcaacctccaggagtaaggcaaaccgtaaaaacgtcacagatgccactgaggagctcgtacagctgtccatcgccaaaagcgaagggtacaccgacgttaagatcaccggttcgcgtcttgatatggacacggattttaaagtctggctcgggatcattcgctcgatgtctgagtatggggtaaaaagtgacaccctggaactgtcgttcgttgaattcgttaagatgtgtggatttgactcacggcgctcaaacaagaaaatgcgggatcgcatcagcaattccctgtttaaactcgcctcggttaccctgaagttccagagcgagaccaaaggatggaccacccatctggtgcagtcagcctattatgacatcaacgaggatatcgtggagatcaaggctgaacccaagctctttgagctttaccatatggataggcgggtcctgcttcggctgaaagccattgacgccctgcagcggaaggaatctgcccaggcgctgtatacatacatcgagagccttccccagaatcccgcacctatctccatgaaacgtatgcgggaccggctgaatcttacctcaaatgtctatacgcagaaccacacggtccgaaaggctatggagcaacttcgggatatcggctatctggattacaccgagtttaaacgtggccgggcgacttactttagcgttcattatcgcaatcccaaactcatcagcgggacggtgaaggtgccgcgcaaggaggaagaagagaaggcgccggagcagaattatgacgaagtcatcaaggcactgaaggctgcaggcatcgatccgcagaaacttgctgaagcgctatcggcgatgaagccggaaaattga

SEQ ID NO: 228608 - DNA, 195 bp, Klebsiella pneumoniae
atgacaaatatcattctgtgtgatgtaactgccagcgtcagcgaacttaaaacgatccggtggccagcgccggtgccggctgcggctacccggtcgcgattattgaccgcaaccgccctgttttttattgtgtgcccgcggttctgtatgaaaaaatgctcgatcttctggacgaaaaagacctggcgcaattga

SEQ ID NO: 228609 - DNA, 267 bp, Klebsiella pneumoniae; identical to SEQ ID NO: 94337

SEQ ID NO: 228610 - DNA, 1398 bp, Klebsiella pneumoniae
gtgtacgatgcggaaggccggatacaacgcgccggttactcactgtgtctgctcgaacgccttcaggatgcactgcgccgccgggacatctggctcgaaaacagcgatcgctggggagatccccgtgagaagctgttgcagggtgaagagtggcaagctcagcgtatccccgtctgtcgtgcgctgggacatcccaccgatgggcataaaggcgtgcagcaactggccgttcagctggatgagacctggaaagccgtcgcatcccgatttgaagggaatgcggaagtccatgtttgcaatgacggtaaatatcctttcctgaccattagtagcctggagaaactggaggagccacagtcattgctttgtctcaacagtcgggtcagacagttgcttcctccggttgatttgacggaattactgcttgaaatagacgccagaacaggatttacacgggaatttatgcatgtcagtgagtccggagcacgggcgcaggatctgcacgtcagcctgtgtgcggtcctgatggctgaagcctgcaatatcggactggaaccgctgataaagcacaatataccggcactgacccgccaccgtctcagttgggtgaaacagaattacctccgggcagaaacactgttcagcgccaatgcctgtctggttgattttcagtctacgctggagcttgccgggcgctggggcggtggcgaagtggcgtcagccgacggcatgcgctttgtcacgccggtgaaaaccgtcaattctggacctaacagaaaatattttggttccgggcgtggcatcacctggtacaacttcgtctctgatcagtactctggattccacggcatcgttgtccccggcacattacgtgattccatttttgtgctggaaggccttctggagcagcagactgggctgaatccggttgagatcatgacagacacagctggtaccagcgatattatttttgacctgttctggctgctgggatatcagttttcaccccggcttgccgatgctggcgaagcgatattctggcgagtggataaatctgcaaactacggtgcactggatgcgctggcgcgaggatgtgcagatctgtcgaaggtagagaaccagtgggatgagatgatgcgaaccgccggttcgctgaagctgggtaccattcatgcttcagaactcattcgctctttgctcaaaagctcgcgcccatcaggattggcgcaggcgattatggaagtggtgcgcgtcaacaaaacgctgtaccttctcaattatattgatgatgaagattatcgtcggcggatcctgacacagctcaaccggggagaaggccgccatgctgtggcgcgagcgatttgccacgggcaacgcggtgagatcagaaagcgctaa

SEQ ID NO: 228611 - DNA, 714 bp, Klebsiella pneumoniae
atgtatcacggatgggtgcccgatcttcatattcatgctgaggacaccctcctgcccttttatcttggggaaaaggatgatgccagctacgctataaagcccacctgctggcctggccttgatatcatcccgtcctgtctggcactgcaccgcattgaaactgagctgatggggaaatttgacgaaggcaaattacctgctgacccgcacctgatgctccgtctggccattgaaacggtcgctcatgattatgacgtgattgttatcgacagtgcacccaaccttggtatcggtacgataaatgttgtatgcgctgctgatgtactgattgtccctactccggcagagctgttcgactacacctccgcactgcagtttttcgatatgcttcgtgacctgcttaagaacgttgatcttaaaggcttcgagccagatgtccgtattctgcttaccaaatacagtaataataacggctcgcagtccccgtggatggaagaacaaattcgggatgcctggggaagcatggtccttaaaaatgttgtgcgcgaaacggatgaagtcggtaaaggtcagatccgtatgagaaccgtttttgaacaggctattgatcaacgttcttcaaccggtgcctggcgtaatgccctctctatctgggagcctgtttgcaatgagatttttgatcgtctgattaaaccacgctgggagattagataa

SEQ ID NO: 228612 - DNA, 141 bp, Klebsiella pneumoniae
atgcagccaagaactaatgaactgaatatgaccgataaagtaatggatgatatgccgaaaagcaaaaactcatttcttattattttttgtgcgtcaacatttctaataatgcttctgtcgatcatttttttgtgtttatga

SEQ ID NO: 228613 - DNA, 366 bp, Klebsiella pneumoniae
atgagttcgtttaaatctaatctaacgctgatgagaaatgaatggtataacgcattctataacgccaacattgagcaattagattatttagaggcggagtggtttattgcaagcaatgggcaaaaaattttatataaaaagcatcaactacgaaagattgctctttctcgggaagaaggatttattggcgcggtaaaaagaagagagatcgatgttgttatcagggaattcaaagatattgcatgtgtaagtggatttgccgaaatttatgatggacatacttcaatacgcacgtcattcattgaaaattggataaagattaatgatggttggaagttacagtttattgctttcgaatctgtataa

SEQ ID NO: 228614 - DNA, 240 bp, Klebsiella pneumoniae
atgagggctgattttttggacaaggaattatataaaaccataacaaactctatctgtgagtatatggaagataaacatgaccttcacttggggcagtttgaggccgagtttttcctcgatgaactgctgaagattattactcctgcaatttataataaggggatagaagactccattctttccttacgtagttttcatgagaggttagaagaagaactcgatatgagaagaataatatga

SEQ ID NO: 228615 - DNA, 693 bp, Klebsiella pneumoniae
atgctacaacataaaattagtagtgcttatgaaacacaacctctagaagttagttctcttgaaaaaatccttatatatcaaaatcatgatttacttttgaagttcaggaaagagtgggacgtaacccctgaacaagctgatgatatattcacagaattgaaaaaatttctatggttagcctcaacatgccaaactgaatgcttcaacataacagttcacgaacaattccttgttattgatgaaatgtggcatacatttattcaatttacagatgcatataagcagttttgcgaagaacatcttggtgggtttctacatcattttcctgcaacgaatgatatgatcagaaaagagataaagcatatcacatctcttggagtatcatttgatgattatcaagccgaacgatttaagaaccagattgataaaataagttctaaattaggtattgagactgctgtcaaatggtatgcaagatacgcagttatgtatagcatagaaaatcttaactcgatgcgaaaacccataatatctacagctaataaagactatcatagcaatatagtgccatttctcaatctaccagtcgaaaaaatatatgaggtaatgaaaataaatgtttggtctggatttatagtttgcggctgtagtggtaaaggttgtggtgcaggatgttcttgtaattcaagataa

SEQ ID NO: 228616 - DNA, 747 bp, Klebsiella pneumoniae
atgagtctgaaactaactaacgtcgtacttccggggacgggatacaggcatatcagcgaatttattgttgaggatattttcgcagaccttcctaataaatccggtcttgttggtgcgtattttctttcttctcaggttggcagtccgttaaataactatgctaacttgaatgtgcctttgttgaaaattggttccccggttgtaggtagcaaatatgccacgacgggaacaacgaatttctacgatacacaactgccatctacgccggtaatgacggttttgggtatcagcctgccaggcgctgattcgcagaatggtgtcttgcttgctaactactctcagtcacccatcagcggtgatacgctccagtattatctcggccatgccagggcgtttggtcaaatgggaagttcgattgcgtcggcggatactgttgtaccaactaccgatcttcccgctggagtattggcgataacgggtggcgttattaaaaatgcttccgtaaaagcattcgcttacgatcctgtaacgaatgctatgatctcatcaatttccacgagtgcggggcgtaccgtaacaactgacagaacgttgcgcatcgggacgagctacgccacaacccagtttacaggcgggtcgagcgtatcggttgtgctggtatacaacgtcgaactaaccgatgctcagatactggcaaacgcgcagtggctgaaaaacagcttcggagtggaatggggcctttggtaa

SEQ ID NO: 228617 - DNA, 1038 bp, Klebsiella pneumoniae
atgaaatttaccgatgggcggagtgcctggcgctggcgggtagcaaaatcgaagtacaaacttttggtgggagcaaaacttaaagtcggttttacgggggattcctggacggagaaacgcgccatcccgcagatgatggcgaacattctttattctgaatacagcaaagctggcgagggatggattaattttgcagctgccaacggggatacgcttaacggcatgtcctttaacatctccgggtggactacgtacgacgcatcggagaccactgccgcgccgacgtatggatgtgcgcttgatggtctgtgcctctatgcaaccgggacggtagcgaggatcacgctgaatgcggtcagcgctacgggcctctctatctacttcaaagatacctcaggggtcttccgctataccatcgatggcggcacgccggtagttgtcacgggcgcaggaacaggcaacgtgaccaaagtggatatcaccgggctcagctccacaggaacccatcagctggtcattgacctgacaggtaatgccgacaccgtggttatttacggcgtctacgccaccatctcgtcaaacggtgttgagattcagaagtttggtaacgcgaacatcacggctgacggctacacaaaggtcctcagtaatatcagctactttgcccaacagctgaacccggacattatttttatgattatcgggaccaatgactaccggctggggaggacgctttcgaacttctatacagcactgacttcctgggtgcaggcttataaagcggcgcttcctgatactgctctggtcctgatcgcaccaccgcagtgtaacgcgtcaggcagttatccgctttcctcataccgcgatgtaatgcggcaggtagcgaacgagaaccacgtcgagttcttcagcctctatgatgacttcccggcagcatatgcgacggcgaatacctacggcctgtggaatgacgctttgcacctgaacaacaacggggcagattttctggcccgggaactttataactacttcctctga

SEQ ID NO: 228618 - DNA, 588 bp, Klebsiella pneumoniae
atggccgaacttaacccgcctttgggaacgacgacgcctgaaatcttcctggataacgtcaagcgcgctgacgaactggtgaacggtccggccggaacggttaacgaccgcgcaggtgaaccgctcgatacctggcgccagatgatggctaagaatgacgaagttcggcaaaacatcatcccgctcagtaagcagtatcagacgctggcggcggcgcaggcggatatcgtgaatattcccgaggggagtaccgcgtattaccgcagcccggacgacagcgccctcgctatcgaagtcatgaacgttggtgggacgctgcagcctaccgggcgaaaaatgccttctcagcaggctgtcgatgaagccagcgattccgcaaatttggcgctggaaagagttcctgaggaaacggtgatgcctgctctggttcctgtcgtgcgtgatatggagggtttgagcgaaagagcggagctttttacaatcagctatttcaacgggttacaacatgctgattggctatgcacgggtctctacaggggatcaaaacctcgatttgcagaaaacagcactgtttcgcgcagaatgtga

SEQ ID NO: 228619 - DNA, 420 bp, Klebsiella pneumoniae; identical to SEQ ID NO: 32215

SEQ ID NO: 228620 - DNA, 1266 bp, Klebsiella pneumoniae
atgtttgcgctttgtgatgtgaattcattttatgcatcgtgcgagaccgtatttcgtcctgacctgaaagggcgtccggtggtcattctgtcaaacaacgacggctgtgtgatcgcccgctcgccagaggcgaagcccttcgtcaaaatgggtgaaccttatttcaagcaaaaggacatgtttcgccggcacggtattatcgcgtttagcagcaactatgagctttatgccgatatgtccaaccgagtgatgacaacgctggaggaactctctccacgctgcgaaatttacagtattgatgaggcattttgcgaccttacaggagttcggaattgtcgcgaccttactgactttggcagggaaattcgcgagacggttctgcgccggacgcacctcacggtcggcgtcggcatagcccagactaaaaccctggcgaagctggccaatcacgccgcgaaacagtggcagcggcagaccggaggcgtggttgatttgtcgaacctggaacggcagagaaagttgatgtctttgctgccggtgaatgaggtttggggagttgggcgccgtatcagtaaaaaactggagtccatggggatagacacggtgcttaagttagccgatacggacattcattttatccgaaaacattttaacgtcgtgctggaaagaactgtgcgggagctacgcggagagccatgtctcggtcttgaggagttcgcgccggtaaagcaggagattgtctgtagtcgcagctttgggcagcggatttccacctacgaagagatacgccaggcgatatgcttatacgcatcccgtgccgcggagaaactccgtggtgaacatcagtactgccgctttatctctgcgttcgttaaaaccagcccttttgcgctgaatgaaccgtattacgggaacagcgcatcggtaaagcttcttacgccaacccaggatagccgggacataatcaccgcggcgacgaaatgcctcgatgcaatatggcgagacgggcatcgctaccaaaaagcaggggtgatgcttggcgatttctacagtcagggcgtagcgcagctcaacctgtttgatgacaacgcaccacgaaagaacagtgaaaagctcatggaagtactcgaccatctcaatgcgaaagacggaataggaactctgtattttgcagggcaggggatccagactgcctggcagatgaaacgagaaatgctatccccgcgttatactacgaggttctgtgacctgctcaaagttagatga

SEQ ID NO: 228621 - DNA, 588 bp, Klebsiella pneumoniae
atgactctaatattagcaatgtttttgttctcccttaccatgtcaatttctccagggccagtcaatatggtcattatatcatctggagcgagctatggattcagaagaactttcccattcgtctcaggtgctacaataggatttactctgttacttatagtcattggttttgggttctacgcttccattgagaaatatccacttttcttcaaatatctcaacgtggctggctcagcttttataatatacataggttataagatagcatcatcaagatctgagttatcattaacaaaatcagaggcgcctagtttcactcagggttttttacttcaatggctcaacccaaaagcctggattgcctgcgcatccggagtggtattattttctgaaccatcaaataacacttcgttaataatcttcataataatatattttatcgtttgctacctctctttagctgcatgggctgtccttggaaagaacatctcaacattgcttaatagcattggacgcatccgtgcatttaatttctgcatgggtgggatactgattaccactgccttctacatgtttctggctcaataa

SEQ ID NO: 228622 - DNA, 894 bp, Klebsiella pneumoniae
atgattgatgatatccgttaccttattgtttttgcaaaaattgtacaagctggatcgatttcaggtggcgcagacgctttagggctcactaccgcgacagcaagcacacatctttctaagctggagagaaatctgggaagtgctttgctatacagaaacacgcgaaaattatcgctgacccatgatggggcaagtttgctcgaaactgcaaactctatgttagaactgtatgaaaaggggtttatcgagtttaaacagcgttctatttcaacaagtaataagctgaatctgtcaattcctgcagtttttataaatagtgtttttactcgtcatcttgcaggatttataaaggaacatccggacgtttccctgagtatttcttatagcgacactcgtaaagatattattgccgatagtatagatgttgcatttcgaattggcgaactgcccgacagcacactcaaagcacggcatctttttgtattaccccgacacgttgttgcttcaaagaaacttcttagcaattatcagcctatcaaccatcctaatgacttagaaaaaatgccctggattggtctgagcatgctgaagggcagtcgagagttcaggcacaaaaatggagagatagctttaattaagtatacgccaacggtgtacgttgataatgtcgaggctgcctacactctagcaaaacatcaggttggaatcgcagcccctccttgctatctcagcaaagaggatattaagcgagatgaaatacagttggttctccctgactggtcattggaaccactaaaagtctatgcaacctggccttctaatatatctaccaacagtgtcgcttacacgttaattaataatatttacaactcctttgaattcaaaatattatga

SEQ ID NO: 228623 - DNA, 195 bp, Klebsiella pneumoniae
gtggtggtttatcccaccaaccaggtgcgtaacccagtgaactggatcgagatgcagttgctcatcactttcactccggagcaaatcctttgtccctggcgccacgttgtaccggctgattggttcggggtcacaagtgatatcccgctcggcttcttcagccaaataagccaggtactcttcacggggttgtga

SEQ ID NO: 228624 - DNA, 2694 bp, Klebsiella pneumoniae
atgcatgccgctaaccgtaacgaccttaacctcctgccctcggcggtgatgatctacgatgagcgcgaacgactgcaggcctggaataataaggtggcgctgttttatccaacgatcgcgccctggctcgccgtcggcgcctctcttgagagtctggcggagaagtttatcgatgccggatacaacatcgacccaggccggcaacagacgctgcgcgaggcgattatccgcaactgccgccagacgaaccactgtgaggtccgccagtcgggcaaccgccgaatttacgttcagcatcagcggctggcggatggcgggattgtcagcctgcataccgacatcaccgagcttgacgaggcccggcgttcgcgtcatcaactgcatgatgactttttattcaccgcggagtcgatccagatcggcatctgggactggcaggtctccggcgacagcctgcaggtgaatgacaccctgctggcgatggtcggccagtcgcgggcgcagtggcgctttccgctgcgctttatgctcaacctggtccacgaggacgatcgcgccactctgcagcaggcgatgatcgcctcgcaaaacgagcacatgccggtttttgaatgtgagcttcgcgtccagcacccgacgcagggctggcgctggatgctgctctcggggcagatcgtcaccctcaacatgcagcagcaggcagagcgggtgatcggcaccttgcaggatattacccggcgtaaagccgcagagctgctggccattgaggcggcgaaggaggcccgcgaggcgaacgaagcgaaaagcgctttcctcgccaatatgagccacgaaatccgcaccccgatgaacggcattctcggcatgacgcagctctgcctcgacacgccgctgaccgcggagcagcgagagtacctttcgctggtgatgagctcagcccagtcgctgctgcacattatcaatgacattcttgatttttcacgcattgagtcgggcaagatgcaggtggacgtagagccgctggagatccgcccttttgttcagtcgctgatccgcccgcatatgcctgccgccagcgaaaagggcattgagctgctggtggatatctcccctgcggtgcctgaggtgctgatcgtcgatggcccccggctgcggcaaatcctgaccaacctgctgggtaatgccctgaagttcactcatcagggggaggtcctgctggcgatagcgccggccgaggacgacaaccgctggcgctttcgcattcgcgataccggcatcggcattgccccggagaagcaaaaggcgatcttcgaggccttcagccaggccgatagctccaccacccgtcgctacggcggcaccggactggggttaaccatttcggcccgcctggtcagcctgatgggcggtgagctgacggtggagagccagcctggggcaggcagcgaatttgccttcaccctgccgctggaaggcctgaacgccgcagcctccggtagcgccccgctgagccgcttcaaccaccagcgggtgctggtggttgacgacaacagcaccaacctgcgcctgcttgacgccatgcttcgccagatgggactgatgccaacctgcgtgaacaacgctggcgaggcgctacgccgggccgccgaaggcccgccatggccgctgatcctgctggacgcgcagatgccggatatggacggcgtatccctggcgctggagctctccgctttgcctgaagcccggcaaagccagattattatgctcagctccatgagccgtcattttgacgccaatatgcttaagcgcatcggcattgcccactatctgcataaaccggtggcgcagcgcgaactgcatcaggttatcgccggcatactggtgcccacgccggtggtgacgacaacgcctgcccccgttgcgcaaccggtcagggaccagaccgggctaaatatcctgctcgccgaggacaacctggtaaaccagaaggtcgccagacggctgctggagcagttgggtcaccgctgcgaggtagtgaacaacggtcgggaagcgctggagcgctggcgcgcagcctgctgggatcttctgctgatcgatctgcaaatgccggagatggacggtgaaaccgccatccgcctgctgcgggaagagacccaggcgctgggcagacaacatcagcccacgattgccatgaccgcccacgctatgcagggcgatagagaacgctgtctggcgatgggttttgacggctatatcgctaagccggtgagccaggaggcgctacgggaagccatcgcccgcgtcggcgcggcggaagatagcgcgccggaggaagaggaaggcctgccggacgaagcccgcctgctgaaacagtgcgccgacgatcctgagcttgtcgaggagttgctgggactcttcgctgcaggacttaatgctgcggccgccgccctcaaccacgccattgacgccaatgaccgggagacatggcgccgcgccgcccacaaactgcgcggcgaggcggccacccttggttttcaacgccttgccagtgtgctccagcggctggagagccaggcggcctcgccagaccaaagcgtgccgggcgacctgcgcgacgcgctgaccgaggcgatcgcgggctgccacctgtggctgcgccgcagaacgcaggaggttccccgtgatcgctag

SEQ ID NO: 228625 - DNA, 657 bp, Klebsiella pneumoniae
atgctgcaaaagggtcacgtctaccccttactgggcgcctcgctgctgatatacggctgctggcaacgctggccggtacgggtcacgccctgcgaatttgaattcgcctttcccttgctggcctggcaatttatctttgtgctgggcatgtgctgcggctggtacaaagcggaactgatctctttcgcccgcacgccgcccggcaaagtcgccttggcggcgctggtgttcatcgcgcttatccttgcgtttgtcgcccagaatcataccaatccttttatgccgcccgcgctgctgatgcacgtaatcccgccggcggattttaacgccttttaccatacctgggcggcgaaaaacggcctcggtccggtacggatcctcaatgatatcagtctgatggtcaccatttatctgctattgacctggtgctggcgcccccttaaccggctggcaggctggttcctgatcccgctcgggcagcgttcgctctacacctttattttgcatgtttacatcgtgctcgccgtaagccagctggtcaccttcgatctgtggcgccaggcgtggatagtgaacaccttgatccatgccgctgcgctgggcgttctgtggctgatggccaaataccgcgtcgccgcacgctggatacctaactaa

SEQ ID NO: 228626 - DNA, 906 bp, Klebsiella pneumoniae
atggacagactggatgccatgcagttgtatgttgcggttgtggatgcccacagcttcgcccgggcggcggaggtgctggggcagccgcgctcaacggtgtcgcgggtagtgaaggagctggaagcctggctgggggcgcagcttcttcagcgcaccacccgcaagctcagcgtgacggccgagggacgccggtattacgcggagtgtaaacggctgctggccgagatggcggcgatggaagcctcctttcccggccgctcggcccagcccgccgggcggttcaaggtggggatgccgcaatctcttgcccggcactgcgtattgccaaggatcggcgagtttctgcagcagtatcccgacctggagttgatcctctgctcaagcgacaacgtggaagatattatccaggagggattcgactgcgtgatccgtagcggacaaatcgaagattccaccaccctggtggcgcgtcctctggcccgctaccgctggatggtcctcgcctcgccggcctggctcgcggcccacggccggccgcagagcatcgacgaactgcaccagcaccgggcggtgggctaccttaaccaccgtaccgggcggaccatcgactggcttttctccctcgatgacggcgattgcgcgatccgcatgcaggagacgctggtggtcgacgataccgatgcctatatccaggccggcgttcaggggctgggcctgatccgcatcgccagctatctggcgcaaccttatctgcagagcggcacgctggtcgcctgtctggagcaggccgcttctgatcttcccctgtcgctggtctatccgcaaaaccgctatctgccgccggcggtacgcgcgttttatgactggggcagacgcgttctgcaacccccgctcagcgaggcctga

SEQ ID NO: 228627 - DNA, 192 bp, Klebsiella pneumoniae
atggcggaaaatagaccgctggcgctctgttggccggtccttgagctattgcttctgcaatcggtttgcaacggtttcgccccgggaaaacgtttgttatgtgtgatttatctcaaggcgcagggggcgaaaacagctaccggacagttccttctccctccggtagagggtcagggtgaggggaagtactga

SEQ ID NO: 228628 - DNA, 1476 bp, Klebsiella pneumoniae
atgaaaatgagtgacacacttaacaagtccatttcatttttttgcaaaaataacttcactgataatgaagaaaaccattgtgcacattttgtatgccatgtgctacaaattgatactggttatgattgcaaattatttatgaatggacaatatcctggagcatgcctccgcgttcatgaactctttgctgcgtgccctgctgttggtgaatgggaacatgccccaaccggattaaagatcgccttcataactgatagttttaatgttgatctagaatcacataaaatgaggaatgttcctaaaaaacatgttggaatattttcaaacggtctaatctaccattactcaaacattcaagacatggtcatttgccaatccgctgaggattttatgaatcgcttcaaaaaagcatatggtggcaaccttaaattatattatggcattattcctccatcagcaatattgccagactcagaatccgacacaaataatgaaggcgtgagtctacaaaattttgttagcgtatctaaaggaactgaaccaataattagaaaagaaaaggtttctgataaacaaaatgattactatgcaacttttgaaggcagtcaggaattttatattgcccgcagcgtacgatataaatcatttaaaggtctatatcagccacataataaaaaaaatggaccgcgttatttggtcaaggactatattaaagaatatggtactatggctggtgttatagctgtgatctcacaaagtgaaagtgagggttacttcaatacattaaatacatatgaccgagcttcatttaccttcggttttttccagtttgcagcgcatacaccggatgataacctcattttattaattcgacgagctgctcgggaacatgagatgtttaaaacaaatttccctgagttagtgctggttgatggtgtgctgcatcgtgatttaggtttacactctgttagtctcgaaagaaaatatccaagaaccggaaattcggaggagttaatattaaaagatttcatgtcttatcttaacccgaatgtgacggacattgacgacaaagagctatcgaatgcagccaaattaattcaattggctaacactaatattacttttaatcatttgcaagttaatgttgccgcacaaattacaatgagaaaaataagagagagatataatatttggtataaacttaatggtgcatctgatcttatatgtactgcaatcgccgatattcatcatcagggacgaggtactcgaaaagaaattagtggaatacttacttctaaactatcatccgatgaacagctaaaagctttatgtctggttgggattgagaataatctggagagatgtaagtctttaagtttagctcttgataaggctaaagaagatggttacttaggtgtttccaggttcgattctgcgagtggtttgttcaaacctaatcaaggctggccagaatga

SEQ ID NO: 228629 - DNA, 351 bp, Klebsiella pneumoniae
atgaaaatattgctgatgttaccaccccttattctgttaaatggttgtgtggatctcggggatgtagggatacatccggaagaaaaaacttactatgttaatcagggaaaaagccaggtggttgattgccttcattatgcagccactaaagagaaactatcactggaatatgatgacactctccctgaaaatgtttataagtacaatctgataaatactgaaaccacggctgtcgcgtgggttgaaatcagcaaattcaacagcaggcagacttcggtagaattttattatgcgccgcatgcgccggatatacatcggtcggttactgccattgctgaacggtgcacataa

SEQ ID NO: 228630 - DNA, 432 bp, Klebsiella pneumoniae
atgcataactatattacgaaaggtattgcgctggctgtagctatcgctgcctcaggaatggtgcaggctgatgagaaaaagaatcatgatccttatttttcggggatcaagatttttgcgcaaaaggagtccaccggaagtgaatgggatagcgttaccggcgaggcgaagtatctgatattctataaagttacgcttgataattactctaataaaagcattgaaccaggcaaagataacaaaatgtgcttctttttgtatgataaaaatggcaaatcatttatgaacaccggaattcaaatggagatgctgaaaaaatacaaacccattgaaagccgaaccggaagcgtgttattcagcagcgccgatcctgaaatactgaatataccttttgttcgtcttgctttcggtaaagagtgcttaacaaaataa

SEQ ID NO: 228631 - DNA, 315 bp, Klebsiella pneumoniae
atgaaaaagcttctgatatgttgtttgtttggcaacaccgccaattctctcgccaaaaagatacagttgctggcggaaaaaaagggccatcctctcattgtcagcgcagtgggcctggaaaattttgccagcgtggcgcccgctttcgacggatttctcgttgcgccgcatattcagtataaggtcgcggagataagagggatcgttggcgacgctcgttctattgcggtgattgaaagtctgccctatgcctcacttgacgcggaaaaagttttcgcgtttgtgatggcgcagatgcctgaactggcaatctga

SEQ ID NO: 228632 - DNA, 615 bp, Klebsiella pneumoniae
atgaaactttattacgcgccagatacctgttcattatcaccgcacatcgtgctgcgcgagctgaaccttgaatttgaactggtgagagtcaacaacagaagtaagatcaccgctgatggtcgcgacttcctcaccattaaccctaaagggtatgttgctgcgcttgagctggatgatgggcagatcctcaccgagggaccggcgatggtgcagtacctcgccgatcgtaaacccgaatacggcctggcgccgcgcgcgggcagctgggaaagggtgcgcctgcaggaatggcttaactttatctccagtgaaatacacgcgggttcggcgccgctgtttaactccgcgctgccggaagatgtcagaacgatttttcgagacaagctattccgacgtttcgattttctgcagatgacgctcagcgaaaaaaactatctgacggggtcatcctttagcgtggcggatgcgtacctcttcacggtgctgggatggtgcaaattcttcgcgatcccactggatcgctggccagcgctatcgtcgtatatggaaataataaatgcccgtcctgctgtacaggcggcattactggctgaagtgtctcaacagggcaggtag

SEQ ID NO: 228633 - DNA, 795 bp, Klebsiella pneumoniae
atgacccagtctggcgccagccaggccattgcccagcttgaggcttctctgggctttccggtatttacccgtgagcgacgatacatcgggattaccgccctgggtgagcaggtggtggaacatgccagaaacatgctttcgcagctgaacgccatccgcgaactggctgatcggggccggaacgtgacccgcgggcgcattcggctggccagttttccctccgtgacgtctaccttgttgcccggcctgctgcgcgacgttaagcgcctgcatccgggtattgacgttgtcgtgctggaaggctctgacgaagaagtcgaagcgtggcttgccgcagacaccattgaacttggggtggtcatgaatcccgttcccggacgtgcagaggtggtattaggacaggatgcgtgggtcgcggtcctgcccgccagccatcggctggcacagcatgcgaaagctgatggcataacgttgaaggcattggcggaccagccctttgttctggcgacggggggctgtgtcgtgaatggcaaaagcctgatggaaaaggccgggttgcaactctctgatatccgcgtgacggttcgcgactggataagctcctgtaaactggtcggcgaagagatgggcgttgcgctggtaccggagtccgccctgccggagacattgcgcaacctgtgcgtggtgccagttacgccggccattcatcgtgaatttgggctggtttgttcgccatccggatcgtcttctgatgccacacaggcgctgcttaatgcgctgcgtaaacgaagatga

SEQ ID NO: 228634 - DNA, 834 bp, Klebsiella pneumoniae
atgaaagttaaaaagtccttaaataacagcatgttgcttgctgaaaatgacggaaaagagatgatactctttggcaaaggtatcggttttaacaccaagccagggacaattatcgacttgcaaagtgtagaacaggtctttatgcctttggataccctcaagtcgcgacattatctgtcactaacggacacaattcccgcggatttctttgagatcactcatgaaattgtcaagctggctcaagctcattacagcgaaaagcttaattcagttttattattcaccctcgcggaacacttgcattttgctgttgaacgctgtaagacaaatacgaatattgcgaataaactgacctgggaaataaagcggtactatcagaaagagtatagcattggcgagttggcaagagatttggtatcagctaagtttgcggtgagccttcctgatgacgaggctgtacacattgcttttcatattatcaatgcaacatttcaatttgatgagactaacgcacataagcaagtagaattagtgaacagaattgctgaaattgttcgttataaactcaatcaaaatattgatgtcaattcaattcactatgccaggtttattacccatttaagatatttcgctgaaagggtattaaataatagccttgccacagaagaaactgacgacttctataatgagttaattcgtttccatccaaaagcgatggtggttgctgaggtgattcgtgactttataaaaagcaattacgctattgctattcctaatgatgaacttacctggttaggcatacatatcagtaaactcagtaaatattcaaagtga

SEQ ID NO: 228635 - DNA, 1461 bp, Klebsiella pneumoniae
atgtcgaaatctattcttcccgagaattttttatggggtgcagccattgcagccaatcaggcagagggggcatggaacattgacggcaaagggccttccgttgcagatgcagttgcctataaggcgcatttgagcacaagcgattatgccggccatatggccgtatctgatcaaaacgtgagcgatgcgcttgaggggaagaatgatcaaaattaccctaaacgcagaggcatcgatttttatcatcgttacaaagacgacttagcgctttttgccgaaatgggtataaaagtcctgcgcgtatcaatcgcgtggtcacgaatcttcccaacaggtgaagatgagcaaccgaatgaaaagggattacagttctatgaaaatatgttcactgaaatgcgcagacttggcattgaaccactggttacgctctcacattatgaaatgccattagcattgagtgagaaatataatggctgggtccaccgaaatgttgttgatgcgtttgtacgctattcaaatgtgtgctttgaccgttacaagaatttggtacgctactggttaacattcaatgaaattgatagcattcatcgacatccttttacgacagcgggtgtccgcgaagagaaaagtttaccaggagaaagcacgcaggatatttatcaggcgctgcatcatcagtttgttgcttcggcgttagcgacaagagactgccacgaaaagatacctggcagccaggtcggatgtatgcttaccaagttaacaacttacccactgacctgtcatcctgctgacgtggaagccactctgaaaaaaaatctcgaaaactatttttattcagatgtacagattaaaggcgaatatccaccattaattaagcgggacctggaactgcggaatatcaagataaaaatgcagccggatgatttggaaacgttacgtcgctatactgtagattttctttcattcagctattatatgtccatcacggaatctgttcagtccgatgcagagcgcacggcagggaatactatcatgggtgttaaaaacccacatctaccggcttctgaatggggatggcaaatagatcctgtagggcttaaaatttcgctgctggagctttacgatcgataccaaatccctttatttattgttgaaaatgggtttggtgcaaaagatacagtggttgatgggaagatacatgacgattaccgtattaattattttcgtgcgcattttgagcagatgattgaagctgtcaaagaaggtgtcgatttaattgggtatacgagttggggaacaattgatattattagtgccggaacatcgcaaatgaccaaacgctatggttttatttatgtagatcaagatgacgaggggaacggttcattgaatcggttacgcaaggactccttctattggtatcgcaaggttatagcgactaacgggactgatttaagttaa

SEQ ID NO: 228636 - DNA, 1869 bp, Klebsiella pneumoniae
atggatcatctaaatactgggcgtacaattctcaaattagtcggcggagcaggcaacatcgaacacattgaacattgctcaaccagattacgcttaagcttgtatgacaatgctaaagttgaagtgtctgacctcaaaaaattacctgaggtaatgggtgtcgtgacaaatgtgcagtgtcagatagtcattggcaaagacgttgttaaagtgtttgatgcgattagatcgttaatggctaatgatgctgacgcgaaacagaaaccagtaacaaagaaaaaatggaatgcatggttgattgattttgttatcagtatctttcaaccactcatacctgcaattgcaggtggcggcgtgctgaaatccattttaattattttgaatatggctggatggctgactaaagacagttcgacatatcaaattttggactgcatcggaaccgcgcctatttattttttacccttacttatcgccatcactactgcgaataagcttaaagttaatccattagttgcattgactgctgtctcagtcttgttgttgcccacatttactaccctggcaaaacaaggtgcaacgttaatgactttcgatattacgaacgtctcctatgcagcgcaggtgtttcccgcaattctttgtgttattttttatgcacaaacggaatctctttttaatcgttatacgcctaatgcattacgtggtttcttatcgcccatgttatcgctggttacgacggtccccgtcacattgcttatccttgggccattaggttttgaaatggggtctctgttaacgcatctgatcctttggatgcatggcaaatttggattcatcgcaacaggcttacttgctggcggactgccatttattgtagcggccggtatgcataaacctttcctcccttatgccataatgtcaatggggcaaacaggtaaagaatcattgtataacccagcttccttagctcacaatatcgctgaagcaggagcctgccttgccgtttcgctaaaaagcaaagataaaatgtttaaagggactgctctttcctctggaatatcagcgctgtttggcattactgaacctgcactttacgggattactttactgcataggccagtactgatctccgtgatgctgggggcaatggtcggtggctccttcatgggatttatgatggtctcagcttatgcaattgtagcgccgagccttgccagtatctcaatttttgcgtcaccggataatccaaccagtttgatatatgcaatcatcggcgcacttgttgcattctgcctggcatttttatcaacattattcttctggaaagaaaaaacagcaacgccccatccagaggaggacatgcccaaatttgagaagactgaagtcactgctaatccagtcttaatgaatgactttacctttaccagcccggttgaagggaaagttatccccttgacagatgtcaacgacgatatattttcttcaaaaatcatgggggatggtatcgctatcgttccaacggtgggagcactctatgcacctgccgatggcgtaattgagcatgtgttcgaaagtggccatgcagccagcatgatgactacccatggagtagaggtcatctttcatattggaattgatacgatacaaatgaacggtgaaggctttcacccgaaaattacagatggccaacgcgttaaagcgggtgagctattaatcgaatttgatattgatgaaataaccaaagcgggttatgacccagtcgttataatggttattaccaatagcgatcgttttataatgaagccgtcaaacgatcataccaatacactccagcagtttaatattttttcattaaatgaggcttaa

SEQ ID NO: 228637 - DNA, 534 bp, Klebsiella pneumoniae
atgcaagctgccaataattctattgccagttcttttgcaaaaatttctggagcaaacccaacatttgggagtggtgataactattatggaaatcacacaaatggcaaggcatttagaataatttctcaaggggaattttaccccacggaaaacactattgttgcacacgctctagtatattcaaatggtaatgatatatttagctatgatactggtgctcatacagattttgaaagttatcgaagtgtcatccgtcccgcttatatctgggataaattcaaccagaccgggatagaactcggatggtttagacaggataacaaaactcaagagcagacatacagtgaatctggttacaaaacaacattgtatcatgcacttaaagttaatacatcaattctaacttcaaggccagaaattcggttctatacaacgtatatccgggcaaaccagaacgagatatcgaattatcaattcaacgataataaaaaagatcaattatctattggcgctcaggctgaggtgtggtggtaa

SEQ ID NO: 228638 - DNA, 1071 bp, Klebsiella pneumoniae
atgaacaagactattctattttgccttatctctgccatgttcagcaatgcttatggacagagtttaacagtggaagagagactggctttgcttgaaaaacaactccaggaaaacactgcagaattaaaaagtacaaaagcagaattaaccaggtataagcaagctgataaaacaaacagaaacccggtcagctcagcagatgaaaagattcaaccaacaacaaattctgcctcttcaactgttgcagtagcatccagtaatagcaaccaaacaggtaatagtgccacaactaaagttaataatgatcttacgttgaaagaaattagtgactttgttaaaaacgatattggtttttcgtacaatggctatttccgttctggttggggaacggctaatcatggatcgccaaaagaatatgctattggatctcttggccgtttcggcaatgaatatacatcatggttcgatcttcaactcaagcagaaagtgtacgaccaggatggtaaaactgcacatgctgttgttatgctggatggtaatgtgggtgagcaatacaacaatgcagtctttgataaggatacagagagtaacttacaattttctgatatctatctcacgacgaagggatttcttaattttgcccctgaagctgatttttgggtaggtaagcactatctgcctaagtatgagatacagatgcttgactggaaaagcgtcagaacagaaagcggagcagggctcggtatagaaaactggaaaatgggtccaggcaaatttaacgttgctgtagtgcggcaggacctgaacgcgcgcgctcttgattatgatacatcaggaaattcattacagatcaatacgaatgcgcttgatatacgttatcgtgaaattcccttatgggataaggcatcattagaacttgatggtcgctataacatggcaaacaaatcagacgtcgtgaagtcaggggaggctgatggtcagtattatcatgtaaaagatgcctggctggtaggtgcgattttaaggcagaagtttgacgcagggggttacgacgatgcaagctgccaataa

SEQ ID NO: 228639 - DNA, 927 bp, Klebsiella pneumoniae
atgcaaaatcggcatcacttggagttaacttggcttgaggactgtgttgcgctggcacagtccctgaatttctcccgtgcggcagcttcacgatatgtgacgcagccagcattcagccggaggattgtctcgctggaagagtggcttggaacgccgctttttgaaagaaatcgtcggggcgtcagcctgacgcgcgccggggaagtattcgttacgcagatccctgaacttattcgcgcactttataccttgagaagtgaatctatagaggccgcaggagaaaccagaccggatgttattttttccgccacgcactctctgtcattttcttttttcccggcactgatgcgtaataacgaaaaaatcgcccgcttcggttcttttcgcttgttatctgacacactgagtgcctgtgaacgcatgatcgacaaaggtgacgcgcagtttttgctttgttactaccaccctcatatgcgcatcaatcttgaacagtcgaaatacttcagtgttcggctcgggcgggaaacattattgccttattccagatgcgatccggcaacccgcgagccaatgtggtatgcatcgggcggcaaaaagtttccttttctgtcctattcggctgaatccggccttggccggatcctttccaacacctcgcaggtcaaccgtgccagacgcggaatggaaatcgcattcactgccgatctggctgcaacattactggccatggtcagggccggtgacggcatcgcatggttgccggaaacgctggcagcgccggatgttgatgccggttccattgccgttgcggcgaagaaagagagcgcgctctgggtacccatagacatcaggcttttccgcccagcagcaaagatgtcccgcgctgtagaagagttgtgggaaattttcgtagaggaccagatctga

SEQ ID NO: 228640 - DNA, 1164 bp, Klebsiella pneumoniae
atgcgtatccttgacgttgtagaaattaccaagcctattgcttcccctatccgtaatgcttacatcgatttcagcaagatgacggccagcctggttgccgttgtgacagacgttgaggtagacggacgtcgcgtagtgggatacggcttcaactctaacggccgttacggtcagggcggcctgatccgtgaacgcttccgcaaccgtatcctcgaagccgaaccagaaagcctgctgaatgccaaaggcgacaatctggatccgcataagatctgggacgtcatgatgagcaacgaaaaaccgggcggtcacggcgaacgttcagttgcggtaggtacgctggacatggccatctgggatgcaaccgcaaaaattgctaacaagccgctgttccgcctgctggcagaaatgaagggcgttgaggctaacccgcgtgtttttgtctacgcggcgggcggttactattacccgggtaaagatctgagcgcgctgcgtcaggagatgcgcggttatcttaatcgcggctataacgttgtgaagatgaaaatcggtggagcgtctctggaagaggaccgtcgccgtattgaggccgtcctggaggaaattggcagcgaagcgcgtctcgccgttgacgccaatggccgcttcgatctggaaaccggtattgcctatgcgaaaatgctgcgtgactacccgctgttctggtacgaagaggtcggtgacccactggattactccctgcaggccgcgctgtcagagttctatcccggctcaatggccacgggtgaaaaccttttctcccatcaggatgcgcgaaatctgctgcgctatggcggcatgcgcccggatcgagactatctgcagtttgactgcgcactctcttatggtctggttgaatatctgcgcacgcttgatgtgcttgagcaatttggctggtcaccgtcacgctgcgtccctcatgggggtcaccagatgtccctgaacattgccgcaggccttggccttggtggcaatgaaagctatcccgatctgttccagccttacggcggtttccctgactcggtgaaggtggaagatggccatatcatcatgccggaactgccgggtatcggttttgagggtaaatcagaccttatcaaagaaatgcgcgcgctggctgtataa

SEQ ID NO: 228641 - DNA, 846 bp, Klebsiella pneumoniae
atgaagcttttaagttatctgacgcctgatggatataaaagttacggtattttacagggtgagggagttattgacctgagaagccggacagatattgatactcccgatttgaaaatttttatcagagaaaaagggatcgcagcagctgacggatatatcagctatgagccggattatcagctttctgatattaccttccttcctgttattgataatccgggcaaaatactttgcgtcggcatgaattatcaggccaaacgcactgagtttagtattacttcggatgcgcctaccatattcatccggttctcagattctcagaccgctcatctgggcaacatcgtgaagcctgcgctgagcgatcagctcgattatgagggtgagcttgtaatcataatcggaaaatccggcataaacatcgctgagcaggacgctgcagaatacatagcgggctattcctgctatatggatggctccgtgcgtgactggcagcatacctggttcactgccggcaaaaattggagcaaaacaggtgggttcggtccctggctggttacgtgtgatgaggtccccgatccgcaaaagcttcagctaaaaacctggcttaatggtgaaattgttcagcaggacagtacagctaatatggttcatccaataagcaaaattatcagttatattagtacctttacacagctatccccgggtgatgttattttgacgggctcaccaggcggtgttggtcgttcacgtaatccgcaggtatttcttaatgacggcgatgttattgaagtcgaaattgagtcagttggtcgcctgactaattacgtcgttgctgcttcaaaataa

SEQ ID NO: 228642 - DNA, 1344 bp, Klebsiella pneumoniae
atgagtgataatgctcttaaaggtaatgcgcttatcgggaaaaaacgctggacaataatactccctgcagtgtttatcatgtataccatttctttcttcgaccgggtgaatataggcatggcgctgccccatattacggccgagatggggctcagcccggtagaagctggctggcttggcggtgcatttgcatggggctacgtggcgacgcagtttaccgctggctggctggcgcttcgctttggatcgcgaagaataattggcgtcagcctgtttctttttggtgcctgcgccatgctcacgggtctgacgcgtaactttggtgaactggttgccatccgtttcttcttgggacttgctgaagggccgattcaggcagcaacggcgatgtttctggcacaatggtttatgaagccagaaaggggacgcgcatttggtatctggaacctcagcctgggggccggtgcgtttctggccggtccaatatcgggctggatcctggcacatcatgactggcgcatgatgatggtcattgagggggcacccgcgtggctgttctgcatcatctggttttatctggtacctaaaagtattcaggctgcgagctggctcagcgccgaggaccgggatcatatccagaaagaccttgcggctgagcagtcaaactatgtgaaggagaaatctgacccctggtggaccattatcaaaataccggcactctggctgatgttaatcggctattccctgcacagcatgctggcatacggctttacgctctggctgccgacggcacttaaggggtatggaacgctcagtgaattcatagtcggtctaatcagcggaatgcctttcctgatgaccatggtgggcatctggtatatcacccggcggtcagataaatacaaccaggaacggcggctgcatgccgctattcccaccgtgttgtgcggtatcgcgttgtcagccgcggcttttgttccgctgtcttactactgggtgcagatagccctgttcatgtttgtcggcctgacaatgaagatgcttgtgccgttggtttacgtccggttgacggaaatcctcccgacaaagaaagcggtccctgcggtggcatttgtaggtgcatgcagcaactttattggtcagtttggcggaccgcttgttgccggctacctgaagcacctggggggcggtactgacatgacgctcgcatggagcgtactgggtctgttctcaatcgtggggggagtactgtttgccctggccgtgggacgtgaggaaagcgtctgggacatcaggcaggcattccgggttacttcccgcaggacgatttccgcgcgggaatag

SEQ ID NO: 228643 - DNA, 234 bp, Klebsiella pneumoniae
atgaatcttcacgataccaacggcgcgagtgacaggttaccagatgagatgatcagtgaataccgcgtcttcagtagcaatcacgttgacctcctgaccaggcgcttcgtactacatccattcccgatgacgtttccctatcaggacaagtgggcgctgagcgactatatcaacgattcttatgccagctgtcagcagcactatccggttcgccagggaacatggccgagctaa

SEQ ID NO: 228644 - DNA, 561 bp, Klebsiella pneumoniae
gtgagggcaaggtcaacgcaaaattgtgcccgcatttctgccgggtggcggctttcgccttacccggcctacgaaagactgcaacatcaaaccgttatgcggttatctgtaggcccgcgcaagcgcagcgccgccgggcaatcccagaaaattgcactttttagggcttgctccctctccctgtgggagagggttggggtgagggcaaggtcaacgcaaaattgtgcttgcatttctgccgggtggcggctttcgccttacccggcctacgaaagactgcaacatcaaaccgttatgcggttatctgtaggcccgcgcaagcgcagcgccgccgggcaatcccagaaaattgcactttttagggcttgctccctctccctgtgggagagggttggggtgagggcaaggtcaacgcaaaattgtgcttgcatttctgccgggtggcggctttcgccttacccggcctacgaaagactgcaacatcaaatcgttatgcggttatctgtaggcccgcgcaagcgcagcgccgccgggcaatccctgaagattgcacttttttag

SEQ ID NO: 228645 - DNA, 561 bp, Klebsiella pneumoniae
atgaaaaagattttgatcgccgccgcgctgattgtcagcggcctgctgagcggctgtaatcagctgacccaatacacggtaagcgagcaggagattaaccaggccctgcagaagcgaaaccattttgccaaagatattggtctgaaaggcgttgccgacgcccatatcgaactgcagaaactgaccagcgctatcgggcgcgaggatccgggcaaagtcacgctgaccgggatcgctaacgttgacctgaactccctgttcggcacgcagaaagcgacgatcgatctgaagctcaaagcgctgccaacctttgacagagagaaaggcgccatcttcctgcaggaaatggaggtggtggatgccaaagtggcgcccgagaagctgcagtcggtcattcaggccctgctcccctacctgaatcagtcgctgcgcagttacttcagccagcagccggcctatgtcctgcgtgaggacgccagcaccggtgaagcgctggcgaagaaatacgccaaaggcatcgaggtgaagccgggcgagattgtcatcccctttaccaattaa

SEQ ID NO: 228646 - DNA, 648 bp, Klebsiella pneumoniae
atggctacctatccgaacgtcaatgcggcgaaccagtatgcgcgggatatcgttggcgggaagattctggcgtgtcagttaacggtacttgcctgtcagcgacatctggacgacctcgaacgagcaaaggatccccactggccctaccgcttcgataaaaacaaagcagaacgatttcttcgttttgcccagaaaatgcctcatacctcaggggaatgggcccggcgtaaactccggattgaatttgaagcctggcagaagttcgctcttggcgtaccgtttggatgggtacacaagaagacaggcctgcgtcgtttctctgaaatctatatcgaggtgcccaggaagaacgggaaatccgctattgccgctgctgtaggaaattatatgttttgtgcagatggcgagcatggtgcagaagtctattgcggcgccacgactgaaaaacaggcatggaaggtattttctccggcgctgcaaatggtgaaaaagctgccggcattgcggcaaaaattctcgataaaaccttgggcaaaaaaaatgacgcgccctgacggttcggtttttgcgcctgtgatcggtgacccgggggatggtgattcgccatcatgcgccatcattgatgaatatcacgagcatacaacatag

SEQ ID NO: 228647 - DNA, 219 bp, Klebsiella pneumoniae
atgtataaattcatgagtaaagcagagcttgaactgataccagatctggaacgtgttatccgagaaccggaatgtttttggatgactggtctaccaaaatcaactcgtgctttcatggagaaaaagggacagtttccgaagcatctggtgctaggccctaaaatctgtgcctggcggctttctgaagtgcaagaatggataaagaccagagcacaataa

SEQ ID NO: 228648 - DNA, 240 bp, Klebsiella pneumoniae
atgaaaaaatttattgaaccaacccctgagcaacgccggcagttactgaacgagtatggtgttccatacgaccgtattgttcgtgagaaagaacgtcgtgatatcacctcactatgtagatcgtcagcgtgggagatggagcagaatgaggcgtacccgcagcgacgtaaaattggtaaagcgggggcaggatggcttcttagtgatctgctccactggttgaggaatcttgatagataa

SEQ ID NO: 228649 - DNA, 822 bp, Klebsiella pneumoniae
atgggattatttcattatacggacttgggtggtttgaaagggatgcttgaaagtaaatcactttgggcaactaatctatattttctaaatgataggaacgaggctgtgcatggttactattgttttgaaaatacgattaaatatcttgatgataaagttatatctcaaaagaaaaaagaaatattgcagaatgcacttaatgcttgtaaaggtgagctaagtaaagaagggaatacacgcgaaaaaaatatctataatatttctttttgtttggattcagataagttgagccagtggagaggatatggtgctcatcaaggcgtttgtatagaatttgacaaggatgaattaatatatggaattgattctgaaggaatgcgtttcaaacatgataaggttaactattgtagtgaaataagtacggttgaaatgaatgaaagcattaatttattttttcaaaaaataaatcttaacccccaaactatagatgacaactttgtttggtatatcagtgcatttacaatgattaatcagattactccttttttcaaaaatgatggtttctcagaggaaaatgaatatagattcatattttcccctgatgccgaaatgatggatgttaagtttagagttaatgctaatggactgatcccgtatataagtgtaggaatgaaggggaaagcgaaacttcctatccaaaaaattattataggccctgcaaaggatcctgattttatagttaatggcattaaaatgcttttattgaaatttggttatcaaaatgttgatgttgaaatttccaaattaccttatcgcggatga

SEQ ID NO: 228650 - DNA, 1803 bp, Klebsiella pneumoniae
gtgaaaaatgcacctaacgtaaaggcgctgccgaaagacaagtttacagaagcgattattttcgcgggtgccgacgcgtggagtcatgccaaaggctgggaagaggggttaggaaagcagatcgcggaagataccacacctcctgtttatcttggcccgcggcaactggaggaactggataatctgcgcattatcgatgatggccgccgagctgcgcgggtgtacctggctggcgatatcgagacgtcgatgattagtgccattggtgccaagctggcacaggctggggtacaggaggcaaaactttataagggtattcccgatactcatccggaggactggcgcgatcatcttaatcggattagggaaggaaaaagcacagtagtaaatctgccagtgacgaaaagagaaccagcgcatgatgaagttagcccggctcttaatcagatgggggccagccagcgcgggcaagtgctgctggcccattacgatggagacctggctattcatgctgattcggacatggttcaccactataacggtgtgatctggaatccactcccggataaagagctgcaacgggcaatggcgcagatttacattgatgctgaggtagcctattcgcagaacgccatcaaatcggcggtggaaaccatgaagctgagtctgccggtgatgggcgtaacagcccgcaacctcattggcttcagcaacggcgtatttgatacccggacggggcagttcagggagcacagcaaaaccgactggttgttgattgccagtgaactgccattcagtccaccagctgagggggagacactggccagccatgcgccgaacttctggaagtggttacgccgttccgtggccaacaacgaccgcaaaacagaccgtgtgctggcggcgctatttatggtgctggcgaaccggtacgactggcagctgttccttgaggttacgggccccggcggtagcggtaaaagtgtgatggcggaaatatgcaccatgcttgcgggcaaggccaatactgtatcagccagcatgaaagcgctggaggatgccagagatagagcgctggtggttgggtactcacttatcatcatgccggatatgacccgctatgctggcgatggcgccgggattaaggcaattaccggcggtgacaaggtttctatcgatcctaagcataaagcgccatattcaacccgtattcaggctgtggtgctggcggtcaacaacaatgcaatgaccttcagcgaccggagtggtgggatatcgcgccgccgagttatattcaacttcacggaaatagttccggaaaacgagcgcgatacgatgttggctgaaaagatagaaggtgagctggccgtcatcattcgccatctgctgacccgttttgcaagccaggacgaagccaaacagctgctgcacgaacagcagaagtcagaagaagcactggctatcaagcgagaaggggattcgctggtggatttctgcggttatctgatggcgtcggtagtttgcgatggaatgtttatcggcaatgcggagattgtgccattcaacccgcgcaaatatttgtatcacgcctatctggcttacatgcgagccaatggcctgagtaagccggtttctctgatgcggtttggaaccgatatgccaggcgcaatggctgagtacggcaaggagtacctaaagcgcaagactaaacatggtatacgttccaatgtaactctgcatgacgattcagaagactggatgccatcatgtaatagtatatctgcaagtggtgaggtagagtaa

SEQ ID NO: 228651 - DNA, 342 bp, Klebsiella pneumoniae
atgcaacggcttattgaaatcaaagagcgtctgggtgtcatcgaaaggtatcttgatatacaggccccgttttacaaacgagatcttaatatctcaactttaatcactgatctaaaggaccgtgtagagagaaaccataaatggttacagcgccagaaatatcaaggtatgttaactgagtttgaatcaatatttattgagcccgcaattaatgatatttatctatcttcgatagttaatcttaaacgaggcgtaaagccaagtgatacagtaagtaattatatatctgaatccttatccactgttgactattggatttcacatattcctaatgatcaatga

SEQ ID NO: 228652 - DNA, 1473 bp, Klebsiella pneumoniae
atgttgactgagattgttaaaagggttggtgtcaatcgtacggaaaaaatattggcatcgttgggtgataaaacttttttaggattgtggtcatttccaaatgtatatagcgatgaaggtataactaaaagtaaagtaggaaaagaagtttgtgaccttttagtagtgtttgagaataatgttattatcttttctgataaagacaataagtttcatgacaacattgatatctctgtagcttggaaaagatggtttaaaaagtctgttgttggttctgtaacacaattgtatggcgctgaaaagttcattaaggagtatcctgaacgattgtttttagatgaagtatgcacaacaaaattcccagttgaatttcttgatcatatgcgtttttttttaattgcagttacaaacaatagttgtgtgcaagcgaagagatatttcgatggtatatcagaaggaagttcagggacgtttgtgaatattttcccatttaacgcttctgattgcatggataaaccattttgtgtaggagatttatacccaagtaaaacatttgtgcatgttttagatgaggtctctttgaaattgcttctaactgagttagatactataaatgacttcataggctacttagcagagaaggaaagggtagtcagaaatggtacgctgcacacaagcattggggaggaggagacactagcaacatacattttaaacaataaaacgattgtaaatagtgatgatatccctgctaattctattgttatgattgatgaatataggtggaaagaattaatagagtcatttgaatatgcaactcattgctcctttaaaatcggaagtgttttttgggatgaaatgataaaaacattctctgattcaattttgtctgcaaatgttggtgctggaaaaaatatggactttggtgttcatgagatggttttaaggcaattggcatctgaaagtagatattctagatatattttgtcccataattttcttgataagttaaaacaagtcccgaaagatcgcaggagtgcgagaattatagagtctcctgattttaaaggaaagtattacttattccttttttttcctagagaccgggggcaaggatatgatgagtaccgtcaggaaagacagggatgtatgcactcatacgcattggtggctaattataaatatcctgaaataaaagaattgataataatcgctacagagcctaaagatgcagagggtcgttcggaagatataatttactttaacacttcaaacactttaacaagagaagagagacgattggcgaaggagttaatgagggaacaaatggttctgactaattttttatcggaaaggaatgttgggccgaacatgaagcgttcttctgctgcaatagaattacccaaagttggtcgtaatgagaaatgtccctgcggttccggtgagaaatataaaaaatgccatgggaaataa

SEQ ID NO: 228653 - DNA, 1167 bp, Klebsiella pneumoniae
atgaaaaaattactcgaattacgccagcagaaagccgcactcaaaacccggatgcgttccatgctggataaagccgacaccgaaaagcgcagcctgaacgatgatgagggcaagcagttcgacgaactccgtgcccaggctgatgcgcttgaagttgaaatcacccgtcttgaagccgttgccgacgttcagcgaaatctgcctggtacttccgttgaaggtgagccagtaagcaacgacgaactgcggcactacatcatgaccggtgatacccgttctctctccacgctggtacaggctgatggcggctataccgttatccctgagctggacaaagagatcatgcgccagttgcaggatgatagcgtgatgcgatctatcgcgacagtgaagacaaccaaaaccaacgaataccagaaactggtatctgtgggcggtgctgttgttaagcatggggcagaaggtgaagcacgtgccgaaactaccacaccgagaatggaacgtgtggatatcaaactcagcccgatctatgcatacccgaaaaccactcaggagatcctcgatttttccgaggtggatattctgggttggttatcttctgaaatctccgacaccttcagcgctactgaagaaaatgattttgttaacggcgatggggtgaagaaggctaaaggctttctggcttatgaccgtgtgtccaccagcgataaaacccgcccgttcggtacgctggagaaaatggaaactgctgctgttaactcagatggtttgatcgacctgctatacaagctgaaagcaaaataccgcaagaatgccgtatgggtgatgaactcgaatactgcggccacgcttcagaagctgaaaaacgataacggggactatatctggcgcgatcgtctggtcgctgactctcctgatacgctgctgggccgtccggttcagtatctggaaactatgcccgatgcggctccgggagaagcatttctggcggtaggcgattttaagcgtggttacttcattgtcgatcacaccacaggcgtgcgcacccgtcctgacaatatcaccgaaccgggtttctacaaggtgcataccgataaatacctgggcggcggcgtggtggactcctgcgccatcaaggtgcttgagctttccggctccggttcctga

SEQ ID NO: 228654 - DNA, 561 bp, Klebsiella pneumoniae
atgaaaacaatcgattttgaaatccgaacctctgagctgagcgccagcaacaaaaagctggtgggctatgccgtgcgctggaacagcctgtcagaagttatctgggatgaattccgtgagcagttcgcgccgggagcgtttaaagacagtctggcatccggtagcgatgtgcgtgcactgtacgagcataactatacccaactgctggggcgcactaaatccggcacgctggtgctgtccgaggacgataccgggctgcgcttcgagctgaccccgccgaatacccagcttgggaatgatgtgctggagctggtggaacgtggggatatttccggcatgagttttggtttccgtgcgctgaaagaggcgtgggatatcggccagtctccgtacctacgtactgtaatagctgccgacctgcgggaaatcacagttacgtctatgcctgcttatcctgaatctggtgtggaaatcgcgcaccgttcgcttttctcccaacatcctgaactgcgtcgcgctggcgataatcgtcgccgctgggctgaattagcggggctttga

SEQ ID NO: 228655 - DNA, 1236 bp, Klebsiella pneumoniae
atgtggaatatctggccgtttggccgtaagtctgaaccctccgagcagcgcagcatgaccattgatgagtttctggcgatggcagggattccaaataccggatcaggcgagtacgtgtctgcgggtactgcggaatctctgccggcggtgatgaatgctgtttccgttatcagtgaagctgtggcgacaatgccctgttacctctatcgggtacgaaatgataaaggacgagaggcgcgggagtggctgagcaatcacccggtggattttctcctgaacgaacagcctaacgactgccagacgccttaccagtttaaacgcacgatgatgcgccactgcctgctgaatggtaacgcctatgcggtgatccagtggggccgtgacggccagccgcaatccctgcatccgtatgcgccgggggcggttgttcccgaacgtatcggccagcataagtacaaatacaccgttactgaaccgtttacgggggctgtgcgcacctacttgcaggaagagatgctgcacctgcgttactccaccgacgatggctttctggggcgttcgccgatcaccgtctgccgtgaggcgttggggctgggcctcgctcagcagcgccacggtgccagcattatgaaagatggcatgatggcggctggcgtggtcactactgctgaatggctcgacagcttaaagggcaaacaagctctggacgcactggaacgctacaaaggtgccagaaacgccgggaaaacgccgatccttgaaggtggcatggactataagcagcttggcatgagcaatcaggatgctgagtggctggcttcccgtcgcttcaccattgaagatattgcccgcatgtttaacgtttctcccatcttcctgcaggaatacagcaacagcacctacagcaattttagtgaggcgagccgcgcctttcttaccatgacaatgcgcccgtggctggcgaactttgagcagcagattaaatccgcgttgctggtggcatcgcctgtacccggaatccgttatcaggtggagttcgactctgccgatcttcttcgagccactccaaccgaacgttacgcaacttatgagcgcggtatcaagaacgggatcatgaacccgaacgaagcccgcgaacgcgaagggatgccaccgcgtgaaggtggcgacgaatacagtcaggcatggaagcaggaagtgaaggtcagtaaggacaacaaggacggtgacgaatga

SEQ ID NO: 228656 - DNA, 339 bp, Klebsiella pneumoniae
atgagagccggaaagatgaaacgccgcgtcacttttcagaagtcagaatctcaccgtgatcagatggggcaggttatctatgtgtggtctgaccttgccaccgtctgggctgaaatccgcgctataagtgggcgtgagcgtatgtcttccggggcgctctactccgaagccactgtacgaatctggacgcgctaccgcgacgatatcaccaccgcaaatcgcattttgtaccgctcgccaaatgtccgggggcaggtttacggcattgtggccatcattcctgatgtggatcacacccggcttgagctgctgtgcaagggaggcattttcaatgaatga

SEQ ID NO: 228657 - DNA, 294 bp, Klebsiella pneumoniae
atgaatgagttaattggtctggaagaagcaaagctgcattgccgtattgatgatgattatgaagacacgctgatacaggcatacatcgatgcggcgctggaggtttgccagaagcatatcggcaagcggtttgataacgggctggagtttacgccagctatcaggattggctgtctgatgtacgtatctcagctttacgagtaccgcacgatgattggtgatactgacgccaaagagataccgatggctgtctctgcgttgtggtctgtctatcgtgatgtgggggtgtactga

SEQ ID NO: 228658 - DNA, 1662 bp, Klebsiella pneumoniae
ttgaccgtctgggatgagtacgcaaacgcgataaaaacgggcgaaattccggcctgtaagcgcgtaaaacaggccgtggaaaggtacttttcagacctgagtgacccccgttatgagttcgatacggcgaccgtagagcggtttattgcgttctcccggctctgtcctcacgtcaaaggaccgctgcgcggccagcctattgaactggagccgtggcaacaatttgcctttgctaacctgctgggatttaaagtcaggaaatcaggccgccggaagtacagcagcgcctttattgaagtgccgcgcaagaatgccaaatctaccgtagccgccatgctggctaactggtttctggtaatggagaagggccagcaggatatctacacggcggcggtgagtcgggatcaggcccgaatcgtgttcgacgatgcccgccagatgtgcctgctgtcaaaaccgctaaaaaagcgcgtcaatattcaggcgcacaaggtcatttatccaaagagcaacagcctgttgaagccgctggcggcgaaagcggccaccattgaggggactaaccccagcctggcgattgtcgatgaataccaccttcaccccgataacggcgtttattccgcgcttgagctggggatgggcgcacgaccggaggcgattttgttcgccatcacgaccgccggaagtaatgttgtctccgcctgcaaacagcattatgactactgctgccagattctggccggggaggagagtaacgattcgctgtttgtcctgatctacgagctggacgacgaaagcgaggttgagcagcctgaaatgtggatcaaggctaaccctaacctgcatgtgtccgttgacgcggcgaaactggagtccaccctccagaaagcgcggggcataccgtcgcagtgggtggaaatgctgaccaaacgtttcaatatttggtgtcagggctccactccgtggatgggggccggtgcatgggacgcctgtgcgctcgactataccgaagaagatcttgcagggatggagtgctacgcaggatttgacctgtcctcaaccagcgatatcaccagcgtgagctacgctttcccgttcgacagggagatccgcctgctgacccgccattatctgccggaagcgcagttgcttaacgtcgccaacaaaaaccgcgctatctaccgccagtgggtgaaagcgggctggatacgcaccacacccggcgactgtatcgactatgaccgcattcgtgacgatatcctgcgcgacgctgaaatcttcaatgtcaggttggtgggcttcgatacctggaacgccacgcatctacgcactcagcttcagggagccggcctcgatgtggagccgtttcctcaaacctatctcaagttcagcccggtcgcgaaatcctttgaggtattcgtcaaccgcagagttgtgcgtcatcgtggcgatcctgttctgtcctgggcgattggtaacgtggtgatggagtccgacgccaacgccaatatcaagcctaacaagaagaaatcctcaaacaagatcgaccccgctgtatcagcgttgatggcgtttggtactttccagtctgagcacgaagactttgcttttgatatgagtgacagtcacaaacaacgactagcgacatttaatggtatttga

SEQ ID NO: 228659 - DNA, 1950 bp, Klebsiella pneumoniae
atgctccgtcctatatgttatgagcgagtatcaagcattcagcaaatcgaagggggtggtggtctggatgaccaacgttcagctctggaaggttatttagatagaaatgctgcattgttcaatgatgatagaatattcattcaggatagaggggttagtgcgtttaaaaattctaatatatcaccagagtcacaacttgggatatttttgcaggatgtgcaaaatcgcaagtacggagaaggggacgcactcatagttatgtcactcgaccgtattagccgccgttccagttgggcagaggacactatcaggttcatcgtgaacagtggtgtcgaggttcatgatatttctgccagtactgtgttacggaaagatgatccacactcgaaacttatcatggaactgatacagatgcgttctcacaatgaatcgcttatgaagtcagtacgtgcaaaggctgcgtgggatagaaagatcaaagaagccatcaaagaaggtaaggttatatcaaatagaatgcctgtatggctagtcaatgagggaggtaagtacgcggtaaatgaagagaaggtagagttgattcgttcatgttttcagatgtacgccgctggcatgagtactggtgagattgtgaagcattacaaacagaggggcgttttgcttcagatggtgactgtttcaaactgggttcgtgatcgtcgtttgttgggtgagcacaaacgttataacgatgaggtatatcgtggcgtatatccagttgtgattgaggatgagctatttattacagctaaccgtatgatggaccgcattggtcttgagaagaagaaaccacgcgaagatttactattagaccatgaagttgtgaagaagattttccgactatttgaagatggtgttggaactggttcgatagttaagcagttagaagctggttggagtactgtcaatgtcttaagagtactgcgagataaaaaggttgttaagatgaaaatcatcgacaacttaacatttgaacgcgtaaaccagaagttatcattaaatggtgtagctaatcgcatcagaaaagatttatcaattgctcaagatgattacataacaaacttgtttcctaagattctcaagtgtggttgctgcggtgggaatattgctattcactataatcatgtaagaacaaagtatgttatctgtcgtacacgtgaagagaagaaagcttgtgatgctaagtcaattcaatatatcaggattgaaaagaacattctagaaacagtgaagaatgtcgattttgaacaattgatgaaaaaagaagaaaacaatagttccccagtagatacattacgtgaggaactatcttcattacgtgcggaagaaaaagcattcattactcgtattgaagagcgtaagaataataagttacgggcaggtctaattcttagtgatggattaactgaggtacaggatagaataattcaggtagaggatgaactaatagcattacaggatgttcgagagataccaaaactcgatttcaacattgatgaggtattagaccctatgaacgtagagctacgggctaaggttcgtaaggagctacgattagtgcttaagacgatcagatatagacttattgctaatgctatctttatacatttggattatttcaatgactaccttacacatgttttagtgattaataataaacgaggtggtggtgagatgctgactgaattcattattgagcagcgtgataatgtaagaagttataaaactgactcattcagcctaacatacactgaaggggatgaactaccagtgtttagaacactagatagtagacctatcaactttattgaatacgtattattacgtgattatatacgtgaattagaaggtgaggaatcagtaacatccgtatggatgaactgtaatgagcaatttatattccagtcttag

SEQ ID NO: 228660 - DNA, 207 bp, Klebsiella pneumoniae
atgcgtgctttaaatcgtaatggaagtttagttaaaataaaaattgatgatatcgtttatattaaaacaccaggtactaatgaaaaacgtggtgtaaaagtgattggtattattgaagatcagattgtagttgttacagtaggtagcgatggaaagtattatgaaccattgattgtactagaagatgaaattattttagtagtttaa

SEQ ID NO: 228661 - DNA, 1851 bp, Klebsiella pneumoniae
atggcaacgatcatcccaaccatcggaagctgcggtaacaagattactgccggagaaaagcgtcttgcgagaatttttgaaagcaatctgagtagcgattgtacttgttggtatgacattcctactggcgaaaaacaaacacatcctgatttcatcattctggatcctcagcgagggctgctttttattgaagtgaaggactggtatatttcaaaaataaaatccgctaataaaacacatgtgatatatgaaacatcaaatggtgacatttctctaacccatcccatagaacaggtcagacaatattcttacggcgcaattaactatctaaagcgggacccacaacttcttcaggacaacgaaaaatataaaggacaattttgcgccccctacggtcatggagtctacctcagtaatattacacgtaagcagttagataaatacttttccaatagtgatatttttccttctgatatcgtgatttgtaaagatgaaatcaccgagtttatgtcatctgaagaaatatcattacgcctattttctttggtcaaacatacattttctaaagagataagtaataagcaagtagatcgtatacgttggcatttataccctgaaattcgcatcacccacgctctcgataaaccagagagttctgccaaatcaatatctgtactccgaacgccgaatattataaaaataatggatactcagcaagaattactcgccagaagccttggtgaggggcatcggataattcacggcgtcgccggctcaggtaaaaccttaattctcctttatcgttgcctacacctggcgaaagataataatttaaagaaacctattcttgtcgtgtgttataatataatgctggcccaaaaattaaaatctctaataaaaagccatcaacttacggttccggttgaaattaccaacttccatgcatggtgttataagcaagcaaaaattaaaaatattctccctaactcaaagcaaaattttatagaaaatcttgagcaagctgttattgctggttttcaaaataaaacaatagcagcagaacaatatagtgcggtattaattgatgaggggcatgattttaaacaggattggctaaaaatactttctggaatggttgatagcgaaactaactatctattatttctatatgacgatgcgcaatcaatttatcagaaaaaaagctcacttgattttacgctttccagcgttggtatcaaagctcaagggcgtacaactattcttgacatcaattatcgaaatacacagcagattctccactttgctaccagcattgcatttgattatttaaatgatcatattgaggataactttaaatatcataaaccagatgctggtggacttcaaggccaggatccaaacatgcttatttttgataaccaccaacaagaaatcatccatataattaaatggctaaagcaacaacatcatactggtgttagctggaatgacatggctatattatgtccctcgaccgcacatctttctgcaatattagtaaaagagttaagggattcaaaaatcccgcactattttatagcaagctcggaagataaaaaacgctactcaccacaaagcgattttttgtctattatacctttgcctagtagcaaaggtctcgagtttcattcagtcgcagtgatagatagttcaaacataatgggtaatagcgatgatctcagcgacgagatcaagcgactatatgttggtttcactcgggcaaccaataatttgcttgtgactttacatcaaaaaaatgtgctcagcagacatttaacctcaacttataatcaaatctataacaatgcatag

SEQ ID NO: 228662 - DNA, 786 bp, Klebsiella pneumoniae
gtgcgctatgcggactccgtgaccgctgaccgcccgctgccgttgccggaggtcggcagcagcgaactgcgtaagctggcccaggcgctagagagcatgcgggtgaagctcgaaggcaaaaacgccatcgaaaactatgtctatgacctgacgcacgagctgaaaagtccgctggcggctattcgcggtgcggcggagattctgcgcgaagggccgccgcctgcggtggcggcgcggtttactgagaatatccttgcgcagaacacccgcatgcagctgctggtggagcggttactccagcaggcgcgactggaaagccggctggagataaagctacagccggtgtcgatagatgcgctataccaacgcctggcggaggagcgcgacatcgccctggcggcgaaagccattactctgcgctggcaggcgagtgggatgctggtcaatggcgatggcgaactgctggcccaggcgctgggtaatctgctcgacaacgcgattgattttaccccccaggggggcgagatcgccctggcagtagagaaacggaatgcagaggagcgactgagcgtaacggataacggatgcggtattccggagtatgccctgacgcggatctttgatcggttctactcgctgccgcgtgaagacggccacaagagcagcggccttgggctggccttcgttcgtgaagtggcgcgcctgcatcatggcgatatccgtctgcacaatcgacctgaaggcggcgtggtcgctacgctgagacttcaccgtcccttcacatag

SEQ ID NO: 228663 - DNA, 1359 bp, Klebsiella pneumoniae
atgttgaaatcaccgttattctggaaaatcaccacgctaataggctgtattgtgctgttatctctacctttaatgatggtcagggagctcatcaatgagcgggctgattatcgcagcgaggtagtggacgccattgagcagagcaccagcggttcgcaaaaactcgccgggccgctgatcgctattccggtaaccgagacgctgacccgcagggagaaccaaaaagaggtcgcctatcagcgtagctgggtgtactactggctgccggagtcgctggcggtcaccggcaaacagaccgtggagtcgagaagggtgggcatctacagcgggcaggtatggcatagcgccctgcagattaaggccaccttcgatccgctgcgtctggcgtcgctgcgaaaaacgcatatcaccctgggccaaccgcggctggtggtgagcgttggcgatgcccgcggcattggcgccatccatgccccggaggtcaatggtaacgtattaagcgtggagccggggctggggatcagcggcgatggggcgggcatccatatgccgatgcctgcgctggcggaggacaacaagccgcttgagattgctttttcgctcgatttgaacggaacgggcgcattttcactagcgccgctcgggcgcaacagcgagctgcagctgaccagtaactggccgcatcccggctttctcggcagcttcctgccaacgaaacgcgaagtgaatgctgccggctatcgcgcccactggcaaagcagctggttcgccaatgatatgggcagctatttcaaggatgatacggagatcccgtggtcgcgcttaccggcgttcagtgccgatgtcatgtcgcttgccgaccagtaccagctaaccgatcgggcgacaaaatatgccatcctgttaatcgggctgacgtttatggcctttttcgctttcgagagcctgacccatcgacccctgcatccgatgcaatatttgctggtgggcttatcgctggtgctgttttacctggtgctgctggcgctttcggagcacattggctttaccgccgcctggctggccgccagtctgtgcggcgcggtgatgaatgggatctacctccaggcggtgctcaggggatggcgtaacagcctgctgtttgtcgccgcgctgctgctgctggatggggtgatgtggtttctgctgcactccgaggacagcgcgctgctgttagggaccggtgtgctggcgctggcgctgagcattctgatgtttttgacccggcgagtggactggtatgcgttatcgttaccgaaaggcagtgcgcctccgccgccggctgccgatgacgacaaactgcgcctgtggaaagagtga

SEQ ID NO: 228664 - DNA, 717 bp, Klebsiella pneumoniae
atgcagaccccgcacattcttatcgttgaagacgagttggtaacacgcaacacgttaaaaagtattttcgaagcagaaggttacgatgtattcgaagcgaccgatggcgcggaaatgcatcagatcctgtctgaaaatgatatcaacctggtgatcatggatatcaacctgccgggtaaaaatggtcttctgctggcgcgcgagctgcgcgagcaggccgacgtcgcgctgatgttcttaaccggccgcgacaacgaagtggataagatccttggcctcgaaatcggcgctgacgactatatcactaaaccgtttaacccgcgtgaactgactatccgcgcgcgcaacctgctctcccgtaccatgaacctcggtaccgtgagcgaagagcgtcgcagcgtggaaagctacaagttcaacggctgggaactcgatatcaacagccgttccctggttagcccgaacggcgaacagtacaagctgccgcgcagtgaattccgcgcgatgctgcacttctgcgaaaacccgggcaaaattcagtctcgtgccgagctgctgaagaaaatgaccggtcgcgagctgaagccgcatgaccgtaccgttgacgtgaccattcgtcggattcgtaaacacttcgaatccactccggatactccggaaatcatcgctaccattcacggtgaaggttaccgtttctgtggcgatctgcaggaataa

SEQ ID NO: 228665 - DNA, 1611 bp, Klebsiella pneumoniae
atgcaacgtcgagacttcctcaaactgaccgccgcggtcagcatggccagcgcgttaccgctttggagccgtgcggtctttgcagccagtcgcccggccctgccggtaccgtcgctgttgacggccgatgcgcgcaaccgtatcgcgctgaccatccaggcgggcaaaacgcagtttggcgcgatgaacgccaccacctgggggtataacggctcgctgctggggcccgcgctgcagctgacgcaggggaagaccatcacggtggacattactaaccagctggcagaagagaccacgctgcactggcatggtctggaggtcccgggcgaggtcgacgggggaccgcagggggttatcgccccgggcgccactcggacggtgagcttcacgccaacgcaacgggcggccacctgctggtttcacccccatcagcacgggaccaccggtcggcaggtggcgatggggctggcggggctggtgctgatcgaggatgaagagagcggacgcctgctgttgccgaagcagtggggaatcgatgatgtaccggtgatcgtacaggacaagaagtttaccgccgctggcgaaattgattatcagctggatgtcatgagcgccgccgtcggctggtttggcgatacgctgctgaccaatggcactctctatcctgaacatgccgccccgcgcggctggctacgtctgcgcttgctgaacggctgtaatgcccgttccctcaattttgcgaccagcgataagcgcccgctgtacgtggttgccagcgacggcggtctgctggcggagccggtgaaggtcaatgaactgccggtcttgatgggggagcgttttgaggtgttggtggacaccagcgacggtaaaccttttgatctggtgaccctgccggtgagccagatgggcatggccattgcgcctttcgataaaccacagccggtactgcgcgtccagccgctggttattcctgcctcaggtaagctgctggataccctggccgctctgccggcgctaccgtccctgacggggctgacgcagcgtcagctccagctgtcgatggatccgatgcttgacaggatgggcatgcaggcgctgatggagaaatatggcgatcaggcaatggccggaatggatcacggcatgatggggcacggcgggatgggcgggatgggcgacacggggagtatgcaccacggcgacatgagcaacatgaaccacgggtccggcatgaatcatggtatgtcgtcgggtaaggggtttgatttccataacgccaaccgcatcaacggcaaagccttcgacatgaatgtgccgatgtttgccgccgccagaggagagtatgaacgctgggtcatctccggcaagggcgacatgatgctgcatccgttccacattcacggcacccagttccgcatccttagcgaaaacggcaagccgccagcggcgcatcgtagcggctggaaagacaccgttcgtgtggaagggggcgtgagtgaagtattagtgaagtttgatcatccggcgccgaaggagtttgcctatatggcccactgccacctgctggaacatgaagacaccgggatgatgttgggattcacggtttag

SEQ ID NO: 228666 - DNA, 1227 bp, Klebsiella pneumoniae
atggcgggcactaacaagctaagtgataaaaagctcaaggcactccaggcggccaaccgtgatgcgccagaaatgtatgcagatggtgaaggtttaagcgtcagggcatcaaaacagggtcaactgagttgggtattctcttaccggttgggtggaaggggtagcaaactcgaacgtttaacgattggccgttaccctgatttgtcgctaaaagctgcaagagaaaagcgggaaaagtgtcgccagtggttggccaatggtcttgatccaaaaacagagcttgcactgagcaccgaagaaacgcttaaacctgtgacagtacaggatgctctcgaatactggctggtgaactatgccaggagaaagcgcagcgatgaagaactggtaagggcacagctacgtaagcatatttacccgcgccttggtcgttatccgctcaccagatgtgaaacccgccattgggtggcctgttttgatgaaataaacctgaccaaacccatgaccgccggccgcatgtttcagatttctaaacaggcgttacgtttctgcaaggttcgccgctatgccgccagtgatgctcttgcctttcttaccattcaggatgtaggccagccatccggccaacgtgaccgcgtattgtcagatagcgagctggctgatgtgtggcgctccacagacagcgatgatcagcagccttactattcacgtcttctcaaaatgctagtgctgtttggtgcacgaacgatggaggttcgcctctctcgatggtcagagtgggatttttcctcatggatttggacagtaccgaaagagcacagcaaaactcgcgagaaaatagttagatcgatacctgaagcaatacgtccgtggctggaagagttaaaacgcgagacaggcaaaacgggactactgctgggagaagatcgcacccgtcaggctgtatcattgaaagggcgcaggctttataaagatttccaccataacgagccttggacgcttcacgatctgcgtcgcacgttctccacggggctaaacaatatgggcatagcaccgcatattgtagaactgctgctgggtcatgccctaccgggcgtcatggctatttataaccgtagcctgtacttgccggagaagctcgatgctctgaacaaatggtatgaacgcttggagcttcttgcgggtaatcatcaaaatgtggttctgttacctgtagcgaatagagattaa

SEQ ID NO: 228667 - DNA, 819 bp, Klebsiella pneumoniae
atgggaatgccattacgtgagtattatacattatctcgggcagctgaatcacttcattgcaaagtagaggatttaattcactgggcatcagttggggggattaatttatatattccaatagaagaaggtatgggctatgttcatttcgttgatgaagatggtcaattaagtatcgattttatggagggatttattgctaatgatgttttttcaactgttagcgctctttttcgtgaggataataaatattattctgactttttcgataaaaatcctccattagataatgtagtgccgtgtatattttcggggctgtgggcgttgccacgatctgcatattatatggatagtttatatgagtttaaaccggggatttttgatctgtggctgtcttccagtagaaaaatgtttgttttgtttgaagattctgaagtttttagtattaatcctgatgctttgctgatcataaagaatgactttaaattaattttaaataataaagaatttgatgatttgcctaattattttaacggaggggtaaataagattgaaattagaaatgagacaaatattcgctctgaggctgcacaggaacgtcatgcaagaaatgaactattaattttaagtgcagcaataagattcaaagaaacaaattcggatgttttcaatgaggaatgcatcaaaaaagacggaagttacaacttttcagcttgggcgagagctgttgccgacagggtgcacttgtttcctaacgggcagtgtccagttaagagtgttgaaacaatcacgtcatatatcagcaagcattttaagttttga

SEQ ID NO: 228668 - DNA, 285 bp, Klebsiella pneumoniae
atgccaaatatcacctttaccccacccaaccccgaacaacgccgcactctattggaagagtatggctttaagttcgaccgccgcattcgtgaagatgaatgcaacgaaatcaccagcctttcccgttccagtcgctggaagatggagcaagaaggccgcttccctccgcgttgccaatttggccgcaatagctgcgcctggcttttgtccgatgtgctctggtgggttcgcaatcctcctgctgtacctaacgtcaataacccgtataaccgtaaatcggcctag

SEQ ID NO: 228669 - DNA, 618 bp, Klebsiella pneumoniae
atgactcagaaaaaatttactgccttaactggcagcagcaagactcaccctgaaaccagtaaaaaggttaatttcacggcaaatgaaaatgatatttctgtaattaaatttgaaggacgtacggtcaggattgtgaatgttttcggtgagccgtggttcgttgtgtctgatgtgtgccaggcattggaaatcagcaacccaaccagtgccgttacctctctggatggtgacgaggtaatgaccctaactttaactgagggtcattcgggtaagcgtggtggagcgcgtagctggaatatggccgcagaatccggcttttataaactgattgcccgcagccgcaaggcatccactgctgggacgttcgcccaccgcttcagcaattgggtattccgagaggttatcccgtccatacgtaaaaccggttcatacggcgtcccgttctcattcctgaatgacttcagccgccgcaaggatcagtacacaaagaaagccagtaagtgcggcagcgacctacaggcgtgcaaaggagagaaagcccgtcttgagatggaagaaattggattatggagaaagtatcaacccggcttactggagggaatggaagatgatgcataa

SEQ ID NO: 228670 - DNA, 264 bp, Klebsiella pneumoniae
atgaccataattaatgatgaatccgtacctaacgtccaggaagttgaggaagccattaatcaagtaaggcatcacttctctgagtataattgttccattaaaacagacgattacgaaaatgagatttttatcagattccccaaatctgaatctcataacgcatttaatttcactatcgatagcaaaatcttcaaaagaaaaacacggctgaaagagcacctcgaattcattgagcgtcaattgaaagaaaacggaagaatataa

SEQ ID NO: 228671 - DNA, 192 bp, Klebsiella pneumoniae
atggcaacaggtgcgaagaacgcaaagtcacaaatgactacagttcgaatcccccatgatgtgatggaagatattgaaagtttgaagcaagaaggcgaaagcaccgctggttttctcgtaactgcagccagaggtgagatcaaacgccgccagcgtaagcagactaaaatcgctccgaatgaggccacataa

SEQ ID NO: 228672 - DNA, 204 bp, Klebsiella pneumoniae
atgagtgaattaaccgtccagcaggctgctgataaagcatatcaggcagaaattattctcgccctgatgcagggaaagtcggctgtgcgcatggaagatagcgaaattgacgctctgatcgcgatagttaaagacttgatcggcgatgtaggtggttttctgggagaagaggaatcacgtacagaacgggagggtaaagcatga

SEQ ID NO: 228673 - DNA, 222 bp, Klebsiella pneumoniae
atgagacatttaccccttattgatgcgacctgccaggttgagcaggcccaggcggttttatctctttggatggaaagaatctcgaaagattcagatcctgaccttccgcgtctcttaggttcgctcatgacattgttaaatggcgtaccggaatccatgagcgaggcagaaagtgcgctacatgattatgttatgcgtgactttagggagggcaaatcgtga

SEQ ID NO: 228674 - DNA, 201 bp, Klebsiella pneumoniae
atgccgttccaggagtgcaggagcaaaacaagctgggtgttaccggaatggtttgccgcggcgaagagagagcgcctgttcagaaagcagaagaaaaaactcatgtggctccgccggataatcgccaaccagaggaaagcatgccatgccgttaatgacgttacccgcatgggcgctaagagcgttcggtacgaaagataa

SEQ ID NO: 228675 - DNA, 459 bp, Klebsiella pneumoniae
atgaactttcagcacctcaacaagcagcaacctgatgcgcatgcatatggcttttccgggcgccgtatgcagcgtatgcaccagcttcagcaatcgcttgaagaagaggaactccctgaatgcccccattctgatgcgcatctgatagcggtgagcaaagcggcaaaacaaaatccgatacaggcatttcatcttatcgcggaagggatcccacatcagaaggctattgccagactaaaaggcagcgctcgccagctcagtcgttttacccggcgggctatggagaaagtttatcctggctgggagttccttgatgccgaagaccagaacatggcggcatttcaacacagcatgattaacggtgacacaaacggctatcgtgctggttttaacgccgctctgttagcgcttgagaagtatatcgaaccggtgagtatggcagatacgctttctatatag

SEQ ID NO: 228676 - DNA, 534 bp, Klebsiella pneumoniae
atgcgtaagataagttcagtcactgatactgctgatagtaatggggaatttacacaaggtaatgttgctaatggggtatcaccaacaattcttgttgccgatatttttaatacctggcagcgtgagatggtgggcgtggtagagggttctggccgccagcttgagcctgaaaatgatggtcagttaaacgaagttattgatgagttgaggatcaccgcccttctatctgaacccatcgtaggtgcccttacttcacagggttactgcattattcctacccgaacaccatcaggtgaaaagaaaaatattattgttcaaatgggaactgccactattaattcaccatcaggtaatgttcagtatccgataccttttcctaaaagggctattgctattgtggctacgaagtacgcagatggaaatcgttacgtgtccgtaaccaatgattccaattccggtttccgtgcatatggctggatcagcggcagttcgggtaatgcagataattttggatggttagcgataggggaatag

SEQ ID NO: 228677 - DNA, 189 bp, Klebsiella pneumoniae
atgttaaaacagaagaagatcgaggcggcaattgaagagctggcccgcctgcaggggcatgagctgaacgccgccgatatgctggagttacgttgcagagtggctggaactctcgcagcaaaagaacggcaccgtcggcggatgaatgcaccagaatatcactggcgtaaaccagaacctcgtcgatag

SEQ ID NO: 228678 - DNA, 1299 bp, Klebsiella pneumoniae
atgctttttttacttgtggtttttcttgtgctattgggtgtgctttggcattggtttcaaaataatattacattgatatcaggacttgccacagctcttgcattttttgcaacagcctgggctgcccatgaaggcaggaaaagtgccagagcagcatttcgtgccgtaaaaacatcagaggatgccctagaggaaacaaggaaaaactatctcagagatgccttcaatcaacggttctcgttattacttgaacaacacaacacctatcttgaaaaggtaaataattatgttcttactgaatcaggatggctcttcataaaagaaaaattctattcaactaatcatttcgaagcatttaatgcgatgagtgggcatgttatacttagcccttacatgcgtattttatatcacacgcttagatttgttgatcaagattattttggcgaaaaaaacgatataaaaggaaagaaaaaatacacttcactaatcagatcacttataagcaatgatgtattgtttttggttgcagttaactctagctatgtttcaaatgaaggtaataagaatcagtattacaagtatcaatatcttttacagaggtttgatttttttgagcatgcaaatttcattaacattaatcatcaaaacgaaaccagcaaaaactttgctttaacaactccaattctaaatattgagggcgatattaaaaataccttttataattacatctcagacggaaaccacgatgccacttcaaattttagaataaacatgtacataccagccattgttgcatacatatataaaaaccctcttcagggtacaatgcgcacgtggctcgataaagccccctcttttttgtttcacacttttatagagaatacagacaagagaagttatgaagatattttcaatatgtatttatttgaaaagttttctaactgttatatcgataaagccatctataacacgaatattccatacaatgcagagagcaagagaaaattagataaagagatattaaaaagcatcatcagggctgtcaggggtgaacgtttacaatcttactctcttgattccataaagtttgtcaaattaaaaaacaacagtagccacgtctcaacctgttataattttgaaactctttattatgatataataaattataaaaaacatattgacagaaaaaattacatttcatttggcaagcgttacttacctgtaaaagacatggctactaaattcagaaaatttgaaagtgaactaaaaaaacaatgtgctctaacttacattgattaa

SEQ ID NO: 228679 - DNA, 3027 bp, Klebsiella pneumoniae
atggcggcattaggcaacaggtcggtacagggagcaattattgagcttgacgcctatgctgtgctcgcaaacggcgatccatcgcagcttgaacgttcatcaaaacgacaggttcttcatcggcttaaagagattgaagccgaagatccttactttcgtaggagcgacttctggcgccggttcagcgcggctggttttttcacacaagacgttgttgaagaaataaagccacttttaacaatgagcaatgaaggtcatttacgtagtttgattttagaacttctggcagactcgccggttaattgtcatttggcatctgagttaagcctgcttactttaaatcccgacgagtctgaacagattcgtacattagcaagcagatgcttacttgatgtcaaagaatacgatttcattggcgctttagccgttttgatttttgaagccagtaatatttcactcaatatagcagccaaagtcatcgaagtcatagggccagaaaaatttaatcacacatatctctctggattcttacgagtctgtgcgaacctataccccgctcacaaagcacaatttgaaagagtgataggcactcgttattttattaagaagctaatctcccatttttcacagcatacgcttgaacttcttctggacgaattaacccataatcttcattgccattgtgggaaaaaaagctatgagtgtgattgtcgcaatggaataagcaagattgttggttcaatggtcgatcgctattttgaactagctcaagcaccgtttgatcctgtgaggatctggcaatggataggtaatctcaatttccatcgtcattgccagcccgatcaaagtaaatcggtacagatacttcaggaaaatgacacacttcgtcaggagatcattgcttatgtatttgggccattaacggatcgtaaagagatattcaacttaagagtagagaaattttccggacacctgcactcacattcaggccttcatttatggaggaaagacaataaatttctaatcgatctcgcgtttaaaacagataacgttgacctgtgggcgagtttcctagtcaaccatcaacgttacaaaaataaggaagagcaaggcccggatgatttgcgggcacaaatgcgtcagcatgccctttccaaacctgtatttatgcgtgaatgggcccgattcaataatggcatgaaattatccgaacaggaacatctcctctggagatttagacataacagaagcatgaaacgccatgaccgaaagcaacgggatatccacgccagaaacataaaatttgttagtgaaaacaaagaaattatagaatgtggtcgtcactggggttgtctggtgcgttttgcagaacttgtgctcatgcatccggaaagaattgaattagaatttggtgacgagaaactggttcggactgcgttaagaaattgtctggattttattactcccgaggttcccagtctacccgaactagcagcgctgcaatgcgaatctaaatacaggcattctgagacgattttatatgccgcctgtttggagattctacgtgcagaaggtagtcttgaatgcgtcaatattgagttacttacagctttaagaactaacattcacgtgggatacaactcagtttctatggaagaacgtgatgcgctacaagcggaggttgaccggcttatttttcctgacagcaaaagtgcggaaaaatatctccgacagtatgttgaaccccaactcgctcaaccatgccctcatcctgaaatctggatgttaagtggagaagaggtctttcgtcattcacgcgctcaactttccattgagtggcttcgtcgttttactgatttatcccttgactcagcagacacactttttgaaattgctgctcaatacggcgatcgtgaggatttaaaaaaggttattgcagagcgttgctcagatatgatgtcaggttggcctaatctgacagaaaatgaggatattgaacgcaagcgaatattctggctggtacgtgagttctactttctggagaatattacggctacttattgggcatggctaaaatctgacaaagacaatttactgcatttttatgaacggtcctggcgtatgagccggagtgagcaccgtgcctggccggaacttacctcaatgaaggttgaagccgttttagatacttttattgaacactggccgcatgttgatctgcctgatagttgggatagtgatagccctaaagaagagaaagcctaccgctttttgactgatttgatttggtcaattaactcggatattcctgacgttgcaatacctgtactggaccgtcttcttaacgatccacgtttcaccagtctgcataaggagttacaaagcatatatgccgctcaaatcagaaaaaaagcgctcagggattttgaaccaccgacgccagatgagatagttcaacgcttggattgtgattcagtcgttaccgttgaaggcctgcgtcagttagttcttcaggagcttaatgatttccaaaacgcaattgatggcggcgagtttaactcggcagatcgcttctatgagaaaaatgaacgccttgatgaggtaaagtccacagaaattattgcggagcgcctgagtttaagacttcagcctcaggccatcgctataactccagagcatcagttgaaagggcaaaacaggagtgacttcacggcatctaagttgattggcggaaaaagacgactgctcgttacggaagttaaaggccagtggcacagagagttatattctgccgcttcagcccagctctatgaccgctattccattcatcctgatgccgagcagcagggtatctttcttgtcatatggtttggagaaaacgaaaccgttgctggtcgcaaaacccacggaattaaaaccgctcaggagcttaaagttagtattgaagcagtactaccgactgatctccgtagtttaattgatgttttcgttttagatgtttcacgacactgtgaccgccaacgttag

SEQ ID NO: 228680 - DNA, 816 bp, Klebsiella pneumoniae
atgaattcaactttctatcttgaacgtaattttacacacggtgacaggacgtacacagagacagagttgctgactgcatcaacgcacattgttgtgttagcagaacccggcggtgggaaaaccgagctgatgaagagtcttgctcagaaactgaacacttcggtcttaaatgccagtgtatttgcctacgtgggagcagataaaaatagcccgctgataattgacgccgttgatgaggtcgccaggatcgatcaatcaggtattcataaactccttgcgctcgccagaacatcaaacccgactcgcgtaatcatgtcgagtagatcaagcgaatggggacaggcttctaccagtatttttaaaaattttcttggtttttcccctatggttgtaaggctgagagagttcgatcaaaacgaacaacacgccatctttcagcaccatgcgccagaagaagacttctttgcattccagaccgaagtaacacggtttagtttagagatgttgttaccaaaccctcagtttctgaaaatgttcaccgatgcctatttagaaagtgacaggcgatttgctgacaaacgttcaatctttgctttagcggtagaacgactggctaaggaagccaacccaaatatcccgaaagcctctgtatctctttcagttgcacagaagatttcattttctgccgaggtttatgccaaacttctgttgtcgggcgcagagggagtcagtaccaccgatgcgacttctagccggatgtatcccatgctgtcagcgttgtttagcggcagtacagcctgttacgacatattgtaa

SEQ ID NO: 228681 - DNA, 174 bp, Klebsiella pneumoniae
atggccggggaacacgtcattttactggatgagcaggatcagcctgccggtatgctggagaagtatgccgcccatacgcttgatacccctttacatctcgcgttttcctgctggctgtttaaccagcagggtcagttgctggtcactcgtcgttcgttgggcaaaaaagcctag

SEQ ID NO: 228682 - DNA, 564 bp, Klebsiella pneumoniae
  misc_feature (527)..(536): n is a, c, g, or t
atgataccatatataactgtgttgatcataatttatacatggattgttttagaaaataaaacaattggtagaaaaacgataattgtacctcttctattgcttggaacgttggcagcggttagatactatggagttggtacagatgcagatatgtatacaagatattttcgatttccatttaatacttatgcatttaattttgatcccgacgtagaggcaggctatcaatacttcgtctatctaattcgtgagttatacagtgatgactattttgtatatttcgcaataatggcgttcgtttgtataattcctgttttatatactctgaagaaattttctgttgattaccccttgtctgtatatatttatattacgtttggtctgtattttgctctttacaatcaagttaggcaagcaatagccatggggatttgtttttatgcgacaaaatatctgcttaataaagagtttttaaaatactgtttatttattctaattgcatcacaatttcatattacggcattagnnnnnnnnnntgatagggatgtactttgtttgccataa

SEQ ID NO: 228683 - DNA, 2163 bp, Klebsiella pneumoniae
atgtcaccagtcaataataagcaattaagccaaaaaactactgaagacttcgatctaggtcgtttgcttggtgaaataatagatcaccggaagttaatcatttcggtaacaacgctttttaccgttatatcgatagtatatgctttatttgcaacgcctatataccaagcagatgcaatggtacaggttgaacaaaagcaagcaaatgcgatattaagtaatttaagtcaaatgcttcctgatagccagccacaatcagctccagagattgcgttgttgcaatctcgtatgattttaggaaagacagttgatgaccttaatttacaaactaagattgaacctgagtacttcccaattttagggcgtggctgggctaggctaatgggtaaaaacgttgggggtatagtcatatcaagactttatctaccatataatggggaggagaaacagaaattagaattggtagtcaatgataataatcattacacaattacgtataatgatgttagtttagaaggtcaagccggacagttaattgatgaaaaagggataactgtaaaggttgattctattgaagcagcgcctggttcaaaattttctatatattatgttagtcgcttaaaagcaatctcagacttgcaagaatacttttccgtaaatgatcaagggaaagatactggcattttagttttatcattaactggtgataatcctcagcgaattaagaatataattgacagcattagtagtaattatttagcacaaaatatttctcgccaagctgcacaagatgaaaagagtttagaatttctaaatcaacaattaccaaaggtcagggcagaattggagattgctgagaataaacttaacgattatagaaggcgtaacgattcagtagatttgtctttagaagcaaaatccgtattagatcagatagttaatgttgataatcaacttaatgaactgacgtttagagagtctgaaatatcacagctttatactaaagaacatccgacatataaagctttaatggaaaaaagaaaaacattacaagatgaaaaattaaaattaaataaaaaagtttcatctatgcctgaaacgcagcaggagatagttaggctaagccgtgacgtcgagtcaggccgtgcagtctatatgcagctgctgaatcgccaacaagagcttaatatcgcaaaatcaagcgctattggcaatgtaagaataattgacgatgctgttacacagccaaaaccaattaagcctaaaaagcttgttgttgttcttcttggttttttattaggtgcgattatatcaatagcacttgtgctagtaagagttttcctgcggcgaggtatagaaacacctgagcaactcgaagagataggaatcaatgtttatgccagtattcctgtgtcagaaacgtatgcaaagaatgtagtaaaacaaggttccaataggaaaagtgattcaaacgagcaagtgtttcttgcagcaacaaatcctgcggatctagcgatagaggcaatacgagggctaagaacaagcttgcattttgctatgatggaagctcgtaataatgtattaatgatctcaggtgctagtccaaatgctggtaaaacatttgtcagtacaaatttagctgctgtgatagctcaaacggggaaaaaaatactttttatagatacagatatgcgaaaaggatatacgcataagttatttaatgttgaaaatgtaaatggtttatcagatgtcctttcaggaaaaattgctgttgagaattctataaagagaatggattcaattgggtttgattttatatcaagaggaatggtccctcctaacccagctgagttattgatgaacaaacgattcgatagccttatttcatgggcgattgcaaattatgatatgattatacttgatacgccaccaattttggctgtgacggatgcggcaatcataggcaattatgcaggtacaaccctacttgttgctcgtttcgaactcaatactccaaaagaattggaggtgagcgtgaagagatttgaacagagtggtgtgtctgtaaaaggctgtattctaaatggtgtcgttaaaaaagcgagcagctattatgggtatggttataatcactatggttactcatatacagacaataaatag

SEQ ID NO: 228684 - DNA, 297 bp, Klebsiella pneumoniae
atgaagcatcttgtacattcttttttatctgtatcatctgacggtgcaactattaagtacgaaatatattctcaagatcaggaattaggacatttaaagaagatcccggagggtagttgtcagatcattaagtcgatatatcaaaaggatagcaatagttttaagttaatagacttaaacgtaaatgttgaggatttatttaaggcaaatcaacccaagccaaatacttggtactcggatgggcaagaccgtgtaaatctcgacatgcttatcaattatcttgataacttaaaataa

SEQ ID NO: 228685 - DNA, 234 bp, Klebsiella pneumoniae
atgcgcctgactgttctcagtaacgaccctggtgaacgtatatggcctagccgtgaacgcataacggtgtacctcaacggtgtcgaggtcaagtacgtttttaccgccgatgatcagaagggcgaagttatcgctgctacgctcgactgtcttggcaacctcatagccgagaatggcgagattaagcgccagaagctgttaggtcaggtgaggatagagcgatgcccgcgctaa

SEQ ID NO: 228686 - DNA, 1908 bp, Klebsiella pneumoniae
atggcctttaatccgccactggggagcacgtctcccgctgtgctgctcgataacgccacacgccttgataagctggccaacgggcccgctgccattgttcccgatcgtgcaggtcaaccgctggattcctggcgccagatgatggcgaaaaatgaagccctcacggaagcaacccgccagaaccttatccccctgagtcgtcagtacatgacgctggcagaggcacaggcggatatcgcgaatatccctgctggctcgacaacgtattaccgcagcccggatgacagcgccctggctatcgaggtaatcaataacgccggtacgcttgtagcaaccgggcggcggatgccgtcgatggaatctattcaaaatctgttacctctcaacggttcagttgagtttcgcatacctgacgatggtgaatatgagtttggtcttgcatttgacatcatcgttattgatgagcaagacaatattctgcggtataccgcaggtatcgaatcgttcaactttctgaacagttatttttcacgcctttttgtagacgggacagagattgaccctgcgggtataccgactccagatgagcgctctgtattgactaattttcaggtttcagcagtagtggcggatattaatgaattcgagtttaatccggctgatggttttctgataattgatgacgaaaacaatattcagttcagcacagctgactatgtgcaacgttcgcctgagtgggacgatgcatggcgcataacccagaacctgccagaaaaaataaccaatccattgctcccctggtcagagtttgataatcaggggaaaaaccaggtacgggtgttcgacactgagacgcagcaagttaaagccgttacgtccgggaacagtaatgaaaccagtccacgccccgacggtgcagaccggatagtgtggcaatctgaccggtcagatccgccgccgggaggattgttttatgctgcatctcctgatttcaaggagcatgcgtatattgcacgtaaaaaaatcgtgggatggggtcactcgtttatcaataacggcgcattcctgaatcgcatgcgtgtgctgaccgggctgccaacatataactttggtctcagcgggcagacgagtgatgccattgccgcgcgccagggtggggcgcctgcctattacgcgcctgttggcggtatcattccggagtcaggagcggttgctcttacaccggcagtgcctggcccatgccgttccctcgctgccccggtagcactgaaatgcaatctggctggcgtggacgggacctttacctggaacggtacggtcgcaacatttacccggctggcatcaggtagtgctgtaacggtttcttcaccagttgcgttatttgtttacccgatcacaaccgtgaatgtgttcaacagcatgccgtccggaacacaatttgatcagcataatgagtgtattaatctcttctggattgggcggaataacatcagcgaaaccagcatgataatgagtaacgccgtctcaatggcaaattatgttaaaaatataggacaaaaaatagttttccttgctgactttaatgcatctacagaaccacccggaagcactggctactctcagatgatggccctcaactccggtctggctgataagtttccagatttctactgtgcaataaatggcgtagatatcaggcagaactttattaaccatgcaaatccggtgtcagcaaatgacatggctgacgtggctgctggtttaacccctagatctcttcgctacgataatttgcatccatcacaaacaatagccacctccctcgaacctgcatatgcgttggatgccggggctaatgttaacgctaattttgtttatcaatttcttctaagtaaagggtggttataa

SEQ ID NO: 228687 - DNA, 816 bp, Klebsiella pneumoniae
atgtcaggattaattattcgggtgaaaggtctggttgcaccgacaggcaagaaactggtgcgcgataagtctgctaacgcagcgacacgggccataattgatgtgtcgaatcagtggtccgggggaaagaaaaatcttgcagctggcgcacaaatcagggatctgattaccggttcagccgttgctgaagtatccaaatcacatacttattccggcggtgggattatatttgccgggattaacggggatacggtaaatcttccggatgttgctgccccccagcctgcagaaactcactggctgatcaccacctggatgaaaatgtctaattacggagcgggtaccgcagcgagcgcgaataaccaaacgttgagcttctccactaccacactgaacgatgcgactaaggcaatgctggcgctggtatgttctcctgcatcgggcgcggctccgacgtctatctctgtctttgcccgcggtaaaaactacagcggtctggcatctgcactggcgccaatttatgacaatgcgcttcatcaggttgcttttgaactgcaactgagcagcgacggcacgcaacagcaactaaaggtctatgtggatggtgtggcggtgtatacgtccggttattctgcggtggcttccaccgtgcctgcgacacccacccaaaaatacatcgggacgtctgcaccgttcccgctggcctgggcgggcaagttctaccgcacccgcaaagacgacctgacggcaaccaccctgactgtagctgaaattctggcggcagattcagcctcgatcaacgggcgtttttcataa

SEQ ID NO: 228688 - DNA, 1173 bp, Klebsiella pneumoniae
gtgggagacatattattttccattattattttgccgtgcttttttatagtgttcattctttctggaatattggttaaatatgttcctgtagcatctcagggacgatattctggtattgatgggcttcgtggttacttggcactaatggtggccgtacatcatttttacatattctatcagtggcggattggtggagagtggaaggagccgtcgctcgttttttttaataatttaggtgtttttgctgttgctgttttttttatgattactggttttttatttattgggaaaatagacaaagcgagtttttttaataattttgattttgttggcttgattaaatcaaggttgtatagaatccttccgctttatttttttgcagcatcaattactatttttatatcgctttatattactggttttacattaaaggttgattatggcttgtttataaagcaagttttgagatggtttttgtttgtaggtgattccataaatggttactctgaagcaaagaggataacagcaggggttacatggacgttaagatatgaatggtttttttatctttcattattctttgtttattttatatcaaaaaatagatatgcattagtaatatgcggttttttggttgctttattagcaatgtggggtcgtgattttttgatattcaatagtctatattttattttcttcgtaacaggtggtgtggcttattttttgagcaagagcaagagattgtctgaggttttagatgaaaaattaatcaaaagcaataagtcatcatttgctatgtgtggattaattctttttgctttaaccattaacgaaaaagaacatttattattgtttagctcaatatcacttttattctttatgtttgtagtgcttggcggtgatttgtttgggttgttatcgatgaccacctctaagttcttaggtgaaataagctatagcatttatctcatgcatggcgtagtcctgtttatcatattcaatctactgtttaacggggtttttcccttgagtttttttgagtactgcatgttgcttcctgtttttttgtttttagtggttgttgtatcatgtgtgacgtatttaaaaatcgaacatccatttattttgtttgggaaacgtaaaaatattaatgaatcaagtgcaaaagtataa

SEQ ID NO: 228689 - DNA, 1287 bp, Klebsiella pneumoniae
atgttaaagaaactctatcgcaaggaagcggttgaatataaaaaaagccattggcgaggaaaagctctattgctcaatggattacccgcttggttaatattacttttatccaccttatttctcatggctctgattagcgcattgatatttggaaaattcacccaaagaatagatgtaaaaggtgaagtaattacccttcctcattcaattaatgtattttcaccacagcagggctttattattaaacaatacgttaaaattggtgatattgttaaaaaagatcaagcactgtatgagatagacgtatcccgaaacacctccagtggaaatgttagcgctgcgcaaattgcatctattaacgacaaaatagaaaactccaatgacattatcaaaaagctaattgacaataaaagccagacgataaatgcattaaatgagcaattaaaaacgtcgaccgattcgttgaaagagaccaaccggatgttacaaaacacccaagccggactcaaaaaaatgcatgctaaccttgcaagctacgataaatatcttagcgatggattaatcaccaaggatcaatataactaccaacactctttatactttcagcaacagagtgcttatcagtcgctggttagtcaaaagatgcaactggaatcgcagatcacccagttaaatagtgacagggtgacaaaagctgcagactttgataaccagatttccagccagtataaccaggctaatgactataaaaaccagctggttgaatccaatgctaacggcaatctgattattaaagcgaccagtgatggtagagttgagtctttatcggcaacgcaaggacagaccgttgaaaatggcagcagcctggcgcagattaaacccacaggaaatgtagaatattatcttatcctttggttaccgaataatgccatcccttatcttaaagtcggtgatccgatcaatataagatatgatgcatttccttcagataaatttggtcaattccccgggacgattctatccatatcttccatgccggcatctcgacaggaaatgtctgaatacactaacgttagcgatggcaccgcacaacaggaactggcactttataaagcaattgtgaaaattaaagataaagagttcaaacacaatggtaaaacgttgcgtttatctaatggtcttaaggcgcaagccgtcgtctttcttgaagagcgcccgctttatatgtggatgtttacccctgtttataaaatttctcaaagcgtgagcggccccgtcaatgactaa

SEQ ID NO: 228690 - DNA, 1032 bp, Klebsiella pneumoniae
atgaaaaaaatactaatattaataacattattaattatttgttgtgaggcgagtgcaaaatgtacgtactcaggaagcacccgccggcaaactctttcactcaagaatataaaaattccaactgatacttcaattccggttggtagtgttctttatacgcaaaaatttggaactcagacatataaaaattttgagtgtgataaatcaactgacgatcagtacattatcgatgtcggagcagcccccgttgccggtgtcaccggaatcaaaggtggtactgtatatgaaactgggattgatggcattggattccaggtatccgatctcttgcgtagtaaaaacggagcgctggtccctgcagaagcggggtctactctagttccaatatcaaaaacctctgagaattactatcaatttattacagtatggttgatcaagaccaaatccgtcatcgacaccaccggttcaggttcaaatccatatgtatctttctcagctggtaatttaacaacaaaccgaagcgccagcgaacgattattttattcggctatagcaatagagctgaaaaacatcaattatcgtaaaacatcatgtaatatctcaacgccacgatctatagttacgttaaaccgaatcgacaagagccaactgatgtcaatctctcgaggcgcaacaacaccttcgcaaaagacgattcctatgaatattgattgtccttcagattcaattgggaataccgtcacttactggtttaatcccataggtggaatcagctcctatggtaacggaattgtgaataatatgctttctggagattcagcagcaagcaatgttggtataatttttaaaatttcaggtagtcctatagtcttctatgacaccgataattataaatacgatattattaccaatagtgatctatcaaagacaataaatctgacagctgattattaccggatgagtgatagcagtagtgaaatcaccagcgggagtgttaaaggtatgttggaagtgattatccaagaagaataa

SEQ ID NO: 228691 - DNA, 420 bp, Klebsiella pneumoniae
atgaaccacaatgagataatgtcgattattgaaaaggcgatgaaagaagaatatcagtacggcaaaaatgattgcaatattgttgcattaagaattgtagatttactatgtggtactgagtggtcaaagattgcaaactataaaagtttaaagacaggacttgaacagttaaataaccttgggtttgattcaactcaagatattatcattaaagaatgcaaggaagtagaaataccaattgatggtgatatatggcttgatgatcataatccgctaattatgggcgttgttgtatcaggtcgcctactaggtgtgaatgaatctcatgatgcgtttgaattacacaataaaaagaaaaatggaaagtactatagagggattaagaaatgggatcaggtggtggaatatttggagcactag

SEQ ID NO: 228692 - DNA, 3210 bp, Klebsiella pneumoniae
atgggatcaggtggtggaatatttggagcactagtaacggcagtaatggtagctgctgccgtttatacaggaggtgcaacactagcagttgctgctgcatggggtgctgctgctggagcactatcattagttgctacgagtatgttaggtcagattgggacaactactggatataatgatgtatcacaggctctaagccgttcaacaagcccaaaaagtgggttaccaattatatatggtggtagtgcacctaataaaccaggtggttctggtggttcattcgtattaacgtcagttatcaataactggtataacgtaccaaatggaagttctcagtacttctttagtgaacaagtagtgtcgatgacaggtacaggtaaacacattgaacaaatttatttcaatggggaaccagtacttgcagtaccagttaccctagatgggattgtacctaaagaggcaatcatctctaaatttcagaagtacttacaacttgaagtacgttttggtggagattatacgacaacaaaaacattagcaaagcaatatgctggtccgaagtggacagataaattccttgggaaaggtgttgtatctatttccgcagttatctttaaaactgagcagagtactatggatggtattttgaccaatgataacttcaatatgaccgtagaattaaaaggtcaaagcatttatgattttaattctggtactacatttgctacttcatgccctgcatcacagtcatatgattattttgtaaatccaatttatggtcttggtattgacccagcgttaattaatcagcaatcattttccgaagtaagtcaatggtgctttcaacagggactaactagtaatattgcaatgtcatatcagagtacttataaagagaacttggaatctattttacaggcatgtgcaggcatcatatatattcatggtggtcagatttacttgacggttgatcgtaaaacactatccgtacattcatttaatgaatccaatattattggtgaggcgagtatcagtacttcaggtacatcagattactataatacaatcgatgcaagctatactaaaccagactcaatgtatgcaaatgaagtactacgtattccatctgatatagataatgatgaggttattaaaagtgatggtatggttattacccttgcacgtgattttaaagcagtatatgaccaaaacattcttgcgaatcttgttaacgcagaactacgtaagactaagtttgcaaaacgtactttgacattcacaactgctgaaggttgggatattcgagtatgggatagcattgatgttaattttaaagagttaatggttgcaggtaaatttaaagtactatcaaaatcaattgcaactgatcaacagaacgttggctattgcattatcacttgtatcgaatatccagatgccatctttgatggaacagatcccggtacatggtctcctggtggtatcattaacccagatgaggggcgtgcaatactacctcctaaaaacctctcagtgacacgcagaggtgataccacaacaggatcagttgtaacccttacttgggaagaaagcccttcacagaacgttagaggctattacatttactatcgtgagactggtcaagctaactggattatcgcagggcagacaccaccaacaaagtacgagtttgatatttttggtttggatctagataagaaatatgattttggtgtatcggcatttaatatcattggtggtgtgtctgttaaggcagtactaggtaatgtgacaccagagtttaacttcactctacctgcaattactggtttgaaacttactaatgctactactgggttatatgaaactactgcattagatttcaatctgatttgggataaccaaagtaacctaagagttaacggtctatccttctcagattactttaaacactatgttatacgcatttatgatggcagtactttaaaagcaacttactatacaaaggaagatagttttaacttcacatttgagttaaacaatctacgtatacgtaaaccaactattggtatcactgcacaaggattcaacgcaggtacattctcaccagaagtcaaaataactgtagagaataaacagtgtggtttagttgacggtgttcgtatttctggtggctttggtaatctctttgttaattggattgaatcaacagaaccagactatgcaggggcgagtatcattctgacaagtgatgcaagtactcaaatgtatatcagtaataaaccagagtttgattctgtaccaaatgtacaggatggaaactatagggttaaagttggtctttttgattcctttggcatggataatatcaaatactctgatgaaattgaaataggtatcaattcaaagtatgtttttacagatcaagatgctagtgcaattaataatattttagatttagaccaaagactagatgatacacttaataatgctgttaatgaaagttcgcaatatactaatactaaaattgatgtactacaaaatcaaatagataatgatattaatgctaaaatcacagagatgaatcaaactattgttgacaacaatacggcgacaacgcagcagattacacaattaaaatcagaggtagatggaaatattgcaactgttaatcaagaaatggcaactaaagcaagtaaagatagtgttgattcctcatattctctatcagtgaaagcaggtggtgaagttgctggctttagattattagcaagtgatggtactgagaaaacatctgctgtatattttgctgctaataagtttataatttctggtactgatacagcagtagctggtgatactccaccatttagtgttgttaatggtaaaacatatataaaaactgcaatgattcaggaaggtagtttaggttctgtatatatttcagatgctgcaattactaatgctaagattgcaaatgcaagtattaatgaagcaaaaattatcgatggtcaaattactaacgctaagattggtaacttcatacagtctaataactatgttgcaaatagtacaggttggcagattaacaagaatggtactattgcaataaatggcaatggtggtacaggtagaatgacaataacaaataacataattcagatttatgataataacggtactttacgtgttagaatgggattgtggtaa

SEQ ID NO: 228693 - DNA, 615 bp, Klebsiella pneumoniae
atgacaattaatagtgagaataaaggaacagttgcatcactttataatccaatgcccagtctaacagatatcgggttttataggatagattccatatttggaaatggttccactttgggttttttacctcctagtttttatccaactaatggcggtttacgttggtttagattaacagtagatggtcgttattgttttccaggggcaagcatgtttgaacccggaacaggtgattttatgatcagtagttcagcggttggtatccaatccggttaccttgatgtttttgatggtggcggtaatcttgtttggtcagccgttagtgctggatcgatgccacgtattagaagctttttaacaattccaccaggtcacgatttatcaagtgcgattacgtttaatacttcttttgattccccttggatatgtataggtcagtgtcctggtaacttatcagatgatggtacagctactggatactcgggtattatgatccgacgtaatagtagtacatcatatacattgcaatacattaataaaaaccagttatcttatctgtctatgatggggagtaatcaattacagatagctctagcatcttttactggatattaa

SEQ ID NO: 228694 - DNA, 240 bp, Klebsiella pneumoniae
atggagtggattagcttggtagttataccattaattgtttatatctttaaatcatggctaaatagtcgttctcagatggttcaacgtatagaaacacttgaagcgaaagttagtacagcagaggtgatgattggtgaactacaagatgatgtagaagagatcaaagaaatcagagaggtattaactgatgttatgcttgatattagagaaattaaaacacttttaaataataagaaataa

SEQ ID NO: 228695 - DNA, 582 bp, Klebsiella pneumoniae
atgataaagataaagagtaaagtaactggcttaaaccagtctaaagtttatgttaacaatgaggggagacgcttaggtagtgaatttcaaaacgaattgatcacaaaaactcgtgaattagccattaagatgcaaactgatttaaatacatctattgatagaggtgccgtatattttactaaaaacgcgttacgttcttggtttcaaaagagtaggactggtgttaagtgttatattggagtactgcaaaaccagaatgagtatttatatgatgttattgttgaaccaaagacaatggaaaaatttgttaatacatcatctgcacgcttaactaaagaaggtaacattactcagttacgtaatggtattaaaaatggaaagtacaaagtggttacaacaggtggtaagaaacgcctaattgatactactaagaaagatacaaaaacaaaaacaaaacgtgttattgggcttcatgagtctaaaaaacgcaagatagtttatgacttctattcagaggctgagaaaggcatacgcctaatcatatctgatatcaaaggtcatttctcggtgaagaggggatga

SEQ ID NO: 228696 - DNA, 321 bp, Klebsiella pneumoniae
atgattatcgaagaacaccattatggtgaaaatacaaataaaattaaactcgatggaattacaccatttgcaaactcatataactttgatgtaggcatgtacttacaaaataagaaactcaaaaaagaactcaagaagattgatccaagtataacttcatatatgaatatcgtatttcagtaccgccaaggccagtggagtattggtgatgttcttacatgggaatatgaaggtaataaatttgatgtggtactttttggttcacatatgattagtcaaaaaggtaagcaattctaccagtactgtttaggaataaagtaa

SEQ ID NO: 228697 - DNA, 291 bp, Klebsiella pneumoniae
atgattacagcactaatcgaacttataaaaactggattttcttttttccagaaaaagcaagaaaacgaagttgatgtggacttagaaaaaaataaagagacaaatgaaactaatagagaagaaatcaagaaaggtttaacatggcgtaatgcgttgggttacatttgtgtagctatactggcgtactcttatatattaattccgattgcagattactttggtgttgcattaattcaaatgcctcttggtgatattattagaatcatcattctcttaattagtggtagttaa

SEQ ID NO: 228698 - DNA, 513 bp, Klebsiella pneumoniae
atggcaaggattaccaaaaaggaatctgcattacacattaaagtaatggatttaattcattcagacacagcactaacgcaagatgataaagaatttatatttaataactataaaggcgatggtataggtgctactggtgcatttttcacgcctgaaatgttggcatgggattttataattgatgctggttgtactggtgactgtattgaactatgtgcgggtatcggtcgcctcagctactaccagtacttaaggaataagccgacacacataacatgcgtagaactcaatcccgaatacgtgatgattgggaagagggtactaccagaagcggaatggatcacaggtgacgccctacagtactcaccagaccgtttctatcgtgttgcatatggcaatccaccatttggcaagatcaacacatcagaagtgcatacaggccgttacactggctcagagtttgaatacaagattatcgaccgtgctcgtgagtatgcatcatttggtgcatag

SEQ ID NO: 228699 - DNA, 711 bp, Klebsiella pneumoniae
atgacccgacctgatcgccgtcacctgcgccgcgccaggctggcccttgccgtggtggctgtcgccgggctgacctcctggctgtggttcccagacgggcgagcctttctgcaacacagcctgacggcgttagcgtcgctggatccccagtatgtcaaagactttatcgccgcctgggggacgcaggcggcgctggtctcttttgcgctaatgatcctccaggcgatcgtcgccccgctgccggccttcctgatcaccctggcaaacgccgcgctgttcggcgccttctggggaggcacgctgtcgtggttcagcgccatggtcggggccgggctctgcttttgcatcgccagagcgctggggcgcgagatggtggagaagctcaccggccgcacggtgctgcgcagcgtcgacggctatttcgcccgctatggcgcgcagacgatcctggtctgccgcctgctgccgtttgtcccttttgatccggtcagctatgccgccggactgacctcgctgcgcttctggccctttatgctggccaccggcgtgggccagctgccggcgaccatcgtctattcctgggccgggagcctgctgaccggaggcgctttctggctggccaccggcctttcgctgcttttggccctggcggtggtcatctccatcgccaaaaatatttaccgtgaacgtcataagagatcgtcgccatga

SEQ ID NO: 228700 - DNA, 144 bp, Klebsiella pneumoniae
atggcggagggtctcctgcagcagatgcaggtgagtcagcagatcgtgaagaccaacgcggtggctgataacggccagcgtggccgccagcgcgagaagtaccagccctttaccaatggccggatgatggcttctttttcatga

SEQ ID NO: 228701 - DNA, 192 bp, Klebsiella pneumoniae
atgagcacgatgtttgccctggttctcaccgtaagcatgctgacgggcggtaatcaggatgtcctgctcggcgtttatgacagtgagaatgactgcgaggcagctgcaaaagagcaacacgtgaaagccgaatgttacccgctgaaaggtgtactggacgagcatccggccgggttcacggtgcaaatgtag

SEQ ID NO: 228702 - DNA, 276 bp, Klebsiella pneumoniae
atgaaaaacatgattggtaccgggaatgcactggagcgactgaaaaaactcattccccatggcgttcagccaaaatttggcagcgttgatgaatggcgtgcctggcaagccgaagaaggccgtaagcgctgtgaggaactggaaaaacaaaaccagcgcgcacgtgcagagaaaatctttggacgtgcaggaattcaggatctgcaccgcggctgcacattcgctaactatcaggttgagtcggatggccagcgtcgggcgctctcgatggcgtag

SEQ ID NO: 228703 - DNA, 381 bp, Klebsiella pneumoniae
atgtcaggtgcgctcgaccgcaggctcgatgaggacgacattgcggtgttgtttggctgtagcgttcagaccgttcgagcaacgctctccctcctcgaggctactcaggccatcagggaagcggtggaggctggcacagtcaccgttacccaggcgcgtcagctggcatcgcttaaacccgaagaacagcgggagaaagtcgctgaaatcgaagcggcaactgctggcacaaccggccatgaaaaagcaatgcgtcagcgtcagatcctcggtgaggcaaagcctcgcctgaaaacccgcaaagaaatcacaaaagccttggaatctgccgagggtgagtatgcgagcgcactccgttgggtgcttggggaggccgtatga

SEQ ID NO: 228704 - DNA, 204 bp, Klebsiella pneumoniae
atgacaatcgtaaaaacccataccggcaccgtgatcaccagagacggtccgaaacggaaaaagctgcacgcaacgaaaagaatgtgggtagtcagcaaaaacgagttacaccacaaagagaccggacgccgtcattttgctgagaatacgcgccgccggctgttgttggaaacgattgaggcgataggtgattcacatgactga

SEQ ID NO: 228705 - DNA, 1002 bp, Klebsiella pneumoniae
atgagtgtaaagatagacgaagtaaatataaagaggttttttaaggataaaaatgtaaaatgggtacttggtgatgtaaatatacttgttggaaaaaatggtaagggtaaatcgatcctgctgaatataatacatcatcttttacaaggcaaagaagataaggctttattgaaatgtgaaagtgcaactataaagcttactgataacagaattttatctagaaataatagtgataaaaccagtgagatattagagggtttgacaaagtttattttgtcagagttcgctaataagaagaatatagctcgtttcataaaaaataataagggaaagacagaggagcaaatcaaagatgatcttgagagtatcatcagtgctgtgaactcaaaaggcgtagatgcaccaagcggtttttttatggaaatggggccaaataaaccagaggtgcatgagaaaattaacacttgttatatatcaaccatcaacatgaatgctaattcaaatagtgaggtaaaaaaaagctcagggggaaaaaccaccattttgactatggagaccgagtctgagatttcagatcttttggctaacgaagatgaccctatgctacaggctttaaaggttaaggataaagcgttactagaatcaattctgaatgatttatttaaagagacaaataaaaagcttgtcattgatactgattttaaaattgaagatataaactctcatgatgaatttgaaatagatgatctctcttcaggagagaaacaacttatttataccttattaaaggtggcaaattcaaaaagagaaaatcaagttatattaatggatgagccagaaatatcacttcatttgtcttggcaggaaaagctactctcatctattaaaaaaatccggccagatagtcaaattattgtagtgacgcacagcccaggaatccttatgggtggttggatgggatgctaccaagaaattgataatattttacatggtgcagagtaa

SEQ ID NO: 228706 - DNA, 981 bp, Klebsiella pneumoniae
atgagcgatcaatttactgattatctgactaatcctgattatatagtgagttatggctataatcagaaaggaatagtttacatagaaaatgagagggattatatattttgggaaagtatatttgaagaattacatcctggaaagtatgagcttaaggcaacttttagcaatgatactactcgagggaaggagatacttaaaaatatatcaaatggattgaataaatattgtcttgcagcagttgatggtgattttgattatatttgcgggagttttcgtgaaataagtaatttgctacaaaatgattatgttcttcatacgcactgttattctcgagaaagcgcgattttatcagaagacaaatttgatgaattaacatcaaaagttagattaactaaaaaatgtgtcttgccggttaaggaactacttcggaatatatctgaatcgcaatatgaaatgttggtggggtacttatatcttttagaaaaagatattgatttagtaagagaatttaatccacaccgcccccttaaggctattcagtttcggcggctaataaagaatgggtttgaaattgatgatggcgtaattaataatcttataaatgatactaatgcattaaagtcgtccatatatgagaagtttgatactgcttcgactgaattttgtgatttcattgccgcatctgaggctaaaggcctaagacctgagactgcatataggttcatatctggtcatattcttagcgataatataatattgccaatttttacccgcataaagttccttatgcagaaacaatcaattgatgaaattttagcgtcgggagttgatggtgaggcgaaaatcaatttgatttcatcagtgagaaaccattatagagataaatgccagcttaaaactattattaatggtttttcaccatgtgcaaatgatgaaatcatacttcgaataaaatcgaaggtttcaaatgtacattaa

SEQ ID NO: 228707 - DNA, 1029 bp, Klebsiella pneumoniae
atgaccattgaagacgaatccccacaggttaagggtggaaaagctcgtgcggagaaaatgacagcggatgaacgcaaagaaattgcccagcacgcagccaacaaacgctggcaaaggatcaaagcgaaccttccgacggcccagtttgaaggtgtgctaaaaattaatgacactgaactggaggtggcagtactcaacaatggaaagcgaataatttctcaatcctccgtttttaaagcgttagggagaccaagtcgaggcgtaagagctacccttgatggtgagatcatactgcctgcttttatggatgctgccaatcttgttccatatattaatcaagatcttatggaggtgatcaaacgcgagcggtttttagacaattcaggggctgaactcgagggttatgatgcatccatactcccattagtatgtgatgtttatttaaaagccagacaagatggtgcgctcaaaacaaaccagatggatacagcgcaaaaagctgaaatcttagttcgctcacttgcaaaagtcggaatcatcgccctagttgatgaagcgacaggctatcaagaaattcgccccaaggatgctttacaagcctatttagacaaaataattagtaaagaactttctgcgtgggccaaaaagttccctgacgagttttacgaaaatatttacaagctgaaaaattggccttggatgggtatgagtaaaaacaggtttagcgtagtcgcccattacactagggaccttgtttatgagcgtctcggcgactcaatccttcaagaacttgagaaaaaaacgccaaaacaattgaatggccagcggaaaaacaaaatgcatcaatggcttactgctgatgtcggcaacccaatgttatcgcaacacttacattctttaattatggttcagcgattagccatcgccaatggatatggatggaatagatttattaaaatggttgatcaggtaatgccacgcaaaggcggtacttttgagcttgaactaaacgatacgttacttgattaa

SEQ ID NO: 228708 - DNA, 927 bp, Klebsiella pneumoniae
atggcacagcagagaacgacctcttttcggactatccctttggatcttgaagtaaagcaagaggcagtaattaacggtatcgagatgggagttcttgataacggaattccttatctgacgcaaagtggacttgcaagtgtttgtggtgtacagcgtttaagaatcaaggaaattactgatgaatgggcagaatcagtagagcatggcattttccgaaaaggaagaatgacctttattggtacataccttttaaacgaaggattttctgatgaaaagctatacattcctataattaggaatggtgttgagtatcatgcatatccagatgtcgtttgcatggcgatcctcgaatactatgcttttgaagcaaaacaagccgaaagcgaaacggccattagatcttatcgtgagcttgctaaaaaaggtcttaagacctttatctatgaagcgcttaagtatcagcctgaagatccatggcggcattaccatgacagagtctcattgctcaaagataagcggtctatacctgatggttacttcattatcttcaatgaaattgcaggcatgatggtagatctcattaatgcgggccttgctataaaccaacacaccgttccagatggtagtgtaggagcttgctgggctaggcattggaaagatgcaagtctttcggaggatttcggagaaaggatcgattgtgagcattactatccagatgattttcttcaagctaggtcaaatccacaaattatcaatgcttaccctgatgcagcgttgtcggaatttcgccgctggttcaagcatcaatacctgacaaccaagtttccgccttatattcttaagaaatctaatgtcttgccgggcgggaaggaagatgcgaccagattaattgaagcgtttaagcagtcagctattgaaagcaaatga

SEQ ID NO: 228709 - DNA, 444 bp, Klebsiella pneumoniae
atgaagatttaccaggctcaaccacatgatgtggatactatccttcctctgtatctcgggtaccgtcgtttctacgaggtcgaagaaaatgcctcgcaggccagagattttattctcaagcgccttcagcttaatgagtccgtgatcttttacgccgaggttgatgggaaagcggtaggctttacgcagctctatcctttattttgctctcttgagatgaaacgtatttggttgctttatgaccttttcgttgatgagtcagctcggaagcatggtgttgcacgcaaactaatctcccgtgctgagcaactggcgaaggagagcgattcggcatttattatgcttagtaccgctacagataacatccgtgcacaggcgttgtatgagcgtaatggatttgtgcgagatactgagttcttcgtgtataacaagtttctgaaataa

SEQ ID NO: 228710 - DNA, 207 bp, Klebsiella pneumoniae
atgccgatgaaacgctcatggtttcaccatcacgaatgcacaacgcagcaggccgacgaactgatggcgaaatatcgccagcggggcgtaaaggtcgaacgaagcttaaaccctgactttatgacatggaccgtcagcgcgcagctggtggaggacaaaaatccgccgcggccagactctcgctggcgcaacaggatgtgggggtga

SEQ ID NO: 228711 - DNA, 1017 bp, Klebsiella pneumoniae
ttgaagaaagtcagcattatagatgtggcgaaactggccggcgtctccgtttcgacggtgtcgctggtattacgccagaaagggaagatctccgacgccaccatcgaaaaagtcaacgcggccatccaggaacttggctatgtacataacgtcgccgccgctaaccttcgcgccaataccaccaatttgatcggcctgatcctgcgcgacttcaacgacagtttttccattaaagtgatggcgaatatcgtccaggagctggagaagcaaggctatatggtgatcctcggccagccgcgcgacgatcatgactatctggcccgctgcctgctgtcgtttaaacagcagggcgtcgccggcgtgatatatctggatgccgataccaccagcaatgcgctgcctgcggcgttacaagcatgtcctctgccgctggtcgccgtctcgcaaacgccgctctccggccatcatgaccaggtggtccgcgataatcggcaggccgccagcatcgccgcccgctatttgattgaacgcggccatcgctacatcgcctatattggcggacaggataatgacctgattcgtcagcagcggctgcttggcttatacagtacgctggagaaaaacggcatgaccgtacgggaggaatttgctcctgcctgcagcgacaatacgcaggctgccagtatcgctacccgccagttgctggaaaaaaataatgccattaccgccctgctgtgccactcaccggatgcaatgattggctgcctcagcggcattcatcaggttggacgcacggtgggaaaagatgtctttctcactcagcaggtggcgctggtgggttttgaagacatgatgcacgttaatttgacctcgccatccttcacttatgtctcttccgccagcgaagagacaggacgtcaggtagcctcgctcattatccgcaaaatcaaagaacctgccctgccgacccagcgcattaccctttccggacagctggtggctcgagagtcagcctga

SEQ ID NO: 228712 - DNA, 1500 bp, Klebsiella pneumoniae
atgagtctgtggtcagggttcataaaatcattatcaaaactgtcgatgatcggccgcgccttgatgctgccgatttcgctcctcccggccgccggcttactgttggccttcggggataaattccatatgcccttgatgatgaacgccggcggtatcatttttgataacctgccaatgctgtttgcaattggttcagccgtggggctggcatcagaatcgggtatcgctgcgctgtcggcagccgtctccgtcttcatcactaatatcaccattagcactgtgctcggcattacgccggagatggcctctcagggcggaaaatatgccatggtcgtcggcatcccgacgctgcagatgggggtttttggcggtctcatctgcggtattctcgcggcgtggtgctataaccgcttccatgcgatgcagttgcctgagttccttggcttcttctcgggtaagcgtttcgtggcgatcgccacagcatttctctcatttatcctcggcctgctgttgccttatgtctggcaacatatccaggctggtattgactcactgtcgatggtggtaaacggcgacaaccaggctgcatcgacctttattttcggccttgttgaacgggcgctgatcccactgggactgcaccacatatggtatccctctttctggtactctttcggcgattacaccactcaggcaggccaggtgatccacggcgaccagaccatctggtttaaaatgctggaagaaggagtgaaatcttttagctccgatagctaccaaaacgctgggaagtttatgcagggggaattcccgcttatgctgttcgcgcttccagctgcctgtctggcgatgtatcacgaagcgcatactaagaataaaaaaatcgcggccggtattctcttctctgccgcgctgacctgcttcctgaccggcattaccgaacccgtagaatttacctttatcttcgtggcgccgatcctgtacgtcttcaacgccatcatggcggggctctcgtacatgacaatgtatctgctgcatgcgcatatcgctaaatccttctcggcggggctaattgactatatctccttcggtattctgccgtcgctgaacggctatcaaacccacttcctcaacgcggttatcgttggcgtgccgatggggctgatttattatttcaccttccggttcgttatccgtcgctttgatgtgaaaacaccaggccgtaccgatatcactgtcaccgccgatgataaaaccgacgcggagctggcaacggagatcgtcaatcttctcggtggttcacaaaatatcgattccgtcggggcttgtatcacccgcttgcgcctggaagtggctgagcgcgatgcggttgataaagatggcctcaacggcatcggcgcacgcggggtggtcttcgtcggcgataacggcatccagattatttttggcgccagggcgcaatttatcgcgcaaaccatgtcggggatgattggcaaataa

SEQ ID NO: 228713 - DNA, 573 bp, Klebsiella pneumoniae
atgatcgcaatgctcttttatttgctttgtggatttgcggtgatacatgtcatttatgaaagaatagttcagccatctataaggctgcactatcgtaacaggctttttgccataagagatgaagtcagaaaccagatcattgatggtctgaatgaacacgacgcaaaagttgcaaatgttgttcatcatgggctgaacaacacaatcaatcgtctgcatctacttactctcggtaacaaaatacgcgctcagaaacgctttgaagaagatgagcaaatgaggcaaagagtcgaagagaatgtgtcacttatagtcaaatgtgataacgaaattatcttaaacgcactgaataaaactgttgaaattgcggatagggttttgttattcaataatttaatgttctttatctataccttgccactagttctgcttttttggatgtctagtggtgttttaacagtttgtaaaaagttttttaaactttacaagaagcgtttagtttctaaagagtttgaaaagtcaataatttttatgaacgatagatttgtagatcgggctgtcgtctcatcttag

SEQ ID NO: 228714 - DNA, 135 bp, Klebsiella pneumoniae
atgaatattgatcctgagaattacagcaaatacaccctccgtcggttcgccgccattctggatgtgatctgctgggtgctgattgccgtagtaaccgttggtatctgcatgtttattgaatgggtgacagcatga

SEQ ID NO: 228715 - DNA, 597 bp, Klebsiella pneumoniae
atgaacaacaacggattaactctcaaccaactgtcagaacgtaatgccgcattggtcactgaggtcgagaaattacgtgccgagcgtgaccgactggctgcggagaatacctatcttctcaacggcgcagcccgtgaacttaacacttcatggatgttccacaaaacgatgctgggtgctcaggcggcgctggcttgcctttcgcttggcagggagtctgctgctcgcgactggctggaaggtactacagacgaagctggggccgagattcccgaggatattaccgttgctggcctgcaggcatggttcgacagccagatggtcagcaatgacggaaaaagcggattcctgacccgggcagaagccgaagaggctatcaagaaggcatgtccagccacctccgcttatctggccgggattaaggctgatgcgattaccgcttctttggatgcctgctctgactatcttgaaactgactgtgttatggacaggcttgatatcagctacgaagaagctgaaaaacgtacgtcaggagcgatggagtttcatgattcgatcgtcgcttttgcccagcagctgcgcgagggggccaaatga

SEQ ID NO: 228716 - DNA, 537 bp, Klebsiella pneumoniae
atgactgatatcaccgaactggcgaaagcggcagaaaaatatcgctccacccttgaggctcatcgtaacaacccgcgtgacggtgtggcactgaatgcctgggatgatgctaccagcaaatttatggagctggtcgacaatgacgagctcaatatcatttcggggttgctagaggcgctggagaaggcgaaggggatggaagcctactggaaaactcaatgccgtgggataacggaccactgcgaggagttgcaggcgcgcatcgccgagctggagtcccgcaccgtcaccgtgaagcaaggcgaggttctggttactgtggccggttttactggctgtggtaagagcgcgattgctggcgaaattgagattgccatgaaggctatcggagtgcctgtcacctgggctaatggtgattcagaaaaacggatgacgggtgctgactggcttaccgccatcgagatgtataagcccaccgtacgcattgttgaggaaaatatacctcgcgccgctggcttcaaggtggaggctgagtga

SEQ ID NO: 228717 - DNA, 3258 bp, Klebsiella pneumoniae
atgtttgctgtttttcttcctccatatccgttcagaggggtgaaagccccttatttatggctttttttaaagtatttgcattgttcaaacgaaaagatactttttattacaagtcctgattatgttgaagtaataaacgatgaaacgcaacattcccgttgggagtttgatgctgcctcgatggcatctttaggatattctcttcctgatgaacaaagccttgccagacatgaatatctgtaccttgatcatgctttgtatgaaatcatgttggctcaacatcatcatgaccccataaaatcatttaccacatttttaaccgaatctatttccgagcttgaaaatgagttattttctttacttacaaaggaaataattcaacgtgttgatgcttttgtctctatctgcaactgtccatcgcttgaaaaagtcgcaagagctttaaataaagaggttatacaccttgagatcgggccattgcgagcaccgatgtatcgcaatacagcatatctggatttcaccggcgttaatggtaataccgaggctcgggcacgctatgaatcttgccagacggaaattgatattacgtgctcaatgaatgatttgcatcgttattttcttgaagcaatctcattaccttcgtcaagtgaaaaccaagttgctgggattgtgttacaggtagaagacgattccaatatcattgcttacagccataattttacgaatatatctttaatttcttatgttcgtcaacagcatactctcgagaatatattagttcgggcgcatcccgggagtttgtttcgtttacgagatgacatatttagcattgatgcatcggcaaacagcctcgaatttattcaaaaatgtcattctatttatactattaactcaagcgttggcttagaggcgcttttatgcgagaaaaagactaatattctcggtgattgttcctatgcttttgtcgctgaggaggcctcaggtcccaacagagtaaatgccatggcattttatctgtttgcttatctggtgccctttgaacttatatttaatctggaatatttgcgattcaggttggaccatccagcagaactggatatcgtacgtaaacacctgcaattttattctaaaatgccggatgagcgtgaagaaaacagccatacgctgtcaacattaataaacgaagcgatttccaaagatatcaccatgagaaccattttagaaaactcattagccgagaataacaaacaacttgaagaattgaaaacgcaacttgctgccgaggttactgagcgcgaaaaattagctgcagcgattaccaaactccagcaaacggcagacttggcagcaaaagacagggatatattagtttccgccctggcagtcaaacaagatgaagtagatcgtatgcgcagaagtctgtcgtggaagttaaccatgccagttcgtatgtctggtaggatttcccgaggtgaatttagcactataaaagcaatgatgagggaatacacgacttccggtaataatgttttttctcgctatattttatcgggtggacttctttcaaaatcgaaatataaaacggctattcgtcttctattgtcaggaaactggtcagggatggttgatggttttaaacgtgttttaagccgagctgctatcgactcttcaccagctacgccatttgtcgatactggaacggtaagaattcttgctactcagcataccctattcgttgcacatttgattgaaaagaatctgcttgattgcggaattaagggccatgtcagtactgcttattccgttgagcaggatatggggcagatgcacattgtagtttgtccgcaaatgttcaaacaactgccccgtaactacattgctttccagatggagcagtcggtcaactcaagatggtttaccgatgagtatttttctcgtctcaataatgctgttgctatttttgattattccttgaaaaatattgaatatttactggataaaggcattccgtatcagaaattgttttatatgccgatttccagctttccagattacccagcccatttagcagataacggttatgtactggatgatcagaaaggtgatatacacgcagatgttctattctatggcgatccaaactgtgagcgccgcaaggcctatcttcaggaattgaagaagcattttaatgtcactgtcgcttcggaagttttcggtgataaactcaccagaatggttaagaatgcgaaagtcgtcgtcaacattcattactatgaaaatgcgttgcttgaaaccacacgtctatatgaaacgatttcgcttgggacgcctgtagtgagtgaaagcagttcagatattgtagagcatgaagacctacaggatgtgatcgatttttgccccatcggtgatattccggcaatggtcgagaaaattcagaatttgttatctgataaagaatattacaacgaaagaaaagaaaaaattaagcactttactaatgtagataataaaaataattattatctgcgacgttatctgctgtcgattgataaactcaatttttcacaatacaaaagtattttctcatttgagcaatttcaaactggagatgtcccacgcctttgtttatcattgtctgaaacacccgtccgccggaaagcttttttcgctagtccatcccatggattccaatttttcgaggggatccgttatcgcattggttggattggttgtggcatgagctataaatatatgctttcaggcatgctggccagtaaggcggaaatggggattatctgtgaagatgatgttattttcccggttgattatgataataaattaaataaaattattaaccatctacagagtactgaggctaaatggcatatttttgctggcataattgcacatctgcatgaggacacgaaggtactggatgttaaggtaatggatggtattgagtatatctacattgacaaaatgactagtatggttatgaatatttattctcgccgtggtatggatcttattagccagtgggatgagaaaaatattgatgccgaaaccaatactattgaccgctatgttgaatcagctcaagatctggtcgtcgtgactacattacctttccttgtaggatacgcagaagagcaacagtcaacattatggggctttgagaactctcaatatacatcgttaataaaagccagtgaaaaactgttagctgaaaaggttgcagaatttaaaaagaatcgctaa

SEQ ID NO: 228718 - DNA, 1323 bp, Klebsiella pneumoniae
atgtcctctaatgaaattgccattcaggttacaaacctgagtaaatgttatcagatatatgcgcgtccaacagatcgtctaaaacagttttttgtgccgaaacttcaacaggtggtccgcagagagcgaaactgctattttcgtgagttttgggccctcgatgacgtttccttcagtatcaaaaaaggggaaacggtaggtattattggacgaaatggtgccgggaagtcgactttgctgcagattatctgcggcacactaaccccctccgctggagatgtacgtgttaatgggcgtattgctgcattacttgaattaggtgctgggttcaacccggagtttaccggtcgtgagaacgtttatttaaatggttcggtattaggtttaaccaaagagcagattgcggctaagtttgctgaaattgaagaatttgcagatatcggccagttcattgatcaacccgtaaaaacatactctagcggtatgtatgtccgtttagcctttgccgttcaagcatgtgttgaaccggaaattttgattgttgatgaggcgttagctgttggcgatattggcttccagtataaatgctataaacggatggaagcattacgtgcgaaaggtgtaaccatcattatggtaactcattcaacaggcagcatccttgagtatgctgatcgctgcctggtgatggaacacggaaaactaatcggtgataccaatgatgttctcgctgcagttctggcctatgagaaagggatgatcctggccaacgataaaccagagcctacaaaacttgcagagaaccgctcttctgaaacttgcagtttggaagacctcaaaagcattcagttacatactgctaatgaagaaattggggaaaaacgttttggtactgcgcgtgctattattaaaaaccttaccatctacaaatcagatggtacgactttgacagagaaaccactcatcaaatcaggtgaagaagttacatttgatttcaccatattagctaccgaagagattaaggatgttgctcttggcctttccatatccaaagctcaggggggggatatttggggagatagtaatattggcgcaggttcaccaattacacttcgtccaggtagtcagcgtatcgtttataaagcaacgctgcctataaattcgggcgattacctaatacactgcggcctcgctatggttggcaacggtgctcgagaggagcttgatcaacgtcgcccgatgatgaaaataaagttttggtcggccagagagctaggcggggtcattcatgctccgttaaaaatcattacaaatggagagtaa

SEQ ID NO: 228719 - DNA, 834 bp, Klebsiella pneumoniae
atgaaaaaccctcatcaaaaactttcatcatcaccattagcagtggtgcgcagtattgccactcactggagtattattctgcagatggctaaacgtgatgttgttggaagatataaaggttctgtgatgggcctgctttggtcttttctgaaccctttgtttatgttaacagtatatacttttgtcttctccgtggtattcaaagccagatggtcaactggtggggacgaaagtaggacacagtttgctataattttatttgtcggaatgatagttcatggttttttaagtgaagtggtaaataaagcaccgttgattattttgggaaatacaaactatgtgaagaaagttatatttccattggaaacgctgcctgttatctctttatttgcggcattatttcatacttgtatcagcctttgtgtgttactgatggcgtttttcatttttaatggatatttacattggactatagtttttttacctttggtttttttccctttaattattttttgccttggcatttcgtggatcttagcatcacttggcgtattcctaagagatgtaagtcaaactacggtaatcattactacagtattaatgtttttatcaccggtattcttccctataagcgccttgcctgaaaagtatcatatctggatcatgctcaatccattaacctttattattgaacaagcccgaacggtccttatttggggtggtatgcctaattttatcggtctgtttttatattctttgggtgccttagtcgtagcctggatgggttttgccttcttccagaaaaccaggaagggatttgctgatgtcctctaa

SEQ ID NO: 228720 - DNA, 552 bp, Klebsiella pneumoniae; identical to SEQ ID NO: 205953

SEQ ID NO: 228721 - DNA, 372 bp, Klebsiella pneumoniae
atggaaatcgtccaaggtaaagacagctttaacgagatggcgaccggaattctggtgaaacttttcgcggcttaccctttccattcagaatttgactattcggactggggctggaagcccagaggagacagaactcagattgacctgttgtgctacacgctccaggcgctcaccgatatgggttatatcgaaataatctcttcaaccgatatggacagcgccgccaagttaacacctcgtggtttgaatttacttcaacagcaggcacctggtgcaggcgatgtagttattaacgttctcaaaggagcagcaggtgagacccggacagcgctcattggtgcgatcatcagttggatttttggcgggagataa

SEQ ID NO: 228722 - DNA, 411 bp, Klebsiella pneumoniae
ttgagaacagccgccatcgactttagagtcgcaactgccgaagaaatctttaacgccttagtccataacatcaccactacctctgcgctttatagcttccaaaaccgtgttggtacgaataagcgaaacaccaagaaagcccttgaaatgctccgtcagtacaaattggagcagaagcgtaacgctcgttaccgccaagcaataaaaaccattctcaagcctgtaaatccccgtatagccgcaggggaagaggtaagtgatatcttctcagatgtcatcaatgggtatatctgcctgtaccgtgatcgcgtgggaattgccctgcatgagaaacaggtattatcgcttattctcaccgaggctcgcgaagatcttaagaagcatggtgttgatcctgagaaacaccgctaa

SEQ ID NO: 228723 - DNA, 1086 bp, Klebsiella pneumoniae
atgtccgagaaagtagaaactaagaccaacttcgaccaaaccgccagcccgttaaaaggtatcaaaaacattataacacctgccggggcagtgatgcgtgtaactgataccgatctcaagtggttcaatcacttttacaccttcgaggcgcagggtaagaagtgttaccagagcattaaaacaattgctaagtcgatgggccgcgccgactcagtggcacaggagaggatcgacaaactgcaagcgctgggccttctggaagtaggtaaagagacctttaaggatgggtggcgtaatacatacacctgtacgtctattgatgtcatcgtgtcccgcatgactgacgcgccagtgacaccgcaagataagccgttgaaaaaatcacagctcaattccttgctgaagaagtctggaaaagttgattcccatgcagttaaccgtgggatcaaggcgatggcaaaaaccatcgcaaatcgtgatctctctgatgaagaagtgatgcaatttgcctttcagatcgcgactgagaaattagccgcgctcgggtggcctatcgaatcaatcattgaggagagtaatgatgaagaggacctgcaacccgctactgatggccctgagactgcctcgcctgctgctggagaaccggacggcgtacctgacaatcatagcgaccagcatgatgatgtttccgataatgatgcggtaaacggtgcggagcactctcgccaatgcgagacacctccggtgctgacggtgaatgctcccagccaggaacgacagaaccagcctcagaaggccactcttgaagaacttcaacattggcagcatggaggtgatcctaaaggatttgacgattacggcgcgaagtggggcaaaaccacacccggcgcaataatggaccttatcaacagtcatgtgaagaccatccagagcgatggatacaaaggctcaaggtctgccgctaacgataccccatctagtgcagatgcttattacaaacagcagcaggcacaaagaatagccgcagcaaaacaaggtgctaatgcacagccagcccaaacctgggatgataaccaaccggtttaa

SEQ ID NO: 228724 - DNA, 522 bp, Klebsiella pneumoniae
ttgtgtgaactcgccaacagccgccaagctgaccaagaagaacaactccccgatctaactcgacttttcaaaaatcgcgcacgagatagcgacgtaatcaaaaaatgcaaatgcctcctgatagccggaatgcctccgggcaaggtggctctggtctgtaggctcccgctggaaaaggtccaggaactgtacgataacagctacaatccccgctgccgtcgttttgcgaacagaaactcctttcaagatgcaaaactagccctaacgatgtttcatcaaggtgaatcactcgctgatatctgtgatgcgctaggaggactacatctatataccgtggtgatgtccctccggcagaatggcgttgctgaatccgctattgagcagcggttaccccctgaaggcgaccccttgctaatcgaataccaacgcgtctgcaaaagaaaggctggcagcagatataaggctatccagatcaatcccgtccaacgagtcaacgtggcgcaggcaactactgcccgatag

SEQ ID NO: 228725 - DNA, 336 bp, Klebsiella pneumoniae
atgattgtatctacagaggaacgttcattccgggatgtcgtaatttatcgtgacgacccggtattcagccacaagactaaaacctttgccacactagcggtggacacggttcctggtacgctgcttacctcaactggtgaggcatacgccagcggcagtgatctgctaatcgcgctggattcccacaaggcaggctctaatgtccctgtaattgttgtcgatcgtggctgtgttctgaaccacgccggattgattggcaccgatgctaccgccgttgcgaatgctatctcccagattgaggccgatggcaaaaatcgtgtctctatttctgaataa

SEQ ID NO: 228726 - DNA, 213 bp, Klebsiella pneumoniae; identical to SEQ ID NO: 109432

SEQ ID NO: 228727 - DNA, 321 bp, Klebsiella pneumoniae
atggccgtaccttaccatgtgaaaaattttcatatcgcggaaaccactgatcctgacaacatcaagcgcgttcacttagatgctcatttcatcaactctaacgggcaagatatttctaaggattattggcttgttaaggatgtacgtgagcctaccaatgcagggattgtcaatgttgtaagtgatggctttaattacgctattgctaataatgccaaggtcaaaatatctgtagatacagaccgaacttatctttggttttaccttccttctgccaaaggggaagacctccgtcagtttactggcggtgagaataagtaa

SEQ ID NO: 228728 - DNA, 1251 bp, Klebsiella pneumoniae
atggctcttactgatatcaaagtcagaacagttaagcctgcagacaaacctttcaaacttaccgatggtgaggggatgcacctgttggttaaccccaatggctcaaaatactggcgtcttcaatatcgttttagtggcaaacagaagatgctggcgttaggggtttatccaatggtttcattggcagaggctcgtaagaggcgcgatgccgcgaagaaactggtatctgatggtatcgatccctctcaaaagaaaaaagaggacaagattgaagaaagcggagcactaacctttgaggctgtagcaagagattggcatgcttcctgtagcaaaaaatggtctgagtcccatagtgagcgggtgcttaaaagcttagtggataatcttttctctgcgttaggtaaacgtaagatttcggaactgaagactcgggatctactcgctccaattaaggtagtagaggcgagtgggcgatatgaagtagcttcgcgtcttcaacagcgaacgaccgcaatcctgcgttttgccgtacaaaatggtctacttgattataatccagcccaagatatggctggcgcaatagctgtagctaaacgagtgcaccgcccagcgcttgatttcgaacgtcttcccgaattgcttgatcgtatcgaatgctttaaaggtcaaaagttgactaaattagcagtgaaactaacactgctggtattcatacgttcaagtgaactgcgttttgcaagatgggaagaaatcgattttaaaaatgcgctttggacgatacctgcagaacgagaacctctgaagggcgtaaagcactcacatcgtggttctaagatgcgtagccctcacctcgtgcctctaagccgtcaggcactggaagtgttaaaagatataaaacaaatcagtggggattacgagttggtcttcatcggcgatcatcagcaggataggccgatgagcgagaatactgttaataaggctcttcgctcaatgggctatgacactaaaacggaagtttgcggacacgggtttagggcgatggcctgtagtgccttgatcgaatccggcttatggtcaaaagatgctgttgagcgtcagatgagccatcaggagcgtaataacgttcgcgctgcttacatccatcttgctgagcatctcgatgagcgtaggctaatgctacagtggtgggctgattatcttgatgccaatcttaacgatatgatcaggccgtttgagtttgcccacaggtga

SEQ ID NO: 228729 - DNA, 2961 bp, Klebsiella pneumoniae
atgaaactacattttgaatctgaccttacctatcagcaaaacgccatcacatcggtctgtgatttgtttgaagggcaagagaaatgggaaagcgaaatgactgtgctggccccagctcagggtgcactctcatttgaaggcgcaacaggttcaatgcctgtaaacccacagatacccgaagatgatgttctgctgaaaaacttaaacaatgttcagttgaagaatcagcttcctccctcacctgtgctcgacagccatgattttactgtcgagatggaaacaggaacaggtaaaacgtatgtttatcttcgcaccatgcttgagttgaataaacgttatggcatgagcaaatttatcatcgtagttccttccgttgccatcaaggaaggcgtttataaaacgctacaaatcactgaagaacattttaaaagcctgtatgcgggtactccatatcaatactacctgtatgactcagcaaaacctgcggatgtgcgaaattttgctaccagctctgttatgcagatcatggtaatgacggtgggtgcgattaacaaaaaagatgttaataagctctatcagtccagtgaaaaaacaaccgttgacgaactggataagccaatcgatctgatacgtgctacacgtccaattattattgtagacgaaccgcaaagtgtggatggtggtttaaacggtgcgggtaaaaccgctcttgatgctatgcacccaatgttcaccttacgctattctgcgacacatgtgcataaacatcatatggtgtatcgcctcgatgccattgatgcctacaatcaaaaactggtcaaacaaatcgaagttgccgggcttgaagtccagaatgcaagcaatagcccctatgtaaaactggtcagtattaacagtaagaagaataatattaacgcgactgttactgttgatataacggataaaaaagggagcataaagcgtacggagattaccgtgtatgacggtatgacacttgatgacgaaacagggcgtgatatttatcagggatacaggattagcgagatccgcacgggcaaagaaggttatcttacactggaaacaccttctaatacctactatatgaaagtgggtgatgtcgtgggtgatattgacccgatgtttatccagcgtcatatgattaggcgtacaattcgtgaacatcttgataaagaacttcgcctgaattctcagcaaatcaaggttctcaccctgttcttcattgataaggttgatttctatcgccagactaatgaagaaggacttcgtgaaccgggtgaatatgcacgtatctttgaagaagaatatctaaaagcgatcaaaagccccgtatataaagatttgctcccttctcatccagaacatgctaaagacgttcatgatggttatttctccattgataaaaaaggttcatgggctgaaacaagcgaaagcaataatgcaggccgggaaaatgcagagcgtggttataatctcattatgaaaaataaagagaagcttttgagtttctcgaatccggtaagatttattttttcacactctgctttaaaagaaggctgggataaccccaatgtattccagatctgtagccttcgagagatgggaagtgaacgagaacgtcgtcaaacattaggccgtggtcttcgcctgtgcgttaaccaagaaggtgaacgtgttcgtgatgacagcattaacattctgactgtcgttgccagtgaaaactatgaagcctatgccgaacgactacagagcgaaattgagaacgaaacaggcatccgttttggtatcatcgaaaaagatgcgtttgcccatctgatcttccctgattcctcacaagctgtgggtatcgccggttcacatgagatttggtctgaactacagaccgaaggttatctggaaaaatcggggagtatcacaaaagccctgaaagaagtgttattcgaagacacttttgttgttagtgagaagtatgcctccctacaggaacaaattgaagctatcctgcgtaaatcagcagggcgactcaatataaacaatgctgatgagcgtaaaacaatcaaataccggaaagaagtcttaagcagcccggaattcgaagcgttatggcagcgcatttgtcaaaaaacgctgtaccgactggcatttgacgaagacgaattgattaaatcctgtacgaaatcactttctgaaatgcagcctttagcaaaagcaatggtcagtttcagcaaagcaacaatcaaacaaagtcaatctggacttgatgtcaaagctcagtctaatgggacaacaagcgctgttatagatgttgcagagcagccactgccagatattcttggtgttctacaggaaaaaaccggactgacaagacgcagtttaagcaccatcctgaaagagagtggaagactcgctgattttgctaaaaatccacagcagtttatcagtgaagctataggccgaatcaactactgcaaaagcctgtcaattgttgatggtattaaatattacccactaaaaggagaggtttatgcgcaaagtctctttatggataaagagctaacaggatatgcccgtaatcttttcgaaacctcatctaagtcagtttacgaatacgttcctagagattctgaagtcgaaggccgtttcgctcaggaactcgaacaacaggatgaagttaagctttatgtgaagcttcccggttggtttaaaatcccgacgccgctgggaacctacaatcctgactgggccttagttattgaagaccatggtgaagaacatatttactttgttgtagagacaaaaagtaaacacattggtcttggtaatgaagaagatgcgaaaattacttgtggtaatgctcattttatctcactcaaaaaacagatgcttaatcctgcgagatatatgctctctacaaccataaatgatgtgttaagcagtatataa

SEQ ID NO: 228730 - DNA, 435 bp, Klebsiella pneumoniae
atggcgctgaccgtggcggctgaacactatccgcgatacggatttaaaaagctttttcaggtgctgcgcaggcagggcaaaagctggaaccataagcgcgttcaccggatttactgcctgctgaaactgaattttcgccgtaagggaaaacagcgcctgccagtgcgtaatccggctccgctggcgacgccagaggcgatgaaccagagctggtccatcgattttatgcatgatgcgctggtgtgcggcagacgcttccggacctttaacgtggtggatgattttaaccgcgaagcactggcgatcgaaattaacctgaatatcccggcgcagcgagtcgtgagagtgctggacaggatcgtggcaaaccgcggatatccgctaaagatgcggatggataacggtccggaactggtctcgctgacgctggcataa

SEQ ID NO: 228731 - DNA, 666 bp, Klebsiella pneumoniae
atgtttaatattacaagaacttatccagctccggactgtatagctaggaatcgttataatgatacagaagttactgaagttctgaaaccattatttcacgcgaagtgttatttgtgtgaacgaaatgaagttcaagatgctgaagtagagcatcttatcccgcatgaaggtgatgataatttaaaatacaactgggataatttattttattcatgcagtagatgcaacggaataaaaagtaacagacataaaaatatcctaaactgctcagactcatctattgacatttttaatcagatagtttgtaagatgccatcaatgcctgatgatgacgttgttatccttccaaatataaacccaccaactttaagcattgctagcactgtaggtctattaaatgaatgttataacttgaagaatacaggtctgagaaaaataagcagagaaagtcttattgaacaaatgtttttttattattcaagatttattgaggctaggatgactctcaaagatcctagtaagggccattctagaaagagagatgcaaaggaaactcttgaagcaatgttaaaggttgaacatccattttcgattttttggcgttggcattacttgggtgatagtttcctaattgcaaattatcctgatttaagagatggtttttga

SEQ ID NO: 228732 - DNA, 1269 bp, Klebsiella pneumoniae
atgcttaataaaaacaatgcaataaaacagatacgtgtattacttcctgatacgaataaaaatatcaatataaatgtcgatggtaaaaatgtcataatcacaggtgggaatggatgtggcaaaactaggtttttaaaacttatttatgagcagatatcggctcaaatagaacagaatgaatataaaacgcatgaaaaaataaaacaggaaataacaaatagacaaagctggatgaaacatacttcacctacggataggaattatttcagctggaaacaacaaatagctgattttgaaaaacaattaataaaaatggaaaatatcaatgttgaactcgttgatctagatagatactgtatcgattttaatgagaggaaatccttactacgttattttggcgcagtcagagaaaataacatatcacattcgggaactatcgatagcttaaagacattaagggatgaggaaatttcagttagtttatcacaggatactagtaataaatttgaacgatatttagtttcgctttataactacggaagtcatttaattgctagagaaaagaataaaactaagggagataaagtagatacttggttttgtttcttacagaaacaatttcaatacctttttgaggatgattcattaaggctagattacaatgcggaggagcaatcattttatatatctcaagagaataaatctccttatagatttaatcaactttcatcgggctatcaatctattttaagcatatatgcagacttattgatgaaagttgaactcaagggaattactgctgatgagatgtctggggtagtatttattgatgaaattgatgctcatttgcatgtttcattacaacgaaaaattttctcattttttgtaaatgcctttccaaatatccagttcattgtcacaactcattccccttttgtagttcaatctgtcaataatgcaataatttatgatttaagtacaaatgaacaacttgaagatctatcaatgtattcttatgaagcaattgtaaaaggattacttggtgttgatacacaatcagaactactcaataatcaattagataaattagcattgctaataaatgaggttatcgttgatacagaagcattgcaacaggttataaacaacattcagccatacgaaagtcaattagatatgaggtctagaacatttttattaatgggtaagaatgctcttttagatgcaaaagatgcaaaagatgcaaaagatgcaactgaaggagagtga

SEQ ID NO: 228733 - DNA, 351 bp, Klebsiella pneumoniae
atgaaagagattatattgaatagttataaggaaacaaaaaacgaacttgttgctaacatcttacaaggatactgtgatgagatatatggtatttatgaaaaacatcctgaaacagcaatagatattttgaatgatggtttcctttcaggcatcacatatgacgttttgattgctcgtgagatgaagaaatactctgtcaaaaatgatgtatctgatatcaatagaagagatttaaaagccacaatcttgtattggcatcaagaacacatcattgaacttgtttcaaaaaatataaatcaggatgaaaatgaagatccgatttactggaagctaaaaatgacagttgtttga

SEQ ID NO: 228734 - DNA, 237 bp, Klebsiella pneumoniae
atgacaaataaaatatctgtagtagtaagtatgctgtgcgaaggaactcctaacgtaatgaatactattcaagaaagctttgatgtatttgttgctctaagtgggtattcagtagaagaaatgataggggataagaacttgattgatgctttaaatagacatgtcaataacgatttagttgatgagttagatttggaatatggctccgttatcatcaatatcggttatagcaactaa

SEQ ID NO: 228735 - DNA, 297 bp, Klebsiella pneumoniae
atgtttaaagagaagataggtattaataaatcaactgaactgttctatgaccttgcatgtagatcatttgccacaagctggaatatgttcatggaagttaatggcgatggggatgctaatgattatctagatgacccggattttatgagtccatttattatccatgtgattgaccacattcagaacaactttgaaatattcactgcccaagagggtaataacggtgatattaatcaggttaactttgaaatggttgctgctatgttggttagatattcagacagcttcagaaaataa

SEQ ID NO: 228736 - DNA, 315 bp, Klebsiella pneumoniae
atgaatactgaagaactaaataacattaaggactcatcaactaaagtttttactgctatggcgaagaatctttatatcacaggaatacgtatatataaagagcaggaagagtatgaggtattggaagctataatgttagatagtaatagaactgaatcatatcttttgcatgttaaagaatatctggaaaagcgctttgatgaacatatggaagaggcaggtaaaagagaaagactgatttatgttgatatggataaagttatgcatgaaatgagatatgtacatactcaagcattactttttagtatgagctaa

SEQ ID NO: 228737 - DNA, 1434 bp, Klebsiella pneumoniae
atgagcttgatatcaaacgcgaagtggaatgctttttcgcagtttttcaaaattggcattcaagttgtcaatcttatttatttagctaaaataatacctcctgcagaatatggtattatggctatggctgttgtggtcataaacttcggtattctgttgagagatcttggtacttcggctgctattattcaaaggaaggaattgaatgatggcatgattaactctatattttggctaaatgttattttgggtttggggttggcaatcgtcatttccgtatctgcgcctcttatctcttctatttaccaacaaccccaattaattaaagttttaatgctgctgagtattacattccccttatcgagtagtgccgccacccatttggctttaatggaaagagaatctaaatttaaagttatttctatgattgaagttagctcctcggtcatttccgttattgtggctgttgtcctagctaatttgggttttggagtttatagtttagtttgccaagctatagttttaaattttctttcggcaatacaattttggaaggcctctaaatggagaccttcgataaggaattttattgtttttagtgatgtaagggaaatatttggatttagtgctaatttgtcattgtttaatttgattaactatttttctagaaatgctgacagttttattattggaaaattcatgtcagctgccatactcggtagttataacttagcatataggataatgcttttccccttacaaagtatgacttttgttgcatcccgctcgctgtatccaattttaagtaaacagcaagataatagtgatgatataaaaaaaatatattatggctgtttgttttttattttgttagttacaatgcctctcatgagtggcattgcaatctatagtcatccattcgttctgctagtttttggacctcaatggcatattacagctgatgtattaaagtggcttgcaccgacagctatcatccaggctgttcttagcactaccggttctgtttttatggctaaagccagaactgatattctgatgaggctgggcgtaattgggatgttactacaagtaacctcttttataattggagttcattattcaattacgactttcgctgctttatatttgttagctaatgttttaaatttttttccggtaatgtattgtttgtttaagcttatttctggtgggtttctctcttttttttataaaatacgacccattatactttcaacttttttaatgattttatcattaaaaacgattgatgttacctttataaatacagctgaaataaatcagctttggattttaatactattgtctttatttggtgtttttgtttactttttttcaatgctcatattttcaagcgattttagaggttattttaagagaaggatttaccattag

SEQ ID NO: 228738 - DNA, 978 bp, Klebsiella pneumoniae
atgaaaaaaattattatattttttgtttctcttgtgtattcatgctttctatatgcacatgatagtgaaaagtacataggtgtttgttttcatcctgaaaaggcaggtttaacaaataatcaattgtttgaggtgatgggaaattataaattttcctcttatcgaacagattatcgttggagtaacacagagaaagctaagggggtattcaatatacctagtaagcaattagatgatttaataaatacctctagacaaaataacattaagcctctaataatcctaggatatactaattccttatatggaaatggtaagcctgttacaaaagagtatcagcttgcatttgctcgttatgttacatgggttgcaaatagatataaaggtaaaggtattatctatgaaatttataatgagtggtggcatggtgatttaaaagggtttagccatgcacaggatgctgagtcagcgaaacagtattttgagttaattaagttatctagtaatataatcaggaaggttgatagttctgctaccattatcgccggaagcatgaaccctttggattctcggcatataaattggcttttgacaatgatggaccttggcctgtcgagctacattgatggtgtttcaattcatccttattcaactaataatccgctcaaggatttttctaagatagatgaatttgaagtggagttaagaaataaaaaccaaaatcatcaaccaatagatatatatattacagagatgggctattctaattcaagtaaaggcaagttgtctattagtgaacaaaataactatgctaaagcatatatgcaattggttaaatccaaagagtacattaaaggcatttggtggtatgagctagtaaatgaagaaaaccatgataattacgagtctaattttggtcttttaaatagtgatctttctgaaaagagtataatgaaaggctttatgagtgcgcattag

SEQ ID NO: 228739 - DNA, 1011 bp, Klebsiella pneumoniae
atggctgttgaaaaaaagagaaggggcttaatttcagttcagttattaagaggtatagctgcactcttagttataacgtatcatatatcggtcaaagctgaacaaaaaggccttgcgcaagaacattatttttctatcggaagctgcggtgtagatctattcttcattatatctggttttattatgtgttatacgaccaacgtaaacactacttgcaaatcatttatcgaatcaagattgacaagagtttttccgccgtattggattcttacaactatagctctcattgtatttatcataaaaccatctttagtaaactccagtggtggaaatacaagcattctagcttcgtattttttactacccacaggtgataagtttcttgttcaaaatggttggacattgagttatgagatggtcttttactttttttatgccttatgtttatatttcgtaccaaatagaaagaatttagctacctgctttgttttattgattctttttgcaagcggttatatgtttgatagcaaagaaaatccatttctttcttttatctttaatgatttatttctcgagtttgttcttggtattctggcttttgaaattcataaaagatattcatttaactttataacttcagcttttacacttttgctgtcggttgcaatgctcgttctttttaatggagctttttctggttatcgagttatattcttcggcataccaatgtttcttttgtttatttctgtattgaatctggaaggttatttacataaacaaagtaaattatcattcttaggcgatatatcttattctttatatttggttcatccatttgttttaagccctattgctatgattttaattgttattggtgttcagagcaatattttgttttttgctattttgatgtctgtttcaatcatggcttcttatgtgttttatcagaaaatagaatatccgatcacgagaaaaataaagggattaactaagaagtatgtgatgggttga

SEQ ID NO: 228740 - DNA, 210 bp, Klebsiella pneumoniae
atgataataagtgaatatagcaataccgctgttgcacacttaacttactacaaaaaagatcctgatgtcattgcagcatcaatttcattaaatgaattaaaacatcttaacaaagaccaaaacgtgaagttgaatgagttaaaagacactcttcatacgacctatttgttgcttgatgatgacattgagaatatattcacatttaaataa

SEQ ID NO: 228741 - DNA, 867 bp, Klebsiella pneumoniae
atggtttgcattgcagaccagctattagcaccacttagtaatgggacattattaccgagagtaccgatattctgtactgctgctgttccaagaccaagatttgtacgtgctgctactgctgtagttgcaccagtaccgccatttgcgatttgtatagttgcagtattatcaaatatttgtcttatccagaatactctaggttgtgtagtacctgctgcaaatcttacgttatacattctaaatttagaattaacactagttgacggccacacttcacaagttaaaaatattccatcagttgcgactactcggatcattgtaaatgttgttaggtcatcaaaagctaattctgctggtgtattaaccattccacctgctgcaactacatatagaccacccactacaaattgttgtgttaaccaatccattgttggtaagttagttggagtaccaccaataccaattgcagttagaccaaggtttgaacgtgcagtaataacatttgataagtcaccaagattacttgcaatcttaagttgtgcatcattagttacattaccaagtccaacatcacctttagtaatggaaatattcccacttagtggtttaccattaacagttgtagtcttaggaacaaaagtactgttaccttcacccttagaatatacatcaaggttggtacgtgcacctgctgttgtagttgctccagtaccgccactatcaatactcaatggtttagataaagtaacatcaccagtaacttcaaggtttccatcaattttaccaccactaagaggtaagtactttgaatctgccattggtgcagtcataatacgagtccatgcagttgagccattctttgcatag

SEQ ID NO: 228742 - DNA, 204 bp, Klebsiella pneumoniae
atgaccaagcaagattggataatgcaacttcgccgttgtattagtattgaaacactcgagaaagtcattgataagaacaagtatgaactttctaatgatgagttagaaactttctattcagccgctgatcatcggctggctgaactcactatgggtaagttgtatgataagattcccgctagtgtatggaagtacgttaaatga

SEQ ID NO: 228743 - DNA, 264 bp, Klebsiella pneumoniae
atggtaccacttgaagcgatcagctataagttacctgttatcgctagcgatattcctgcttttcatgagattaatcaggtaagtaatttgtattttagcaatggtgatagtgactcacttgcaaagttgctcatcaatataaaaaaatatgatttcgatatgataaaaaaccaattgtatgagatggtctcgcacgattacacaaaagaagtcatgaatgagaagactcttgctttataccgggaaataacaaaaggagcataa

SEQ ID NO: 228744 - DNA, 288 bp, Klebsiella pneumoniae
atggtattgttaagaaatatatcagtacaaacactgctggtgttactggtgcagaaggtctatatatccgcccatgcgttcacgtatcagaagatgataaagttaaccaagatattaaccatttacttgaacgtgagttctataaatgggcggaagacccatatgcatttagccgtgcaggtgatatggatatcagtacttttactcgactcgcagaacgtacacgtgcaattgatggtgattgttttattcgtattcataaatctaaaaatggtctaccacaagtag

SEQ ID NO: 228745 - DNA, 312 bp, Klebsiella pneumoniae
atggcaaagcatatgcaagacaaagaaagcatggccggaatcacctggctggctctgctgatcattgctggttggggcggccttgtccgattcctgatggatgtgaagcagggcaaagcaaaatggagctggataaatgcttttgcgcagattgtggtttcggcttttaccggggtcattggtgggctcatcagcattgaaggtggcctgagtatttacatgatactggccactgccggtatcagtggtgctatgggttctgtagcgctcacgtatttctgggaacgaatcaccggagtgaaagcacaatga

SEQ ID NO: 228746 - DNA, 219 bp, Klebsiella pneumoniae
atgaattactacttaaaggtcatgaagattacgagaaacgtaaagcacaaattactgcaaagtatgcacaacaggctgttgagattcagaaccaagaaactactcaattactacaaggtatggaaaattcctttggtcagattggggatggtatggctgctgcattcggtgattcatctgctgctgtacaagctgcattcgcagtacagaaaggtgtaa

SEQ ID NO: 228747 - DNA, 258 bp, Klebsiella pneumoniae
atggacaataaaaaaagcatttctgattacaccgaatctgagtttttagcttttgtgaaaaagatatttaatccggataatacaaccgaagatgaagatgtgcaaaatgttttagagtttgaacgtatcactgaacaccctgatggttctgatgtaattttctatcctccaaagggccgagaggatagtccggaaagggttgttaaggaagtgaaagaatggcgggccaggaatggcaagcctggtttcaaagagtag

SEQ ID NO: 228748 - DNA, 1119 bp, Klebsiella pneumoniae
atgaccctgccctctctgtacatattgctgacgcttaacaacgcggagaacctgatgagtaacaacacgataaatatcgccctgattggctatggcttcgtcggtaagaccttccacgcgccgcttatccgttcggtgccgggcctgaacctggccttcgtcgcctcgcgcgatgaagagaaagtcaaacgcgacctgccggacgtcacggtgatcgcctccccggaagcggcggtccagcatccggatgtcgatctggtggtcatcgcctcccccaacgccacgcacgcgccgctggcccgcctggcgctgaacgccggcaagcatgtggtggtggacaaaccctttacccttgatatgcaggaggcccgggagctgatcgccctggcgcaggagaaacagcgcctgctctccgtcttccataaccgccgctgggacagcgactatctcgggatccgtcaggttattgagcagggcgccatcggcacggtgaaacattttgagtcccatttcgaccgtttccgcccggaagtccgcgtccgctggcgcgagcagaacgttcccggcagcggcttatggttcgatttgggcccgcacctgatcgatcaggcgctgcagctgtttggtctgccgcagtcggtacagggcaacattgccaccctgcgcgacggcgcggagatcaacgactgggcgcatgtggtgttaaactacccggcgcataaagcgatcctccactgcagcatgctggttgcggggggctcctcgcgctttaccgtgcatggcgataaaggcagcgttgtcaaagcgcgggccgaccagcaggagagccagctgctggcgggtgtggtaccggggagcgccggctggggtcaggatgatgacaagctggtgatctatgacgcctcgctgcaggcccaaactcagcctaccccgtcgggcgatcagcgccagtactatatgcagatccgcgacgcgctgaagggccagatcgccaatccggtgccgccggttgaagcgctggcggtaatggccgttctggaagcggcggtgcgttccgcgaaaagcggcgtggcgcaaaccctcgacctgaccgccgacgagcgcaacgcgctgcgctaa

SEQ ID NO: 228749 - DNA, 165 bp, Klebsiella pneumoniae
atgtggtatctgtggaccgggataactatctatggcttcttattggtgctcggtcgggttcattgcccaaccgtagttgatcacattcttgctctggtgacaatcgttctaatgtggccgcttattccagtgaaaattgcagtgtgctttctcaaaggtgactga

SEQ ID NO: 228750 - DNA, 294 bp, Klebsiella pneumoniae
atgtcatttaaattaaccaaaacgtttgacgcaaacgtagtcagcactgataccggactgagtcttggtaagcagcaagtcacggtagacttaacctgctccattgcgcttattactatcacaactgacggtacagccagggctactattacgtcatcggtaggtgacggcacgcctgtccagacagatatttttgagttcagttactcaatgtcatctggtgtcgggatgtacgagcaggcactggaacagatactggcgagtgagaagtatgccggggctgttgctaactaa

SEQ ID NO: 228751 - DNA, 897 bp, Klebsiella pneumoniae
atgcgtattgagcactgcccgttctcactggagtgcggattcatcgaacacgttcgctttattaacgggaaaattgagaccaaacgcaaaaaagatgcaacccactatgttgttaaaattaatgataacgccacgcgatatcatttcgacggcatgcagtttgttaccaccccgacaactaagacaccgtatttgtatgaccagggccaatggccagtctacaacgagtgtgattttaccgtcggcggtattatcgggaattatcctggtgttcgctggatttacagaaacccgacaagaacatcagttgcaaaattcaaggcactcactattaccggcccgatgcaggcagatggcgcagacccggcggcatatcctatgtatctggcagattatgacgaattcggagggtctatacagtgccaggatacctacacaatagatggcgtagctgtttacccgtcatatcaggggctgatatgcatggggacagggacaaagatggggtcgttgcacataaacaccaacaacataacaaaaacagcagggtctgtattttatgcaagaggcggtgattatgatatcggcaagccaacaataaccggggcaccacataacctgcttgctggcgtgaaaaatgatatcagaaaaatgataacatccagcccggatattgaaatataccgacgcgagattattttattaaatccaggtacaaccctgaactcaatgaaaggatttgagggtcaggttatcagagttatgacgtttggtaccggctgcacgataacgcattcgtcattaattaataactcgtcaggtgcgaatatatcaatgacggcaaatacagtttacacgttcatgatgctgaccgggacggtcgccaaacaaatttaa

SEQ ID NO: 228752 - DNA, 546 bp, Klebsiella pneumoniae
atgacgcgttgggtatcttgctgtccggcttcaccgttggacaaaaaagccagccagcccgttaaccgttgccacaatgccactttcgttttctcctctgtcgggaagcgtatcgcctgggtctatttcaaccacagttggccgggcgcgggaaatattaattccgaatttgcaatcctggctggcgcatattacccccggtgcttttcccctctccctcaccctctctccggagggagagagggccgcccggcaatcgttgccgcaccgctatacaccgcggggccacagggaaaggcacataccatttttaacggatatgttctgatagctatgaaatggctcctgaaacctacgggcgtgcagcgggcccgattcccgctgaaatcggcgaaccggaggtcggcagacaagggctggccgccatggacggcggccagaggcgattcgagacatgacgtcgagttgagccgaccgcaggctgatgaccgggaggtgagcgtagtgcgcagcaccgatttctctgcgggaccggggggattgtaa

SEQ ID NO: 228753 - DNA, 1125 bp, Klebsiella pneumoniae
atgacatatcaattacatgtcggacgctgtgaagaagttctcaagacgctgccggataactcagtcgatgccatcgttacagatcctccatatgggctgagcttcatgaaccataaatgggattacgacgtcccgaccgtcgaccagtggcgggaatgtctgcgcgttctcaaacctggtggacacctgctggcatttggtggatcacggacctatcaccgacttgttgttaacgctgaggatgccggcttcgaaatcagggatcaaatcctatggatttacggtagcggcttccctaagtcacataaccttgatggtgattttgatggttggggaacggcgctgaagcctgcgcatgaaccgatcgtaatggctcgaaagccattcaagcaaaccgtgtcagccaacatgaacgagcacggtaccggagcaatcaatatcgacgcctgccggataccgaccgatgaggcgcttaatggaggtgccggcggcctgctttcgcatcagcgtgacggtaccgaaccggttgccgactacgagcaggctccggaaggacgctggccagcaaacatcattcatgacggtagcgaagctgtcgtgtcggcatttccggatgcgaaaggacagcaaggggatttgaaggaaaccggacgcgcacgaccatctcagggtcgatatggagatatggcgccgccaaaggcgcatgctgccagggttgaaagtgaaaaaagcgccgcccgcttcttctactgcgccaaggtcaaaccgaaggagcgcgacgaaggcctcgagcgattcatagcgacatcagccagcgatatgaccggcggccgtaaagagggaagcgtcggcattaacgaccctcgggccggtgccgggcgtacaaatggcgctaagaacaaccaccctaccgttaagccgatcgctctgatgagctatctctgccgactaataaccccaccaggtggaaccgtgcttgatccgtggatgggaagcgggagtactggccggtctgccattgaggagggttttaacttcatcggaatcgacctgaacccggattacgtaaccattgcttccgcgcggatcgcttactccttcaaaaaatcgacggaggcagcatga

SEQ ID NO: 228754 - DNA, 603 bp, Klebsiella pneumoniae
atgaagttgacccctaaggccgtaagcaaatggtttaatggagagtcgattccaagacgcggaacgctgaaagctctggcgtctcacattggtacgtcagcgtcgtatctgctcggtgatgtcgatgaggacggaatcgatacagaggcaaccccaatcctgaaagatgtctttcgtattgacctgttggatataacggttagcgctgggcctggggttatcaatcaggagttcgtggagatcctccactcggttgagtatgcgccagcggaagcccggcacatgttcgatgggcgtaaggctgagaacatccggatcatcaacgtccggggtgacagcatgtccggcacgattgagccgggtgatctgctgttcgtcgacatcagcgttaagagcttcgacggcgacgggatatacgccttcctgtacgacgacacagcccacgtcaagcgcctgcagaagatgaaggacaagctgctggttatctcagacaacaagagctatgcagcctgggacccgattgagaaagacgagatgaatcgggttttcgtgttcggcaaggtgatcggcagcatgccgcagacgtacaggaagcacggttga

SEQ ID NO: 228755 - DNA, 303 bp, Klebsiella pneumoniae
atgaaaaagaactctggcaaacaagccgttattaacttcatcggccagcatcctggctgcagctttcaggatatccgccgcggtaccggtcttgactcttcagtggtcaattcctccctgtggcagatgcaccgtgacggtcaggtaaagcgtgaaggtgagtgcaggagctaccgctacaccctgatcgacacgacagccgtaaccgaaagcgatccgactgttcagtaccgccatcgtcatgacggcgtaaacccaatgaccaacctttttaaccagtgcctggcgggagtaagaaaatga

SEQ ID NO: 228756 - DNA, 615 bp, Klebsiella pneumoniae
atgagcgaattttcacgagaaacactactcaacattatcgagactgaccatgtgcaatgcggtgaggcttcggcattggcccgtatggcgctggccgcaatggacagcgagccggttgagatgcctctcgattacctacagggacacaaagacggtctggagtgggcctcccaactggcagaagccaatcaccctgagaccggagactggctttacgatgaccctatcgagctggcaaaagctattcgcaaaggtccagatatgccgccagtgcagccggtagcggacagcgagccggtgattgttgttggcgatgatggaggggatgcgctttcttatcgccgccttatccagtcctttgagcctggcactaagctctatcgccacgcgcagccagcgccggtagtgccgggtaaatggatttcggtaagcgaacagatgccggaagttggcgacatcgtgcttaccgcaatgggaggggtagttaacgttggcgaaacggagtgctctgctgcaaattgtcgtttcttcacgtcagttatttccggtagagagttaccggcgactcactggatgccgctgccagccgccccgcaggaggtgaaaggtgagtaa

SEQ ID NO: 228757 - DNA, 144 bp, Klebsiella pneumoniae
atgcgcaccactggaatcctaatggcggaaattacgcttcgcccatacatgaagccgctgctcatcctttcagtgcttttgcgctggggctggctcactaagaagtgtatccggattggccctgtaattggtaagcaggcgtaa

SEQ ID NO: 228758 - DNA, 633 bp, Klebsiella pneumoniae
atggcgtcgaaaaagcttacagctgatcagcagcagcttttcgatgctctgactccgctgcaaaaaaggttcgcacttgcaatcataaaagggaagaaccagacggatgcctataaggctgcgaaggggaaggctaagacgccagaagccattcgcaactcggcgagtcagatctttacaaatcttggtgtgcaagcctttctgaaatcagtacagggagagattgtcgacgaggcaatcatgacccgagaggaggcgttaaagcgcctttctaagatgggtcgaacatccatcgctgatatagccgagttcagcaacagcatcgttggcgaagatgacgatggcaatcctgttttccaggccgtgtggagcttcaaagattccgctcttcaggaccctgacgcaatgagtgcaatctctgagctcactacgggaaaggacggcatcaagctgaagatgcacgaccccaaagcggcaattaagcagcttgccgaaatgcagggttgggacgctccgaagaaaaccgagctgaccggtaaagacggcggcccactgaatcaggtgacgtacaccgctgaagactatgcgaaggcccagcagaagctggagggaaggttagaagggctggactga

SEQ ID NO: 228759 - DNA, 264 bp, Klebsiella pneumoniae
atgaagaagcacgcgcgtgaatttaattacggatatggcgtcagcaagatcgtttctgtagaactgtcctccactaacgctgcggtaggattgtccgctgatggtggtgaaacaatgctggtgtggatggatatcaagtcatttttcgacctcaagcccgcccctggaaagtggctggtagatggttacggcggtgagcgtttcgttgtcgatgatgccggactatcaaaattgggcgaagaagtgctcgatgaagagggttga

SEQ ID NO: 228760 - DNA, 756 bp, Klebsiella pneumoniae
atgtctaatatcatccctatgaattacgatgaccgttcattcccttttacggctgactgctggttcaacgccacagttgccgcaaagcatcacggcaagcttccgaaggactggctaaagactgaggcgacaaaaacttatatcgccgaactggctgaggagcttggaattgctggctccggcgtaaaagaggatttttctccccttttagtcagagtggagaaagggcgaaacggcgggacctggcttcatccggagttggcggtggaattcgcccgctggttgtcagtgaaatttgcccgcgcctgtgatcgtcatattaaaaatctgctgctgagtaaaaacttccagctcaccgaagatcagattgtcggcctgatggtgtgccagcaaccaacgtcctgggagaagcgctttaaagacccgttctatcaagcactgtcgaaaatgtccggccttccttactttggtcatgtcggcggttgcccggctctgttcgggcagatcacctctcgctgggtgtacggtgtagcacttcctgattatgtctatcaggcagccaaacaagccgccggggacagcaaggagaagattcaccaacatcttaagcctgatgcactggagaaggtcgagcagcaactgatcgccgttaccaacattgccagttgcagcattgaccagaaggacttcgaggcccgttgtatgtccgcatttcccgttaaggggcaaatgaagttgctgtatgcggcggcgtga

SEQ ID NO: 228761 - DNA, 843 bp, Klebsiella pneumoniae
atgtcgttttctctgaatgtctcgacagtgctatccgccattcagggaggaagcctgttatccgtccttaacagcgccctgtcgccaacctaccggatcacctataacaccgttgacaagtcgcttttgacggctgcagccgggcgggaggttttcgctccttccggctgggttagcgttgatcgctacggtgatgctaacgtgacgaaggggccggttgaaaatgggcagtatacttcgtacaacaaggtccggcagccatcggaattaagggtgatcctggcacttgagggatggactgcatatacaggtgcgcttccaaacctgacaaacttatctcttcttagccgaagtaatttcattcagaaactggatgagatgaaaaaaacggccagtacctacaacattgagacgccggacacggtgtattacagctacgatctgactcactttgattactttgtgggatcatatcgcgggcagacgttgttgatggcaaactgcaccttcgaagagataatggatagcggtgaagtaattatcgctaatggggtttccggtaaggctccgacagataacgacaaaacaaacaataagggcgctgcaaaaacagaggtaatcactgcttcaactaaagaagtaacgcttactgacgcaaaaaacgcatggacaagcgggaatacatcgctatcaagcgcccttgatcttaccgggagcgccatagtttcaggtgtcaactcggcggccaaatcggtatctcaagtatgggataactcatcaacagcggtcgcaaaacagatcaaaagcacggtggctgattttcttaaaaataaggtgatgtga

SEQ ID NO: 228762 - DNA, 306 bp, Klebsiella pneumoniae; identical to SEQ ID NO: 194752

SEQ ID NO: 228763 - DNA, 867 bp, Klebsiella pneumoniae
atgagttacaaggaaagagagttaacagttgagtttactctggccaatggcacctttgatggtaaaaaaggtaacacgctcatagccgaagggttcaagtgcgagctttctgtttcggcttatgggggagctaccgggacgatgatggagcttagcctgtggggcttatcccttgataacatggctaagctaaccacaaactcagagaaattctttgatgaagaacagaattcaatccgagtttacacaggtgacgtgtgtgtgtttactgggacaatagttgcatctcgaataaacttgaaccaagctcctgatgccccaattgagataacagcgtcagcaataggaaaggaaaagttaataccctgcgaaccaacctcaatagaaggtgacatattggtatccgatatgataaaggcgctagcggccaaggttggcctgaagttcgtaaatgttgacgttaaggcagtacacagcaacccttactacgagggaaatgctatagagcagatacagaaaattgctgctgatcacaatattactgcagatatagattttggcaccgtgacaatttacacgggtgataaccctatcgactcagtagtgcctttcatttctcctgagcatggattaattgggtatccaatattctataactttggtattaattttcgttgcatatactcaccagcggttcagctagctcgaaaaataaaacttgagacatctcttcctcacgcgagtggagaatgggttgttcagcatggaactactcattacctttcatgcaaagtacctggcggattatgggagacctttgttgtcgcttatccgggatttattttaggggatggggatgctaactaa

SEQ ID NO: 228764 - DNA, 588 bp, Klebsiella pneumoniae
atgctaactaatcagaagccgatggatgtgtcgtgccaggggaacgctgttctttcgcttatagccggagccataaagggctgcgtatttgccgatatcgttttagtcaaaaaagtgaatgggaagacccttaccgtatttcctctggttactggaacaaacgcttctggcggatcaattgaaaaccaggatgtttacaatgttccattcattcagtaccaggctggaaatagttcggtaaaaatgacgcccagagtaggtgatattggcctggtgattgcctgtgataaagacatcgcaaatgtgaaaaaaactaaaggcggaggccctccaccaactcagcggcgccactcatactcagatgctgtttacatcacggctatagccagtttgaacgatgaacccacggagtttgctgagtttacaggcagcggcataaacatacagagccttggagtggttaacataaacggcctgaaagtccatccgaacggacagcttgagcttgtcgacggttccatcgttgatggtcatactcatggtggagtagtatcaggaggaagccgaaccgatcccctggagccgtga

SEQ ID NO: 228765 - DNA, 654 bp, Klebsiella pneumoniae
atgactcttccagaaaacctcaaatcattaactaatattgacttgaatgatttgtctgaaaatggtcttgttctgattattccattaagcaaatcacaaaattttcctttagttgagaagctatcaagcttaatggcatctgcaaggggttcagttaatggtcgagaggttattttgtgtgtttctgatttaacatcctctcggcaatgcgatttatctatggagatcataaacattgcaagctcatggaaggggttctcagtgatagctagacgcaacgttataccaccacttagttgttatcaggttttatcctgtatgatcgaatccttccaatgcatcaacaaaaaagcacactgccaaactagagtaagcaacgcctctttccttcgcccatacgtccttcactcattaagcatggtgaacagagatggattagaagccatcctgccgtgcaaattagtcagcagtggattctacgaccctttgattgatgccagcttggccgaacagtaccaggcacacgccgtatcccaaggcatccactggtgtcctcattttgatgaatctttaattagggttatagatggcaaggtagatgctaccaaagcttatcaatgcgatactttcatcgaagaaaagaaacccacctga

SEQ ID NO: 228766 - DNA, 237 bp, Klebsiella pneumoniae
atgtcacgtgaagagccgcagataaatataagaatttccaatgagttaaaggcaaaagttaaggctagagcccaaagcaaccgtcgatcaatgaatgcggaaattattcaaataattgaagatgccgtggatggccggtcattcaatagcgctgagtttgccaagcaagaagccgatcgcttcagggatgctcttcttgagactttttcgaaaatgtataaaaaggaagaaaaatga

SEQ ID NO: 228767 - DNA, 168 bp, Klebsiella pneumoniae; identical to SEQ ID NO: 203904

SEQ ID NO: 228768 - DNA, 948 bp, Klebsiella pneumoniae
atgacaagtatagcaattcttgaagcagttaacacctcttacgtgccgttcaacgggcagcaaataatcactgctatggctgcaggcatcgcttatgtggctatgaagcctgtcgttgaaaacctcggcatgagctggtcaactcagcaaacaaaactgatgaaacaactagaaaaattcaactgtgttcatatgaacatggttgccgccgacggcaagttgcgtaagcttttgtgcctcccactgaaaaaactcaatggatggctgttcagcatcaaccctgaaaaagtgcgcgccgatatccgcgacaaactgatcaagtaccaggaggaatgctttaccgtactgcacgactactggactaaaggtgaggtaaagaacccgcgcaaaaagaccacggtcgatgaaagaacgccacttcgggatgccgttaacatgctggtaagcaaaaggcacatgatgtatccggaagcctacgcgatgattcatcagcgctttaatgtggagagtattgaggatttagaggcgactcagattcccgatgctatcgagtacgttcatcgtgttgcgctggaaggtgagtttctcggtaagcaggaagcactacccgctccgaagctggatattcactacccagcagactggtgggatcagttcccgctccttcagcgtgaaagaaaaattcagaaatccacagcggctggaggttatcagttccccgtaatgctactttatggatttgaggatgaatcaccttcggcgatcagtagcctcataagcaaactggcgatgcagggatacgacgtgagtgcggtcaagatggaatacttggctcatcgtcattacgcagagcggatgtatcagaaactatccagaattgctgaaatcagtggctcggtattaggcagtagcattaccttgaatattcagacacctatgcgctcttag

SEQ ID NO: 228769 - DNA, 192 bp, Klebsiella pneumoniae
atggacatcaaaatcacctgcccggagtgcggaagtgaacgcatcaaagctcccgccgaagtcaacacgctggacgacctcgcgggttccatctgcgccgactgtggaagagaaatcagtaaagatgatgtcgttagtcaggcgagacagttcgctatcgactcgctcagaaattccatcgggaaatcgtga

SEQ ID NO: 228770 - DNA, 1296 bp, Klebsiella pneumoniae
ttgaataattcagccataccgtcacgtttgacggttgtcttttctgtgagcggcgataaaaacacgatcccggtcaattccacctctgaaacgctggctgatggcctggcggcgatggattccggtttcccgccgctgacccgtatcgcactctctgccggcggcaaaccaccgaaggggcaggactttaacggcatttttaatgatctttacactcgcctgcaatggtcggatgccgggatgggatatccctttaacgcagatttcagaacggccatttcaggctatccgaaaggtgcggtgatcccctccagcgattactcggtgtcgtggctcaacaccatagattccaataacaccgcgccggaaaaaaccgacgccacggcatctggctggatgccttcatgggggtgcggggcggccagcatttcaatatcgacagctaacgttaatgccaccgatctgcaggctgctaacccgcggctaattctaaccggcgcactaactggtaaccgggtcctttatctccctccatgggtgaaagactggaccatcgaaaacaactgcaccggcagcgcttactacgttcagttaagcgccagggcagcgggcgcaacggttgtcagcaagccaggcacagttactcaaatccactctgatggaaccaacgtaacctccctttcgaagcctcatggaaacatcgcttacgcagtcaacgggacgtattcgttcgtcgtgcctgcgggggtgacgcgcattcgttacaccgtgacgggtgcaggtggatcaggaagcggttgtcaggcgtactcctcaagtgagtcctatagcggcggcggcggcggtgctggcggtacagctttaggctggctggatgttgttccgggaacgaccttatccgttgtcgtcggcaaaggtggcgcagcggtatcaggagccgtgtccggcaatgacggcggcgactcttctttgggtgggatcatcttcggccgcggcgggaaaaaatccaacaaggccagcatcgtgaacagcgccgggggtgatggcggtgttgcgtcaggtggcgatatcaacattcagggggggaccggtcaggacggccaggcagcgacaaacatgcttaccggttctggcggtgcttcgttctggggtggtggcggacgtagcggcgcaactggcggtgtgaaagggaaagcggcaggctctggcggtggtggtgcttacgatattgatttcagcggaatagcttacccatccggcgatggcgccgatggcattgtgcatatcgagtggtaa

SEQ ID NO: 228771 - DNA, 240 bp, Klebsiella pneumoniae; identical to SEQ ID NO: 221930

SEQ ID NO: 228772 - DNA, 930 bp, Klebsiella pneumoniae
atgcgcattgaacactgcccgttctcgctggaatgcgggtttattgaacatgtccggtttctttcagggaaaatcgaaacgcgccgcaaaaaagatgcaacccactatgtcgttaaaattaatgatactgccacgcggtacatcttcgacaatatgcaatttgttaccaccccgacgacagaaaccccgtttttgtatgaccaggggagatggccaaaatacagtaagtgcgagtttaccatcgggggcctcaccgggttttatcccggcgttcgctggatttaccgtgaacccacaaaatcatcgaatgcaatatttaaagccattacgataaccgggccaatggcggcagatggtggtgatccgaagaaatatccgatgtatctggcgagctatgatgcgtttgacggctcagtaatctgccaggatacgtactacattcctgacagcgaagggaagtatcaggaatttcatccgacaaaccagggattgtttgcccttggttatcagacaaaattcgggatactgcatctcaacaccaatgatatctctaaagtggccggtgcgatcttctatgcccgtgaaggcgagtataacctgggcgaactgtcgatatccggggcgccttataagctccttcagggcgtatcgctggggaatatcatttctcttggtgcactcgcgaagacggtaacaaccggggatgtcgcgatatacggcaaagaaaccatcatgatgacggctgcaaccacactgactgcattaactggatttaccggccagacggtccgtgtagtgagttttgtcgacggtagcgttattcagaacaacgcgcggataagcacaggaactggcgcggacgtaccaatggttaaaaacaaggtttatacactcacgatgctgtcgaataccacagccacgaaagactag

SEQ ID NO: 228773 - DNA, 291 bp, Klebsiella pneumoniae
atgacatttaaattaaccaaaacgtttgacgcaaacttaaccaccgataccggaatgagcctgggtaagcagcaggttacgttagacgtcatctgcgccattgtactgatacacatcatgcctgacggcacggccagggcaacgattacatcctcagccaatggcggtgaccctgtgcagacagatatttttgagttcagttactcaatgtcatctggtgtcgggatgtacgagcaggcactggaacagatactggcgagtgagaagtatgccggagctgttgctaactaa

SEQ ID NO: 228774 - DNA, 126 bp, Klebsiella pneumoniae
atgagccttaaattgctgagtaagggctgcctctgggaaactgagccatcaggcagcaggcagcaggtagccgatgtgataggggtagacgtgaaaaatatctacaagcacctgccagcctcctaa

SEQ ID NO: 228775 - DNA, 1536 bp, Klebsiella pneumoniae
atgaaagagataaagcgacgaaacgcatggattgccttttccctggcgctggtggtatttctggctggcgtgttcgtaataaactggcaactgtggcattccgatcaggcctcgcatgtcgccaccgcccgtcaggcggcaaagaaaatcgccgttattctggatgaggcccgcgcagcaacgatgacggcgatgaacgttagccgcggcggttgctccgtgcagggccagtttcagctcgggaccgaggccgccctgcagccgcatctgcgcacaattgtgctggtaaaacagggccaggtgtggtgctcgtcgctgccgggcaatcgggtactgatgctccatcctgagtctttacccgatgagccactgcagctgatgcccgccagaatgatggtgaataagcggccagtgctgatctatcacactcgttcggcgcaggtaagagtcattgtcagcatcagcgatatccatttgcgcgatgccttgtatagcgatgaggataacggcgggctggcgcttttggttcacaatcaaatgattgccagatatggcgatgtgaagccactcaacgctggtccgaaccatgatatttttagctcaccagactatccatttcacattgcctatcctgagtcgcctttttttagccccagccgcttatttcataatgggtccgggctgctgatttttattttctctgtttcgttgctgttttattttctgttgcgcaaatacctcaatgtctatacctcagaagaggagaggctgcgctacgccatcgctcagggcgctatcgttccctactatcaaccgctggtgaacgggaaaaccggagagatctatggcgtggaaatccttgcccgctggccaaacaccacggcgcagtggcgttcgcccgctgaatttattccgctggccgagcgtaccggcttgattatcccactcacttgtagcctgatggcgcaggtcgccgcccagatgaggccgatcttcagtaagctgccggacgggtttcatatcggcgtcaatatcagcgcatcacatatcaacgccccgtcgtttatcgatgactgcctgcactttcagcgcggctttgagggcacagcggtgaagctgatgctggagatcaccgaacaggagccgctgttgctcaacgaggcggttgtcgacaagctcaacgcattacactcccgcgggttttccatcgcgctggacgactttggcaccggctattccgggctttcctatctgcatgagctggttttcgactatatcaaaatcgatcagagttttgtcggccgggtgactgacgaggcgccgtcaagcaaactgctggactgcgtgatagagatggcgcggacgctgtcactgcgcatcattgccgagggcgtcgaaactcaggctcagcttgagtatctcaatcgccagaatattcatctactgcagggctactttttctggaagccgatgccctacgtcgcgctggtgatgcttctgctgagcaaaccaaaggcgcggattatcgaagaatga

SEQ ID NO: 228776 - DNA, 441 bp, Klebsiella pneumoniae
atgctggcttatatcacgataggtaccaatgattttcagcgctcagtagatttttatgacgctatttttaatgttcttggctactcacgtctgccggcctggacagaaagctgggcaatgtggggagataaaaataatccggataaggcgttcagcttttgtatttgccctccttttgacggacattccgcaacggcgggaaacgggacaatgtttgcattccaggctgataacgcagagattgtcagacagttccatgccgctggccttcttgcaggagggcaaaatgaaggcgcaccgggcacacgccccgcctatggccccgacttttatgtggcctacctgcgcgatcctgacgggaataagctggcatgcgtttgtcagcattattctcccgcaactgataagttcgtcaaccagaaacaggcgcttcgcatatag

SEQ ID NO: 228777 - DNA, 597 bp, Klebsiella pneumoniae
atgaataacagtcttttaccgccgggatcgtcagcactggagcgcaggctggcgcaggcatgttctggcatcagcgatctaaacgtgccgctgcgtgacctgtggaacccgtggaaatgcccggtaagtttcctgccctatctggcctgggccttttcggtggacagctgggatgaggcctggagtgaagccgaaaaacgcagcgtcatcagtgaatcgttctggcttcatcagcgtaaagggaccgtggccgccattcgacgggtgactgaaaaaatgggctactccatgtcactggaagagtggtgggagattgccgacccggcaggcacgttccggcttgaggtggacgtgaatgaggctggactgacgtcgcacatgctggatgaactggacaggctggtcaatgacgctaaacccctgagccgtcatctggcacagctgaatatttcgtccagggctgcgggcgtggttgcgaccgggagctcatttggcagcggagaaatcatcaatatctacccggaggatgtcgagccggacgacgagcatctctataacggcatgatttttcacgatggtaattttgattacaggtaa

SEQ ID NO: 228778 - DNA, 2325 bp, Klebsiella pneumoniae
atggcaaatatttttgagtcaccatcgtgggaagacgatatcagcctgattgggcgtaccgagcgcgtgtccggcggactggatggcgtggctaaccggcccattaaacagctggcgaaccgcacgcgctacctgaaggaaaagagtgaggcgattgacctcgatctttccgggaaaattgaggcagtaaaaacctttacggatggcgccacgttgctctcgccccgggaggaaatcatctggggcgcctaccggatggtctggacgggcgattttcctaaaacggttcctgccggatcgacgccgcagtcctccggcggcatcggggccgggcgctgggcttatacctccgatgcggccctgcgcgagagcctgatttttgccgatggttttcacaatatcggcaagggtaactatacctatatccgccagtatgacggggacgccacgcgcattctgtgttacggcgtggagcatctgtttgacggcggagacggtgagtttgagcgcaatgaccgggatgtgacgtcaccggacaataactgcaccatcattgtcgatgcgctgggtcgtcgctggtaccgccattttaagggcaatatccggatgcgctgggcgggtgtgaaaaccacggatgaaacggatgcgccgcaggacactgcttttaaaaactgtttgctggcagccgctgcccattcgcgaactggctggccgcagatggtgattgaagcgccgcctaatgcccgcgtttatctggcggaaatgcactatatccgctgcggtgagttctcggaaagtgacgtctggcgcagtaaggggtacaagggcacccgctttgggatcatcgggacgtttgcacttgcgccgggggcggggtttaccattgtgcaggccagaaagccgctgctcctgctggatattgataactcagagatgaccttctcccgggattttacgcgggaggattatgctctgcggctggaggcgatagtgttccgccctgagctggatgtggacggtacgaattacggcggtacgctgctgtactccaccggcaaatccgatatgagcatggtgcgcgcccactggccggatatcacccagaccctgccctcaatgcagaacctcggaaaagccaagctggcggcgaatgcctgtggccggactttctgcctcagcaataccggtgccggcttcggtcatatcctgtctgtctggtcgcaggataaccggtggcgtaacgtgttcagcaatatgtatgacgtgtcggtcctcgcctatgaggattatgtcccgcacacggaagataccggcggcctgctgattgacagctgcggcaccatgaatttcccggagctgctgaccggggccggtggccgggggcgcatctgcattcacgactccccgagcgtccatatcggctcggtcaatgccatctgtggcgcaccgacatattccgccgatacgccggacctgttctcgtttgagatttgcaactcccgcgtgctggttggcactgtccacacgcagaaccccggcgcgtttgcccgctttggcttcaacgcgttcctcagtattcagagcatggaatgctgggataccagcgagctgtttacggcaacaaacgacctgtcgaagctcaactatcgcgggcagcgcgcggggaatgcggtggacggagcttatctcgtcgtggggtatttgtgggcgcagtcgctgaacaacgccacccagggcgcaccgtgcagaccgcccatccgggttgagaagtcggttaaccgcggggagctgacaattaacggcggctggctgaataacattcatgccgggtacggcaatgaagcggagtcaaaactgtatatcgctgaggtactgaccgacagcgaccagttcaagctcaatgtgtcggggattaagctgcgcgacaacatttccaactacgtgttttatgtggagaaacaatacaccgtcggggccatgcgggataacgattttaactttaaccgcattcgcttcggggatggtacgcagtcctccacggacatgcgggattcgacccacccggagctgggcagtacggctctgccgctgaacggcaccgactggagctacaactacagccgcgcggggcgctatcacggcgatctcgttgtggcggcaaactcgaaagtgaccgtgaaatttaatgaccaggtgctgtacagctacagcacgccgggcacttatccgctgaatctggtcctgccgaggcagtcgcgcgtcaatatcgcgacggaagggacggtgacgttaatcaattcatcgtggcgctacaccacgctgtaa

SEQ ID NO: 228779 - DNA, 297 bp, Klebsiella pneumoniae
atgacgagagcactgaaaggccgttttctggtggaggtctccggcgtcagccagatattcacctttgcgaccattgacggtatccggggcaatgaaaacctgctgtatctggatgttctgctgaaaaatgacgatgacgcactgtcaccgggaacctacatcacccggagttttacgccggacctgtcctcagcggacaattttttccagcagggttatgccagcctgaaaacgcatgacgagtttaacggggctgaagaggtcggcacccctgaaagcgagcctgaaagagaatga

SEQ ID NO: 228780 - DNA, 516 bp, Klebsiella pneumoniae
atggccttaccacgcaagttaaaacacctgaatatttttaacgccggtaacaactggatgggcattgctgaatccgtcaccctgccgaaattcacccgcaagctggaaaactaccgcggcggcggtatgcccggttcagtcggtattgatctggggctggatgatggcgcgctggatacggaaatgaccatcggcggtactgaggcgcttttgtttaaacagatgggcaaagccacggtggacggcgtgcagctgcgctttaccgggtctattcagcgcgacgacaccggcgaagtgcaggccgttgagctggtcgtccgtgggcgccacaaagaggtggattccggcgagtggaaaaccggcgagagcaattccaccaaagtcagcagcgttaactgttacgcgaagctgaccattaacggtgaagtgctctatgaggtcgatgcgatcaacatgattgaagttgttgatggtgttgacctgatggaagaacaccgtaacgccatcggtctgtaa

SEQ ID NO: 228781 - DNA, 486 bp, Klebsiella pneumoniae
atgatgatggtcctgggcttgtttgtgtttcagctgcgcacggttccctatcagcaactgcagtatcagcggaactggcgccatgtgaccaacaaccgcgttaatcgccgtccgacaacgcaatttttggggccagataacgatcagctgacgctctccggcgtcctcatgccggaagtgaccggcggccggttgtcgttgctggcgctggagctgatggcagagcaggggaaggcgtggccgctgatcgagggtggtgggaccatctacggcatgtatgtaattgagagccttaaccagacgaaaacggaatttttcgccagtggagaagccaggaaaatagagttttcgctggggcttaaacgggtggatgagtccctgtctgaaatgttcggcagtctgagtgatcagcttagcagcctgcaggattctgccgccgccgcagtagggaacatcagatccacggtaggagggttgctgcagtga

SEQ ID NO: 228782 - DNA, 1098 bp, Klebsiella pneumoniae
gtgagcgagatggctgatttactcaacctcgtaagcaagaccccggcctttcggatcgtgattgaaggcaaagatgccacgcagacgctggataaacgtctgctgggtatgacactgaccgacaaccgcggatttgaagctgaccagcttgatctggagctggacgacgccgacggcctggtaattatgccacgacgtggcgcagtgatttctctggcgctgggatggaaaggcgagccgctgtactcaaaaggtaagtttaccgttgacgaaatagagcatagcggcagcccggacaggctgacaatccgtgcccgtagtgctgatttcagggaaacgctgaatgtccggcgtgagaagtcctggcacaaaacgacggtgggcgatgtggtgaaagacattgccgcgcggcacagccttaaagtcgctataggaaatgatgttgctgcgatggctctggatcacctggaccagaccaacgaaagcgacgccagctttttaatgaagctggcgcggcagtatggcgcgattgcctcagtcaaggacggtaatctgctgtttatccggcaggggcaggggaaaacagcaagtggtaaaccgttgccggtcatcactattacccgccgggacggtgacagtcatcgattcagcctggcggacaggggagcgtacaccggggtgattgctcactggttgcatacgcgcgaaccggagaaaaaagaaaccaccaaagtgaagcgccgccggaagacgacaaagccaaaagagccagaagcaaagcagggggattacctgatcgggacggatgagaacgtgctggtactgaacaggacctatgcgaaccgcagtaatgcggaacgcgcagcaaaaatgaactgggagcggctgcagcgtggcgtggcgtcattttccctgcagctggcagagggccgcgcggatctctatacggaaatgcccgtgaaggtcatcggctttaaacaacccattgatgatgcggaatggaccatcacgacgttaacgcacacggtaaacccggatagtggatttacgaccagcatcgagctggaagtgaaaattgatgatttagtaatggactga

SEQ ID NO: 228783 - DNA, 252 bp, Klebsiella pneumoniae
atggatattaaaaaattgctggaaaaaattcgcgaaattacagactgcttagatcgcgcaaacagaattatcaatatttgcagtaacagtaatgaattccattcatccggaattttagcggagggaagaaacagagagtgctatctcaaggttgatccatcagaaattaaggaactggcagaaagccaaaaggttcatcttgaaagcgaactagaacgtctggaagaagctaaaaaactgcagaacgcgtga

SEQ ID NO: 228784 - DNA, 324 bp, Klebsiella pneumoniae
atggaagcgcttaccatcccagtaacaatctacgttctggcaacaactaatccttttttaccaacctcttaccatgcatcgacttgtgacatgtcacagaagtttcccggtatatacgttctcgtttcgaccaaaacgctggaactccccattcaaccgttagaaccgatcgacatcatcgggatgcaggttaatgccctgcgcgcaaggaaagaacaaatctcagttgaagccgatatacagctaaatgttattgaagatcagatccagcaactgctgtgcatcgaccactctccgattgaagaaagcgacgtaccgttttaa

SEQ ID NO: 228785 - DNA, 171 bp, Klebsiella pneumoniae
atgaattctctgtacgccacatataacaccctgctgtttatagccggaatcatcttttttggtggggcagcctatagcctgtggattgctcgccgtaaaaaaatgagtctgctgtattgttccgttatccctatttttattgttgatatttatctggcttgggctcactga

SEQ ID NO: 228786 - DNA, 1395 bp, Klebsiella pneumoniae
atggcagaaattattctcccggcgaacaactggactccacgcccacatcagcgaagggcatgggctgaaattcagggtggaaaaaaaagagcggcgctttgctggcctcgccgttacgggaaagacgatttcagcctgcacatgacagcatgtaaggcattcgagcgtgtcgggaactatgcccactgcctgccgcaggcgaaccaggtaagaaaggctatctggaaggcggttaacccgagaactgggcgtctgcgtatcgatgaggcttttcctcatgaactgagaagaaaaacgctcgataacgagatgatgatcgaattcatcaacggttccacctggcaggcagtcggcagcgacaactatggcgcgctaattggttccggtcatgtcgggattgtgttctcagaatgggcgctaagtaacccctctgcgtgggcatttttgcgaccgatactggctgataacggcggctgggctttttttgtctccacgccacgcgggaaaaaccacttctacaaaatgttccagggtgggttaaaggatcctgacaactggttttgtgatcatttaagcgccgatattacgctgcacatcccaccggaaacactcgctcaggagttgcgcgagatgcaggcagagcgcggggaggaagaggggcaagctctgttcaatcaggaatacatgtgtgactggaacgctgcaatacccggcgcttattactcatcgattttggttggtctggagaaggccgggcaaatagggaatgtgccgtgggatccccagtatgaggtttacacgtcatgggacctgggcattggcgacgcaacggctatctggttttatcagtttatcggcaaagaggtacgcgtcattgattattacgaatcgtccggcgttggcctggagcactacgtaaaaatattgcgcgagaaaccgtatacctatgctgagcgtcatttcttcccgcacgatgtacgcgcccgagaactgagcaccggagcatcacgcgaagagacgctgggcaagctggggatacgctgcaaggtactgccggccacatcggttgatgatggtatcagcgaggtgcggatgatgctgcgatcctgttggttcgacaaagccaaatgcgaaaaaggcctggaggctctgggacagtatcaaaaagagtgggacgacactcgaaaaatgtataagccaacccctctgcataactggacgtctcacggcgcagactcattccgttatggtgcagtaggcagtaagtctttgcgtagcggcaaccgccacacaacccagcaatttgcccagtccaattacgatccttataaccctcctggacatagccagcagttttacgctgattccgactgggatctgtatggggacaactga

SEQ ID NO: 228787 - DNA, 390 bp, Klebsiella pneumoniae
atggaggataaacagcgctaccaggacggaatggcggtgcggcgcaaagtgttgggcgacgcccacgtcgaccgtaccctgcagcatctgacgccgttgaatgacgagtttcaggactttatcacccgctacgcctggggtgagacgtggacgcgtccggggctcgaccaccacacccgcagcatgatcaccattgccatgctgatcgctctcaatcgcgaggcggagctgaagatgcatctacgcgcgtcgtttaacaacggggtgacccgcgatgagctgaaagagctgatcatgcactctgcgctgtattgcgggctgccggcggccaatgccacgatgcatctggcgcagcaggtgtttgacgacatcgacgccgggcggggttaa

SEQ ID NO: 228788 - DNA, 657 bp, Klebsiella pneumoniae
atgcaaaaactgacccgtgacgaaatggcccagcgcgtggcccgcgatatccccgaaggcgcttacgttaacctcggtattggcctgccgacccggattgccaattacctgcccgccgacaaagaggtgttcctgcatagcgagaacggcctgctgggcatggggccgaaaccgctgcctggcgaagaagatccggagctgatcaatgccggaaaagagtacgtcaccctcctgcagggcggctgctatttccaccatggcgactcctttgccatgatgcgcggcggccatctcgatatctgcgtgttgggggcctatcaggtctctgccagcggcgatctcgccaactggagcaccggcgcgccggacgccatcccggcggtcggcggggcgatggatctggccatcggcgctcgccaggtgtttgtgatgatggaccatctcacccgcgacggcgagtgcaagctggtggaacagtgcagctatccgctgaccggggtcggctgcgttagccggatctataccgacctggcggtgatcgacattaccgaccgcggcccggtggtgcgggaaatctttaacggtctctcttttgaagagctgcagcgcatcactccggtgacgctgatctttgaacaactggcggaaagcgcgtaa

SEQ ID NO: 228789 - DNA, 687 bp, Klebsiella pneumoniae
atgattgataaaagcgtatcgacgctgagcgaggccatcgccgggatccacgacggggcgactattatgatcggcggctttggtcctgccggccagccgacctttctgattgacgccctgatagaccagggcgcccgcgacctgaccatcattaacaacaacgccggtaacggagaagtggggctcgcggcgctgctgaaggctggccgggtgcgcaaaatgatctgctccttcccgcgccaggtcgattcacagatttttgatgacctctatcgccgcggcaaagtggagctggagctggtgccgcagggcaacctcgcggcgcggatccaggccgccggcgccgggctgggcgcggtctttacccccaccggctacggcacgccgctggcggaagggaaggagacacgggaaatcgacggccgccactatgtgctggagtatccgatcaaagccgatttcgcgctgattaaagctcaccagggcgaccgctggggcaacctggtgtatcgcaaggcggcacgcaactttggcccgattatggcgacggcggcgaaaaccaccatcgttgaagtctcgcagctggtgtcgctgggcgacctcgaccctgaacacattatcacccccggcattttcgtccagcgcctcttctcgctggaaaacctgactgccgcacaacgcgcctga

SEQ ID NO: 228790 - DNA, 807 bp, Klebsiella pneumoniae
atggataagcatccagacgatttactgaccggcgacggcgatccgtttaagggcgatcctaactttatggcctcgctggcgcgcggcctggaggtcattcaggcattcacgccgcagcggcccctgctgtctatctcacagatcagtcagaagaccggtattccgcgcgccgcggtgcgccgctgcctgtataccctgagcaagctggggttcgtctatgccgaagacggtaaaaactttcagctacggccgcggatcctggccctcggtcacgcctggctggcctcgacgccgctggcgcgttcggcgcagccggtgctgcggcatctgagcgaaatgctcaacgagtcctgctccatcgccaccctcgatggcgacgatattctgtatatcgcccgcgcctccagctcgcggatcatgaccatcgacctcgatatcggcagccgccttccggcgtgggcgacctcgatgggccgggtgctgctcagccatcagccagaggagaagctcaacgatatgctggcgagggtaaccatgatccgctataccccgcagacggtggactcggtggcgaagctgcgcgccgagctgaaacgggtgcatcaacaggggtatgccctcaacgatcaggagctggagatgggcctgcgctccctcgcggtaccgctgtttaacgcccagggtcaggtgcaggcggcgctcaacgtcggggtgcatgcgggccagatgtcgtcccgcgaaatgatcgaccgcgtgctgccggagctgcaaaaagccgcccgcgagctgacgctgctgatgcgctaa

SEQ ID NO: 228791 - DNA, 564 bp, Klebsiella pneumoniae
atgaaccttgatgacaaatccctgtttcttgacgccatggaagatgtccagcccctgaaacgtaacaatgacgtgcactggcatcccgggcgcaacagtcgcgccccgcagcgcgtcgacaccctgcaactggataattttctcactaccggctatctcgatatcgtaccgctcgccacgccgctggagtttaagcgcgaagggctgcagagcggcgtgctggataagctgcggcgggggaaatacggccagcaggcgagcctctccctgctgcgccagccggtggagcagtgccggcagatgctcttcgcctttatggtgcaggcgcagaaagaggggttacgcaatgtgctgatcgttcacggcaaaggccgcgacgatcagtcccacgccaatatcatccgcagctatctggcgcgctggctggaagagttgccggaggtgcaggccttctgcgccgcgcttccgcaccacggcggcagcggcgcctgctatgtcgcgctgcgtaaatcggccgaagcgaagcaggagacctgggagcagcacgccaagcgcagccgttag

SEQ ID NO: 228792 - DNA, 909 bp, Klebsiella pneumoniae
atggcctttcagatcaaatttcatcaaattcgcgccttcgtcgaggtggcccgggaagggagtattcgcggcgccagccgctcgctggcgatctcgcagccggccttgaccaaagcgattaaagagctcgaggaggggctttccgctcagttgttcgtccgccgccgccagggggtggcgctgactgacaatggcgaaagtttttatcaacatgcgagcctgatccttgaggagctgcgggcggcgcaggatgaactgctgcagcgtcagggagagcaggccgggcagatcaatattggccttggcgccagcgtcgcccggacgctgatgccgtcggtgatctgccgttttcatcagcagcatcctcaggtgaaggtgcggatcatggagggccagctgctggcgatgatcaatgagctgcgccagggagagctggatttcaccatcaatacctactatcccgggccatatgatcatgagttcagctttgaaaaactgtttgagaaaccgttcgcagtgttcgctcgcgcggggcatccggcggcgcaggccacctcgctggtggagctgatggatcaccactggaccatgccgacgccgcgcggcagctactttaaacagctgcaggacaggtttaatcaggccgggctggcgccaaaggtgaatattgtgtgcgagaccttctcgtcgtgcatcagcctggtggtgaaaagcgattttctcagtatcctgccggtggagctcggcaacgatccgctgatggcggacaagctgatgatgatccccgtccgcgaagcattgccgacggcggcctattttctgatccagcggcgcgacacccgacagacgccgctaacggcgtcattgatcaccctgtttcgccgccagagtcgacaatggtttccttaa

SEQ ID NO: 228793 - DNA, 1311 bp, Klebsiella pneumoniae
atgccgcaacttgatgaatacctgcgccagctggcgccagccatgacccaatggcgccgcgattttcacctgcacgctgaatccggctggctggagtttcgcaccgccagtaaggtggcggagatcctcgacgggctcggctaccagctggcgctggggcgcgacgtcatcgatgccgacagccggatggggctgccggatgaggagaccctggcccaggctttcgagcgcgcccgcgagcaaggggcgccggaacgctggttgccggcgtttgaaggcgggttcgccggcgtggtggcgacgctcgacaccggacgtcccggcccaaccctggcctttcgcgtcgacatggacgccctcgacctcaatgagcagcacgatgacagccatcgcccccatcgcgaccatttcgcctcctgcaacgccggcatgatgcacgcctgcggccacgatgggcataccgccatcgggctggggctggcgcatgtgctcaagcagtatgtcgcccagctcaatggcgtcattaaactgattttccagcctgctgaagagggtacccgcggcgcccgcgcgatggtggccgccggcgtggtggacgaggtggactattttaccgccatccatatcggcaccggcgtcccggtcggcaccgtggtgtgcggtggcgacaactttatggccaccaccaaattcgatgtgcagttcagcggcgtggccgctcatgccggcggcaagcctgaagatgggcgcaacgcgctgctcgccgccgcccaggccgcccttgccctgcacgccatcccaccgcacagcgccggcgcttcgcgggtcaacgtcggggtgatgcaggccggcaccggacgcaacgtggtgccctcctcggctctgttaaaagtggaaacccgcggcgaaagcgaagccatcaaccagtatgtttttgaccgggcgcagcacgtcatcgccggggccgcggcgatgtatcaagccgggtacgagttacgcatgatgggggccgccaccgccagcgccccgtcgccggcgtgggtggcgtacctgcgcgaacaggccgcgcgggtgcccggcgtgcagcaggcggtggatcgcatcgccgccccggcgggatcggaagacgccaccctgatgatggcccgggtccaggcgcgcggcggccttgcgtcatacatgatattcggcaccgaactgagtgccggtcatcacaacgagaagtttgacttcgacgagagcgtaatgacggtcgcggtcgacaccctggcgcgcgtcgcgcttaactttccctggcagcggggggtgtga

SEQ ID NO: 228794 - DNA, 1446 bp, Klebsiella pneumoniae
atggacccgatttttcagtttgttgaagaggtaattgaggcaagccgcgagacctattgcgccatcgccgatgatatctgggaccacccggagacgcgctttgaggagttctggtccgcccggcggctggcggacgccctggaagcggaaggtttccagctcacccgtgatgctggcgggatccccaatgcttttatcgccagcgtcggcgagggccaaccggttattgccctgctgggcgagtttgacgccctggcgggtctcagccaacaggcccattgcgcgcagccgacatcgtcaacgccggggggcaacggtcacggctgcgggcacaatctgctcgggacagcggctttcgccgcggcggttgccgccaaaaaatggctgcagcagcacggcggcgcgggtaccctgcgcttctacggttgcccgggggaagaaggcggctcgggcaaaacgttcatggtgcgcgaagggctgtttgatgacgtcgatgcggccctcacctggcatccggaggcctgggccgggatgttcagcacccgcactctcgccaacattcaggcggcgtggcgctttaccggcaccgccgcccacgccgccaattcgccgcacctggggcgaagcgccctggacgcagtcaccctgatgaccaccggcagcaacttcctgaatgaacatattatcgagaaggcgcgggttcattacgccattaccgataccggcggcgtctcgcccaacgtcgtccaggcccaggcggaagtgctgtatctgatccgcgccccggagatggcagatgtagagcagatcttcgcccgcattgagaagattgcccagggggccgcgctgatgaccgagacccacgtcagctgccgctttgaaaaagcctgttccagctatctgcccaaccgcacgctcgaagcggcgatgtatcaggcggtagcgcattacggcacgccggcatggagcgacgacgatcgcgcctttgccgcggcgatccgcgccacgctcagcgccaacgatatcaacaacagcctgaacaatatcgccggcaccggcggcgaggcggggaaaaccttcgctcgtcgccaccgcgatacgctgctgattgatgaggtggcgccgtgggcggccacggatacgattctcgccggctccaccgacgtcggcgacgtcagctggaaagcgccggtggcccaatgcttcagcccctgcttcgcggtgggtaccccgctgcacagctggcagctggtgagccagggacgcaccgccatcgcccataaagggatgctgctggcggggaaagtcctcgcggcgacggcgatccgtttattcagcgaccgcgcgctgctggaggccagccagcgagagctcaggcaggcgctggccgaacatccttaccgctgcccgattccggcggaggtgagaccgtcggttttacgataa

SEQ ID NO: 228795 - DNA, 1527 bp, Klebsiella pneumoniae
atgagtatgtcatccataccgtcgccttctcccgccggaaagcgctatggctgggtagagaagattggtaataaggtcccgcacccgtttttgctgtttatctatcttatcgtggcgctgatcgccgccacggcgatactctccgccttcaacgtcggggtgcaaaaccctgcggacgggtcgcgggtggtggtcaaaaacctgctcagcgtggaagggctgcactggtttttaccgaacgtgattaaaaacttcagcggtttcgcgccgctgggggcgatcctcgccctggtgttgggcgccggctttgccgagcgggtgggcctgttgcccgcgctgatggtcaagatggcctcccacgttagcgcccgttatgccagctatatggtgctattcatcgcctttttcagccatatctcttccgacgccgcgctggtgatcatgccgccgctgggggcgctgatgtttctcgctgtcggtcggcatccggtcgccggcctgctggcggcgatagccggcgtgggctgcggctttaccgccaatttactgatcgtcaccaccgacgtgctgctctccgggatcagcaccgaggcggccaaatccatcgatgcctctctgcacgtcagcgtgatcgacaattggtactttatggcgacctcggtgatcctcctgaccctcgtcggcggtttaatcactgacaagctggtggagccgaggctgggagagtggcaaggcagccgcgacgaaaagctgcaaaccctgaccactgtggagcgtttcggcctgcgcatcgccggggtagcaacgctggcgttcgtggcggtcatcgctctgatggtggttcctgaaaacggcattcttcgcgatccggttcagcacacggtgatgccctcgccgtttatcaaaggcatcgtgccgctgatcatctttttcttctttgtcgtgtcgctggcttacggcatcgccactggcaaaattcgccgtcaggccgatctgccgcagttgatgattgagccgatgaaagagatggccggatttatcgtgatggtcttcccgctggcgcagttcgtggcgatgttcaactggagcaatatgggcaagtttatggctgttggcctgacggacctgctggagagcgccggcatgaacggcgtcccggcgtttgtcggtctggcgctgctgtcggcttttctgtgcatgtttatcgccagcggctcggccatctggtcgattctggcgccgatcttcgtgccgatgtttatgctgctgggcttccacccggcgtttgcgcagatcctgtttcgcatcgccgattcatcggtgctgccgctggcgccggtttcaccgtttgtaccgctgtttctcggttttttacagcgctaccgacccgacgcccgcctcgggacttactactcgctggtgctcccttacccgctgatttttctcgccgtctggctgctgttgctggtgggctggtatttggcaggactgcccatcggccctggcatttatccgcggctcccttaa

SEQ ID NO: 228796 - DNA, 159 bp, Klebsiella pneumoniae
atgcaatatatactgactggcgtaatcgtattgatcttcagcggcctggttatccacggcctcacgctgttgctcgaacgcgggtatcgcgcgcttttcggcttcttcgccggagccgcagatgtcccccgtaaggtcaaaatgaaggtgccgcgttaa

SEQ ID NO: 228797 - DNA, 516 bp, Klebsiella pneumoniae
atgttgaccttgctgcaggataaaatggataccccgctgggggcgctgtgggtactctgcgacgaacagtttaatttacgcgccgtcgagtgggacgagcaccgcgatcggatggaaaccctgctcgacgtacactatcgccgggaaggctatcagcgcgttgactgccgcaatccgggcggtctcagcagtaagctgaacgactattttgccggcgacctggccgttatcgagaccctgcctaccgccaccgccggcacccctttccagcgccaggtctggcaggcgttgcgcgatatcccctgcggccaggtgatgcactacggtcagctggccgaagcgctcggtcgtcccggcgcggcacgcgcggtgggggccgccaatggcgccaacccggtgagtattgtggtgccttgccatcgggtcatcggacgtaacggtacgatgaccggctatgccggcggcgtgcagcgtaaagagtggcttctgcgccacgagggctatctgttgctttga

SEQ ID NO: 228798 - DNA, 753 bp, Klebsiella pneumoniae
atgatccctgagaagcgaattattcgacgcattcagtctggcggttgtgctatccattgtcaggattgcagtatcagccagctctgcatcccctttactctgaacgagcacgagcttgatcagctggataatattatcgagcggaaaaagcccatccagaaaggtcaaaccttgttcaaagccggtgatgagctgaaatcgttgtatgccattcgctccgggaccatcaaaagctacaccatcaccgagcaaggcgatgagcagattaccggcttccacctggcgggcgatctggtgggctttgacgccatcggcaccggcctgcacccgagcttcgcccaggcgctggaaacgtcgatggtatgcgagatcccctttgaaaccctcgacgatctttccggaaaaatgccgaatctgcgtcagcagatgatgcgcctgatgagcggtgagatcaaaggcgaccaggatatgatcctgctgctttccaaaaagaacgccgaagagcgcctggccgcgtttatctataacctgtcccgccgtttcgcgcagcgcggtttctctccccgtgagttccgtctgaccatgacccgcggcgacattggcaactatctcggcctcaccgtcgaaaccatcagccgtctgctggggcgtttccagaagagcggcatgctggcggtgaaaggcaaatacatcaccattgaaaacggcgacctgctggcccagctggccggtcaggcgcgtaacgtcgcttaa

SEQ ID NO: 228799 - DNA, 951 bp, Klebsiella pneumoniae
atggcgaagtatcagagcatgctggtagtaatcgatcctaaccaggacgaccagccggcactaaggcgagcggtgtacctgcaccaacggattggtggacgcatcaaagcctttttgccgatctatgatttttcttatgaaatgaccaccctgttgtcgccggatgaacggacggcgatgcgtcagggcgtcattgcccaacgaacggcctggatccgcgagcaggcgaaattctatcttgaatccggtgtgccgattgacgtgaaggtggtgtggcacaaccgccccttcgaagccattattcaggaagtgatcagtgagaaacacgacctgctgctgaagatggcccaccaacacgacaagctggaagcggtgatcttcaccccgaccgactggcatctgctgcgtaagtgcccttgcccggtctggatggtgaaagaccagccatggccagaaggcggtaaagcgctggtcgccgtcaatctggccagtgaagaaaattatcacaacaccctcaacgagaagctggtgcgcgagaccctgtcgctggcggaagaagtcaaccacactgaagtgcaccttatcggcgcctatccggtcaccccgatcaatatcgcgattgagctgccggatttcgatcccagcgtctacaacgacgccatccgcggccagcatctgctggcgatgaaagccctgcggcagaagtttggcattgacgagaaattcacccacgtggaaaaagggttgcctgaggaggtgatcccggatctcgccgagcatctgcaggcggggatcgtggtgctgggtacggtcggacgaaccggcctctccgcggcgttccttggcaataccgcggagcaggttgtcgaccacctgcgctgcgatctgctggtgcttaaaccagaggcctatcagacgccggtggaactggacgacgacgacgacgattaa

SEQ ID NO: 228800 - DNA, 189 bp, Klebsiella pneumoniae
atggataccgagttaaccccaacgcagatggccatcgaattcttacgccgcgacaccaccgtcatgactccagcgcagtatctgaaaaaacttaaactgctggaactggagtttgctgacctgatggcactctcctcgctggagctgaaagaagagatcgatctggcctggcgtctgggtatccactga

SEQ ID NO: 228801 - DNA, 1389 bp, Klebsiella pneumoniae
atgtctggtggattagttacagctgcatacattgttgctgcaatcctgtttattttcagcctggcgggtctgtcgaaacacgaaacctcgcagcagggcaactatttcggcatcgccgggatggccatcgccctgatcgccactattctgggtccggacgccggcaacgtcggctggattatcctcgcgatggtgatcggtggggcaatcggtattcgtctggcgaagaaggtcgaaatgaccgagatgccggagctggtggccatcctgcacagcttcgtgggcctggcggcggtgctggtagggtttaacagctacctgcagcatgaaaccggcatggagcagattctggtcaatatccatttgaccgaagtgttcctcggcatcttcatcggcgcggtgaccttcaccggttcggtagtggcgtttggtaaactgcgcggcaagatctcctccaaaccgctgatgctgcctaatcgccataagcttaacctggcggcgctggtggtttccttcatcctgatggtgatttttgtgcgctccgatagcaccggcacccaggtcctgtgcctgctggtgatgaccgcgatcgcgctggccttcggctggcacctggtggcctccatcggcggcgcggacatgccggtggtggtctcgatgctcaactcctactcgggctgggcggcggcggcggcgggctttatgctgagcaatgacctgctgatcgtcaccggcgcgctggtgggctcttccggcgccatcctctcttacattatgtgtaaggcgatgaaccgctcctttatcagcgtgatcgccggcggcttcggcaccgatggttcctccagcggtggcgatgaagaagtgggcgagcaccgcgaaattagcgccgaagagacggcggagatgctgaaaaattcgcactcggtcatcatcaccccgggctacggtatggcggtggcccaggcgcagtatccggtggcagaaattaccgagaagctgcgggcgcgcggcattaaggtgcgctttggcattcacccggtcgccggccgtctaccggggcatatgaacgtcctgctggcggaggctaaagtgccttacgacatcgtgctggagatggatgagatcaacgatgatttcagcgataccgacaccgtgctggtcatcggcgctaacgataccgtcaacccggcggcgcaggacgatccgaagagcccgatcgccggcatgccggtgcttgaggtgtggaaagcgcagaacgtggtggtctttaagcgttcgatgaacaccggttacgccggcgtacagaacccgctgttctttaaagagaacacccatatgctgttcggtgatgccaaagccagcgtcgatgcgatcctgaaagcgctgtaa

SEQ ID NO: 228802 - DNA, 1530 bp, Klebsiella pneumoniae
atgcgtattggtgtaccacaagaaaggctagcccaggagacccgggtcgccgccacgccgaagaccgttgagcagttgctcaaactcggctttagcgtcgcggtagaaagcggcgccgggaagctggccagctttgacgatgaggccttcgcccaggcgggggctgagatcgtgaccggcgatgaggtgtggcagtctgatgtcatcctcaaggtcaatgctccgaatgacgatgaaattgccctgttgaatccaggaaccacgctgattagttttatctggccggcgcaaaacccgcagctgatggaaaaactggcggcccgcaatatcaacgtgatggcgatggattcggtgccgcgtatctcccgcgcccagtcgctggatgcgctcagctcaatggccaatatcgccgggtaccgcgctatcgttgaagcggcccatgaattcggccgtttctttaccgggcagattaccgcggcaggcaaagttccgcccgccaaggtgatggttatcggcgccggggtggccggtctggcggcgattggcgccgccaacagcctgggggcgattgttcgcgccttcgatacccgtccggaagtgaaggagcaggtgcagagtatgggcgccgaattcctcgaactggattttaaagaggaagcgggcagcggcgacggctatgccaaggtgatgtccgaggcctttattcaggccgaaatggcgctgttcgccgcccaggcgaaagaggtcgatattatcgtcaccacggcgttaattccgggcaagccggcgccgaagctgatcacccgggaaatggttgacgccatgaagtcgggcagcgtggtggtcgatctcgcctcgcaaaacggcggcaactgcgagtacaccgtgccgggcgaagtggtgaccaccgccaacggcgtgaaaattatcggttataccgacctgccaggccgtctgccgacccagtcctcccagctctacggcaccaacctggtgaacctgctgaagctgctgtgcaaagagaaagacggcaatatcgtcatcgatttcgatgacgtggtggtgcgcggtgtgaccgtggtgcgtgaaggcgaaatcacctggccggcgccgccgattcaggtctccgctcagccgcaggccgcggcgaaaaaagtggaagcgccgaaagaagaggtgaaaccggcgtcgccgtggcgcaaatatgcgctgatagcgctggcgattattctcttcggctggctggccaacgtggcgcctaaagagttcctcggccatttcaccgtcttcgcgctggcctgcgtggtgggttactacgtggtatggaatgtctcccatgcgctgcatacgccgctgatgtcggtgacgaacgccatttcgggcattatcgtggttggcgcgttgctgcagataggccacggcggctgggtcagcttcctgagctttatcgcggtactgatcgccagcattaatattttcggtggttttaccgtgactcagcgcatgctgaaaatgtttcgcaaaggataa

SEQ ID NO: 228803 - DNA, 951 bp, Klebsiella pneumoniae
atgaagcttaaaaacaccctcctggcgtctgctctcctgacaaccgccacgttgtctgcccacgcagcgaccgagttgaccccggagcaggcggctgcgctgaagccctacgatcgcgttgtcgtcaccggccggtttaatgccattggcgacgcggtgcaagcggtatcgcgcaaagctgacaaagacggcgcggcctcattctatgttgtcgacacgtcggattacggcaatggcggcaactggcgcgtcacggctgacctctataaagacgacgcgccgaaagcggatgcgccgaaaaatcgcatcatcaatggcgtgatggagctgccgaaagatcaggccgttgagctgatgccttacgacaccgtcaccgtccagggcttctatcgcagtcagccggaagtgaacgacgccatcaccaaagcggcgaaagcgaaaggcgcctatgcgttcttcatcgtccgccaggtggacgccaaccagggcggcaaccagcgcattaccgcgtatatctataaaaaagatgcggagaaacgcgttctgcagagcccggacgctatcccggctgattctgaagccggccgcgcggcgttggccaaaggcggcgaagcggcgaaaaacgtcgaaatcccgggcgtcgccaccaccgcggcggttggctccggcaccggtgtaggtcgtttcttcgagacccagtcgtcgaaaggcggacgttacactgtcacgctgccggacggcaccaaagttgaagaagtgaacaaagtgaccgcggcgcaaatggtgccgttcgataacatcaagttcaccggcaactatggcaacatgacggaaatctcttatcagacggcgaaacgcgcggcgaagaaaggggcgaagtactaccacattacccgccagtggcaggaacgcggcggcaacatcaccatcagcgccgatttgtacaaataa

SEQ ID NO: 228804 - DNA, 1383 bp, Klebsiella pneumoniae
atggaaaagaaactgggcctgagcgccctgaccgccctggtccttagctcaatgctcggcgctggcgtattcagtttgccgcaaaatatggcggccgtggccagcccttccgctctgctcatcggctgggcgatcaccggcgtcgggatcctgttcctcgccttcgcgatgctgctgttgacccgtattcgccccgacctcgacggcgggatcttcacctacgcccgtgaagggttcggcgagctgatcggcttctgttccgcgtggggctactggctgtgcgcggtgattgccaatgtctcttatctggtgatcgtcttttcggcgctcagtttcttcaccgatacccctgagctgcgcctgtttggcgatggcaacacctggcagtcgatcgtcggcgcttcagttctgctgtgggtagtccactttctggtcctgcgtggggtgcagacggcggcggggattaacctggtcgcgaccctcgccaagctgttgccgctgggggcgtttgtcgccctcgccgccctggcctttcagttggatacgttccgcctcgatttcagcggcgtggcgctgggcgtaccggtgtgggagcaggttaaaaacacgatgctgatcactctgtgggtgttcatcggcgtcgaaggcgcggtggtggtctccgcccgcgcgcgtcacaagcgcgacgttgggcgcgcgacgctgctcgcggtgctttcggccctcgcggtgtatctgctggtcaccctgctgtcgctgggtgtggtgccgcgtagcgaactggccgaaatgcgcaacccgtcgatggcgggactgatggtcagactgatgggctcgtggggtgaaattgtgattgccgccgggcttatcgtgtcggtgtgcggcgcctatctcagctggaccatcatggccgccgaagtgccttacctcgcggccacccacaaagccttcccgcgcctgttcgcccgtcagaaccgcaacaacgccccctccgcctcgctgtggctgaccaatatcagcgttcaggcgtcgctggttttgatctggctgaccggttcggactacggcaccctgctgactattgcgtcagagatgatcctcgtgccctatctgctggtcggcgcctttttgctgaaaatcgccacccgtccgctgcatcaagcggtgggtatcggcgcctgcatttatggcttatggttattatacgcgtcgggacctgtgcatttgctgttgtcagtggtactttacgctccgggtcttctggtctttttgtacgcgcggcgtacgcaccagcacgatcgttcgctcaaacgccgcgaattggcgctaattggtttattgctggttgccgctgtgccggcaacgtggatgctggtggggtaa

SEQ ID NO: 228805 - DNA, 336 bp, Klebsiella pneumoniae
atggggctgttaatcaaagggctgctgggcgcgctggtggtggtgctgattggcgtgctggcgaaaaccaaaaactacgccatcgccgggcttattccgctgtttcccacctttgcgctcatcgcccactatattgttgccagcgagcgtggtattgaagccctgcgcgccactatcgtgttcggcatgtggtcgatcgttccctattttatctatctgctgtcgctgtggtacttcaccggcatcatgcgcctgccgttagcgctggcaggcgcagtggggtgctgggggctctgcgcctggctgttgattgttggctggagccgcttccactaa

SEQ ID NO: 228806 - DNA, 717 bp, Klebsiella pneumoniae
atgaataaaatcgtttttgttgaggatgatcctgaggtaggagcgctgatcgccgcctatctcggcaagcatgatatggaggtggtggtcgagcctcgcggcgaccgcgcagaggaagtgatcgcgcgggagaaaccggacctcgtgctgctggacattatgctgcccggcaaggacggaatgaccctctgtcgcgatctgcgtgggcaatggcaagggccgattgttctgctgacctcgctcgacagcgatatgaaccatatcctctccctggagatgggcgccagcgattatatcctgaagaccacaccgccggctgtgctgctggcgcgactgcgtctgcatttgcgccagcatatcgccccggcgggtacaggcgcgccttcgacgctgaccccgcacaagaccatctcctttggctcactgaccattgacccggtcaaccgccaggtgctgctcggcggagaaagcgtcgccctgtccaccgccgatttcgacctgctgtgggagctggccacccacgccgggcagattatggaccgcgacgccttgctgaaaaatttacgcggcgtcacctacgacgggatggatcgcagcgttgacgtcgctatctcgcgcctgcgcaaaaaactgctcgataacgccaccgaaccctaccggattaagacggtacgcaacaaaggctaccttttcgccccccacgcctgggataactga

SEQ ID NO: 228807 - DNA, 147 bp, Klebsiella pneumoniae; identical to SEQ ID NO: 222711

SEQ ID NO: 228808 - DNA, 363 bp, Klebsiella pneumoniae
atgatgaaatacgttgtacttttggcacttactctcttcacgtcactctctggctgggctttttctctcgacaacgccgatatccggctcctctgtccacagcgcgggcagattaaggtgcttcttcaccgctatcaacatacccagcaatcctggggagatcaccatttcgaaaccggcggcggatacgtgcgccaggggccgctgctggtgatcccgtttgctaatcttgatcagatgatttaccaccagaccaccggcgaatttgcttactggtatgccgaagcagaacagctggtgcgctgtcggctgctgagcctggccaccctctatccggtggatataccctactatcgcgagtag

SEQ ID NO: 228809 - DNA, 1302 bp, Klebsiella pneumoniae
atgaaaaagctgttcgtgcagttctatcttctgctcttcgtctgctttcttgtgatgaccatgctggtgggcctggtctataaatttaccgctgaacgcgccggaaggcagtcgcttgacgatctgatgaaaagctcactgtatctgatgcgcagcgagctgcgggaaattccgcctcgcgactggagcaagacgcttaaagagctggaccttaatctgtcgttcgacctgcacatcgagccgatgagcaaatttaaattgtcggaaagctcgatgcagcacctgcgcgctggggatattgttgcgctcgacgaccagtacacctttatccagcgcatcccccgcagccactatgtgttatccgtgggcccggtaccctatctctattttctgcatgaaatgcgcctgctggacgtggcgctgatggcgtttatcgctatctcgctggccttcccggtgtttatctggatgcgtccgcactggcaggacatgctgcgcattgagaccgccgcccagcgctttggcgaaggccacctcagcgagcgtattcattttgacagcatgtccagctttgagcggctcggggtggcctttaaccagatggccgacaacattaacgccctcattgccagcaaaaagcagctgattgacggcatcgcccatgagctcaggacgcctctggtgcgcctgcgctaccgtctggagatgagcgaaaacctcaccgaggcggaatcgcaggcgctgaaccgtgatatcggccaactggaggcgctcattgaagagctcctgacctacgcccgtctcgaccgcccgcagacggagctcagccttaccacccccgattttcccgcctggatcagcgaccacgtcgaggatatccagatggtcaacccgcagcgcgaggtcggcctggcgacgctgacccgcggcaactatggcgcgctggatatgcggttgatggagcgggtgctggataatctggtgaataacgccctgcgctacagcagtcagcgggtggcggtcagcctgaccctgcagggtgcccgcgcgtcgttgcaggtcgatgatgacggcccgggcattgcccccgaggagcgcgagcgggtgttcgagccttttgttcgtcttgaccccagccgcgatcgggcgaccggaggctgcggcctcggcctggccatcgtccacagtatcgcccaggcgatggggggcgaggttcgctgcgaggccagtcctctcggcggcgcccgcttctgctttagctggccggtctatcatcagttgcccgattttacctctgcctga

SEQ ID NO: 228810 - DNA, 933 bp, Klebsiella pneumoniae
atggccagctacgacctcgttgaacgtctgaatgatacctttcgccagatcgagctggagctgcaggcgctgcgccaggcgttaacgacctgtcgactgctggcgggccgggtgtttgagctgccggcaatcagtaaagatgccgagcatgacccgctggcgaacattactgtcgtccagcacaccggggaggcggcgctggatctcgccctgcgacactatggccatctgtttatccagcagcaatcggaaacccgcagcagcaaagccgccgtccgcctgccgggtgctatctgcctgcaggtcaccgccgcggaacagcaggcgctgctggcgcgcattcagcagatcaacacccttaaggccaccttcgagaaaatcgtcaccgtcgactctggcctgccccccaccgcccgctttgagtgggtgcatcgccatttgcctggattaattaccctcagcgcctatcgcacgctaacgccccttctcgacccgagcactatccgcttcggttgggccaataagcacgtgatcaaaaacctgacccgcgaccaggtgttgatgatgctggagaaaagcctacaatcgccgcgggcggtgccgccctggacccgcgagcagtggcagagcaaactggagagggagtatcaggatatcgccgccctgccgcagcgggcgcggctgaaaattaaacggccggtgaaagtacagccgattgcccgcgtctggtatgccagcgagcagaaacaggtgcagtacgcctgccccagcccgctgatcgccctgatatccggcagccagggggtcagcgtgccggatattggcgaattgctcaactacaatgccgacaacgtgcaataccgctacaaaccggaggcgcagtcgctgagattactgatccctcgcctgcacctctggctggctagcgagtag

SEQ ID NO: 228811 - DNA, 1401 bp, Klebsiella pneumoniae
atgacaacgcatcgcagtgaaaaagactcgatgggcgccatcgacgtcccggccgataaactctggggcgcccagacccagcgttctctggagcatttccgcatctcgaccgaaaaaatgcccggggaactgatatatgccctcgcgctgaccaagcgggcggcggcgaaggtcaatcaggatcttggcctgctgacgccggagaaagccggggcgatcgtcgccgccgctgacgaagtgctggccggaaaacacccccaggagttcccgctggctatctggcagaccggttccggcacccagagcaatatgaatatgaacgaggtgctggccaaccgcgccagtgaactgctcggcggtgagcgggggatggcgcgaaaaatccaccccaatgacgatgtcaataaaagccaaagctcgaatgatgtgttccccaccgccatgcacgtcgcggcgctgattgccctgcgggaaaaattgctcccgccgctgcaggcgctgcgggccacgctcaacgaaaaagcggtggccttcagggatatcgttaagatcggtcgcacccatctgcaggacgccacgccgctcaccttaggccaggaaatctccggttgggtggcgatgctggaccataacctgaagcatcttgacgccagccagccgcatctcgccgagctggcgctgggcgggacggcggtgggtaccgggctgaatacccatccggaatatgccgtgcgggtggcggccgaactggcctcgctcagcggacagccgtttgtcaccgcgccgaacaaattcgaagcgctggccaccgtcgatgccctggtccatgcccacggcgcgctgaaaggtctggcggcctcgctgatgaaaatcgctaacgatgtccgctggctggcctccgggccgcgctgcgggattggggaaatcgccatcccggaaaacgagcccgggtcatcgattatgcccggcaaggtcaacccgacgcagtgcgaagccctgaccatggtctgctgccaggtgatgggtaacgatgtggcagtgaatatcggcggcgcctcgggtaacttcgagctcaacgtctatcggccgatggtcattcacaacttcctgcagtcggtgcgtctgctggcggacggcatggcgagctttaacgagcactgtgcggtggggattgagccgaatcgcgagcggatcaaccagctgctcaacgagtcgctgatgctggtgaccgcgctgaatacccatatcggctatgataaagcggcggagatcgccaaaaaagcgcaccatgaggggctgaccctgaaggcctcggcgctggcgctgggctacctgacggaagccgaattcgacagctgggtgcgcccggagctgatggtcggcagcctggctactcgctag

SEQ ID NO: 228812 - DNA, 1647 bp, Klebsiella pneumoniae
atgtcgaataaaccgtttgtttaccaggatccttttcccctcaaaaaggatgacaccgagtattatctcctcagcaatgattacgtctccgtcgccgaatttgccggccaggaagtgctaaaagttgaccctcaggcgctgacccttctggcgcaacatgccttccacgacgcctcctttatgcttcgcccggcgcatcagcagcaggtggcggatatcctgaacgacccggaagccagcgaaaacgacaaatacgtcgccctgcagttcctgcgcaactccgatatcgccgccaaaggcattctgcccacctgtcaggacaccggcaccgcgatcatcatgggtaaaaaaggtcagcgcgtctggaccggcggaggcgatgaggccgccctggcgcagggggtgtacaacacctatatccaggacaacctgcgctattcgcagaacgccccgctggatatgtataaagaggttaacaccggcaccaacctgccggcgcagattgacctctatgctaccgatggcgatgagtataaattcctctgcatcgccaagggcggcggctcggctaacaaaacctatctgtaccaggaaaccaaagcgctgatcaccccggcgaagctgaaaaactatctggtcgagaagatgcgcaccctggggaccgccgcttgtccgccgtaccatatcgcctttgtcatcggcgggacttcggcggaagcgacgctgaaaaccgtcaagctggcctccaccaaatactacgatggcctgccgaccgaaggtaacgaacatgggcaggctttccgcgacgtgcaactggagcaagaactgctgctggaagcgcagaacctcggcctcggcgcgcagttcggcggcaaatatttcgcccacgatatccgcgtgatccgtctgccgcgtcacggcgcttcctgcccggtagggatgggcgtctcctgttccgccgaccgcaacatcaaagccaaaatcaaccgcgacggcatctggattgagaagctggagagcaatccggggaaatatatccctgagcatctgcgccaggccggggaaggcgaagcggtgaaagtgaatcttaaccagccgatgagcgcgatcctggcgctgctgtcgcagtacccggtgtccacgcgtctgtcgctgagcggcactattatcgtggcccgcgatatcgcgcacgccaagctgaaagagcttattgataatggcgaagccctgccgcagtacgtcaaagatcacccgatctactacgccggcccggccaagacgccggacggttacgcctccggctccctcggcccgactaccgcagggcgcatggactcttacgtcgatctgctgcagtcgcacggcgcgagcaagatcatgctggcgaaaggcaaccgcagccagcaggtcaccgacgcctgccaccaacacggcggcttctacctcggcagcatcggcggcccggcggcggtgctggcgcaacagagcatcaagagcctcgagtgcgtggcctacccggaactggggatggaggctatctggaaaatcgaagtggaagatttcccggcgtttattctcgtcgatgataaaggcaacgacttcttccagcaaatccagacgtcgcagtgcgcccgctgcgtgaagtaa

SEQ ID NO: 228813 - DNA, 1179 bp, Klebsiella pneumoniae
atgcaaaagctgatcaacgccgtacagaactatgcctggggaagccataccgccttaactgaactgtatggcatcgccaacccggacaaccagccgatggcagagctgtggatgggggcgcatccgaagagcagctcgcaggtcctgacggccgatggccagccgcgttcgctgcgcgaggtgattgacgcggataaagccgccctgctcggcgacaaagtggcgcaacgcttcggtgagctgccgttcctgtttaaagtgctgtgcgccgcgcagcctctctccattcaggtccatcctaacaagcaggcctccgaagagggtttcgcccgcgagaacgccgccggcatccccctctccgccgccgaacgtaactacaaagatccgaaccacaagccggagctggttttcgccctgaccccgttcctggcgatgaacgcttttcgcgagttcagcgaaattgtcagcctgctgcagccggtggccaacgcacacccggcgatcggcgccttcctgcagcagccggacgcgactcgcctgagccagctgtttgccagcctgctgaatatgcagggcgaggaaaaagcccaggcgctgcaggcgctgcgcgaggtgctggaccgtgagcagggcgaaccgtggcagaccatccgcctgatcgcggaattctatcccgacgacagcggcctcttctccccactgctgctgaacgtggtgaagctgaatcctggcgaagcgatgttcctgtttgccgaaacgccgcacgcttatctgcaaggggtagcgctggaggtgatggccaactcggataacgtgctccgcgccggcctgacgccgaagtacattgatatccctgagctggtggccaacgttaagttcgaggctaaaccggcgggtgagctgctgacccagccgcagcgccacggcgcggaactggacttcccgatccctgtggaagattttgccttctcgctgcacgatctctccaccgaggccagcgatctggcccaggcgagcgcggcgatcgttttctgcgtcgacggcgaagccgtgctgcgcaaaggcgacctgagcctgaccctcaagccgggcgaatcggcctttgtggccgccaatgaatcgccggtgcaggtcagcggccatggccgcgtggcgcgcgtgttcaataagctccagtaa

SEQ ID NO: 228814 - DNA, 1539 bp, Klebsiella pneumoniae
atgaaaaaatcgctggtcgcagcaggaatcatcgtggcgctgggcgtggtatggacaggcggcgcctggtacaccggtaaacagctggaaggccgaattgccgatatggtgcagcaggctaacgcgcagctacgcagcagcgcgccggagtcaggtctggagctgagctatcaggactaccagcgcgggctgttcagcagccatctgcagctggtggtgaagcccatcgccggtcaggctaacggctggctggccgccggacagagcgtggtgcttgacgaggtggtcgatcacggccccttcccgctggcctcgttaaaaacctttaatctggccccggcgatggcttcggtccacaccacgctggtgaaaaacgacgccagccaggcattgttcgagatagccaaaggcactacccccttcaccgttgatacgcgcatcgcctacagcggcgacagccagtcggcgatcgttctcaatgccctcgactacgccaaaggggatgagaaagtcaccttcagcggcggccagttccagctcgacgccgaccgagacggcaaaaacatcagcctgaagggccaggccggcagcggtcagatcgatgccctcaacgaatataaccagaaggtgcaactgcgcttcgtcaacctgaccaccgacggcgccaccgagctggccagcttcaacgagcgtatcggccagcaaaaaatgaccctcgataagctggccatcagcgtcgaaggcaaagagctggcgctggttgacggcatggcgctggacggcggctcgacgctgaccaaggacggcaaaggcgtgaacagccaggtgaactacaccgtcaacagccttaagctgcagggtcaggatatgggcagcggcaaactgacgctgaaagtggataacgtcgacggtcaggcgtggcaccagttcagccagcagtacagcgcgcagtctcaggcgctgctggcgaagccagagctggcgcagaacccggagctgtaccagcaggcgcttaccgaaaccctgttcaatgcgctgccgatcctgcttaagggcaatccgtcggtgaccatctccccgctgagctggcgcaatgccaaaggcgaaagcaccctcaacctctcggttctgctgaaagatccggcccaggtgaccgctccgccgcagacgctggcggacagcctggatcgcgtggtgcagtcccttgacggcaaagtggtgatcccggtggatatggcgacggagtttatgactaagatcgccggtctggaaggctaccagccagccgacgccgccaaactcgccgatcagcaggtcaaaggcctggcggcgatgggccagatgttccgcatcaccaccatggaagataacgccatcagcagcagcctgcagtacgcgaacggccaggtgacgctgaacggccagaaaatgccgctggaggattttgccgcgatgtttggtctggaagcgccttcgctaccggacggcgcgccgcaggacggccagcctcagcaggacgacgccgccccgcagccgtaa

SEQ ID NO: 228815 - DNA, 1029 bp, Klebsiella pneumoniae
atggcaatcgcaaaaaagatcaccatcaatgatgtggcactggccgccggcgtctccgtgagcaccgtttcgctggtgctgagcggcaaagggcgcatctccagcgccaccggcgagcgggttaatcaggccatcgagcagctgggatttgtgcgcaaccgtcaggccgcctcgctgcgcggcggacagagcggggtgattggccttatcgtcagcgatctctctaaaccgttctatgccgagttaaccgccggcctcaccgatgccctggagaggcaggggaaaatggtgtttctcacccaggggggacgcagcggcgagaagatggctcagcggtttgatacgctggcggcgcagggggtggacggggtgatcatcgccggggccatcgaccgcggcagcgagctgcgcgagcgggcggcggaggcgggggtgccgctggtgttcgcttcccgcgccagctatctcgacgatgtcgacctgatccgcccggacaacatgcaggcggcgcagctggtgaccgagcatctgatccgccgcggccatcagcggatcgcctggcttggcggccagagctcgtcgctaacgcgcgccgagcgggtcggcggctattgcgccaccttgctgaaatacggtctgccgtttcacagcgaatgggtgctggagtgcgagtcgagccagaagcaggcggcggaggcgatgaccgcgctgctggggcaaaatccgaccatcaccgcggtggtgtgctacaacaacgtggtggcgaccggcgcgtggttcggtctgctgcgggctggaaggcagagcggggaagatggcgtcgacagctacttcgagcagcgggtggcgctggcggcgttcgccgatgtgcccgaggccgcgcttgacgacctgccgctcacctgggtcactaccccggcgcgcgagatgggcaaaacgctggcggagtcgatgctgcggcggctggaggagggcgcgggcgagacgcgaaaccagatcatgcccccgcggctggtgacgagaaaatga

SEQ ID NO: 228816 - DNA, 1593 bp, Klebsiella pneumoniae
atgacggcgaaaaccgcaccaaaaatcaccttgtgggaatttttccagcagctgggaaaaacctttatgctgcccgtggcgttgctctcgttttgcgggatcatgctggggatcggcagctcgttaagcagtcacgatgttttgaccctgctgccgtggctggatatgccgctgctgcaggccatctttatctggatgagcaaagtcggctcctttgccttcagcttcctgccggtgatgttttgtatcgccatcccgttggggctggcacgggagaacaaaggcgtcgccgccttcgccggttttgtcggctacgcggtcatgaacctggcggtcaacttctggctgacggcgaaaggcattctgcccaccaccgacgccgcgatccttaaggccaacaatatccagaacatcatcggtattccctcgatcgataccgggatcctcggggcggttatcgccgggattatcgtctggctgctgcatgagcgctttcacaacattcgcctgccggacgccctggccttcttcggcggcacccgcttcgtgccgatcgtcaccaccgtggtgctgggtctggtcggtctggcgatcccgctggtgtggccggtcttcgccatggggatcaacgccctcgggaagatgatcaatagcgccggcgattttgggccgatgatcttcggcaccggcgagcgactgctgctgccgtttggcttgcaccacatcctggtggcgctgatccgcttcacggaagccggcggcaccctcgacgtctgcggccacagcgtcagcggcgcgctgaccatcttccaggcgcagctaagctgcccgaccacccacggcttcgccgaaagcgccacccgcttcctgtcgcagggtaagatgccagccttcctcggcggtctgccgggcgccgcgctggcgatgtaccactgcgcccgtccggaaaaccggcataaaattaaaggcctgctgatctccggggtgatcgcctgcgtggtgggcggcaccaccgagccgctggagttcctgttcctgttcgtggcgccggtcctgtatgtcatccacgccctgctgaccggtctcggctttaccatcatggcggtgctcggcgtcaccatcggcaacaccgacggcaatattatcgacttcgtggtgtttggcatcctgcatggtctggcgaccaagtggtatctggtgccggtggtggcggcaatctggtttgcggcctactatgccatcttccgcttcgccatcacccgcttcaatctgaaaacgccgggccgcgatatcgacaccgccgccagcgtggagaaagcggtcgctggcaccattggtaaatccgggtataacgtgccggcgattctggcggccctcggcggcgccgacaacattgtctcgctggataactgcattacccgtctgcgtctgtcggtacacgatatgagcaaagtggacgctgccgcgctgaaagcccaccgcgccatcggggtggttcagctcaaccagcataatctgcaggtggtgattggcccgcaggtgcagtcggtaaaagatgaaatggccacgctgatgaataccgttcaggcctga

SEQ ID NO: 228817 - DNA, 1173 bp, Klebsiella pneumoniae
atgtttgatttttctatacccatcgaccgccacggcacctggtgcacgcagtgggactatgtcgcagaccgctttggcgtccccgacctgctgccgttcaccatctccgatatggatttcgccaccgcgccctgcatcctcgacgccgtcagccggcggctggcccacggcgtgttcggctacagccgctggcagaacgaggcgtttctcggggcgattgcccactggtacgccagccgctttcacagcgtcatcgatccgcaaacggtggtatacggaccgtcggttatttatatggtggcggaaaccatccgccagtggtcgcaagaaggcgacggcgtcgtcgtccatactcccgcctacgatgcgttctataacactatcaccgctaaccgccgacagatcgccccggtgccactgaccctgacgaacaatcaatggcactgcgatatggcgcgcctggaagcggcgctggcggagccgaagaataccctgctgctgctctgcagcccgcacaacccaacggggaaagtctggcgccgcgaggagctccagaccatggcggcgctgtgccaaaagcatggcgtcagggtgattagcgacgaaattcatatggacatgacctggggcgaccaccgtcatatcccgtggagcgaggtggctcaggggccgtgggcgctgttcacctccggatcaaagagcttcaatattccggcctttaccggggcctatggctttatccctgaggcaaactgccgcgacagctatctgcaggcgctgaaagcgcgcgatggactctcgtcgccctcggtgccggcgctgctggctcatatcgccgcctaccgcgacggggcaccctggctcgacgccctgcgcgactacctgcaggagaacctgcgctttgtggctgatacgctcaatcgcgcctttcctgcgctgcgctggcagccgccggaggccacctacctggcgtggatcgacctgcgccccctcaacattgacgaccgcgcactgcagcaggcgctgatcgccgggcagaaggtggcgattatgccgggatatacctatggtcccgaaggcaatggctttctgcgtctcaacgtcggctgtccacgcgagaagctggagcgcggtgtcgcagggctgatagccgccctgcgcagcctcagttga

SEQ ID NO: 228818 - DNA, 1029 bp, Klebsiella pneumoniae
atgagtcaagacgtcaccgcgaagatgttaaagcccgattttgatatggaagtgtccggcctggtgtatggctatctgtttcatgaagatcaccccccacagcctattgcctctggtgaggtatgcgccagctatcaggcgctggctgacgataaggcctttatctggctgcatcttaatctcaatcacgccaccgccgaaaaatggctaatcagtcactttcccgtggcggactttttctttgaggagatccgcagcggctcgcataccacccgtattgaacggcaaggggaaaatctgttcgccgtgcttaacgacgtgctgtttcgtccgcaagacaccagcgcggaaaccgccacgctgtggctctactgtagcccgaagctggtggtgacagcgcgtttcaaaccattgcggtttatcgaatggatgctgccgcgtctgcatacgcttaaggtgcatacctccgctgaactgctggcctttttgctggaggagcaggaggaggtgctggagcaggtggtgcgccaggccagccgccacgtcgacctgattgaagagcggctcctgagcaatcacgtgcagcgtaatcgggccgatctggcgcggctgcggcggatgctgctgcgttttcaacggctgctggcgccggaaccggcggccatgttccggctgcttaaccggccgccagcgtggatggatcgcgcggtggtgcaggcatttcgtcagttcaccgaagagtttagcgtggtgcttaatgacctgtccggcctgatcgagcgaatcagcctgctgcaggaggagatcggcgcccgccagctggagcagagcaaccgcaccctctacaccctgacggtgatcacggtcctcgcgctaccgattaacattgtggccggtttcttcggcatgaacgtcggcgggatcccgctggcgagcaatcaccacgggtttatcctgctggtggtgattgtcggcatctttaccctcggcgccggctacctggcgttccgccggcgtgacgatctgtag

SEQ ID NO: 228819 - DNA, 204 bp, Klebsiella pneumoniae
atgaaaacctatgaccgtaatcgtaacgctattgctaccggcagtatggtcatgatcgctggtaacggtacgacgggcgtgattaaagcgatccatggcgaggggaaaaccgccgagcagctgcgtcgggcggactgcgtggaaatcgacggctgcgagggacgcttctgcccgttagatctgatccgtctcggtttccattaa

SEQ ID NO: 228820 - DNA, 519 bp, Klebsiella pneumoniae
atgttaaataaattaagggttttgttatccgggctattgttggttgccatgccgtcggcgcaggccggggaattcaatctttattcgatgaatactggctcctatgtttatcacatgaccggtaaccacggacaatataacgagcatttcaacaacaactttttctcggtggagcgcaagttttcagcggattcaaaatatagcgcgctggtcggcaccatgaaaaacagcttcgacgatcgctgtctgaccctcggcgtgcgccgcgactggctgaaaaacgacaccggctggctgctgaaaggcgtgtatgcctataccggggaatttttctttgacgctttcagccactgcggcgactcaggcacctaccgtaccgctaaaaaaatcaccggcgtcggtttttcgccctatatttatcatggtctgcaatacaactttaccgattacttcggcgtcgagggcgggattattataccggcgatcttcgtgatgagtattcagtggagctttcgctaa

SEQ ID NO: 228821 - DNA, 354 bp, Klebsiella pneumoniae
gtgttagccactctcctcgttgcgctggtcgctattattcatctcgccatcctggtgctggagatgtttttctgggaagcgcccgccgggcgccgggcctttaacctcagcgccgatttcgcccgggaaagccgggtgctggcggccaaccaggggttgtataacggtttcctggccgccggcctggcatgggggctgtggctgggggcatcgggcgtgcaggtggtgatctttttcctcgcctgcgtgctggccgccgggatattcggcgcgctgaccgccagccgcaaaattctctatattcaggcgctgcccgcgctgctggcgctgcttgcggtgctggcgcaggcgtag

SEQ ID NO: 228822 - DNA, 273 bp, Klebsiella pneumoniae
atgacatggcaatccttcaaacaggcctggcttatccggttctggtctcccgtcccggcggtcatcgccgcgggcattctctcaacctactattttggcatcaccggcaccttctgggcggtgaccggcgaatttacccgctggggtggccagctgctgcagctgctgggggtccacagcgaacagtggggctattatcagctgatccatctcgacgggacgccgctgacccgcatcgacggcaggatgatcatcggcatgttcggcggctga

SEQ ID NO: 228823 - DNA, 876 bp, Klebsiella pneumoniae
gtgcaggccgtggccgggggcatcatcgccgggttcggcgcgcggctggcgatgggctgcaacctggcggcgtttttcaccggcattccgcagttctccctgcacgcctggctgtttgccatcgccaccgccatcggctcctggtttggcgctcgcttcaccctgctgcctctatttcgcatcccggtaaaaatgcaaaagatatccgccgcttcgccgttaacccaaaaaccgctgcaggcacgccgccgtttccgcctgggcatggtggtctttttcgccatgatcggctggggcctgctcaccgccgcagaccaccctgcgctcggcctggcgatgctgttcggcatcggcttcggtctgcttatcgagcgagcgcagatctgctttacctccgcctttcgcgatatgtggatcaccggccggacggtgatggcgaaggcgataatcttcggcatggcggcgagcgtcatcggcatcttcagctatgtgcaactggggatggcgccgaaaatcatgtgggccggtcccaacgcggcgatcggcgggctactgttcggctttggcatcgtgctggccggcggctgtgagaccggctggatgtaccgggcggtggaaggccaggttcactactggtgggtggggctgggcaacgtcatcggctccacgctgctcgcctggtgctgggacgatatcgccgccccgctcgccacccactggcaaaaggtcaacctgctgaacgcttttggtcccttcggcggactgctggcgacctatctgctgctgctgatcgccctgctgctggtgatcgcctgggagagacattttttccgccgccagtcggcagcggtccggaccgtgaaggagagtgcatga

SEQ ID NO: 228824 - DNA, 234 bp, Klebsiella pneumoniae
atgaaaaacatcatccctgattatcgcctggacatggtcggcgagccctgcccttatccggcggtcgccaccctggaggcgatgccctccctgcaaaaaggcgagatcctcgaagtgatcagcgactgtccgcagtcgatcaataacattccgctcgatgccaggaaccatggctatacggtgctggatattcagcaggatggcccgaccattcgctatctgatccagaagtaa

SEQ ID NO: 228825 - DNA, 393 bp, Klebsiella pneumoniae; identical to SEQ ID NO: 222710

SEQ ID NO: 228826 - DNA, 159 bp, Klebsiella pneumoniae
atgggattctggagaatcgtttttactatcattctgccgccgctgggggttctgctggggaaaggtttcggctgggcgtttattctcaacattattttgaccctactgggctatattccaggcctgatccacgccttttgggtccagacacgcgattaa

SEQ ID NO: 228827 - DNA, 999 bp, Klebsiella pneumoniae
atgagtaaacttgggattaatggttttggtcgtatcggacgtctggtgttacgccgtttattagaagtcgacagcagcctcgaggtggtggccatcaacgacctcacctcgccaaaagtgctggcctacctgttaaagcatgattcaaactacggccccttcccgtggagcgtcgacttcacggaagatgcgctgatcgtcaacggcaagaccatcaccgtgtatgccgaaaaagaggcgcagcatattccgtggcaggcggcgggcgcggaagtgattgtggagtgtaccgggttctacacctcggcagagaaatcgcaggcccatcttcaggccggcgcacgcaaggtactgatttcggcccccgccggcgagatgaaaaccatcgtctataacgtcaacgatgacaccctgacggcggatgacaccatcatctccgtggcctcctgcaccaccaactgcctggcgccaatggccaaagtgctgcaggatgccttcggcatcaccgtaggcaccatgaccaccatccacgcctataccggcacccagtcgctggtggacggaccgcgcggtaaagatttgcgcgcctccagggcggcggcggaaaacgtcatcccgcacaccaccggcgcggccaaagctatcggcctggtgatccccgccctgagcggcaagctgaaaggccatgcccagcgcgtaccgaccaaaaccggctcagtgacagagctggtgtcggtgctggagaaaaaggtaactgcggatgaggtcaatcaagcgatgaagcaggcggccgagggcaatgaatcctttggctataccgaagaagagattgtctcttccgatatcatcggcagccatttcggttcaatctacgatgccacccagctggagattgtggaggccggcggcgtacagctggtgaaaaccgtcgcctggtacgacaacgaatacggttttgtcacccagctgatccgcgtgctggagaaatttgcccgctaa

SEQ ID NO: 228828 - DNA, 801 bp, Klebsiella pneumoniae
atggcagaacactttcccccgctgtcggcgacgacgctggcggcggcaaacctgaccggcggctggctggcgcaaaacgatctggcgacgctgaccgcgccgccggcggtggatgtggtggtgctggctggcaacgccgtgatccctaccatcgacgccgcctgccgactggcggtggagcaggaggttccgctgctgatcagcggcggcgtagggcactctaccggttttctgtatgaggcggtgcgcgaagatccgcgctaccgttcgctcgcggtggaggggcgtccggaagcgcatattctggctgatattgcgcatgacttctggcacattcctcgcccgcggctggtggtggaggatcggtcgaccaactgcggcgaaaacgcgcgctttactcgcacaatgctggagagtcgggggatcccccatcgtcgcgggatcgtcattcaggaccccaccatgcagcggcggacgatggccaccttcgcccgcgtctggcagggggcgacgacgccgccgcagtggctgagctttcccggctgcacgccggtgctggaacagaccgacggccagctggggttcgtgggcggcggggcggggctgtggccggtgacccgctacctggcgctgctgctcggcgaactgccgcgtctgcaggattcccctgaagggtacggtccacgggggaaagactttatcagccacgtgactttcccgccggagatcctcgacgcctggcgacagctgcgggaggatgaccggctcgccggggcgctgcaggcccgcatcctcggctga

SEQ ID NO: 228829 - DNA, 1326 bp, Klebsiella pneumoniae
atgagcaatccagcaagcaacactgcatccattctgcagaaaaacaagaaggtactgatcgcgagcctgaccggcagcgccatcgaatggttcgattattttctctatggcaccgccgccgcgctggtgtttaacaaaatcttctttccgatggtcgacccggtcattggtctgatcctctcctggctctccttttcgctcaccttttttatccgccccatcggcggagtcattttcgcccatatcggcgatcgcatcggtcgcaagaagacgctggtgctcaccctgtcgctgatgggcagcgccacggtggccattggcctgctgcccacctacgagatggtgggcctgtgggcgccggccctgctgattaccctgcgcattattcagggcatgggtatcggcggcgaatggggcggcgcgctgctgctggcctacgaatacgccccggaaaagcggaaaggctttttcggcagtattccccaggccggcgtgaccatcggcatgctgatggcaaccttcatcgtctcgctgatgaccctgttcgatgaggcgcagtttctcgcctggggctggcgcattccgttcctgctcagctccgtcctcgttttcctcggcctgtggatccgcaaagacatcgacgaaacgcccgcctttaagcaggtgaaacagtctggccaggtggcgaaggctccgctgcgcgagacgctcaaacaccactggcgggaagtgctgatcgccgcgggtctgaaagtggtggagaccgcccccttctatatcttctccacctttgtggtcagttacgccaccaccaccctgagctatcagaagtcgcaggcgctggaatccgtcaccctgggcgcgttggtggccaccgtgatgatcccgctgatggggctgctgtccgacaaggtgggccggcaaaaaatgtacaccctgagcgtggtgctgctggggctgtttatcgtcccgtggttcctgctgctcgacaccggcaccagctggggcattatgctggcgacgatcgttgccttcggcatcctgtgggcgccggtgaccgcggtgctgggcaccctgtgctcagagattttcagcgccaatgtgcgctataccgggatcaccctcggctaccagctgggcgccgcgctggccgggggcaccgcgccgcttatcgccaccggtctgctggcgaaatacgatggtgactggcgaccggtggccgtctacctgggcgtgacggtggcgatttcgctgctggcgatattctgcgccagccggatgaaatccgtccctggcgcggcgcgctcccgggcggaaagcgcctga

SEQ ID NO: 228830 - DNA, 1431 bp, Klebsiella pneumoniae
atgactgaacatcaacatcaggcgccatctgccgccggaggtgaaggcgcgtcacagcttaagcgcgggcttggcgcccgccatatccagatgattgccctcggcggcgccatcggcaccgggctgtttatgggggcggggcgcaacatcgccgtcgccggcacctcgatcctggttatctatgtactggtcgggttctttacctatatggtgatgcgggcgatgggggagctgctgctcactcgccatgactaccgctcgtttgccgactttgtcggcgagtatctcggaccgcaggccagcttttatctcggctggacctactggctgagctgggtggtgacctgcatcgccgacgtggtggtgtgcgggagctatatgcagtactggttccccgagctgtcggcgtggatgccggccctcagcatgctggctatcctgttcctgctcaacctgctgtcggtgaagatgtttggcgaggcggagttctggttcgccctgatcaaggtgatcaccattatcgccctgatcgtcaccggcggctggatgattgccaccggctggacctctccggacggcgtgacggcttccctgagccatctcaccgacccgacggcctttatgcctcacggtatcaccggctttttcgccggcttccagatagcgatcttctcctttaccggtatcgaactgctggggacgatgacggcggagacccgcgatccgcagcgcattttgcccaaggcgatcaatgcgctgccgctgcggattatcatcttctatctgctgtcgatggtggtgatcatcgctgtcgcctcctggccgggggtgtcggcggagaccagccccttcgtaacgctgtttgccaaagccgggctgcccgcggcggcggcggtgattaacttcgtggcgctgacctcggcgatgtcctcggccaacagcggggtcttctccagcacccgcatgctgtacggcctgtcggtggagaagcatgcgcactggcagttccgcattctgtcgcgcagcacccgcattccggtgcgcagcctgctgttctcctgcttctgcatgctgatcggtacgctgctgcttttcctggtgccgaatgtgatgaccctgttcaccatcgtctcgaccctggcggcgattatggtggtgttcagctgggggatgatcctcgcggcctatctggtttatcgccgtcagcgtccggacctgcatgccggttcgatctttaagatgccctttggcgtggcgatgagctgggtgagcctgctgtttttcgccttcgccatcttcatcatgatctttgacccggacacgctgctggcgctgctggcttctccgctgtggtttatcgcgctgtgggccttctggaagctgaagcagcggcgcgaagggcagcttcagctggacaatcagagcgcctga

SEQ ID NO: 228831 - DNA, 996 bp, Klebsiella pneumoniae
atggagcatctggttaacgatttactgcactgccgcctgcaggcgtggacctttccggcggacatcgaggcccgctggctgggcgagggcatcctgcagttgctgccggccacgccgtggcgtcaggcgacgatcctctccgctggcgtccatggcaatgagaccgcgccgaccgagctgctgctgcagctgactcacgatctgagccaggggcggcagccgctcacccaggcgctgctgatcgtttttggtaacctgccggcgatccgcgccgcgcgtcgctatctgcacaacgacctcaatcgcctgttcggcggccgccatctggcggtcaccccgggcaatgagtcgcggcgggcttttgctctcgagcaggcggtgcaggccttctatcgcgccgccgatgcggcggggccggtcagccgtagtcatctcgatatgcataccgccattcgcgggtcgctgtatcgccagtttgcgctgctcccggcccacgaggaggatttttcgcccggtttctatcagctgctgcaggccagcgggatggacgccatcgtgcgccataccgaagcgggcgggaccttcacccacttcacctgcgaaaagttcgccgcgcaaagcgccacccttgagctgggaaaagtgatgccgttcggcgccaacgatcttagcctgttcgccgccgccgacgcggcgatccgggcctggatttctgacgcgccgctgccggcgcgcgataaagcgccggtggattacttcctggtcgaggagagcatcatcaagcgcgaaggggaatttacgctcaatctggcggccaacgtcgagaacttcaccgcgctcccggcagggtatgagatcgcccgccaggcagagaaacggtgggtggtgcaggcccgggccccctatatcctctttcccaatgccggggtcgctaccggccagcgcgccgggctgctgctgcgcgccgcggcgcttcacctcccgcaaccagcctga

SEQ ID NO: 228832 - DNA, 1341 bp, Klebsiella pneumoniae
atgtctggttttgaagctaactttgatggcctggtcggcccgacgcaccactatgccggactctccgtcggcaatgaagcctcgcaaaataaccgcgatggtctctctaaccctaaaaaggcggcgctgcaggggctgtataaaatgaaagcccttgccgatcgcggattcgtgcaggggattctgccgccgcagccgcggccgaacctgcgtctgctgcgcgacctgggattcgagggcagcgatgagcaggtcatccgccaggcggcccaggcggcgccgcagctgctctccgccttcagctccgcctcgtcgatgtggactgctaacgcggcgaccgtttcgccgtcggcggatagcgccgatggcaaagttcatttcaccgtcgccaacctgaacaataagctgcaccgcatgcaggaggcgcccaccacctcggcgatcctgcgcgccaccttcgccgatccgcgctacttcgcccaccacgcggcgctgccgcagcatggcgacctcggcgacgaaggtgcggccaaccataaccgcttctgtcgggagtatgaccggcagggggtgcagctgtttgtctacggtcgacgcgccagcggcgggatcgccccggtgaagtatccggcgcggcagaccctggaggccagcgaagcagtggctcgcctgcatcagctggatccgcgctacacggtgtttgcccagcaggcgccgcaggctatcgatcgcggcgtgtttcataacgacgttatcgcggtcagcaatcgccatgtgctgttccaccatcagcaggcgtttgtcgatcagtcgacagtattggcgacgctgcgggcaaaaagcgacagtctcgatattccgtttaccagcgtggaagtgccggacgagcgggtgtcgctcgatgacgcggtggcctcctatctgttcaacagccagctgctgagcaaacccgacggcaagatgctgattgtggtgccagaggagtgccgccagcgggaaaacgtctggcgttacctgagcgatctcgcggccgacagcgcgtcgccgatcgatgaagtggcggtttttgacctgcgggaaagcatgcgcaacggcggcggcccggcctgcctgcggctgcgggtggtgctcaacgagtctgaacgtaaggcggtcaacgcccacagcctgatgaacgacgaacgttaccagcagctgacggcgtgggtggaaaaacattaccgtgaccggctgcacgcccgcgatctggcagacccgcagctgctgcgcgaggtttatcaggcgctggatgagctgacgcagatcctgcgtctgggcgctgtctatgattttcagcgttaa

SEQ ID NO: 228833 - DNA, 1467 bp, Klebsiella pneumoniae
atggcggtaaaagcacagttcatagccgggcagtggcagccgggcagcggcgcaacgatgagtaaactggccccggaggatcagtctctgctgtggcaggcggccagcgcggggggcgacgacgtccaggcggcctgcgccgcggcgcgcgccgcgttttatccctggtcgcaccgcccgctggccgagcgtattgacgtcgtacagcgtttcgccgcgctgctggagacgcataaagaggcgctggcgaccctgatttcccgggagaccagcaagccgctgtgggagacccgcaccgaagtgcaggcgatgatcggcaaagccgccatctccatcgaggcctatcaccagcggacgggctttcatgagtcgacgctgccggacggtaaagcgctgctgcgccacaagccgcacggcgtgatggcggtcttcggcccttacaacttcccgggccacctgcccaacgggcatatcattccggcgctgatcgccgggaatactatcgtatttaaacccagcgagctgacgccggccactgcggaactgacggtccagctgtggcagcaggcgggcgtccccgacggggtgattaacctgctgcagggcgggaaagccaccggccaggcgctgctggaaaaccgcgatatcgacggcgtgctgttcaccggcagcgcagcggcgggtttccacttccatcgctacttcggcggccagccggagaagatgctggccctcgaaatgggcggcaacaacgcgctgatcgtggctgatgtggccgatgttgatgcggcgctgcatgtgattatccagtcggcgtttatctccgccggacagcgctgcacctgcgcgcgccggctgattgttcagcgcggcgagcagggggatgcgctgctgcggcggctggtggaggccagcgcgcagatccgcgccgggaaatgggatgaccagccggcgccgtttatgggtggcgtgatttcccttgaggcggcgcagaacatgctggcggctcagcagaaactggagggacttggcggcaaggtgctgctgcgcctgcgccagcccgacccgcactccacggtgctgaccccggggatcgtcgacgtcaccggtatcgaggtgccggatgaagagtactttggcccgctgctgacggttatccgttacgacgacttcccggaggcgattcgccacgccaaccagacccgctatggcctggccgtggggctgatctccagcgatgcggcacagtttgaccagctggcggacgaggcgcgcgccgggatcgtcaactggaacaagccgctgaccggcgcttccagtaaagcgccgtttggcggggtgggcgcctccggtaaccaccgcgcggcagcgtggtacgccgccgattactgtgcctggccgatggcctctctggtcagcgacacgctgacgcttccggcgaacgtatcgccgggcctgccattctga

SEQ ID NO: 228834 - DNA, 1023 bp, Klebsiella pneumoniae
atgctatttcgtcccgtacgggaaaacgatcttgacgacatcgtccgccttgccgcgcgggcgggggtcggcatgacctccttaccccatgatgccgggcgcctggccgcccggatccgccgcagcattgacactttcgccggcgcgctgccgcgcggccagcaaggctttctgtttgtgctggaagacaccacgctgtcgcgggtggtgggggtcagcgccattgaggtggcggtaggcctggacgagccgttttacaattttcgcattcagaaaacggtccgcgcctcgaaagcgctgggggtctacaagccccaggagctgctcaatctgagctatgaccacaccggccacagcgagctgtgtacgctgtttctcgaccccgagtatcagcgcaaccgcaacggtctgctgctctccaaagcgcggtttttgtttatcgccgccttccgcgagtggttttcgccgcacctgtttgccgaactgcgcggctgcagcgatgagcaagggcagtcgccgttctgggatgcgctaggccatcacttcttcgagatcccgttcgccgatgccgaccggctgaccggcaccggcatgaaaacctttattgccgagctgatgccggcgtacccgatctatatctcgctgctgccggagaatgcccgtcaggtcatcggccaggtgcaccccaacaccgcccccgcgcgggcgatcctcgagaaagaggggttcagctggcgcggctcggtggatattttcgatgccggtccggtgctggaggcggagaccgatcagatccgcgccgtgcgcgactgccagtgcctgccggctcagcagttggcgggcacgctgtcggtgccgacgctcgtcgccaacggtcagttcgacaattttcgggcgctgctggtggcccacgaagagcaggtctcactggacgccgccgcgctggatgcgctgcaggtcactgaaaccgaccgcgtttatacggtaaccctgaacccagaggaaaacagatcatggcggtaa

SEQ ID NO: 228835 - DNA, 1206 bp, Klebsiella pneumoniae
atgtcaggcagcatgactcgcgaagattttgacgcttacctggttccctgttttgcccccgcgccgtttattccggtgagggcggcgggctcccgcgtctgggaccagcaggggaaagagtatattgatatggcgggcggcatcgcagtgaacgccctgggccatgctcacccggcgctggcggaggccctgcaggggcaactggcgaaactgtggcatatcggcaatggctataccaacgaaccggtgctgcagctggcgaaaaccctcgtgcagtccacctttgccgacaaggtgttcttctgcaactccggcgccgaagcgaacgaggcggcccttaagctggcgcggaaatatgcccacgataagttcggcggtgaaaaaagcgaaatcatcgccttcaaccacgccttccatggccggacgctgttcaccgtctccgtcggcggccagccgaaatattccagcgattatgcgccgctgccgcagggcattacccatctgccctataacgatatcgaggcggtgactgcggcgatctcctcgcgcacctgcacggtgattgtcgagccgattatcggcgaaggcggggtgatcccggcggacccggcgttcctccaggcgctgcgcgccctttgcgatcgccatcatgccaccctgatatttgatgaggtgcagaccggcgccgggcgtaccggccatctctacgcctaccagcattacaacgtcgtcccggacatcctcaccagcgccaaagggctggggggcggcttcccgatcggcgcgatgctggcgaaagaagcctgggcgcaggtcttccagccaggcacccatggcaccaccttcggcggcaacccgctggcggcgaccgtcgccaacgccgtgctggcccatctggatgcgccgctgctggcgggcgtcggcgagcgccatgcgctgatcgtcgaccagctgaatgccctctctgcccgttacgatgcgtttagcgccgtgcgcggcgccggtctgctgatcggcgccgagctggcgggaccgctgcgcgggaaggccaaaaccctgaccaacctggcggcggaagagggtgtgatcgccctgattgccggtccggacgtgctgcgcttcgcgccggcgctcaatatcccgctggcagatattgcggaagccttcgtgcgcctcgatcgcgccgttgcccgcttaacccgctaa

SEQ ID NO: 228836 - DNA, 1275 bp, Klebsiella pneumoniae
atggaaaagttatcttacgcatctgaaagtagtacatctccatggaccacctacctgcgccagatcgaccgtgtcgcgccttatctcggcgatcttgcctactgggtggaaaccctgcgccatccgaagcgtgcgctgatcgtcgacatccctgtgcagatggacgacggcaccattcgccacttcgagggctatcgcgttcagcacaatctttcgcgtggaccgggtaaaggtggtgttcgctaccatccggatgtcgatcttaacgaagtcatggcactttctgcctggatgaccattaagtgcgccgcggtcaatattccttacggcggagccaaaggcggcatccgcgtcgaccccttctcgctgtcggaaggtgaactggaacgcctgactcgccgctacaccagcgaaatcggcattatcatcgggccgcagaaagatattccggcgccggacgttggcaccaacggcaaagtgatggcgtggatgatggacacctactccatgaaccatggcaccaccatcaccggcgtggtcaccggcaaaccgatccacctcggcggctccctcggtcgtgaaaaagccaccggacgcggcgtgttcgtcaccggccgggaagtggcccgtcgcgccggcatcgaaattgaaggcgctaaagtggcgctgcagggctttggtaacgtcggtagcgaagcggcgcgcctgttcgccggcgtcggcgcccgtatcgtggttattcaggatcacaccgccaccctgtacaacgaaggcggaattgatatggccgccctcaccgcctggcaggcggagaaaaagcagatcgcgggtttcccgggcgcccaggagattgataaagaggctttctggaccaccccaatggacatcctgatcccggcggcgctggaagggcaaatcacccgcgagcgcgctgagaagctgacctgcaaactggtgctggaaggggccaacggcccaacctatccggaagcggacgatgtgctggccgagcgcggggtgatcgtggtgccggacgtgatctgtaacgccggcggggtgaccgtcagctactttgagtgggtgcaggacatggccagcttcttctggagcgaagaggagatcaacgccaagatggaccgcatcatgaccgacgccatcattcacgtctgcgataaagcggccgagaaagaatgtacgctgcgtaccgccgcctatatcgtagcctgcgagcgcatcctgatggcgcgtaaagaccgcggcatctacccgggctga

SEQ ID NO: 228837 - DNA, 654 bp, Klebsiella pneumoniae
atgagcatcgccttttttgatgtggatgaaacgctgataaccggcaaaagtatgttcctgtttctgcaccgctatgccgaggaatatccgctgcagtgcggtttgacggccgcggcgattgtccgccagcttcaggcgcttagcgaagcgggtcaaccgcgggaagcgatcaaccgctactattactcgctgtttcgccacgagtcgcgcccccgggtgcgggtggtcgccgagcgtctgtatcgcgaaggcggatatggttttcaccacgaggtggtggcgcgcctcaggcagcatcaggcgcggggggatgacgtggtgtttgtctccgggtcgatgaccgacattctctggccggcgatggcggcgctgggggtggaacatgccctgtgctcggagccggtggtggtggatgaccgctataccggcgagctctggcgaaccgccatcggcgaacacaaggcgacgcatgctcaacgctacgcgcagaaacagggccagccgctggcggcgtgctacgcctttggcgatcatatctcggatctgccgctgctcaccgtggttggtcacccctgcgcggtgaatccctgtccgggtctgctggcggaggcgcagcatcggggatggccagtgctgtggtccaccgtcggctga

SEQ ID NO: 228838 - DNA, 786 bp, Klebsiella pneumoniae
atggaaaaattaattgtggtgggtgagaaatttaccgattttgcccggcggcatgagaatgtgctgacggttaatgagtttgagcgatttgtctggagcggcgagctggccggcgtcgataaaatcgttattggtcagggggtacagctcgacgacatctcccgcaccatctgcattattcgtcagcactatccggataaaatccgccagatcgtcaatctgcaggatctctattatcaaaacaaccgagatcatcagcggctggtacataaacgtaaaaaagcgaatatcctcatcacctcgccggaaaaacgcgatgaggatagctattgcgcgcgcctgatcctgcaggatgcctcggagttactctgcgaccaccagaccgggcaacatattcaggggatggtgctgatcgaggcggcgcggcagaccatcatcgccacctcggaaaaattcctgctggcggaggccggcgtggcaatggcggagaagtactttaccctgagctcgctgcaggtggccttttcctgctttgtttttccgctgccggtgaccatcgtcctcaatgtggtgtcacgcaaaagttcagcccatggccgcttcacctgcgaatgctcggtggggtttgaccagaccggcacccgcaaagcggaagttggctttagcttcagcgtctatgaccttaactacatcactcgcaaagagtgcgagcaggcggcgcagtgccatcaacattatctggtcagtattgagcagggggacggggatgagcatcgccttttttga

SEQ ID NO: 228839 - DNA, 1206 bp, Klebsiella pneumoniae
atgaacaaagtctatatcgtcgcggcctgccgtacgccggtggggcgctttcttggtgccctgaaaacggtctccgcggtggagctggcagcgctcaccgtcaggcacaacctgcagcaggccggcattgacccggcgtggatcgatgaggtgatctgcggctgcgtcctcgccgccgggcagggaatgggaccggcgcgtcaggttgcgctgcgggcagggatcccggtgcaaacgccggcttacaccctgaatatgatctgcggtagcggcatgaaaagcatgaccgaaggggcgatccatatccagagcggttatgccgacctggtggtcgccggcggaatggaaaatatgagtcaggcgccgtttttgctgcagggagagataaggggcgggatgaaattcggcgcattcagcagtgaggatgtgatccagcacgacgggttaaccgatccgctgctgcagatcccgatgggggaaacggcagaggccatcgccgcgcaggagcagatctcgcgcgcggcgcaggaccggtatgcgctggagagccatcaaaaagcctccgtcgccagccgtgccggctattttgccgatgagattgtgccggtgacggtaagcgcgaagcggggcgtcagcacggtccgcgaggatgagccgatccgccatgatcttagcgccgagcagctggcggcgctgaaacctgcttttcgcgctgacggcagcgtcacggcgggcaacgcctccgggctgaacgatggcgccgcgtcggtgatcctcgcttcggcgcgcgccgttgcccgctatggcctgcagccgctggcggagatcgtctcctttggcgaaggcggcgtcgatccgtccttgatggggctcggcccactgccggcgatagcgtgcgccctgcgccgcggtggttttcagctcagcgatatggcccggctggagattaacgaagcctttgccgcgcaggtattgggggtggtcaggggactggccagagagcatcagatgacggaggaggagattgcttcccgcctgaacgtccacggcggcgcgatcgccctcggtcacccgctgggcagttccgggacgcggatcgtggtcagtctggtgcacgcgctgcgccgggagaatcaaccgaccggcctggcgtcgctgtgcatcggcggcgggatggggattgcattactggtgaaaacgatctga

SEQ ID NO: 228840 - DNA, 1485 bp, Klebsiella pneumoniae
gtgaaaaaagtactcattgttggcgccggcccggtagggttaatcattggctgctatctgaataagtatggaattgattttgatatcattgataaaaatacccacagcaccacctggtccaaagcgctgagcgtcagtccggcgaccattaaagccttccacggcttaggccttgccggggaactgatcgcccagggaaaacaggtgcagtcagtctacgcttactataaaaaccgcaaatttctgcatattgataaccgccgactcgccacctgctatcccttccatgtcagtatcccgcagccgcggacggagaagatcctcgaaacggcattagccgccgccgggcgggaggtaaaacgcgggcaccagctggtctcctggcggcgggagggggagcgctatcacgtctccctgctcgacgatgcccgtcgggcctgttccgccgcttatgactatattatcggcgccgacggcgcggccagcaccgtccgggagctggccgggatcggctttagcggtcatgactatccgctgcattttgtgatggcggatgtgcagttcgaccccgcggcggcgctcccggggacctcctaccatattgatgagcaaggctttctgattttcctgcccatgccggacaatcaggtcaggattgtgattaaaaaagccgggcgcttgccgtcgccgcgtccggtgccggacctgcaggagattaacgccgcgctggcgcgctactgccctcaggtgccgccggcgcagaggctcacctggtcctccagcgccaatttctataaccgcatcgccgatgacaatctgcagcaccatattatgctggcgggagatgccttccacctgttcagtcccattggcgggcaggggatgaacaccggcgtccaggatgcggtgaacctcgcctggaagctggctttctgtctgcacggcgtggccactgaccgactgccggcgtcctatcgcacccagcgcttcgccgcggtgagcggtgtgctgcgctccaccgactatgataccggcctgatcgccggtctggtgccgagaaatcatatcgatggggtctactttccggagttttgcaaccgtcactactatcgtcaccagctgccgctgcagtacgccggtttcaccgcgacgcaggcgcaggagccggacggcctggcagggcaccatgttccctggtacgtttttgcctcgccgcaggcgacgtttcgcaacagctatgacgccttcgccagcggtaaggtggtgatcttttccgcccgcgccgcctgtcctcctttgtcccgcctgaagcaggccggctggtttatgttctgccccctcgagccggcggacaaggcgtttcttgaggcgctacagatcggtcccgatgactacgcggtggttaatcccgatggctatgtgggctttaccggcagcgaagccgggacgcggcagtatctttcctcgctctacgtaatggaataa

SEQ ID NO: 228841 - DNA, 1065 bp, Klebsiella pneumoniae
atgaagtatcggtatttaggttccaccgggctgtcggtttcggagctctgtttcggcgccatgacgtttggcgagaaaggggcctttctcggcgcgccggggcgcaactggtcggaattcggcgtggtgcctgagcagacggcctacgatctggtgtacaaagcgctggacgccgggattaacttttttgataccgcggactgttataagaacggccagggcgaagagctgctcggcaacgcgctgaagggaaaacgccagcaggtgattatcggcacgaaagggcgctggcaaaccgaccccaacccgaatgcgctgggggcgtcgcgctaccatatcatcaatgccgtcgaggccagcctgcagcggctgaagaccgattatatcgatatctatcaccttcacgggttcgatccgcgcaccgcactggaggataccctgcgcacgctggataccctgatccgcgccgggaaaattcgctatatcggggtctccaactacgcggcctggcagctggcgaaggcgctggggatctcggagcgccttgggctggagaaattctgcgtctatcagggctattacaatatcgccgcgcgtgaactggagcatgagattatcccgctcagcgtcgatcagaacgtcggcatcaccgtctggagcccgctggccgggggctttctcaccggcaaatacccgcgcaatcaggcgtttcccgaaggtagtcgcctggcgaacgccacgccgttcgaatccgcgccgatcgccaaccgcgagcaggcctggcagaccctggaggtgatgcaggagattgcccgccagcgcaacgccagcgtcgcgcaggtggcgctcaactggctgcgtacccgtccggggatcgcttcgctggtgatcggcgcgaccaaactggcccaactggaagataacctggcggcgctgaactggacgctgagcgacgaggagacggcgatcctcaacagcgtgagcgagaaagagaaaccatacccctactggcatatctgcaatgtcgccggcgatcgtcgtctggccgatgatatctatccctaa

SEQ ID NO: 228842 - DNA, 1188 bp, Klebsiella pneumoniae
atgactattgctgtttcccgtccggcgggattgcctgcggcggtgtatgcgctttccgtgggttcatttggtattggcaccaccgaatttgtgattatgggtttattactcgatgtggcccatgattttcatatatccattactcttgccgcctggtctattaccgcttatgcctgtggggtggtgattggcgcgccgctgcttacgccgctattaagccgttatcgcaaaaaaccggcgctgttatttttgatgatcttattttccattggaaatttaggctgcgcgatcgccggtaatatgaccatgctaattattgccagggtaataaccgctttcgctcacgcttcgtttttcggaataagctcagtctatgccgcggagctggcgccggtagataaacgagcttcggcggtctccgccgtgtttctcggcgccaccctggccaatattctgggcgtgccgctcggcgcctgggtggggcagtaccttggctggcgctataccttctatatggtcacgctgatcggcgttctctccgccctggcagtcattgccctggtgcctggccgtcaggcgcaaccgtcggcccagagccggatccgtgatgagctaaaggtgctccgccatcccgcggtgctgcgcagcctgctgatcactgccctcgggttctccggcgtcttcgccgccttcacctacatcgcgccgatgctgaaaaccgtcaccgggatgagcgaacaccttattccgccggtgctgatgctgttcggcgttgggatggtcgccgggaatcatcttggcggccgactgaccgacggcggcgtccgccgggcgctgctgctgactctcgctttgctgagcgtcgtcctgtgccttttcccgttggctattcagacgctgcctggtgcctgcgcggcggtgtttttgctgggggcggcgatgttctccaccattccgccgctgcagatgcaggcgctggacagcagtgagagcggtaaaagcatggtctcctcgtgcaatatcgccgcctttaacctcggcaatgccggcggcgcctggtttggcgggctgctgctcgcctctggcgtctctctatctcacattcctctggccggtgcttgcctgaccgccagcggattggttatcgctagtgtgacgttgtcacctttaaaaggaagtcaagcatga

SEQ ID NO: 228843 - DNA, 999 bp, Klebsiella pneumoniae
gtgaaaacacgttatctcggaaaagagaagttccaggtttccgcattgggtctcgggtgtatgggaatgagttttgcctatggcggcgctgaggagtcgcaggcgataaataccatccatgccgcagtggacatgggcgtgaccttcctcgattccgccgaagtgtatgggccttttgacaatgaagtccttgtcgggaaagcgattaaaggcattcgcgataaggtgcagattgccaccaaatttggctttcgtattctgccgaccggccaggggctggagcggatggccggcgtcgacagccgtccggaacatattcgcgaggcggtggaagggtcgctgaagcggctgaatatcgagaccatcgatctgctctatcagcaccgcgtcgatcccgcggtgccggtggaagaggtggtgggaaccatggccgacctggttaaagagggtaaaattcgccacatcgggctgtcggaagtgtcagcccagacgctgcgccgggcctgcaaggtgcatcagattaccgcggtgcagacggaatactcgctgtggacccgtgagccggaaggcggcatcctcaaggcctgccgcgagctgggggtgggctttgtcccttacagcccgctggggcgcggcttcctgacgggcaaaatcaccgaccccagcctcttcgctgccgatgattttcgtcgcaatctgccgcgcttccaggccgaaaccatgcgcaaaaaccagcagttgctcgaccgtctgcagcaggtcgccggccgctacgatgccaccctggcgcagatggctctcgcctgggtgatgagcaaaggcgaagatatcgtgccgatccccggggcacgaaaaatcaatcacctgcgcgataatgccgctgcggccgatattatgctctcgcctgaagatattctcaccatcgatcatattttcgctgccgaaaacgtcgccggcttacgctataaccagggcgactttaatttaatcgataaataa

SEQ ID NO: 228844 - DNA, 915 bp, Klebsiella pneumoniae
atgaaaacgttgcctgatttgcaacaaattgaaatattaatactcatagtgaaacatggtagttttcgacaagctgccagagcattaaatctttcaccgccggccctcaccagcgctattaatcatctggaagaaaaattaggcgtgcgcctgctcaatcgctcgacgcgcagtttgtctttaaccgccgtgggtgaggaatttcttaataatatgacgccggtggtgaatgattatcgccgggtagtcgacagtctgaattatcaccgtctgaccccggaaggggtggtgaaagtcaatttaccgcgcattgttctcgaccttttctttcagcgctattttattgcttttaaaaccgcctatccagacgtgacgctggagctgtttaccaccgatcggaaagtgaatattatcgagtccggttttgacgctggcattcgttattcccgggatgtgcccaaagatatgattgccatcccctttggcgagaaactgtcgctgatcccggtagccagcccggactatctccgccaggccggagcgcccgacaccccgcagtcgctgatcaattttcgctgcatcaaccgatgttttcccagcggcgaaaagtaccggtgggagtttatcagccccgacggcgagccaggcgaagtcgcagtcaaaggcgatctggtcgtcgattccgatacggcgatgatccaggcggcggagagcggactggggatcgcctttgtctatcagtcgctggtctccgcgcaactgaacgccggcagcctgatccgcttattgcccagctaccgctacccggcggatcatttctgcgtctactatccgagtcgcaaacatattcccgcgcccctgcgcgcttttatcacctgggtgatggcgcagaataagagcatcctccatgagtaa

SEQ ID NO: 228845 - DNA, 432 bp, Klebsiella pneumoniae
atggaccatcgacagcttaacttctcccatcttttatatctgaccgcccatcactggcggctggcggttaatcgtcggctgaaaaacctcggcctcagccaggccagctgggtagcggtcgccgctatcgcccgccatcaccagccgctgtcgcaaagcgaactggcgcaggagctgggagtggagagcgcgacaattgtgccgctgatcaaccgcctggtgaccctcggcctggtggagcgcgtcaccaccgaccgcgataaacgcaagcggctgctggtggtcaccgaccaggggcaggccctcttcaagcaggtcaaaacggtggcggacgatctgcgtgaagagatcctgacggcgattactccgcaggagcgggaacaaactcagcgggtgctggaaaagctgttgcgcgaagtggagaagaaataa

SEQ ID NO: 228846 - DNA, 1653 bp, Klebsiella pneumoniae
atgccccgtcgtcagagtaacccttacgccccccatgactgggcgccgcatgaaaaaccggccctgctcggctcgccatcgacgccgctgcacagcccggcgaagcgcctggcctacggggtggtcgggctgctggtgtgcctcaccggcgcgctgggcaacgcggtagtcaccgccaatctgcagctgctgcagggcaccttcgccgcctggtcgacggagatcgcctggctgccggcggtgtatgtcatgaccaacgtctccatcaacctgctgctggtgaaatttcgtcagcagttcgggctgcgcgcctttaccgaaggctttctggtgctctatgtgctggtcaccttcttccacctgttcgtcaacgatctcagctcggcgatgatggtccgcgccgcccacggcatggtggccgcggcgctcagctcgctggggatctactatcaggtgcaggcctggcccgcacgccaccgccttaaagggctgaccatcggtatcactggctcgtcgctggccattccgctggcgcgcctcttttccaccgagctgctgcagaccgacgaatggcgcgggctctacttctttgaactggggctggcgctggtgtcgctggcctgcgtcatcgcgctgaagctgccgccgagcgatcgtaaaaaggtgttcgagaagaaggattttatcaccttcttcctgctggcccccggcatggcgctggtgtgcgcggtgctgtcgctggggcggctcgagtggtggttcgaagcgccgtggatcggctggtcgctggcggcggcggtggtgctgatcgtcgctgccatcgccttcgagcataaccgcagcaatcccctgctcaataccaaatggctctccagcggcagtatcctgcgcctcggtctgattatgctgctgatccgcatcgtgctggcggagcagaataccggggtgatcggctggctgcagtacgttggcctgcaaaacgaacagatgaccaaccttgcgtggtcaattttcgccggcattctgtgcgggatcattgccagctgcctgacgcttaacccgcagaagctctactggccgaccgccaccgccctggcgctgatcatggtggcctcgctgctcgacagtcagtccaacgccctcacccgcccggaacaactgatgttcagccagtttttgcttggcttcggcagcgccttctttctggcgccggcgatgctcgccggtattggcggggtgttcgccgatccgcgcaacctggtcagcttctcggtgctgttcggcatgagccagaacatcggcggcctgctgggatcggcgatcctcggtactttccagacctggcgggagaaatttcactccagtcagctggcggatcagatcaccaccctcaacccgctgatcgtcgagcgtctgcagcagtacagccagatgtaccagagccagatcggcgacagcacgctgcttaacgtccaggccacgacgctcctgcaaaacgccgcgacgctgcaggccaatattctcgcctggaatgatacctatctgctgacggcggcgatctccgccgggacgttagtgtgggttttctggcgcttaattcgcttacgactaaccgcccgtatcgcattaaaacgcgccactggcagcaaataa

SEQ ID NO: 228847 - DNA, 1086 bp, Klebsiella pneumoniae
atgagtcagcaggatgcggccaaacaacaggccaatacccgaaacaacattcgcgtggtctccatttttaccgccgcggcgataggcctcgtcggcgtactggtgatcctctatgcctggcagctaccgccgttcacccggcatagccagtttaccgacaacgcctacgtgcgcgggcagaccacctttatcagcccacaggtcaacggctacatcactgccgtcaacgtcaaggatttcgccatcgttcagccgggcgaggtactgttccagatagacgatcgcatctataagcagcgggtgcaccaggcccaggccaccctggcgatgaaggaggcggcgctgcgcaacaacctgcagcagcgcaaaagcgccgaggcgacgatcgccaaaaacgaagccgcgctgcaaaacgcccgcgcgcagaatctgaaaatccaggccgatttaaaaagggtgcaggaactgaccgccgatggctcgctgtcgatccgcgagcgtgattccgcccgcgccagcgccgcccagggggcagcggatattgaacaggcgaaagcggcgctggagatgtcgcgccaggatctcgaatcgaccatcgtcaatcgcgattcgctggaggccgacgtggccagcgccaaagccgccctcgaactggcgcagattgacctgcagaatacgcagatcatcgcccccaccggcggccagctggggcagatttcggtgcgtcttggcgcttacgtcagcgccggaacccatctgacttcgctggtcccgccgcagcactgggtgatcgccaacctgaaagagacccagctggccgatgtgcgtatcggccagccggttaccttcaccgttgacgcgctcaacggcgagaccttccacggcaaggtgcagagtatctccccggcgaccggggtggagttcagcgctatttcgccggacaacgctaccggcaacttcgtcaagatcgcccagcgcatcccggtgcgcatcacggttaacgaggggcagcgcaacagcgagcgcctgcgccccggcatgtcggtgcaggtgaccattgatacccgcgcggagaagcagccatga

SEQ ID NO: 228848 - DNA, 1371 bp, Klebsiella pneumoniae
atgatccgcccggtcacccttgtcatcgtcctggcgctggtcggctgtcagtccgccgatgtccagcgcgcgcagccgaccctgaccatccctgccgcctggcgggccgacgttggccctgccagcccggtggaaggcgtatggtggcgcaattttcatgacagtgcgctgaatcagtatgtcgaccgggcgctgcgctataacagcgatgtgctgatcgcccgcgagcgggtcaatgagtatcaggcgcgggcgtatgccgccgacagcagcctttttccctcgctggatgccagcctgaccggcacccgcgcccgcgcgcagtccgccgccaccggcctgccgatccacagcacgctgtacaaaggcggcctgaccgccagctatgatgtcgatatctggggcgcgaaccgcagcgcggccagcgccgccggggccagcctcgaggcgcagaaagccgctgccgccgcggccaatttgagcgtcgccgcctcggtggccgtgggctacgtgacgctgctgtcgctggatgagcagctgcgggtcacgcagcagacgctccaatcacgggaagacgcctggcggctggccaaacgtcagtttgaaaccgggtatacctcgcgccttgagctgatgcaggcggattcggagctgcgctcaacgcgggcgcagatcccgccgctgcagcaccagattgcgcagcaggaaaacgccctcagcgtgctgctgggggataaccccggcgcggtaaaacgcggcgaattcgccgggctcaccccgctgcgtctgccctcgcagttgccgtccaccctactcaaccgccgcccggatatcgtacaggcccagcgtcagctggtagccgccgatgccaccctggcctcgtcgcaggcgcagctgctgccgtctatcaacctgaccgccaccggcagcctgcaggaccggacgctgccggatctgctcgacgatccgctgcgactgtggagcattggcggtagcatcctggcgccgctgcttaaccgtcaggcgttaaacgcccaggtggatgtctccatggcccagcgcaaccaggcgctgtacagctatgagaaaacggtgcgcggcgcgttcgaagaggtcaatgacagccttgacgccattagccgctatggcgaacagttgaccgagctgcagggacaggtggcggtagcggaggaaacattgcgcattgcgcagaatcgctaccgtaacggctactcttcgtatctggatgtgcttgatgcccagcgaacgctgttctccacccagcttagcgtggtccaggtgaagaataacctgctgttggcgcagatcgatctgtaccgggcgctgggaggcggctggatgaacgcgtga

SEQ ID NO: 228849 - DNA, 660 bp, Klebsiella pneumoniae
atgcaacaacagtggtctgctgtcgataattacatgatttcttcgcttattcctgatgatgacgtgctgagacaggttctggaaaacaacaaacgcgccgggctacctgaacatgatgttgcggccaatcaggggcaatttctggcgctgttggtgcgcatgacccaggcgcggcggatccttgaaattggcacgctcggcgcctatagcgccatctggatggcgcgtgcgctgcccgccgacggaaagctgattaccctcgaggccgacccgacgcatgcgggggtggcgcgccagaatatccgcctcgccgggctaaacgagcgcattgagcttattgaaggacccgcgctgaacacgctggaaaatttcgaggatgtgcagccattcgacctgatctttattgatgccgataaacctaataatcctcactatctggagtgggcgctgcactattcccgccccgggacgctgatcgtgggcgataacgtggtgcgcgatggcgaggtgattaatgggcaaagcgatgacgcgcgtgtgcagggcgtgcgtcggtttatcgagatgatcggcgataacccgcggctcaccgccaccgcgctgcagacggtgggcattaagggatgggatggctttacgctggcgctggtgaatggctga

SEQ ID NO: 228850 - DNA, 777 bp, Klebsiella pneumoniae
atgctggcgctggctatccttgtgatggccgcgtgtaaacccttcgttgacgcttcctcctgcgatgaaacacagcgggcgatcaacgatgcgaacttttttattttgacctcccttccgccgctgaacggcgaagtgcagagcgtgcaaatcgtcggcagccagaataacgaatatggcgcccttcgtttcgcgcgatgccgccggctggcaagctatgagcgggcaaaaacccttaacacagcacatggctcaacgatcgtcagagataatgttcgctggcgaaatgataaaggatggatgcgggaatatatccggcagacccggagcgcgacgggaaatatcagcaagatggtgatgcgcgaacagttttataccgattctctcgggcggattgtgcgcgccgaaaatgtgtccgcgacgcagcaaccgcccaaagtcctgcatacgaccacctatcagtatgacgaccggcaccgcctggtccgtaaaacggtcaacggcggtatgatggtcatgcttgctgtcgattaccgctatacggatgggcgccttagccgcatggctgactcggactccacctcgacgctgcgttgggatgaaaaagggcgctggatatcccgggaaacgacctcaacgtataatggaccacgccaggcccgttgtttagggtgggatcccgaggggaactgtactgcggagtatggcgagcagcctgctgcaggggcaatgaaagatcagtctctgcactaccagtatacctattatcctcgatga

SEQ ID NO: 228851 - DNA, 3903 bp, Klebsiella pneumoniae
atgacagaacaacaaaaaatcaccttcccccagctttatcaacagctcgacggcctgatgctgcgcgacaaaacgcgctttgcccgccgtctgcacggcgtgaagaaggttaaaaatcctgaatcgcaacaggccatccttcaggagatggcgcaggagataagccaggcagccggtaaagtcctgctgcgcgaagcggcgcgtccggccatcacctatccggaaaatttgccggttagccagaaaaaacaagaaattctcgaggcggtacgcgatcaccaggtggtgattgtcgccggggagaccggttcgggtaaaaccacccagctgccaaaaatctgcatggagctgggccgcgggctgaaagggctaatcggccatacccagccgcgtcgtctggccgcgcgaaccgtcgccaaccgtatcgccgaggagctgcaaacggagccgggcggctgtatcggctataaggtccgctttagcgatcacgtcagcgacaacaccatggtcaagctgatgaccgacggtattctgctggcggagatccagcaggatcgcctgctgatgcagtacgacaccatcattatcgatgaagcgcacgagcgcagcctgaacattgacttcctgctcggctatctgaaagagctgctgccgcgccgtcctgacctgaaaatcatcatcacctcggcgaccatcgacccggaacgtttctcaaagcatttcaataatgcgccgattatcgaagtctccgggcggacttacccggtggaagtgcgctatcggccgatagtggaagaggcggacgataccgagcgcgatcagctgcaggcgatctttgatgccgtcgatgagctcgggcgcgaagggcccggcgatattctgatctttatgagcggcgagcgggagattcgcgataccgccgatgcgctgaataagctggatctgcgccataccgaagtgctgccgctgtacgctcgcttgtccaacagcgagcagaaccgcgtcttccagccgcacagtggacgacgcatcgtgctggcgaccaacgtggcggaaacctcgctgaccgtaccgggcattaagtacgttatcgatcccggtaccgcgcgtatcagccgctacagctaccgcaccaaggtgcagcgcctgccgatcgagccagtttcccaggcgtccgccaaccagcgtaaaggccgctgcggtcgcgtctcggaagggatctgtattcgtctttattcagaagacgatttcctgtcgcgaccggaatttaccgatccggaaattctgcgcaccaacctggcgtcggtcatcctgcagatgaccgccctgggcttaggcgatatcgccgccttcccgttcgttgaagcgccggataagcgcaacattcaggacggcgtgcgcctgctggaagagctgggcgccatcactaccgatgagcaggccaccgcctacaagctgaccccgatgggccgtcagcttagccagttgccggtagacccgcgtctggcgcggatggtgctggaggcgcagaagcacggctgcgtgcgagaagcgatgatcatcacctccgcgctgtcgattcaggatccgcgcgagcggccgatggacaaacagcaggcctctgacgagaaacaccgccgctttcacgataaagagtctgacttcctcgcctttgttaacctgtggaactatctcggcgaacagcagaaagccctgtcgtcgaatcagttccgccgtcagtgccgggtcgattttctgaactatctgcgcgtgcgcgagtggcaggatatctatacccagctgcgccaggtggtgaaggagcttggcctgccgatcaacagcgagccagcggaatatcgcgagatccataccgcgctgctgaccggtctgctgtcgcacatcggcatgaaggatgccgataaacaggagtttaccggggcgcgcaacgcccgcttttccattttcccggggtccggtctgtttaaaaagccgccgaagtggacgatggtggcggaactggtggagaccagccggctgtggggccgcattgccgcccgcattgagccggagtgggtggagccggtagcgcagcacctgatcaaacgctcatacagcgagccgcactgggagcgggcgcagggcgcggtgatggcgacggaaaaggtcaccgtctacggcctgccgatcgtaggcgcgcgtaaggtcaactacagccagatcgatccggcgctgtgccgcgagctgtttatccgccacgcgctggtggagggcgactggcaaacgcgccacgccttcttccgggagaacctgaagctgcgggcggaaatcgaagagctggagcataagtcgcgccgccgcgacattctggtggacgacgagaccctgttcgaattctacgaccagcgtatcagccacgacgtcatctccgcccgccacttcgacagctggtggaagcaggccagcaaagagacgccggatctgctcaactttgagaagagcatgctgattaaggaaggggcggagcaggttagcaagctggactatccgaacttctggcatcagggcaaccttaagctgcggcttagctatcagtttgagccgggcgccgacgccgacggcgtgacggtgcatattccgctgccgctgctgaaccaggtggaggaggccgggtttgaatggcagatccccggcctgcgtcgcgagctgattatcgcgctgataaaatcgctgccgaagccggtgcggcgcaattttgtcccggctcccaactatgcggaagcgtttcttggccgggcgacgccgcttgagctgccgctgctcgattccctggagcgcgagctgcgtaagatgaccggcgtgaccatcgaccgcgaagcctggcagtgggatcaggtgcccgatcacctgaaaatcactttccgggtggtggatgataaaaacaagaagctgcaggaagggcgctcgctgcaggcgctgaaagaggcgctgaagggcaaagttcaggagacgctgtcggcggtcgctgatgatggcatcgagcagagcgggctgcatatctggagctttggcaccctggcggaaagctatgaacagaagcgcggcaactataaggtgaaagcctggccggcgctggtggacgagcgcgacagcgtggccatcaagctgtttgataatccacaggaacagcagcaggccatgtggcgcggtctgcgtcgcctgctgctgcttaacattccgtcgccgattaagtatctgcacgagaaactgccgaacaaagccaagctcgggctctatttcaacccgtacggcaaagtgctggacctgattgacgactgcatctcctgcggcgtggataagcttatcgacgaggcgggcggtccggtatggacggaagagggcttcaaccagctgcacgataaagttcgcgccgagctcaacgagacggtggtggagatcgccaaacaggtcgagcagatcctcactgcggtgttcaatatcaacaaacggctgaaaggccgggtggatatgaccatggcgctggggctgtcggacatcaaagcgcagatggcggggctggtttaccgcggctttgtcaccggcaacggcttccgtcgtcttggcgatacgctgcgctacctgcaggcgattgaaaagcgcctggagaagatggctatcgatccgcaccgcgaccgcgcgcagatgctgaaaattgagagcgtgcagcaggcgtggcagcagtggctgaataagctaccgccgaaccgccgtgaggacgacgatgtccgggagatccgctggatgatcgaggagctgcgggtgagcttcttcgcccaacagctggggaccccgtaccccatctcggacaagcgtgtcctgcaggcgatggagcaggtgacgccgtaa

SEQ ID NO: 228852 - DNA, 606 bp, Klebsiella pneumoniae
atgagcaaagtattagttctgaaatccagtattctggcagggtactcacaatctggtcagctttccgactattttgttgaacaatggcaggaaaaacacccgggcgacgagatcaccgtgcgtgacctggccgctaatccgatcccggttctggatggtgaactggttggcgccctgcgtccgagcgacgcgccgctgactccgcgtcagcaggaagcgctggccctttccgacgagctgatcgctgaactgaaaggcaacgatgtgattgttatcgctgcgccgatgtacaacttcaacatcccgacgcagttgaaaaactatttcgacctggtggctcgcgccggcgtgaccttccgctacaccgaaaaagggccggaaggtctggtgaccggtaaacgcgcagtcgtcgtgaccagccgcggcggtatccataaagataccccgaccgacctggtcaccccgtacctgtccaccttcctcggcttcatcggcatcaccgacgtgaacttcgtgttcgccgaaggtatcgcttacggcccggaagtcgcggccaaagcgcagtctgacgcgaaagcggccatcgacagcgtggttgcagcctaa

SEQ ID NO: 228853 - DNA, 441 bp, Klebsiella pneumoniae
atggcagagaaattatccgctcactgtcactgcggtacggtggcctttaccgttgagctcagcgacggcttcaacaccgttcggcgctgtaactgttcatattgtcgaatgcgtggggcggtcgcggtctcttcgccgcgttcaggaatcgatgtggtacgcggcagggataagctcacagagtatcgctttaatacaggggaagccgtgcactttttctgctcggtatgcgggatctacacctttcatcaacggcgatcaaacccacagcagtatggggtgaatgtggcctgcattgacggcgtttcacctttcgattttccttgcgtggaagtcaacgacggcgtgaatcatccaaaagatggcggcggaggcgtggtggggtatttgcgctacgagaaaaagcaaaaatctcctcccgccggcagcgagaggagttaa

SEQ ID NO: 228854 - DNA, 597 bp, Klebsiella pneumoniae
atgccgatttatcagattgatggactgaccccggtggtgccggaggagagttacgtccacccgaccgcggtgttgattggcgacgtgatcctcggcaaaggggtctatgttgggcccaacgccagcctgcgcggcgattttggccgcatcgtggtcaaagacggggccaatatacaggacaactgcgtgatgcacggcttcccaggccaggatacggtggtggaagaggagggccatatcggccacggcgctattctgcacggctgcgtaattggccgcaacgcgctggtgggcatgagcgcggtgattatcgacggggcgactatcggcgaaaacagcattgtcggcgcctcggccttcgtcaaagccaacgccgagatgcccgccaaccatctgattatcggcagcccggcaaaagcgattcgcgtcctgagcgaacaggagctggcgtggaaaaagcacggtacccgtgaataccaggtgctggtggaacgctgtaagcagacgctgcaccaggttgagccattacgggaagtggaagacgggcgtaagcggctggagtttgatgaaaacctgcggccaaaatcctccacttga

SEQ ID NO: 228855 - DNA, 936 bp, Klebsiella pneumoniae
atgaatcagatgagtaaactcgacgcctttattcaacaagccgtgacggcgacgccgatcagcggcacgtcattgatcgcctcgctgtatggcgacgccttattacaacgcggtggggaagtgtggctgggcagcgtcgcggcgctgctggaaggattaggcttcggcgagcgcttcgtccgcaccgcgctgtttcgcctcaataaagaagagtggcttgatgtcgtccgtatcggccgccgcagcttctatcgtctgagtgacaaagggctgcgcctgacccgtcgtgcggaacataaaatttatcgggcgaacgccccggaatgggatggtacctggctgctgttgctctcagaaggcctggaaaaaaatgtgctggccgacgtcaaaaagcagctgctgtggcagggatttggcgcgctggcgccgagcctgttagcctcgccgtcgcaaaagctggcggatgtccagtcgctgctccacgaagcaggcgtcgccgaaaacgtcatctgttttgaagcccactcgccgctggcgctctcccgggcggcgctgcgcagccgggtagaggagtgctggcatctcaccgaacaaaacgagatgtatgaatcgttcatctcgctattccggccgatactgccgctgctccgtgactgcgaccccgcggagttaacgccggagcgcagctttcagatccagctcctgctgattcatttctatcgccgggtggtgctcaaagatccgctgctgccggaagagctgctgccggcgcactgggcggggcaaaccgcccgccagctgtgtatcaatatttaccaacgggtgagtcccggcgcgctggcgttcgtcagcgagaaaggtgaaagctcggtcggcgagcttcccgcgccgggcccgctctattatcagcgctttggcggtttgccgggcgcataa

SEQ ID NO: 228856 - DNA, 1317 bp, Klebsiella pneumoniae
atgataactactacaaaattagatccgattgaaaccgcctcgcgtgatgagctgcaggccctgcaaacccaacggctgaagtggaccctgaatcatgcgtataacaatgtgccgatgtatcgtcgcaaattcgacgccgccggcgtgcaccctgacgactttcgcgaactgagcgacctgaccaaattcccgtgcaccaccaaacaggatctgcgcgacaactatcccttcgataccttcgcggtgccgatggagcaggtggtgcgcattcacgcctcttccgggaccaccggcaaaccgacggtggtgggctacacgcagaacgatattgataactgggccaatatcgtcgcccgttcgctgcgcgccgccggcggcacggcgaaagataaaattcacgtcgcctacggctatggcctgttcaccggcggccttggcgcgcactacggcgcggaacgcttaggcgcgacggtgatcccgatgtccggcggacagaccgaaaaacaggcgcagctgatccgtgatttcaagccggatatgatcatggtgacgccgtcctactgtctgaatctgattgaagagctggagcgccagatgggcggcgatgcccgcggctgttcattacgcgtcggcgtctttggcgccgagccgtggaccctggcgatgcgcgcggagatcgagcgccggctggggatcaccgctctggacatatacggtctgtcggaagtgatggggccgggggtggcgatggagtgtctggagactgttgacggcccgaccatctgggaagaccacttcttcccggaaatcgttaacccggacgacggcacgccgctggccgatggtgaacacggcgaactgctgttcaccacgttgaccaaagaggcgctgccggtgatccgctatcgtacccgcgatctgacgcgcctgctgccgggcaccgcccgcaccatgcgccgtatggaccgcatcagcggacgcagcgacgatatgctgatcatccgcggggttaacgtcttcccgtcgcagctggaagaggagatccttaagtttgaacatctggcgccgcactaccagctggaggtcaatcgccgcggccatcttgattcgctggcggtgcgcgtggagctgaaagagagcgggctggcgctgagtcacgagcagcgctgccagatttgtcaccagttgcgccaccgcatcaagtcgatggtcgggatctccaccgatatcactatcgtcaactgcggcagcattccgcgctctgaaggcaaagcctgtcgggtatttgatctgcgtaaagcggtggtcagcggttaa

SEQ ID NO: 228857 - DNA, 1206 bp, Klebsiella pneumoniae
atgcgcgaggcctttatttgtgacgggatccgcacgccgattggccgctacggcggcgcgctggccagcgtgcgcgccgacgacctggcggcgatcccgctgcgggcgctgctgagccgcaaccccaggcttgacccgaccgcgatcgatgacgtgatttacggctgcgcgaatcaggcgggcgaagataaccgcaatgtggcgcatatggcgacgctgttggccggtttcccgcataccgtaccgggcaccacgattaaccgtctatgtgggtctggtctggatgcgatcggctttgccgccagagcgatcaaagccggcgatgccgatctgctgattgccggcggcgtagagtcgatgtcgcgcgcgccgtttgtgatggggaaggccagcgcgccgtatcagcgtcaggcggagctgtttgacaccaccattggctggcgttttgtgaacccgctcatggcgcaacacttcggaactgacagcatgccggaaacggccgagaatgtagctgaattgttaaatattagccgcgccgatcaggatgctttcgcctggcgcagccagcatcgcacggcgcaggcccagcgcgatggcattctggcgcaggagatcgtgccggtgcagattgtcggccggaaaggggcggtcagcgatgtgcgcgaggacgagcatccgcgcccggaaaccacgcttgagcagctggcgcaactgaaagcgccgttccgtcagggcggcgtcattaccgcgggcaatgcttccggcgtcaacgatggcgccgcggcgctgatcgtcgccagcgaacagcagaccgctatccaggggctcacgccgcgcgcgcgtatcgtggcgatggcgacggcaggggtcgaaccgcggctgatggggctggggccggtaccggcggtgcgtaaagtgctggagcgggcgggactcaatatccacgatatggatctgattgagctgaatgaggccttcgccgcccaggccctgggcgtgctcagacagcttggcgtgccggacgatgcggcgcatgtgaatcccaacggcggcgccatcgcgttaggccatccgctgggcatgagcggcgcgcgtctggcgctgagcgccagccttgagctgcagcgccgcggcgggcgctatgcgttgtgtacgatgtgtattggcgtgggtcagggcatcgccatgatcctcgagcgagtgtga

SEQ ID NO: 228858 - DNA, 423 bp, Klebsiella pneumoniae
atgagcaataacgcctggcgcaacgcgcgcgcgatgtacgaaaaagatacctgcgccagaacgatggggatcgaacttatcgaaatggacgatggttttgcgcagatgaccatgaccgtctcgccggacatgcttaacggccatcaaacctgtcacggcggtcagctatttacccttgccgataccgctttcgcctacgcctgtaacagccaggggctggcggcggtggcttcggcggccagcattgatttccttcgcccggcgtttgccggggaccggctggtcgccaccgcccgagtcaaacagcagggcaagctgaccggggtctacgacattgaaattgttaatcaacagcaaaaaattgtggccctgtttcgcggcaaatcgcaccgcatcggcggcacaatcacaggagaagtctaa

SEQ ID NO: 228859 - DNA, 1422 bp, Klebsiella pneumoniae
atgacgacatccttagccaacgtggcggtgatcggcagcggcaccatgggggccggcatcgccgaagtggctgctgccgccgggcacccggtactgatttacgacatcgatcatcaggccatcgtccgggcgatcgatggcattgccaggcgtcttgcctctcgggtcgagcgcggcaaactggcgtcagagcaggccgacgcgctgctggcgcggctgcatccggcccacgatttagccgcgctggccgacgcagatttagtgatcgaagcggcctctgaaagcctggaggtgaaagcggcgctgttcgcgcagctggcggcgatctgctcgccgtcaacattgctgaccagcaacacttcgtcgatttcgattaccgccatcgccgccggggtcaaaaacccggagcgggtggccgggctgcacttttttaatccggcgccggtgatgaagctggtcgaggtggtgagcggcctggcgacgtctgcggaagtggtggagcagttgtgccagtgcgtgagcggctgggggaaacggccggttcgctgccgctcgacgcccggctttatcgttaaccgcgtggcgcgtccgttctatgctgaagcctggcgggcgctggaggagcaggtggccgccccggaagttatcgatgccgctttgcgtgacggcggcggcttcccgatggggcccctggcgctgacggacctgattggccaggacgtcaacttcgccgtgacctgctcggtatttaacgccttctggcaggaccgccgttacctgccatcgctcctgcagcaggagctggcgcaggccgggcgattggggaaaaagagcggtcacggcgtctatcgctggcctgcggagacgcagccggaggtgacgctgccgccggtcgccactggcgcgcaatccgtgatgacggtaagtgacagtgtcaccgagctggacgagcttttgttgctggagaccgaaggcgaaaccgccctggcgctgagcgttaagcatcgtcgtccggtggtggtgtatgacctgtgcgccagcgatacggtggtgctggccgccgcggcgaccaacgcgccggcggcgacggacaaagcggtgcactatttccagcagcagggcaagaaagtgctgcgcatcgccgattatcccggcctgctggtgtggcgcacggtggcgatgctggttaacgaagcgctggacgcactgcagaaaggggtggccagcgcgcaggatatcgataccgccatgcgtcttggcgtcaactacccgcagggcccgctggcgtggggggaaagcctcggctggcgccgcgtgctgcgcctgctggagaacctgcaccaccattatggcgaggagcgctatcgccccggttccctgttgcgccagaaggcgctgatggagaagcaccatgagcaataa

SEQ ID NO: 228860 - DNA, 789 bp, Klebsiella pneumoniae
gtggaagctttcattctcagcgcagtggaacagggcgtcatgaccatcactctcaatcgcccggaccgcctcaacagttttaacgatcggatgcatcagcagctggcggaatgtctgaagcaggccgagcgcgacgacggcgtacgttgcctgctgatcaccggcgccggccgcggcttttgcgccggccaggatctgaatgaccgcaacgtcgaccccagtggtccgccgccggatctcggcctgtcggtggaacgcttttacaacccgttagtgcgccgtctggcggcgctgccgaaaccggttatctgcgcggtcaacggcgtagccgctggcgcaggcgccaccctggcgctgggctgcgatatcgtgctggccgcgcgttcggccaagtttgtgatggcgttcagcaagctcgggctggtgccggactgcggcggcagctggttcctgccgcgggtggctggccgcgcgcgcgcgatggggctggcgctgctgggcgacagcctcagcgcggaacaggccgcgcagtggggaatgatctggcaactggtggacgatgccgaactggcggataccagtctgcagctggcgcgccatctggcggcccagccgacgtttggtcttgggctgattaaaaaggcgctgctggcggcggaaaccaacagtctcgacgcgcagctggatctggagcgcgattatcagcgcctcgccgggcgcagcgatgattaccgcgaaggggtcagcgcgtttctggccaaacggccaccacagttcagcgggaaatag

SEQ ID NO: 228861 - DNA, 768 bp, Klebsiella pneumoniae
atgagcgagctgctgatccaccgccatggccgggtgctgcagctgacgctcaaccgtccgcaggcccgcaatgcactgaacaatgccttattaacccagattgccgaggcgctggaggtcgcggccgctgataaccgcgtcagcgtctgcgtcatcagcggtaacccgcgcttctttgccgccggggccgacctgaatgagatggcggagaaagatctcccggcgaccctggacgatatccgcccgcggctgtgggcgcgtatcgatgccttccccaaaccgctgatcgcctcggtcaacggctacgccctcggcgccggctgcgagctggccctgctgtgcgatctgattgtcgccggggacaacgcccgctttggcctgccggaaattaccctcggcataatgccgggcgctggcggcacccagcggctgatccgcagcgttggcaaggcgctggccagccggatggtgctgagcggcgagagtattgacgcccgtcaggcgcagcaggccgggctggtgagcgatgtccatccgggggcgttaaccgatgagtatgccctgcaactggcgaccaccatcgcccgccatgcgccgctggcgctgcgggcggcgaaacagtcgctgcgcctgtcgcaggaagtgagcctgcaggccggtctccagcaggagcgccagctgttcagcctgctgagcgccaccgaagaccgccgcgaaggcatcgacgccttcttacaaaaacgtaacccggaatttaaaggacgctaa

SEQ ID NO: 228862 - DNA, 1071 bp, Klebsiella pneumoniae
atgacgacgttccattcgcttaaggtggcgagagtcgagccggaaacccgcgatgcggtgaccatcacttttgcgatcccgcaagccctgcaggcggaatactgttttcgcccgggccagcatctgacgctaaaagcccgtctgggcggtgaagagctgcgccgctgttactccatctgccgcagccgcacgccgggagagatcagcgtcgcgatcaaagccatcgacggcgggcgcttctcgcgctacgcccagcacgatatccagcaggggatggagctggaggtgatggtgccgcaggggcatttcggctatcagcctcaggccgaacggcagggcgactatctcgcgattgccgccggctccgggatcacgccgatgatggcgatcgttagcgccaccctggccaccgagccgtacagtcgcttcacgctgatctacggtaaccgcaacagccacagcatgatgttccgccaggcgctagccgatttaaaagaccgctatccgcagcgcctgcaggtgatacatctgttcagccaggagtcgatggacagcgatcttttacaggggcgcattgacggcgacaaactgcgccagctcgctgaccatctgctggatttcagccgtttcgacgaggcctttatctgcggtccggcgacgatgatggacgaggcggaagcaacgttacgtgaacttggcgtagcggagaaatcgattcatctcgaacgcttcaatacgccgggcggcagcgttaagcgcgccgccggggtgcaggcggagggacgcacggtcaccatccgccaggacgggcgcgatcggctgatcgccctcagcgccgaagacgacagcatcctggatgccgcattgcgtcagggagcagacctgccgtttgcctgcaagggcggggtgtgcgccacctgtaaatgcaaagtgctgcgcggcgaagtggcgatggccgccaactatagcctcgaagcggatgagctggcggcgggttatgtactgagctgccaggcgctgcccaccagcggcgacgtagttgtcgactttgacgcgcgggggatggcatga

SEQ ID NO: 228863 - DNA, 498 bp, Klebsiella pneumoniae
atgcaacgtttagatgacatcgctcccgccgaggtgcgcgctatctggggattgttaagcgcgatcccggacccggaagtaccggtgctgaccatcaccgatctcggcatggtgcgcagcgtcgcgcgccacggcgacggctgggtgattggctttaccccgacttattcgggctgtccggcgacggagcatctgctgggggagatccgcgcagtgatgagcgagcatggttatctgccggtccacatcgtcctgcagctggatccgccgtggaccaccgactggatgagtcaggatgcccgcgagcgcctgcgccagtacggcatcagcccgccccaggggcacgcctgccatgcggatatgcccgccgaggtgagttgtccacgctgcggcagcacccatacctcgctgcttagcgaattcggttccacggcctgcaaagcgctctatcgctgcgacagctgccgggaaccttttgattactttaaatgtatttga

SEQ ID NO: 228864 - DNA, 756 bp, Klebsiella pneumoniae
atgaataacccgaatcccatcgccacctatgccctgcggcttggcgacaatggtctggtgctggcccagcgtttaggcgcctggtgcggccatgccccggagctggagatcgatcttgcgctggccaacatcggcctcgacctgctcggccaggcgcgcaactttttaagctatgccgccgagcttaacggctgcggcgacgaagataccctggccttcggccgcgatgagcgccagttcagcaacctgctgctggtggagcagcccaacggcaattttgccgacaccatcgcccgccagttctttatcgacgtctggcacgtcgccctgtacagccggctggtgaacagccgcgatgcgcagctggcggcaattgccgctaaagggctgaaagaagtgcgttaccaccagcgcttcagccgtggctggctggagcgtcttggcaacggcaccgaattatcaaatcgcaaaatgcagcaggcggtcgacaatctgtggcgcttcaccggcgaactgttccttgccgatgacctggagctcagcctggccgggcagggcattgcggttgatccgcgcgagcttcaggccgaatggcaaagcaccgtgcataccgcgctgcttgactcaggcttatcgatcccgcaggaagcggccttccgcagcggcggcaaacaggggctgcacagtgaacatctcggcccgctactggcggagatgcaatatctgcagcgttcgcatcccggcctgcagtggtaa

SEQ ID NO: 228865 - DNA, 288 bp, Klebsiella pneumoniae
atgagcaaagtttactggccgttatatgaagtgttcgttcgcagcaaacaggggctttcccatcgtcacgtcggcagcctgcatgccgccgacgatcaaatggcgctggaaaacgcccgcgacgcctacacccgccgcagcgaaggctgctcaatttgggtggtgaaggccagcgaaatcgttgcctcgcagccggaagagcgcggcgaattcttcgacccggcggaaagcaaagtctaccgccatccgactttctataccgtgccggacggcatggaacatatgtga

SEQ ID NO: 228866 - DNA, 930 bp, Klebsiella pneumoniae
gtgacagaagaacaacgctttgaccagcgcatcgcgcaggaaacggccatcgaaccgcaggactggatgccggatgcctaccgtaagaccttgattcggcagataggccagcacgcgcactcggagatcgtcggcatgctgccggaaggcaactggatcacccgcgcgccgacgctgcgccgcaaagcgatcctgttggctaaggtacaggatgaggctggacacgggctgtatctctatagcgccgcggaaacccttggctgcgcgcgggaagacctgtatcagaagatgctcgacgggcagatgaaatactcctccatttttaactacccgacgctgagctgggcggatatcggcgtgatcggctggctggtggatggcgcggctatcgtcaaccaggtggcgctgtgccggacctcctacgggccctatgcccgggcgatggtcaaaatctgcaaagaagagagctttcaccagcgccagggattcgaagcctgcatggcgctggcgcagggcaatgacgcgcagcggcaaatgctgcaggacgccattaaccgcttctggtggccagcgctgatgatgtttggccccaacgacgacaactcgccaaacagcgcccgcagcatggcgtggaaaatcaaactgcactccaacgacgagctgcgtcaacgcttcgtcgacaacaccgtgccgcaggtggagatcctcggcatgaccgtcccggacccggatttgcagtttgatgcagccagcgggcactaccgcttcggcgaaatcgactggcaggaatttaacgaggtgattagcggccgtggcatttgcaatcacgagcggttggccgccaagcgtaaggcctgggaagagggcgaatgggtgcgcgaagccgcgctggcccatgcgcaaaaacagcaggcccgcagcgcggcataa

SEQ ID NO: 228867 - DNA, 2046 bp, Klebsiella pneumoniae
atgcagcagttagccagctacttatccggcgcctggcagaccggccggggccgcgcccgtactattcatcacgccatcaccggcacggcgctgtgggaggtgaccagtgaaggtctggatatggcgcaggcgcgccgcttcgcgattgagcgcggcggtaaggcgctgcaagccatgacctttattgaacgcagcgcgatgttaaaagcggtggcgaaacacttgctggagcagaaagaccagttctacgccatctcggcgcaaaccggcgccacccgcgccgacagttgggtggatattgaaggcggtatcggtacccttttcacctatgccgggctgggcagtcgcgaactgccggacgatatcctgtggccggaagacgagctgatcccgctctcaaaacagggcggttttgccgcccgtcacgtgctgacctcaaaatcaggcgtcgccgtccatatcaacgccttcaactttccctgctggggaatgctggaaaaactggcccccacgtggctggccggtatgccagctatcattaaaccggccaccgctaccgcccagctcacccaggcaatggtgaaagcgattgtcgacagcggcctggtgccggagggcgccatcagcctgatttgcggcggcgcgggcgatctgctcgaccacctcgatagccaggacgtggtgacctttaccggctctgccgccaccggccagcagctgcggtcgcaccccaacctggtggctaaatcgattccctttaccatggaagcggattcgctcaactgctgtgtgttaggcgaagacgtcacgccggagcaaccggagttcgcgctgtttatccgggaagtggtccgcgagatgacggcgaaagccggacaaaaatgtaccgctatccgccgcatcatcgtcccgctggcgcagatcaatgcggttagcgatgcgctgatcgcccgcctgcataaagtgaccgtcggcgacccggcgcaggaagggattaagatgggggcgctggttaatcacgagcagcgtcgggacgtacaggagagcgtcaatgaactgattgccgccggctgcgaagcgctgcttggcggacaggcagacctcagcgcggccggagcctttttcccgccgacgctgctctactgcgcgcagccggatgaaaccccggcggttcacgccattgaagcctttggcccggtggcgaccctgatgccctaccaggaccgccagcatgcgctgacgctggcacgcgccggcggcggcagcctggcggggacgctggttaccgccagcggcgaactggcgcgcgagtttatcctcggcgccgcccgcgcgcatggtcgtattcagatcctgaacgaagcatcctccgcagaatcaaccggccacggttcgccgctgccgcagctggtgcatggcggccccggccgcgcaggcggcggagaggagctcggcggactgcgttcggtgaaacactatatgcagcgcaccgccgtccagggcagcccaacgatgctggcgaccatcggccagcagtgggtacgcggcgcccaggtgagcgaagatcgcattcacccgtttcgcaaatatttcgaagagatccagcccggcgacagtttgctgaccccgcgccgtaccctgaccgaagcggatatcgttaacttcgcctgcctgagcggcgaccatttctacgcccacatggacaaaatcgccgccgccgagtcgattttcggcgagcgggtggttcacggttatttcctgatctccgcggcggccggtctgttcgtcgatgccggcgtcgggccagttatcgccaactacgggatggaaaacctgcgctttattgaaccggtcaagccgggagacaccatccaggtgcgtctgacctgtaagcggaaaacggtcaagcggcagcgcagcgctgaggagaaagccaccggcgtggtggaatgggcggtagagattttcaaccagcaccagcaggcggtggcgctgtattccattctgaccctggtggcgcgccagcagggggatttcccggcgtaa

SEQ ID NO: 228868 - DNA, 2268 bp, Klebsiella pneumoniae
atggcaaacggcttgaaattttctcctcgtaaaaccgcactggctctcgctgtcgcggtggtttgcgcctggcaatcaccggtcttcgctcacggtagcgaagcccacatggtaccgctggataaaacgctggaggcgttcggcgctgacgtgcagtgggatgactatgcgcaaatgtttaccctgataaaagatggcgcttacgtcaaagtgaagcccggcgccaaaacggcgatcgtcaacggtaaatcccttgacctaccggtgccggtggtgatgaaggaaggtaaagcctgggtctccgatacctttatcaacgacgtgttccagtccggtctcgaccagaccttccaggtggaaaaacgccctcacccgttaaactcgctctcggcggcggaaatcagcgaagcggtgaccattgtcaaaaccgcgccggagttccagccgaatacccgctttactgagatttccctgcacgagccggataaagcggcggtatgggcctttgccctgcagggaacgcccgttgatgccccccgcactgccgatgtggtgatgctggatggcaaacaggtgatggaggcggtggtcgatctgcaaaacaaaaaaatcctctcatggacgccgatcaaaggcgcgcacggcatggtgctgctcgatgatttcgccagcgtgcagaacatcatcaacgccagcagcgaattcgcggcggtgctgaaaaaacacggtattaccgatcctggcaaggtggtcaccaccccgctcaccgtcggctacttcgatggcaaagatggcctgcagcaggatgcgcgtctgctgaaggtggtcagctatctcgataccggcgacggcaactactgggcgcacccgattgaaaacctggtggcggtggtcgacctggaagcaaagaaaatcatcaaaatcgaggaaggcccggtgattccggtgccgatggaaccgcgtccgtatgatggccgcgaccgcaacgccccggcggtgaaaccgctggatattactgaaccggaaggcaaaaactataccattaccggggataccattcactggcggaactgggatttccatctgcgtcttaactcgcgcgtcgggccaatcctctcgacggtgacctacaacgataacggcaaaaaacgccaggtgatgtatgaaggttcgctcggcgggatgatcgtcccctacggcgacccggacgtcggctggtatttcaaagcctatctggactccggcgattacggcatgggcaccctgacctcgccgattgtacgcggcaaagacgcgccgtcgaatgcggtgctgctggatgaaaccatcgccgactacaccggcgcgccgaccaccatcccgcacgccgtcgccatattcgagcgctacgccgggccggaatataagcacctggagatgggcaagcccaacgtcagtaccgagcgccgggagctggtggtgcgctggatcagcaccgtcggcaactacgactatatctttgactgggtgttccacgacaacggcaccatcggcatcgatgcgggcgccaccgggattgaggcggtgaaaggcgtgctggcgaaaaccatgcacgacccgagcgccaaagaagatacccgctacggaacgctgatcgaccataatattgtcggcaccacccaccagcatatctataacttccgcctcgacctcgacgtggacggcgaaaacaacaccctggtggcgatggacccggaggtgaagcccaacaccgccggcggcccgcgcaccagcaccatgcaggtgaatcagtacacgattgacagcgaacagaaagcggcgcagaaattcgacccgggtacgattcgcctgctgagcaacaccagcaaagagaaccgcatgggtaacccagtctcttaccagatcatcccttacgctggcggcacccatccggcggcgaccggcgctaagttcgcccccgacgagtggatctaccatcgtctgagctttatggataaacagctgtgggtgacgcgctaccacccgagcgaacgctatccggaaggcaaataccccaaccgctccgctcacgataccgggttaggccagtatgccaaggacgatgagtcgctgacgcaccaggatgacgtggtgtggatcaccaccggcaccacccacgtggcgcgcgctgaagagtggccgatcatgccaaccgaatgggcgcacgccctactgaagccatggaacttctttgacgaaacgccgaccctcggcgagaagaaacagtaa

SEQ ID NO: 228869 - DNA, 951 bp, Klebsiella pneumoniae
atgttcaacgacgccattgtttatgaccgctacgggccgccggccgcggtgctaacgctgaaacgcgccccgctggcgccgctggccggtggacgggtgcgggtcaggatgcgctatgccccggtgaatccttcagatctgatccccatcaccggcgcctatcgccaccgtacccgactgccggccgtccccggctacgaaggccttggcgaggtggtcgccgcgccattcggcagccggctgaccgcgggccagcgggtgctgcccctgcgcgggggcggcacctggcaacggtttatcgatctcgatgagacctggctggtgccggttcccccggcggtggacgatctgctggccgcccgcgggtatatcaatccgctgactgcgatgctgatgctcagtcgctggccggttgccgggaaacagatcgtgctgaccgccgccgcctcctcctgcgccagcctgctggggcagtgggcgctggccatgggcgcccgttcggtaagcgggattattcgctcgccgcagcatcgggcgcgtctggagcaggccgggatctatccgatcctcgacgccgaccgggcgctggtggagaaggtcagccagcacagcgatctggtgtttgacgcggtgggcggggagctggggaacacgctgttgtcggtgctgcccgcgtcgtcgatcctggtctcctacggcttattatccgggcggccgttgatccagacgcgcgccagcgcggcggtgcgcaagtttcatctgcgggaggcgctgcctggcctcagcgtggcggcatggcgggcggcgttcgatgagatctggcagcggctaccgacgactacgcaaccgccggcccagcgggtggcggtgaacgactggcgcgaggcgattgccgccgccggccagccgggaagaggcggtaaaatcctgctcgatttcaccgtgggttaa

SEQ ID NO: 228870 - DNA, 819 bp, Klebsiella pneumoniae
atgcacaaccaacactctcaccatatcgatcaagcgacagtcgaccgctggcaggcggatggcgtggtattactgaagggcgtttttaccccctgggttgagcgcctcgccgagggggtcacggcgctgatggccagccccagcgaatatggtcatgcgcgcacggtgatccccaaagatggtacgccgcctttttttcaggattactgcaactggtcgcggatcccggcgtttagcgagtttgttttccagtcggccgccgccgaaatcgccgcggcgctgatgcagtcgcagacggcgaaatttttccatgagcatacgctggtcaaacccgccgggggcagcacggtcaccccctggcatcatgaccagccttactattgcgtctccggccgacagaacgtcagcttctggatcccgctggacccggtagcagaggccacctcgctgcgctgcattcgcgggtcgcatcgctgggaggcggagtacagtcccacccgcttcaatggcaccaggctctatgagcacacccggttcagcgcgctgccggatatcgacgcccatgaggacgagtacgatatcgtcagctgggcgctggagccgggggatgcggtggccttccattttcgcaccgtccatggcgcccgcggcaaccccggagcgcgggcgcgacgggtcttctccgcccgctgggtgggggatgacgccgcctttgccgaccgcggcggcgtgacgtcgccgccgttccccgagctgaccctgcgggacggcgacccgctggattctccactgttcccccaggtctggccaccagcgtaa

SEQ ID NO: 228871 - DNA, 1185 bp, Klebsiella pneumoniae
atggcgtgcctggcgatgaataacacgccgggagcgatccttgccgcgctgctggcctttgataccaccagccgccattcgaacctggcgatgatcgactggatcgccgattttctcgccgcccgcggcgtggcgtcccgccgcttttatgacccgtcggggggaaaggccaatctctacgcccggctggggccgtccggcggcggcggggtgatgctctcgggccataccgacgtggtcccggtggacgggcaggactggagcgtgccgccgttcagcctgaccgagcgcgatggccgctactacggccgcggcagcgccgatatgaagggctttctcgcctgcgtgctggcggcggttgatgactttctggcggcgccgctgcggatgccgctgcatctggccttctcctatgacgaagaggtcggctgtctcggcgtgcgcagcctggtggaatttctgcaggcctcgccggagaaaccggcgctgtgcctcatcggcgagccgacggagatgcagccggtgttcggtcataaaggcaaactggccatgcgctgctgcattgagggccaggcctgccattcggcctatgccccgcagggggtgaacgccatccgctacgcggccaggctgatcaaccgcctggatcggctgggcgagcgtctggcccggcagcaggacagccgcttttcgccgcctttcagcaccctgcaggtgggcaccattcagggcggcgccgcgctgaacatcgttccgcagtcctgtcgctttgattttgaaatccgctacctgccggggatgcgtcccgaaacggttaccgaagcgctggcggcctacgcccgccgccggctgctgccggagatgcgccgggtcggcggcggaagcgacatccagtttcagctgttgagccactacccgccgctgctcagcgatccacagtccgactttgcccgctggctggcgcagtggtgcggcagccagcggttttccaccgtggcgttcggcaccgaagggggactgttcgacgagatgggcgtcgcgaccctggtctgcgggccgggcagcatggcccagggccataaggccgatgagtacatcagtatcgaccagaccgaacgctgcatggcgatgctgggccagctttgcgcgtggatgcgcgccgagcccgcagaaccgcttacctga

SEQ ID NO: 228872 - DNA, 675 bp, Klebsiella pneumoniae
atgaccctttcccttaccgcccgctgcccggaaacgggtcagttgggcattgccattagttcatcgagcatggccgtcgggtcgcgctgtccgtggctgctgcccggcgtgggggcggtttccagccagaacattaccctgccgtcgctggggccgcagatcctcagcgcgctcgaagcgggggccagcgttgagcaggccctgaagcaggcgctggcggaggatcgcttccgcgaatatcgccaggtcgcggcgattgacgccaacggcgacacggcggtgttcagcggggagttcaccctcgggatcggcggcgccctggcgggggataactgcgtggcggcgggcaacatgctggccagtcagggggtgatcgccgcgatggtgggcgcctttgaggccgccaccggtgagctgaccagccggctgctggtcgggctgcgcgccgggatcgtcgccgggggcgaggccgggccggtccactcggcggcggtgaaggtggtggacgattacccgtggccggtggtcgacctgcgcattgactggacggaagcggatccgttggcggcccttgagcagctgtggctggcgtgggagccgcaaatggaggcctatattacccgggcgctcgacccgcgcgaggcgccggcctatggcgtgcctggcgatgaataa

SEQ ID NO: 228873 - DNA, 438 bp, Klebsiella pneumoniae
atgccaacccatacccgtattcgcatgtttaacaccaaagagacctacccgaaccaggcgctgaacaacgatctgtgccaggcggtgcgggccgggaataccgtctacgttcgcggccaggtcggcaccgatttcgccggcaacctgatcggcctcggcgacccgcgagcccaggcggaacaggcgatgaagaatgtcgagcagctgctgaaagaggccggcagcgatctctcgcatatcgtcaagaccaccacttatctgatcgacccccgctatcgcgagccggtctatcaggaggtgggaaaatggttgaaaggggtctttcccatctccaccggggtggtggtgtcggccctggcgcagccgcagtggctgatggagattgacgtcacggcggtgatccctgacgactggcagggggaggcagcagcagaatga

SEQ ID NO: 228874 - DNA, 1257 bp, Klebsiella pneumoniae
atgactgaacagataaccgagatcgataccctggtggtcggcgcggggcaggcgggcgtcgccatgagcgagcatctgacccggctggatattccccacctggtgctggagaaacagggtattgcccaggcctggcgcagcgggcgctgggattcgctggtggccaacggcccggcctggcacgatcggtttccggggatggtgttcccggactgcccgccggatagctttgtcggcaaagagcaggttgcggactattttgccgcctatgcccgcagcttcaacgcgccgatccgtaccggggtggaggtgtacagcgccgaacgcctcgccgggcgaccgggctttcgtgttgacacctcccagggggtgattgaggcgcagcggatcgtagcggccaccggaccctttcagcgcccggcgatcccggctatcgccccgcagagtccggctattcagcagctccactcggcgcactattttaatccgcagcagctgccggagggcggcgtgctggtggtgggggccggatcctccggcgtccagattgccgatgagctgcagcgtgccggacgcgcggtgtggctgtcggtgggggcgcacgaccggccgccacgtcgctatcgccagcgcgatttttgctggtggctcggggtgctgggaatgtgggacgccgcggccaatgcgccggggaaagagcatgtcactatcgcggtgagcggcgcgcgcggcggccataccgtcgattttcgccaactggcgcatcagggggtcaccctggtggggcagacccgcggctttgacggcgccagggcgctgttccaccccgacctggcggagaatatccgccgcggcgatgcctcttatcttgcgctgctcgacgccgccgacgactgggtagcgcgcaacggttctgatctgcctgaagagccctccgcccgtgagtttctgcccgatccggcctgcgtcagcgacccgctgcttagcctcgacctggccgaggccgggatcggcgccatcatctgggcgaccggatataccacggactatcgctggctgaaggtcaacgccttcgatgacgcgcagcggccgcagcatcaccgcggcgtgtcgacggagccgggggtctattttctcggcctgccgtggctgtcgcggcgcgggtccacctttatctggggcgtctggcacgatgccaaatatattgccgaccagatcgccattcagcgccagtatcagcgttaccagccgtcctga

SEQ ID NO: 228875 - DNA, 915 bp, Klebsiella pneumoniae
atgaaccgatttaccctgaagcagctcaaatatttcgtcaccgtggtggagacggagagtatcgccgaggcctcccgccagctgcacattgcgcagccgtcgatttccattgccattaagaatctggagagcaccttcgaccagcagctgtttattcgccaccacgcgcagggcgtctcgctcacctccagcggtcggcggatctacgataaagcgaaggagctgctgcgcctgtcgtgggaatttgagcagaattcgcgggcggataaagagctggtttctggcatgatctccatcggttgctttgaatcggtagctccgctgtatatgccgaagctggtggctggatttaagaaatgctatccggaaataacgctgcatctgtatgacggcgaacagcatgagctgatgcatggcctgcaccgcggccgctttgacctggcgctggtctacgatctggagcttggccactcgatcaataaagaacggcttaacgccccgcataaaccctacgcgctgctgcccgccgcgcatccgctggcgcaaaaggcgcaggtgacgctgcaggagctgagccgcgagccgatgatcctccttgatgcggtcccgagcaaaaattatttcatctccatctttaaggaaaaaggctatcacccggaagtagcttacagctcaccctctatcgaaatggtgcgctgtatggtcggtcaggggctcggtttttcggtgctggtcacccggccctgttgcgatatgacctacgatggtgaaagggtggtgcagcgggatattgccgacgatatgcccgcctcaaccttaattatggcgcatctcgcgaataatgagccgacgcggccaacgcaactgtttatggattattgccgcagtatcgaattaaccccctctcacggctga

SEQ ID NO: 228876 - DNA, 1521 bp, Klebsiella pneumoniae
atgacgtttaactggaactatatgttaagcctgctcagcgatgccgatttttggtgggccacctggaccgtcattaaattaagtctgctgacctggggctgcagtattgtgctcggatttattctggcgctggctaaacagtcgccgcgcggctggttatccacccctgcccggctgtatatctggttatttcgcagtatgccgctgctggtcctgctgatttttgtctacaacatgccgcaggcgctgccctccttcgcgccggtgctgaacgatcccttctgggccggcctgctggcgatggtcctcagcgaagcggcctatattgccgagatccatcgcggcgggctgctctccatcccccgcgggcagagtgaagccgcgcgggccctgggtttacgctacgccgggatccagtggcgggtgatcattccccaggcgctgcgcgtcgccctgccggcgctggccaatgagtatatcgccatcgtgaagctcagttcgctggtgtcggtgatctccctgaccgaaatattgatggtcggccagcagctctactcgcagaactttctggtcatggagaccatgaccgccgtggcgttttattacatctttatcgtcacggtgttcgattttctgctgaaacggctggagaactacctcgatgtcacccgacgcgacaccgcccggccggtggatgccgagatgcagcagttggcgaccgcccggcgcccggcgatggcgcgcagcgtctcccagggccaggagccggcgctgcaggcctctaagctgcataaggcctacaacaatgtcgaagtgctgggggcggtgagcctgcagatccagcccggcgaagtggtctcggttatcggcccgtcgggctcggggaaaaccaccctcattcgcctgctaaacggtcttgagcagatcgataacggcgaaattcagattaacggccagccctttattcatctcgaccgtcaggggcagcataagccgcgctttatggagaatgccgaacaccgtctgaatatcggcatggtgttccagagctttaacctgttcccgcatctgaccgtgttcggcaatctgctgctggctccgcgctatcaccatctggcgagcgacgcggagctgcgccagcacgcctgcgagctgctgcacaaggtgggcatgctggaacacgcctggaagtatccgcaccagctctccggcggtcaacagcagcgggtggcgatcgcccgcgccctgatgatgcgtccgcagatcatgctgttcgatgagcccacctcggcgctggatccggaaaaagtgaatgaggtgctgcaggttatcgaatccctggcccacgaaggcatcacgatggtcatcgtcacccacgagatgaacttcgccttcaaagtgtctgaccggatcgtgtttatggagaaaggccgggtggtgtgcgatgacacgccgcaggcgatgcgcagcgggcaacacccgcgggtcgaggcctttctgaaagatgtttctctggcttaa

SEQ ID NO: 228877 - DNA, 873 bp, Klebsiella pneumoniae
atgattgcgcagtggcaaattgagcagtttcatcagcagggttatctggtggtcgaaggggtgctttccgccgccgacatcgccacgctgcagagcgatttcgacggctgggtcgaggagagccgccgtcacgcgacggcgtggggagaaaccctcgacgggcggccgcgtttcgatatcgaacgcgaccatgctcctgaccatccgtcgctgcgccgggtcgcctccccgacggagatctccgaggcctatcgccatactgcgctgaattcgcggatggcgaccatcgccgggcagctgatcggcggcaacggcacccgttttcaccacagcaaaattaactccaagctgccgcacaccgccaccgaggtgaaatggcatcaggatttcctcttcaccccgcacagcaatgacgacattatcaccgccctgctgatggtcagcgaggtgactgcggagaatggcccgctcaatgtggtgccgggcagccatcaggggccgctgtggtcccactggcaggagggtcgcttcaccggggcggtggatgacgaggtggtgacggctcactgccagcagccgcaggcctgttttggcccggcgggctcagtctgctttatgcatacccgcctgctgcacgcctccagccccaacgaaaccgccctgccgcgcaccctgttcatcagcgtctacgccgccgaggatgcgctgcccttcggcgaaaacccgctgccgagccgccatgccggccagctggtggccggggaagagagcggtctggtgcgcagcaccaataaccagcttcgcctgccgcagaagccgcgcggcgcttcgttttttgttcagcaggccggtgccgatcgcgccagcatgtaa

SEQ ID NO: 228878 - DNA, 831 bp, Klebsiella pneumoniae
atgacacgctttttcgcaccacgcccgctgtctctgctgctctgcgcagcgggggctctgacatccctgaacgcgctggccttccagcaaagcggcaagatcaccgccggctcggacatgacctttttcccttacgagtacatggagaacaacaagccggcggggtttgatattgaactgctcgacggtctggcgaagagcatgggccgcgaggcggtgaatatcgacacccgcttccccaacctgatccccggactgcagggcgggcgcttcgatatcaccaactcgtcgatgtacattaccgccgagcgcctgaaggtgatcgacatggtgccgtacctgaaaagcggggaagcgatcctcgcccgcaaagggggcgactaccatcctaagacgccggaagacttctgcgggcataaaatcggctcgatgggcgccacctcgtggctggcgcagttgcagaagctttccgccgactactgcgtgaagaaagggctgaagccaattgcgctgagcgtctataccaccgacccgcagaccacccaggcgctgctgtcccgcgcagtggatgcgcagatcaccgacgccgccgtggcgcgcggggtggtggaaaagctgggcgaccgggtggcgatctcctctgacaccctgatctatccagtgctgaacggctttggcgttaaaaaaggcaacacggaggtgaaaaccgccctcgaacaggcgctgaaaaaatacagcgcgacgccggaatatgccgccttgctgaagaaatatcacttccaggcgccgacggcagaggatctgcagaccctgatgccgaaagcggagtaa

SEQ ID NO: 228879 - DNA, 732 bp, Klebsiella pneumoniae
atgcgcgattccgatgaagagcagatccgcatcgacctggcggccacctttcgcatcattgcccatctcggcatgcatgaggcggtggccaaccatttcagcgccgcgctctccgctgacgggaaaacgtttttactcaacccgaagtggaaacacttttcgcgcatccgcgccagcgatctgctggtgctgcacgccgatgatgaacgttgcgccgcgcgacctgacgtcgatgccaccgcgtgggccattcacgggcagatccatcagcgactgcccgacgtgcgggtggtgctgcatctgcacccggtgtacaccaccagcctcgcctgtctggcgacgccgcagatcctgcccatcgaccagaacacggcccgctattttaaccgggtcgccgtcgataccctgtacggcgggatggcggacaccgcggcagaaggcgcacggctggcagggctgctgacggataaacgccgtctgctgatgggcaaccatggggtgctggtgaccgctccgactatcggcgaagcgttcgacgatatctggaccctggagcgcgcctgtcagatcctgatcaccgcctggtcaaccggccagccgctgaaggtgctgtcggacgcggtggcggaaaaaaccgcccaggactgggagaaaattgccgatttctcccggcagcacttcgccgagatgaagcagttgatgatcgacctcgatccctccctggtggattaa

SEQ ID NO: 228880 - DNA, 891 bp, Klebsiella pneumoniae
atgacagcatttcctgaggttgcactaattggtcctggcgccatcggcaccacgatcgccgccgccctgtttgcggtggggagggcgccggtggtctgcgggcgcactgcccattcgtctttggtgctgcgcactgatgagggtgagatcgtggtgcccggcccggtgctcaccgacccgacggcgatagccgcccccttcgacctggtgtttgtcgcggtgaaggccacccaaacggaggccatcgccccgtggctggcggccctgtgttcgccagacaccgtggtgtgcgtgctgcaaaacggcgtcgagcagcgccagcagtttgcccctttgaccggcggcgcgacggtgctgccgtcggtggtctggtttccggcgcagcgcgacgccgatgcttcggtctggctgcgcgccgcgccgcgactgacgctgccggatgtgccgggggcggagcgggtgcagcaggcgctggcgggaacccactgcgcggtggagctggcggcggattttaccagcgtcgcctggcgtaaactgctgcagaacgccgtcgccggactgatggtgctgaccggacgacgcgccgggatgttcgcccgggaggagatcaccgccctcggactggcctatctgcgcgaatgcctgcaggtggcgcgggcggaaggggccgtcctgagcgacagcgtgccggaggagatcatcgccggctttcatcgggcgcctgccgacttaagcacctctattctgatcgatcgcctgcatggccgaccgctggagtgggatattcgtaacggggtggtacagcgtcgcgggcgtcaacacggcataccgacgccgctcagcgatatcatcgtgccgctgctggcggcggccagcgacggcccgggctga

SEQ ID NO: 228881 - DNA, 1500 bp, Klebsiella pneumoniae
atgtccacctctcagatagcgctgcttgccagcgtccagcagtttttagaccgtcagcatggcctgtatatcgacggcgccccctgcgccgcgcagagcgaaaaccggttaaccgtctgggatccggccaccgggcaggcgatcgccaccaccgccgacgccagcccggcggatgttgaccgggcggtgatgtccgcctggcgtgccttcgtcgaccgccgctgggccgggcgcaccccggccgaccgcgagcgcatcctgctgcgctttgccgatctggtggagcagcacggcgaggagctggcgcagctggaaacccttgaacagggtaaatccatcgccatctcccgcgccttcgaggtcggctgcaccctgaactggatgcgttacaccgccgggctgaccaccaaaatcagcggccggacgctggacgtctcgatcccgttcccgcaaggggcgcgttatcaggcgtggaccaaaaaagagccggtgggggtagtggcgggcatcgttccgtggaatttcccgctgatgatcggtatgtggaaggtgatgccggcgctggcggcgggttgttcgatcgtcattaaaccctcagaaaccaccccgctgaccctgctgcgggtggcggagctggcgacccaggcgggcattcctgacggggtgttcaacgtggtcaccggcagcggcgccggctgcggcgcggcgctgaccgcccatccgcaggtggcgaaggtgagctttaccggctcgacggccaccgggaaacagattgcgcgggtggccgccgaccgcctgacccgcgtgacgctggagctgggcggcaagaacccggcgattgtgcttaaagacgccgatccccagtgggtcattgaggggctgatgaccggcagcttccttaaccaggggcaggtctgcgccgccagctcgcggatctacattgaagcgccgctgtttgacaccctggtcagcggcttcgagcaggcggtgaaatcgctgcaggtggggccggggatgctggagacggcgcagatcaacccggtggtctcccgggcccactgcgacaaggtggcggcctaccttgaagaggcccgacagcagaaggcggagcttatcagcggcagcgccgggccggatgcgggggggtactatattccgccgacgctggtggttaacccggacgccgggctgcgcctcacccgtgaggaggtgtttggtccggtggtgaacctggtgcgggtggccgacggcgaggaggcgctgcgcctggccaatgacagcgattttggcctgaccgccagcgtctggacccgcgacctgacccaggctctcaactataccgatcgcctgcaggccgggacggtatgggtcaacagtcataccctgattgacgccaacctgccgttcggcggcatgaagcagtccggcaccggtcgcgatttcggcccggactggctcgacggctggtgcgaaaccaaatccgtctgcgtgcgttactag

SEQ ID NO: 228882 - DNA, 903 bp, Klebsiella pneumoniae
atgatgaccacggctgagggggggctggcgtaccagcgctggctggcgacgatcaatcaggtctgcggccatttcgccgcccggccgctggagggccgctttcacggcgagattgacgcccgctacgccggcagcctcaaggtcagcacggtcaccgccgccggcgtcaatctctaccgcacgcgcaatgagataaaacgcgataacgacgcctggttctataccgtgtttcagctcgccggcgaagcggtgatcgaacaggacgatcgccaggtgaccctggcggcgggggatatcacgttgatcgatgccgcccgcccgtgctctatcgtctggcagcagacctcgcgtcaggcttcgctgctgctgccgcgccagcgggtggcgccgacgggcgagatagtcaccgcctgccggctggataagtctctgccgatggtgcagctcagccagcgactgctgctggagagtatgggcggcacggcgctctccgccagcgaaagtgaagcggcgctggaggcgatcgcctgcctgttgcgcccggtgctgcgccagcgtgagccgaccccgtcccggcgggacaagcagtttcagaagataatagcgttaatcgacgcatccattcagtcggagcatctgcggccggagtggctggccagcgagatgggaatgtcggtgcgcagcctctatcggctgtttgccgacaaagggctggtggtggcgcagtatattaagaaccggcggctggatctgtgcgcccgggcgttacaggacgtccacgatgacgaaaagctggcggggatcggctaccgctggggcttcagcgaccatagccatttctccaccgcctttaagcagcgctttggcgtctcgccgggcgaataccgcaagcgctgccgctaa

SEQ ID NO: 228883 - DNA, 324 bp, Klebsiella pneumoniae
atgagaaaacgactgttaaccgcggcgctggcgctgactctgctcagcgcgcccgcgctggcgttaaccctgagcgaagcgcgccagcaggggcgggtgggggagacgctgaacggctatctggcgccgctgcgtcaggataaagagacgctggcgctggtgaaacagatcaacgccgcgcgcagtgaaagctaccagcagctggcggatgacaacaatctgccggtggatgaggtagcgaaaatggccggacagaagctggtggcccgcgctcaacccggcgagtacgttcaggggctgaacggccagtggctgcgcaaataa

SEQ ID NO: 228884 - DNA, 186 bp, Klebsiella pneumoniae
atgaagaagctgttactggccatagtggcgtcgatgctgctcgccggctgtacgccgcgtatcgaaattgcggcgtcgaaagagcccatcaccatcaatatgaatgtcaaaattgagcatgagatccatatcaaggtcgataaggatgtggaaaacctgctgaaatcccgcagcgatttgttctga

SEQ ID NO: 228885 - DNA, 2640 bp, Klebsiella pneumoniae
atgaagggtaaatataaagccgccatcgcgctggtgttagcgctggtgttactgccgctaaccctgctgttgacgctgacccactgggtgccgacgctggcgggcatctggctgcccgtgggcactcatatcgctatgcaggagagcccgcgtcttacgcgttccgccctgctgatccccgatctgcgctatctggtgggcgagtgtgaactcgccagggtgaccgatgcccgtctctcgcgccccagccgctggcggctgcatattgaccaactggagatcaacagcgcctgcctgagcaaactgccggccagcgatcccacgcccggatcgccgcgcacccttgccgaatggcaatcgatgctgccctacagctggttaactattgataacctgcggctgtcgccgtgggaaaaatggcaggggcggctggtgatgtcactgacccctgcgcagcaggatatcggctttgccggtaacgatttgagcctgcaggcgcgcttgcgcggccaggcgcttaccgtcagccagttcagcgcccggctggctgacgatcagccgccggtgaagctggtggggaccttccatctgccgctggtgccggatggcctgccggtcgatggccagatgcagggcaccttcgaattcccgcagactgcggaatggatcgatgccgagctgacgtggcagcataatcgcggccagctgctggtcaccccacgcggcgaggtggagcccattctcgacctgccgtgggagatcactccggagcggatcaccatcagcgacggccgctggcgcacccgctacgaggcgtatccgctgagcggtcgcgtggcgctgtcggtgggtaactggcagcagggcacggaacagatgatcgtcagcggtcgcttgaatgttctcaccgaggggcatgccggaaaaggcaacgcggtgctgaatatcggcccgggcaagctgagcatggataacagcgacctgccgctgcgactcaccggcgaggccaagctgggggagatgatcttttacgccgcgctgccggcccagctcagcgggtcgctggtcagcccgcagctggcgtttcaccccggggcgctgctgcggtcgcgcgggcgggtgatcgacgcgctgaacattgacgaaattcgctggccgctggccggggtaaaggtcacgcagcagggcgtcgatggccgcctgcaggcgatcctccgcgcccatgagcagcagatgggcgactttacgttgcatctggacggcctggcgaacgattttctgcccgacagcggccgctggcagtggcgctactggggcgaggggcatttcacgcctatgcaggcgcgctgggatgtgaagggcagcggtgagtggcgggacaatgccattacgctgagcagcctctccacgggtttcgacaagctcgagtacggcacgatgcgggtcagcacgccgcgtctgaccctcgagcagccgatccgctggctgcgcgatgctgagcatcctcggctgaccggcgcgctgtcgctggatgcggcaaaaactaccttcaccggcggcagctatcttccggcgtcgacgctgaaattcgccctcgacggccgggatccgacgtggttccagttcaccggcgcgctgcacgccgataccattggcccggtgcggttgaccgggcgctgggatggcgaacggctgcgcggccaggcgtggtggccaaaacagtcgctgacggtattccagccgctggtgccgccggactggaagatgaacctgcgcgaaggcagtctctatgcgcaggtggccttctcggcggcagccgggcagggatttgaggcaggcggccatggcgtcctgaagggcggcagcgcctggatgccggataaccagatcaacggcgtcgacttcgtcctgccgttccgcttcagcgacggccactggcagctgggcacccgccgtccggtctccttacgcattggcgaaatcgtcaaccaggtcaccgcgcgcaacctgacggcggacctgcagggcacctggccgtggagcgaggccaatccactgcagcttagcgacgtcagcgtcgacctgttaggcggcaagctgaccctgctgcagctgcgcatgccgcagcgcgacccggcgctgatccgtctgcagcacatctccagcagcgaactgaccagcgcggtcaaggtgaagcagttcgccatgtccggggcggtgagcggcgcgctgccgctgtggctggagaacaatcaatggattatccacgacggctggctgcgcaatgacggaccgatgaccctgcggctggataaagacaccgccgatgcgctggtggcggacaacgtctccgccggggcggcgatcaactggctgcgctatatggagatctcccgttcatcgacgcagattaacctgaacaatctgggcgtgctgacgcttaaagccgccatcaacggcaccagccgggtggacgggaaaagcagtaccgtgcatttaaactacgctcatgaggagaatattttcgatctgtggcgcagtttacgcttcggcgacaatttacaggcgtggcttgagcaaaatgccacgctgcccgtgcggcgctgtacggacggtaagacatgtaaggaacctaaatga

SEQ ID NO: 228886 - DNA, 501 bp, Klebsiella pneumoniae
gtgtcgttaattatctcgctcattgagagcgcacagggccactatccattggtattactgatggttttcttgctcactttcactaaatcctgcgcgctggtgtcgctggccatcccgggcacctccggcctgctgctgctggggacattcgcttccgccagcctcggtcatttcctgctaatgtggtccagcgccagcctcggcgccatcggcggattctggctctcgtggtggttgggcgttcgctatcgtcaccgccttacgcagttacgctggctgacctccgagcggctggcccgcagccgactcttttttcagcgccgcgggctgtgggcggtctttttcagccgctttctctctcccctgcgcgccaccctgcccctggtcagcggcgccagcggcctgccgctgtggtcgtttcagctggctaacgtcagctccggtctgctgtggccgtttctgctgctctcccccggcgcgttaagcctgagtttgtggtaa

SEQ ID NO: 228887 - DNA, 990 bp, Klebsiella pneumoniae
atgaaaatcgcggtttacagtacgaagcagtacgataaaaagtacctgcagcacgtgaatgatacctacggctttgaactggaattcttcgacttcctgctgacagagaaaaccgctaaaaccgccaacggttgcgaagcggtatgcatcttcgtcaatgacgacggcagccgtccggtgctggaggagctgaaggcccacggcgtgaagtatatcgccctgcgctgcgccgggtttaacaacgtcgacctcgaggcggcgaaagagcttggcctgcgcgtcgtgcgcgtcccggcctactcgccggaagcggtggctgagcatgcgatcggcatgatgatgtcgcttaaccgccgcatccaccgcgcctaccagcgtacccgtgatgctaatttctccctggaaggcctcaccggtttcaccatgtatggcaaaaccgccggggtgattggtaccgggaaaattggcgtggcgatgctgcggatcctcaaaggttttggcatgcgtctgctggcgttcgacccgtacccaagcgccgccgcgctggagttgggggtggaatatgtcgacctcgccacgctgtacaaggagtcggacgtgatctccctgcactgcccgctgaccgacgaaaactaccatctgctcaatcgcggggctttcgatcagatgaaggacggagtgatggtgattaacaccagccgcggcgcgctgatcgactcccaggcggccatcgatgccctgaagcaccaaaaaattggcgcgctggggctggacgtttatgagaacgaacgcgatctgttcttcgaagacaaatccaacgacgtgatccaggatgacgtcttccgtcgcctctccgcctgccacaacgtgctgttcaccggccatcaggcgttcctcaccgccgaggcgctgatcagcatttcggagaccaccctgggcaatctgcagcaggtcgccaacggtgaaacctgcccgaacgctatcgtctga

SEQ ID NO: 228888 - DNA, 441 bp, Klebsiella pneumoniae
atgaacaaatttgcggcattactggcggcagggttgctgctgtccggctgtgtctataacagtaaggtgtccaccggcgcggaacagctacagcatcatcgtttcgtgctgaccagcgtcaacggccaggcggtaaacgctggcgaccggccgctggagctgagcttcggcgagaagatggctattaccggcaatatgtatgtttcgggcaatatgtgcaacggcttcagcggggaaggtaaggtgtcggacggcgagctgaaggtcaagtcgctggcgatgacccggatgctgtgccacgatgcccagcttaatacccttgatgcgaccattggtaagatgctgcgcgagggcgcgcaggtcgatctgacggaaaaccagttgacgctggcgaccgccgaccagacgctggtctataagctcgccgacctgatgcactag

SEQ ID NO: 228889 - DNA, 264 bp, Klebsiella pneumoniae
atgcgagctgcgatgttagtggggtgtgcggcgctgttgctgtcggcgtgcagtagtgaacccgttcagcaggccacggcggcgcacgtcacgccaggaatgcgggcggcgatgagcgacgccggtcaggccaactgcgccatgataggcggctcgttatcggtggctcgtcagctcgatggttcagcgattggcatgtgcgcgctgccgaacggtaaacgctgcagcgagcaggcgctggcgggcggaagctgcggctattaa

SEQ ID NO: 228890 - DNA, 3528 bp, Klebsiella pneumoniae
atgattacgattgatggtaatggcgcggtcgcttccgtcgcgtttcgcaccagtgaagttatcgccatctacccgatcacgcccagttcaacgatggcggaacaggctgacgcctgggcctgcaatgggctgaaaaacgtctggggcgatgtgccacgcgtggtcgaaatgcagtcggaggcaggcgccattggcgccgtacatggcgcgctgcagactggcgccctctccacgtcctttacctcatcgcagggcctgctgctgatgatccccacgctgtacaaactggccggccagctgatgccgtttgtcctgcacgtcgccgcccgcactgtcgccacccacgcgctgtcgatcttcggcgaccattccgatgtgatggcggtccgtcagaccgggtgcgccatgctgtgcgccagcagcgttcaggaagcgcaggatttcgcgctgatctcgcatatcgccaccctgcaaagccgggtgccgtttattcatttctttgatggtttccgcacttcgcacgaaatcaacaaaatcgccccgctggcggatgacacgattcgcgccctgctgccgcaggagaaaatcgctgagcatcgccagcgcgcgctcaatccggaacacccggtgatccgcgggacctccgctaaccctgacacctacttccagtcgcgggaggccaccaacccgtggtacgacgcggtttatgatcatgtcgagaaagcgatggatgacttcgccgccgccaccggccgccagtacaaaccgtttgagttttacggccatccgcaggcggaacgcgtgatcgtcattatgggctcggccatcggcacctgcgaagaggtggtcgatgaactgctgagccgcggcgagaaagtcggcgtactgaaggtccgcctctatcgtccgttctccgccgcccacctgctggcagcgctgccggagagcgcccgggcggtggcggtgctggatcgcaccaaagaacctggcgcgcacgcggagccactgtatctcgacgtgatgaccgccctggcggaagcctttaaccgcggcgagcgcgagacgctgccgcggaccatcggcggccgctacggtctctcttccaaggagttcggtccggaatgcgtgctggcgatattccatgagctgcaggccgcccagccgaagccgcgctttaccgtcggcatctatgacgacgtgaccaacctgtcgctgccgctgggcgaaaatactctgccatcagaggccaagctcgaagcgctgttctacggcctcggcagcgacggcagcgtgtcggccaccaaaaataatatcaaaatcatcggcaattccaccccgtggttctcccaggggtactttgtctatgactcgaagaaggcgggcggcctgaccgtctcccatctgcgggtcagcgaaaagccgattcgttcttcgtatctgatttcgcaggccgatttcgttggctgccaccagctgcagtttatcgataaataccagatggccgagcggctgaagcccggcggcattttcctgctcaacacgccgtacagcgccgatgaagtctggtcccgcctgccgcaggaagtgcaggccaccctgaatcagaaaaaagcgcgtttttacgtggtcaacgcggcgaagatcgcccgcgaatgtagcctcggggcgcgcattaataccgtgatgcagatggcgttcttccatctgactcacatcctgcctggcgacagcgcgctggcggaactgcaggcggccatcgccaaaagctacagcagcaaaggccaggagctggtggaacgcaactggcaggcgctggccctggcccgcgaatcgctggcggaagtgccgctgcagccggtgaatgccaacagtccgaaccgcccgccggtggtctccgacgccgcgccggatttcgtcaaaacggtcaccgccgcgatgctggccggtctcggcgatgcgctgccggtctccgccctgccgccggacggcacctggcccatgggcaccacgcgctgggagaaacgcaacatcgccgaagagatccccatctggaaggaagcgctatgtacccagtgcaaccactgcgtcgccgcctgcccgcactcggcgatccgcgccaaagtggtcgcgccggaagagatggagaacgcccctgccagtctgcactcgctggacgtcaagtcccgcgatatgcgcgggcagaaatacgtactgcaggtcgccccggaagactgcaccggctgcaacctgtgcgtggaagtgtgcccggcaaaagatcgccagaatccggagatcaaggccatcaatatgatgtcgcgcctggagcatgtggaagaggagaaagtgaattacgattacttcctcaacctgccggaaatcgaccgcagcaaactggagcgtattgatatacgcacttcgcagctgatcagcccgctatttgaatactccggcgcctgctccggctgtggcgaaacgccgtatatcaaactgctgacccagttgtatggcgaccggatgctgattgccaatgccaccggctgctcatccatttacggcggcaacctgccctcgaccccgtacacgaccgacgccaacggccgcggcccggcgtgggccaactcgctgtttgaggataacgctgaattcgggctcggcttccgcttaaccgtcgatcaacatcgccagcgcgtgatgcgcctgctgagcgaattcgccgaccagctgccggcagagctgaacgcggcgctgcatgccgaggcgacgcaggaagcgcgccgtgaacaggtggcggccctgcgccaggcgctgaccggggtgcaaggcgctgaagagctgctgaccgatgccgacgcgctggtggagaaatccgtctggctgatcggcggcgacggctgggcctacgatatcggcttcggcggcctggatcatgtgctgagcctgacggaaaacgtcaacattctggtgctggatacccagtgttactccaacaccggcggccaggcgtcaaaagccaccccgctgggggcggtcactaagtttggcgagcacggtaaacgcaaggcacgcaaagatcttggcgtcagcatgatgatgtatggtcatgtctatgtggcgcagatttcgctgggcgcgcagctgaaccagacggtgaaagcgattcaggaagcggaagcctatccggggccgtcgctgatcatcgcctacagtccttgcgaagagcatggctacgatctggcgctcagccacgatcaaatgcgtcagctgaccgccaccggcttctggccgctctaccgcttcgacccacgtcgggcggaagaaggcaagatcccgctggcgctggactctcgcccaccgtcagacgccctggctgagacgctgctcaatgagcaacgcttccgtcgcctgaacgcccagcagccggaagtggcggagcagctgtggaaagatgctgccgccgacctgcagaagcgctacgacttcctcgcccagctggctggcaaagcggagaaatcaccgagcgagagctaa

SEQ ID NO: 228891 - DNA, 1125 bp, Klebsiella pneumoniae
atgaaaagaaaagtactggccctcgttattccggctttattagccgctggcgccgcgcatgcggcggaaatttataataaagacggaaataaattagatgtctatggcaaggtagacggtctgcactatttctccagcgactcgaaaaaagacggcgaccaaacttacgttcgctttggctttaaaggcgaaacccagatcaacgatatgctcaccggttacggccagtgggaatacaacgttcaggccaacaataccgaaagcgccggcgatcaggcgtggacccgtctggccttcgccggtatcaaagtgggcgattacggttccttcgactacggtcgtaactacggcgtgctgtacgacgtcgaaggctggaccgatatgctgccggagttcggcggcgactcttacacctatgcggataactttatggcaggccgcgccaacggcgtcgcgacctaccgtaacagcgacttcttcggtctggtagacggtctgaacttcgccctgcagtatcagggtaaaaacgaaggccagaacgcccaggacatcaacgtcggcaccaacaaccgcagcagcgacagcgatgttcgctttgacaacggcgacggtttcggtctttccacctcctataacttcggcatgggcatcagcgcggcagcggcctacacctcatctgaccgtaccaacgaccagatgacccagaccaacgcccgtggcgataaagctgaagcctggaccgctggcctgaagtacgacgccaacaatatctacctggcgaccatgtactctgaaacccgcaacatgaccccttacggcaacgacggcgtggccaacaaaacgcaaaacttcgaagtcaccgctcagtatcagttcgactttggtctgcgtccggctatctcctatctgcagtccaaaggcaaagatctctataataccggcagctacgccgataaagatctggtcaaatatatggacgtcggcgccacctattacttcaaccgtaatatgtccacctacgttgattacaaaatcaatctgctggatgacaacgacagcttctacaaagacaacggtatctctaccgacaacatcgtcgcgttgggcctggtttaccagttctga

SEQ ID NO: 228892 - DNA, 213 bp, Klebsiella pneumoniae
atgcatcatcacccggttaaatcttcccgaattatctctgtcgcctatgatgacgcctccgccacgctggaaatttgtttttatcaccagccgccgttgcaatataccggcgttccaccgcgtatttttcgtgactttttacaggtggtgtcaaaaggtcggttttatgacggcgtgataaagggaaaatttcccgaacacaagtcacgttaa

SEQ ID NO: 228893 - DNA, 435 bp, Klebsiella pneumoniae
atgagcagaatgattcttgtccccatcgatatctctgataaagaatttactgaacgcattatcagtcacgttgaatcggaagcgcggattgacgacgctgaggtccatttcctctccgttatcccttccctgccttattatgcctcactgggaatggcctataccgccgaactgcctggtatggatgagctgcgtgaaggaacggaaacgcagcttaaagaactcgcgaaacagttctctatcccggaagatcggaaacattttcacgttgccgaaggatcgccaaaagataagatcctggccctcgccaagtcgctacccgccgacctggtgatcatcgcttcgcaccggccggatatcaccacctatctgctgggctccaacgccgccgcggtggtccgccacgccgagtgctcggtgctggtcgtccgctag

SEQ ID NO: 228894 - DNA, 258 bp, Klebsiella pneumoniae; identical to SEQ ID NO: 228747

SEQ ID NO: 228895 - DNA, 936 bp, Klebsiella pneumoniae
atgcaagaaaatcaagaacttacaaagaaagagaaatacaacatcgataagctgcagaaacgtctgcgccgcaacgtcggtgaggcgatcgccgacttcaatatgattgaagaaggcgaccgcattatggtttgtctgtcaggcggcaaggacagctataccatgctggagatcctgcgtaacctgcagaaaagcgcgcccatctccttctcgctggtggcggtgaacctcgaccagaaacagcccgggttcccggagcatattctgccggcgtatcttgagcagctgggcgttgaatacaagattgtcgaagagaatacctacggcatcgtcaaagagaagatcccggaagggaaaaccacctgctcgctctgctctcgcctgcgtcgcggcattctctaccgtaccgccagcgaactcggcgccaccaagattgccctcggccatcatcgcgacgacatcctgcagacgctgttcctgaatatgttctacggcggcaaaatgaaagggatgccgccgaagctgatgagcgatgacggcaaacacatcgtcatccgcccgctggcctactgccgcgaaaaggacatcgagcgtttctcccaggccaagggcttcccgattattccatgcaacctgtgcgggtcgcagcctaacctgcagcgccaggtgatcgccgatatgcttcgcgactgggataagcgttatccgggacgcattgaaaccatgtttagcgcgatgcagaacgtggtgccttcgcacctgagcgacgttaatctgtttgattttaaaggcatcacccacggttctgaggtggtggacggcggcgatctggcgtttgatcgggaagagattcccctgcagcctgccggctggcagccggaggaagaggacgcccggttagatgagctgcgtctgaacgtagtggaagtgaagtaa

SEQ ID NO: 228896 - DNA, 1374 bp, Klebsiella pneumoniae
gtgaccgctttttctaccctgactgttttacctgccgcccaattagccaaccttaacgagctgggttatctgtcgatgacgccggttcaggccgccgccctgccggcgatcctcgcggggaaagatgtgcgcgtgcaggcaaaaaccggcagcggaaaaacggccgccttcggactgggtctgctgcagcatatcgatccgtcgcgctttgagacccagtcgctggtgctgtgtccgacccgcgaactggccgatcaggttgccggcgagctgcgccgtctggcgcgctgcctgccgaacatcaagattttgatgctctgcggcgggcagccgtttggcgcccagcgcgattcactgcagcacgccccgcatattatcgtcgccactccgggccgtctgctcgatcatctgcagaaggggacggtctctctcgacgcgctgcagaccctggtgatggatgaagcggaccgcatgctcgacatgggcttcagcgacgccatcgacgaggtgatccgcttcgcgccggctgaccggcagacgctgctgttttccgccacctggcctgcggcaatcgcggcgatcagcggccgggtgcagcgtcatccggaaacgattgagattgacagcgtcgatgcgttaccggctatcgaacagcagttctttgaagtttcccgccacggcaagattgcgctgctccagcgtctgctcagccagcatcagccggcgtcctgcgtggtgttctgcaataccaagcgcgattgccaggcggtctgcgatgcgctcaacgccgccgggcagagcgcattatcgctgcacggtgacctcgagcagcgcgaccgcgatcaaacgctggtgcgcttcgcgaacggcagcgtccgggttctggtggcgaccgacgtcgccgcccgcggcctggacatcaaatctctcgcgctggtggtgaacttcgagctggcctgggatccggaggtgcatgttcaccgcatcggccgtaccgcccgcgccggcgaacaaggcctggctatcagcttctgcgcgccggaagaggcgcagcgcgccaccattctggccgacatgctgcaattaccccttaactggctgccggcgccgacgggcaacgctatcacgccgctgacggcggagatggcgacgctgtgcatcgacggcggaaaaaaggcgaaaatgcgcccgggagatgtgctgggagcgttgaccggagatatggggtttgatggcgccgatatcggcaaaattaccgtccacccggcacacgtctatgtggcgatccgccagaacatggcgcagaaagcgtataagcagttacaaaacggcaagatcaaaggcaaagcctgccgcgtacgactgctgaagtaa

SEQ ID NO: 228897 - DNA, 984 bp, Klebsiella pneumoniae
gtggacgcgattaaaggctcggagttgcagataccggacgcgatcttcgcgtgggtgctcgacgggcaggggggcgtgaagccgctcgccgataacgatattatcgacaaagagaagccctgctggctgcatctcaactatacccatagcgacagcgccgactggctggcggccaccccgctactgcccaataacgtgcgcgatgccctggcaggcgagagcacccgaccacgggtaacgcggatcggcgacggggcgctgatcaccctgcgctgcatcaacggcagcaccgatgaacgcccagaccagctggtggcgatgcgtctctatatggatgagcggctgatcgtctccactcgtcagcgcaaagtgctggcgctcgacgatgtgctgggcgacctgaaggagggcaatgggccgacggactgcggcagctggctggtggaagtctgcgacgcgctgaccgatcatgccagtgagtttattgaacaactgcacgaccgaataatcgacctcgaagacgacctgctcgatcagcaggtgccgccgcgcggtttccttgccctgctgcgtaaacagctgatcgtgatgcgccggtatatggcgccgcagcgcgatgtttacgcccggctggccagcgagcgactgccgtggatgagcgacgatcagcggcggcggatgcaggatatcgccgagcggctggggcgcgggctggatgagatcgacagctgcatcgcccgcacggcgatcatgagcgatgagatcgcccagattatgcaggagtcgctggcgcggcggacctatacgatgtccttgatggcgatggtgtttctgcccagcacctttttaaccggcctgttcggcgtcaacctcggcgggatccctggcaacagctggcatctggggtttagcctcttctgcctgatgttagtcgttgtcatcggtggtgttgcatggtggttacatcgcagtaaatggttgtaa

SEQ ID NO: 228898 - DNA, 744 bp, Klebsiella pneumoniae
atgcataagctcgcccgacaaaaacacatcctcgaccggctgagtgaaaccggtcagctgagcatcagcgaactggttgatgcgctgcaggtgtcggccgataccatacgccgggatctcagcgagctggaaaaccagggcgtactgcagaaaagccacggcggcgccatcgcgcttaacgtcccggcgatgacgcgccagggaagaaacgccctgctccccggaaccaagcagcgtctcggccagcaggtcgccgcgcgcatcccctccggctcgacgctgtttctcgacgccgggagtaccctgctggccgtcgctacccagctgaaaggccccatgaccgtgatcaccgcttcgctggatatcgcccagctgtttagcgaccgcgccgatatccagctcatcctgcttggcggccagtgggacagtgagcagcggctgttcgccggcagcgccacgctgtcgctggtggcgcgctaccgcgccgatatcgcgattctcggcgcctgcgcgttgcatgccgaactgggcctgagcgccagccaggaggccgatgccgacgtaaaacgcgccatgctcgccgccagcgcggaacactggctggtggcggaccataccaaagtcaaccattgcgaaccctggctggtggccggtctcagcgacattcaccatcttttcctcgatcgtccctggcctgagctgggggatgaccctgccctctctgtacatattgctgacgcttaa

SEQ ID NO: 228899 - DNA, 1119 bp, Klebsiella pneumoniae; identical to SEQ ID NO: 228748

SEQ ID NO: 228900 - DNA, 195 bp, Klebsiella pneumoniae
atgtactacacgttaggagataccactctccatttttatcgctatcagtgcaaattttacgtcgcccactgggaaggagggaacgtgatggacgaaaaatttaaaccgtttatcgagcagatcactgagaagaccgggctggacgcaaagcgcgtcgagaccgccgcgcgcgattattttactaacgtggattaa

SEQ ID NO: 228901 - DNA, 750 bp, Klebsiella pneumoniae
atgaagcatgtgcacaagctggcctggattggcctgttcgtcaatattattatctgttttgtcgcgcgtaatttattactcgatgaaggacaactgaatttccatagtcgggtggacagcatgtggtcctggctggttcttgccctgtttatcgccgtggtggttcaggcgctcagcattatgctgtctggccgctatccttatatggccattgtgctagcctttattggcggtatcgtgatgatacccatcagcatgatctttctggtcggcagcctgttcagctttcaaacgcggattaacgccggttttaccccgtggcggtcaacaaccggggcgatgagccgcgacgataatcaccagctattaacctttaatgcatccgctttttatccgcagggagcgctggcgctcatcgccgggataattatcttaatgattggcatgggtattggcggcgtatttattgccgccggtattctggcgttgtgcaacggctatcgtctgcagaatcgggtggtgattggcgtcagcggcgagtcgatgatatttacgccgggtctctatgccgacacctacattattcctttgcgcgaggtagttctcgctgagcgcggcagtcatgatgcgaaagtccggctgctcatcccgtcgacaggcagaagtatcaccttgcgcaaaaaaatgctcgccggcgataacgtcagcgacaccttcgccgcgatccttgcaaaactgaccaccgtttag

SEQ ID NO: 228902 - DNA, 1380 bp, Klebsiella pneumoniae
atgacaacgcagcaagagcatcagttaaaacgcgggttaaaaaaccgccacatccagttgattgccctcgggggggcggtcggcactggactgtttttaggtattgcgcaaacgatccgtatggcaggcccttcggtcctgctggggtacgccatcgccggggttatcgccttctttatcatgcgtcagcttggcgaaatggtggtagaggagccggtggcgggttcgttcagccatttcgccaaccgctactgggggcccttcgccgggtttatgtcaggctggaattactgggtgttgtacgtgctggtaagcatggcggagctgacggcggtggggatctatattcagtactggtggccggaggtacccacctggctgtcggcggcgatcttcttcgtggcgatcaatgccatcaacctgacgcacgtcaaagtatatggcgagctggagttctggttctcgattgtcaaagtggccgccatcatcagcatgatcgcctttggctgctatctgttatttagcggtcacggcggcccggcggcgacggtggccaacctatggcaggacgggggatttttccctaacggcatcacgggcttggtgatggctatggcggtgatcatgttctccttcggcgggcttgagctggtggggatcaccgcggcggaagccgatgagccgcataaaaccattcccaaagccaccaaccaggtgatctaccggattctgctgttttacgtggggtcgctggcggtcctgctgtcactctacccgtggcggaacgtcgtggaagggggaagcccttttgtgctgatctttcacgccattgacagcaatattgtggccaacgccctcaatctggtggtgctcaccgccgcgctgtcggtctacaacagctgcgtctactgcaacagccggatgctgttcggcctggctcagcagggaaacgccccgcgtgcgctgctgcgagtgaaccaccgcgggatcccattgaccgccctggcggtatccgccgtcgccacggcgctttgcgtggtgattaactatgtgatgcccgggaaagcctttgccctgctgatggccctggtggtggccgccctggtcatcaactgggcgatgatctgcatcactcatcttaagttccgccgcgcgatgcagcgggccgggaaggtaacggctttccagagtttcgcctatcccctgacaaactggctgtgtctgctgtttctcgccgggatcctcggagtgatgtatctgaccccggacatccgcatctccgtctgcctgatcccggtatggctgctgatccttgccgcaggctatctgctgcgcaggaaaagcgcgctggagccggtggcggcgctggaggagcgttaa

SEQ ID NO: 228903 - DNA, 480 bp, Klebsiella pneumoniae
atgtacaacatcgacgactatgatctgaaaattcttaccctgctgcaggccaatggccgtttaaccaatcaggaactgagcgagcttatcggactgtccgcttcccagtgttcgcgccgccgtatcgcccttgaacaggcgcagcttatcctcggctaccatgcgcgtctggcgccggatgccgccgggcaggagatgcttggcctgattgaggtgcgtctgctgaatcacaccccgcaatgcgtagagagctttcatcagatgctcagtgaagtggacgccattctggacgcctggaaaaccaccggcgacgccgattatctgctgcgggtaacggtcccggacctgcccggtctgagccatttgatcagccatattctggcgcaaaacaaaggggtggcccatctgaaaactgccgttgtgctcaaccgcctgaaagagaacggccagctgatgccgggcacgaccccgctgcgctga

SEQ ID NO: 228904 - DNA, 615 bp, Klebsiella pneumoniae
atggataacgtcctttcccctgaaaaactgactcacacctggctggaggatgccctggcgctgctgttcggcacgctaatgatctcctttggcattatcctgtttcgtcaggccggtgccctgaccggcgggacggcaggcatggcctttctgatccactacgccacccacctgccgttcggcgtggttttcttcgccattaatctgcccttctactggctctccgtccggcggatgggcgccgccttcacgctgaaaaccttctgcgcggtcggactggtgtcgctgttctccgacctgcacggctactttatccatgtcgatcgcctgaacccctattacgccaccctcttcggcaacatcatggtcggtatcggctttgtggtgctgttccgccataaagcgagcctcggcggcgtcaatattctggccctctatctgcaggataaaagcggcatccgcgctggtaaattccagatggtagtggacgcctgcatcgtcaccgcctcgctgtgggtggttagcctgccgatgctgctggtctctgtcctcggcgccgtgattttgaattcgattatcgccatgaaccaccgccccggacgctatgcggtgtaa

SEQ ID NO: 228905 - DNA, 1200 bp, Klebsiella pneumoniae
gtgttccagaacgtcgacgcctacgcgggcgatcctatcctgtcgctgatggaagcctttcaacaggatccccgggcagacaaagttaacctcagcatcgggctgtactataacgagcaggccatcatccctcagctggaggcggtccgccaggccgctgaccggctacagagccagttgcaaaaggccagcctctatctgccgatggagggactggcgccctatcgccgcgcggtccagacgctgctgtttggcgaacatcatccggcgttgcgtaccggacgcatcgccaccatccagacgctgggcggctccggcgcgctgaaggtgggcgcggattttctcaagcgctacttccccgactccgcggtctgggtcagcgatccgacctgggagaaccatgtggccatctttgccggggcgggcttcgaggtgcatacctatccctggttcgacagcgccactcgcggggtcaatttccccgccatgcttgccgccctccagcagctcccgtcgcgcagcatcgtgctgctccatccttgctgccataatccgacgggggccgatctcacccccgagcagtgggatcgggtgattgaggtgttgatcgcccgggagctgatcccgttcctcgatattgcctaccagggctttggccgtgggctggatgaagatgcctatgccatccgcgccatcgccagcgccgggctgacggcgctggttagtaactcgttctcgaagattttttcgctgtacggcgagcgtgtcggcggcctgtcggtggtctgtgacaatgccgatgccgccgggcgcgtgctgggccagttgaaagccaccgtgcgccgcaactactccagcccgccggggtttggcgcccaggtggtgtcgcaggtgctcaacgatcccgagctgaatgccctgtggcaggaagaagtggaggccatgcgcacccgcatcagcgccatgcgcgtcgcgctggtgaaatccctgcagacagccctgccggcggaggattttacctatctgctgacccagcgcggcatgttcagttacaccggctttagcgccgatcaggtagacgttctgcgcgaagtgcacggcatctatctgatcgccagcggtcgggtctgtgtggccgggctcaaccgcggcaatattgcgcgggtagccagcgccttcgccgcggtctgcgcacgctag

SEQ ID NO: 228906 - DNA, 669 bp, Klebsiella pneumoniae
atgtttgatctgattgataccgccattaccggcgagcagtttctgctggcgctgcatgataccctgattatggtcgccatctcactgggctttggcgcgctgatcggcgtcccgctgggaattgtgctggtggtttgtcgtcccggcggcatcgtggccaacccggtggtgcatcaggcgctgaatccgctgattaacgtgctgcgctcgctgccgtttatcattttgctgattgtgatcctgcccttcaccaggctgctggtgggcacgactatcggcaccgcgggggccatcgtgccgctgatcgtttttgtcgccccctatattgcccggctggtggagagctcgctgctggaggtggatgaggggatccttgaggccgcagacgccatgggcgctacccctctgcagaccgtctggcactttatgctgccggaggcggcggcgtcgctgattctggcccttaccaccgcgaccatcggtctgcttggcgcgaccgccatggcgggaacggtgggcggcggcgggatcggcgatctggcgatcacctacggctatcagcgcttcgacgcctttgccaccctcaccaccgccctggtgctgattgttattgtccagcttattcagacgctgggtacccgcctggctcgccggctgcgtcgcgaataa

SEQ ID NO: 228907 - DNA, 1026 bp, Klebsiella pneumoniae
atgaataacgcaatgatagaatttcgccatgtcagtaaaaccttttccagaaaagggcatccggttctggccctgcaggatattaatctcagtatcgaccggggcgatattttcggcattattggctacagcggcgcaggaaaaagcaccttattgcggctgattaatcggctggaaacgccgggcgagggcgaggtggtgttgaatggtgagccgctacaggactgcagcggccagcgactgcaggcgatcaaaaaagatatcggcatgatctttcagaattttaatctgctgaattcgaaaacggtatttcataacatcgctatcccgcttattttgcagggccgcgacaaggcctttatccaggcgcgggttgcggagctgctggcgtttgtcgacctgagcgacaaaatgcacagctaccctaatgagctgtcgggagggcaaaagcagcgggtcggtatcgccagggcgctggccaccaacccgtcggtgctgctgtgcgatgaagccacctcggcgctcgacccccacaccacggtacagatcttactgctgctgcaggagattaatcgccgctacggcatcaccattgtgctgattactcatgaaatgtcagtgatccagaaaatctgtcacaaagtggcggtgatgcaggccgggcgcattgttgagcaggggacggtgttcgatctctttgcccagccgcagcatccggtcaccgccagtttcgtgcagtcggtggtgcacgatcgcctgccgcagcgggtggcgtcgctcctgcagcgcgataacggcgcccgggctttacgcctcgaatttatcggcgcgacggcccggcagccgatcattaaccacctgatccgcgagtatgctgtcgaggtgaatatcctgtttgccagcatgtccgaagttcagggccggatactgggatttatgattgtgcaactcctcggcgagcctgacgaaaccgaacgcgctatcacccatctggccgacgcaggagtgaaaatcacccatgtttga

SEQ ID NO: 228908 - DNA, 804 bp, Klebsiella pneumoniae
atgaacaagtcagttgcgctcgggatgacgctcgccctgttatccgctacctctttttacgccaccgcagatcaaattattcgtatcggcttcaatcccgggccgtataaagagcaatttgaaaaaggggtcgccccctatttattgagtaaagggtataaaatcgaatataaagattttagcgacggtattcaggtcaatgacgcggtagcccgcggcgatatcgaagcgaatattatgcagcatccggtatacctgaaagcgatcaatgagcggctggggaccgataacgtgggcattgtgcaggtacccacaccgccgatgggcctgtatggcggtaaactgaccaccctgggcaccccggtagccggcacggtggtgtcggtgccaaaccagccgtcgaacgaatatcgcgcggtgctggtgctggaaagtctgggctgggtgaagattaaaccggacagcgatcccgccaccttttcccagcgcaatatcgttgctaacccctataaaatcgtgcttaaggagatggacaatgcccagcaggttcgcgcgctgccggacgtcgactatggcctgattcagggcaatttcgccgtctccagcggcatggcgctcacctcggcattaaagctggaggccgccaccagccattttattaacgtcgtaaccgttgccggtaaaaatcagaaggcgcagtttgccaaagatattatcgacggctatcactctgccgatttcaaaaaatatattctcagccatccgcagtatgatggttacctgctgcctgattatttaaaatga

SEQ ID NO: 228909 - DNA, 1176 bp, Klebsiella pneumoniae
atgcctgattttgctgcttcaccgctggtggacgccctggaagagaatctgttcagcctgctggaaaacctggccgcggaggtcaacaccgacatgctgccgttgatcgacctctccagcggcagtccggatcaacccaccccgccggaagtgattgacgcgctgcagagcgccattcatcgtcgtgaaaaccatggctacccctcattctggggcaagccgcaggtccgcgaagcgatcgcccatttttatcgtcgccagtatgatgtggaattcgatccgcacagcgaagtcgcggtatttcagggctcgcatatcggtattggcggcatcccgcgggcgctgctccgtcccgggcaatacctcatctccaccgatccctgctatcccatttatcgctcagcggcactgcagtcccaggcgacgttttatggcctgccgctcagggctgagaaccatttcctgccggattttaacgacctcccccgggaggtggctgccaaggccgggctggtggtgcttaactatccgcataaccccaccggcgccctcgccacgccggcgctgttcgccagcgccctgcagtttgcccaccgtcaccaggtgccgatcctgcacgattttgcctatgcggccatcggcagcgcggccagtgacgcgccgctgagccttttctctcagcccggcgcgaaggcgtggggagtggaaacctacaccttctccaagacctttaatatggccggctggcgcttcggcttcgcggtcggcaacgcctcgattattcgggcatttaaaaagctgcacacccacagctacagcacggtgtttggcgcgattcaggatgcggcgatcgccgcgctcagcctgccggcagaacggattgcgcagctgacggcggcgtatcatcagcgccgggagtgggttctgcgtcgactggccgcgctgcgctggccggttcgtaccgcacaaggcacgttcttcctctggctgagcgtgccgcccgggtaccgttcacaagagtttgcccgcctgctgctgcaggaggcgcatattctggtggcgccaggcactggttttggcgaagggggcgaagggtttatccgcatcagtctgacggctggggacgacgcgctgagcaacgcgctggaccgtctcgcccggctggcgctgttttag

SEQ ID NO: 228910 - DNA, 360 bp, Klebsiella pneumoniae
atgacaatttaccgatgggcttcggcctgcctgttaagcatgacctgcgccgctacggcggcggaatttaaaaccatcgaggccgatctgctggcctccaaccggctgttctgtatgaccggctatgatcataagccgatcggcgtggcgtgggagagcgtcaaatccagccgctatcaaccgcagtcggatggcgaccgtattttcagcgacaccgtctcccggcgctttctggaagaggagaataagaccgccttttacaatggcgccaaatatcgcgtactgggtaaacccgccagcgcctgctatgactattccgccgcgcgtattcaacgcatggcgggctacctgaaggtgtaa

SEQ ID NO: 228911 - DNA, 912 bp, Klebsiella pneumoniae
atgaataatacgcaaagcgtgttggtttttggcgccaccggtcagcagggcggctcggtggcgcgggcgctgctgcaccgcggctggcgggttcgggcgctggtcagggatcctttctccgccggggccgtcgcgctggcggcacggggagccgagctggtggtgggtacctttgaagaccgggcggcaatgcgatcggcaatggccggggtcgacggcgtcttcagcgtccagcccagttcgccgggagggacggtgaccgatgagcaggaggtacgctacgggataaccatcgccgacctcgccgtcgagtgcggggtgaagcatctggtgtacagctccggcagcgcggcgggggagacgcccaccggcgtagcgcattatgacaccaaagcggaaattgaacggcatatccgccgcctgccactggcggcgaccatcgtgcgtcccgccacctttatggagctgttggtgatgcccggttttggccttgatgaaggtcattttcacttttttatgctgccagaggggaggatgcaggtgctggcggtggaggatatcggccatctagtcgcggcagtttttgccgcgccagcgcggtttgccggcaagacgtttgagatcgccagcgacagcgtgaccggccgtcaactggaggcgttattctccgcggcggcgggacggccgatcccctattcgcgattttccgatgaggtgctggccgccagcccttttctgcacaagctgaccgggctggtggacgacgggcggctggccgggcacgccgacctcgacgccatgcgccagctgcatccgcagctgcacaccttcgccggctggctggcgggccccggccgtcccgcctttgagcgggcgctgaccagcggggccagctgggcgtttaatcgttaa

SEQ ID NO: 228912 - DNA, 861 bp, Klebsiella pneumoniae
atgcaagcttaccagacaggcgacagcctgatattcaaagttccggagcgcgagattagcctgcagccggcggcgctctatcccgcagcgttccctgcgacggaggcggacgccgataatcagccaatcgcgctgtcgatccacagctgggtggtacagactccccacgatctgattgttatcgataccgccaccggcaacggtcgggagcgcggcggcaatgctctctatcatcaacttaacacgccctatctggagaatctccgcgccgcaggagtgaacccggaggacgtgaccctggtactactgactcacctgcatactgaccatgtcggatggaataccgtctggcaggacgatcgctgggtgccgctgttccccaacgcccgctacctgtgctcggcaaaagagctgacgcgggtgaaaaacagcgaacgctaccgggcgctgtggctcgacagcctgctgccggtgatcgaagccggcctgctggaaaccgtcgatgtggcggcccggccgcgggtcggcgggcggatcgcctttgtgcccacccccggccacagtccggaccatgccgcgctgatcctcgccgccggagatgattacgcctgtttctccggcgatcttcttcattccccgcgccagtttacccatccgcactggaactcggcgttctgcggcgatccccggcaggcggaagcctcccgacgggagatgatggcgtggggagccagccatcatgctcaatggttcaccgggcattttgccaggtcttcctgcggctggctggaggaggataagcaaggtgactatcgctggcgagaggccgggcaacaagctgcagataaggggaaacagtga

SEQ ID NO: 228913 - DNA, 906 bp, Klebsiella pneumoniae
atggacagactggatgccatgcagttgtatgttgcggttgtggatgcccacagcttcgcccgggcggcggaggtgctggggcagccgcgctcaacggtgtcgcgggtagtgaaggagctggaggcctggcttggggcgcagcttcttcagcgcaccacccgcaagctcagcgtgacggccgagggacgccggtattacgcggagtgtaaacggctgctggccgagatggcggcgatggaagcctcctttcccggccgctcggcccagcccgccgggcggttcaaggtggggatgccgcaatctcttgcccggcactgcgtattgccaaggatcggcgagtttctgcagcagtatcccgacctggagttgatcctctgctcaagagacaacgtggatgatattatccaggagggattcgactgcgtgatccgtagcggacaaatcgaagattccaccaccctggtggcgcgtcctctggcccgctaccgctggatggtcctcgcctcgccggcctggctcgcggcccacggccggccgcagagcatcgacgatctgcaccagcaccgggcggtgggctacctgaaccaccgtaccgggcggaccatcgactggcttttctccctcgatgacggcgattgcgcgatccgcatgcaggagacgctggtggtcgacgataccgatgcctatatccaggccggcgttcaggggctgggcctgatccgcgtcgccagctatctggcgcaaccttatctgcagagcggcgcgctggtcgcctgtctggagcaggccgcttctgatcttcccctgtcgctggtctatccgcaaaaccgctatctgccgccggcggtacgcgcgttttatgactggagcagacgcgttctgcaacccccgcttagcgaggcctga

SEQ ID NO: 228914 - DNA, 930 bp, Klebsiella pneumoniae
atgaaatctgataatcttaaccacgaggaaaagatattggtgctgggagcgggacaactgggcgccgccgtactggatgcgctggtacctgcggtgatccagcgccagggcgcggtctcggttatcgtctcgccggcggcctgggatgaagccggccagctgcgttcggcaagccaccgggcgctggccgacgccggggccacctttctcgccgtcgacattgccggtagcgacatggagacgctggctggtcagtttagcggattcaccaccgtgattaactgcatgggctttgtcgccggtccggggacgcagctaaaaattacccgcgcggtgctggccgccggagtgccccgctattttccctggcagtttggcgtcaattacgatgtggtcggcaaaggcagcggccagccggtgtgggacgagcagtatgatgtccggaccctgctgcgcgcgcagcaggccacggagtgggtcattgtctccaccggcatgtttaccagctttctcttcgagccagacttcgatgtggtgaatttagccacccgaacccttcacgcccttggcggctgggacacccaggtgaccgtcacctcgccggcggatattggccgcctgaccaccgcgatttatctgcatcagccgcggatcgtcaacgaggtggtgtttgttgccggcgaaacgacctcttaccgccagctggcggaaaccgtggagcgcgtgacgcagcagacgttcagcaaagccgttcacaccctgcccgccctgctggagcagctgcggacggacccggataacgccatgctgcgctatcgcgctgccttcgcccggggggatggcgtgtggtggccgatgggcgacacctggaatgcccgccacgcgctaccgacccaggacattgccggctggctgcaggccgcgcgctga

SEQ ID NO: 228915 - DNA, 207 bp, Klebsiella pneumoniae
atgaacaagttgcttccactgatcgtattgagttgtctgctgccgctggcggtcaacgccagaaccatcaccgccaccggcgataccctggacaacgcggagagcaaaattcgcgagcaggccgcccgcgagggcgcaaccgcctatcggatcattgaggcgcgaatgggcaacaaagtgcatatcacggcgaaaatctcggactaa

SEQ ID NO: 228916 - DNA, 879 bp, Klebsiella pneumoniae
atgcgcgacgaactcttcgctctctgccgccggtatgccgatgctcatgtcgatagcagcggggtggcggttaccccggttcccggcatcaccctggtgcgggccctgcaccccggcgatctgcaggcggccatcgccaggccgttagtggccatgctgctgcaggggcgcaaaagcgtgaccaccggcctggcaagctttgactacggtccgggggaggcgatggtgatcgccgccgatgttcccaccaccagccagatcaccgaggccagtcagcgctttccctattacgcgctggtgctggagctggacctggctatcctgcgcgagctgcaggacgccggcccatctggtccggatgaggcgccccgcgtcggtatcgaaccgatgaatgctgacgtgacggacgccgcttatcggctggcaaggctgtttgatcaaccgggggcgctggcggtgttaggcgaagggctgcggcgggagctgcattactggctgttgcagagtgttcacgggccagccatccgggcgctgggcgctgtagacagccattcggcgcggatccgccgggcggtggcgatgctgcgccgggattttatgcagccagtcagcgtcgacgcgctggccgacgccgccgggatgagcgtctctgtctttcaccgtcatttccgcgccatgaccaccttgtcgcccctgcagtttcagaagcagttgcgcctgatccacgcccgccgcctgatgctggcggaagggatgagcattgcccaggcggccggcgaggtgggctatatcagcgtgtcccagttcacccgggaatatgctcgcctgtacggtgcgccgccgggccgcgatcgccgacgggaaaaaatgagcgcctga

SEQ ID NO: 228917 - DNA, 756 bp, Klebsiella pneumoniae
atgactaagattgcacttatcaccggcgccaaccgcggccttggccgtcagaccgcactggatatcgcccgccagggtggggacgttatcgtcacctaccgcggcaatattgaacaggcggaagcggtggtggccaacattcacgctctcggccgcaaggccatcgccctgccgctggatatggcgcagaccacccgctttccggccttcgccgacagcctgagcgctgcgctggccagcgtctggggacggaacaccttcgatcatctgatcaataacgcgggacacggcgaatttgccccgctggccgaaacgcgcgaggcccagttcgacgggctgtttaacgtccacgtcaagggggtgtttttcctcgttcaaaccctgctaccgctgctggctgacggtggacggatcgttaacttctcttccggactgactcgcgtctcatatcctggcttctccgcctacgctgcggccaaagcggccgtggagatgctgagcgtgtacatggcccgcgagctgggcgggcgcggcatcaccgtcaataccatcgcccccggggctatcgccaccgattttggcggcgggctggtgcgggacgacgcgggggttaacgcgcagtttgccgcgatgacggcgctgggacgggtgggcgttcccgaggatattgggccgatgatcgccagcctgctgcgcgacgataaccgctgggtgaccgcccagcggatcgaagtctcgggcggacagactatctga

SEQ ID NO: 228918 - DNA, 471 bp, Klebsiella pneumoniae
atgaaactgcagcaacagcaaaatccgccgcggacagccactttggatggggcagccgccgcggatatcgccatgtttcgccagcagatggcggcgctcgcccggcaggtgaatcagtggtttgacggaacgggtatcgaggtggtggtttcgacccgccatctccacgatctgagcacccttggctatagcctcaatagcggcatctaccgctacgatatccctggtatccgcctgcaaaacggcgcgcgcagcgtcaatatcgtgccacagcagctgtgggatggcgtggaaaagggggtggtaaccctgagtcttgaagcacccggcggcgtgggatcccgggaggtgttttatctgagcctggccccggaggatggctggatgatccgcaaggcgcaccagtccccggaggcgcgccttttgcttaccgaagatcgtttttttatggcgatcgacagcctggcctga

SEQ ID NO: 228919 - DNA, 543 bp, Klebsiella pneumoniae
gtgttacgtataagtttgactaaaaccgcctgcctgctgcccctgcttgcgctttgcctgagcggatgcgggctcacccagcgcgtctcggagggaacaaaatctgccttcaacgccgttttttataagcaaattaataccctgcatctggactttaccgcccgcgaagcgctcaacaccgatgccagagagaatcactcgctttccgaaccggtggtggtgcgcatctatcagctcaaagatcgccagactttcgaccggctggtttaccagcaactgctggaggagggggatattctgctcgccgccgatctcctcgccagtcgcgatctggtgatcagccccggaggggatgccagtctgaatatgccgctggaaacggcggcgacgttcgtggcggttgtcggcctgttccgccatccggacaccgacagaaatacctggaagcaggtgctggcgcgcgaggaattggacccggacaaaccgcgcatttttaccgccgaaaacaaccagctacggctcaggcctgaagcggcgaagtaa

SEQ ID NO: 228920 - DNA, 1086 bp, Klebsiella pneumoniae
atgggaagagaagcacagccgccgcattcccggctgaccccacggctggaggccgacctgccgcggatcaatttttaccgctgctgtcagcttctggaaaagcggcgtcccggccaaccgctgatgggggcgaccagccatccggctgacgatccggtgcgtttttacccgcatccggggatgggattcccgaccagcgaactcagagccgtggaatacgatgaggccgatgactgcgggccgccggtcattcgcaccacctttatgggcttgtacggtgtcgattcgccgctcccgacggcctggctcgatgatatcgcccagcgcagggaagggcatgacgcgctgcagggcttactggatatcttcaaccaccggatcatgacgcagttttaccgcatctggcggaaatactgctggcctgccacctttgagcccggcggtaccgatcgtctttcgcagtcgctgctgggcctggcggggctgggcatccccggcacgacgcggcatatcgcctcgccggcgtcgcgctttctggcgctgagtggcgtgctgcgtcagccgggcaaaactcagcaggggatccaggcgctggtcacgctgctggctccggagaccaccgtcagggtgagcccgtacagcctgcgtccggtggcgatcagccagccgctggggttttacggcgatgacgacttcttactcgacggcaatacgccgctgggtgacgaagcgatggatgccagcagccagctcctcgtcgcccttaccaccgacaatcccgaggaggcgcagggctggaagcctgatggcccgctgtttcgggacttcctcatcctgctgcgggtgtatctgggctggcgattccgggccaacatcaccctgaccgtgccgacccgactgcttgctgtcccgccgctgggggacgagccgttctggcttggtatgaacggcgtgctgggcgctggagagggcgagagccaggatgatatccctcagacctttaccaccgaactgggcacctataccggcctgcagcctgccacctcttctcaaggaaaccgacgtgttacgtataagtttgactaa

SEQ ID NO: 228921 - DNA, 1755 bp, Klebsiella pneumoniae
atggacgatttaaccctgcgttattacgacgctgaaatgcgctacctgctggaagcgggtgaagcctttgcccgcgctcatcctgagcaggcggcgatgctcaatctcgacaaagcgggcgcccgcgacccctttgtcgagcgcctgtttgaaggttttgccttcctgatgggccgcatgcgccagaagctcgatgacgatctgcctgagctgaccgaaggcgtggtcagtctgctgtggccccattatttacgtaccattccctcgatgtcggtcgtggaattcacccccgactggcaggaaatgaaagagccgatgacgatggccaaaggctttgaagtgctttcccggccgatcggtgaaaagggcacgcgctgccggtacaccaccaccaaagcgatcgctctgcagccgttatcccttgagcgcgctcagctcaccaccgatacggatggccggtcggtgatcacgctgcgctttaactgcagcagcctgacggactggcgccgggtcaatctctgccatatcccgctctatttcaacgccgatgcgccgctggcctgcgccatgcacgaggcctttaccctcaatgtggccaggatgtggctgcgtgtacccggtgaggaggacagaaggccgctgaacgggtatttcagcgcgctgggatttggcgaggatgatggcctctggcctgaagatggccgcagttttcgcggctaccagctgctgctggagtattttaccttccgcgaaaagttcatgttcatcgatctacgcggactggagacggtggcttttccggccgggatggcgtggtttgagatcgacgtcgtactggcggaacgctgggaacatgacttccgcttcagcgaaaagcagctgcgcctgcactgcgtgccagtgatcaacctgttcccgctggagtccgatccgctaaccatcaattccttgcagacagaatacctgctgcgcccgatgcgcgtgcaggacggccacaccgaaatttacaccgtcgattccgtgatctcctcgagccagcaggtttacgcgccattctcaagctttcgccacaaaggcggcatgatgcgtcatgacgctcctgaatattactatcatacccgggtgcgccgtggcccctccgggttgcataacacctggcttatcgtcggcggggaagcctttgacaagcatagcgtaccggaagatgaaagcctgtcgctgaccctcaccggaaccaacggccagctgccgcgtcgcgcgctgcagagcaccgtgctcgatacggtgatgaaaaccacctcggccagcgtcgcggtgcgtaacctctgcgcgccgacgctgccgtgctatccccctgcccaggatcggtttcactggcgggtgctgagccatctgggcagcagttttctttccctgatggacaacgcggaggtcctgcgcggcaccctggcgctgtatgaatggaccgacagcgagatgaatcgtcggcgtctggaagctatcctcgacgtgaagcaccgcgcgacagagcgctttgcacagggccatctgctgcgcggcgtgcagattgaagtcaccctcgacagtcacggctttgccggacgaggcgacatatgcctgtttggcgagatgcttagccgcttctttgcgctctacaccgacatctacttgttcaaccgcctgattttcattttgcaaccaaccggagaacgactggaatgggaagagaagcacagccgccgcattcccggctga

SEQ ID NO: 228922 - DNA, 1593 bp, Klebsiella pneumoniae
atgagcattttacaaaatctggttgccgccagtcagttggatgaaagcgtactgcgccagcaggcccggtcacgccaggcgcattggcagtcatggcttgcgccaatcagtgatagccagcccaccgggagcgatccgggctatgacgatgattttcagcgtatccgcgaggaggtcaataagatctccggtgtcgataccgaactgatttgccagctggcagaaaaactgctgactcagacctgcaaggatctgcgcgtgatcaccttttacgtatgggcgcgtctgcagcgggatggcgagagcggtctggcggagggcgttacgctgctggcggcaatgcttgagcggtttggggctatgcttcatccccagcgtgaacgtagctgtaaatcggcgctggaatggcttggcagtcgccggatgtcggacagcctgtctctttatccggaagtcgacatgaccactatgcaggtcattatcggggcattattgctgacggaagcctcttttgccggcttggctgaggcatcccgccccgatctttccgggctatatcagatactggagaaccgcctggtgcaaagcggcggagcccgcagcctggtgccgcagaccagccgcgaagaacacgatctgctgccccaacatgcagacaccgctccggtaatgcataccgtcacgtcaggtcgtgatttgctcgatcaggctaaggtgctggcgaaatatctgcgcgagtgtcccggcggatggctggcaggtcatcatctgatgaagagtgtgcgttgggataccttaacggagttaccgccgctggatgcctccggccggacccggctgttgcctccaaagcctgagagtaaagcccatcttaagcggttgtatttacagaaaagctggtcggaactgctggagcatacggacacgctgttggcgcaaggcgtcaatcatctgtggctcgacgtacagtggtacgcctggcaggcgctgctgaaactggatgctgacagcgtacgggccgatatcctgtgccgggatatgaaagggctactggctcgtctgccggggctggaaaccctggcatttaacgatggtacgccattcgccgatgaagtgacgctcaactggcttaacgagtgcgtcctggaagagatggcccgatggcaagatgagccggtaatggcggcgaccagcgctgatgaggtgctgtcgctggagccagaagtgctcacccgcgcggacgatgaaggcattgagtcggcgctgaactggttacaggcgcagccgggctataccaccagccgcaatcggtggctgatgcgcttactgatggcgcgggtcagcgagcagtacggaaaaaatgaaatggcgctgcttctgctggcggaactcgacagccgcgcccgggaaatgacgctcgaacaatggaagccggagcttatctttgaggtcaaagcccgccgactccggctgctcagaggcaaggccgggcgcagtgaggcagaaaaaaatcgcttgctgccagaaatggagtcattgcttgccgggctcatcgctctggatcccgctcgcgccgcggtgctgtgcgcataa

SEQ ID NO: 228923 - DNA, 3441 bp, Klebsiella pneumoniae
atggacaacgtcaataaacctgccgctatctctgtggcggctacggttatcgtctgtattgctgcggtcacgcttctggtgctcctgggcgggttggcatggtggctatgggcgatggatcgtgccacgcagtgggaaacgctgcgcccgcttatcgccacgggctttattatctgggggatggcgctcagcctgctggtactggggtttatggcctttcgactgctgataaaagataaggttaagccttcagtagcgcctgtgcggcaacccaccaggcccgccgggcgcgaagccctttatgccccgctgaaaaagcaccttcacgcacgttacagccttctttggcggcacaaagtccgcctgctgctggtcactggcgacgaggcggcaatcgaacaactggtgccaggcctgggacagcagcgctggctggagggccagcgtaccgttctgatttacggcggcagtctactctccgaacccgataaccagcaatacgccgcgctgcgcaagctgcgccgtggccgtcctctggacgggattgtgcgggtgatgccgtcgtctctcaccctgacgccgcagataagcgaaaacgacctgcgtgggctggaaaaaatcagcgaactgctgggctatgccgccccggtctggctgtggaaactgggcgacagtgagtggtcgcaggcaaaacgcactgaacagacggttggtgccactttcccgctgcgtgctaagcctgacgatattaccggccagctggagcggatgctgccggccctgcgggcgcaggggatgagtcaggtcgcggaaaataacagccacgatttcctgctgcggctgggccagcatctcaaagacggcggaatcgcccgctgggctcagcaactggtgccgtggctctctgtttctcaacagcgcgttccgctgcgtggcctgatgttcagcctgcctgagaataaacccacgacttcgcctgagggcacagccgacgctgaacagtatatcccgggggcacatcgtcatgcgctgaccctgccggcaacctggcaggggattgttgaggactgcagccgcgtgcgtggccgccgtgtcagtatggcttgggagcagacgcttgcctggtcgctgatggtcatcattggtatctggggggcgggaatactgctgtcgtttgcgataaaccgcatgcagatagtctctgttgccgagcaggctcatgccctggtggagcatccttccgtatcggattaccagctcacggcactccataacctgcgaaacgacgccggtcgcctgctgcataatactgaggagggcacgccctggtatcagcgctttggtctggatcataaccatcagttgctcgacgcgatgctgccctggtacggcgtggcaaacaaccgcctgatacgtgacccggccaatgtcgcgctgcggcaggcgctcaacgagctggtcaactccgcccccaacagcgaccagcgagcccagctggcgaaaccgggctatgaccagctgaaagcctggctgatgatggctcgtccggataaagccgatggcgccttttacgcgcagaccatgaaagcggtccagccaacgcgaacagggatctcgaccggtctgtggcaaagtctggcgccggatttgtgggctttttatctcacccggctacccgaacggcctgaatggaagataactccagatgcgcaacgggtcagtcagagccgtcaggttttgttgcagcagataggtcgccgcaatgccgaaagcaccttatatgagaacatgctcaaatccgtgcgtcgtaattttgccgatgtgtcgctggaagagatgaccagcggcaccgatgcgcgccgcctgtttaccaccgatgaagtggtcccggggatgtttacccgccaggcatgggaaggcggcattcagcaggccattgataaggcagccagctcgcgccgggaggaaatcgactgggtgctgagcgattcgcgcaaaacgatgtcgacagacctgtcgccggaggcgctgaaagcgcgtctgacccgacgctacttcaccgatttcgccggcagctggctgaattttctcaacagtctgcgacttaatccggcgaccaatatcgccgatgttaccgaccagctcacgctgataagcgatatccgccagtcgccgctgattgccctgatgaatactcttgcctggcaggggcaggcggggcaacaaagggaggggctgtcggacagccttattaaatcggccaaagatctggtgggcgggaaagacaagccggtcatcgaccagtcggcagccggcccgcaggggcctctggatgacacgttcggcccactgctccagctgatggggaaaaacacgggcagcaacgtcatgtcggccgatagcaccctaagcctgcaaacctatctgacccggatcacccgcgtgcgcctgcgtctgcagcaggttgcgaatgcctccgatccgctggagatgatgcagaccctggcgcagactgtcttccaggggaaaagcgtcgacctgaccgacacgcaacaatatggcagcctgatttcggcaagccttggcgaagagtggagtggcttcggtaacactctgtttgtgcagccgctgactcaggcctgggaaaccgtgcttctgccgtcagcggccagtctgaatgataaatggcgccgatcggtagtcgccaactggcacaccgcctttgacggacgctttccgtttgccgccagcaaaagcgacgcctccctgccgatgctggctgagtttgtgcgcaaggacagcgggcggatcgaacgttttctcacgacggagctgaacggtgtcctgcataaagaaggcagtcagtgggtgccggctaaggtcaacagccacggccaggtctttaatccggcctttctgcgcgccatcaaccagctaagccagctgtccgacattcttttcaccgacggcagccaggggatcagctttgagttacaggccaggccagccccggaggttgtggagacgcagctgacgatagacggccaaaaattgcgctatttcaatcagatgaccgactggcagactttccgctggccgggggagacgtataaacccggcactctgctgacctggaccaccgtcaatgcgggcacgcgcctgttcggtgactacagcggtacctggggttttattcgctggctggagcagggtaaacgccagcagctcgaacgcagtcagtggatgatgagcttcaccgccccggatggccgcaccctgcagtgggtattgcgctcccagcttgggagcggcccgctggcgcttctggcgctgcgcggattgaccctgccggatcagattttcactgtcgatgcggctgagagcgcacaggccctgactacgggggtagggaatagtgacatggatgagatggaattatga

SEQ ID NO: 228924 - DNA, 1140 bp, Klebsiella pneumoniae
gtgaggccggtaccggagtatcccccgtacagagacgcgcgaccccctggtacggccaggtggctagcggcttcggccctgttggtcctgcttagcggcggggtcagcgctttacttccctcgttagaaggaaaaagcgccctggccgccaccgggatcctgttggctctggtgctgtcaggtaccggctggttgatccggctgctgtactaccgcatgagcgtgcataacgccaggttttatgaccaactggtggcatacgaacaacagcaatggtgggcggagcatcggcagccgatcgggttacaggaaggtctgttactgggacccatgggcaaaacgaccactgactggctgcgggtgctaagccgtcaccagcgtccgccagaggaagagaacgagggcggcggcagggcgctgcgagcgccatacctttcagtttctgaggctatcgcccgcgaaaaacggctggcggaactactggtgacggaatggcaacgacagcgcagtgaaagaacgcttacgccgccgctgcgttgctactggcagggaacggagctcgcctggcaggcgtttcgtgcacagatgaccctcactgttgcgcagatgacactaccctcacgcccgcatgcctggcgtggggaggccagcctcgcggagatagcacacgctctggcggaagctgacccccatgacactgtgcttatcgccggatgtcaggtggttgtcgcccagacgggggcggtgcaacccgccggagagtccgcggtactgtggctcgccggacgggacggtccggtgcacctgaccaggggggaaacctattgcgcagaaaaaggggaggccctgactgctgtagccgctcgtgtgctggagcagaacgaactgagcggccccccggaagcctgtgcgctgttttttcagccgggactggaagcgctggcgcacagcggttgggatatcaacctgtatcgccaggatgcctgttggggagacatcggcgagatggaaggcttgaccgttctgtctctggcggcgatctacgccgcgcactaccaacaaccgtgtggctggctagcccgcgatcccttgaataccctcgcaattggaattgtaaaacctgatggacaacgtcaataa

SEQ ID NO: 228925 - DNA, 258 bp, Klebsiella pneumoniae
atgaataaagtcattcgcaaaggcgataccctgcgggagtatgggggcagggtgctgatggggcattatcagtgttttggtctggggttcgcctgcaagggcgacccggtcaagtgtcacaaacacggtatgacgaccattgctgaaggcagcgcgcgaaccacgattgatggccggccagttgcgctgcacggtcatcgctgcgcctgcggctgcacgctggtcagctctaacccagactgcggggttgatcagtga

SEQ ID NO: 228926 - DNA, 2442 bp, Klebsiella pneumoniae
atgtccgaaataaccgaaacccatgccgcctgggtcccgccgccgtttccgccgcagggacgtctgccgggccgggcgctgcaggttgggcagaactgccatcagcagaacagcgacgagcggcgctatcatcaggaactgtgcctggctgcgggacggcgcgtggagccgccgtgctgcaagacgctgcatatcagtctgtttttcgatggtaccggcaataacttaaatcatgacttttttatcgcgaagccgaaacatccgactaatatcgcccggctgtttcgggcaactattggaacgggtacggctggcggggtgccgtctgacgatcagagcaagctgtttgatgatgacggcgggggggacgggaaatattttaaattctatatgcccggcgtgggaaccccgttcccggaagtgaatgacccggactattccaccatgggtctggtgggggcagttaagggggaggatcggattaactgggcgctgctgcggataatcgatgtgctgatgtttagtgccaccgaaaaatggctgaccaccacagagagtcgtcgttcactgaaagaaatgagcaccagctggaaccggctgtggtttggcggcagccataaccgttatgaagagttcactcgcttgctgaatggtcttgccccgaaactgatgccgatgctgattcagcctgagccgggcaagccgaaactgacaggcatcaagctgtatgtctatggtttttcccgcggtgcggcagcggcgcgcacctttgtgcgctggctgagcgaactgctgctcccgccggcggcggaaggtgaaaaaccgccgcagtgcctgcagacaggcgggatgcagctgcccgttagcgtggagtttctcgggctgctggatacggtggcctccgtcgggggggcgcatgtggtgccggttgccgacgggcatatgtcctgggcagacggcacgatggagctgccggatgatgaaacctatggcgggctgataaaaaaatgtgttcacctggtctccgggcatgagcagcgtctctgctttccgctggactcggtgcggcgggcaaacggcaaatacccgccctgtgccagagaggtggtttacccggggatgcattcggatatcgggggagggtatccgccgggggatcaaggaaaaggcaacgatgaatttgatcgatttttgttatcgcagatctcgcttcatgacatgtatgccaatgcatttcaagcaggtgctccattaaaggttccagaaccatcgctcccagaaaatttgaaaaatgctaactggagggctatggatccaacaatgcaattggagtttgctgtttcacctgaacttatcaaccgcttcaacgcctggcgcgaacttaccctgggccaaaccacgccgaaagcgttcgatcccgaagcagcctctcactacgaaccacctgccgccggcggcagtctggaaaccgtcattgctgagcagatggcctggatcaccgcctggcgcatcgaccgctatgccagaggctcgattctgaaaacgcccttctatcagcgcgccaagaataccgaagcgctgcctgccgcgcgtaaggcggcagaagatattcgtgataaagaacaggagaaggtgctcagggctcgccaggaccagatagcaaaccagcctcctgacaggatggacgagctggttctgcagccgggcgtgaaggattttgacccaaagatggatcaaacccagctgttcgacgcggcgaaggagctcggtaaggactaccacgacggttaccgtattccggataacctggcgcagctggtgctggataccgtgctgcagccggtgattttcgttctcaataccgatgatgaagcgcaggaataccggcgcatgaagcgtgacggagaagcccgggtggccgtcctctttcccgatgccggggaggccagcaacgcggaacagcctgccgggctggtgagggcgctgtttgatgaccagatacatgactcacgcgcctggtttatgtatgccgcgctcggcacgcgcgagatgtggaccggctacttccgctaccggatgatttacttcagcgagcgctgcagtaaaccgctctcgccgctggtgctcgccggagacctggtgggttttgcgaccgtgaccgcgggtgtcgtgctcagtttccggcaaaagcgcctgaccggcaagctggccgggctggctgcgacaggcgccgtgcgctcgctggaggtggcggtgctggaccagataaccggggaagcgctgccggagctgcccggaggggctcagctgcgggcatttacccacgagccgggaaccgttgtcgcacagcaaaaggcgcggaaagcggaagagcagctggcgcgggggcaagccgcgctgccggccagctggctggaggacgttctgacgacaacggtctga

SEQ ID NO: 228927 - DNA, 1080 bp, Klebsiella pneumoniae
atgagtgacgatctggatacggttaggttaacggtaggcaataaaataatagagggatgggattcagttcgtgttaccagaagcatagagcgattcccgtccgattttagtcttgggctaatggactattacccgggtactaatgataagcaactggtgcaggagggacagtcctgcgaagtgcgaatcggtaatgatctggtcctgacgggctacgttgacagttgggagccgtcaattacacggtccagacatgaagtgcaggcgaacgggcgcagcaagtgtcaggatctggttgactgctctgcagagtggccaaacaatgtcatcaaccaaagtgatgcgctgagtatcgcttcccgtctggcctcatggtatggcatcagcgtttcctgcgatgttagtgatctggttaatgtacctcagttcacaattaactggggggagtctccgcaggaaataattgagcgagtaactcgctggtctgcgctgctttattatgaccttccggacggtaacctgcttctcacgcgagtgggaacccgtcgcgctgccagtggtgtcgctgaaggggaaaacatagagcaggcgtactaccgcgctgatatgtcggaaaggttttctgactatgttggcatctcgatgagtatttcaccaatagctgggttttcgcctgatactgcttatgactcagtaactctggctaccgcgcgcgatccggaagcggcaaaaatgcgctatcgaaagcgtatcgttatcgttgaaagcaccctgatggcatctcagcaggcacagcgagcgattgactgggagatgaacaggcgttatggccgctcaaagcaactaagcgtcacgatagatagctggcgggataaagccgggaacctatgggagccaaatacgctgatacccgtaaatattcccacgctaaagctggctaataccgagttgttgattgccgacgtaacgtttatgcgcgacagcgatggcacccatgccaggctaacgctaatgcctccagaagcgtttgccgttcagccttacgctttctaccaacaacttgcaggattcaaccaatga

SEQ ID NO: 228928 - DNA, 1401 bp, Klebsiella pneumoniae
atggcaatcattcaggatgcgatcacatccctgatgggtggggatacggttgatgactggcaaagtcagcttcggccatgttccttccgtggcgtcccctttgccatcatcagtgaagaagggagtcatgggcgccgtcaggcagtgcatgaatacccttacagggataccgcctggatagaggatatggggagaggcacccgtcgttttgtcctcaaagggttcctcgttcaggatagcctcatatacggtggtggagacgccatatcccagcggatagctttgatcgccgcttgtgaaaccaagggcagcgggacgctaattcatcccacgcttggtgagatgactgtttctgttcctgaaaatggcctaagcctttccggagatatgaagagtgggagagtatttgagttcaccctgacactcattgagtccggtattaaagtatttgctataaccggcagtagcgcatcatcaaaaacggttaaaacaaactacctgaaactggtaagcactacggttcttagtaccatcgcacgtgttaaagctgaaatgcgtggggttagccaggcaataaaaacaataaaaagcacgataagcttttggtcaaatatggctaacagcaccattaatgaagtgacaaatatcagtagtgtgctgaaatcaacatttggtaatgagcgatatggtcgatatagcaaaggaactgtaggcggctcatcatctggattgacgggtggaacatctgcagatgatgcggaagattttcagttattatctgatcaggtatctgctcaggccattatggacagacagggaattactgacgccgctactaagctgaataactcaacaactattgatgattttatccagcgtacagccgacttaattaattatatcctcaactgcaccggaggtgttaacgagcgtattacggcactggaaaagctggcaaatgcaaccagcaccgaatatcagaattcgacttcaagcgccgacattgtacagaccgttaatactctgattatcgtcttatgcagtgctgctatggctacagcggcatctgactccaaccctaccagccgcgatgaagcggagcaaataaccaagcgtgtagctaaccagcttgatgccgcgcttctggttgctggtgacagagccgatgatgatttatacggtgagttgttgctggtcagatcttcatttcttgaggccatgtcagccatttctggtggtttgagcgagttaatgcaatttaattcagcccagcctcttcctgcgcttactctcgccagccgcctataccaggatgcttccagagcggacgagctgattcaggagtccagcgttccccatccggcatttatgcctgtttcgatgaaggtattacggcaatga

SEQ ID NO: 228929 - DNA, 279 bp, Klebsiella pneumoniae
atggctgaattagaacgtacgaaaatcattgttcttacaacgcctcttgaagatgtggcacagaaaacgcgctatgagcaacttgagcttaaagcgccgacactgagccaggctgagcagttttacgaaaagcagtcttcttcaacctctcttgcggcaatgcgcttacttatttctctggtatctgacacccgcgaaagcgtgctgcagccgatggattttatcgacttccgcaagtgcgaggtttacctgctcagttttttgacctggcagccctga

SEQ ID NO: 228930 - DNA, 2124 bp, Klebsiella pneumoniae
atgtccacaaacatatctcagtcctcggagagccagaatttaacccagcagaagactgaaagacttcttctgagcgtcagaaaaggctggaccccacctccgcgtatcagcgttcctcaatgggctgatgattaccgcaagctggcaaaagaggctgggagtacatcggggaaatgggagacctcaactgtagaagttgctcgcggaccaatgcttgccgcgactgaatcaggggtccatatcattacggtgatgtgctgcacacagttaatgaagactgcgttgctggaaaacctttttgggtattttgcacaccttgatccatgtccaattttgcttctgcagccgaaagaagaagctgcagagcagttctcaaaagaacgtattagccctctggtcagagtaacgccagtgcttcgcaaaatcatcggcgatacaaaacagaaaagctcaaaagaaaccatcctttataaatcttttaccggcggttttcttgctctcgccggtgctggtagtcccgataacctcgcacgccgaccaatccgcgtgctcctggcggatgaggtggataaatacccgattactcgcgaaggggatcctattgctctggcagaggagcgaacggcgacatttggcctgacatggctctctgtaagagcttgttctccgacagtagaggatgaaagccgtattgctgacagttatgaggagtcagatcagcggcgagcttccgtagtctgcccccattgtggccatcgtcagtttcttgacttctttaagcatgtccagtggccaaaagacggcgataagcacctgacaaaatcggcgatgattcactgcgaatgctgcggtgctggctggtctgagggtgagagactccgtgcattgcagactatacgctggcatcaaaccaagccgtttgaatgttgcggatcccgtcattcaccattaatggcgtatgaccagagatggcatgaaaacgatgatggtagcgttgatgcagtatggcgctggtcagaatcagagcggcacgctgtgtatcgggccatttgcccggactgcggttctgaagcgctggataaccatcatgccggttatcaggcatcaaagctttttagcccatggcaaaaagataagccttcggatattgcgaagaaataccttgatgccaaaggggaccccgacagggagcaggcctggtggaacacccaaatgggattaccgcataggcctaaccacgggaaacaactgccggttgatatcttgctatcgcgtcgcgaagttttccctgctcctgttcctgacggagttgcgctgttaactgccggggtggatacgcaggatgatcgcttcgaaatcactattaccggatggggtagagacgaggagtcctggtcagtagcgcatgacgtcatctatggagatctggaaacagatgagccatggaagcgtcttgatgcgtatctgaggcaaatctggcgccggactgatggccgaggcttgaatgtcatggcgacatgcatggactcaggcggccatcacacccaaaaggtttacgaatttgctaaagagcgtctggggcgtcgcgtctgggcaatcaaaggtgaatccgctcagggcggtaagcgtaatccagtctggccaaccaaacgaccttcctcgaaaagcaaagccagcttccgcccaattatgattggcgtgaactctgcgaaagatgttgtccgtggtcgtctgcatcttgaaccgccggctttaggcgttgcaggcgcgggctatatgcacttcccggatgatcgggacctcggatatttcaaccagctactagctgagcgactggtttacaaagtgatggccggacagcgtttcagtatctgggagcctattcccggtagggctaacgaagcgctcgactgtcttgtttatagctatgccgctctgtgtggtctcaagcatatggggttaaagctcaacgttagggctgcaaacctcgaagccaaccctgagaaattcttaccggcaccatccgtgccagaagaaaaaatcagctacgaactacccggggcagttgttgatgaacctgccaccgtcaagcgtaagaaaatctctaaactcctgccgcaataa

SEQ ID NO: 228931 - DNA, 171 bp, Klebsiella pneumoniae
atgatgttctattacatctggaatggcttattaatcctcgtcaccataggcttacctattgttttgatgatcgcgtcaaacggtgctcagcctacttttatgtcctgtcgtgaaatgcgtgcccgctacggtactcctcagaagaaaccgaaagacaatgatagcgcctga

SEQ ID NO: 228932 - DNA, 429 bp, Klebsiella pneumoniae
atgaaaaagtttttaatcgacatgattgataagggcctctattacgcgttgcttgcggcgctggcttttgggtcggtcacagggcaaagcaacgtccttaacgtggctgctgctgcgttttgggtggtggtatttcttggcggggtggttggcattatcacaatatttctcgcacatggtgctgagcatataactgatgagaaatcacgtcagtctgtgctggagtcgctgaggaagattgtccggcgtaagaacgtcattgctcgatggtggggctggttctgcatgatggcgaccatcgctctacttgcctacggcggctgggtatttaccgcagtgtgttatgcgctttcatccctgtttgtgcggttctgcatttctctggccagagacaaagtagaaaaacagacggtcggcgttttagcttga

SEQ ID NO: 228933 - DNA, 324 bp, Klebsiella pneumoniae
atgcaaaagagcagatcgcactggacgcatcgggagcctcggctgatatccgggttgctgttgcgaatgatgattgcactaatcgccctgtgcctgctggcgcagttaagcggctgcaacaattcgcgaacggtctacgtcaaagtgccggtggtcccgttaccggccagcctgacggctgacaccccgcaaccggaaatccccgacaatctgacgtggggccagagcctggatttaaacgtcagcctgctatcagcgctggggcagtgcaaccgggataaagcggatatcaggcaggcagagaaaaaacgagcctcgcaatag

SEQ ID NO: 228934 - DNA, 525 bp, Klebsiella pneumoniae
atggcgcaactgactaaaagagctggtgccaccggcgcggtttgttctgtggcagcgattatcgcaatagtgctgaatgcaggtcatgtgcgcaccaacgagcggggccttgaactgattggcaatgctgaaggttgtcggcgtgatccttatgtctgtccggcagccgtgctcaccgatggcatcgggaacacgcacggagttaagcccggtgtgcgcaaaactgacaagcagatcgccgctgactgggaaagaaacatccttgaggccgagcgttgcgtaaatacctatggcaatggccgacggttgagcgacaacacattttcagcggtaacgtcgatcacctttaatgcaggctgcgccaatatgcagaaatcgacattgtttgcattactcgtgaaaggtcaggttacgcaggcatgtaaccagtttcctcgctgggtgtacggtggtgggaaagttcttcccggccttgtgactcgtcgcgcagcagagaaacagctctgcctggacggtgtgaaatga

SEQ ID NO: 228935 - DNA, 321 bp, Klebsiella pneumoniae
atgaaaatgaacaaccagaacgagaatatcgttacccatttctttgcgtggctggctgctgttgcctcaatgctggggatcactacacaggacatggtttatatcctctttggttttatcggcgtggtgatttctctcgcgtcgtttgtgctggggagaatggatgcacggaaagagcgtaacgaagacagtaagcgaacgcagttactggctgattatctccatggcgtgcagcagaaaccggttcgtgaacgcccatcgtctgctgaagtgatcaccgaatcaatgaacaggataaataacgatggcgcaactgactaa

SEQ ID NO: 228936 - DNA, 579 bp, Klebsiella pneumoniae
atgatcaacccttctgaagttggtaagtcaggtgaaatgattcgcctccgtacgctggaaagcatctggatacagggaaagctgcgcatgtggggccgctggtcatacattggaggcggtagcggcggcaacatgtttaaccagctgttggcatccgggaagataacgaaaactgccatcaatgatgcactgcgccgtatgaagaaatcgggcattaccaaacctgagttggaagccttcttcaaggaaatcctcagcggtaaaaataaaagcggcctggcgttttgtactgacgaggagggattgaaaattgattcagtgcttagcaccgagcttgtgcgctccgggaataaagctctctataagctaatcaaggatcggtatgtttatcgcatgagcaagaaggccatggcaaaagagctaaacgaaaagcatccagaatggtgcttgaggacttgcgagagcagggttgatgtttggctaaatttggcagaatcgatgctttacgcaccaatgtgtgacgcgtttggcacaaatagcgacagattttacttgaatagttgcgcggaaagtgcttga

SEQ ID NO: 228937 - DNA, 168 bp, Klebsiella pneumoniae; identical to SEQ ID NO: 103813

SEQ ID NO: 228938 - DNA, 852 bp, Klebsiella pneumoniae
atgaccagcaaatttagcatcgacaacagagagctgcttcagagaatcagtagcggcgaggctgttgtgggaattgattttggtaatctaatcgtcagggagttggctgtattcaggctggccgcaatggatagcgagccggttgaactgccgcttgactacctgcaggggcacaaagacggtctagaatgggccgcccaactggcagaagccaatcaccctgagaccggagactggctttacgatgaccctatcgagctggcaaaagctattcgcaaaggtccagatatgccgccagtgcagccggtagcggacagcgagccggatcgcaatcctgtgctggcgtatgccgacagttatcgtgatatggcgaaacaaggcgtcgagtcagtcccaatatggagcgtcattaccgacctcgagcgaaacattgctccgctctatcgccacgcgcagccagcgctggtaattcctgacgagatgacagcagagcaggcatatgaaataggatattactatggagaaccggtaaacgtgtttgcacgaggagctaactggatgcgtcagcatatcattgactccacattagcagccgccccacagtcacccggcagtgaacccgctaccgtgccgggcaaatggattccggtaagcgagcggatgccggaagtcggcgttaaggtcttgtgcttcccggcagaggatgagccgattcatgcggtattcaatggtcagttatggctgcaggatgtttcatggagcgcaagttacgagccaattgataacgtcattccaatcaccgtaacccactggatgccgctgccggcagccccgcaggaggtgaaaccataa

SEQ ID NO: 228939 - DNA, 270 bp, Klebsiella pneumoniae
atgagcaaatcattcatcgtaattatccggcgcgcctggtgtaacgaaggcggacacggtatcgaatattcatctgaccttattcactacgagacccgcaatggagccatatcacacggttttcgggctgtggatagcgacgatttcaatgtcggcgtaatcgagggcggcaagttgatttcatttgactggatggataagccggttggagaaagcgaagacacgctggcgcagattgccgagctaatcggtctggaggatgtcgcatga

SEQ ID NO: 228940 - DNA, 426 bp, Klebsiella pneumoniae
atgactatcacactacaggcagtaaacgagctcatcgcctccctggagagcgcaggcgagccgtcgatcagagagcagaagttcctgaagctggcgaaagcgtaccagcagctggctgcggagaatgtggaggcaaaaaaaataatcagcgaatgccgggagtatttcatcgctggggtgatgaaccgtatcagaccaacgaatgaaggctacctgcatatgatttgcgacacgtttgcagacgaaacccccgccaccgatcgcatcgtagccgggattaaggctgatggggtggaggagttcgcagcataccagcgcgccattacagaggaatgggcctgtaaagaaggtcactcatccttgctgaaggtagccgaaagcgctgagctttttgccaagcagctgcgcgagggggccgacaaatga

SEQ ID NO: 228941 - DNA, 786 bp, Klebsiella pneumoniae
atggctaaaaactcgatcgacgcgtatggcgccagcggcaaaaccaacgttctgatgttcgaaccggaaaagctgcaccttgttaccgacaaaacccatcttctctacgatgaacgtatcaacctgccgatcgacgaagggatggttctgaacatcaaggagctgggtgtactggagcctatcatcgtctggaaagaccctgagacagggctcacctgcgtggtggttggccgtcagcgcgttaaacatactctggaggcaaataagcttcttttgaaagagggtaaggacccgctgcttgttcccggagtcgttaagcgcggatccgcaaatcagatggctaaatacatggtcagcgaaaacgaaattcgcagacctgataccccgctgggtcgggctaaaaaaatgtcagatgcgctcgaccgcgggctcgatgaggacgacattgcggtgttgtttggctgcagcgttcagaccgttcgagcaacgctctccctgctggatgccacccaggcagtcaaagacgctgtagagtccggcacagtgacggttactcaggcgcgtcaacttgcatcactgaaacccgaagaacagcgggagaaggtggcagaaatcgagcaggcgaccgctggcacaaccggccatgaaaaagccaggcgtcagcgagctgttcttggcgaaactaagccacgtctgaaaacccgtaaagaaatcacaaaagccctcgaaggtgccagcggcgaatacgctgatgcactgcgctgggtgcttggggaggctgtatga

SEQ ID NO: 228942 - DNA, 414 bp, Klebsiella pneumoniae
atggaaatcaaacacgagcacgttgaaatggtcctgctggcatgggctgcggaagttggtcaggcgttcgcggcaaatgctatcgctgaagaatatgcacgtattggtggcgatcaactgcgcctggtgccggggaaaacctggagtaaccagcaaaacattttccaccgctggctgaaaggtgagaccgaactacagcgcgagaaaatccgtttgctgctcccggcaatcctgcgtgttctgccgcgtgaaatccgtcaccggctaagcatctacgacaccattgagcgccgggcgctgcttgcggctcagcacgctattggaacggcaattgatgctcacgatgacgctattgaagccgtctacagcaaggcttatcagcctggagctgttgaagtgccgaagtaccactga

SEQ ID NO: 228943 - DNA, 270 bp, Klebsiella pneumoniae
atgcttacaccatacaaaaacattacggaaaaggccgttaaagcgattggtaacgtgtcctacgtcgcccgaatgttcaacttcaagtcgagccagtcagtagcaaattggattaaccgtaattgtgtccccagcgatcgcgttatcccgctctgccgtatggggggctgggtagtcacacctcatgaacttcgcccagatcttcaccccacgccaattagtgggcttacagaagaaattatcaccaagcgccggaaggagtctgattga

SEQ ID NO: 228944 - DNA, 396 bp, Klebsiella pneumoniae
atgagtaaaaaaaacttgtctgttaagcagttaagtttggcgggacaagtaacttacgaaatggctaggcggtatacgctcggcacggccaagccacgcgatgaaaagctgataagaattgcggagtggctaaacgtacctcccgcatggctggactacggggctactgaggctgctactgaatccgacactgttcaggaaatcggcacagatttccattacgataagcctgatgaatcagagttcgccaaccttagcgatgaggaaaaacgcttgctccgggtatttagaaaattccccgatgcagaagctaacaacatgctcctagcctttgagatccgctataagaagctcctagaattttacagcgagtacgctgatcctgacaaaaaatag

SEQ ID NO: 228945 - DNA, 219 bp, Klebsiella pneumoniae
atggaaagcaaagatctgatagtgattaacggtcagctatgcagcaaagacgttgtcctgctgattattgagaaggttttacctaccgttcttttggtggtggcggaaaaggtgaaggacaggcgaactaatgatgaagtgaaagaagcagccacaaccgtagttgaagccgctatctcagcaattagtgtgaagagcctagttgctcccaagtcttga

SEQ ID NO: 228946 - DNA, 195 bp, Klebsiella pneumoniae
atgaataaagatgataaggcttggcttttggccgttgtttacgcatcaactcaacccaaagaaatcacccctgaagagttcctttttgaagtcgaccgctctgaggttgattttctctccctgcttacaaagcgtgaggaagaggaaagtgcgcaagcgatcaagacttgggagcaactaggctcttcacactaa

SEQ ID NO: 228947 - DNA, 396 bp, Klebsiella pneumoniae
atgaaagcgatagccattcttgccatcgtgatgtttgccttgctgattgccgccgtcagcggccttgcgtggcaaagccataagcgcgaacaggcagagaaatcactgaccgacacccgcaaagaactgaaacagaccggcgatgtgctgaccgaggtcagggcgctacgccgggacgtcagccaggtggaagctgaactgaagagactgaatcagcagcgcaacacaacaggagagcaccgacgtgaaaacatcaaaaccgcactggccggtaacagctgcgccgttgctcctgtgcctgctactggcgctgacagcctgtaccagcgagccgaagaagtcagcaccgcagattattcaggaacccttacccgaaagcctgacggcaaaaactga

SEQ ID NO: 228948 - DNA, 702 bp, Klebsiella pneumoniae
atgagtacaaaacccaaaatgacctttgccgacattaagtcttcacaaatttattggcaagaagtgtggtttttagctacaggtataataagaaaaatgaatagactaattgagattacccctatgcctgagagagattacttccttaattgtgatcctgaaattactgatcttgttctcggcattcttagcaactcagctaacataaaaaaactcaccactccagcaccacaacaaaggggggaatcagcattcaaatatcaatttagaatagacagatgtaatgaaataaaaaaaattcttcctaacgtcgatttctctgcaatcctagacacaaaggtaagaaatactctagaacacttcgatgaatatcttgatgaatttatcattaatgcaacgcttggcgggcttgatccaaaatatatgcacatcacctacaatgtcggtgtttctgatacagcggtgtttacaccaaaaccattcccaataaggatgtatgaagcaaaaacaaaaatcttttataattttgacaataaagttgatctcggtaagatttatgatattgcgcaatccgttgataatggcattcaagaatacatcagaaatgaaacagcaaaacattatccatcccatactgtcgaagaaaaaatcgagtgttccggaggatcaattatacctagattagcaatttgtggtaaatga

SEQ ID NO: 228949 - DNA, 549 bp, Klebsiella pneumoniae
atgttgatgaaagccaggggtgtgaagggtaaggcaccctctcatgttcgcgcatggactgaagaggaagatgccttgcttgtgatgttgtatgcagtacacaccggaaaagaagtagcgcagcgtatgggcaggcccttgggaggggttcaaaaacgcttacgaatcctgagagaaacacgccctgatctgttgtgtaagcatcgaccatttaccgatgaagaagagcagtttattcgccaaaactgcaagcagatgaccgttggtcaagtggctagcttgctaaagagaaagcgaggggatgtaactcagaaagcattgcgtatgaacgtcagcttttttaagtgtggcgatgcacatcatagcactcgaatttcggatgatgacgtactgcttatcagggcactgcgtgacgacgaacaaggcggaaaactgacattttcagagatcgcggagaagttcgatataactgagcatgcggcatggtgggcgtacaacctccgccttaccgtagacgacagcgtttcgcgtgagctgttatctaaatga

SEQ ID NO: 228950 - DNA, 132 bp, Klebsiella pneumoniae
atgaacgaagaaaccaattaccgccggttctggcgaagccttgtgatctgcggcgtgctctgcctgctgcttttttggattccgtcggtaatcgccacgcttcgcatcttgaaaatgatttttgggggatga

SEQ ID NO: 228951 - DNA, 174 bp, Klebsiella pneumoniae
atgaacacgcttgatgccgttgtgacgcgagttctggacgttcgtccatatcgccatttctgggtcgtcgaggtagaggtgctgtgctacggcgattacagcaacacgatcatcatccgcgatatcgaaaaagaagcccgccaggttaagcccggcgacacggtgacgatctga

SEQ ID NO: 228952 - DNA, 438 bp, Klebsiella pneumoniae
atgctgtccggcggtctggcggaaaaatgccgggccgccgccttgcctctccgcgtgtcctggcctaaggtaagacatcattccctgtcgtttatcgtctctatggcttaccgctcccgcttgctcgacgctatccctggcatccgccacgcgtttctcgatgtccacgaaaccgccgcttttccctatgccgaattggccccggtgaagctggtccatggcaatgaggtgcatcactatcagcagccgctgccgacgcggccgcacgccgacgcggtgtttaccgccgtggccgggcaaaaggtgggggtggtgaccgctgactgcctgccgatactgatcgcctcgcgcgacggtcgcttcgtctgcagcgtccatgccggctggcaggggctggccagcggcattgtcgacaacagtctggcgacttttcgctaa

SEQ ID NO: 228953 - DNA, 1209 bp, Klebsiella pneumoniae
atgaaatctgtagagctatttgccggagctggcggcttggctatgggctgtgagatcgctggttttgagcatcttgccgttgttgagtgggacaaatgggcctgtgataccgtccgagaaaaccaaaagcatgggtttccgttgttgtgcaactgggatctctttgaaggcgatgtaagggcgtttgactggtcgcagattccaaaagatattgatcttcttgccggggggcctccttgtcagccattctcaattggtggtaaacacaaagctaactctgactcgcgagatatgtttcctgcgacagcagaagccatcagacaaattcgccctaagtccttcatcgtcgagaatgtgaaggggttgacgcgcgcaacctttgcgagctacttccagtacatccagttgcagcttgaatttcctcaggtcgcgccgagaaatggcgaggattggagcgagcacctgaaacgcttgcaggaagagaaaaccagtgggaaaagcaaaggaaaggggctgacgtacaacgtgctggcaacgttggtcaatgccgcagactacggcattccacaaaagcgcgagcgtgtctttattgttggtttccgtgatgaccttgagattgaatggtcgttccctaagccaacccatagctatgatgcccttgtttatgaccagtgggttactggtgactactggaagcgacatggtttagaaatgcccgatcttccggatcagttagttagccgtgtcacaaaactgcgtaaaaatcccccggatacactcccgtggaaaacagttcgggatgctattgcggatttgccagatcctgaaacaaaggcggctaagaagatccggaatcatacgttccaggcgggggcgcgaacttatcccggtcatacgggaagcccgttagatctgccagctaagacactcaaagctggtgctcatggtgttcctgggggcgagaacatgctcgttcgtgatgatggttccgtacgttattttactgtgcgagaaagtgcacgaattcaaacgtttcccgatagttatcgttttcacgggagctggactgaaaccatgaggcagttgggtaacgctgtgccggttcacttggcgtattgcgttgcaagtagtgttgctgaaaaactgttgatctccgagattggtaacatcctgagaaggggtggaaataataaaagggtttctgcatga

SEQ ID NO: 228954 - DNA, 651 bp, Klebsiella pneumoniae
atgacaggtaaagtcattccgtttaatccacttgataagcaaaacttaggagccagcgttgcagaagccttgttgagcaaggaagcacatccacttgatgagttaacttcgttctctggcgccgggatttatgccatttattacactggcgatcaccctgcatatgagcagttagcaggcatgaaccgtgatggtaaatttcagctaccaatttacgtcggaaaagctgttcccgcaggtgccagaatggggctgaccaatccggaaaaggttggcaacgttctttttaggcgcttaaaggaacatgctgagagtataagatcagcgcaaaaccttgatattaaagatttttattgtcgctttctcgttgtggatgatatctggattcctttgggcgagtctttggtcatctctcgctttaaacccatttggaattcttctattgacggttttggtaaccatgatcctggtaaacatcgctacactggtttgcgtcctcgctgggattttatgcatccgggtagaggatgggcgcaaaatctgcgtgagcgtgacgagacagttgatgaattgattagggattcgcggcaatacttgcagaacttgccgctcagtttagcccagaaattcatcgaggctgagggcgattaa

SEQ ID NO: 228955 - DNA, 876 bp, Klebsiella pneumoniae
atgagtgcagcagcaaaaactaaaaattacgacgtggttcctaccagcgtccgccggatgacgaagttacataccccggcaggggatattaaattcacgcctctgatgaaactaatctactcgtacatatggacattccaggggaatgagaacaggggcaatgatgatccgattcataccaatactaacgtcatcgcctgggaaatgggaatatccgaaagggcgctgatcgacgcgctcaatgcgctggatgctgcgagagtggtgataaagggaactgtcaaggttcgcggtaacgtcaactccagcaattacgtagcgatcccgcccgcttccgttgttacattgggtgtcactcctccctcaccaggcaaacggaaggtgatcaaaaagggcaaaaaaaccgatgaaaaggccgcagaggctgcaacgcaggcagaaccgcaggcagaacaggcaccatcaactgctacaccgtccactgatgcgcccgctaaccagcccgctgatcagcatcctgacctggcccctgagtcttccgaggttgttgctgaacagcgctatagcgtggcatgtaacgatgaccgtagcagcgatgatcacaccgctggtaatcatgcaatgagccaggaagcgcaggacgatgagccaacgtttccacccgagaaaccagagctacaggaaaccgcaggccgggttatagccccactcgatgatcttcgctactggtcagatattggttacgaaggcatggacgactacggcgtaatgtggggtgtatcaggcgatgaccttgataatctgattcgtgaacacctcaaaataagagaagcggaagcagaaaaaactttaaatcgcagagggcacattgattga

SEQ ID NO: 228956 - DNA, 330 bp, Klebsiella pneumoniae
atgttaactgacattgaagatcgcagtttccgcgatgtggtgatttaccgtgatgatccggtattcagccactacacaaaatcttttgccacgctggcggtagataccgtgccaggcacactactaacctcagcaggcgaagcatacgccagcggcagcgatatcttaatcgcactggatgcccacaaggcaggctctaacgttcctgtgattgtcgtagatcgtggtgtggtcctgaaccgcgccgggctgattggcaccaatacaaccgccgttgcaaatgctatcgcagcaatccaggccgctggcctgaaccgtgtttcagaataa

SEQ ID NO: 228957 - DNA, 1023 bp, Klebsiella pneumoniae
atggattttaaatacaacgattttaccggcagttttaataaacctttcgggcataacttcctgattcaggagctgggactcttcaaagaaaagcattcagatacaccgaaaattgaaacggatgacctccgcgaaggtgcaattgctgtagctgaatctgtaaaccgttatgggacggaattaattgcgacggagcgtccgctgagccgttcacgtctgctggaaattccccactgggcactgtctggcgaggtcgatacaagttcatggcagggtattcgccgtccagggactcagcgccaacaaacaatggatgaattagtcagtgatgaggccatccgccaatatctgaaattccgaaccattaaagaagatgttttggcaacttgtttgtttaagggcattgtcaacgcaccgtacacccagcagaaagttatcgacatggaagaagagttcggcagcggcttctcaagcgcggttatcagcgtaaatctgccgagtgctattcttgaaacactggatactgccgctacagaccttcgcgttagcctgggtggttgggttaaagcactttcaggaatgttggttctgtgctcccccgagttctacaaaaaggttaaatactcagaagagatcagggtcctcgtacaacagggtgtgctccccgattctacactattcaacgcatctgtacgggctaatctgccagcgtatcaggcgtttgaactagacggcctgacctttgttaacgctgtgggttatgagaaatatatctccgcaggcgaggcattcatggtgcccgtattcgctgacaatatcgtgcagagtgaccacagcccgcgcgaagttatatccgggccggcatcgcgtaatgcccgaatcgctgcgagtggtgtccagtctccattctatgcatggtccctagaggatcgtctgggtaatcgaaccgtccaagcagaatttggagtactccctttgcaatatgacctgtcgatgacaaaagtgttgagcttcgacgtgtaa

SEQ ID NO: 228958 - DNA, 204 bp, Klebsiella pneumoniae
atgaggttaaatctattaggtgtgggtaatgcgcctttgctgagtgtgaccgtcaagactcttagtgacgcgggcatcattaatatcagtcagctatgtcggacgctgcgagtaaagcggagtaccttcctgtcgaaggtcgccagtgtagggatcgaaaaggcgattctgcattacgtcacaaaattgaaagaagcaagctaa

SEQ ID NO: 228959 - DNA, 201 bp, Klebsiella pneumoniae
atggaactgccgaacgctcagtcagtaaatgatttcgatttccttgcacgaagctttgcccgcatggagagtgaggggttgcctgttgatctaaccgcgatcaccgggaacatgccagaggagttaagaaagtggttttgccgtcgatatgtacaatattgtaagcacgaaataaaaaacgaaaatgaagtgactttctga

SEQ ID NO: 228960 - DNA, 3135 bp, Klebsiella pneumoniae
atgaaaataaaaaaagttgagatcgaaggtttccgtgcctacaaatataaggaggatggaattttcgattttacgaacgatgatgaaatgccttctaactttgttgcaatttatgctcctaatggttttggaaaaagctccttttatgatgcagttgaatgggcgattacgaatcatttggaaaggcttggtggtgactataatcgttcaaatcatgaactcgcagctaaaagtactaaagaaaagggcatagctcaaaaaatcctacgcaataaggatgttgatagcagtataccaacacgcgttacagttaccaccactctcccaaaaccgttcaaccgaaaccttagagcgccacgttcaaattcaagtgatatcagaatcggtgtaaataagaataaagaaaatgaatacttcagaaaaattatcctaagccaagatgaaattgatcgatttttaagggaggctaaaccgcaggatcgatataatcgtttcatggaaagttttgggtgtgatgccgagattgcccgtcaggagttaacagttttaattaatgataacaaggttgtactagctgatctggaaaaagagagaaacaaacttctagatcaactacatgaaccagttgatgtatatatgttcgaacaatttaataaaattgtgtctgaattgaataaagacgatgaaaatttgatcttggtggatgatcaattctcattaaatactcaacatgacatggtttcagccatcataacccgtactcaagaattaaaaaaacaagcttctgctaatatcaatttgcgagaatcactaactaaatatttttctaaattgccagaattaaaacttaatcttagcctaatcaaggagcaacaacacaaactgcttaaatttagtaaaggattgcaggaggctgaacgatatcagtcattgttaacttcatactcgactattcagaacgaataccagtacgcaagccagcaattgctaactcttaatgaagtagctgaaaacttaaaagtttttctagatactcaatcagatataacaaatgccactgaaaaacgctcctcgctttctaggcaacatacttatgaagcaaccatacttgttgatcttcaacattcactcagcaaacttgattcagacttaaccgaggctgataatcgctcattgcttctacgtacggcgttagataattgctcctctatttattctgaaataaatgtacaacaagaacgactaaaaaaacttagtgctcaagttgcaaatacaaatttgtcattaactctaaataagaatcttcgagataatattcaggttgagttaacaacgatatcttccctcacagttaattcggaatcattgcttaattctgatttaagctcaattaattttgataagcttaaactagatgaattagggcacatttctgaagaactgaatgcgttactactgcacgatcaatctattaagaaaactcaaatttctttagccgaacaaatggggcttcatgaacgtctggttacctctggtctagagtatctgagtatatggcccactaatatttgccctttatgtaacaagccgcatgattctgagtcggctctccaaaaagaagtaaagaatacagaactattgtcaattctaagtaaggagaatgcagaaaaactcaatgcttccactaaacgacaaagcttactcaaagccaagatggatgcaatcgtccaagaggccgttaggattcagatggatcgcctttctgatctaagaactaaacttaacgacctaggtttgcaagtgtctaagctagaagagcaaaaatcattacttcaggcagaggtcaactctctacagttgcaaatcaaatcccttcaactttctgtctgggaacttactaaagaagaactcatatctcggacagaagccgaactcaaagatcttactttaaagaaagaagaattgcttaatagtaaaacagtgttaagccaaaatattgatgaaaaaaaattactcataacgcagattgagtcatcgattaaaatgcttaatttacaaatccaaaccacttcctctaaatcagcttatcaaaaggtaaatgtttaccttactgaaaatagcttgcagccacatgaatttaaagcatattatttcgaaaagcgaacggcaattgaaaaatgcagaaaggaacatttatctaatgcaaaaaaaattgctgagcagtcaaaatccctgaaagagactatgattgctaacgaaactgtgactgatattgaggtattatccgcagagaaaaagcaggcagaaactcatatcgctgagtatgaatcatttatacagtctttcgttgcgtctttaaatcaaatgattggcccgcaggatggcaagactgccgatgagataggaaatactataaccgaaaccattaatctccagatactgcaatatcgaagaattgatagcaaactgaaaaaatttgaactgttatcagaactattgaaagcaacagagttgtatttaacaaatcaagtgctccgtgaaaaccttaccaccgtggagaaacgcttaactcagagaaatcaagttgataaagtgctgctggctgagagagaaaaggttattgatgaacttagaaagctcataagagagttcttctatgaagatcttattgattctatttacagaaaaatcgatccacatccatccctcaaaaaagttgagttccgcccagattttgagacatcagatcgtcctggattaaatattgttctcagcgataaggaagggaaaaccgtgtcgccaattctttttttcagcgctgctcagctgaatattctcagtttaagcgtatttttggctagtgcacttcatgccaaggatgataatggtgatccaatagatgtcattatgattgatgacccgatacagtcaatggactcaattaatgtcttagccacaattgatctcctacgaagcatttctgttcgttttaataagcagattataatctcaacacatgatgataacttctttaatttgcttcagcgcaagatcccttcacaagtaatgggttcaaaattccttaagctggaaaaatttggtgttgtagttcctgtcgaatcattgagtaattaa

SEQ ID NO: 228961 - DNA, 945 bp, Klebsiella pneumoniae
atgaaagtccaagacggacatatgacaagcgtaagggaccatttgattgtcttcacagtcagtggcacaccagggaaagatgcaattgatggtatgtctggtggtggtatttatcatgtagccaatgaacgtccctatttggtgggggttgaatttggtatggatagtatcaacaagcatcaacaatatggtcgtgttcaatgccaagggctagtgagatttgaagaaatcatcgaggcaaataataaagcccccattataccagcctatttggaatgtttttcgcgtctgagagaacagatattcagttttaatgttattaataaaaatactattattaatttaaagactgagttacttaactttgctgatagccttgtcgctcaagggataccgcctccgttcgagctcatgacaaaatataaagacgatttaataatcggaccttttcagcctgctgatataaaagataaaaggttatggattgcttatttcgaatttttgataatttgcgcaattctggataatgtaagcgccactgactattgctatattaaagaattagagcgacgccgaagaatcctatatacaaatgatggttctaactgggttggtaagctagacataattctaaaagccgctagaaaatttcttgataaagacggaactgtgattgttgcgtctccagaacagggagctgatttattgccagatggatttgaagtggacagagttatacaaaatatcgcactgattccgggagccggacctcttgcccctatcgatcaggttgaacgggcgatgtacaaaagttttgtattgacacacctcgagggacttcgtaaacaatgcgtcgtacgtaatgaaagactttttgcaaataccgaacctggtgttgctcagttgcgtgcgtttaaggagcacttcaatgcatttattaaataa

SEQ ID NO: 228962 - DNA, 897 bp, Klebsiella pneumoniae
atgaacctaaagcaactttattattttaaacgtctgtctgaaactgaacattataccgaagcggcctccagtctgtgcatcacccagccttcgctaagccatgcgatatcagagctggagaaggagttaggggtcgcactgttcgccagacagggacggaacgttaaaattacgcaaaacggcaagcgttttctgccgtatgtcgaagatgccctggcctcactggaaaatggccgcacagttttgcaaaaaaacggcgctgaaaataaagaaaacattcgtatcgcctttatttacacgatgggcgaatatgttgttccgcagttaattaataaatattctctttcacctgagtttcacaatgtgactttttcttttactcaagggacctcgctgacgctgttgcaggagctgaaagcgggaaaagtcgatctggcgatctgctcttatattgccgatgagcccgatatcgattttattccggttattcagcaggagctggtggtggtgaccgccagggatcatccgctggcccgtctgtatgaacatgaagtcgacctcgtggagacgattcattatccctatatctatttttcagaaaatagcggcttacgtccgtttatcgataatgtatttatgcagcaaaagctggtgccggagattgcctgctacgtggaagaggataccgcgatggccgggctggtcagcattgactacgggatcgcgatcatgccgcggatctcggcgctctcccattacaacgtccatatcctgaagattaaaaacaccctccctccgcgctatatctatctggcgaccatgaaagaccggggactttccccggcgctgcagtcgtttaaaaatgtggtcatccacgacagccagaagatctgttag

SEQ ID NO: 228963 - DNA, 930 bp, Klebsiella pneumoniae
atgcgtattgaacactgcccgttctcgctggaatgcgggtttattgaacatgtccggtttctttcaggaaaaatcgaaacgcgccgcaaaaaagatgcaacccactatgtcgttaaaattaatgatactgccacgcgttacatcttcgacaatatgcagtttgttactccgccgacgacagaaaccccgtttttgtatgatcaggggagatggcccaaatacagcaagtgtgaatttaccgtcgggggaattactggtttttatcccggcgttcgctggatttatcgtgagcccacaaagtcatcgaatgcaatatttgaagctattacgataaccgggccaatggcggcagatggtggcgatccgaagaaatacccgatgtatctggcgagctatgatgcgtttgacggctcagtaatctgccaggatacgtactacattcccgacagcgaagggaagtatcaggaatttcatccgacaaaccagggattgtttgcctttggttatcagacaaaattcgggatactgcatctcaacaccaatgatatctctaaagttgccggtgcgatcttctatgcccgtgaaggcgagtataacctgggcgaactgtcgatatccggggcgccttataaactccttcagggcgtctcgctggggaatatcatttctcttggtgcactcgcgaagacgataacaaccggggacgtcgtgatatacggcaaagaaaccatcatgatgacggccgcaaccacgctgactgcattaaccggatttaccggccagactgtccgggtggtgagttttgtcgacggaagcattattcagaacaacgcgcggataaatacaggcaccggcgcggacgtaccaatggttaaaaataaggtttatacactcacgatgctgtcgaataccacagccacgaaagactaa

SEQ ID NO: 228964 - DNA, 291 bp, Klebsiella pneumoniae
atgtcatttaaattaagccaaacgtttgacgcaaacttaaccaccgataccggaatgagcctgggtaagcagcaggttacgttagaagtcatttgcgccattgtactgatacacatcatgcctgacggcacagcgagagcgacaattacctcatcagccaatggcggcgaccctgtacagacggatattttcgaatttagttactcgatgtcgtctggtgtggggctttacgatcaggcgctggcgcagatactggcgagtgagaaatatgcaggggcagtcattgcataa

SEQ ID NO: 228965 - DNA, 270 bp, Klebsiella pneumoniae
atgaggcagaacattcactttctcattatcccattcggcggcggcgcagacggcctgccccactcccgcgttctcacagtcctgaatacgttttgccggcgcgttaccatagctcagcgccacggtgccgacagccagcagaataaaagcaaaaattttcacagcgacatcaacgttaaaaccgaatatgcaggaaatgatcgcatgagcggcggcggaaagtcaaacccgggagcgtgcgccaccgcgctggcgcgtatggtggattga

SEQ ID NO: 228966 - DNA, 348 bp, Klebsiella pneumoniae
atgaaattaatctcgctgtgtctggcgacattggttgccggactggttgccggcccggttggcgcggcagacggcacgctgaactttatcggtaaggttgtgaacggggcatgcaagcttgagggagcgggcgacaacggggtcatcaacgtcagcatgggcgacattccgctgtcgcggctgaaaaacagtcagtctggcaccgggccggcggtaggtgtcgatattcgcgtcaaagattgtgagaaaggcacctactatattgtggtggatggcccccccccaccggcatgcctgaacatcgcgtactggccctcgacggccgcggcaagccggccggcaacgtag

SEQ ID NO: 228967 - DNA, 444 bp, Klebsiella pneumoniae
atgaacactaaaatattcgaagacaacattttatctcgtaatgatatcgctgtacgctacgtctttcagaaaatgttttccccacaaggtaccttagtcgcggttgaatgcttaagccgcttcgataatcttcccgtttcgccagaatattttttccgccatgccaccgcggcagttcgtgaacgtatttttctcgagcaactggggttgattgaacagcataaagcatggtttttacgtaaccatatttccgctaccattaacgttgatgaccatatcctgactctgctgcgccagaaggaaataaaagagaaaatcgccgccctgacctgcgtccattttgaagtgaccgaaaacgccgagaaacttctgaataattccctggccgcctggcaaagcccgcaggatacctcgctgtggctcgatgacttcggctctggctag

SEQ ID NO: 228968 - DNA, 1140 bp, Klebsiella pneumoniae
atgtctttatttcaaattgttcaagttatagcgcaactaggtagttctattattatttttaaaagaatcagtaaaaacaaacggtcagggattattttaattaatacaactgtgttaatgagagcttttttctattttatttgctctttcccgattgttatttatttttttattcacggagcaaatgattctttttggtttatatttgcagcatttctctcatgttttttctcctcccttgatgtatattcggtatattatgacgccattctaaaatcaaaaataaatactgtaataaacgtatgtggacttatactcagtcttgtgttgcgatggtggattgcaagcttcgagatgcctcccgttcttttaacgattccaatagtgttgactagcatgtttccatatttattaagggctatcgcatataagaataattataatgttcgaccacttttaaagagacacagaggaaagtatagaaggtatcttttgaaagtcggcggaagttttgtcatttctgatgtttctattgctatttatacaagactctcacttctaattcttgctgttcttgaatctaaaacaagtgtaggtatatattctgtggcactaaatttagccggatcttggtcatttattacgatgtctcttattacatcaacactaccaagtattttttctgaaaagaatgattctcttgctttaaaaaagactgttaaattaaatatatacatggctattatatcaatcactgtaatattttttgcatatcttttgggggggtggtttttgagattcttttatggtgttgaatatgacggggctttttatcctttaattattctttgtatgtcaacaatgatttcgacattaggtactgtttccgcacgtttcatagcaaaatattcaggctattcttttttatcaaaaaaaatgctggtcgtgttggtttcatctctaattttaaattatttattgatagcaaaatttggtattttaggtgctgctatttcaacgttagcgactgagattctttctcttactttatataattatttttttaagagaggaattgttgcaagcttacatattgagacaattaaatatatattgatgcctttcaggagaagggggtga

SEQ ID NO: 228969 - DNA, 216 bp, Klebsiella pneumoniae
atgataaccagtgacgactggggtagctacgccagagaagtgccaaaggatatacacctgaccggcaagctcttcacgcaacgtatcgagcgtaacaacctgactctccgcacccgcatcaagcggctggcacgtaaaacgatttgtttctcacgttccatcgagatccacgaaaaagtcatcggctccttcatcgaaaagtacatgttctactga

SEQ ID NO: 228970 - DNA, 903 bp, Klebsiella pneumoniae
atgttcatgacaaaaaaaagaaagacaataatttttacagatataatcaacgggttatatactgaaatattaggaaggcccgcagacgctgatggaatactttttcatattgaaaatttcattcaatacggaattgaagagggaactaagataacaacgaaaactttaatatcatctgaagagttctcagccaaaataaattttaaaacaaaacccgtttttccactggggacccagacaattaacggaaaagaggttgaacacatagtatcgctaggaaatcactgcctaacagcaactttattaaaaaagtacggattaaaaaaatactcctgcccttttgattggattttttcatcgccagaaatggttattgattgcattgaagatggattttcaacacttttgaataaaaaatatcattcatcaatcacaagttgtagaaagaacaatgattttgaacccggctcgtctcattccctttatgaagaaaaatataacataaaagaattattcactcatagagatataacaaaagctggcgattacaattattttaaacgctcagcagaaagattcaattccgtactaaaatcaaaagggggaaagatttttgtcatggtaagcagaagggagcataatctagaaaatcatttttatgacattgttgattgcttaaataaaaaaacaaaagactttgttcttatcgctatttcgttatcaagtcacgatgaagaaaacaaatattattcttcaaagatagaaaaagaagtagatggtagcatattttgcaaaataactccatctgttgacgaaatccccaccggaagatttgacaacataccggatgacatggcaataatatcattagtatcaaagtacaaactaaatctatctgcatag

SEQ ID NO: 228971 - DNA, 537 bp, Klebsiella pneumoniae
atgagcaacaaagctaaattcagcgccgctatgctggcgcttctggccgccggtgcgtcagcgccggtactgttcgatcagtttattggtaaacgcgagggtaacacgctaacggcggttatcgatcccggtggggtctggtcaatatgccggggggtaacgcgcatcgatggccgcccggtagtgaaggggatgaacttaacgcagagccagtgtgaccattacaacgcaatcgaacgcgacaaggcgctggcgtgggtacaaaagaatgttcacgttccactaactgagccgcagaaagtcggcattgccagcttttgcccgtacaacatcgggccgggggagtgttttccttcgacgttttatcgcaagctaaatgccggcgaccgcaaaggggcatgcgcggagatccggcgctggatattcgacggcggcagggattgccggttaacgaaagggcaggccaacggctgttacgggcaggttgaccgacgcgatcaggaaagcgcgctgacgtgctgggggctttacgaatga

SEQ ID NO: 228972 - DNA, 360 bp, Klebsiella pneumoniae
atgaatggcaaagcgaaattgcttatagcgggggtaacgttggcgctggtcgccggtgttttctactcgggatatctgaaaggatggtatgcgctttctgagcacgtaaatagccaggcacagacgcgggaaaagaagcaggagaaggcggtagcgaatggcgaacagaaggcggcgacagcgaacgctgaagccaaagtgatttaccgtactgtttatcgtgatgtgttgaaatatgtcaacgacccgaatcatactaagtgccagtttgatcctgctgctgtgcagctgcgccagcgagcaatcgacgcggccaacaatatccccggatttgatgaacccgccatgcaaactaagtaa

SEQ ID NO: 228973 - DNA, 1137 bp, Klebsiella pneumoniae
atgaaaagaaaagtactggctctcatggttccggcattattaatggccaatgccgttaatgccgcggaaatctataacaacaacggcaacaaactggacctttacgggaaagtcgccggcctgcactatttctcagacgacacttcagaggacggcgatcagacctatgcacgctttggcatcaaaggcgaaacgcagatcgcttccgagttaaccggctacggtcagtgggaatacaatatcaaggccaataccagcgaaaatgaaggagcgaattcctggacccgtctggccttcgccggtctgaagtttgctgactatggctcactggactatggccgtaattacggcgtggtgtacgacatcgaatcctggactgatatgctgccggaattcggcggcgatacctacacccagaccgacgtctacatgaccggccgcaccaacggggtggccacctaccgtaacagcgatttcttcggcctcgtcgacggcctgcatttcgccctgcagtatcagggtaataatgaaaacgccggttctggcgaaggcactaacaacggtggtgctcgtaaactggcgcgggaaaatggcgacgggtttggtatctccagctactacgatctcgatatgggcatcagcttcggggccgcctactcatcttctgaccgtacccataaccagctggcggcagcacgtagcagccatatttatgccaacggtgataaagccgacgcctggaccgtcggcgccaaatatgacgccaacaacatctatctggccgccatgtatgcggaaacccgcaacatgaccttctacggcaacggcgctattgccaacaagacgcagaactttgaagtcgtcgcccagtaccagttcgatgagtataatttaccgctgcgtccgtctgtggcctatctgcaatcaaagggtaaagatctctactcctcttctcgcttcggcgacaaggatctggtcaagtatgtcgacatcggcatgacctactacttcaataaaaatatgtccacctatgtggattacaaaatcaacctgctggatgaagacgaccgcttctacagcaacaacggtatctcgaccgatgatatcgtggccctcggtctggtttaccagttctga

SEQ ID NO: 228974 - DNA, 537 bp, Klebsiella pneumoniae
atgaccatcattaccactcaaagattaatcattcgccattttaaggaagaggatgcggcagctcttttcgattacctctcttcaccacgtactccttgctttaaggatgaaaagttacattcactcgctgaggcagaggtcgacgtggctaaacgagcctctgacccaacacagtttgccgtttgtctaaatgaaaccgatacgttaatcggacatctttttgcggacaatagcaacgagccagacagcaatacctggtcagtaggctggcattttaatcaacgttttgaacatcagggatatgcaagcgagtcagttgctgcactgtttgattatttatttaaagtaaaaggcgccagacgtttgtatgcctgggtggaagattataattactcctctcaaaaattatgcgagcgactacttatgcgacgtgaaggatgttttaaagaatttgtctcctttgaaaacgaggagggtaaagcaaggtatgacgacacatacatctatgcgttactgcataaagaatggatgaagtag

SEQ ID NO: 228975 - DNA, 213 bp, Klebsiella pneumoniae
gtggtagcggagtttgtcgccggcactggcgggaccaataccgggctggcctatcagatcctgcaggccggctatcagctggatatcccgctgatgtttgccgcgctgctgctgatctctctcgccgggattgcgctgttcggcgtgatgtcctgggtctcgcgtcgggcgctcagcgcctggcatgaaagcgaatccgtgcaatctcattaa

SEQ ID NO: 228976 - DNA, 504 bp, Klebsiella pneumoniae
atggtaaatgttggcttcaccgggagcgaaacgacggtcagggatgttgtggctaagtggcgtaagcaggttaacagtcccgttatcgccccagttcgactcccctcagcatccagggtaagccgctggttaatgccctggcgaatgatcagaggagaagaaaactatgcatcccgcttcatcgaatcgatgtgccagaaagaaccgcaactgaaaatggcgcaacagctgtcgctcgacttctatcgaatgctgaaaacgaagaataaatcgcagttaaatcaatcgttcactgacgtaagtcaaagtgagctcattgaccttcagcgtgttgcggccagtatggaagcggatgcaacagcaatacacgaagcgataagcagcagatggagtaatggcgttgtggaaggccatgtaaaccgcctgaagatgctgaaacgacagatgtacggtcgagctggcttcgagttacttcgacgacgagtcatgagccctctggcttaa

SEQ ID NO: 228977 - DNA, 3009 bp, Klebsiella pneumoniae; identical to SEQ ID NO: 121760

SEQ ID NO: 228978 - DNA, 174 bp, Klebsiella pneumoniae; identical to SEQ ID NO: 143759

SEQ ID NO: 228979 - DNA, 957 bp, Klebsiella pneumoniae
gtgaggaattctcaagaagccaaaaccaacactttcctggtagttgccgagcgttggtggaatgtgaagaaagccagcgtaacagaggactatgccgacgatatctggcgctcgcttgagagagatgttttcccagcaatcggtgatatcagtgtcactgagattaaggctcatactcttgttaaagcagttcagccggttcaggcaagaggtgcattagagactgttcgccgcctttgtcagcgcattaacgaagtcatgatttacgcgcagaacacgggcctgattgatgcggttcccagcgtaaacattgggaaagcattcgagaaaccgcaaaagaaaaacatgccaagtattcgaccggatcaacttccacagctaatgcaaactatgcgtacggcaagtatcagtatgtccacacgatgtctgttcatgtggcaacttctcaccattacccgccctgccgaagctgctgaggctcgatgggatgagatcgattttgatgctaacgaatggaaaattcctgcagctcgaatgaagatgaaccgggaccatacggttccactatcggatgaggcaatctcaattctggaaatgatgaagtccctcagtggtagccgggagtttatctttcccagtcgcatcaagccaacccagccaatgaacagccaaacagttaatgccgcactgaagcgtgctggtttaggtggcgtactcgtttctcatggcttgcgttctatcgccagcacttctctcaatgagcagggatttccgtctgatgttattgaggcagcattggctcatgtagacaaaaatgaggtacgacgagcttacaatcgaagcgattatcttgagcaacgacgtccaatgatgcaatggtgggctgattttgttagcaaggccgatagcgggagcattgttgaaagtgggaaaacggggttaaaacttgtgggctga

SEQ ID NO: 228980 - DNA, 996 bp, Klebsiella pneumoniae
atggcatactgcagatgttacccggccgcactcataccgggtaacgaactgtgtattgtgatgattttttattacagggggatgatcgtgatcaataagatttgccaggtaattgacggggagtacgtctgcgacattgatatcagtgtggaagaatggaaagctctgttaatgaatgaaaaggtttttgactctaaaagtattgaggcgttaaaaaaatggtatattgaaccaaatcattcctgcacatgtttcgatataggcaaaaagtacgaacagcacagtatgagtgctaatggcgttattaacgggctcggtggtagagttcaaaaagagcttggcagatttgaagttaaagggatcggcaatatagcacctggcacaaaattcattacagtcatgaagagtaaagaaaccggtgaaaaaccaaaaagatacttatggactattcgtgatgaacttgttcaggcaattaaagaactggatttttttgggtcgaaagaaataaccaccaatgagtattactcagacgatgagttgatcaacgccatggaggcgaataatacatttgatgtcgcgcagacatttgaatatacaggggaagctaaaccaaagaaacatgcaacagaagtaaaaaatggcgtctcgtacccaagaagtaaaggggtttcaaaaaatgcactgaacaaagcaggttacagatgtgaagtcgatggcgaacacccaaccttcagaaggcgtaactctcccctgaattatactgaacctcatcacattgtacctatgtccaggcaggatgactttaacacttcgcttgacgtcgaagaaaatataatatcgctgtgttgcaattgccataagcaaattcacctcggacagggatatgaagaaatgcttgagaaaatatataatgagagaaaggagttgttaaaacaggtagctatcgatatatctctggaggatttgattcgctattataaaggacagaacaggtga

SEQ ID NO: 228981 - DNA, 576 bp, Klebsiella pneumoniae; identical to SEQ ID NO: 161815

SEQ ID NO: 228982 - DNA, 1329 bp, Klebsiella pneumoniae
atgagccgcagggagttgttcagcgaatttcttgaaaatttgaatcttgaccttaaacaggccaaaaagatcagctatcactatcgaaaaataaccaagtcattaaatcttgcgttcagaggaactagttcccgggtagcaaatcgcttgaaagtggggtcagtaggtagacataccgcaataaaaggcatatccgatctggatatgctttatattatgccccccaatcagtatgaatattataaccataaggataatggtcagtctgcattgctcacagatgtcagaaacattctggcggaagaatatcctgaccagacggtgaaaaaggacaggctggtcgttcaggtcgtctttaaaaactttcatgtcgaggttcaaccagtattcagacaggatgatggcagctttaaattccctgaaagctataatgggggagcatggcgcattacaaaacctcttcacgaaaaggcggctatgaccgcattttcgcgagataaatccaacaatctgcgcaagctgtgtaaaatgatcagagcctggaagaacctgcatggcgtcaatatgggtggcttactgatagacacactggcgtatcgctttctttcatcaacatcagattatgacaataccggaaatggcagtctgggagtcctcgccagagacttttttgaatatctgtcaaatgaggagagaagggaaaggtatctcgcgttaggcagtaatcaatatgtacgtgttaaatccccttggtttggtcgggcagcgaaacacgcgtatgaactatgttgtgatgccttagacgctgagggtgctgccagtgaaaatgaccgctggcgcaaagtgttcggacgagccttccccagacgtaaggtggatattatggaagcccgcctcgctctggaatcgcatgcggctgatgctgctccctgggccgataccgaagagtttatagaggaaaaatatccggtggatatcaagtactcactcaatcttgactgtaccgtaacccaggatggtttccctcccagaagcctgagggagatgcttaccagaagatttcgcctctccgcccgaaaatctctccttttccgggcagacctgacagaaatggaggcagaggaaccctacaccgttatgtggaaggtactgaacgtgggtgacgaagcacgcagaagaaatatgatccggggacaaatcgttccggacggcggctactatacgaagaaagagactaccgacttccgtggagatcacgtggtagaatgctatgtgataaaaaatgaggttgtggttgcccgggcacagattgaagttcccataagctga

SEQ ID NO: 228983 - DNA, 1374 bp, Klebsiella pneumoniae
atgtacaataaccttcccgccttaaccgacagtattctgtgggataatggtcttctggcaaaagactattctgtcctcgacgctgaagcgctgatgggagcacttagccgttatctccacgcggtcagcgtactccggagcgagtggcataatcccgaacactctcctctcagcctgtggattgcccgtcacgaccaggtagccctttatcgacccggattgttgtcagctgagcgaataatcctgaccgatgcgctggaagaagcggcattacggcttgaaattgttgaatcatcccaggcgatggatcatctggtacataacagagaaaccgacaggcttggggatatcagaactggtgttgcgcatttcattcgttttgctaaggacaattttcttctgattcaggccggtttcattgctttcacgccttgtgaatcagcaaggcatgaacagcagcgcaggatgcagctcctgcaggataaccctgaccggcatttccttcacagcgtgatgcctccggctgtggctcagctctatgaacgaagcctttccgtgcggggcatcaggcgagtgggtgacgaagggcatttcaggtttgtgtcagaaaaaacattgccggacgagatcgtgctggaattacgggattgcctcagtcctttcaccaatgcgtatatttatcaggaaatgcggcctgtccggataaacgaagacgggacgtttatagcaaggatcacccgcggtaaacatgaaagccgtaaagggtatgagcgatgggtaaacggagccagaaatcgtagcatgtactttcattatcgcggtctccttactgatatcagccagtcagccagggctggtgcctcttttgtcactcgttgtacattccagagcaaaatacttcagaaactggatgaaccgggtagactttcacgtcggatgctggaaattgagctcccgtttctgcaggacctgtctttacacgacatttttcgcatccgtaccgattacgaaccaagcgtgacagccttcaggcgttctttgcgtgactgtgcagttgaaatggagcgcgcgtccggtccggatgagatccgcctcctgcagcagcgtttccgggaacgtattgcggatgaagggctggatgaacttcaccagaagctcagcatatggaagcgcaggagtatgcaggacactgcactgctcgccgtaccggcagtgctgggttatatgggatcaccttcattgctgaatatggccgctggagcagttagtctcctgcaggctgtgttgggggctcatcgtcatcatggagatgtaacccatcatccgtcctggtttctcctgcgcaccacggcaattaagtgcatgaagaagtag

SEQ ID NO: 228984 - DNA, 201 bp, Klebsiella pneumoniae
atgactccattagttcttaccgcagagcaaattaaagctctggcagatttcgcggagcaggacggccaacccgcttacacgatctctcaggccagcatccccgaatttgaagctgaagacggcagcactgcgcctggttacgagggccttatcgcttactcagaatcagaagagcacggcgtacttcagctggaagattaa

SEQ ID NO: 228985 - DNA, 1284 bp, Klebsiella pneumoniae
atggatttgtttcttgttgtagttttgcttttagccatactctcccccatcttggctgtcattttgctcaagaagagcaaacaatataagatcgagatcaaggcacttagtgaccgcaatgtaactctgtcgaatgaattgagtgaaagccaagaacatttagcgaatgctatacgagagcactcagatctggaggggagagctgctccattgtggcgatatgaagaactgcatagtgcggttctggatgcagaaaagacgataaaaacagcagactcgattgctaaaagcacagtgaatgaagcgcaacttaaagcctccagcatcgttttagaagcaaataatcaagcccgactcacaataagtaatgctaacaacgaagcagttgtaataactaaagacgctcgcgattctcgtttaaaagccaaggaacgattggacaacgccaatagtagggcagatgagctaatctcaaatgcaaatgataatgcgatgaaaataatcgaagatgctgagacacgtgcaaaagaaattgccgggtccgcatacgaagcgaaagagtttgcagagacctaccaagctgtagccaactcaatgaaaaataaaattgaaggatatggtgatgaatggatagttccaaatcgaagcgttttggacgaattggcagataattatgaatttacagatccagggaaagaactgcaaaaagctagagaattaaccaagtctcttatcaaaacaagcaaagcggcaagttgtgagtacgtcgaaccgaacagacgaaacaccgcaataaaatttgtactagatgcttttaatggaaaggtcgatagcaccctttcaaaaataaaacataataactacggtaaattatcccaagaaataaaagatgcttttgagcttgtgaattataacggttctgcctttaggtcagccaagatcactgatatcttcttacaggcccgtctcaacgagcttaaatggggagtagctgtaaatgaaattatgctcgaagaaagagaagagcaaagacgaatcaaagagcagttgcgtgaagaagaaaaagcgcgtcgcgagtacgaaaaagcgataaaagaagctgaaaaagaagaaaaaaccattcagctggccattgataaagcaactaaagaactgatgctcgcaggcgaagaacaacgtatatccctcgaacagagactggctgagctgcaagttaaatatgaagaagctgaagccaaaaaccaactgacctgctccccgttgattagtacaccccgatgttag

SEQ ID NO: 228986 - DNA, 597 bp, Klebsiella pneumoniae
atgtcaacatcaaagtacccaaatgagatcaaaataaatcccaatcagggtggcaaagctgcgattgaacgattggtagaggcgtatggtttttcaacacggcaagcattagcagatcacctagacgtctcgaaaagcactttggctaacaggtatatgcgtgacacgttccctgctgattggataatccaatgcgccctcgaaactggtgtatctctcaattggttaaccactgggcagggtctaaagcaaagctcgaaaacagcgactaccgaagaactggcacagtttactttcactgctggcaaaatggttgaagatggttcttgcgtttttgacgcatcatttctccccaccaatctttcatctccgattgttgttcgtgatggtcgtaccacatatatctgtgatcaaaaattcactgaagtgttagatgggttctggttgatcaatattgatggaacctattccgttagactgattacaaggctgccgaaaggcatgattaaaatctctactgcagaaaatagttttgagtgtgctttttcagatatagaagttattgcatgtataagaagcacaacagtttcacattga

SEQ ID NO: 228987 - DNA, 510 bp, Klebsiella pneumoniae
atgtttgactatcgcatatcaaaacatccccatttcaatgaggcctgccgtgctttcgcgctgcgccataatatggcgaagctggctgaacgtgcaggcatgaacgttcaaaccctgcgtaataagctcaatccggagcaacctcaccagctcacagcgccagatatttggttgctgaccgatctcaccgaagactcaacgctggttgatggttttctggcgcagatccattgcctgccatgtgtaccaaccaatgaagtcgcgcgggagaaaatgccgcagtacgtactgaaagccaccgctgagatcggccgtgttgctgcgagtgcggtttcaggtgttcagttaaatgcgaccacccgccgccaggttgttgaaagcgtcaactccgttactcgtctgatggctttaactgctatttcactgcaggcgcgtttacaggccaaccctgcaatggcaagtgttgtcgataccatgacgggccttggctcctcgttcggtctgagctga

SEQ ID NO: 228988 - DNA, 201 bp, Klebsiella pneumoniae
atgctgaacaatgaaccctcgtttgcgtctcttctaattaagcaaagcccggcaatgcactgcggccacggctggatcatggggaaagatggtaagcgctggcatccgtgccgctcgcaggatgcacttttggccgacctgtctactatccaacaggggaaaccatggctattgaaggtcctgcagcgactgttccactga

SEQ ID NO: 228989 - DNA, 237 bp, Klebsiella pneumoniae
atgcgaaatagtgaaacccgttctaccaaaaccggaccgaatgatgccggtttgttccagctgtttaacgagactcgcctagatgagcgtaaaagctgcgcctttgccgtttccatccgcatggaggcactggcgatccacatcctgaaagaggggatgaacggagtggaggcggcagaactgctgcgccgtgaagtcgctcgttatgaagctgaatcacgcggagactggcactga

SEQ ID NO: 228990 - DNA, 2382 bp, Klebsiella pneumoniae
atgcctgaattaacaaacgacaaaggtggccctgctgaggccgccggggttttcccatggaacgccccgaaaaaagcagtaaacccctatctggacccggcggaagttgcgccggtgtctgcgctttcaaacctgatcactctctacactgcagacaacgagcaggaacagctgcgccgcgaggccctgagtgatcaggtctgggaacgctatttcttcaatgaatcccgtgatcctgtccagcgtgaactggaacaggaccagcttatcagccgcgccaaaatggcccgtgagcagcagtgttttaaccccgatctggtcattctggcaaacgtcagcgccgagcctgctcacgtcagcaaacctctgctggagagaattaaattcttccaggggctgggaagggcgaaggcttattcccgctatctgcgtgaaaccatcaggccgtgccttgagcgactggatcgcgtgcgtgaaagtcaggtgtctgcctcttttcggtttatggcgagccatgaagggctggaggggctgctgcttctgcctgaaatgagccagaaccaggttaaacgtctatctacactggttgcggcacatatgagcatgtgtctcgatgccgcctgcagcgatctgtttgtgaatgatgacgtcaagcctgagcaaatccgacagtcatgggaaaaagtagcagcagaggctatgcgtcttgatgtcattccgcctgcctttgaacagctgcgccgcaagaaacgccgccgcaagcctgtaccctatgaccttattccgggttcgctggcgcggatgctgtgtgcagactggtggtatcgcaaactgtggcagatgcgctgcgagtggcgggaggaacagctgcgtgctgtttgcctggtcaacaagaaagcgtccccgtatgtcagctatgaagctgtgatccacaaacgcgagcagcgccgtaaatcgctcgagtttttccagtcgcacgagctggtcaatgccgacggcgacacactggacatggaagacgtggtgaatgcaagcagcagcaacccagcgcaccgtcgtaatgaaatgatggcctgtgtgaaaggactggagctgatcgcagaaatgcgcggcgactgcgccgtgttctataccatcacctgcccgtcacgcttccacgccacgctcaacaacggcagacccaatctgaagtggaccagcgaaacggtccggcagagcagtgattatcttgtcgatacattcgccgcattccgcaaagccatgcacaaagccgggctgcgctggtatggcgtgcgcgttgccgagccgcaccacgacggcaccgtacattggcacttgctgtgcttcatgcgcaaaaaagaccgtcgcaccctcactgcgctgctgcgtaaatttgccattcgtgaagatcgcgccgagctaggcaacaataccggcccgcgcttcaaatctgagcttatcaatccgcgtaaaggcactccgaccagctacatcgccaaatacatcagcaagaacatcgacgggcgcggcctggcgaaagagatcagcaaagaaactggcaaatcactgcgcgatagcgctgagcacgttagtgcttgggcatcacttcaccgtgttcagcagttccgtttctttggtattccagggcgtcaggcataccgcgagttgcgtcttctggccgggcaggccgcgagagcgcagggtaacaaaaaagccggtgcgccggtgctggaaaatccgcaactcgatgccgtgctagccgccgctgatgtgggctgttttgccacctacatcatgaagcagggcggcgtattagttccccgcaaaaatcaccttatcagaacggcctacgagcttaacgacgagcctggcacctacggcgatcacggaatccgcatctatggcatttggtccccgctcgttgagggccggatctgcacgcacgcgatgaagtggaaaatggttcgtaaggccgttgatgttcaggaggcgatagccgaccagggcgttcgcgccccttggactcgtggcaataactgtccccctgttgaaaaaatgtaccaggcagggggcgaattaccgggcagcaaagaacctgcagcgctaccggacttcgaaaacatgagtacaaaagagctgcgtgagctgacagcaaggctgcggctggtcaaaccgaagcgccgtaaaggctacaaacaggaaattacggaacaccaacggctgcagcttgatgcggagctgcggtctagaggatttgacgcgagtgaaacggaggtggatctgcttctgcgtggcggaagtctgccatctggggccgggctgcgcctgttctaccggaaccagcgtctacaggaggatgacaaatggcgtcagtggtactga

SEQ ID NO: 228991 - DNA, 186 bp, Klebsiella pneumoniae
gtgaacgatttgttcatggaatcacttgcactgcagcggatagaacttatggcccggctggttgccagctcagattgtagcgatgacgataaggaggttgccatttcgtggttgtcagaactgacaagcgaactggtgaacaggttaaatcagtacggggtaggtcaggatgaatgtaagcattaa

SEQ ID NO: 228992 - DNA, 1056 bp, Klebsiella pneumoniae
atgtcttttaaacagattgaggcaaggtttgcacaagcccaggatgatttagtccttcaacaatcagatttatcgctcaaatctgtttcagatatggttgattttaatgcgattgatattagccctaaatatcagagacgtgaaagatggagcgaagaagaagagtccgaattaattgaatcatttttgatgaatataccaatacctccaatctatcttgctgaagatgaatatggtatctattcggttatagatggtaagcaaaggcttacggcaataaacagatttttaaataataagttgattctttctaatttgaatcttttccctgaattgaatggtctgacgttttctaaattgcctagtgcactttcaaatgctttggctattagaccttacattagagttgtgacgttattgcgacaatctaatcctgaattaaaacatgaggtatttttaaggttaaataaggccggtgtaccactaaattcacaagagataaggaatgtcgcgtttcgaggtgaactaaatgatgctctctttgaattgtctgaaaacagacatttgaaggagatgttaaagtcaacaaaatcatctactatgtatagggaaatgacagatgttcaatatgtcctgcgttttttcactcttcgtgcttattggatgaattttcctggtaacatggacaaggcaatggattattatatggcggaaaatttggatatgccatctagtgatattcaagatctaaaggatatgtataatagatctgtcgatttttgtgaagctgtatggggagtggatgcatttaaacgcttaggtaaaagctctagagtaattcaaggtatgtatgatgtacaaatggtctgcgttagccttttgaacactcaagagtataacaatgctattagcaaacctagacaagtaaatgcggtacttgtgaatgaaatgaatgttaataatgaatttctcacgtcaataactcaatttacgtcaaatgcagaacatgttagatatcgcattgaacattttactaaccttctaaaaggaatttaa

SEQ ID NO: 228993 - DNA, 927 bp, Klebsiella pneumoniae
atgtctgcgaagagcaagttgttagaacgcattaacaccttggaaaccactcttgcgttgccggtcttgattaaccagccattgggtaacgttgcacataataaaactgcaacttttttgcgaaaaggtttgggtatagtcacatttaatattttagaggattatattaaagagcgtactttggaaatgtttggctcagtatcatcttcaatgattaatttcagtttcctgccaaatgatttgcaggaggccgcgactttgggtgcacttcgagccttggtaggtaaagtcagaaatgaaaagaaaaataatgggaattggttggggctaattcagagtgaaacggctaacataaattcaacttcgcttgtgaataactttacaatatctcaattttcattgatgagtgagagttcaaatataaatgctgatgaagtgcctaaggtccttaagtgtttaaatattgatggtggctggggtactttgcaacgtatttcgcaagagatatatggaggtgttccaaatttaagtcaatcttatggaaatatctcaatgcgacgccattctgcagcacacgaagctggatttgattatgaatatggttggttgcaaactgctgtgagagaaataatggcaatagcatcttcatttgatgtggcattaagcactaaatgcaagatgattaatatatctccggctgttcaagttgctaagaatgacctttcaaatatgattaagtatcgttttttgcaacaggttaataatagccatgtatataaagaaaaagtttttgttacttcagtttctgtgaaaaactggactgatttgaacttggcaaaacaaatgctcgcagttaaatgtcaaacaaggtcagaaagcctcgttattttaaattcacagacaaggatcattgattggttagcgtga

SEQ ID NO: 228994 - DNA, 477 bp, Klebsiella pneumoniae
atggctgccgtcctgcaggtacatccagtcgtcaaactgcagcagccaccggctgccgctggcctcgacgttcatgctgtagcgccagtgaaaggcattgcctgccgcctggccgctggccacgccttcgatatccccggcggtgccctgataacggttatcgccggtgcggcgaatgcgccatacccgctgctgcttctcgccatcgtcatagacaaagcgctcatggagcgtcagggtatcgccgacgacgtcgccatcgatctcaacatggaagcggcgcagctgtttgccgttgcgatcctgcaccatcccccacgcctcggttcggccctgaaaatagtgaaagatgtcgagggcgggctgctgctgccggtattcggtgacctcggtactgcagccggcgagcatcagcatcagcagcgccaggccaagggtcagaatgcgtttcatggagtacctccgatcaactgctga

SEQ ID NO: 228995 - DNA, 768 bp, Klebsiella pneumoniae
atgacaacccaactttcatttcacgagcatcatttttctgcaataaatcgcaacaatcagatctggctttcgagtaaagatatcgctgtagcgctgggctattcgaaaactaacgccatcactcatatctacaatacaaatactgacgaatttacaccaggaatgaccgagatagtcgaaacgaatacctcggggaatctcaaggctcgcagccgtattttctcccttcgcggagcacatctgatcgcgatgtttgcccggacccagttagctaaagaattccgcaaatgggtgttggatattctcgataaagaagttggcgccccggtgaatgaacagccatcggaatccaccagcaccgatgatcgcacgccgctgcgcgatgccgtcaatatgctggtgggcaaacgcggtatggcgtacgacgacgcctacaaactgatccaccaccgcttcggtgttcagcatatcgaccaactcacccaagcgcagatgctggaggcaatcgagtatattcactgtctggtggttgatggccctgcgcgcagtaccgcgccgttgaatggccgtcttcttctgacattccggaacggcgaggttgtcggctccagcatgctgccggaagatgctcacgtggccacgatggccgcgtttatggatttggcccgcaaagcccattatgttgtgatccatgaagatgatgcacagccgatcatccagttgctaaccggaaagaaaatacccgccagacttcccgcaaaaatctaa

SEQ ID NO: 228996 - DNA, 213 bp, Klebsiella pneumoniae
atggctaaaaagcaatacggaatcatgccgccatttccgcacttggtagccatgttgcgtggttcccagtaccgtcactttgtgtttgggatcgactggtggcacaggcacatcatagttttgcgtgatggcaaaccggagctggtgccgattgagcaggtgaagtttgtcgagccgacgaaagaagagatcgagatgttgaatgaaatgtaa

SEQ ID NO: 228997 - DNA, 591 bp, Klebsiella pneumoniae
atgactttatcattcctccttctcagtttatgcttggacgatgaacaaattttgagaaataaaaatatgcgtaacatatactttttgctcttgtttgtgatcttcccgctctttattcacgcccaagagatatcgaattgtctttctattggaaacagtcattggaaattcaccaatgatgtagttggttatgttttcgattgtgacgattgtaatcagccaattgaaattgttgtgaattgtggtaatccaggcggtgctgataataatacatttatcaagactgttactgaggatcctttaacattcgcagaaaccctaaccgatgatgcatttaaaaacatagtgaaaacaagtgttaaaaaagcagatgttaatggatttttagccggccagcgggcgttagtgagtgatcaaatacacatggtcggacaacaagtaaaaacccccatcaatgtcaaatcttattggatcataaatgatttgaatttaagaatgataaatttaagagtttattcgccgcatgacttggatagaaaagatcaaaataggatcgataccttcttgcaaacagcaaatttggtaaagtga

SEQ ID NO: 228998 - DNA, 387 bp, Klebsiella pneumoniae
gtgatcagtaacattggctcgtttggggaaaacgtttataagattgggatgacgcgcagacttgaaccccttgatcgcgttcgtgaacttggtgatgccagcgtacctttttcattcgatgtgcatgcaatgatctacagtgatgatgcaccatcactcgaaaatcatcttcacaaagtgtttaacgataagcaagtgaacaaagttaactcacgcaaagagttcttcaatgttggtataaaagacatcaaatctacgattcaagaaatgagtattgatgcgcattggacgatgtttgcagaggctaaagagtatcgtgagtcactagccataactgaaaaaatccttactgataaaatccccgaagatgaactgatcgttgcttag

SEQ ID NO: 228999 - DNA, 930 bp, Klebsiella pneumoniae
atgaaatttaaagctaattccattagaacattagatcgttttttgaaatgttgtggtggtcaagaaaatataacattaggtatcaaattagatgatttaggacctgaaaagctagttgaaattggtttcggcatttcgccagaagaaggcctatcgataataccaagtgttattggtaagtttactagtttcaatgctaatggaaaggaaatcctacgacctgatttgccaaaagaacaatacagcgtttcatatacaagcactacatacgactggcatagaaatcctcattatgggatgcgcacacgaacagctatgcggatagcaagagaacatattccagctcctgctataatgatctctgttgctaaaacaaaaaatgggacatacataacttcacctttactaaatttgtccgaagaaaattcagagttaaacatccacattataaacttaatgctcgaatgtttcgatgagatagaaattttagatacagaaaaagaaccattaataacaacaaaattcaaaaaagtgttatggactgtattacctaaagggaaatacccatgggacgaaatttcgagaataatagcttctaacacccaaaaaacttcagcatcagatagcgatagagaggtcattgaatccagactcaagttaatcaatgtctacaaacctgatttcattgctactggtcatgcgggattcaacggatattttatctttggttttgaaagtaaaagtatatacgtacttgaaagcatttttcttgataacgcaacttacattttcaaaaaagattgggaaatattatctcaattaactaaagcagagatcattaatggtgaccttgaatatgagcgtatcgttcataataaagtttggaaacgagcaataggtgaccgcttatcaaaggccttaagaacttaa

SEQ ID NO: 229000 - DNA, 141 bp, Klebsiella pneumoniae
atgtaccgggtaaaacagctgttcggggggtcactgacgctgcgtgactacgatggtcaggttgcggaggctatggccctggtacgagcgctgaacaaaatgacgaaagcaggtatgcctgaaggcgtgcgtattgcctga

SEQ ID NO: 229001 - DNA, 243 bp, Klebsiella pneumoniae
atggatatcaaattattttttatttttcggataaaacataactggaacatttctacttttattgtttttatctttcacacaagaagtgaattcataaaaagggttaggtataatgtcttcaatggatttgaagacattaagtttattctcaaaagttcttgccttaaggcaataagcattaacgataagattgaaatacccggcaaaaccgacaagcgcagcggtaaaaggaaccatccttaa

SEQ ID NO: 229002 - DNA, 294 bp, Klebsiella pneumoniae
atgctaaacttatatattgattcattactgaacttatcaacagtgttctacggtattccgttgttagtcctttcggcgttaactacggttgttttaggtttcgtggtgttttatccgcttgctaaaatgatgaacactaacgcttataaaagctttccagtgtttcatatgatgcctgtaaactactatgcctttaagttgattgtaggttttcccgtgagtatggttgtattcttaacgttgggtatcactattctttctttcgtcaacgttctgattaaaatcttcatgtaa

SEQ ID NO: 229003 - DNA, 1197 bp, Klebsiella pneumoniae
atgaatgaacaatttttagataagttcgatagagctttcattgctgatcctaccgaagcattaaaggccgttgacgacatggccacatctctaatgtcagagatagaacagaagaggaaagccggtgttaaagagttagatcccgttatggtaaagctacaggaagaccatgcttatctctccgggctacatgaagaaaagaccgaagaactggcattacatcagcgcctacataagcaagctgacatcgagatagacaatccttttaatggtaatccagcgcctgcaggtgatgctccaaagggtagaagaccatcattcaataccactgtagtaaaggccgttgtatctcaacagcctgtagttgaagatctggatgatgatgagctaaagggtgaacagaacttaatgacgaacgacgacatagcgaagttggctaaagctgtcagtgataagcagactcctgcagctccagtagaaccggaaggaatggacatatcccaattcaagccagaacctaagccactgaatctttcaggacttgatacgttcaccatgcgtaaagcagaagaggcaaaacagaaagctaaaccaaaagtggatactgacgaactggataactttagtaatcgctatgcggggaatagttttattgaaaaagtgacaaaaaaactacaggagacattttcagcatcttctcatgctcctgttaactttgtaccagaacatgagataaaggctatgtttggtaattctctttctaaaatagttaataacaccaatagtagaagcattcattttgttgataaatctgttcttaaagaagatgcgcagggattatcaattgccacaaaggatagaaccttagccgcaagaagattaactctaatggctaaggctaaaggatggagcagcattagttttgatggtaatcagcttttccttgaagaagcatatgaagaagcaacaagagcgggtttggtagtaaagccatcatcagaagaacaagccagatttttcaaagaagttcatgaagcgaaaaagttagatagttttatgccttttggcggtatgaaggaaagcaaaaaaaaggatatagataaagatattgaaaatcccggacatagccatgaacaagcccctgttcctgttcaagcccctgtctacaacgcaagaataccaacaagaatgaaataa

SEQ ID NO: 229004 - DNA, 624 bp, Klebsiella pneumoniae
atgtttgctatgagtgtgttcaatttgaagggaggggttggcaaaacgacccttagcctgaatctgtgcggctattttgcttccaaaggtcagtcaacaacgttagtagactttgacccacagggaggttcacttacatgtgcagcctttgcgatgaagaacggtaaacctctgccgtttgaagtgacccgtaaaccgaaggtagcaaccgacttcatgatctttgaccatgcgccgggtgtagacagcggcggtcagttagcgccattggtattggtaccaaccatcctcgatgcttccagctattcaaccactctaaagagcattgataacctgaaagaaatgaacaaacctttcatccttgttccaaaccgggttgaagttcagaacaaagagcaaatggctctcttgaagaaactcgaaacgtattcagaaaatcttggctattcacagccctacattcgtaagcgtgttgcgtatccccgcgcttatggtaatgggatcaccatctttgatgagaaggccgcattaccgaacatcactgatgcccggaacgagtttgctcacctgatcgaaatcatcaaactgaaaatcaaagaacaggctgaagccaaaaagaaatga

SEQ ID NO: 229005 - DNA, 396 bp, Klebsiella pneumoniae
atgacagatactaagaaagacaaaacagaaaaaaacgctaaaaagggtgctgcttggctcgataactttgatgattttcagaatgtctcgctggaaacctcttttgctaaagataatggcacatactggagctaccgtacagaaagcttaggtgatattcaggccggaactacgccttatgtccgttcaaccgtcaaagtcactaagcatgatgatgctcgtttgattaacgtccgtattcctgctgcgctggaagagaaactaaaagaagtttcttttgatattccaatccccactcttcttttaatttgtgccgattatttaactgatgaactcattaaagaaaacaaacaaatattagcacttccaaaagaaagcgatgaacggaagatataa

SEQ ID NO: 229006 - DNA, 2145 bp, Klebsiella pneumoniae
atgattagttctaaggttttatattcatacgaaaggaatgatattaaaatatcatgcggattgtataatgaaaaaacatccgctaaagaaaaaggtatcggtagagccgggtattatgacgcattaactggagagcttattgaagctgaaactcttgaagatgttattaaaataattgctcttccagaagttgttgctgaatacaatgagcatggagatttaattcgttctttacctgccgatattgaacaagtagttcgtaatgagcttttgttttccgatgaaaaaataaaacagattaaaatcggtgaacgcgatggtaaaaaaataattgaaaagtatcaaaaagaagagaaaaaatataatgaatatcttgaaagggtagagaaatacaaagaagacccaaacaagaacccattaccttctacggctgtagcaccgccaaaggttcctgagccattcatttacacgaactcttacaaagatgtctcatcgaaaaatccagatgccgcaatagaatgctaccaaatcattcttaatcttgaacatgttcctgttgaagaagtagaagctgtatggaaagtagcaactcatgcgatggcgcatgataactatgtatatgattatcctcaaggcggtagtaatactacgcctcgcggcctgaaaggaagacgcccggttatcttcaataatatccatgttaaacaggatgctcctatacacggtcaggcgtatgtttttactcgtgatgtttcagaagcaaaatatgttcctttgactgacgagaaaagagcgtatttagagaaagaaggtaagttagatcttataacttatttcccaaatgataaaagggcttttgttcctgaacaaaacggtgtttatccgtgggctaaatggtcaaatgctaaaacaaaacttcaagatgaaaagtttatggaagttttccaaaaacacatcgaaagagagttaaagaatgcgggttataattatccgttcacaatggttagtgtttgtaaaagatataaagatgctgataaagcagaagcagtaagaaaagttcatactgatttacctaaagctatagatacctataaagaaagctttgttgattcaacaaagcttgaacttgatccagaacataaacaccatgctattttaaataaatacaatactaatatcaagacaaaacaaaatcaggctgctgatttacttgctcaacttgaaaagcttgaacgtgatattaatgttatggaagcggctaaagctgctgaaatagaaaacttatctcttactgttgaggtaaaaggtttaacagctaaagtatcagaactgactgaacaaacttcattaaaagatgaagaaataaatgaactcaaggaagagcttgaaaaagaaataaaagaaaaagaagagtttgttgataaaaataatgaattgtattttaaaaactctgaactggaagctaaaaaagttgagttagaaaaggaagttaaaacgcttgaagacgaaaatatagagttagaaaaagagaataccactcttactgaaaaagtttctgctcttgaagagaaaaacattaagcttgaagaagagttagaaactctcgatgctaatactacaacggagataaatactctcaaaggtcaggttgaatcacttaatggtcaacttgagcaaaaagatattactcatgctgctgataaagaagctgctttagcagagttaagaaaacagcttagtgaagtgtttgaaactgaaaaacaggaagctttagctaaacttcgtgaagagttaactaatcagtttaaagtggataacgaaaaagctcttgaagctcagaaaacaacgcttgaatcaggttttaaaaccgaaaaagaaacagcattgaatgagttaagggaagaacttaataaatcgtttggtgttaaagaaagcgaatataaaactgagataaatcaactgagaaaagatgtttctgatcattttaaatcatcacaagaaaacttccagttagcgaatgattatagtcaaaaaatgcgtactttcttagaagaaaacactgcgctcgttaaagaaaatcgtgatcttaaacaacagcttgaagaacttaaaaatggaaacaataacaaaccaaaaaataaataa

SEQ ID NO: 229007 - DNA, 507 bp, Klebsiella pneumoniae
atggaactatattttaacaatatgaggaatgcttatgatacgttgatttctgctatcagaacagatgaaatggtacaggctgtcattaaaagacaagacagccttgtcaaaatcatggaaaaagcttcttcaatttttcaggaacaacaactttcgggtaaaaaaagaatactccaaaatgataatgacttagcgttaacgataacaaatattggtgttgagactaattttaaagagataaactactataaaaatcttgtttctgacactttttataaagtttataaaacaataactgatgatcaaagaagctatttaagagacgttagcggtaattctttaagtatacttgaaatgtatttagataaaacaaaaactaaaagagaatacagcaaagataaaatagagttagctcttagcagggtatataacgcattatgtgtttattacggttttcagttatatgatacacgattaaaaagagagggaagttatgaatatgaataa

SEQ ID NO: 229008 - DNA, 663 bp, Klebsiella pneumoniae
atgaatatgaataatactcttgatttatcttctcttagggaagagctggaaaaacagaaaaaagagcgtgaaaggctgattactgaaaatgctctggcagaagtaaaacatcaagcagcactggaagaaggagaaggggagcaatccccttcctcagaagaggctcaggccgtttctgttgacgctgttcctgatgatgtgttgatgggtagcggaagcctcaataaagctatcctgtggcgttgtgcgcgtgatttcttccaacctaatgttaagctgataaaacagtaccaatttccccatgttgttattgaagagtctaaagactgttatgttatctactcttctgatgtagagcttgctgtaagcacgctttacgctcattttgattatgagatcgcagcttttggtatctgtaaagtagaaagcgataatcaagagtatgtggaagaaataatatatcagggtgttttaagaggttttagtgtttttccttccatgttagaacatgaaaaaattgaacaacaaaaatctaccattttagctttaaaaagaattaagcgtgaaagggatgaagaaaccggaatcatgaaagaaagtattaatacttttctgatggattggttaaataaatcggaaaaagggttgaggttgtcaacttaa

SEQ ID NO: 229009 - DNA, 1905 bp, Klebsiella pneumoniae
atgttagataaagagccattgctttctttcaggaaagcacatttaaatgatgaaatacaaatagactttaaaacagcaacaacaaatatagccgtgtttggtggaacaggaacaggtaaaacaacgggtgtatgtttcccggctgtttacaatctgattaaaaatcactgttcaggattgatactggacgttaagggagattacaccaaattagcacgtcagattaatgaggaaatgaaaagcgataaaatttacatattaggtgttaaagaggattgttccagatttaatttaatatcttgtatcgaaccggaaaagctaaaagcatttttaaactacggcgtgagttctatccgtggaaatgtagataaatattggggttcaaacgggatagaagacactgttttagtgtatgagttagttaaagagtttgatattaatcctacccttgcggatctctattacttgattactaatcctgatgacctacaggcaatgaaaaacaactgttcagaacagttatcagaaaagataaaaaggcgtatagcttcggatgggttcagtattttcaataacaaaaaagataccgatgaagctaccaaaagagaacaaagatcatggcagttttcagcattaaacagcgttctaagacctttttatgaagacccgtatctaaaccatcatttttgtaataatgatcatacagtttcttatgctgacattatttataaagaaagaaaatccttagtgctggaagtgcctttttctaaatatgctgtttcatcattgttcattttaaaggtggttaaagcaacattcatagagagtataaaacagcaggatataaatcagcttacagcaaggggctatggagaggataagtttacattcatgttggtagatgagtatcagcagttccttaccgatgataccgatccgtcagtggatgataacaactggttcgacatatcgaggggctacggtcatatcaacattatttcctctcagtctgtggattcacttgatgctaaggctgggcaagcatacacaaaccagctcataggcaactgtatgaacatagttcatctggctactcatgctgtcaggagccttgagaacatcgctacccttgctggcagtccagaacgcgctatacaggctcaggatacgttatcaggtcagtcagaggacattgcctttgtctacatcaacaaaagccagcagagccgtacaggggcgcgcgtattggttcatacaggcaaatcacaacatagcttcatgaacagattcatctatgcgactaagccacagctgcaggagctacccgtaacgggctatgtagtgcctgaaaaagtgaatgcgttaagcgtcttactggaagcgttaaaggaagataaaaaagaagagaaaacagaaatgcaccttttagaagagttaataaatatgaaagaagaacaaaataaatggatttataatctttgtcctacctatacagttcaaaaaagattatgcgtgataacaacaaaaagcttttcagacgggtttaatgatttcaatgttgtattgaataatttaaatatcggatttgaagaggtagtggtacatccaattatatataacaacaaaatagatttggatttacttaaagagatactgattgaggataaagaaagtctgtatgttatcgtcagagggggaggtgatttagaacactttattcttaatgattttaaggtacaggcattgataagtgaatgtatgattaacattagatattcagaaagtgagttattaatagcggtaggacatgccaccgataaatttgaagatttctttgaaatggttcaagatgcgtatgaagcattaacaccgactgatttagcactgtctcttatacacatctga

SEQ ID NO: 229010 - DNA, 435 bp, Klebsiella pneumoniae
atgagtctttcaacactgaacaacattcgtaccattagaaaagaagcgcgtgaaatcagctttgagatctttgaagagattttagagaagatgaaaaaggttcatgaagaacttttagctgaccagcttgaaatcgaagaaaaacgcgctaagaagctggcactgatggaacagttcagagagatgttagctgctgagggtattgaaggtatcagcatttccgagatcgctgatggtgtagccgctcctgctgccaagaatgggaaaggcgctaaaagtgataagcgtggcgctgttgagcgcaagtatgcttataaagatgaaaacggaaaagaagtgttatggtcgggtcgtggtcgtctgccgaagcctgtcgaagaagctatgaagaaaggcgctaaaaaagaagacttcttgatcaagaaagaagattaa

SEQ ID NO: 229011 - DNA, 543 bp, Klebsiella pneumoniae
atgttcaacatgacaaagagaaagaataaagggttttcattattagagttgttattggttttcggtattatcgcagcgttgatagttggtgtctttatgatctatccaaaaattagttctggtcagaagatagatagcgacataaaaatattgggaacattaaatgctgggataaaaaatctctacgcggggcaagcagattacaccgggttatcagttgacgctgtaatcaaatcaaagattgttccagaagatattgttgatgataacttaatttgggatagctggggcgctaacgttcaaatagaaccatactatgatggtagtttttatatcggttttgaaaacgtttcagttgatgcttgtcctaagtttgtgtcgcaagctggagcaagttttttcaaaatagtagtaggttcaagagaagttaagaacacagaagcaaatcaggatcttgatatggcaactttagcaaatgcttgtatcagtaatgacgatgggtacggtggcagaccaataacagtatatttttacgacaaataa

SEQ ID NO: 229012 - DNA, 558 bp, Klebsiella pneumoniae
atgataaatagttttagattattaaaagacagaaagagtaaaaaagggttttcacttttagaaatattattagttcttggagctatcgcagcgttgatagtagcggcttttatgatattacctaaagttcaggcttcacagcgtatcgacagagagagcaggaacctaacagctatacaagccggggttaagtctctatatggtggaagagcgaagatctcaagcattaacactgatagcttcattgcgtctaagaacgcaccggagaacatgattcaggacggaaagcttatcaatgaatggaaaggcaacgtacaggttgagtattcagggaaccacggcaaatacaacattatctatgatgctgttcccgcttctgactgttcaaagttgatagcggctgtatcgggtaatttcgtaagcatagacgtttacaacgggaacggcggtacgcaggtcaagaaccttgaagaagggaagaacattgatatagcggcaacatcagcagcgtgtttttcagaagataactccaccattatttttgcgtcaataatataa

SEQ ID NO: 229013 - DNA, 312 bp, Klebsiella pneumoniae
atgatgagtaaaataaatagtttctttagaagtctttatgacactgagagcaaaaacgggaaaaagcttagagagatttccatgatgataatgagattagggatgtggatgattacatacggttctttcagtgttttatttggtggtttttttggtttcgatttcaatccagaagtaattgctaagatgactggaattacaggagttggaggcggtatttttcttttaggtttgttcattacgtttatatttaaaaaagatggcagtatttatgatggtaaaaccataaatcaaaataacaaaggagaatga

SEQ ID NO: 229014 - DNA, 168 bp, Klebsiella pneumoniae
atgattgaaaaaatagaatgttttatcgtgtatattttcaacttccgaaaaataaataaaatgactgaggcattagttaggttatcgaacagtaaagaaatgacagaagacgaattagaacgctttctgttagaagaaagaattgaggatatgttaaaccatgaataa

SEQ ID NO: 229015 - DNA, 399 bp, Klebsiella pneumoniae
atgaaggtggtgttatttatggtagtcaagaaaaacaaaaaagagaggtggtatatgaaaaatgaaaatagaaatatgaaagaaaacgcattacaagagataatgtattacaagttgatatgttatggaattatagtgttttttgcgaaaggaacattgataatgtcagatagaattcctacgttaagtgctctacttaataaaataagcagcactgatgctatctattatacactatcggttatgttgttattggaagtgattacattcctaacttatggtgcatttaaatcaatgaagaaaaagaaggaaggaaaagaactggatttaataaaggaaggttttgctgaaggattttctaagggttttaaaaaaggacaaatggataacaatgattga

SEQ ID NO: 229016 - DNA, 294 bp, Klebsiella pneumoniae
atgaaaaaagacataacaagagaattaaaacgattaggtttacacaatggtaatgagttcatagcaaaagcagcgttgatagaagggcagagagcagaagcaatattagacctgatagaacgcttgggaagacgcaaaatcattcctgatgctgttcagcatggttttaatcaggttaaggctacatatcgcttatcgggctacatcaatcaggcactgactgttatagcgtttaaagcttatgtgaacgaaccaaaagagaactttaaagcagatatttactggaatatataa

SEQ ID NO: 229017 - DNA, 456 bp, Klebsiella pneumoniae
atgattaataaactaaaagcatcctcaaaggacgcacaaaaaaaacatatggaagaagataggtttaatgtattgttagggttattcataatgtcggtttcttttttaacacttcagtttatacctgaaatatttatcgtattaactttcttagtgggtacaggtataacattattaggaataataccgataataatgcgtgttatccataaggtgttaaaaacactttgggattcaaaatggtatgtgagcattacgataccagcgttttttatgagcttaattttatctgtggtttcattaatagatgtgaatatcccattgttatatgtttttgctaagtttgtttttatgtttggtattatttggctttcattatatttgattattaaagttgctgtgattattcacattgaagaagaaaaaggggagagcataagtgaaaaaaaaaactaa

SEQ ID NO: 229018 - DNA, 399 bp, Klebsiella pneumoniae
atggcgaaagtgtcgatcagtgaggctgcacgcctgacgggtaagagcaggacaaccctgcacaggttaattaaagccggtgaactgtccacctgtcggggtgaacggaatgctaaaatgctcgatacttcagagcttttgcgggtgtttggtgcctttgcgtccgtatccgttgaacaggaggaagaacaggtcagtggacagcgtgacacagtcacttctgaccataatgaacaggtcattcatactctgaaacaggaaattgaacacctgaacacacttcttgcctcaaaagattcacatatcgacagtctgaaacaggcgatgttgttgctggagaaccgggaagatcagcggcagaacacgacccggccctggtggcgtttctggcagtcctga

SEQ ID NO: 229019 - DNA, 699 bp, Klebsiella pneumoniae
atgacaagaacatttattttattgtgtaccggtgttttcgccatcgcgtacgccctgtatgagctgaaacatatgggcgtttactatccggatgccagcaatccgcagctgttcactggctggaaggcggtcaccgaactcggtcccgcaatcctggctacggggatcgcagccacagcgttctcgctgtggctgttcattttgtttttcagaggctcagagtcccgccggatacagcgcgagataagcggatatcagcaggcactgagggaggcagaagaggctcacagagccagacaaaatacccttattcagaatcacaacctggagacagcggccctgcgaagccactacattggtgctgaggatgtactgcgggaagcgtttgcgcaaaaagaaagcctcttgcttcaggcggtgcagaatgcccggaaagaagccagaaaggagctggaagaacagagggaggcactgaatcagcgcgaatccatcctgcagaaaaaggagctggcgctggaaacaaccctggagaaggcccggaaatatgtggccggggagcggcataacaccgagctggcccgtctggaagcagagaaagcagaggaaagacggagaaatgcctgcgcgacggcggaacggcgcagacggaaactggaaaaactccaggccactggcggaacagcagggcaaaaacactga

SEQ ID NO: 229020 - DNA, 888 bp, Klebsiella pneumoniae
atggctaaattcgccagcgctgcccgccaggcagctggcgtgataaaaccactccagggaaatattctgcgctctgtcggcacagtccggaattacgagcagggactgacccgcgtcgcagagtggatgaaagagaaccggctcaaccacggtgatttacgcacactgacaccggcgcaggccatcacctacctggagcagcgcggggagcaggttggccagaaaacgctcgatatggaacgccaggccatccaggccatgatgatccacgtgacgcagaccctccctgccggcgaacacctgccggtggtgaaatcggagcaggcacagatcctgagcagccgggcctacagcccggaccaggtagccctgattgccgcagcacaacagcccgccaacgctctggccaccgcgattgccctggccgccggattacgcgcccatgaactgctgaccctcgcgccccgccaggagcgagcagcggatccccgtccggcagcggacagtaaatttgccggtcgggagggtgtgatttacaccgttcagggcaaaggcggcctggtcagggaagttctgctgccgtcacgcctggctgaacgtctcgagcatgtcaggctggccagcccggtccgggtgaccgatcgcggcgtgttttaccagagtcagtacgccattggcggaggccagcgctggtcaaacgccttcagtgccgcctccatgcgtaccctgggctggtcacggggggcacacggcgtgcgtcacagctacgcccagcaacggatgcaggagctgcaaaaactcggtctggttcgtgatatggccctgcgcaccgtcagccaggaaatgggccattttcgtccggaaatcacggagacatacctgcgatga

SEQ ID NO: 229021 - DNA, 222 bp, Klebsiella pneumoniae; identical to SEQ ID NO: 185749

SEQ ID NO: 229022 - DNA, 174 bp, Klebsiella pneumoniae; identical to SEQ ID NO: 185748

SEQ ID NO: 229023 - DNA, 564 bp, Klebsiella pneumoniae
atgatagcggcattacttaaccagatccgtagcaccggctttgtgcttctctcccaatttgacgctgttttgtcttccccggctcctacgccggaagaacaggaacagaaagacgcttcattaaagatgcttctcccgctgttagagaagaaccatgatgaaagatacctgataacacgtttactcgattacagcgctcaggatctgttagcggtctacctgtcaggccgttccagtagcatgaaagcgtatgcgcttctccagctcatacagaacacatccaaaacatggccgtcaggtttctatcatgctgttgcccgttccggcttacgcctgaacgacgagctggacacatccgggctaacccctatccagttagcagccaaaacaggaaacgtagagctgtttaagcttcttctcttggatggggcagatctctatcagaagaacaaagacggtatgagtgcttatgatttggtgttgaacagcaataacgcagagctgttaatgttcatgatccgctatgaaaatgctgatatttcgaactaccgccgaaaagcttga

SEQ ID NO: 229024 - DNA, 1041 bp, Klebsiella pneumoniae
atgactgtatctaaaaaatccaaatctaatattcttcatcttgatattgatgctttcattgctaaagcacgtaatattattcatgaagtctaccataacaaaactattctctctgttcctgattaccagaccaaaacagcagcaaacgatcaggactatatcacaaaaccacttacccccctttacgcatgggctggcggtaaacgtcgcctcatcaaagcgtatcgcccctatatgccggattttaagcgtattcgatactacgcagagccgttcttcggcgcaggcgctatgttctgtgaggttttcaatcagcaccgggcgcacatcaaaagctaccacctgaacgacattaacccggagatcatcaatctcctgaacaccattaaaagggattgttccgggttcattgacgagctgaaggccattgaagaacgcaaccactataagaccattgaaggtcgtaaacacttctactatcgcttacgtgaagaataccgctcattgcccgtaggggttgagtattcagtgagaggaacagctatgttctacttcctcttaaacaatatgttcaggggcttatacagtcagaaaaacgggcgtattttcacttctttccagactaataaaaatggttttgattatgagaatatcaaaaactggtcaacagcattacagaaagcggtgatcacctgcggaagctatgaagacgtaaaggttaataaaaatacattcctgttctgtgatccgccatatcgtgattgctcgattatgtattcaacagtttttaatgatgaacagcataagcaatgctacgcatgggttcaggaaaaagtagaagagaaaaaagcagtaggtatgttgtgtaataaaaacttaaatgatggtttctttagttcactacctactacaacagatagcgaacatatcaacatccaatattcgcatacaaaagcaagagtaggcgcaaacagaaacattgttgagctgttaatggtattcaaagaaaaaatggctgttccggttcttaaagcagcttaa

SEQ ID NO: 229025 - DNA, 303 bp, Klebsiella pneumoniae
atgaataaaggtagaaagaagttcaggccagtagattttcaaaataacaacttagggaataactacataacaatagaatgtttgttatcagcgcctttccatgagcattcaccggagcattttgcaaagtgtttagcagaagtgcctaagataaacaggctacttattgacaggcgtaagtgtgataacgaagagcattatcaaagggtattggtaatggctgatgtgtctttaaaaatggcaatgattgaaagaagaatgaaaatagtgaacgaagaaaacagttggtttaatcaaaaataa

SEQ ID NO: 229026 - DNA, 393 bp, Klebsiella pneumoniae
gtgcaatatcatgaaatagtaaaagctgaggttttaggttttgttttaaataatgtggaaggttttaatatctttgataaaatccatataaaaatgatagatgttcatcatccgggttatgagggaataaatcgtgttcctttctttgaaatagattatagaaaaggatttactttagcaaatacctttaatcatattgatgatgaatacattaatcaaagaacgttgaactatgcccttaacttgtgttttaacagtgagatgagctttaagtatgaacacaacagatttataagtgaatgcttctcatgcacttattattgtatctttgaaaatatgtatagaacattatcagagaaggaaagcggtaaagtgagatggtggattgattga

SEQ ID NO: 229027 - DNA, 246 bp, Klebsiella pneumoniae
atggatgttgatcagtataacaaatcaccatgtagattttatatagtaaatgaagaggttcgttatcatgagttcataatggactatgaagaagctttaaagataatgcgcattgataaaaggatgaaatataaacttgaaaatatcttcaatgatacaaggaagcttcttccgtgggagatctcagagttcaagaaagaagattttgataacatatcgaaagaagatttacaaaaactcatataa

SEQ ID NO: 229028 - DNA, 1185 bp, Klebsiella pneumoniae
atgaataacttaaaagaaaaaatagaaaaagctttagataaatgtgatgttgttgttgtatctggtgttagcggtgtaggtaaatcgactttactcaaagagatagcaaaagaaagacacatacattattcaaatccgacttataactgtattaagttcagcattaaacacagcgatcttattgctattgatgatgtgagagaaacagaactaaaaaacgtgatacaaaagattcaggatgctgtagctaaaacaaacataaaaactaaagcgatcatagtagttgataagtttgataagtctgttcttgatagcgttgtattgaaaataaagcattacagaatggtaaagcaaaaagcaaaaggtgtcttaccaaaaataaaagagtatcaggagcttttaaaatcaatagaagaacaaagatttcttactgataatgttcagatctcatgtttgaacgatttgtatcaaatggaacaagaattgaagtatttgagagatttgaatgaaaagtatgaatgcgaagctgttttacatgaccataactatacacaattagctcttgatttggatgatagcaaagctaaagtagaagagcttgaaagtgaaattgttgagttgaaagcattaataaaagaaatcactgataaaactcaggaagagttgactgatttagaagagcataacatcattttaattgaaaggttgagaaatgaagaaagtgaaaacaaagatctgataaaagagaactacagcttacacttaaaaataaaagagcttaatgatttactctatgaccaaaacgaagaaaaaatagaacttgaaggttctaatcaggagttagagcagtctctttcccaatgtctgaataaaatccaaacataccaaaatacagtagctgtttttgaagataaaacaagacttcttgaaaaagctaataacgatcttgaaagtgaaatagattaccttaaagaaaaggctcattgtcttgaagaagagttaaataatgaagttgaggaaacaggattttttaaagaaatgtcagaagactttattactcagattaaatggttaaacaacacgattgaagtttatcgtggtgaagttgatgaagacaccatacgcagggttgaatacaccgtccaacagctcagagaaagtttcggtgatgattatgaggtctga

SEQ ID NO: 229029 - DNA, 867 bp, Klebsiella pneumoniae
atggctaatgaagtattaaagtggtttttaagcgtagtcgcttcagcagggtttatcggtgggataggttttatagcaagagagagtttaggaaaatttctaacaaagtcgattgaacataaatttgaaacggaactggaaaaattcaagtcagacataagagagggtgaaaaggaattagaacaaatacgaagttacatttcatctctaaggacaaacagagattcagttctccaatcgaagaaatttgaatcagccgaaaatctcattgccatacgccaatttcttagtggtttaaccatggctgtacaatacatgcaaatgctaaaggtcgatgagataattaaaatgggtgatgaccaaaatcttaataacttcatggaggcaattacaaagcctttaaatattagccaaaaatttgaagaatacgctaagtttaataaagatatcatgaaactatatttaaatgataatactattaaatctttcgagatttatgaaagcattatgatttatgcattgatatcgctgcaacttttatcaattccaatgtctagaaaatacaatattttaaaagaaggaacccttagcaaaaagattattgaagtaatcccttcgtcaaaagaaggatttgataaatatggtgagaattatatttattattggcatgattatttttatgcggatgttttaaaaaaactcagggaggagttgataggagaggtcaatatgaacaatgacacaaagtcagcggaaaggcttgtcttagattttaagaaggcacaagttaatatccagaactcgttaagagaaaatgggttgccacaaaacttacttaataaagatgtgattaatgataaagaatga

SEQ ID NO: 229030 - DNA, 1338 bp, Klebsiella pneumoniae
atgaacaggccttcagcctcatcaacgctccggacaccgttgttttttattgtatctatactggcgctattttgcttaattaattttaccacaacctacattaacacgataacgaccccggcgccgttgttgttttacggcatgacccttattattctgatattttactttttaatatcaataactatcgctttaaaatacttaagtgataaacgctgtctgtttctcataccagtagcctgtgcctttattggctctgccataatgatgattcttgcgttacaaaattacagcaaactgttttattgcaatctcaacgactcaatctcatacaatgaatttctgcggtattacttttaccgcaacgccttaacactcacccaaatcatcaccgcggcattagtatacagatttcgttctcatcgcctgctggcctcccataaccacattattattacctttgcctgcataagccttactttagctatcgtcctgattgttggatttgcctcaatgcacttgtatgaaccaacgatacgcttagccagtaatataatggtttacatgtggacgctcctctttttcacgacgattgcattaacccgcttcagaaatatattctggacaggaatctatttttactgcttcgtttatatcttaaccttctctttcttaacaaccgcagatgtcgctagcgaaaacacatggtataaagcgaggcttttcgaaacgctgggcaccctgatctttattattattattttccttaatgcgtttaagctttatcaattatccaacaataaatatgagaatgcctatcagaactcgattcatgattatctgacgcagctgtacaaccgtcgctatttttaccttgcgctgacaaaaaaaatgcaacgggtctctgtgcaaaaaccattgtctatcttgttatgcgacatcgatcatttcaaacgcataaatgacaaatatggccactttcagggagatcttgttattcagtatgtagcctgggttcttcaggatcaggttcgaagagatgatattgtggccagaacaggcggcgaggaatttgcactattactgcctgacgtcggccaacagcaggcgcaactcatcgccgagcggattcgccaggctattatctccccaggcgacgtcagcagcagggttaaactccccgagagcgtcacgatcagtatcggccttgccactacggaggatcctaaaacggtagagactgaattacttaaccgcgccgacgacgccctgtaccgggcaaaaaaagcaggaaggaattgtgtggttgcctggcagaagtcctcctgtactcgatag

SEQ ID NO: 229031 - DNA, 405 bp, Klebsiella pneumoniae
atgagcaactttgatacttcatcgcaagttaaggctcgcaagttacatcgttgctgtgaatgttacggcgctataaatccaggagatacctacgagaaagtttttgtcgtccaggatggcgatgccagcaacttcaagacgtgccagaaatgcacagaagcgcgtgactggctgcttaacgaaactgattggcctgacgatatcgacggcgaagggcattcgtatttcttcaggatgctgcgtgaccacctccgtgaacaaggccgtgaaggggaccgcaaatacgcatttcgcgcatatcggcttgtcgtcctgatggataagcgccgcatggcttatgccaacgcatacaacgcggagaccgtgaaaatccgcgattctcttgctcaaggagtctcagcatga

SEQ ID NO: 229032 - DNA, 303 bp, Klebsiella pneumoniae; identical to SEQ ID NO: 206278

SEQ ID NO: 229033 - DNA, 318 bp, Klebsiella pneumoniae; identical to SEQ ID NO: 206277

SEQ ID NO: 229034 - DNA, 294 bp, Klebsiella pneumoniae; identical to SEQ ID NO: 156811

SEQ ID NO: 229035 - DNA, 522 bp, Klebsiella pneumoniae
atgagaaaaggatttaaaaaaggttttagtctcatagagctgttgttagttcttgccgttgctactggcgtagtggcggctacgttctatgtctatggtaaggttcaggcgcataacagggttaaccgggctacgcatgatctggcgagtatcagtaaagcgatgaatgccattctgacgacaaggccaacgatagctgaggctaatactatgctgaccagctcaaaggctttaccgtcctctatgctcgataaaacaggctcgttcgttaacgcctacgggggaaagctcactataaccgctcatagcggctcaaatgacttctatgatgtttcctactacaacgtaccacctgatgcgtgtatagagcttgtaagcgccagcagagcgatttaccgcactataaccaacacttcctatagcgcgaagataacagccgcttcaggcgtgagtgatatagcttcattctgttccgggtttacctcttccagctcagtgatggtctttactgacgcagcctga

SEQ ID NO: 229036 - DNA, 327 bp, Klebsiella pneumoniae
atgagtatattagagtttttatcaacggctatagttttcggtattgttgctttatttataacattcgtagtaaaaaacataaggagaagcattaagtttaaattatatttcaaatccttaataaaggttggtattacattgatagcactgatgttcgtttccggtgtaatatccaaagacattaacatatttattagtttgatgtttgtttattatttaaaggttttatatttctcaacattgctttcctttgtttattttgttggaagaaatatattcacgagtataagaacaaataaaaagaatatgaaaccaaatgcaatataa

SEQ ID NO: 229037 - DNA, 1005 bp, Klebsiella pneumoniae
atgcaaagaaatgtcattattgatgccatgagatttttagggttgttacttataatgcttgctcatgtaaatccacctgggcccatttttcaaattcgaacatttgacgtaccaatgatggtattcgtatcaggaatgtcattctttttatcgaaaaaaaccgacatcagtttcataacctattcgctctcacgttttaaacgcttagtgttacctgtatgggcatttctcaccttgtttttttcatgcatatatttgtttaaacctgaaggttttttagatcttctttcatttaaaataatcgcgtctacatttatgctaaatggctttggttatgtatgggtcattagagtatttcttgttattgcaattctatcccccctctatgtttacatagctgaaaaagccaatggttacattacctcattaatagcattaacaatgctgctatgcagtcttgcagcatcaacaattaattatgaaaatgaaagtaagttaattggacatttgttttatgatgtaatctttccagctatatcatatggagcggtatttattattggatataaattcatccattttaaaaacctcgaaaaaattttcttgcttctattattcactttgtctttattaatatatgttgcatacaactatgtaactcacaatgcaatatacggaccacaaacatacaaatatccaccaacattatattacatatcattctcaatagtaatgattatgatagtgaactatgctttaaatattttactagacaaaaaacaacttccatcaattattcttaaaatatcttcgaacaccatatggatttatttatggcacattcctgttgttgaatttttttacagatataacaccggattgaacttcattgtgaaatacatattagcagttggcatatcaaccaccattgctttaatacaaacttcattgattaagcgcatatttccaaattcgaaagccataagaaatatttttaccggctag

SEQ ID NO: 229038 - DNA, 165 bp, Klebsiella pneumoniae
atgtggtatctgtggaccgggataactatctatggcttcttattggtgctcggtcggattcattgcccaaccgcagttgatcacattcttgctctggtgacaatcgttctaatgtggccgcttattccagtgaaaattgcagtgtgtctcctcaaaggtgactga

SEQ ID NO: 229039 - DNA, 291 bp, Klebsiella pneumoniae
atgacatttaaattaaccaaaacgtttgacgcaaacttaaccaccgataccggaatgagcctgggtaagcagcaggttacgttagacgtcatctgcgccattgtactgatacacatcatgcctgacggcacggccagggcaacgattacatcctcagccaatggcggtgaccctgtgcagacagatatttttgagttcagttactcaatgtcatctggtgtcgggatgtacgagcaggcactggaacagatactggcgagtgagaattatgccggggctgttgctaactaa

SEQ ID NO: 229040 - DNA, 930 bp, Klebsiella pneumoniae
atgcgcattgaacactgcccgttctcgctggaatgcgggtttattgaacatgtccggtttctttcagggaaaatcgaaacgcgccgcaaaaaagatgcaacccactatgtcgttaaaattaatgatactgccacgcggtacatcttcgacaatatgcaatttgttaccaccccgacgacagaaaccccgtttttgtatgaccaggggagatggccaaaatacagtaagtgcgagtttaccatcgggggcctcaccgggttttatcccggcgttcgctggatttaccgtgaacccacaaaatcatcgaatgcaatatttaaagccattacgataaccgggccaatggcggcagatggtggtgatccgaagaaatatccgatgtatctggcgagctatgatgcgtttgacggctcagtaatctgccaggatacgtactacattcctgacagcgaagggaagtatcaggaatttcatccgacaaaccagggattgtttgcccttggttatcagacaaaattcgggatactgcatctcaacaccaatgatatctctaaagtggccggtgcgatcttctatgcccgtgaatgcgagtataacctgggcgaactgtcgatatccggggcgccttataagctccttcagggcgtctcgctggggaatatcatttctcttggtgcactcgcgaagacggtaacaaccggggatgtcgtgatatacggcaaagaaaccatcatgatgacggctgcaaccacactgactgcattaactggatttaccggccagacggtccgtgtagtgagttttgtcgacggtagcgttattcagaacaacgcgcggataagcacaggaactggcgcggacgtaccaatggttaaaaacaaggtttatacactcacgatgctgtcgaataccacagccacgaaagactag

SEQ ID NO: 229041 - DNA, 717 bp, Klebsiella pneumoniae
atgaatatcgtcaccgtcgcccgggttgaacgtaatccgacggtaaaaaatgaaatcgcccagaagggtttttcccgctcgctgccggtgggctttttagcctatcccataagtcaggccgccgatatcaccgcctttaaggccgaactggtgccggtcggcgacgatcagctaccgatgattgaacagaccaatgagatcgtgcacaaaatgaatagcctgaccacgacgccgatcttacagcactgcaaagcgctgctcagcgacgtcagccgcctgccgggcatcgatggcaatgccaaaatgtcgaaatcgctggggaacacgctcaccctttcggccagtgaagaggagatccatcgtgcggtcagcaccatgtataccgacccgaatcacctgcgggtcgccgacccgggtcaggtagaaggcaacgtggtcttcacttatctcgacgcctttcatgctgataaggctttcgttgccgagatgaaagcccactatcggcgcggagggctgggagacaggcagtgcaaaaacgcgctggagacctgcttacaggagctgctggcgccgatacgcgaacgccgggcgacctatattcaggataaaggcatgctgctgacgctgctgcgccggggaagcgagcgagcgcacgaactgacacaacggacgctgcatgaagtgaagcgtggcctggggctgccggtgctgttttga

SEQ ID NO: 229042 - DNA, 1398 bp, Klebsiella pneumoniae
atgaaagatgaaagccaaaaatatatctcgattatttttaaggaatggttgccgctgtacgacagcctgacgccggaagtgagggcggtacttaaaaatattgccgggcagcaggcggaggcgttagcgacccgtttttatgattttattttccaggacccggacattgcgcggcatcttagctatgacttagttcaggaacggctcagcagctcgctggccgggtgggtgaaagatatcctgatgtgcgataaggaaaatctgcaggcgctggcggagcggcagtacctgatcggcagcatccattcgcgcatcggtatcccggcagaggcggtactgcgcggtgcgcgccagctgaaagccgggctgattgaaaatatccgcgatagccaactcgatcgcgagaccagcgtcgccgccatctactacgctatcatggccattaacatggcggtagagatgatgtgtcatgcctataccctgtcgcactatcgggcgacgaaaaatgaagaagcctaccgcctgtatagcctgatggataacgttccgctggaatatggcaaacagcaggcctcgctctccggatgggaaaataccgctatttttaatatcgttagcgataataaaagcgatattaacggagcgttattatctgattcggaatttggcctgtggttccgccataaatgcgtgcgttattttaacaaaaatccgcaaatgcaggaaatcgccgacttaattagcaaggtggatgcgctgttatccgcctggaaatcctcgtctgagggttctgagtataaaaacacgcaggctttgctgcaggggatccatatcaattgccagcagatcggcagccagatgggggtgctgtttagcagcctgtcgcagatgcaaagcggtaaggatacgctgaccagcctgcttaaccgccgctatctgccggttgtcctcaagcatgaagtgacgctggcgatggaatatgaactgccgatgacggtggcgattatcgacatcgaccactttaaagagatcaatgatagctgggggcacatggtcggcgaccgggcgattaagcacgttgcggagctgctcagcgataatattcgatccagcgattatatcttccgctacggcggcgaggagtttctgctggtgctggtggagaccggcgccgcggaagcctttacgatccttgaacggctgcgtaaaaaaatcagccagctggcgtttagcgttggcgctgacaatgagatttcgattaccgccagcatcggctacgccgtccacacaggtcatccggattacaatctgctgctgcgcgatgccgacagcgcgctgtacgtcgccaagcgcgatgggcgcaactgcgtgaagctgcatgaaggcgacggcaactaa

SEQ ID NO: 229043 - DNA, 327 bp, Klebsiella pneumoniae
atgtcaaacttaaataatgaagattttaacgcaataaaggaagctggctttattaatgaatggaaaaagcccggcagtgatgaagttagatattacatcaatactaaagagattatgaatttatggtcagaagataagattaagttaggttattcaagaagagaaagatcagagttagaagcacataaatggtggtatgttgaatctaaaaagggtggttttgttttaaaaacatccatgagttataacaacactaaacataaatatattttccctacactttcaggagtgttgattgaagcgtctaaaagcgatctttctgactga

SEQ ID NO: 229044 - DNA, 642 bp, Klebsiella pneumoniae
atgaaaaaaataagctttaaaaatacattaaaagaaatagtagctaaaaagtatgaatatgaaacagaggcaatgcattatcttatcagaaaaatgaaatctcttggttataacatgaatgctaaagaccctgtaattgctgcctttatattagatatgaaaaacattgaacttaacagaatcagaacatcagataaaaggtttagagcacatcaaataaaaaatgaacttgggttgttatacaatcatataaaaatactaaataaaacattaccaacaagaactattgaaatagatgaagagtatataaatgacactgaacaaaaggaacacattatgaatacaatcaacttcaacgacatatacaacacattaaaatccaaaaatgttaatgatgggtttttggctctaaattatcttttgagagatctaagtgttttaggttttgaaatagataggaaagattctactttagctttaacttatagtgatatttttgaaatgatggagctaaagagtaatgattttaaaatagatgatatacgtgagtatttagaatttatctataaccatattacaaaatccaaaaacatagaaacaaataaacagttagtaaggatatgggagctaaccaaagtataa

SEQ ID NO: 229045 - DNA, 336 bp, Klebsiella pneumoniae
atggaatactacgaatttgtagaaacctctgtgttcacgcgagagatgaaaactctactcagtgatgatgaatacaaagagtttcaaacgttcctcatcgagaacccggaggcgggtgatctgattgtaggaactggcggttgtcgcaaggttagatggtcacggcagggaacaggtaaaagttcaggtgtccgggctatttactacttctacaatccggcaggccgcttatacatgcttatcatctatccaaaaagtgagaaggatagtttgacagcagcagagaaaaaccagctcaaagcggttgtagcgggttttaaaggtgaagagggctaa

SEQ ID NO: 229046 - DNA, 291 bp, Klebsiella pneumoniae
atgcgtaaagagctttttgatgatctgattgcttctgctaaggaagctgtagaaatccatcagggtttacgtgagccagctcgcgtgacccgttttgaacgtccagatgttaaggctatccgggctaaggttcatatgaaacaagatgattttgccagcctgatcggggttagctcttctcttgttcagtcatgggaacaggggttaagaactccggcaggtgcagcgttaaagctgttgcgtgtcatcgagcgtaaacctgaatttgttcaggaactacgtgaagcataa

SEQ ID NO: 229047 - DNA, 282 bp, Klebsiella pneumoniae
atgtcatatacatataaagtcataaataatagcctcttctttattgaagaggaaagtaataagcagtatgaagtaaacgttataccaaaaggaattggaaataatctgtttcaggtttctattcctgatttaagcccgcgcattttagaagcaaacaatgctaaagagctttttaatcaggttgttgatatagataatgtcagacgtagttttagacgacaaacacctgaagagtttaaatctaaattccagaaaatgaaaaagaaagcttgtccagaataa

SEQ ID NO: 229048 - DNA, 1929 bp, Klebsiella pneumoniae
atgcctgttgaagctgttagtatgcgtgatgaagaagtttttaaatccgtatacgacgataaagataaaaaacaggtatcttctaatgatacaaaaacgcatattaaagttaagtttcttgatctcaatggtcaggaaagctttgttaaaataccacaatcagaactatcacaaatcactaaacagtctgttttagctaaacgctggcctttgccacctgctaataaaatgtctaaagtggctgacataatgttaaaagtgctggctgatggtagaaaaactgtagtttcacctgcgggtgttcaatacgaaccttgtataatatccacttcaggatcggataattgcggatgggataagggcgaacacatacgagctgggcatcctctttatgtaggtgatgaagagtgtatgacgtttaaagcaggaagcgcagaagttcagttagatatttttaataactggtttgataaagacttacagcaagcttttatgggtgcttatcagcaagcaagctatgcatttgatattatctatcgtgctaacgttaacttcattttagagttaacaggtaagcccggtgatggtaaatcagcacgtttgttaggtctttcttctgttgaaggtattccggtaaaaggcatgaacagaacgtattttgatgctacagcctctttagcaggtttagagcgtcatttaccgctgttaaataacggttatgtcttaatggatgagtttgataaaatcgtcaataatgacggtttaaaagtcgcaactcaaatgattttcctcattgctaatggttcccaaaggatcatagcagaagcgaataaaaccacaaccattagaaaaaacagaccttttaaacttggtgctattgttgcttcaaacacatccataatagaaagaattaaaggtcattcaagcttcatggcattaaaagaccgttttattgctatcagaactgatgatgatgagattacaggctttagaggtgatctaactattattaacgtatggaaacgtttattagaagaaaactatggacacatttatggtctgactgttgattatatatctaaaaataaaaacaagcttattgaaatgtttaccactctacaaaatgagctttacgaagaggacaaacactttactaatgatatgcgtgatgctgaaatgatcgcattccttcagttaggtgcgtttcttgtttctcaggtaattggtaaagaagcagggatagctgctgataaagctgtagagatctataaaaatcgtattattaactctactcaacatgaagaatataatcacaagattgttattgagagatttaaagaatggattgctgataacatcggttctattcgcatcgaaggtccagtttatactggttatggtagaagttcagaaagagaacagcttgatcacgctgaacgtcttacaaacaacgctatcatgtctaacagaggcgctatagctggacttgagcaaacaagaaggatggaacacagaacagattttgagggctgtatctggttaaaaccagaagcagaggcaagtttagaaaaatcaggtatttctcttgatgagcttatgttagcagctaaagaactggatttattaccaaaatctaaaaaaggtgaagttaatgaaaaatctaaactaagtgatcaaaaaacaagctggctcgcaggtgttagtaaagaagagctattagatataagaagaaaaaaagaattaaataaatacaatataagtacatatgcaaaatgtatttatctgtctccattcgtagagccagaaggacaagttaaaaatgaatttgaggatgaagtattttattcaaacgtggatcgcgatgatatagattcacttgttgagcaaaatattaatgctcatatgttcgatttaccccaaattgattaa

SEQ ID NO: 229049 - DNA, 684 bp, Klebsiella pneumoniae
atgagcctcttctcaactgacgactaccttaaagcgctacaggctctaatcccgtcaggaagagcctggacaagagataaaaacgcagtgcagacggcagtgcttcgagcgctggccaggagttttcaacgtagtgataatgacgctcagtctcttcttagtggcgctttccctaaaacagccaccatcatgctcactgactgggagaatacgcttggactgcctgatgattgctctattggcgaagttgacacaatcgctaagcgacaaaatgcaatcgtctcaaaattaatcagtaccggtggtcagtcaaaaagctatttcatcggtattgcagcggcgatgggctacaccatcgccattaaagaatacaggcaggcgcgcgctggattatctgtttgcggagacggccttaatggcgatgactggccattcgtctggttggtagaaaccgaggataccacgatatcttatgcacgggtgggtctcagttattgtggggatccacttcgctcatggggaaatcgccagcttgagtgccgtataaatgccttggcaccgtcttatacattggtcaagtttggttatatctattttggctttaacgatgaaggtgtttatgatgttacgcccgagtttgccagcatgtttgatattagttcaggttatttatcactaaattaa

SEQ ID NO: 229050 - DNA, 1080 bp, Klebsiella pneumoniae
atggaaaacaaaacaacagaaaaactatattcactcgatgtgttaagagggttggcagccatatcaattgtattttggcactggcaacactttttttatgttggctcagcaccaaatggtataatctatgaaaaacaacctttttttaatttattctggatgttatataagtatggcgatcttgctgttgagcttttcttttgcatatctggattcatcttttactggctttactcaagcaacataaaaagcaaaaaagaaagcgcaagaaactttttcataaaaagatttagtcgattatatccgttgtacctattaacatttttagttgttgcattgttacagtatgtgtatcacaaaaccaatagctcatactttgtttatcagtttaatgatttttaccatgcgttcttgaatatatttatgatttctggctgggggtttgaatctggatggtcatttaatgccccagtctggtcagtgtcaatagaggctttactatatgctttatttttcattacgtgcaagactcgaataagtgggaaaatcataatcccactttttattgtaattggactcctaacattccctcacaactataaattaggaatagggatattttcattctattgtggggctgcaactttctttttcagcaagttaataacctcaaggctacatttgttacctagaatcatgcttagcacctcattactctgcatttcatggataattataatcgaccagtcaaagaacaacgcattcattataactgggttaggctttacatcctttatattgttcttaactacaatagatggatttgaaaaatgtcatatctttttcaaaaaagtgggctgggtaggcgacataagttattcgtcatacctgatacatttcccactccaaataacctttgcgctcgcaactcaaaaaattgggttcagcagagatattttttataatgacggtgtttttattgcatttatgctgtccctattaacactgagcttcattagctatttttactttgagacgaaaagtcaaaacgcgatacgaaaacttacactccaacattaa

SEQ ID NO: 229051 - DNA, 753 bp, Klebsiella pneumoniae
atgctatcaaataccgttcctacaaggctttacagcgaattagccattgatagtgttagagaatgtttatttcctgattgcgtatcaagattaagaggtttttttgttttcgatgaaatagaatcaatatctagattttggagttgtaattcttggggggggcatttttctgatcaatatttatctgatgtaggtgtggcagcaactagatctaccagagtagactccaattggatatctcatatagttgatgtggatggcagactaaaagaaggttggcatgataatacagttaactattggcgtggagatgcgtttccaggttctgaacctatatgggaaaggatcgtcgaaggttatttaacggtttggagtcccgttgttagaaaagaagcaatattagaaatagaggctgtctggccaaactctttgaaattattgaactattcttgcctgtgtgctgcttatggctctttagatggaatgattttcccatttttgatgcaagataatgaaggtaatattaaagttacctatttatctagaatggttcaagctaacgacaaaaatttcattgaagcgattattgaaaacgcaaagaaaatgccttcctttagtgttaacttgaacgatacgacaactaatgacgaagagatcagcacacctgatctaacctttttgaatgtctcactatcctctgacgataattgtgcttttgccgactttgttaaactcatgagtcactctcaatga

SEQ ID NO: 229052 - DNA, 336 bp, Klebsiella pneumoniae
atgagtaatagcgtaaaagagacagtcagagataaaatgatctccgatttaactaaatactattttactcgcaaagggaataaatcgtatttaacgatgttagaaaacaacaggtatttattcgctaaaaatgataaggatgaagggttctatctggtttcatcaaaggataatgatagcatcattgatttaactaagagcatttatatggaaataatcaaagaagcaaaagaacatggtttaaataataaatatcatatatacgcaacgggatgtttgtttgccagtccattaatagacttcaataaaatatccaatgtggaagaaattttttaa

SEQ ID NO: 229053 - DNA, 351 bp, Klebsiella pneumoniae
atgagtaatgaaaagaaattggcaataacaagcgatatagtgttttctcttgatacaaagataaaaggtaaggattatgtttatgaagtggagcatttacatgcttcatatcaaacaggcgatattacagactatttatctttaaaaatgaagagcaaggataaagatagtgatttcaaaactgaaactatcaatatggcttattttgataatctgaaaccggatcagcatgaagattttaaaaagaagataaaagagtttgcgaatgaagcttataacagaatggaaatagacatgcagcccgtgtatgaggaaaacatgaaaaacttacgttcactaagctttaaataa

SEQ ID NO: 229054 - DNA, 831 bp, Klebsiella pneumoniae
atgttgatgtgtgatgcgaccggtctgtcgcaacgtcgtgcctgcaggcttacaggtttatccctgtcgacctgccgctatgaggctcaccgtccggctgctgatgcgcatttatcagggcgcatcactgagctggcactggagcgcaggcgttttggctaccgtcgtatttggcagttgctgcgccgtgaagggcttcatgttaatcataagcgcgtgtaccggctttatcacctcagtggcctgggcgtaaaacgcagaagacgtcgtaaagggctggcaacagaacgtctgccgctgctccgtccggcggcgcccaatctgacctggtcgatggatttcgtcatggacgcactttccaccggtcgcaggatcaagtgtcttacctgcgtcgatgatttcacaaaggaatgcctgacggtcactgttgcctttgggatttcaggcgttcaggtctcgcgtattctggacagcattgcactgtttcgaggctatccggcgacgataagaactgaccaggggccggagttcacttgccgtgcactggatcaatgggcctttgagcatggtgttgagttgcgcttaatccagccgggcaagccaacgcagaacggatttattgagagctttaacggacgatttcgcgatgaatgtttgaatgagcactggttcagcgatatcgttcatgccaggaaaattattaatgactggcggcaggattataacgaatgccgcccgcactccacgctgaattatcagacaccgtctgaatttgcagcgggctggagaaagggtcattctgagaatgaagattccgacgttactaactga

SEQ ID NO: 229055 - DNA, 264 bp, Klebsiella pneumoniae
atgaagaagcgtttttccgacgaacagatcatcagtattctccgcgaagccgaagctggggtacccgcccgtgaactctgccgcaagcatgccatttccgatgccacgttttacacctggcgtaagaagtatggcggtatggaggtgcctgaagttaagcgcctgaagtcgcttgaggaagagaacgccagactcaagaagctgcttgccgaagcaatgctggataaagaggcgcttcaggtggctcttgggcgaaagtactga

SEQ ID NO: 229056 - DNA, 822 bp, Klebsiella pneumoniae
gtgcttaagcagcgtcagcggggcgaggatcggcagcagcccggcgcgatagttgaggatcacctcccgcagctcgccgcgctggcggctgttcagctggtcgcggaaataaccctgaatatgcatcagcacgttggtgtggtttttccgcgaggcgggccgcttgaggatcgccatcagcttttcgcggtagacctcgaagaaagcctccagatcctcccattcatgcagcgaggcgacgaacgggccgatctcgcggtagcccgcctggtggtgagccagcagctgcagcttgtagcggctgtgaaaggccagcaggccgtggcgggtcaggccgcgggcgcgcagggcgttgagttcatgcagggcgaaaacgcgctcgacaaagttctcccgcagcagcggatcgtgcagccggccatcctcttccaccggcagccacgggtagcgcgccatcagggcgccggtaaacagccccacgccttccttacgcccgcgattgcctttttcgtcatacagccgcacgcgctccatcccgcagctaggcgatttggcgcagacgataaagcccgacagctcgcccagagttgccagatgggcgttggcaaaatcggccatcttctccgtcacatcctcgtgcggggcgtggctgaagcgcatgcggatctccccgaccggagtctgcaccaggcggagcgccgggcggggtacgggcaggccgatcgccatctccgggcagacgggcttaaacgccacccactgcgcgagctcatccatcacaaagcccatacgcttatgcccgccgtcgaatcgcacggctga

SEQ ID NO: 229057 - DNA, 924 bp, Klebsiella pneumoniae; identical to SEQ ID NO: 130278

SEQ ID NO: 229058 - DNA, 660 bp, Klebsiella pneumoniae
atgaacataaagtatatcggaaacagaatattaactgcttgttttcttttctttattatgaatagctttacgctcgctaataattttacaattggcgtaggcattcatcctctctcgtatcatatggaagacgaacagttaattaacatatttaataaatataatataaaaagttttaggactgattatttttgggataaagtggagaagcaacctcatgagtatagaccaatacctcagttagatgaattaattgataagtctgtaagcgaaaacattattcctatgataattattaattatgggaatgagttgtatggaggtggtttaccacttgatgaagccagcgttgaagcatatgcaaactactcatcgtggctggcggatcacctaaaaggaaaggtcaaatatttcgaagtttggaatgaatggtgctataaaaagaatccaaaagataagagttataatcctctaagtaattattcagctgaaagttatttcaacttagttaaacaggctagtctcgcgatcaaaaaaaataacccagatgcaattattttagcaggtggttttaacccattaaataattcacagacgccatgggttgaacatttattggaactagggattttaaattatattgatggattctttttatag

SEQ ID NO: 229059 - DNA, 492 bp, Klebsiella pneumoniae
atgtctgattatcgtcgcagttatatccccggcggctgctggttcttcaccgttaacctgcaaaatcggcgcagcgatctcctgacgcggcatattgctcatctgcgtgccgctacagcgtttgttaaaagcaaaaaaccgtttctgattaacgcctgggtcgttttaccagagcatatgcactgcatatggaccctgcctgagggggataccgattattccggtcgctggcgggacattaaaaaaatgtttacccgagcgctggcgcagcaccatatctggcagccgcgattctgggaacataccatccgtaatgaagaagattaccggcggcatatggattacgtttatatcaatcctgttaagcacggtcatgtccgtagggtgcaggattggccgtattcgacctttcatcgcgatgtgcgtcagggagggtatccgccggattgggcgggtgaggtaagcgaatttgatgcaggcgagaggcgataa

SEQ ID NO: 229060 - DNA, 180 bp, Klebsiella pneumoniae
atgcttgatgacttctttattgactttgttgatgttgaatggtgtttgagagcaagttccaaagggtataaatgttatattaatcctttcgaaaaaatgcaacattcaattggtgacatgagagtaacaatcttaggtagaatctgtctcttatacacatctgacgctgccgacgaatag

SEQ ID NO: 229061 - DNA, 258 bp, Klebsiella pneumoniae
atgaaactgaacaactacctgagcaagttctttgatgttgaagagcatgaagtggagaacgatgaaggcgaaaaaatcccttctctctggctctatgtgaaaggggaagactctgaacctgtagttatcctgaaacagacagaaaagcccggagaatggcgcgtaggagatatttactcagctcttaccaatgatgcccggctatcagaagaacagatcaagaagctggcaaaggatggaatgatcaccaaaaactaa

SEQ ID NO: 229062 - DNA, 1311 bp, Klebsiella pneumoniae
atgagtcaggcattaccgcttatcacccgtcagggcgatcgcattgccattgtcacggggctacgcacgccatttgctcgtcaggctacggcttttcatggcgttccggccattgatttaggaaaaatggtggttggcgagatgttggcgcgcagcgacattcctgccgaagtcatcgagcaactggtctttggccaggtggtgcagatgccggaagcgccgaacatcgcccgggaaattgtgctgggtaccggcatgagcgtacataccgacgcctatagcgtcagccgcgcctgcgccaccagtttccaggccgtggcgaacgtcgctgaaagcctgatggccggcaccatccgcgccggtattgccggcggcgccgactcctcctctgtcctgcccattggggtcagtaaaacgctggcccgcacgctagtggatgccaataaggcacgcacgctgagccaaaagctgaagctgttttcccgtctgcggccacgcgacctgctgccggtccccccggcggtggctgaatattcaaccggattgcggatgggcgataccgccgagcagatggcgaaaagctgggggatctcccgcgagcaacaggatgccctggcgcatcgttcgcaccagctggcagcgaaagcctgggaagagggtaaactgtccgcagaggtgatgaccgcctatgctccccctttccgcgaaccgctcgagcaggacaacaatattcgtaaaaattcaacgctcgcagattatcagaagttacgcccggcctttgaccgcaaacatggcaccgtcaccgccgccaacagtacgccgctgacggacggcgcggcagcggtgatcctgatgaccgagtcgcgggctaaagagctggggctgaggccgctgggctatctgcgcagctacgcctttaccgccatcgacgtctggcaggatatgctgctggggcccgcgtggtccacgccactggcgctggagcgcgctggcctgacgctggcggatctcacgcttatcgatatgcacgaagctttcgccgcgcagacgctggccaatctccagtgtctggcaagcgaccactttgcccgcgaggtgctgggccgctcgcaggccaccggtgaggtagatgaaagcaagtttaacgtcctcggcggctctatcgcctacggtcaccccttcgccgccaccggcgcgcggatgatcacccagacgctgcatgagctgcggcgacggggcgggggatttggtttggtgacggcctgcgcggctggtggtctgggtgcggcgatgatcgtggaggctgaataa

SEQ ID NO: 229063 - DNA, 1947 bp, Klebsiella pneumoniae
atgaacgaattaatggaatggcccgatgtaaggctcaaaaatcctgtcagagtgaacaatgatataaaatcaacgggtgattttatatcatggctagcggagaagaaatctgtcttagacaactgtttggccgatctaatgcatccattcctatcagagtctcccgaaaaccggattgatttaattcttagttggtgttcggaaaaaaacattatggatgacgcggatattatcctgacgttattttgtgcagagtcacttcatcgacatcctgaagtcacaacatggattagcgtccgcgaagtgatcgtgaactcttacgccgttgaatactggatcaaaaatgcgttacttgcattatgcaatatttatcaggaagctcggcacacatacacctctcttttttcggaaatattctatgccattgagcggggtgatttgaaatcaaatcggcattctgagctaactgatcaattgtctcactgggaacgatcagccaataaacttgaagaaatttggcgtgggtttcgttattcagatcccagaatgtttgccgagtcgagtctgttttcgtttctagctgatatcgatattaaccagatggccagtctactaaatacatcacgcaacccggttttgatcgatgcagtgcttatggtatcgggggccggaatgttctctccccgtctgagtagatggagggagtttgtgcttttagcagagcaggcattttcacaagatggtcattggaacggaagcatatttcttccgatgctactcgcgcatgtatgcgacaggatgaaagatattccgtttgaattggtacgacgggggaaaatgattgaagaccaatataaatccgaaatacatgccttagccgatagtattgcccacacactctacggacgttcagacttcgctggtattgtgacacgatggtcagcttggctgatgcgtaatattgtcctgagcgatcaggattctaaagattttaaacacccagattatgcgctttctatactcaatgattcacttggtcgccatacatcacagctgaatctgccagaaacgagcccgtcagatgctcctgactgggagaccctctgctacttttctgctcgctctagttttgctaacgacaacaacagtaaactgcaaaacaataatgtattcgaacagttatggcagcgaggtgccgatagtttttctttagcacagagccataaattacatcgtatattatcactgcacttcagaagagaaggccagagctttccggggatatcttcacaccttctggcctatccgcttgtacaactcggcgacacagctgcgcgctggcttagcctctggaactccgcatattttctacgtgaggcagcagagtttggcctacccgaggccccctcggaacggtactctcttcgacataacataggagaatgtcttttagtgctctgcgcttccggccttgctgctctggatcagatgtccgtacagcttgaagaaggtaagctaagtactccccagagttttctggacatgcatcaatatctacactttgccgtaaaagagatgatgtcaattgatgacaccataaatataaagcactggaagcaactttttctgcacctctgtttgagacgcgtgatatgggatggctcgttaatggacgaggcacagcattcattctttcctcccactgaaaagcctgattttcaggactatctggaatattaccactttgacataatggatctggccggaatgctgtccagtgcaattcgtaacaacgcaaatacagaggcgattaaagtcttggtggcagctgccaatatcaatttggtagagattattggtcagctaaaatggctaaatcaagtggatgaaaggcgatattcactgaacatggacgtcatatcggatctgaagccgcttttacaatag

SEQ ID NO: 229064 - DNA, 627 bp, Klebsiella pneumoniae
atgaacattttttctccttcactaatattatccagcccgactaagcgttcactaccggaaaaaaccatatactgggggtgcacacccggcggcgatcccactaagttcccgcctgatcttaatgccttaagaatacgccgtgatctagatgtagcggaacccctaactttttttgtagacgcggtcagggatgcgcaggaaaggatctggatattggacggttatttttttgccgcacctagcataaaaattgatagcacagactatatacttgatattgctaaatggtttcacgctcgacttgatgcaaccgacgtccgaattttaactaaggttcaccaagaattcagttctgagatggaatctatttttgaaatacaggaaaaagaaattaacgcattacgcggaggcgggaagcccaaatgttcgattcagatcagacaaaccttaaagcagaaatttgattttatgcatgatcgttttgctgtgattgatgatgaactctggcatttcggggctacagttggcggatttcatacttccgtctccgctgtcagtcggggatggtgtgcaaatgagacaggggctataaaattttttgacctggcctggagggaaatggcatga

SEQ ID NO: 229065 - DNA, 1611 bp, Klebsiella pneumoniae
atggacttagttgattcatcagaaggttgggctgttatccgactggcctctctggctaagcaaagctcccgggagcctgccagattactattcgccacgatcactgaactcacacctgaacgcatgctgccaccaccgatgagtggcttcgaaacagtgaccgtcaaatcgaccaaagaacgcattttcttcagacgcacactcctagcgttgtctgatgctcggcaatggtatctatctcttcaggaaggcgtttgcaaaacgcctcttccaacacttgaagctgagcgtaaccttgctctggatggcctgcctcttttcaccgcgggtaaactttatgatgagaaaccttggccccagatgagtttgcccatcggcgaaggattttttgcacttcctttggccgaaaacgatcctgctccgtttattggaagcacaacttcccgtatacaccggcgatttgacggtggcgggattgaacactttgcaggatttctgcttgatgatgaagccacaacatttgtagctcagcgaatgcacataaacttgcgtggttatcaagagtatctggggagtgcatgttacgtaagcccccagcgcatattacgacgggttgaaaattttatagttgatgctggcaaggaaggcgatgagtctcttctattccggtttgttgctatgccaggtcaaacagttgagggacttgagcttacaacgtttgacacagacatgaatttgctaactgattttcagactcataagttacgaagcgatggtgtagtgatacagaaaaaagccgtatgcgatggagaatacgggtatgttttgcggcatccttctcatggcattttggcgttcagtcccccatcacctttcatacggcatatcaatgttggtgtaggagttgcagacagaacacaatacattgtcgatgtgcccatcgatgagtcaccagacgccgaaagattgacctatcacgcgtcgcgtagcatggtacaatcaacctcgacggctgtagtgcgtgaggcagaacccgcacagattagagcaaaacgacgcgaacaacattatcgtcgtcagcgtaaaatccaggctgacacgcagggtcagcgctggtttaaagataaccatcgaaaggaagccatgcgctttttccatgcgctaatccagacagctaaaaagcggatcattatcgccgacccctattttggaggtttacagttctcgcagtatctttataaagtaagctcacgtcaggttaacgtagatattttaaccacagtaagagcttttacaggaaattcagctgaagagaaagcaagaaccttccttgatggtatcgaagaaattcgtaagaaccatcacataaccatcaagacacacatcctaccagggaatcttctgcatgatcgctttatagtcattgatgatgaagtatggttctcaggaaactccctaaactcttttggcaaacaggcttcagtaattgtcaaactgcccgacccgcaaactataattgataatctagagcttattctcgctcaaggcagacaattggaaacccatttttccttatcgaaaaggtcatatacaagtggagaaaacgaatga

SEQ ID NO: 229066 - DNA, 441 bp, Klebsiella pneumoniae
atgaagattaattttgtatttctggcgctgttactgccttcagtagtcacccacgctgaaacggtgggcactacatacattttgaaatgtacccctgaaaaggattacatagatgctaagccgttctttattcagatggaagatacaaagaacgctgatcggacgtggagtcgtgttatcagttgggatagtcattttaacatcccattggatcttaacggcgataccccgaacgatgcaggagagatagaaaatacttatctattctcagcgtcagatagtcaggggatgttaactggggcatcaatggtaatcactcataaccggaaacataataaaaccacttatggggattctactaatacaagtggagaagttaagcagggaccacacggccaaggagtttgtgtaatgaccgataagcaggataaagtaaattaa

SEQ ID NO: 229067 - DNA, 945 bp, Klebsiella pneumoniae
atgctggagggattagcgaccttccagcccatcgttccctttattcgcgatcaccattttagcccgaaccaccggggctcccgcgaacagcacattgtctatttcgctgatgcctttgaacggctgctgccggccgatagccacgttgccgcctggcccacgcgggcggtggtggaacagttcgtcgctttgcatcgggagatcgatccgccgctctgcgatatcctgtgcgaggtcgctgaaaatgcgaacttctggcagcaccttcaccccggccatattcagcggctgctggagattattggccccatcaacacgcgctatctggatattcacggtctgaaggatgtctgcctgctgattgccaaaatcgtcgacacctacagcagctttaccgccacccatagcatcatggtgggggaaatcgcccgccagcttgcccgctggatgcagctgccggagcccacctgccagcaaatacagatagccggctatctacacgatattggcaaggtctatatcccactctccattctcgaaaaagagggcgagctggatgatgaggagctgagtcaggtgcgggagcacagctacatgaccggcgaacttctcagcgactatagcgagctcggcgacatcattaactgggcctcgaatcatcatgaaaaaatggacggcagcggctaccctctgcatctcgaaaaggagcacctgaccctcgccgaccggattatctccatcgccgatattttcaccgcgctgaccgaagatcgcccttatcgtaaagggatggcctggcaggaagccttacagattatggaagcggatgttataaatggcgctctggatagcgatgtcttcctcgttttgcgccaccatgcggaaacgctacacgccatcattcttcagacccttgcccctctgcatagcgagcgccgcctctga

SEQ ID NO: 229068 - DNA, 1110 bp, Klebsiella pneumoniae; identical to SEQ ID NO: 192089

SEQ ID NO: 229069 - DNA, 267 bp, Klebsiella pneumoniae
atgttttcacagtatggcgaatatgcactgatgatcaccctgaacaacggcgttctcaaggtctattccggtatgactgataacccggaaactctgctgaccggatgtccggcatttgattacgtcatgctgggcagaaacagctcggtttctggttctacagtgtcaaactctggattctggggcggctggttgcagaaagccgtactgttcgattcggcgctgagtgacgcggatatgattgcgcagtttgacctgctcgcataa

SEQ ID NO: 229070 - DNA, 1170 bp, Klebsiella pneumoniae
atgatgacgggcatgaccattgatgctggtaccagtctcgcaccggcatttatgctgacgctgaacagtcaggacattaccagcaattttagcgaccgactgatatctctcaccatgacagacaatcggggatttgaggccgaccagctcgacatcgagctcgacgatactgacggtaaagtcgagttacccctgcgcggggcggtgctgacgctgtggcttggctgggagggctcagcattgctgaataaaggcgatttcacggtcgatgagattgagcaccgaggggcgccagataccctgaccatccgggcgcgtagcgcagactttcgcggaacgctcaattcacggcgtgaggaatcctggcacgataccaccctcggtgaactggtcagtaccatcgcaaagcgtaacaaactgacggccagtgtcgcggagccgctgaaaaaaatcccggtaccgcatatcgaccagtcgcaggaatccgacgcggtattcctgaccagactggccgaccgcaacggggcggtagtgtcagtgaaagcggggaaattgctgtttctgaaagccggtagcgcggtgacggccagtggtaagcccgtcccacaaatgacgctgacccgcagcgatggtgaccgtcatcagtttgccattgccgaccgtggggcatataccggcgtaaccgcgaaatggttgcacaccaaagacccgaagccgcaaaagcaaaaagtgacattgaagcgcaagccaaaagagaagcacctgcgcgcgctggagcacccaaaagcaaagccggtcagcaaaaagacaaaggccaaaaaagagcaggaggcccgtgagggtgagtatatggccggtgaggccgataacgtgctggcgctgacgacggtctacgcatcgaaagcgcaagcgatgcgagccgctcaggctaagtgggataagctgcagcgaggcgttgctgagttttcaattacgctggcgcttggtcgggctgatttattccctgagacaccggtgcgcgtgtcaggctttaagcgcgtcatagacgagcagtcatggctaatcagtaaggtaactcacaatctgaataataatggctacacgacgggcttagagcttgaggttaagctctctgatgtggagtacagctccgagtcggatgatgaataa

SEQ ID NO: 229071 - DNA, 486 bp, Klebsiella pneumoniae
atgatgcttgctctcggcatgtttgtatttgaacgccgcaccctgccttatcagtcgatgcagcactctaaggattatcgctgggcgtctaacgaccgggtaggcaaaccgcctgcatatcagtttctcggtgagggtgaaacctcgattcaacttgccggcacgctttaccccgccattaccggcggtcgtatttctctgcaggccgtcgagttgatggccgacgagggcagggcgtggccgctgattgagggaaccggcaatatcctcggaatgtatattgtcgacaaggtatcaaccacacataccgagtttttcagcgatggtgccgccagaaagattgatttcacgctttcgctgaagcgggtcgatgagtcactgacggcaatgtttggcgacctgaataaacaggccggggagcttctcggctctgctggtaatctggctgataagctgcagggtaaactcggagggctggccgtatga

SEQ ID NO: 229072 - DNA, 2442 bp, Klebsiella pneumoniae
atgagtaataacctgagaattgaggtattgctgaaagcggtggatcaggcgacccgaccgctaaaatctatccagacggcaagtaaaaccctgtcgggcgatattcgcgatacacaaaaagacctgcgcaccctgaacgcgcaggcgtcgaaaatcgacggctttcgcaaggccagtgcgcaactggccgtgaccagtcagtcacttgaaaaagccaaacgcgaagccggtgagctggccgtgcagtttaaaaacacgactaatccgacccgcgcgcaggcgcaggcgctcgaagcggcgaaacgtgccgcctctgagctgcagacgaaatacaacagccttcgaacatcggtacagcgacagcgctcagaactgatgcaggccggtatcaatacccgcaccctgtcggccgatgagcgtcggctcaaaacctccattagcgaaacgacggcgcagcttaaccgccagcgtgaggcactgacgcgcgtcagtgcgcagcaggcaaaactaaaccgggtacaggagcgatataaatctggtaaggagcttgccggtaacatggccgctgcaggtgctgccggggtaggtgttgccacggcgggaacgatggccggggttaaattgctgatgcccggttatgactttgcgcagaaaaattccgagctgcaggccgtactcggggtcgacaaacagtcgccagaaatgcaggcgctacgcaaacaggcgcgccagctcggcgacaacactgccgcctctgccgatgatgccgccagcgcgcagattattatcgcaaaaggtggtggtgatgccgcagcgattcaggcaacaacgccagtcacgctgaatatggcgcttgctaaccgtcgcacaatggaagaaaacgccgcactgttgatggggatgcgctctgcgtttcagctttccaatgacaaggttgcgcatattggtgacgtactgtctacggtcatgaataaaaccgccgccgactttgacggtcttagcgacgctttgacatatgccgcgccggtcgccaaaaacgccggtgtcagtattgaagaaaccgccgcgatggtaggtgctttacatgatgccaaaattactggctcgatggccggtaccggaagtcgggcagtattaagtcgcctgcaggctcccactggcaaggcgtgggatgcgctcaaggagttaggggttaaaacatcggacaacaaaggcaatacgcgcccggtatttaccatcctgaaagaaatgcaggccagttttaagcgcaacaatctcggaaccgcgcagcaagccgaatacatgaaaacgatattcggcgaggaagccagctcatcggctaatgtgttgatggcggcagcggcaagcggcaagctcgaccagctaaccgccgcgctgaaagcatcagacggaaaaaccgaggaactggtcaaggtgatgcaggataacctcggcggcgactttaaagaatttcagtctgcttatgaggctgtcggtaccgacctttttgaccagcaagagggctcactgcgcaaactcactcagaccgcaacaaaatacgtgttaaagctcgacggctggatccagaaaaataaagggctggcggaaaccatcggcattattgccggtggcgcgctggctcttattggtgtcatcggcggcattggtctcgttgcgtggccggtagtcatggggattaatgccatcattgccgccgctggcgtgatgggtacggccttgactgttgccggtagtgccattgtaaccgcactcggtgcaatcacctggccgattgtggccgtcggcgcggcgattgtggccggggcgctacttatccgtaaatattgggagcccatcagcgcatttttctcaggagtgatagagggcatcatgagtgcctttgcgccagttggagaaatgttcgctccactggcacctatttttgacggcctcggtgagaaactgcgcggcgtatggcaatggtttaaagacctgattgaaccggtcaaagctacgcaggagacgctcgatagctgtaaaaatgctggcgttattttcggtcaggcgctggcctcagcgctgatggcaccactaaacgttttcaataagctacgcagcggtgtcgactggcttctcgaaaagctcggcatcatcaacaaagaatcgaacagcctcgaccagaccgccgccaaaaccaacgccgccacgcaggggaattcatacataccggcgactagcacctatggcgggtatcaggcttatcagcccgttaccgcaccggcgggacgctcttacatcgaccagagcaaaagcgaatacaacattacgctaccgggcggtgtcgcgccggggcatcaactcgaccgccagctacgcgacacgcttgaacaaattgagcgcgaaaaacgtgcgcgtcagcgcgccagcatgagccacgactaa

SEQ ID NO: 229073 - DNA, 336 bp, Klebsiella pneumoniae
atggcaaaagtaccacgtaaaaaacctgaatttgttgatacggctggcaatgaaattgacaccgataacccgaatgtcgtgactcttgatgagccaatcaagcgcgccggtcagacaatccataaggtcactctgattaaaccaactgccggaaccctgcgcggtgtcagtctggcggcgctggcacaatctgaggttgacgcactgattaaagtgctgccacgcatgacctatccagccctgacgacccaggaacttaccgcaataaacgcaccagatttgatgcagctcgctggcaaggtgattggttttttgtcaccggcttcggtgggatag

SEQ ID NO: 229074 - DNA, 519 bp, Klebsiella pneumoniae
atggcactaccccgcaaactcaaatatctgaacatgttcaatgacggcctgagctacatgggcgttgttgaatccgtgacgctgccgaagctgacccgcaagctcgaaaactatcgcggcggcggtatgaatggcgcggctccgattgacctcggcctcgatgacgatgcgctcaccgtcgagtggtctgtcggtggcctgcctgatgtggcgctctttgcgcagtatgccgcgccgggtgccgatgctgtgccgctgcgttttgctggctcataccagcgtgacgacaccggcgaaatcgtggccgttgaggtggtcatgcgtggccgtcataaagaaatcgacggcggcgagaataaacagggtgaaaatacctcgaccaaactgtcgaccgtctgcacctactaccgcctcacaattgatggtagcgacgttatcgaaatcgacaccgtcaacatggtcgagaaggtgaacggcgtcgaccgtctggaacagcaccgtcgcgcaatcgggctgtaa

SEQ ID NO: 229075 - DNA, 1179 bp, Klebsiella pneumoniae
atgagtgattttcaccacggcgtgcaggtgcttgaaattaacgacggcacccgcgtcatttccaccgttgcgaccgctgtcgtcggtatggtctgcacggccagcgatgcggacagcacaacattccccctcaacgagccggtgctgattaccaatgtgcagagcgctattgcgaaagccggtaaacaaggcacgctggcaacctcactgcaggccatcgccgaccagtcaaaacccgtcaccgtcgtcgtgcgtgttgccgaaggtaccggagaggacgccgaagcgcagaccatttcaaacatcatcggcggcacggatgagaacggtaaatataccggtattaaggcgctgttaaccgccgaggcggtcaccggcgtcaagccacgcattctcggcgtgccgggtctcgatacgcaggaagtcgcaaccgcgctcgcctcggtgtgtatcagcctgcgtgcgtttggttacgtcagtgcatggggctgtaaaaccctttctgatgccatcaaataccgcgagaatttcagtcagcgcgagctgatggttatctggcctgacttccttgcgtgggataccaccacgaacgccaccgcaaccgcctacgccaccgcgcgcgcgctcggcctgcgcgcctatatcgaccagaccatcggctggcacaaaaccctgtctaacgtgggcgtgcagggcgtcaccggcatcagtgcgtctgttttctgggatttgcaggcatccggcaccgatgctgacctgctcaacgaggccggggtcacgacactggtacgcaaagatggttttcgcttctggggtaaccgcacctgctctgatgacccgcttttcctgtttgagaactacacccgcaccgcgcaggtactggccgacacgatggccgaggcgcacatgtgggcggtcgataaacccatcaccgcatcgcttatccgcgacattgttgacggcattaacgccaaattccgcgagctgaaatcgaatggctacatcgtggatggtgaatgctggttcgatgaggaatcgaacgataaagagagcctgaaaggcggcaaactgtatatcgattacgactatacgccggttcccccgctggaaagcctgaccctgcgccagcgtattaccgataaatatctggtcaatctggccgaatcggtcaacagctaa

SEQ ID NO: 229076 - DNA, 618 bp, Klebsiella pneumoniae
atgaacaaatacaacactgatttacctacggcaaaactgaataaaagcggcattgccaccgttgctggctggctcacggtgtacaacgtggagcctaagcagcgcgaatttcaggcggtgacgatggaatatttagccgcgggtgtaggcttgcctgctttcagttatgccgataagccagcattaccgggtgatggctttgcactggtgcgcagcgcggatgaaaaacaatgggaaactattgcggattatcgcggtttaacggcttacagcactgagaccgggcaaccggaaatcatcgcttttctcggcgaattgccggatacgctgacgttactggcacctgtcacggcgtatgataaatgggacggtaaccagtgggtgaccgacacggcggcgcaacatgctgatgaaattgccgtcgcagaacagcaaaagcaggatctgctttctgaggcgcagcagcaaatcaccgggtggcaaacagagctgcagctcggcatcatcagtgatgatgataaggccagcctgactctctggatgaattacattaaggacattcaggcggtaagcaccgagggtgcgccggatatcgagtggccggtcaagccggaataa

SEQ ID NO: 229077 - DNA, 1476 bp, Klebsiella pneumoniae
atgacagcaaaatattatgccattctgaccaatcagggcgcggcacggctggcgaacgcgaccgcactcggcactaagctgaacctgacgcaaatggccgtgggcgatgccaacggcaaattaccgacgccagacccggcacaaacagcgcttatcaaccagcagcgcatcgcgccgctcaatatgctgaccgttgacccggccaatgtcagccagattatcgctgaacaaattattcccgaaaatgaaggtggtttctggatccgcgagattggtctctatgatgatgatggcgtgttgattgccgtggcgaactgccccgaaacctacaagccgaaactggcggaggggagcggccgcacgcagaccattcgcatgattctgattgtctccagcacgacggccatcacgctaaaaatcgacccgtcggtcgtcctggcaacccgtcagtatgtcgatgagcaggttattgatgttaaatcatatgtcgatgatgtgcttgctcaacatgaaaagtcccgcaatcatcctgatgcgactacagccgcaaaaggttttgtgcagctcagtagtgcaacaaacagtaccagcgaggcgctggccgccacaccaaaagccgttaaagcagcaaacgataatgctaataaccgactgtcaaaaaccggcaatctgagtgagattaaaagtgccggcaccgccgcgcagctctcagcgcagcaaaatatcggtttgtcatcctatggtattgctcctgctttagcggctgaaaccggaaaggatctgaatagtcttctcactcagggcgtatttgtgctgacaaatccactcaatgccccggagcctgctaataacgccggtacggtatttgttgaggtgatgacgtggcagtcaggtagcggggatgacgggtacagggtgattcaacgactttatggatatggttcgtcgagtagcatcgctaacagggtatgggtcagaacaaagacgccggactggggtggctggtatgagttgtattctcaggcaaataagccgaccgccgcagacgttggcgctattgtgcgggaagacgcccctgtcggtattccgcagccgtggccgctggcgactgccccgctgggctggcttaactgtaatggtgccaccttcgacaaggcgatgtatccctatctggcagcggcatatccctcgggcaaattaccagacctgcgcggtgaatttattcgcgggtgggacaacggacgcggcgtggatcctggcaggtctttactggcatggcaggacgacatgataaaaaaacatagccacacgctcggtacatataaatccgttgacgccggaatcaagatgccagtgactgccggtgctgagctttctaattccggcgtgggcggcgctatgtataccggtgaagctggtagctcagaaacccgcccacgcaacattgcatttaactacattgtgagagcagcataa

SEQ ID NO: 229078 - DNA, 609 bp, Klebsiella pneumoniae
atgagtgaccggttgttacccgtcggctcgtcgccgctggaagttgccgccgctgccgcgctcgctgagattcagcgcgtgccggtaccgttgcgcacgttatggaactggcgcacctgcccggtcaatctgctgccttatctggcgtgggcgctgtcggttgaccggtgggatgagacgtggccggaggcgacaaagcgcagtgtttgtgcctcctcgttttttgtccatcagcacaaaggcaccatcagcgcattgcgccgggtggttgagccgctcggctatctgattgaggtgcgcgagtggtggaagctcaacgaggagccaggcactttccgcctcgttgttggtgtgctcgatagcggtatcactgaggaaatgtatcaggagcttgagcgcctgattgaagacgccaaaccggcaagccgtcacctgaccgggctggctattagtctgagctcaaccggcgagctgtatgtcggcgcggcctgttatcacggtgatgcgctgacggtttacccctatatgcctgaagaaattattgtcggtggcggtatttatccggcctcggctatccatttgattgataacctgagagtgaacgcatga

SEQ ID NO: 229079 - DNA, 909 bp, Klebsiella pneumoniae
atggcaactgttgacctgagtcagttacctgtccccgatgtggttgaggtgctggattatgaaaccatccttgcggaacgcattgcgacgctgatttcactttatcccgaagaccagcaggaggccatcgcccggacgctgacgcttgagtcagagccgattgttaagctgctgcaggaaaacgcctaccgtgaggttatctggcgtcagcgggtgaacgaagccgcgcaggcggtgacgctggcgtattcaaccggtaacgacctcgacgtcgtggccggaaacaataataccgagcgcctcaccatcacaccggcagatgacaccaccatcccgccgacgcctgccgttatggaatccgacaccgacctgcgcctgcgcacgcaacaggcatttgagggattgagcgtggcgggtccggtcggcgcctatgaatatcacggccgcagcgccgacgggcgggtcgctgacgtctcggtcgaaagcccgtcgccagcctgcgtgacgattaccgtgttatcccgcgagggcgacggtaccgccagcgctgacctgctggcgattgttgataaagcgctgaacgctgaggatgttcgcccggtggccgacagggtgaccgtccagtcagcggagattgtgccgtaccagattgacgcgacgctctacgtttaccccggtcccgaatctgagcccatcaggcaggcatcagagcagaagctgcagagttacatcagcgcgcagcaccgtctcgggcgcgatatccggctgtcagccatttatgccgcgctgcatgtcgaaggggtgcagcgtgtcgaactggcatcaccgcaggccgatatcgtgctgagtaagtcgcaggcgtcgaactgtaccgagcaccggataactatcgggggctcagatgagtga

SEQ ID NO: 229080 - DNA, 348 bp, Klebsiella pneumoniae
atgacggcgcgctatcagggtatgaaccgcaataccggccttgctatcagtgacactgagcacatcagccagagcatgcgcgacattctgctgacgccggtcggctcgcgggtgatgcgccgtgaatatggctcgctcctgtcggagctgattgatatgccgcaaacccccgcgctcaggctgcaaatcatggtggcatgctattcggcgatccagaagtgggagccacgcatacgcctgaccgccatcagctttgagaccggcgaggctggcgaaatgtatgtcgatattaccggggcgcgaaccgataccggtgcgtcagtttctaccaccctttcactgagttaa

SEQ ID NO: 229081 - DNA, 642 bp, Klebsiella pneumoniae
atgaatacattaaacaacatccaagagttggcaagagccattcgcaacctcattcgctcaggtgtggtgactgaggtcgacacctcgcaggggctttgccgggtgcagagtggcgggatccagactacatggctcaactggctgactacccgcgccggtcgttcgcgtacgtggtgggcgccctcgatgggtgagcaggtgctgctgctggccattggcggcgagctcgataccgctttcgtgctgccgggtattttctcagatgataaccccgccccgtctgcctcggcggatgcgtggcatgtggctttccctgatggcgcggtcattgagtacgagcccgagacaagtgcgctgacggtcagcggcatcaaaacggccaacgtgacggcatcgggagccatcacggtcaccgtgccggtcgtgctggtgaaagcggagacacgcatcaccctcgatacccccgaggtcgtgtgtaccaacaagctgaccaccggcacgcttgaggtgcagaaaggcggcaccatgcgcggcaacattgagcacaccgacgggacatttaaatcaaatggcgtgcaggtggatgaccacggtcacggcagcgtgcaaaaaggcggtagctggacggagggcaccaaatga

SEQ ID NO: 229082 - DNA, 873 bp, Klebsiella pneumoniae
atgaaaggaatgtcatcattcaagcgcacaataagcaaaatgaaatatatcatcgtcgttttttctttatattcaggattaataattggcctttctctatacacaggaaattataactcaacgtttaccgagaactttcttgtcaacgcaaactcttcaattttagacttcctcattctcggtgttatcctttattactttgaaaataaaagacaaaacaatgatgcaatccatgatcttattgaagaccttgaaaatctagcaaaacattcatctgcagagttgaatatcatgaagattaaaattatacgccaactcaatgccaaaggcatttataacatacaaatacctcgaattgagcttgataaaatgtctacaataaaatacttacacttcaaagatgcagacttgactggtctgaatgtcagtgaatcatacattagagattgctcgttcgaaaattgcacaattcaagcaatgaacattacaaataacagagttaaaagtgtcagatttattaactgtaaacttaaaaatatcaaagcatttaatgctaaatttcaaaacgtcatattcgaaaactgcaaccttgaaggcggttattttactgactgcgatatgaaaagctgcatcttaaaagggtgcgattttaaatccgtcacttatgaaggggctattatgcggaatgcaaatatactaaacgcaacaaacgttaacgtccaagaacttataaaggcaaaaaatttagattatttggtttgcgaagaagaaattaaaagcaaaatcagagaaaaaaattcaacaataaaactgtcaaaaggagggatacgaggtcagggaatcgaacccaactcagtgggtaagcccacctag

SEQ ID NO: 229083 - DNA, 456 bp, Klebsiella pneumoniae
atgagtgagttaaccgcgctgcaggaacgtcttgccggtctgattgccagcctgtcaccggcggcgcgtcggcaaatggcggctgacattgcgaaaaagctgcgcgccagtcagcaacaacgcattaagcgacagcaggcacccgacggcaccccgtattccgcgcgaaaacgtcagccggtgcggagcaagaaaggtcgtattaagcgcgaaatgttcgccaaactgcgcactaaccgctttatgaaagccaaaggcggcgacagtgcggcggtggtggaatttaccgacaaagtgcagcgcatggcgcgggtgcatcactacggcctcaaagaccggccaaaccctcacagccgcgacgtgcagtacgaggcgcggcagttgcttggcttcaattcctctgatctacaggaaatagaaataataattattgatattttgggccggaaccattga

SEQ ID NO: 229084 - DNA, 468 bp, Klebsiella pneumoniae
atgcagaagcacaaaagcctgcgcaaagcgctgattaatgccgtgccgcagctccgaaataaccccgatatgctgcgccttttcgccgataacgggcataccgattcccggctggcgagctcgctgtcgtttgaaaaggtgtacgtgcttaacgtagtggtgaccgacttcaccggcgacctcgatttgattttcgtcccggtgcaggcatggctgcgcgaatatcagccagacatcatgaccaccgacgaggggcgggaaaagggattcacctggattattgatatcaataacgacgattcgctcgatatcagtatcagcctgaggctcaccgagcgcacgctcgtcaaagaggtcgacggcgcgctgcatgtcagttatgcccctgagccgccgctgccagagccggtgacgcgcccggtcgagctgtacgttaacggcgaactggtgagtaagtgggatgagtga

SEQ ID NO: 229085 - DNA, 429 bp, Klebsiella pneumoniae
gtgtccagagtcattgtgatgtttctggcctcagcactggtgctggctgtgctcgggctgctgtggttgcgccatgagaacggcaatttatccctctcctttgagacggcaaaccgcgtcgcgagcgagcaaaagacgacgattggcatgctgaaaaatcagctcagtgttgccggtcagctcgccagacgtaatgaatccgcgcaggtagcactgcgcgaacagctcgcagaggccagtgcagaagccagtcgccgagagcagacgattacgaggttactcaatgaaaatgaagcctttcgccgctggtataacgctgctctgcctgatgctgtgcgtcggctgcacacccgcgccgcctgcgccagcgccggtgattgtggtcaacggatgcccgagggtgaacctttgcccgatgccgggaagtga

SEQ ID NO: 229086 - DNA, 432 bp, Klebsiella pneumoniae
atgaaaaaatatatacgttccctgatatacgatgccttgctggcactggttctgctttgggggctggtatcgccacaaagcgtcgcagttaactttgttgctgcgtgggcgctgtttggcagttttgtctgcattacggcgagcctcgccggtgtggtcgcctatgagcactggctgcgaaacaccggcaaaagtattcccgtcaatccagacctgatgaaggtgtttcgcgtcgtcttttgtcgcaaaccttcgcaggcgcgtcacgcatggtctctcattattttctctgctaccacgggcagtttacttggggctggctggatctttacagcgctggtctacctgctttgtgttctgacctttaaggccgttcgcgagacttaccgccagcgcatagagggggctggcctgtgtccagagtcattgtga

SEQ ID NO: 229087 - DNA, 513 bp, Klebsiella pneumoniae
gtgagctcaatcgttaaacgttgcagtgtggccgcagtgctggcactggcggcattgttgcctgactttcgtctgctgcatacctcgcctgatggtctggcattgattgccgaccttgaagggtgccgcctggcaccttaccagtgcagcgcgggcgtgtggacgtcaggcatcggccacactgccggggtggtaccaaaacgcgatatcaccgagcgcgaagcggcggcaaatctggtcgccgacgtgctgaataccgagcgccgtctcgcggcctgcgtgccggtcaccatgccgcagcctgtttacgacgcgctggtcagtttctcttttaacgtcggcaccggcgcggcctgtcgctcgacgctggtctcttacatcaagcgtcatcagtggtggcaggcatgcgaccagcttacccgctgggtatatgtcaatggcactaaaaacaaagggctggaaaaccgccgcgcgcgggaactggcgtattgcatgaaaggagtaacccaatga

SEQ ID NO: 229088 - DNA, 222 bp, Klebsiella pneumoniae
atgggactgagtatggaaaaaatcactacgtttatcgcttactggctggccgtggcgctggcgtatttcggggcaatgtcgccagaaaaactggcgctgtatgtgggtagtctgtgcgccatttttacggcagcggtgaatttctggtaccggcgcaaaacctttcgctatctgaccgaaatgggaatcgacaaaggggtgacccgtgagctcaatcgttaa

SEQ ID NO: 229089 - DNA, 204 bp, Klebsiella pneumoniae
atgaaagcctatgcgatgcagggagatacccttgatgcgctttgtgcccggtattacgggcgcactgagggcgttgtcgagacggtgctgcaggctaatccgggtctgtctgagctgggtgtcattctgccgcatggcacggcgattgacctgcccgacgttgagacatcgcccacagcggagaccctgaacctatgggactga

SEQ ID NO: 229090 - DNA, 510 bp, Klebsiella pneumoniae
atgacgacagtgatactgaatcagcccgatgaactgcaggacattccgggcgtggtgattcccgcccccgagacgggcgacgcagtgattaaaaacacgttcttttttcctgatgtggatccgaagcgggtgcgcgagctgatgcgccttgagcagacggtgtccgatgcgcgcctgcgtaacgctatcaagaccggcatggcggaaaccaatgcggagctttacgactaccgcctgcgccagcttgccgcagggtttaagcaactggccgacgtgcctgacgccgaggaaatcgacggcgagaatgtgcgcgttttccactacctgagcgccgtaacggcgatgacaaccgccaccctctatgagcgttatcgcggcgttgaggctaccggcaagggtgacaaaaaagccgacagcgtcgaaaccaccattgatgacctgtggcgggatatgcgctggtcggttgcgcgcctgcaggataagccacgctgcatcgtggggcagctctga

SEQ ID NO: 229091 - DNA, 750 bp, Klebsiella pneumoniae
atgacgagccccgcacagcgtcacatgatgcgggtctcggcctcagaagccgcgcagcgggaaaaagccccgctgcgccatgcaaccgcctacgagcagatgctggtaaagctggccgaagaccgccgcacgttaaaaaacatccgttcaaatgagcgcaaagccgagaaaaagcgcgagctgttgccgttctatgcgccgtgggtcgccggtgtgctggctgatggccgtggtgcacaggatgacattgtaatgaccgtcatgctgtggcgtctcgatgccggtgatatcgctggcgcgctggaaatagccccttatgcgctgaaatacggcctcacctctgaccatcgccgcacgacgccttacatgctggttgaagaggtggcacttgccgcacagcgcctgcgcgatgccggtgagcctgtcgacctcgcattactgctgaccaccatcgacctgaccgacggtgccgacgttcccgatatggtgcgcgcccgtctgcataaagtgaccggcctgaccctgcgcgatgccggtcagagcgcggaggcgctggcacagtttcagcgcgctatgcagctcgaccgcaacggcggtgtacgcaaagcgattgagcaactggaacgcgcattaaagccaaaaccagaaacggcaccccgtaaaacgactaaaccgcgcacgcgcaaacctgccaccaaaccggcggcaaagcgcgggcgcccaccaaaggcggttaaaaccgccggttaa

SEQ ID NO: 229092 - DNA, 1068 bp, Klebsiella pneumoniae
atgcgtcaggaaacccgttttaaattcaatgcctatctgagccagctagccaaactgaacggcatcagcgttgatgacatcagtaaaaaattcaccgtcgagccgtccgttacgcaaaccctgatgaacaccgtgcaggcgtcatccgcgtttctgcagatgattaacattctgccggtcgcagaaatgaagggcgagaaaatcggcgtcggtgtgaccggcactatcgccagcacgaccgacacctcgggcgacaaagaacgccagaccgcagatttcaccgcgcttgagtccaacaagtacgagtgcaatcagattaacttcgacttccacctgacctataagcgcctcgacctgtgggcgcgttttcaggatttccagcgccgcattcgcgacgccattgtccagcgtcaggcactggatttcatcatggccggttttaatggcatcacccgcgctgatacttcagaccgcattaaaaacccgatgctgcaggatgtggctgtcggctggctgcagaagtaccgcaatgaagccccggcgcgcgtgatgagcaaaatcaccgatgctgagggtaaggtcgtatctgatgtgattcgtgtcggtaaaaacggcgactatgaaaacctcgatgcgctggtgatggatggtaccaacaccctgattgacgagatttatcaggatgacccgaaactcgtcgctatcgttggtcgtaagctgctggccgacaaatatttcccgctggttaacaaacagcaggaaaacagcgaatcgctcgcggccgatatcatcatcagccagaagcgcatcggcaacctgccagccgtgcgcgtgccttacttcccggcgaatgcggtattcgtgaccacgctggaaaacctctctatctatttcatggatgagagccaccgccgcagcattgatgagaacccgaaaaaagaccgcgtggaaaactacgaatcgatgaacatcgattatgtgattgaagcgtatgccgccgggtgcctgctggaaaatatcaccctgggcgatttcaccgcgcctgcagcaccggaaagcggagagtaa

SEQ ID NO: 229093 - DNA, 855 bp, Klebsiella pneumoniae
atggcaaaaaaagtctcaaaattctttcgcatcggcgtcgaaggtgacacctgcgacgggcgcattatcggcgctaacgatattcaggaaatggccgaaacctttgacccgcgtgtctatggttgccgcattaacctcgaacacattcgcggtctcttccctgatggcgactttaaacgcttaggcgatgttgttgaactgaaagccgagaagattgacgacgattccgcgcttaacggcaaatgggcgttgttcgccagaatcaccccgaccgatgaccttatcgcaatgaataaaaaattgcagaaggtctatacctcaatggaaattcagccgaattttgccaacaccggcaaatgctatcttgtcggccttgcggtcaccgatgacccggcaagtctcggcactgaatatctcgaattctgccgcaccgcgaagcacaacccgctgcagcgctttaaggccaatcctgaaaacgtcttctctgtcgccacactggcggagctggaatttgaagacgttcccggcacggtactcaacagcctggtcgataaggtgagcgccattttcagccgcaaacaggtcagcgacgatgcgcgcctgaatgatgtgcatgaagcggtgactaccgtcagcgagcatgtgcagaccaatctgaccgcacaggataagcgtatttccgatatggaaaccgcattttccaccctgaaacaggaactgaccggcaaggttgaagaaaccagccaggcattttccgccctgaaaaccaccctcgataaaaccgaaagtttcagccagccgcgacgcgcaaaagcaagcggcggcggtggcgatgagctgctgaccgactgctga

SEQ ID NO: 229094 - DNA, 1770 bp, Klebsiella pneumoniae
atgaccatttccaccgatacaaccttgttgcatgacccgcgacgacaggcatcgctgctttactggcagggcttttccgtgccacagattgccgaaatgctgcagatcaaacgcccaaccgtgcagagctggaagcagcgcgacggctgggacggtattgcaccgatttcccgcgtcgaaagcagccttgaggcgcgcctgattcagctcatcgttaagccacaaaagtcaggcggcgacttcaaagagattgacctgctcgggcggcagattgagcgactggcgcgcgttaaccgctacagccagaccggcaacgaggtcgaccttaaccccaacgttgccaaccgcaacaaaggcgagcgtaagaaaccgaaaaagaactttttcagcgacgaggctatcgcaaagctggaagaaatattcttcgaccagtctttcgagtatcagttgcagtggtaccgcgcagggctggcgcaccgtattcgcgatattctcaaatcccgccagattggcgcgacgttctatttctctcgcgaggcgctgctgcgcgcgctcaaaaccggccataaccagattttcctgtcggccagtaaaacgcaggcttacgtgttccgcgagtacatcatccagtttgcgcgactggtcgacgtcgacctgaccggcgacccgattgtcatcggcaacaacggcgcaaaactgatatttctcggtaccaattccaacacggcgcagagccataacggcgatctgtatgtcgacgaaattttctggatcccgaactttcagcggctgcgcaaagtcgcctcgggcatggcctcgcaaaaacacctgcgctcaacctatttttcgacgccctccacgctggcgcatggcgcttaccccttctggtctggcgaactgttcaacaaggggcgcagcagtatcgccgagcgtatcgatatcgatatcagccataccgcgctcgccggtggtcagctctgcgacgatggacagtggcggcagattgtcaccattgaggacgcgcttgccggtggctgcaccctgtttgaccttgaccagctcaaacgcgaaaacagcgcagaagactttaaaaacctgtttatgtgcgaatttgtcgacgacaaagcgtcggtgttcccgttcgaggagctgcagcgctgcatggtcgacgtgatggaatcatgggaagactttgccccgttcgccgattatccattcggatcccgcccggtctggattggctacgacccgtcacacactggcgacagcgccgggtgcgtcgtactcgcgccgccggtggtctcgggtggcaagttccgcatgctggagcgccatcagtggaaaggcatggactttgccgcacaggcagaggggatccgcaagctgaccgagaaatataacgttgaatacatcggcattgacgcgaccggcctcggcctcggcgtttatcagttggtgcgctcattcttcccggcagcgcgcggtatccgttacacacctgaaatgaaaaccgcaatggtgctcaaggcaaaagacaccattcgccgcggctgtctggaatacgacgccggggcaaccgacgtcacgcagtcgtttatgtccatccgcaaaaccatgaccagcagcgggcgcagcgccacctatgaggccagccgcaccgaggaagccagtcacgccgatattgcatgggcgaccatgcacgccctgttaaacgaaccgctttctgccggtagcggcatgcagccaaaatctattctggagttcaattaa

SEQ ID NO: 229095 - DNA, 1047 bp, Klebsiella pneumoniae
atgggtaagcaaaaatcccgtaaagccgctgcgcagaaggccagcaagtcacagcaactgaccgccagcgcaccgccaaaaacaacagcgttcaccttcggtgagccggtgccggtactcgataagcgcgatattctggattacgtcgagtgcatcagtaacggcaaatggtacgagccgccggtcagtttctccgggctggcaaagagcctgcgctctgccgtacatcacagctcaccgatttatgttaagcgcaatgtgctttccagcacctatatcccgcacccgttgctgtctcgtcaggatttcagccgctttgcgctcgactatctcgttttcggcaatgcctttcttgagcagcgccacagcgtcaccggccagttaatcaaactgcttgcctcaccggccaaatacacccgacgcggggtcgacgactcgattttctggtttgtggaaaatttcacccagcctcacgaattcgcccctgatacggtttttcacctgctggagcccgatattaatcaggagatttacggcctgccggaatatctcagcgcgcttaattccgcgtggctgaatgaatccgcgaccctatttcgccgcaagtattaccagaacggcgcgcacgcgggttacatcatgtatgtgaccgacccggcgcagagcgcgaccgacgtcgaatcgctgcgcgaggcgatgcgtaactcgaaggggctcggcaactttaaaaacctgtttttctacgctcccggcgggaaaccggacggcatcaaaatcgtgccactgagcgaagtcgccacaaaggatgatttttttaacatcaagaaagccagcgccgccgacctgatggatgcgcaccgcgtaccgttccagcttatgggcggcaagcccgagaatatcggttcactcggtgacgttgagaaggtggcaaaggtctttgtgcgtaacgagctgtcgccactacaggacagattcagggaggtaaacgactggcttggcatggaagtcatcaggtttaaaaattacagcctcgataatccggaataa

SEQ ID NO: 229096 - DNA, 1080 bp, Klebsiella pneumoniae
atgtcgcagcctagaaacatagaatttattgagacgcaatttctttcgtttgacccgaagaaccctagattttaccgcttgaacgacgcaagcagtgatgatgcagtcattgaagaaatgcttgatgatgagagcgtccatgatctgatgctttcaattggtcagcaaggatactttcctggcgaaccgctgttagtgttcatggatggatctgattatgttgttgcggaaggaaaccgcaggctcgctgctgtcaagttgttgaatggtgagctaagcgcaccaacgcgtaaaagcaaaagtgtggaggatatcaaaagcgatactacccacaagccaattgaactcccctgccttgtgtatcagacgagggaagaagttttacgatacatcggttacagacacattaccggtgtaaaggaatgggactcactgtcgaaagctaagtatcttaaggaactttgtgaggagttctacaaatctgtctctaaagatgagcttcttaaaaatcttgcaagagagattggcagcaaaccacattatgtaggagcattgctaacagccttaatgctttacgagaaagctcaagaaaaagatttttatgggctaaaaatggatgagaatgatgtggaattttcatacatcactacatcccttagttatacaagcattactgaatggcttgggcttgaagataagaaagatttcgatagtgacgatatcgatgaagaaaatttaaaaaacctttttgcgtggtgctttgtccgtgatttgcagggacgaacaattatcagagagtctcgaagattaaaagatatagctaaaattgttgataacgacgatgcgattaataatctgaaagaaactggagatattgaccaagcatatttatatacgaacgggcagcaagaggctttagaagagtcaatgcaggcagcagctgcaagattgcgtgttgtttggaacatgctgcttaaacttgattcgtttagcgccgatgatgaagaatccgccaatcagatgtttgaaatggctaaaaaaatccgctcccatatcagaagcgtgcgagaggatgactaa

SEQ ID NO: 229097 - DNA, 927 bp, Klebsiella pneumoniae
atgctgttcaatttggaatcattaccctcaaacgatgtatttttttgggcagattttatagaaattcgagcgctggttcatccagataaaagatttaaccgtggtgaattagatagcgttatgcgcagccaaccagagggatacacaagagaacaatctcaggaaaaatggcgcttagcgattgattttataattcagagacgagtaattttcggtgacagctatccttttcacgtaagcgatgacatggatgaggtcattcttaatgagaccgaactggatcttttgactgcactgcaacatatgtatctatccttattgctttgcgcaaatattaaatacattcctaagcgtagaagggctgaaatcacgcgctcttttgaagtaattagcttgcccatttttagttcactaatgccccgaggcgttcaggttgtccccaattgggcggggggtggcgaagaggctagatatcgcgggtcattatttgaaaaataccaagcaatcgcaaatgatattagatgcacggctgtgggtctgagagaacgggattttaaagttggtgaccatggtgatggtgggttagatattatagcttggcatcctatgggcgatgatcgtgatgcgatacctatagcatttgtacagtgtggatgttcccaaaaagaatgggttgctaaacaattggaagcttcgtacgccaaacttggatctcgtatccctgtaacacacccttgggctacttattatttcctcccacaagatttaagatggatggacggtgactgggcttacaaagcagacataggaaatgcgatttttgttgaccgcttgcgcttaatcaacttagccagagagaatgagttgattgaaaactttcctctccagccttacgtcgctgaaacctttagtatgtcttatcgctaa

SEQ ID NO: 229098 - DNA, 936 bp, Klebsiella pneumoniae
atgccaactgtagtgtcgcttttttctgggtgtggtggttctgatgctggagtgttgagggcagggtttgatgtgctcatggcaaatgacattctaccttacgcgcgtgatgtatatttggctaaccatcccgaaaccgattacgtccttggggatgtttctgctattgaatcgtttccttcagccgatatgctcgtcggttgctacccctgtcagggttttagccaaggtggggttcgaaaggctgacagaaaaatcaacacactttacttggagtttgcaagggcacttagaatagttaagcctaaagcattcattgtagaaaatgtttccggtatggtgcgaaagaactttgagcatttactgaaagatcagttcaaggttttcgaagaggctggctacagagttaaatctcagattctaaatgcttctcacttcggtgttgcacaagaccgtaaacgcatttttatcgttggcatacatgagacatttggtgtggatttttcttttcctacagcaactcatggcgaaggtttgaagaaggtgaatactatccgtgatgcgataggtgatttacctgagtggccggttggtgagttctatgacgctgattttcattggtattatttatctagaaatcgacgtcaggattgggatcaaatatctaagaccatagttgctaacccaaggcatatgccattacatccgattagccctactcttgaaaaattagggccagataaatggcaatttacatctaatgaccgtgcgcgacgctttagttttcgtgaggcagcttatcttcaagggtttggtaatttagttttccctgaaactgagcgggcatctatgaacatgaagtataccgtggtaggtaatgcagtaccgcctccactttttgaggcggtagcaagaggtattccagatatctggtaa

SEQ ID NO: 229099 - DNA, 195 bp, Klebsiella pneumoniae
gtggatagagagttaaacgagcacgttatgattgagcgggtcgaaatgattgcgcgtctaaccactgagggggcttgtaaggaaagggatcgtgaaattgcgctcggactgatagctgaacttgccaaaggtaatctgatgaaaaatagctctttttcaatagttttttccgtaaaacctattgaaaatcaatga

SEQ ID NO: 229100 - DNA, 1071 bp, Klebsiella pneumoniae
atgaaaaagacagctatcgcgattgcagtggcactggctggcttcgctaccgtagcgcaggccgctccgaaagataacacctggtatgcaggtggtaaactgggttggtcccagtatcacgacaccggtttctacggtaacggtttccagaacaacaacggtccgacccgtaacgatcagcttggtgctggtgcgttcggtggttaccaggttaacccgtacctcggtttcgaaatgggttatgactggctgggccgtatggcatataaaggcagcgttgacaacggtgctttcaaagctcagggcgttcagctgaccgctaaactgggttacccgatcactgacgatctggacatctacacccgtctgggcggcatggtttggcgcgctgactccaaaggcaactacgcttctaccggcgtttcccgtagcgaacacgacactggcgtttccccagtatttgctggcggcgtagagtgggctgttactcgtgacatcgctacccgtctggaataccagtgggttaacaacatcggcgacgcgggcactgtgggtacccgtcctgataacggcatgctgagcctgggcgtttcctaccgcttcggtcaggaagatgctgcaccggttgttgctccggctccggctccggctccggaagtggctaccaagcacttcaccctgaagtctgacgttctgttcaacttcaacaaagctaccctgaaaccggaaggtcagcaggctctggatcagctgtacactcagctgagcaacatggatccgaaagacggttccgctgttgttctgggctacaccgaccgcatcggttccgaagcttacaaccagcagctgtctgagaaacgtgctcagtccgttgttgactacctggttgctaaaggcatcccggctggcaaaatctccgctcgcggcatgggtgaatccaacccggttactggcaacacctgtgacaacgtgaaagctcgcgctgccctgatcgattgcctggctccggatcgtcgtgtagagatcgaagttaaaggctacaaagaagttgtaactcagccggcggcttaa

SEQ ID NO: 229101 - DNA, 279 bp, Klebsiella pneumoniae
ttgaccattacgaaactgacccgaaccgaccttgcgcctgatctggaagcttaccaggcgctgtttgctcaagctgaactttcccatccggccccctccctctcgggcgatctgcagccgcgtttgttctatgggcttgagcagctgctgtacacgccggcagtctcctccgtcatgctggtgaaagcccctgaagagccggaatatctgcaatggctggcggctgaaacccggactctgcacgagccgcaccgctttacggcgtccgctatgaggtaa

SEQ ID NO: 229102 - DNA, 1638 bp, Klebsiella pneumoniae
atggaaaataagagcggagaagcgaaagtgcagaaggtgaagaactggtcaccggtgtggatcttccctatcgtcactgcgctgatcggggcatggatcctgttttatcattacagccatcaggggcctgaggtcacgctgatcaccaccaatgcggaagggattgaagggggaaaaacccggatcaagagccgcagcgtagacgttggggtggtggagagcgcgacgctgaccgacgatctcacccacgtggaaatcaaagcccgcctcaattccgggatgcagaagctgctgcacaacgattccgtcttctgggtggtaaagccgcaggttgggcgcgaggggatcagcggtcttgggacattgttgtccggggcctatattgaactgcagccgggaacgaaaggttcggtgccagcgcagtatccgctactggattctccgccgctggcctcgccggatgccaaggggatccgtattctgctggaaagcagcaaggcgggccagctgtcgccgggcgatccggtgttgttccgcggctatcgcgtggggtcagtggaaaccagcaccttcgacacgcagaaacgtcgtataacttaccagctgttcatcaatgcgccgaacgatcgcctggtgaccaccaacgttcgtttctggaaagacagcgggatcgctgtagatttgacctcggcggggatgcgcgtcgagatgggctcgctgtcgacgctgtttggcggcggggtgagcttcgatattcctgaaggactggacctcggcgagccggtggcgaataaaacggaataccatctgtttgacgatcagaagagcatccaggattcagtctttaccgagcatatcgattacgtcatgttcttcaaagactcggttcgcggcctgcagccgggcgcgccagtggagttccgcggtatccgtctgggcaccgtcggcaaagtgccgttctttattccggggctgaagcagcgtttgaacgatgactatcgtattccagtggaagtgcgggttgaaccgcaacggctgattaatcagcttggcggcgatccgaatattcgcgcccacattgacgatctgatcaaccgcggactgcgcggctcgctgaaaaccggtaacctggtgaccggcgcgctgtatatcgatctcgacttctatccgaaggcgcccccgcgcgggaaaatacaggagtttaacggctatccgattatcccgaccatcagcggtggactggcacagatccagcagcgtctgatggatgcgctggataagattaataacctgccgattaatccgctgctggagcaggcgaccagcaccctggcgcagagcgagaagacgatgcagcacgtgcagaccacgctggataatctgaataagatcacctccagccagtcaatgcagcagctgcccgccgatatgcagacgacgctgcgtgaactgaaccgtagcatgcagggcttccagccgggctctgcggcctacaataagatggtggccgatatgcagcgtctggatcaggtgctgcgtgagctgcagccggttctgaaaacgctaaatgataagagcaatgcgctggtgtttgaggcgaaggataaaaaagatccacagccgaagggagcgaaataa

SEQ ID NO: 229103 - DNA, 252 bp, Klebsiella pneumoniae; identical to SEQ ID NO: 137321

SEQ ID NO: 229104 - DNA, 2073 bp, Klebsiella pneumoniae
atgtcgtatacaccgatgagcgatctcggccagcaggggctgttcgatatcacccggcttttattacagcagcccgatctggccgcgctaagcgaaaccctgacccgtctggtgcaacagtccgcgctggccgatgaggcggccatcatcctgtggaacgcgggtaatcaccgcgcggccaggtacgcctgcgatgaggccggccatccggtaagctacgaggatgaaaccgtcctggcccacggtccggtgcgtcgcttactctcccggccggatgccctgcattgcgatcatgaaagctttgccgatacctggccgcagcttatccgcagcggactgtatcgtccgttcggttactactcgctgctgccgctggcggcggacgggcggatctttggcggttgcgaattcctccgccgtgacaaccggccgtggagcgagaaagagttccagcggctgcataccttcgcgcagatcgtcgccgtcgtcaccgaacagattcagaaccgggtcagcaataacgtcgattacgatctgctgtgccacgagcgcgacaattttcgcatcctggtggcgatcactaacgcggtgctctcgcgactggatatcgacgagctggtcagcgaggtggcgaaagagatccatcgctacttccggatcgacgccatcagcgtggtgctgcgcagcgaccgcaaggggaagctcaacatctattccacgcattatcttgacgccagccacccggttcacgaccagagcgaggtggatgaagccggcaccctcaccgagcgcgtgttcaaaagcaaagagatgctgctgcttaatctgcacgaacatgacactctcgcgccgtatgagaaaatgctcttcgagatgtggggcaataagatccagaccctgtgcctgctgccgctgatgtccggcaataccctgctcggggtgcttaagctggcgcagtgcgacgaacaggtcttcaccaccaccaatctcaagctgctgcggcagatcgccgagcgggtgtcgatcgctatcgataacgccctcgcctaccgcgaaattcagcgcctgaaagagcggctggtggatgagaacctcgccctcaccgagcagcttaataatgtcgagagcgaattcggggagattatcggccgcagcgaggcgatgaacaatgtgctcaagcaggtagagatggtggcgcacagcgacagcaccgtgctgatcctcggcgaaaccggcaccggcaaagagcttatcgcccgcgctatccacaacctcagcggacgcaacggtcggcggatggtgaagatgaactgcgcggcgatgcccgccgggctgctggagagcgatctgttcggccacgaacgcggcgcgttcaccggggccagcgcccagcgtatcggccgcttcgaactggcggacaaaagctccctgttcctcgatgaagtgggcgatatgccgctggaactgcagcccaaactgctgcgcgtcctccaggagcaggagttcgaacgtctggggagcaataagctgattcagaccgacgttcgattgatcgccgccaccaaccgcgatctcaagcagatggttatcgacagggaattccgcagcgatctctactaccggctcaacgtgttcccgatccacctgccgccgctgcgcgaacgtcccgacgatatcccgctgctggtgaaggcgtttacctttaaaatcgcccgccgcatggggcgcaatatcgacagcattccggcggaaaccctgcgcactctgacgcgtatggagtggccgggcaacgtgcgcgagctggaaaacgttatcgaacgggcggtattgctcacccgcggcaacgtactgcagctctccctgccggagcgggatatcgtggaagccccgcggacgccggcggtcctgcctgaggaaggtgaggatgaatatcagctgatcgtccgggtgctgaaggagagcaacggcgtggtggccgggccgaaaggcgccgcccagcggctggggctcaagcgcaccacgctcctgtcacgcatgaagcggctgggtattaataaagacgaactggtgtaa

SEQ ID NO: 229105 - DNA, 651 bp, Klebsiella pneumoniae
atgtcattacctatgttacaggtcgccctggacaaccaaacgctggccagcgcttatgaaacaactcgtctgatcgccgaagaggtagatatcattgaagtcggcactatcctctgcgtcggtgaaggtgtacgcgcggtgcgcgatctgaaagcgctgtatccgcataaaatcgtgctggcggacgccaaaattgccgatgccggcaagatcctgtcgcggatgtgcttcgaagccaacgccgactgggtcacggtgatctgctgcgccgatatcaacaccgccaaaggggcgctggatgtcgccaaagagttcaacggcgatgtgcaaattgagctgaccggcttctggacctgggagcaggcgcaggcgtggcgcgaggcgggtattcagcaggtggtctatcaccgcagccgcgacgcgcaggcggcaggcgtggcgtggagtgaggcggatatcagcgcgattaagcgtctgtctgatatgggcttcaaagtgaccgtcaccggcgggctggcgctggaagacctgccgctgtttgccgggatccctgttcacgtctttattgccggacgcagcatccgcgatgccgcctcgccggtggaagcggcgcgccagtttaaacgctctatcgcccagctgtggggttaa

SEQ ID NO: 229106 - DNA, 927 bp, Klebsiella pneumoniae; identical to SEQ ID NO: 134552

SEQ ID NO: 229107 - DNA, 975 bp, Klebsiella pneumoniae
atgcgcgacatattccccgtggtggtcgatggcctgtggcgtcagggcgcgaaaaatctggccgttcgtctggtgagcgccgaggggcaaccgctgccggcgtggacacccggcgcccatatcgatctccatcttccctgcgggctgatccgccagtactccctgaccggtagcccggccgaacgggatcactatctgctctgcatcacccgcgaggcgcagtcccgcggtggctcaggctatgtccacgacaccctgcgcccgggacaaccgctgatgatctctgccccgcgcaaccactttccactgcacgagggcggccatgtggtgcttctcgccgccgggatcggcattacgccgctgctggcgatggcccacgcccgggcggcgtccggcgccagctttacgctgcactattacgttagccgtgcgcaggaggccgccttcgccaccgagatcgcccgccagctaaccggtggaatctgccagatccactgctcagacgaggggcagagtccgcgccagcggctggcgcaggatctgggggctccggacgccgacacccgggtctacttctgcggtccgcccggatttatggcccgggttcgcgataccgcgcgggcggccggatgggaggaggcgcaattgcacagcgaagcgttccagccgcctgccccgacggcagcgtcagcggcggacggaaccttcaccattaccctcgcctccaccggggagcgctggccggtcccgggggacaaaaccatcgcccaggtgctacaggagcatggcgtcgcggtgccgctctcctgcgagatggggatctgcggcgcctgcctgacgccggtgcgggagggaaccgtcgaccaccgggataccgtgcagtcggaggcggaaaaacaggccgcagagcagcatattgcgctgtgctgctcccgcagcctgtcggccgatttagttatcgatctcgcgggataa

SEQ ID NO: 229108 - DNA, 1239 bp, Klebsiella pneumoniae
atgagttcctgcatagctgctgacgcgagcctgtcacccgccaaacctgcctggcgcgccgtctatgccctggccctcggggtgttcggcctgatcgtggccgagtttctgcccgccagcctgttaacgccgatggccagcagcctcggggtcagtgaagggatggccggacaggcggtcaccgcgacggcgctggtggcgttagtcaccggcctgctgatcgccaccgccacccgcaatatcgatcgccgctgggtgctgatgttcttttccgtgctgcagatagtctccagcctgatggtcgcttttgccgattcgctggcgtttctcctgctgggccgtctgctgctgggagtcgccatcggcggcttctgggcgatgtccactgccacggcgatgcgtctggtgccggcggcccatgtgccgaaggcgctggcgatcatcttttccgcggtgtctgtcgctacggtggtagccgcgccgctcggcagctatcttggcgagctgatcggctggcgcaatgtatttattctctgtgcgatacccagcctgctggcgctgctctggcaactgtgggtgctgccctccatgcgtccggagagcgtcgggaccttctccacgctgttcagggtgctgcgccgtcccggtatgctgggcggcatgctggcgacaatcctgatttttagcggccatttcgccttctttacctacctgcggccgttccttgagaccgtggcgcaggccagtgtcgaaggggtctcgctgatattgctcggcttcggtatcgctaactttatcggcacctcggtggcgagctatctgctgagccgtagcctgcgcctgaccctggcgctggtgccgttgatgatgagcgttctggcgctgctgatggtgacgtttggccatttgaccgtgctggacgggctgctggtcgccctgtggggatttgccttcggtctggtgccggtggcctggtccacctggcttgccaccaccgtgccggatgaagcagaaagcgcgggcggtctgctggtcgcctctattcagctggccatcagcgccggggccgccggcggcggggcggtgtttgatttgcacggcgccagcggcgtcttcaccggcagcggtctgctgctgttgagcgcgatggtgattgttttcgccgccgtgcgggtgaaaccggtcgccagcgctgaccagccggagacgggccgcttatcccgcgagatcgataactaa

SEQ ID NO: 229109 - DNA, 129 bp, Klebsiella pneumoniae
atggaatcgcaaatttgggttgtgagcacattgctgattagcatcgtgttaattgtattaaccatcgtcaaactgaagtttcatccgtttctggcgctgctgctgcgagctttttcgtcggggcgatga

SEQ ID NO: 229110 - DNA, 735 bp, Klebsiella pneumoniae
atggcgttttacagtatcggtgaagtcgccgaacgttgcggaatcaatccggtcacactgcgcgcctggcagcgtcgttacggtctactgaaaccgcagcgtagcgaaggcgggcatcgacaatttgatgaagaagatatcctgcgtatcgaagagatcaagcgctggatagagcgcgctgtatcagtagggaaagtcaaagcgctgctggaggataacctgccggcggcgcgcgacgaatccgcgcatcttcaggaagagatgatgtccattctgcgttatatgcaacccgccagaatccgcgccaaattaatggcgctcagtcatcaacaccccgtcgacaccctcatcgatagcctgttagtgccggtacgacagcgtctcaagttggatcagaatacctcgctggtgattagcagcatgctggacggcctgttaattgactgcgtagcgttgtttctcgccgaagcgcgtaaaaaaaatggcaaagagacgctgctggtgggctggagcaatgaggacaggacgcgtctgtggctggaggcatggcgtctttcccaacgcggctggcatgtcaacgttctcgccgaaccgctggagtcgccgcggcctgagctatttcccgggcagcatattttcgtctggaccggacgtgccgccacgcctctgcaggaggagttgctcagccactggcaggagcagggcttcagcatccattttcacggccaaaattaa

SEQ ID NO: 229111 - DNA, 1212 bp, Klebsiella pneumoniae; identical to SEQ ID NO: 138800

SEQ ID NO: 229112 - DNA, 1146 bp, Klebsiella pneumoniae
atgaaaattatttttgctactgagccaattaaatacccgttaacgggcatcggtcggtattccctggagctggttaagcggctggcggtcgcccgcgaaatcgaagagctgaagctgtttcacggcgcgtcgtttatcgatcagatcccccaggtggagaataaaagcgataccaaagccagcaatcatggtcgtctgtcggcgtttctgcgccgccagccgctgctgattgaggcgtatcgcctgctgcacccgcggcgccaggcgtgggcattgcgcgactataaagattatatctaccatggtcccaatttttacctgccgcatcgcctggaacgcgccgtgaccacgtttcatgacatctccatttttacctgcccggaatatcatccaaaagatcgggttcgctatatggagaagtccctgcatgagagcctggattcggcaaagctgatcctgaccgtctctgacttctcgcgcagtgaaatcatccgcctgttcaactatccggcggagcggatcgtcaccaccaagctggcctgcagcagcgactatattccgcgcagcccggcggagtgcctgccggtcctgcagaaatatcagctggcgtggcaggggtatgcgttatatatcggcaccatggagccgcgtaaaaatatccgtggtctgctgcaggcctatcagctgctgccgatggagacccgcatgcgctacccgctgatcctcagcggctatcgcggctgggaagacgatgtgctgtggcagttagtcgagcgtggtacgcgtgaagggtggatccgttacctgggctatgtcccggatgaggacctgccttatctgtacgcggcggccagaacctttgtttatccctccttctatgagggattcggtttacctattcttgaagcgatgtcttgcggtgtgccggtagtatgttccaatgtcacttctttgcctgaggtggttggcgatgccggcctcgttgccgatcctaatgatgtagacgcgattagcgcgcatattttgcagagcctgcaggatgatagctggcgggaaatcgccaccgcgcgcggtcttgcccaggcgaaacagttttcgtgggagaactgtacgacccagaccattaacgcctataaattactctaa

SEQ ID NO: 229113 - DNA, 1116 bp, Klebsiella pneumoniae
ttgagagttctacacgtctataagacctactatcccgatacctacggcggtattgagcaggtcatttatcagctcagtcagggttgcgcccgccgggggatcgcagccgatgtttttacttttagcccggacaaagagacaggtcctgtcgcctacgaagaccatcgggtcatttataataagcagctttttgaaattgcctccacgccgttttcgttgaaagcgttaaagcgttttaagcagattaaagatgactacgacatcatcaactaccattttccgtttccctttatggatatgctgcatctctcggcgcggcctgacgccagaacggtggtgacctatcactcggatattgtgaaacaaaaacggttgatgaagttgtaccagccgctgcaggagcgattcctcgccagcgtagactgcattgtcgcctcgtcgcccaactacgtggcctccagccagaccctgaaaaaatatcaggataaaacggtggtgatcccgtttggtctggagcagcatgacgtgcagcacgatccgcagcgggtggcgcactggcgggaaaccgtcggcgataacttcttcctcttcgtcggcgctttccgctactacaaagggctgcacattctgctggatgccgccgagcgtagccggctgccggtggtgatcgtcgggggcgggccgctggaggcggaggtgcggcgtgaggcgcagcagcgcggactgagcaatgtggtgtttaccggcatgctcaacgacgaagataaatacattctcttccagctctgccggggcgtggtcttcccctcgcatctacgctcagaggcgtttggcattacgttactggaaggcgcgcgctttgccaggccgctgatctcctgcgagatcggcaccgggacctcgttcattaaccaggacaaagtgaatggctgcgtgatcccgccgaatgacagtcaggcgctggtggaggcgatgaatgagctctggcataacgatgaaaccgccagtcgctatggcgaaaactcgcgtcgtcgttttgaagagatgtttacagccgaccatatgattgacgcttacgtcaatctctatactacgctgctggaaagcaaatcctga

SEQ ID NO: 229114 - DNA, 5841 bp, Klebsiella pneumoniae
atgttagatccgattggcggttttcgccgcattcaggacttcttcatttcatatatagaaaccagctttcgaattgccgatccttcagtcgcggactcaagacgcaatcttttgaatagcagcggggaatttgccgcggagccctacattgaacctgttttacggtatgagtcttcggataaaacgcttgaagctttggccgagatggacggcgggccgctgaatagcttgtctcccaaaggccgtaaagcgttcgtcgaactagcgttatccggtctgttcgattctaaacctggcgacgaagtctggccgcgtcgttcggtccatgcgccgtatagccaccagactcaaatgttggagcgcggtattagccctggttgccccggcattgtgacatcgggaacaggctcgggaaaaacggaaagttttatgttgcctatactggctgcattatcgaacgaggctgtcagctgggccgcaccttgcaatggctatctgcaaaatcggtggtggaatagcgaaaaaacaaactgggtttctcgtcgcgaaggagaaaaacgtcaggcggcagtcagggcgttagtactttatccaatgaatgcgctggttgaagatcaaatggcgcgtttacgtaaaacattggattcagatgacgcgcggcaggtgatggaacatcgcttctccggaaatcggatcttcttcgggcaatataccagtgcaacaccgattaccggctatgccaaccatcctcgtctttccggagccacctcggaaaaaagtcgccgggcccgtaatcttgaaaaattacgtaaggcgttgaagcgaattgatagcgatcagcaggctgcgcgcgcattcgacgaaaaagaaaacgcttcggaaaagacccgatatatatttccttcgacagacggcggggaaatgatgtctcgctgggatatgcaggctgccccgcctgatgttcttgtcactaacgcctcaatgctaggggctatgctttcgcgcgaagtcgaagacggtatttttgatgctacgcgcgaatggttgatgaataacaacgatgcgtatttctatctggtattcgacgagctgcatttaatgcgcggttccgctggaaccgaaaccgcaatgttgattaagtcgctgattatcagacttgggcttgacgatccgaaacatcgctacaaactgcgtttgctggtgtcttccgcatcgctgccgatggatggagctgatggagaacaatcacggaaataccttcgggatctctttgcgccctttggcacttgccgcgattctctggatcccggtagcgataagcctgatttctggcgtaactgcgtcattcagggaaaaccttatataccgttgaagccagaaggaaaaatcgccgtgcggccttttgccgcattaatgcgggttgcccttgagaatcagggaaatgtcattcgccatttgaacatgacggacgcgctgagtcaggctttgtctgatgtcttcctggctctgagcgtgagtgcaaaaaatgatatgcaaggcattaaacaagcggcggaaaaagcggctgcgctattgaccaacgcttgtatagaagaagacggcgagttgccacgagcaatgcctcctggacttatcatagataagatttttctgaaggaagactcggataaaccagatgaattggaattagcattacgcgggttaatgctggtgcgcgcgctgccggaatgcggagtggtttgcgagaagaccgccaacgtcacaccagcttttcgcgtgcatacattcgtcagaaatattgaaggtttctttgcctccgtatcgccgggagagcaaaaggcgaaattcgcagatttttgcctagagcgagggctgtcgcacgcgccatcaacaccagccggaaaacgtggtcgccgtttgttcgaaatgttgtattgtgaagcgtgtggcgagttactgatcggggggcagaagggacagaatcacggtaaaatcatcgaattattaccttcagcgacaaatctggaaaatcttccagaacgccctggcgctgaatattacgatgatatgacactggatgagtttgcggttttctggcctgtcgatatagcttatcggccaccggtaggttgcgaaaaaggttgggatgtctgggaaaaagcggcgcttaatcctattacaggcatagtgaccattgggcaggaaacatcaacgacgaatactgacgtagttcgcgggtatatctatttccagaatcaggttaagcctaaaaaaggtgagccgccgaagaaaccttctgcgcaacctttctgctgccctagctgcggcattgactattccagccggcctgccagcaatcgttccagaacacccattcgcgcatttcgtaccggtgtgacgaaatcatcccaactggtagcaacggagctatttgaattactgcatgcgatcggcgcggaagcaaagagtattgttttctcagacagtcgacaggatgcggcatcaatggcgctggaaatcgaacggctgcacttgcgcgatctgcgcagggaaatattggtcgcagcttccagggcgatgattaacgaggccgaaagcgggtatatttcagacaaggatattgaagaaaggaaagccaaagctaaacaatctggagactacgatgagtatgtcaaactacatgaccttcaaaaaagccaagtcggaattaccgagctttgtaaatatcgacgggtaaaaatagacaaattgctggagtctgaaggcgactcaatcggaagaatcacatctgagctagtcgggttgggaatatcaccctataaatatcgttctaattcagaggagcatgatagtgctgtttggcatgctaatttcattaaagaagaggaatcggttagattcagtgaaagacttccttctcatgaactaatgaaaataaagacgaaaatatcttacgatcaatctgaactgatagatgacgttatcttcgccaatacttttttcgcgctggaagaaacaggactggcatacccatgtatctcagataaagatgacatgccggaaattgatgcttggctaagggtgttttccggtgcctatcgtgttaaagagaataaatatttcgatgcaagccgtactcgtgattggtatgttgggaaagatgttgaaaaagagaaaattaagcgagtcgccagagttttattcggtgataacaactatcaagatggtttgacgcgtatcttaaagcagtttactgatttgaaacatccagcaggattaattagtatcggcaagttgtttcttaaagttgctaaacttggcgataattactggcaatgcggtaattgtgggcgaattcacttacatttagggttcaaacattgtacccggtgcgtaaacccgctcgacattgaacccagcggagttgtcgaagagctatgggaagaaaattttcttggtaagcgcattgtacgtggagagcgagacggagttaaacgtttccggctgaacgtcgaagaattgacgggacaaacggatgatttctccgatcgtctgcgtaagttcaagggtattttcgtcgataagatgagtgaacttgaaaagctagatgcggaaatagatatgcttgctgttaccacgacaatggaagttggaattgatatcggttcacttcagtctgtttatcaggcgaacatgccgcctcagcggtttaactaccagcagcgcgtcggccgagctgggcgacgcggtcaagctttttctttcgttatcacattttgtcgcggacgtactcatgatgcttactatttcgcccatcctcatgcgatcaccggtgatccgccgccgccgccctttctggcggtagatcacgacgccattccattaagacttatgcggaaagtatggcttagagctgcatttaatcttttacgcgaagaggatcataaaaacggaacaactttccccggagataaacttgtcccacctgatattcatggcgagtatgtttctacgcatgattactatcgtgacgatgaaacgaattggtctgaacgattactgggagcgttgaaagcaacacagaatatacatgatcgctttattgaagcagcaacgttcgatccagtgcaaagacaacgtctttattccgcattaaatgcggaaaaaataatctatgaaatcgctgaactgaacacttacgtccctgaagaagatatggggctagctcgtttcctggccgaacacggtaaactgccgatgtatggaatgccgactcgagtgcgcaacctttatttgggattgcgtaaaacaaaaggtctaaatgctcaagaagaatacgaatggtcgacgatggatcgagatcttgatctcgcagttttcgaatatgctcccggctctgtattgattaaggataagaaaaagcatgaggtaataggctttacaggcaattaccatgaaccacaggttcaaaataaccgaatatcggatctatcgacggtaggctcctggcaagagtcatgcagccatgtagcaatttgcccggcatgtggctccgccaagctggagttaaataagcctgacagcgacattaattgcgaggattgccgcactcctattagtcctgacgaattcaggctttatatcacgcccgccgcttttcgcacggatttcaaacccaaagacgatatagatagttttatccgcatgtcgttgaaaaccacggcgacagtgttgcatgaaggcgtcccaacaaaatgcgattctttcactgtgcaacgcggcgaagtgaccatcctgcgcctcaacgatggtcctattaatggagaaaaggaaggtgaacgatttactgtcgacttggtaaccgatcaaaaagcaccgatgcccttttctacatattgtccgtcagttaaaggcgagcaggctatcgattcaggatggctggaatcgcacaataacccgcgctggcagtgtagcggcaagaaaaaaagttttgggcttgtatcaagcaaagagacggaatcgcttcatatcgaattaacaaaattcgatgctcgccttaatctggatatggtcgccagattcggtgaatacatgaatttacctacgcgcgcggcggctatcagcgcgacccagatattaacgcataaggcagcgctctatctagatgtttcgccagatgaatttgaaatgcttgaacccagactacatcttggcaaacccatattacaaatcgccgatgcattaatcaacggttcaggattatgcagacggcttgctgaaccagcatctgctgacggcttacctttgatagtcacattattacatgagattctcgaagagaataacaactggccgatagttgattttctaaaaaaagatcatccaactcaatgcaaaaccgcgtgttacaagtgcatacaacgctatggcaaccgtcgatatcacggcttgttggactggcgtttaggtatggcctatttacgggcgatggttatgcccgaattcgcatgcggcctgaacgccgccgactggaaccagccggaaatgaaaggctggcgagaaagagcgtttgagttagcggaagacgtcgaggcgctacgaccaggaacaatcaaattgtcaaaagaacattcattacctgttcttatcgaaatacaggatggaaaagagctttggcgagcggccgtaacgcatccattatggcaatggagggacgccgaacgtgattcccttattgactgttttggcctagctggcggggagtcgcagctacgattcattgatacgtttgaactggaaagacgaccattgcgtgcgcttgcgaaccttaaacggagttaa

SEQ ID NO: 229115 - DNA, 2091 bp, Klebsiella pneumoniae
atgaaagatatcccttggtatattggtcaatatgaccgcagaaattatcagtcttacttcaaagttgtcgcgcaggaaaccctagatggctggcgtgtgatcgacaatcctaggaagaaatttcctcgtacaggggaagtcgagttcaacggaactgacattttacaatttcgcccgcaagaatgggctgcttttcaggtgggcccaggccctcgaaacaagactcaggcgaaacacacccgtcgtatttatccttattatgatttatcttccgggctgtcgctactggaggcgcgtcgtcgattaagtttcgatggcataacggcagacggcgaaccgggactatgggctatccgtttcgggcctgacggatttattctggcgaatctggctgagtcaaaatcaggctgtctgatgctgtccagaaaccagagcgtctatgaatatgctttcaacgaaaacggtgtaattagtgtatccgacacatctgaatgcgggaaagcattttatatgcccgatactgatgcttcacccgctagagtccatgactggacgccggataagcagtacatcgaaaacgtcattcaacttctttcctgtgcgtgttcgacaacggagctcgcttcatggcttcgggtgcattcagacgagaaaagcggaaaattaaactccggcgtcaatgatcttctggctaccgctcaatcactccgctcaggcgaactggcaaagaaattggaagacgaagattgcctggcccgtcagctaactgaatcactactcagtgacggcagaatcgctgacttgctcgaacgtcagatacaacgtatcgctgaagaagagcaagcgacgttgcgcgctgaacaaaaaaaagcgctcgaagacgaattttccgccgaacgccagcaacgtcgagatgttcttgatgcggaaatggctacttttctggcaacccaaaagaatgaaatcgaacatcaaatcgcccaattacgacaaagcgatgaagaaaaattacaggctgattttacagagaaacaagcaaaaatcgagctgacgctaaaacatgagaaattgcgcctcgaaagggaaatagatcgcctgaaagacgtcatcacggatttatgcgctcagaacgaacatcaacgtcagacgctggtttctctgaccagtgagcgtgaagcgttagtggcttctcttgctgacgtcaaagaacattctgctcaggcgcaagccgaactcgggcatatgaatgctgctattgctgaaaaagctcgccggatggcgtattcagctattcctgaggtacgcctcccgacagaagcgaaaatcgtgtcctgcaatgagttcggtggttgcgtcagagggaacaaattgctaacacctgacggaaagaggttgatggtgcagtttctggcgttgatgctggctggagaatgtccattgttatctggcccagaaacgcaggatttccttgctattgccgaatcactgatttcttcgggccgctccatccgacagatcgccgatccaacgatgatttcctgtgaagatctttgggttcgtgcgggaaataatatggcaacgccgctttatcagggattattgttgagcgaggcttcccgcccccgaacgatcctcgccattattgaacgtgtcgaatgttccgccgcgcgcttctggctgccagcgctgaaagaccgattgcacagcggcgatttgccccgacgctttctgatttgcggtaccattgaaaacgaagattgtgaagaagcggagaaaataaaggaacagcatcttcacctgcggatggaaaacgtcatcattcgaaatgcgattgctctgtcccctttacatctttctttagaaaatcatagcgagctggatcccggcccggcatcgcaaagttctctcccggaaaaactcactatcgctgatgaaatgtctgctggacgtctggatctggcaaataccctacgggcgatgagaacggcgcatgaagtcgcgccgcttgatgatgaacacaaagcgatacatcagaagcatttagtcgatttatacgccgatttacagaataacgagctgtacgcccaataa

SEQ ID NO: 229116 - DNA, 2565 bp, Klebsiella pneumoniae
atgaagtggacgccgcctgttacgcccgatggctgggaaagtaagctgatcgattattttctccggttcggtcacgacggggatgcgcaggatattcgctggtttgaagttacgccttcgacgctcgcagcggcattcgccgacagcggcgtcggcgcggatgaaatagaaaaagcttttcaggcatgtatgtcgaggataccagatctgccgctgcgccttgaaagtggaatgatggaaagatccaatgacaagtctcccggatattttacttatcttgtaatgacgctacttatcagcagtcaattcgacgctcaagaagaaagtaatgatttccgcctgaagttacagaactggttgcaaaccgggcatagctaccagaatttggcaggcgtaaacgctatgtgggaagcgctagctggatggcttgaacaacggattcagaaagaggagccttaccgtcgtctgattcttcctgaaataccacccagttggagtcacatcggctacaccttacgactggcttttcccggaaaaacagacttgcgcttgatgacccgagttcttaggaatcacccgcaagccgtatccagcccccgactgttaatcgactatttccaattcgcgattcaaaaagaaaacgcatcttacgcaatgagtcaggcctttaacgagtttaaaagcgcctggtttgctggacgtagaacgctcgccgatatgcctttctggcgcctgcgtcagcgagctttggcgcagttccccgatgttgaaatgcgtaaagcgattattgatatgcggatcgatttggacgattcgcggtgttatttcagctcctctgatgagaacaacgatagtgttttcgctccttcgttatccgaagcgctaatttctgcatctgctggacacagtgaaaacctgggaaaagccgtgcagatcggcttaatcttttttcatcaagtcggccatggacgctggagagcaatcgcagttcccgataaatgttcttcacaattttacatcgcattatcctgtaagcactccacgcgtataagcaaataccttgacgatgcagttatagaaggtgactggattttgaccagacgccctcagagccgtcatctagcaatggatatactccgtgtgatgaaagcgtcgtcagattcgccggatgaacagattacccgtcctctgatttacgacggaataagagtaccggggggatggctggggttgcctgcatttatgccattcatcaaatcagacgcgcgaaattacagggtttatgctttggggaaaaattgcgcaaaaatcgatgtcaagaagatagatgggcaattaatatcatccatgccactcagcggcgagtttattattgagcctgagttggaagcagacaagaaaatgccactatggcggcggcgagtgcgtttttttgatcgcgctgttccacatccagcgctaggggaaagcgcaaaatatcatctcgagcgtcttactgaatggaagatttcgcaactgaaaacccctgtattccgcgccgaatcgcccttgttaatggaagatggcgatgtgcgttgtgaacatcttctggaggctatttacgcaaccggcgccagcggctgggaagaagttgaactggtctcacttctccagagcgttgctgatggtatcagcatatggcatctgcttcgcagtctgcatgatgctggtctgattgagccgcgcttacgccagtcctggaaaggtcgggtatggacgctagtgaaaccctcgctgtttcatattcgctatggaaaaagcagtctggtcattgtagaaggtgccatctgcgccaggcttatagatgattttcaaaaagcggtctcagaactgggcggaaaatatttccgtcgcagcggcgtaagtgtctggtctcctcctgtattcggcgcggagattgatgatcctgtcacgttatcccggattatggaatggccacttgtcgaggcaccgttgaagtcagatatgatgcctctcgcatttatgtcaacgctccgcaccgctgaacttcacgttcaggcggcaatctgggactggaattccgggcgtttcctgccgcatgtggattcagatggcgaaacgacgcgtttaacgcgccatgttcatccgggtggacgcgatcatgatgtgtatcgtgttgttacccaccgaaaaacggagttttttttatcccgaaccgccgcaattatcgccgcgaacgtggatgctcgccgccctacgttcaggaaaatcgctgataaccgctttatttgcattaccaacgattgcggcttgcctgacgcactggcgacaggattgcggcgcaacctgctcagaaacggcggcccgacggaagccggatatgcttaccctctcgacgacatatctttccgttggctaaaccaactgcttcctggatgtttctattcgctctcgtcggatgacgataatagcgccagccagttagtttccgcagctcgccattccggcggaaaaatgcgtcttcaatggcgaaacgggcttctagcgttatggactgggaaataa

SEQ ID NO: 229117 - DNA, 1146 bp, Klebsiella pneumoniae
atggcacgagcaggcctgggaaagcagtggcgatgcctcttcgccaatgacatggatccgataaaagcatcgacctacatcgataactggggcgatgaacatttcgacatacgcgatgtacgcggaatcccgtctaatgacctgccgcgccatgctgatttaacctgggcctcattcccctgtcaggatctatcactggctgggaatggcttgggaatcggcgatagagattccagcgctgacgagattacgcgttccggcgctgtgtggccgtttctcgatttgataagcaaactcagtgaagaaaaccgaaagccgccacttcttgtcctggaaaatgtgcttggattgctaacgttggatcaaggcaggcatttcgccgcgatatgccatcagctaagtaaaacgggttaccgctatggcgcaataatcgttgatgcaaaacactttcttccgcaatccagaccgcgtgtttttattgtggcagttagtcgtcatatatctattcccacaaatctggtttcagaaaaaactcttcctgaatggcattcgtcgtcccttattcgtgcctgtgatgcaatagcagaagaagttcatgacgactgggtctggtggtcacccggtattacgcccgaagccaaaatgaaggaactgactgacataatagattgtgaagacacaaatgcgctatggcactctgctgatgaaactcaacggcttattcatatgatggcacctgcgaatcaggcgcgtttggcgaaggcgcaggaatcaggcgagacgatgataggcagcctttatttacgcatgcgcaaagaaaaaggcgtcaaccagcaacgggcggaaattacattctcgacggttcttggctgcctgagaaccccgaaaggcggggcttctcgtcctcgcattatagttgtcaacggcaatcaggtgaaaacgcgtttgttgtcggtcaaagaagcggcggcgttaatggggttgccggatgattttattctcccggaagcgtatcaatcggcatttaaagttatcggcgacgggcttgctgttcccgcagtccgttttctggctgaacgcatactggaaccgctggcgatagctgtccgaaatgatgagcgccggagggaggacaaacacaaatga

SEQ ID NO: 229118 - DNA, 1002 bp, Klebsiella pneumoniae
atgtcgttcactattcacccttggtttgaactcgcgcaacaatacgatgggactattttactgggcaacggcgcaagcatggctgtcagccctcgttttgggtatggctctttgcttgaacacgtcacgcaaagtcagagtctggcggaagatgcccgcaggctgtttgacttttttaaaaccaaagatttcgaacttattctgcgtatagtctggcaggcatctaatgtcaataaatccttagaaattgaggatgcacgtacccgcgaggcctacctccgaattcgcgaatgccttattcaagctgtacgcgacgtacaccctgaacatcatgaagttagcgagcagctgccgtatctctatgattttttgaaaagattcgacacggttatttcgctcaactatgaccttatcgtttactggacgatggcacatggcttagatattcatgatcgccatcaatttaaagattgttttctcggtggaggcctttttgagcaggactggcagcggctaagagggatgtatggaaatgaacgatcgaatacgcttgttttttatccacatggcagccttatattatgccgaaatcgtgtcgaacaggagcgtaaaatacatatccgtggagcggggttactcgaatccattcttcaacgctggcaaagcgaagaagtggttccgctgttcgtcagtgaaggaacgcatgaacaaaaggttaacgctattcaaagcagtttttatctttcaaccgtttatcgagaagtgctcactgagccgcgagacaatttggtgattttaggttggggaatgggagagcatgacgttcacctgctaaaacgcatggccgggagtgggatacagcgagtcgcagtatctgtattcagaagagatcaggcatattgcaacagagctagccttttgattaaagagactcttgggcgaaataccctcgtggatttttttgatagcgaaagcccgggttgctggaaccaacatatttaa

SEQ ID NO: 229119 - DNA, 1158 bp, Klebsiella pneumoniae
atgggctgggtacgaacaaaagcattgaccatggagcagccatcggctccttcactgacccgatggctgtttgccggtgtactgatggcgattatcggtgtcctgttctttatcctccatgcctccggcaccgtaaaaattatctcagtgataaatatctggtgggtatccctgatgcctgcaggatgctggttgctgattttttgcctgcgttgctacctgtgggacagggatctgaaagcgcatcagttcttgctgaaagaggcggaatacggacagcagaggtgggaagactgggccgggcgctggctggccgttctgagcagtgcagtgctgttgccggatcatatttctgcggcgcattgggggagtgagcggcctcagcaatacggacttgcccgcaggattaattaccttccggcagaagagcccgtgcagttgagtgcgatgcatgcgctgctgaccagtatagaagagcgcgtgcagtgcctgccggaagagctaccgctgtatgtcaccctgatcacggataatccctcgcctgagctgaccagcagtttcagtaatctctggaaagaacacattcctggccgcgccgtgcctgatgatattaccgttaccggctcattctcactgtcggaagtggaggagcgcctgaagcagcctgtactgacggtcaatttactcctggtcatccagctcaacggtggtacagcatactccgacgggctggccgtgctgctgctgaccagcgatgatgtggcgcaaaaataccatctgccgcactcatcacggctgttacgtcctatgcccttagatatgacgaactttgaagacgatatcaccctgtttctggaaacccagactgtcgcctgccatacgccctccgttatcggggacgcaaaaaaatggacggaaagaagcgccgcgcttatcacgcagggcggcaaaatgcataccccatggaaagctgaagatatcgcgctgctggaaaaatggtgcggtattccgggacccgcagcgccctggctcctgatcgcgctggcagccgatctggtcagcctccgtaaacagcccctgctggcgttattttccagcgaacaggaacattttatcagtaccatcaccccagggagtgaagatgaatataccgggtaa

SEQ ID NO: 229120 - DNA, 381 bp, Klebsiella pneumoniae; identical to SEQ ID NO: 218202

SEQ ID NO: 229121 - DNA, 144 bp, Klebsiella pneumoniae
atgcaattgttcgccgcgttcgctcagaagcaaaactttggtaccgggcgcgacgttatatcgactaatcggcgccgggtcatatgcaatgtcacgatcggcatcatctgcaaggtaggacagataatcttcacgggtcattga

SEQ ID NO: 229122 - DNA, 219 bp, Klebsiella pneumoniae
atgtctacaagaattaaaggtttggtaaaatggtttaacgaagataaaggttttggtttcatttcacctcttgacggaagcaaggatgtcttcgtccatttctccgcgctccatggtgagaatttcaataccttatttgaagggcagaaagttgagttcgccatgcagagtggtgaaaaagggcctgctgctacaaacgtaatactttgcgataaatga

SEQ ID NO: 229123 - DNA, 8583 bp, Klebsiella pneumoniae
atgaaaatgaaccccagagcgtggtttaaccgctcccgtattccggtgaatgctgccgcaaacgtaacgttttcggcgaacgatcctgcaagcgaaagcactccgcggtcagaactcttttcgactgcccagatggaacgctatggtcagaagctggcgcggacccataaagtatcaccggataaacatccctattatcttctgaaacggcttggcgacaatgaggccgttatcacccaaaactgctatgagcttaatgcaggtaaaaagaccagtatcatgcccgccggggagtggttgctggacaattattatctgattgaggaacaaatccgcaccgtccgccagcacttgccgaaaagttttggtaaaggtctcccgtcgctgatgtcgccgctgaattgcccaagaatttatcatatcgcatcagaggccattgctcacggtgatggccgctgggatgccaccagtctgaccagctatctcgctgcctatcaacaggtgacgccgctgacattaggtgaaatctgggcattaccgggaatgcttcgcctggcgctgattgaaaatcttcgtcgtatcagtatggaagtgataaaagcgcaacaggacagaaacctggcagatacgtggataaccaggattttcgaatgtgcagagagtgcgcctggtgatttaattatggtggttgccgatttggcgcgctcccgtcctccgttatccagcgcgtttgtcgcagaactggtgcggcgtctgcaggggcacggcaacgcgctgtcgttacctcttacctgggttgatcagtgccttcgggaacagggagtcaccactgacattctcataaataacttcaatcaacagcttgccgccagccagctgtctgtcagtaacagcatcgcaggcctgcgattactgggtgaaacggactgggctgatttcgccgaaacgataagcgtcgtcgaacaggcattaagcaatgatcctgccggtatctatccccggatgcacttcaatacccgggatcattaccggcacgtagttgaggtcctggccagagacagtgggctcagcgagcctgaggttgctgacagggtgctggcgctttcagaggaaaaagcccccaatacaccggaacatcatattggttattatctcgccggcgaaggtcgacaggcactggatatacatcttctggcagacacctcaagactcatacgcttgcggcacagtttcaacagaataaccctgctgtcatggcttggcagcctggcgttgttgacaaccgcagcgaccgcggcaatattgcacgaaactgccatgcagggcgcaggttggttgttaatcgcggtgatattacctctggttatcgctttaactcagttaatgagtgatttactcagtgacgcaaccacccgttttcgcgttcctcgccccttgccggggatggatttttcagccggtattcccgctgacagtgccactatgttagtcattccctgcatgttgaccagccacgaaagtttcagccagctcctcaccagtcttgaagtttgctggttggggaatgaaaacgaaaatctcaggttcgcgctgctcactgattttgcagattctgaaaatgaaccctcgccggaaagtcacgcgctgctcagacaggctatcgctgatacgcaggcactgaatcggcgctacccctccggtcgaccacgtttttatctgttacatcgtcagcctgaatggaacccctcggaaggaatgtggatgggctacgaacgcaagcggggaaaactggcgttgctgaacagctggttgcgccatccgggaacgcaattcgtcagcgttgcagacatgccggcccaccttttaccggatcacattaaatacgtcattaccctggacagtgatacggtgttgccgcgcgatacggctcacaaactggtcgcggcgatggcccatccgttgaatacgccagagtatgatccggtacgccagagggtggtcaaaggatttggtattttacaacccggtcttgcggaggagataccacgtaacggtcaggggcgttacgccgccctgcgcagcagcataccgggtaataacccctattctatgatgtcttcggatatctatcaggatctctttggggaaggatcgtttgtgggcaaagggatttacgatgttgacatttttatgcaggccactgccaatacctgcccggaaaatctggttctcagccatgatctcctcgaagggtgctatgcgcgctcgggtctgctgagtgaggtgttactctacgaacagtaccctaataattatctgtccgacgttgcacgccgttcacgctggatccggggtgactggcaactgcttaactggctgaaaccacacgtcagaaaagccgatggaacccgtacccggaatccactgaccgcgctttcttactggaaattactcgacaatctgcgtcgcagcctggtagccccctccttactggtattgctgttcttcactctactttgggtacccaatccggtttactggctgggcatactgttgctgatatggctgttgccagccctcctctgcattagccacgaccttctgcataaacctctgcgtcgccgcgtgaagtcgcatctgttactggtgggggcgggcgcgctaaagcgtctgtcaggtatcagccttaattttgcgatactgccgcacgaagccggatattcgctgaaagcgatcgccgtgacgctatggcgactggggataagcaggcgtcacctcagccagtgggtcagccacagccaggacagcagtcaggccagacccactgttgcacgtttttatcaggcgatgtggctgaacgttgccggtggcgtggcgctgacaatactgactggacaatttgccccacagctgctggggattgcgttaccgatcggtttggtatggtgtgtggcaccgctgctgatgagctggctgagtcgccagcccgtgcgtaaggttttttcgcctaatcaggaacaaaaacagctgttacgccagacaagccgtgaaatctgggctttttttgaaacatttgccacagcaaaagagaactggcttccgcctgataattatcaggaaataccacaaccgacggtggcacaccgaacctctcctaccaatattggtctttcacttatggctaacctgacggcatgggactttggctacctgcctggcggagaggtgctccggcgcgtgtcgctcacactcgacacgatggataaaatggagcactaccggggccatctctacaactggtatgacacccgtacgctggtccccctaagtccacgctatatctccagcgtcgacagcggcaatatggccgggcatttattgaccctgcgtgcaggcctgtccgccatgcgtcatcagcctgttttaagcagccaacagatactgacaggactgaacgatacgctggatattctggaaaaacagtggggtaagaacccacctgacagcctgagactgctgcgcaagcattgcctgaacgcggtgtcgctctctccgcaggcgcttttcagcgaactgaaaagcatgcgcacccagtgcaaccatctgaccagcgcatgccatcagggatctcctcttcagatgcgctgggctggacatctggagcatcaactggttcagctttgccatgagtggtctctgttgcttggctggttgcctgcatcctggaatgaacagacgctgccgacgctgagcgagcttgcccgtccgacattaaccggtacaggaacgcctccggcgtcagtgacggagcaggcccgaatgcgactcaatattatcaccgaactggaacagcggctggatgagcatgcccggatggatttcgcctttctgtacagtgaagcaaccagtctgctcagcgtcggttataactgtgacaccaatatgcctgacaagagccactacgatctcctgccgtctgaaattcgcctgaccagttttcttgccattgcgactaatcagctgcctcttaaaagctggtacgcgctgggtcgattgtttaccacgattgataatgaaactgccctgatgtcatggagcggatccatgtttgaatatctgatgccgaatctggtgatgcccacctggcccggaagcctgctcgatgaaatgagtcagtcggcggttatgcgccagattcactgggggaaagaacgcggggtaccatggggtgtttcagagtctggctatcatgcttttgatgttcagcataattatcagtatcaggcatttggcgtaccggggctcggtctgcgcaggggacttgccgatgacatggttgttgctccttacgccacgctgctggcgctgatggtttccccacagagagcctgtgagaacctgttcaggctgcaaaaaaatggtgcacgcggagaatacggtttttatgaagcgctggactataccccctcacgtcttgcaaccggtcagctctatgcggtggtacagtcctggatggcgcatcaccagggtatggcatttcaggcgctggctcatgtgctgcttgacgcccccatgactgaacgctttatgtccagcacggtattcctgtcagcgagtctgctgttacaggagcgcgtgccggatgcggtcgatctgtacagtccgcgccgtcattttgaatctcatgagggcatggtcaaacccgttcgctatgaaccccgtattttctatagcgtggatacccccgccccggatattcaactcctgtccaacggccattatcatctgatgttgaccgcgggcggcggtggttacagtcgctggaatgatattgcactaacgcgctggcgcagtgataccacccgtgataactggggagcattctgctacatccgcgatacccagacgggagatgtgtggagcaatacctggcaaccgacaggctacaccagcggacaagacgaggaagtgttgttcaccgatgcgggggcagaattcagacgcagcttagggggactcagcgtcaaaactcaggtggtgatctctccggaggatgatgttgaattgcgacggctcacactgattcatcgtggtcgcaagcctcgctctctggagctgacaacctatgctgaagtggtactggcacctgatgccagcgatctggcacacccggcattcagcaatttgtttattcagactgagctggctcctgaacgtgacgctattctttgccaccggcgcccgcgctcaccggatgaaccgggcccttgcctgtttcacatgatggtggtgcacggcgataaccgacataacgtgtcgtttgaaacggacagggcaaggtttattggacgtggcagaaaccctgcgaatgcacaggcaatagagacgggagggatgctaggcaacacgtcgggctcggtgctggatccgatactggcaattcgcaacgccatcattctgcagccggggcagccggttacgattgatatcatttatggcatcagcgagacccgtcagcagagcctggcgttgctggagaaatatcgcgattaccctatcgccgatcgcgtctttgaactggcctggtctcacagtctggtggtattgcgccagatgaacgccagtgaagatgatgccacgttgttcaataatctcgccagcgctgtgctttaccctgtccaggagctacgcgccgaaggccaggcgatcggccgcaaccggcgtggccagtccggactgtggggctgggcaatttcaggggatctgccgatagtgctgctgagtataaccagcgaggaaagtatcacctcagtgaccacactgattcaggcacaccgttactggagacagaaagggctggatgttgatttggttatcctgaataacagccccggcggctaccagcagggattacaaaatcagattatggagttaatttatgccgggtctgaagccagtctgctggataaaaagggcgggctttttgtccggaacggtgagcatctctccgctgaggataagttgcttttgatgagcgtggcctgtctttatcttgatgaccgcgcagggggtattaatgagcagcttaaccagcgtattcatacgctgaaatcgccggcaagggcattcattccgcgtgctgtgcgcgagcataatcaacatacggactggagccctgataccagtcagttatgccatttcaatgggtacggtggattttctctggatgggcgggaatatcagatcgtccttcgggaaaatgcgcttacaccggctccctggtcgaacatactggcaaattctcgttttggcagtgtgatctcagaggcagggcaggcctatacctggtatgagaatgcccatgaataccggttgacgccgtgggagaacgatccggtgagcgatcgcagcggcgaagcattttacctgcgcgatgaagagagcggggagtgctggtcgccgacggctttacctgttcgcggacacggtgattacctgacccgccatggttttggctacagcgtttttgcccatcgtgagagtggtatagacagcgagttgacggtcctggttgctgaagaagatccggttaaactggtgctcctgacgctcagtaactcttcgggacggacacgtcaactttccgtcacaggctatgtagagtggacgctcggagaaacacgaacgcgctcagcccctcacattgtgacacatgtggccagaacgcccggcggctgcgggatacttgcgaataacttttatggtgataatggtggcggccgaactgcattttttgccgtcagcggtaatgactgttctctgacaggggaccgccgggagtttattggccgtaatggttcccttcacgccccttcggccatgaaactgcaaaagctttctggtaagacgggggccggtctggatccctgcggagcggtgcaatcggcggttacattaattgacggggaccagaggacgtttatttttatcctcggcgcagaggagaatgatgtttgtgctcaggagatgctggcccgctacatgaacgaggatacggtccgccaggagctgaaccggattcataatcactggcacaatgttctcgataaaatcgtagttaacacccccgacacgtccgtaaatttactggttaatggctggctgttgtatcagacggtcgcctgccgtcttatggcccggagtggctactatcagtctggcggtgcatttggttttcgcgatcagctgcaggatacgctggctctgagccacgctgctccggaccggatgcgtgaacagataatactctgcgcatcgcggcagtttatcgagggggatgtgcagcactggtggcacccgccatacggcaacggtgtgcgtacccgctgttccgatgactatctttggctgccgcttgctgtttgctactatgttgaaacgacgggggatatggatgcactggaaatacgcattccttatctggagggacgctcgcttcagcctggtgaagagtctgtctatgacacgccggtcatcagcggcaccgaagagacactctggttacactgcgtcaaagctattcactatggacttcgcttcggggagcatggcctgccgctgatgggtgctggtgactggaatgacgggatgaaccgggtgggtatcgaaggcaaaggtgaaagcgtctggctgggcttcttcctgtacgacattttgcagcggtttgcagcgctggcggagcgcaggctggatgaaagcgtcgccgcgatgtgccgttcacaggctctgcgcctgcaaagtaatctcgaagcccacgcctgggatggggaatggtaccggcgcgggtattttgacgatggtactcccctgggatcgaaaacctcacaggactgccggattgatgcgattgcgcagagctggtctgtattgtccggcgccgcgagcccgggacggtgcgcaaaggccatgcaggcgctggataagcaccttgtggataacgaaggcgggctgatcaaactgttaacgcctcctttcgacggacacggtccaaatccgggctacatacaggggtacctgccaggcgtgcgggaaaacggagggcagtatacgcatggcgccatctgggcagtgatggcctttgcccgaatggggaatgccggacgagcctggcaactctggtcaatgctcaaccctataaatcataccctgaatgcggactctgtcgggatttataaagctgagccttatgtcatgagtgctgatgtctacagcgtcgctccccataccggacgtgcagggtggagctggtataccggttccgcaggctgggcctggcgtttacttaccgaggaattactggggataaaacgttccggcactgagtttagtgttcatgcccggttaccggatgagtggtcgtctttttctatggcatatcaatatggtgaaagccattatcagattagtgtttcacgcggcgatgcagaatattgcgtgacactggatggtgttctcctccctgatgacagaataccgctgaaggatgatggacaaaaccatacggttgagatcattcagaactga

SEQ ID NO: 229124 - DNA, 288 bp, Klebsiella pneumoniae
ttgaaaattgaacgtctgatttatgatacactatccttccgtgagaaatttatgatgaaatcagaagacacccttgactggtatccggcacaactaccgcctgtgaaaattattcttggtgaagccgtgctggctgtgggtaaacagggcagaccgattaatacccgcaccttgctggaataccttcaggtcatgcaggacaaacaaaaaaggcgggatgacaaaatcgccatgcagactgcgattgatgttctcagggataatcagcgcattaacggcagacgttaa

SEQ ID NO: 229125 - DNA, 273 bp, Klebsiella pneumoniae; identical to SEQ ID NO: 106548

SEQ ID NO: 229126 - DNA, 909 bp, Klebsiella pneumoniae
atgtcacagacttttacttataatttactccatccccgctactggcttacctggactggtttgggtctgctgtggcttctcgttcagcttccttacccggttttacatattctgggctctggtcttggaaaaatatccagaccctttctgaaacgtcgggaaggaattgcgattagaaatatcgaactctgctttccaggaatgacaccgtttgcccgaaaccagatggtcaagaaaaactttgtttctctcggactgggactgatggaaacaggaatggcctggttctggagtgatgcgagagtcaaaaaatggtttgatgtcgaagggcttgaaaacctgaccggtgcgaccagaggggtaatggttgtcgggattcattttatgtcccttgagttgtgtggaagagtaatgggtttatgccatcctatgatggttacgtatcgcccacacaataatctattaatggaatgggtacagacaaaaggtcgtatgcgttcaaataaggcgatgattaatcggcgtaatttatctggttttgttcatgcattgaaagctggtgaagccgtgtggtttgcaccagatcaggattatgggcctaagggaagcgtttttgcaccttttttctcggtaaaaaaagcagcctcaacgaacggaacatatgctctgtcaaaactcgcaggtgcacaactgatcacacttagcatgattcgacgtagcgataaaaaaggttatcgcatgtatatcagcaatccgttgtcaggctatccaggggaagacaaggtcgccgcagcgggttatatgaataagatcatcgagctagaaattctccgagcccctgagcaatacctgtggatgcatcgcagattcaaaacgcgtcctgaaggcgaagcctctttatataaatga

SEQ ID NO: 229127 - DNA, 573 bp, Klebsiella pneumoniae
atgctgattggctatgcgagggtatcgaccggggatcaaaacctcgatttacagaaaaacgctctgatccgcgcagaatgtgagctggtttttgaggatatggccagcgggaaaaatgcccgacggccagggttaaagcgagcgctgcggcgactccgggcgggcgacgtgctggtggtctggaaactggaccggctgggccgcagcgtgcgtgatttgattacactcgtgtcggagctgcaggcgcgcggggtgaatttccgcagcctgactgactcgatcgacacgtcgacccctgcaggccgtttcttctttcatgtcatgagtgcgctggcagaaatggaacgagagttgatcgtcgaacgtactcgcgctggtttagccgtagcaagggagcaggggagaattggagggcggcgtcgggtaatgacgactgatatcgtggaacattgccgccggatgctcgcaaatggagctacccgacagcaggctgcagatgttattggggttggggtaaagacgatttacaaatatttccctgtagctggcgtagggaattttgagaatcagtaa

SEQ ID NO: 229128 - DNA, 1287 bp, Klebsiella pneumoniae; identical to SEQ ID NO: 180579

SEQ ID NO: 229129 - DNA, 921 bp, Klebsiella pneumoniae
atgacaacgaaattaattaacctgccgcacctggcagatatggtctttggtgtgccgcattacgtgacgcggcaaacaatggactccgtgaaagcggtgctcatcccccgtattcaggggatcaccgaagatgccgtcattcagatggcgctgaatccgggtaaatcacctgctgctgagcaggtccagcccaccggcggggtggcggtgatccccgttcacggcattcttgttccacgccgggggcagattacggcgatgtgctccgagctgaccagctacgagcggatccgcgggcagttgcaggcggcgttaaacgacccctcaatcagcgaaatcgttctggatattaactccggcggcggcgcagcggtggggtgcaaggagctggccgattacatttatcagtctcgcgacacgaaacccatcacggcgattgtgaactacagcgcgtattccgccgcgtatttcatcgcatcggcctgcagcaaaatcatcgtcagccagaccagtggcgtggggtcgattggtgtgatcatggagcacctcgatacgtcgaagatggaagaaaaaatggggctgacgttcaccaccatttaccggggagataacaaaaataacggcacccaacatgaaccactgagtgaagagtcgctgggtatgttccagggcatgatcgacgaaatgtacgagacgtttacggggtcggtggccgaatatcgcggcctgaagcagcaggccgtcattgatacgcaggcggggctgtattttggccctggcgcggtgtctgccggcctggcggatgaagtctctgacccccaggcggcgatcaatgctatcgcggcaaagtatcagcaaccccgtcaaaaaacctccattcagatgcaggcagccgcgatggacctgcaaaccaaaatgtaa

SEQ ID NO: 229130 - DNA, 1260 bp, Klebsiella pneumoniae; identical to SEQ ID NO: 200116

SEQ ID NO: 229131 - DNA, 1710 bp, Klebsiella pneumoniae
atggccgcatatccaaacgtcaatgtggcgaacaaatatgcgcgggatatcatagacgggaaaatagtcgcctgcagagctattcggctggcatgtcagcgccattttgacgatttaaaaaaatcactcgataacaattacccttaccggttcgacagagatttagctgagcgggcctgccggtttgttcagaaattaccgcactctagtggcgatttggcggggcagaaattaaaactggaaccttggcaaagttttattttttgttcgatttttggctgggtcacgaaaaaggataaaaaacgccgatttcgcgaagcgtatatccgggtagccaggaaaaacgggaaatcgttttttgctgccgggattggcacctacatgttttgcgctgatggcgaaaacagcgcagaagtgtattgcggtgcgacaactatggcgcaggcgaaaaaggtcttcaccccagccaggcagatggccagccgcctgccggcacttcgctccagatttgatatttcggtatggaccgacagcctgacacgcccggatggttccgttttcgcacctatggcggggaaacccggcgatggtgacagcccacattgcgcgatcattgacgagtatcacgaacacgatacggatcatatgtacgaggccatgacaatggggatgggcgcccgttcgcagccgttaacgctcattatcacgacagccggctcgtcactggagtccccttgctatgacaaggacaaggaagtcaaagaggttatcgaaggcataacccgtaatgatcgcctgtttggcatgatttacgaactggatgctggcgatgactggaccgacccgaaaaacttaatcaaagctaacccaaatctggacgtttcggttaagtacagcgacctggttgagcttctggaagtagcgaaacaggttcctcgcaaggttaacgccttcaaaaccaaacgcctcaatatttgggtatccggtaaatccgcgttctacaacatggagcagtggaaggctgctgaagaccccgaccttgagctggctgattttgcgaatgacagctgcaacatcggtctcgatctcgccaaaaagctggatatgaacgccgggatacggctatttacgcgggaaattgaaggtaaacggcattattactgcatcaaacctaaattttgggtcccggaagacactatccatacaaccgatccaaaactgctgaaaactgctgacaggtatcagaagttttatgaaatgggcgtgctggaagcgacggatggcgcagaggcagactatcgcgagattctggccagtattatcgatatgcaggacgaaaaccgcattgacgagattgatatcgaccctgcaggcgcaacagcacttcgccaccagttggaggacaacggatttaccgtagtcgatatccggcaggattacaccaatatgtcaccggcgatgaaagagcttgaagcggctctggccggtggtcgattccaccatgatggcaatcccattctgacctggtgtatcagcaacgttatcgggaaatttatacccggtagcgatgatctcgttcgcccgacaaagggagacaatcaaagcaaaatcgatggagctacagcgttatttaacgccatgactcgcgcaatgctgcacgaaagcagcggcggcacatcggtatatgatgaggaagacatagcgtgttaa

SEQ ID NO: 229132 - DNA, 423 bp, Klebsiella pneumoniae; identical to SEQ ID NO: 199877

SEQ ID NO: 229133 - DNA, 909 bp, Klebsiella pneumoniae
atgcctgatcgctcaagtaatccgcccaatgcatatcaacaactcaataatcctggcgcagcaatcactcagctgaccagagacattgctgagaacaatgcaaacacgacccagaagagtatttccagcattggtaccctggcctcaggacccgtattagagctatctgatagtgctcaggatgtgctgtatgctctttttttccgaggcgcactcgtatctggtgatattccttcaaaagccggcgcctccgcactgcgttctctgggatttgccgagaccggccatacagccacgccatacaaaggggaagactatttcacctggctgactcctgcggggtatgcgttcgctattgggtatctggttaacactcgcttcggcaaacatcctgcaaatgcagtagcttccgggcagccatcagttcatccggaaggattaagcattaacaaagccatgattaaaggggagatcagtagcgaagcccatgtttgcggcaataccatcgagcaggaaacgctttcatcagtgttagcgcattacctgcccaacacccctctggataaagccagagaccacgctgtgatgctggcctctgcggtcaaagcttcttttgcagaattgaaccactccaccggtggtttcgtaatttcccgcgatggcgccgctcaggttattggcgaaaaaaattctgaaacaataatccctgcgtcggcccttaaaccgagcacagatggaaaggaaaagcggggggcaacctttacgataaatattgaggtggatgccagcaaagccactcaagcgctcgatgagttcagccatgcattcgataagcgcatagcctccgcgttagaaaaaggacttatgccaggcggttcattatggtttgcgattaagagtcaacgttaa

SEQ ID NO: 229134 - DNA, 300 bp, Klebsiella pneumoniae
atgaaaatttatattgctggcccgatgaccgggcgcgagaactttaaccgtgaggcatttaacaaagaagccgaacgactgacccgacacgggcacaccgttttaaacccggcaagcctgcctgatgggctggagcaacgcgaatacatggatatttgttttgccatgctccgttgcgctgatgcgatcctgatgctccccagctggcagacctcctccggtgctacggcggagtatcactatgcctacaaaatggcgcttccggtctataccacggttcactatccgccggtcgcatag

SEQ ID NO: 229135 - DNA, 219 bp, Klebsiella pneumoniae
atgcgcgtaataacccagctgattatctgcgtcgctttggccgggtgcgtgaaatcaacgccaatgacaccaacactgaatccggctccgtgcgcagcggaaaagccggtgattgatgtggttcacgtcgatgggcatttcgtcatcgctgatgacgatatgggaaaactgaccggctacattgccgcactggaagcgggctgcaccgcaccaaaatag

SEQ ID NO: 229136 - DNA, 477 bp, Klebsiella pneumoniae
atgaacagtttaaaacgtatggctaaagcctggttgctgatgaatggtgccttcgtccttctcgtgatggcgacgcaaccagcgatggcaaatgagagccagagtcttggtttggatctggattcaattctgagggcccttcctgctggctgggccagcggcgtaactgccgtatttatcgtgctgtatgcggtggcgcagctgcgcgccgtactccccccgtcagtgaccaaaaggattcccacggtggtcatgaaaattctcgacctcgttgccgcgaactatgcccacgcccggaacgctgatgcgatcagcaaagttgcgcgggatgccgggaaagccaaaggcccatcagatgttgattatcgtgtgatggtggaaacggccaaaaacaatggagagcttcgtggaagccggattgagagtgctggcgattatcctggagatgatcgcccaggcagtaaaagcccgcaatga

SEQ ID NO: 229137 - DNA, 492 bp, Klebsiella pneumoniae
atgaattatggactggtgagcaagcaagacgcgcgcctgtatgccgaagccgtttgcgatgtgatcgggcatggcaaggcgaatgcagctgttttgctgtgtgtcgaaacggccgcagccgagacattgctcggtgattacaaagacccgacgccgaccagcgccggaaccggattaacccaggttgatctcggtaccttcgaatggctccgcgataagtacaaaaacagccgttatgccccggtactgctgaatcagtttggcatcgacctgagccgaacagtttatgcggaactgaggacctcgccgctgatggcgatgctgttttgccgcctgcgctatctggcggtttcagagtcgattccggcgactcgcgaggcccgcgcagcgtactggaaaaaatattacaacacctcggcaggcaaaggcacgccgaaggattacatcgataaatgccagcgcgctggcgttgatgcgctattcacgcagtga

SEQ ID NO: 229138 - DNA, 312 bp, Klebsiella pneumoniae
atgaacacagctatcgaatatggaaatcctgatctctggctggtcttgctcatgctggccgccggggtggtatcaagcgccctgctttccgaaacccctatcaacccgcgccgcctcatcggagacgttctgagaggcgtaatcgtggccatcatcctctgggcttacggcgctatgggcaacatctcaattttgaaagtaatcactctagccggtttatcggctgtggcatggccacacaccgtcaacgaaatcaccggctttgcaaaacgaactatcagccgaattttcggcgggagaaaagaacgatga

SEQ ID NO: 229139 - DNA, 1062 bp, Klebsiella pneumoniae
atgaaaaacactgtgaaaataaacagtgctgaacttgtgcatgcagattcacttgagtacatcaaaaccctgccggacaacagcttagacgccatcatcaccgacccaccgtattaccgcgtaaaggcaaatgcctgggataaccaatggcccagcgtaacggattatttggcctggctggatgagtttttcgccgagttctggcgagtgcttaagccagcagggtcgttatatgtgttctgcgggccgaaattatcatcggacactgagctgttgttacgtgaccgtttcaacgtgctgaaccatatcgtttgggccaaacccagcgggcgctggaatggcgcgcgtaaagaaggtttccgatcttattttccggccagtgagcatattttcttcgcagagcattacggcgcggaaggctttgctaaaggccaggctgggtatgcgacaaagtgccaggagttgaaaggccaggtcttcgaaccgcttatcgcttatttccgggatgctcgccagcaacttggtatttccgctgccgaaatcaacgcggcaaccggcacgaaaatgtgtagccactggtttagcgccagccaatggcaattgcccaatgaacggcagtacctggcgctgcaggcgctgtttaaccgtaaggccgcagagcatggaataacgggattgtcagagccgcatgcggcgctgcaggaggaatacggcactttaacggcgctatattccgaactggttatgcagtattccgaactgcgacagcagtatgagaatttgcggcgccctttccatgtgacaaaagatgttccacacaccaacgtgtggacgtatccaccggttccgtactatccgggtaaacacccatgcgaaaaaccgctgcagatgatgctcgacatcatttcggcttgtacgcgccctggcgatgtgatcgccgacttttttatggggtcgggtgcaacgataaaagccgcgctgcagttaggacgcggagccatcggcgtagagctggaagaggagcgatttttacagacggtctccgagatagaaaaacaataa

SEQ ID NO: 229140 - DNA, 231 bp, Klebsiella pneumoniae; identical to SEQ ID NO: 206989

SEQ ID NO: 229141 - DNA, 222 bp, Klebsiella pneumoniae; identical to SEQ ID NO: 206988

SEQ ID NO: 229142 - DNA, 309 bp, Klebsiella pneumoniae; identical to SEQ ID NO: 180595

SEQ ID NO: 229143 - DNA, 288 bp, Klebsiella pneumoniae
atgaaagtaaaaggcatcccatttaaccaggtcaaagaaagtctgctcaacaccccggaggcaatccggggttaccaggaagcagataaagagctggcactggtcgaaatgctgtacgagatgcgtgaaaaggctgggttaagcaaatctgccctggcggagcggatggggatcacgccatctgctattagccgcctcgaggggaacccgttgggggccagcatgaagacactgagtaaatacgcgcaagcgtgcggcgctgaaattaacatccaggccgtgtactga

SEQ ID NO: 229144 - DNA, 204 bp, Klebsiella pneumoniae
atggaagatacggtcctctcaaattgtgaaaggctggacgctgagctgagtgatatcgatgccgtattagatatggtatcggtggcgatggcatccccggaggccagtttgcatgtggctcaaactatgcgcctcatttgtatgtcacgtcggatgttgcagcggtgccgggatctgaacaaggttaaaggaagaagccactag

SEQ ID NO: 229145 - DNA, 228 bp, Klebsiella pneumoniae; identical to SEQ ID NO: 200097

SEQ ID NO: 229146 - DNA, 366 bp, Klebsiella pneumoniae; identical to SEQ ID NO: 199846

SEQ ID NO: 229147 - DNA, 246 bp, Klebsiella pneumoniae; identical to SEQ ID NO: 180600

SEQ ID NO: 229148 - DNA, 477 bp, Klebsiella pneumoniae; identical to SEQ ID NO: 206981

SEQ ID NO: 229149 - DNA, 135 bp, Klebsiella pneumoniae; identical to SEQ ID NO: 199869

SEQ ID NO: 229150 - DNA, 609 bp, Klebsiella pneumoniae; identical to SEQ ID NO: 199849

SEQ ID NO: 229151 - DNA, 738 bp, Klebsiella pneumoniae; identical to SEQ ID NO: 206978

SEQ ID NO: 229152 - DNA, 609 bp, Klebsiella pneumoniae; identical to SEQ ID NO: 206977

SEQ ID NO: 229153 - DNA, 3975 bp, Klebsiella pneumoniae
atgaccttacaagaattctatgcggctcgcttcggtagcgatccgtattcattgcttgaagcagcgcgggatgagctgtcagagctggccacaatggctggcattaactggacagcatgcgctgataacattcagttgaacccgcgcggcggggaagaacgttattcaaaatataacggtggcgcccccgaggctctggaaaagagcctcaaagggcgtgtggaaatctactcccgcaaggaacaacacaaaagcggcatcagctacccattcgtcaactttgtccagaaagggcatgacgaaggttcctggagcggcttctccttcctgttcgccgaataccgccgtgaacaacaaagaaatcatgcgaccgtggtcgcacaacctgctgaagaactggcgcgtattgaacgccaggctgaagcccgcaagcgccgcgccgaacaacaacggataaatgaacttaaaaacaatcagttagagcaagaacggttgctcggatggttggcgttccacagtgcatgggaacatgcgccagctgaggacgggtcgtggccttacgcagtgaaaaaaggcattcgtgacgtattcagcgcttgcgatattcgtcgcgtgaccagtcacgacaacgcaaaatggagccgtggaccgactacatacatggcgattccgctggcccacctggacggacgcaaagacggacaaattgtcggctggcagcgtatcgaccagcgcggcggtaaattccagaccagcgcgatcaccagcggtgatttcgtcggggcgtgctttgttatcggcaacctgaacggcgcgcaaaatattgcagtggtggaaggtttcgccaccggcgcgtccgtatggctggctacccgtaaggacccgaaaaaaagctttgatgctgtcgtggtcgcagtggccgcaaacaacatgacccatgttgttgagcagctggtgaatatgtacccggcagcaaaaattacctgcgccctggataacgaccgcaaatcatcggctgaaggtaaaggcaacacaggcctgcgcaccggatacgacatcatggagaagttttccggcgtcaaatgtgtttacccaacttttgaggatgaccctgagcaggaatgcagcgattttaacgacctgcacagcttgagagggctgaaggaagtcgctcgccagttaacgagaaataatctgagccgtgcaaccgacctgttgtcgattacgctgaataaactgcgtactctcccgcggctgaacagacgtacttttgccaaagagctgcttcgcgccgtcgatattggcatgctgacatgcccggtaccaaacagcccgaaagaacttatgcgcctgttcagcagcacgctgcgagatatggggatcgcagaaatttataacggtaccgttaaagatcacattacgcgccggttgaatcgcaaatgccgtgccgcgcaaacatcacgttcgttcagtgaacgcatcaccaacccgaaccttcgcccgtcacacatcacttacaaacggtttgaaacctccaggatgactgatgaggttatgacatacgccgcacagctgcagggcatcgttattgtccgcgccgggatgggctctggtaaatcgacaggtctcctgcgtccactgatgctgcagtccacgcgtggcgtttccgtcgcgcaccgcgtatcccttataggcggcctgcatgaaatgatgaccgaagggaaaggcgctaaagccgacattctgcattatcaggatcccggctatcaggaaatggcgccatatgccaacaagctgactatttgcatcaactccatacttaaaggctgctggcaaccgctgatgcgccagcatgacttcttcggcttcgatgaagcaacacagggcctgcgtgccattctggccgggcgtgcgatggaaaacccggtaggcgtattcaacacgcttatcgacgcgctagcgcgtactgaagagcatgccattatggtggatgccgacgccaacgatctgcttgtcgaccttgctgaactggcgatgaagcgacgcgaggagctgggcctacctgcctggctgcaaattcacgtgattgaactcccggtcgacgttcgcaaccgcgaaaccaacaagcctatccgcgtattttataccgagaaaaatcggatcatgaccgaggtcatcgctgcagtgcaacgcggcgaacgaatcatgctggccaccgacagttcgacgttcgccgaagacgttaccatgcagctgagactccatttccctgacaaaaagtttctctgcgttaaccagaaaaacaaacaggagaaggaagtcgacgatttcaccaaccagcctaaagtgatggtgaaaaaatatgacggcctcatctacagcccgtcgatatcttcaggtgtatcgattgaggagaaacacttccaccgccatttcggcatgttctgcggcgaagtggtccccagcgacgccatccagatgctgcgccgcgaccgtacagctcaggaatacatcatcggtttcgacaagcttcgcggtaaacgtgaaaccgatccggaaaaaatcaaacgcgcctacgcgcaggccttgctcgaaacggctggccactccgggctgctgacagacgttgtctttgacggtgaccgaatttcactcggtgtggctaactcttcattcatgcagctcaaaattaaagccgccgcgctcgaggcgtcggccagaaatgattatgccagcaacatgatttgcatcatgcatgatgatggctatcaggtcgcgcctatggctaccgacgcgcttgcaaacagcatcggtaaggatttacgtaaagaagcccgtgagctggtctttgagcagcttatggaacgccacctgagtgtcgatacccctgaccaaggcgaacacgatgagttgataaaaaaacgcaccctgtctctggatgagcaggcccagctggtccgctgggacatcgaaaaggagctgcagctggatgtcgacgaggaggcgttaaaattctatttcgacggcggcctgaaaaaagtgcgtctgtttgaaaccatgcagctggatgagataaccgcgcgtcgccttgaccgcgaggaagcgttgatccactttacctacgcttatcgcgtcgccggtcgctggcagcaatttgtcacaacagctatgacacgagaacaggccgacgaggagttccacgctaaattcccggccataaccgattaccgcgtcaaatctacaccagcggttgaaataggcatgcgtggtttttacactctcaaatcagcaacgctgcgacagtacttccgcgactgtggtattgatccagaaacactgaccggtgaggccgacatggacgccctcaaacgcgccagggataacctgctaaccccggaacggcgcgatctgctgaacaacgttttgcgcataggtggcttcaacacagagaagggcaaaaagaaagcccctgaagaactatgcaaaggcatcctggagtctatggggttatccagtaagaccagacgcgccagagatggtgatgctcgacctacaatgcgttctatcgactcacagtcggtcgagttcctcatgaatattgtggagaagcgccgcgaagcagggttatcaattcacgcccgcaaggtcgaaaaaaccaccatcgaagtggatcgcgatctggatctaaatatagatatacatggtaaccctcgatccaaaacaagccacattccggacaccccgcaatcagtaattattcaagcactggaggctatcccggtgacggtgccggaagcgtgggcggagaacgcgttgccagcaaccgaaatggaggcggtacgcctgtggccagtggccagcatcgcgagaacgttcgcctcgctgtacatgaccgaatttatggacctgctatcagtacgcgagataaggctgctgaaagcttttctgagccagcggcaagccgtggcgatataa

SEQ ID NO: 229154 - DNA, 249 bp, Klebsiella pneumoniae; identical to SEQ ID NO: 199851

SEQ ID NO: 229155 - DNA, 330 bp, Klebsiella pneumoniae
atgacgtcaacacctgagtttttgaacaagctggactacagacagcttcagttctgccgtgatgagtgcgaggccagaatcagggccatagaggaagaagagaaaaaggtagcctgggcggttactgatggccaaattaattatggttggtatcgaacagaggactacctgaaagctgtcgaatgtttagcacgtgaagcagatgagcgctggaaagaagaagataaaagcaatcctgaaccgcgcaattggttgaatttttgtatcagggggcagcggctgccagtgtctgagtatgaagcgttatttgccgatggccagtgggggtga

SEQ ID NO: 229156 - DNA, 339 bp, Klebsiella pneumoniae; identical to SEQ ID NO: 199853

SEQ ID NO: 229157 - DNA, 336 bp, Klebsiella pneumoniae; identical to SEQ ID NO: 199854

SEQ ID NO: 229158 - DNA, 228 bp, Klebsiella pneumoniae; identical to SEQ ID NO: 199855

SEQ ID NO: 229159 - DNA, 165 bp, Klebsiella pneumoniae; identical to SEQ ID NO: 199860

SEQ ID NO: 229160 - DNA, 231 bp, Klebsiella pneumoniae; identical to SEQ ID NO: 199859

SEQ ID NO: 229161 - DNA, 783 bp, Klebsiella pneumoniae; identical to SEQ ID NO: 199856

SEQ ID NO: 229162 - DNA, 1923 bp, Klebsiella pneumoniae
atgcgtaaggtgaagattggtgagctaatcaattcgcttgtgaacgaggttgaggctatcgacgcctcggatcgtccacaaggcgaaaaaacaaagaaaattaaagccgcagctataaaatataagaatgcattatttaatgataaaagaaagtttcgcggaaaaagcttagaaaaaagaatttcggctaatactttcaatgcctatatgagccgggcaaggaaaagatttgatgataaattacatcataactttgaaaaaaacgtaataaaattatccgaaaagtatccattatacaatgaggaattatcctcatggctttctatgcctgcggcatcaattcgacaaaatatgtcagctctgcaagccaagctaaaagaaataatgccattggcagaagatttatcaaatataaaaatcggtgcgaaaaacagcgatgcaaaattagccaaacttgccaataaatatccagaatggcaatttgctattagtgatttaaacagtgatgattggaaagaaaagcgagattatctttataaactcttccagcaaggctcttcgcttctggaagatttaaacaatttgaaagtaaaccatgaggtcctctatcacttgcagcttagctctgcagagcgaacctccatccagcagcgctgggccaacatactcagcgagaaaaagcgcaacgtggttgtgattgactatccgcgctatatgcaggctatctacgatataatcaataaacctatatcttcgtttgatttaaccacccgtcgaggtatggcccctctggcgttcgcgcttgcggcgctatctggtcgacgaatgattgaaatcatgcttcagggtgaattttccgtcgcaggtaaatatacagtaacattcttagggcaagctaaaaaacgctcagaagataaaggtgtatcaagaaaaatatatactctttgcgacgctgatttatttgtgagtctggttaaccaacttcgctcctgccctgctgctgcggattttgatgaagtggttaaagggtatggggaaaatgatactcgctctgaaaatggtcgtattaacgctattctagcgacagcgtttaatccgtgggtaaaaaaattcttaggcgatgaccgccgcgtttataaagatagccgcgctatttacgcccgcattgcctatgaaatgtttttccgcgttgacccacggtggaagaatgtcgatgaggacgttttcttcatggagattctcggtcatgacgatgaaaacacccagctgcactataagcagtttaaactggcaaacttctccagaacctggcgtccacatgttggcgaggaaaatacccggctggcagcgctgcaaaagctggatagcatgatgccagatttcgccaaaggcgacgccggggttcgtattcatgaaaccgtgaagcagctggtggagcaggacccatcgataaagatcacaaacagtaccctgcgaccatttaacttcagtaccaggctgattcctcgctacctggagtttgccgccgatgcattgggccagttcgtcggtgaaaatgggcagtggcaactgaaggacgaggcgcctgcaatagtcctgcctgatgaagaaattcttgagcccatcgacgacgccgatctcgatgacggagaccaggaagatgaaacgctggatgacgatgagatcgaagtagacgaaagcgaaggagaggaactggaggaagtggacgacgctgaagaggccgaggaggctgagcaggaagagaaacatcctgccaagccaaactttaaagcgccgagggataatggcgatggtacctacatggtggagtttgaattcgatggccgtcattacgcctggtctggtgccgccggtaatcgggtagaggcaatgcaatctgcctggagtgcctacttcaagtga

SEQ ID NO: 229163 - DNA, 339 bp, Klebsiella pneumoniae; identical to SEQ ID NO: 199853

SEQ ID NO: 229164 - DNA, 909 bp, Klebsiella pneumoniae; identical to SEQ ID NO: 229133

SEQ ID NO: 229165 - DNA, 396 bp, Klebsiella pneumoniae; identical to SEQ ID NO: 180578

SEQ ID NO: 229166 - DNA, 966 bp, Klebsiella pneumoniae; identical to SEQ ID NO: 199887

SEQ ID NO: 229167 - DNA, 1164 bp, Klebsiella pneumoniae; identical to SEQ ID NO: 199886

SEQ ID NO: 229168 - DNA, 828 bp, Klebsiella pneumoniae
atgaatgagccaatcactgagcagttatacaataaagttgtaaatttcgttaataaaatggatgggagtgtgcgctttgattatatttctaagtccttgcgcattcctcctgacactcttgatgaaattgtggacaggatgattgctgatggagtcgttgttaatacaggaacggtaggtgaatatttaccagtaaaacacgcatcttccaaaaatactgataaagataatcgatgctgtacatctcaaaaaaacaatgatagtagtggactaaaatttattgttgggagagtagcattagttatagccataatattttttattataacctgcttttatgcttacagagcaccgatatcatttgtttttctaatcccagccataatggctgcatttgtttttacaaaccaaaatcatggtggagaaggtttcctagggttgagttcaatctctgcatgtttaatctttttgctccttactaatgcgcagacaccaatatttggagaagcatatgaattaagaaagcagagggatgaaattaaaaatgaagttactaggaaatcaaaggaagaagatcagcaacagctaaatgatatccttaacgccagagagcatataaaagggatgctaaaagacccctcctcagctaaattttctggtgaattcattgggaaaaatggtgctatctgtggccatgtcaacgctaaaaatagttttggtggttacactggggagtctcgttacatattttctgtcaatttttctgcaatagatgaaggcaccacctcctttaataaggagtgggagagacagtgttatcttaattga

SEQ ID NO: 229169 - DNA, 1098 bp, Klebsiella pneumoniae
atgaaaaaactgatcttattgctcatattggcactgtgtcccgtctatagctgggcggcctgcacgggaaccaactatggcgatgtctcgatgaccaacctgccggaaaagatcctggtcaatgccgggagctataccgcagggacggtactgtatgactcggggaagattacgcgctcgcaaacggaattgcttaactgtgaggggagcacctacgcggtttttgcctggtcctcgaacaatgccggggcactgataggggataatatctatgccacctcggtgcaggggatcggtatccgcgtcaaggtgtggctcaatatcagcggtgaatatggcgatgacaccgatgatttcagccccgactcgcaggtgcattatattggtgatgtgaattattacctcggaaagccgacaggtcttttcgactctttcgcgtcgactcattataccccggcgtatcagctgcagctggtggccaccggcggcgccatcgccagcaagagtcaattatcgttcagcgacccggtggccacggtatcggccaaggataaaaaggggaccatcgctatttcacaactgcacatcagcggcaccaccagcatccagctaatcccgatggggtgtattgtcggtagcaataatctcagtttttccatgggcagcatcaatgccagtgagtttaataccgcgacgaaggtgggtagcgcgcggcagtctctgagcctctcctgcgagccgggaactaacgtttcgatgcgtgtggcggctgcttctgcaagcggggataaccctgacaatacggtgatggccctcacggcggaacagaatgccgccactggcgtgggagtgcagttaaatttgaatggcaaagcactgccgttaaataccgatatcagcctctatacttcgagccgcacgacggtgaccaacagcggcgcggacgccagctacagctatttcaccaatcccgacagccccggaggcgcagcggccatgcagacgctcgctttatccactaactattacaggacggggagcgcggtgaccgcggggacagccaacgccaccggggtgatcacctttacttataactga

SEQ ID NO: 229170 - DNA, 690 bp, Klebsiella pneumoniae
atgagatatcctttttttgcgatcggtttattgctgtcttcttccttcgcgcaggccagcgtggtcgttggcggtacgcgtctggtttttgatggtacgaaaaataacgctgtaataacggttgagaataaagatcagaacagcaatatcgttcagtcctggctctcggtggttgatgcagcctcacccgccaaagacgcatttattattacgccgccgctgtttcgtctcaaagccggggagaaaggatttgtccgcgtagttcgatcaggaaagaaattacccgacgatcgcgagtcgatgttttggctcaatattaaagggatcccggcaacagaatatgtacctgataaaaatgtcgtacagtttgcgattaattcgaaaataaaattgatttatcgacccgctgcgttaaaaggtaatacaccggaagcgtacgctgaaaaattacagtgggggaaagaggggacgtcggtgacggtaaaaaataactcaccgctgtatatgaatttctcacaggttagccttaacggtaaaaatatttctggcgcatggtttgctgccccgttttccactttaaaaatacccgtgaagagtagcctgtcggcgacaggaaaaaaagagatcacatggagcgtgattaatgattatggtatgtcagggaagaaatataccgctatcattcagtag

SEQ ID NO: 229171 - DNA, 759 bp, Klebsiella pneumoniae; identical to SEQ ID NO: 212843

SEQ ID NO: 229172 - DNA, 825 bp, Klebsiella pneumoniae
atgattacctcttttgccaacccgcgggtggcccaggcgtttgtcgattatatggcgacgcaggggattatcctgaccatccagcagcatacccagagcgacgtctggctggctgatgagagtcaggccgggcgcgtcagggctgagctggcgcgttttctcgaaaacccggcggacccgcgctatctggcggcgagctggcagtccggacagaccaatagcgggttgcgctatcagcgctttcctttctttgccacgctgcggcataacgccggtccgttcacctgggcgattctgctgatctgcatcgcggtgttcatcctgcaaaatctgctgggcgatcagccggtgatgatttggctggcctggccctacgatccttcgctgcagttcgaagcctggcgctatttcagccatgctttcatgcatttctcgctgatgcatattctcttcaacctgctatggtggtggtatcttggcggcgcggtggaaaagcgcatcggcagcggcaagctggtggtgatcaccgtcatcagcgctctgctaagcggcttcgtgcagcaccagtttagcggcccgtggtttggtggcttgtcgggcgtggtctacgcgctgatgggctacgtctggctgcggggcgagcgcgatccgcagagcggtatttatctgcagcgcgggttgatactcttctctttagtatggttaattgctggctggtttgatgttttcggcatggcgatcgccaacggcgcgcacgtggctggtctggcgaccggcctggcgatggcgtttgttgataccttacatgggcgaaaacgcgcataa

SEQ ID NO: 229173 - DNA, 330 bp, Klebsiella pneumoniae
atggaacagtttgaatgcatcaatgttgaagaagcgcaccagaaactgcatcagcagacggcggtactggtcgatatccgcgatccgcaaagctatgcgatgggtcatacgccgggcgcgtttcatctgaccaacgatacgctgggcgcgtttatgcgtgacaacgactttgacacggcggtgatggtgatgtgctatcacggcaacagcagcaagggcgccgcgcagtatctgctgcagcaggggtttgataaggtctatagcgttgacggcgggttcgacgcctggcatcgccatttcccggcggaagtggcccgcgggacgttttaa

SEQ ID NO: 229174 - DNA, 1509 bp, Klebsiella pneumoniae
gtggaaaccaaagatctgattgtgataggcggaggcatcaacggtgccggtatcgcggcagatgccgccgggcgtggtttatccgtactgatgctggaagcgcgcgatctcgcctgcgccacctccagcgccagttccaaactgatccacggcgggctacgctacctcgaacactatgagttccgtctggtcagcgaagcgctggccgagcgtgaagtgctgttaaaaatggccccgcatatcgccttcccgatgcgctttcgcctaccgcatcgcccgcatctgcgcccggcatggatgatccgtatcggcttgtttatgtacgatcatctgggcaaacgcaccagcctcccgggatccaccgggttgcgttttggcgcagaatcggtacttaaaccggaaattgtgcgcggtttcgaatattccgactgctgggtcgacgatgcccgcctggtgctggccaacgcgcagatggtcgtccgcaaaggcggcgaagtgcgtacccgcacccgcgctatctcggcgaaacgtgagaatggcctgtgggtggtggaagcggaagatattgatagcggtgagaagtttacctggaaggcgcgcggcctggtcaatgccaccggcccatgggtcaaacagttcttcgacgaagggatgcatctgcgctcgccttacggcatccgtctgatcaagggcagccacatcgtggtgccgcgggtgcatacccagaaacaggcttatattctgcagaacgaagataaacgcatagtgtttgttattccgtggatggatgagttctctatcatcggcacgacggacgtcgagtataagggcgatccgaaagcggtggccattgatgataaagagatcaactatctgctgaacgtctataacgcgcactttaaaaagaccctcagccgggacgatatcgtctggacctactccggcgtccgtccgctgtgcgacgacgagtcggattcgccgcaggccattacccgcgactataccctggatattcacgatgagaacggtcaggcgccgctgctgtccgtcttcggcggcaagctgaccacctatcgcaaactggccgagcatgcactggaaaaactgaccccctattacaaagggatcggcccggcatggaccaaaaccgcggtgctccccggcggcgatatcggcggcgaccgcgacgactacgcggcaaaactgcgccgtcgcttcccattcatcagtgaatcactggcccgccattatgcccgcacctacgggagcaacagcgagtggatcctgaaggaagccagcgccctgagcgatctcggggaagatttcggccacgagttttatgaagccgagctgaaatatctggtggagcacgagtgggtgcgcagcctggatgacgccatctggcgtcgtaccaaacagggcatgtggctgactgccgagcagcaggcgcgcatcagcgaatggctggcgcagcatgcgggaaagtctgaactgtcgttagcgtcctga

SEQ ID NO: 229175 - DNA, 3336 bp, Klebsiella pneumoniae
atgcatactgcgcgctatggtttctggggctatcttcttcttattatagggctggcaggaatttgtgccttattgattttcattaatcaggatttgttggcaaggagaggagtatccacccaacaggcgtggtcactatggggagggatatttgcaatcctgttattcgggctggtgtgttcaccattctggtggctcaggaaacaaaagaaagagcagacgatttatcggcctgaagtgccggccaaaaatgaaaagcgactatctgatgatttttacatccttcttaaatcaaaacttcggtcccgctatggcctgctctggcgacataaagtccgcctgctattggtgatgggtgaatcgacgcaggtggaagcgattgcaccaggattaacggcgcagcgctggcaggaaggcgagcacacagtgttaatatacggaggctccgcgtcggcagccccggatacgacacttttgacatccctgaaaagactgcgccatttccgtccgctggacggcattatctggccgctgacggaaaaacaatgttgccagacggcgcaactggataaaggttggcgtgagctggctacctgcggacaattgctcggttttcaggccccgttatatctgtggcaagtttgtgatgacggtggttatcaggctgggcatacgctacaaagcgtcggttgcctgttgcctgaacgctgcgtgccggaacaactggcgtcgctgctggaagcgcggacactgcagttgaccgcacagggagtacagcagttactgaataacgaccaccacgatttcctgttacggcttgcccatcagctcgctgaaggcggtattgttaaatggaagacggcgctaaaaccgctccttgccggtggcgcgttttcttgcctgcaactgcgtggtttgatgttcagccctccgcttacccccgcgccagaggccgcgatccacgcatggttgccatcgccggtatggttgggcgtgactggcgataatgcgcgggggcgcagagtgggttttccgtggtggcgcactatgttagcgatctgcgcctgtgtgctggcggtatgggtggccggaatgatgacctcctttttcgccaaccgtgccctgattcaggaaatcgggatacaggcgacgcgggcgcgcgatatccgcctgccgctttcagaacaactggccgcactgcataccttacagagccaactcgagcgtctgcagtaccgtattcgccacggtgcgccgtggtatcagcgttttggtcttgaacgtaacgcgcacctgctcagcgccgcctttccttgttatgcccaggcagcaaaccggctggtgcgcgatgtcgcagccgcgtatctgcagcaacaaatgaacgcctttatcgccctgccgccgaacagtccgcaacgcaccgcaacgggagaacagcgttataaacagcttaaggcgctgctgatgatgtcccgcccggaaaaatctgacgccgcctttttcagcaccacgctgatggcagagcatctacgctatgcagctgtaccggaaggtacccggcaaagcgtgctgccatcgctgctgaccttctggatggctaatctgccggagcatccacagtggaaaatcgccccgcagccgcaactgaccagcgcggtacgcaaaattctgctgcgccagattggggtgcgcaatgcggaaaacaccctctatcagaacgtcctgaaacaggtctcccgtaactacgccgatattacgctggcagacatgaccggcgacacgctggcagacccgcttttcagtaccgaacagaccgtaccgggaatgtttacccgtcaggcatgggaaggacaggtaaaagaggcaatagaacaagtggtcaccgcccggcgcgaggaaatcgactgggtgctcagtgaccgtcggcaggacgcatccgccgatatctcgcctgaggtgctgcgcgcccgcctgaccacacgctacttcaccgatttcgccggtagctggcaggccttcctcaacagtattcgctggaaaaaagaggactcgctttccggcgtgcttgaccagttaacgctgatggctgatgcccgccagtcgccgctgattgcgctcacggataccgtggcatggcaggcggcaaccggaagggaaagcgcaggcctgtcggattcattggtaaagtcggcaaaagcactgtttaacggcaaggaaaatacgtcgcatgccgtccgtaaagatgaaacaccggcgggaccaatggacaaaacgtttgccccgctgttgcgactgatcggggatacaaccggagggcggggtgatactcagctcagcctgcaaacctggctgacccgcgtcacccgtgtgcgcctcaagctacaacaggtgattaacgcccccgacccgcaggagatgacccagcagctggcgcagaccgtatttcaggggaaaacggtcgatcttaccgatacccgcgattatggccgtctgatagccgccagtctgggtgaagaatggagtggttttggccagtcgttgtttgttagcccggtggagcaggcatggcgacaggtgctgacgcccgcagcggatagccttaaccggcagtggcagcgcgctattgtcaacctctgggagcaggattttgccgggcgctacccgttcaaagacacagcgaatgacgcctcacttcccctgctggcgcagtacctgcgtgacgacgggcggataaatcagtttattgccaccaacctcaccggaatgttgaaacgcgaaggccggtactgggtggctgacaccatgaacacgcagggactggcgatcaacccggcgtttttacgcgccctgaatcgcctgcgcgatgtggccgacacagcctttgccagcggcgatgccggggtacattttgaactgatggcaaaaccggcacgtgacgtgatgaaaacgcatctggtgattgacggccagcaactggaatatttcaaccagaaagaacgctggcagcgtttcagctggccgcatgagcagtggcagcccggcgcatcgctgagctggaccagtacgcagaatatggaacgtattctggccgacttccggggaagctggagttttattcgtctgctggaacaggcgcaggtcacacagctggacagcagcagctttaagctgcagtggcaagcgccggacggtctgccgctgcattacctgatgcgcgtcgagcagggcaaaggcccgttggcgcttctgacgctgaaaaacttccgcctgccagggcagctattcctgacagagaaaggggcggcggacaggagggaatatggagaggatgagtga

SEQ ID NO: 229176 - DNA, 1119 bp, Klebsiella pneumoniae
atgaaaaaatggtttttgcttaatggcccacatcgcctgagaaacggcctgctgctggcgacggtgatatttatcacgggatggctggcattcaaacccggcgcgtatcagtattcattaaatgacagggagaaagtgatggtcacctcattattgcagcaccccgaaacgcggtactttggtttttattccgtggcgcttccggctgaatttacaccagccgggatggtgatgtttatccagggttcagcgatgaccccagtggaaacaaaacggcaatactatcctccgttccggcagtttctgacgcgctatgaagaaaagctcaggaatacgtccgtcgtcgatccgcaggatgcgccttacctgaagggagtttatccactaacctcaccaatgagcggtgtcatttttgagcggatggcggctgagcatactccagatatggcaagagtactggatgcctggaaatgggcagatggcattacgttttcagttaaaatgaaagcaagagacgaacgggctgcccgttatgatgtttattggtatggtaaaagtaaagaagtcactgatacctttcgatataatgtcccgcagaaaaaatcacaattactggctattctgtcagggttgcaaccccgtcaggataatcagcgtccctcaggcaatcagttagctattcagtatgggcaggttgatgcctcactgctcggagagtatgaaacctccgtaagctataaaaacggtaaaaaagtgttcgttgcactaaaaacagataacgacagttataccggtacaccgctgctggataaagacgcccgggtggtggaaacagaacacggaaaaaccctgtacaaaggcaaacgtaaggtcaacggccttgaaatttcagaatggtggattaaaagacttgtagttaatgacgcagacccatcgctaagttatattttttatctcactatccatgaaaataaaattaatggcagcaaaccgcttgatctgaaaatgtcttaccgaattgatttcctaaaccctggagatgtattaaccgagaatgaactggtagctctgtgggagaatataaccgaaacaattaaatatcaccccacccggtggtaa

SEQ ID NO: 229177 - DNA, 1797 bp, Klebsiella pneumoniae
atgtctacgacgatgcatatggatcgtgccgataaaaataaagttggcaccgcggagattgaggatctgcgggtaattccggttatttttctgccaggaataatgggaacgaatcttaaagtaaagcccaaagatgatggtgaagattcgatagccgtgtggcggtatgatagcaaaacctcactgctgggctggacgcttccttcatcaggaccaaaagagagaaaacggctactacatcctgaccgggtgaagattgacaacagagggcttattcccatgtcgccagatgtacagaaacatattgatctggtaatagccacgcaataccccagtaatatcgctgataaagaagaaatggagcgatttacaaaagctttactaaaggctgaggaagaagatcatccagaaaaaaaactctttggctcacgacgcgatcggggttggggcgaggtagccgccccaagctacggcgcttttcttgatgcgctacagactgcactgtaccgggataagccaacgaaaaaagacaatacgctgagtgcgatttatcaaaaattagttgatgaaccactagggctggaatttggcgtggattccctggatgaaacataccttgaagtcatgaaactgtatcagtttccagtacatgtcgtgggctacaactggctgggctccaatatactgtcggcaaaaagacttggcgaagaagtcgataggattattgacaagtatcaaactcagggcatgaagtgcagcaaagtcattctggtgacccattcaatgggggggctagtggcacgatattattcagaatgtctggagggcagagataagatttacggtattgttcacggcgtgatgccgtctgttggcgcggcggcgacctatacccgcatgaagcgcggtactgaaaatacagagtccggtttggctggcgctgtaggatatctcaccagccatatccttggccgcaacgcagcagagatggtagcgattggctctcagtcttccggcgcgctggagttactccctgccaacaattatggtgacgactggcttaaggtcgttgaccgtgacggtagtatattaacgctgcccgcagatcttccggtcggagaggacggtaagaaagaaaactgtctttatagtggcctttatctgaaccgagataaatggtggaagctaatggatgaaaatctgttgaatccgtttaataccacattgaataaaaggcagatcgacagcgactggttggaatatgaaaatctgattaaggataatgtaaaaccattccaggagcagttagctgacaaataccatccgtacacctactcattttatggaaaagcaaaagggggagaattatccgcagcgtatcggactcaggagacggcggtctggagcggggcgctggcaagcggccaaataggtgagacgccgccggcgccaaaaatgaatgacgaacgcctttatttaagtgaagtcagtgccgatcgaacggtgaaagatgaactttccccggaagagcaggcgtgggcattcaagggcgataacaacgtagtatatggctgggtaggacaacgttttacactacgggatgcctgtgaaaatggcgacggtacggtgcctttgcgcgccgggcaaatcgttcatgagaatattcgggagcgtctggcagtacaggttctccatgaagccgcttaccgggatactctcagtcaagcttttgccttacgctctattataaaaattgcccagcaggtcaattacgatgaaaaaatggtttttgcttaa

SEQ ID NO: 229178 - DNA, 2481 bp, Klebsiella pneumoniae
atggatgtacagaacttcgaccactcacaccacgcgttaaaaatccgcggcctgagcagcggcgtggacgtactgtcctttgaaggcaaggagcaattaagcgccccattccgctatgacattcagtttaccagcagcgataagtctattgcgccggagtcggtgctgatgcaggacggggcattcagcctgaccgccccgccggtgcaagggataccgacgcagactcccctgcgtacgttgtacggggtgatcaccggatttaagcaattgtcttcctcacgggacgaggcgcggtatgaggtgcggctggagccccgtctggcgctactgtcccgcagccatcagaacgcgatttatcagaaccagacggtgccgcaaatcgtggagaaaatactccgcgagcggcatgagatgcgcggtcaggactttgtgtttaacctgaaaggcgactacccgtcacgcgagcaggtcatgcagtacgacgaagacgatctgacattcatctcacggttgctgtcggaggtgggtatctggttccggttcagtaccgacgcccgactgaaaatcggggttatcgagttttacgacgaccagagtggctatgagcgcggcctgacgctgccgctgcgtcacccttcggggatgagcgacagcggaaccgaagcagtgtgggatctgaacacggcctacagcgtggtatcgaggtccgtcacgacgcgggattacaactaccgtgaagcgatggcggagatgacaacaggccagtttgacgtaacaggcggggataacaccacctacggtgaagcctatcattacgctgacaattttctgaaaacgggtgacaaagcgacgccggagagtggtgcattctatgcgcgtatccgccacgaacgctacctgaacggacgcgccatcctgaagggacagagcaccagttctctgctgatgccggggctggagataaaggtcgagggtaatgatgcgccagaggtattccgcaagggcattctgataaccgggattaccgccagcgcagcacgagaccgcagttacgaactgacattcaccgccatcccctattccgaacgctacggctaccgccctcctctcatccgcaggcctgtgatggcagggacactcccggcgcgggtgaccagcaccacggcaaatgatgtctacgctcatatcgacaaagacgggcgctatcgagtgaacctggactttgaccgggatacgtggaagccgggtttcgagagcctgtgggtacggcagtcacgcccctatgcgggagatacttacggtctgcacctgccgctgctggcgggaaccgaggttagcatcgcgtttgaggatggcaacccggacaggccatatatcgccggggtgaaacacgactcggcgcacaccgaccatgtgaccatccagaactataagcgcaacgtgctgcgcaccccggcgaataacaaaatccggctggacgatgagcggggtaaggagcacatcaaggtcagcacagagtacggcggaaagagccagctgaacctgggacatctggtggatgctgggaagcagcagcgcggtgagggtttcgaactgcgcaccgatatgtggggtgcgataagagcgaaaaaaggtgtctttatcagcgccgatgcgcaggaaaaggcgcaggggcaggcgctgatgatggatgaagcgttaagccagctccaggaagcgctgtctttagtggaagcactacatagcgccgctgaagtggcaaaatcagagctggcggatttacagacacaaaaaacgctattgtcagaaacactgaccgagctgaaaaaatcagcgctactgctttctgctcccgcggggattgcacaggttacgcccaaaagcctgcaattatcctcaggggaaaacctgattagcaccagtgggaaaaatacggatttcagcgtatttaaaaaattcactgtagctgcgggagaagcagtaagtctgtttgctcaaaagcttggtattaaaattttcgccagcaaaggcaaagtggagattcaggcacaaagcgatgaaatgctcctggatgcatgtaaagatctgcgcataagcagtagcgacggaaaaattcttattagcgcaaaaaatgaaatcatcctaaccagtggtggtggatatattcgaattggaggtggcacggtggaatgtgccgcaccagataaaattatagagcgtggagcggtttggcaaaaattcagtggtcagagtatcagtcaggccatgcaggaatgggattccactgattttgccatcactcctgagatcctctggaagcaaaccggcaaaccggcaaagaatcaaaaggtacgcgttacccgcggcgatggcactaccgttgaaatgacgactgacgatcaagggaaactacctgtgcagagcgggctttttgttgaatcaataaaaattgatctcttagataatcaggaagattaa

SEQ ID NO: 229179 - DNA, 249 bp, Klebsiella pneumoniae
atgtctgcaaaggaacatatttcttcatctgcggctatgtcaacaatgatgggatcagacggtatttatcagtcgttgtttagaaaaatacatctgacggtagctatccatactccactttcctgtctggcgaaatctgcggaggatgtggttatgcatcagccagacgtccagcacgttaagtcacgctggcacggtctcaggtttctcaaatgccaaaagcaaaaacctgaccgggcggtggtgtag

SEQ ID NO: 229180 - DNA, 168 bp, Klebsiella pneumoniae
atggctaaaaaatttctaaacgatgttcccgaaactcgctttaacataaagccgggcctgaaaacaggaagcgccatgaatgtgaagttacctctacatcttctctccgccagggattgtagtgtccaccagacatttattaactatagccccaataattggccttaa

SEQ ID NO: 229181 - DNA, 894 bp, Klebsiella pneumoniae
atgataagtttatcaccaccgactatttgcaacagtgccgaacaaagtaccaaatcactacgtctcggggtttttgccgccattattttggggctcgtaggaaccgggttcggaatctaccagctcgtgaaagagaaggatctggcgcaagagatcgccaacgtgaagtccacggtcaaccaggtgaaagatgccgaaggcgtcaccttcaaaagcaaggcagagtttgaggctgctgtggccgaaagcatcaataagtttgtcgcgcagaaacaacaagccgacatcgatcagaagtatgcccagttcgaggcggcacctgaaaaggtcgaagacggcaaacacatctatggggaccttggtgcccgattcacgctggtggagttctctgatatggagtgccccttctgtaagcaattccacgacacgcccaagcaaattgtggatgccagtaaaggcaatgtgaattggcagtggaagcacatgcctctcgacttccataacccggcagctcacaaggaagcgttggccgctgaatgtattgctgaacagaagggcaaccgtggcttctgggtcttcgtgaatgagattttccatcacagcaaaggcaacggtgccggtgtttctgacttggcctctgttgtcacgggtgttggtgctgatctggatgctttccgtgagtgtctcagctctggcaagcacgaagataaagttcaagctgacatccagaaagccaagagttacggcgttaatggtactccagcaacctttgttgtagacaaccagacaggcaagagtcagctactcggtggtgctcaaccggcacaagccatcatggcggtgatgcgaaaaatgatgattgagtcgcaacaagacgactcagcgaaccaataa

SEQ ID NO: 229182 - DNA, 429 bp, Klebsiella pneumoniae; identical to SEQ ID NO: 199236

SEQ ID NO: 229183 - DNA, 360 bp, Klebsiella pneumoniae; identical to SEQ ID NO: 199237

SEQ ID NO: 229184 - DNA, 447 bp, Klebsiella pneumoniae
atgctaaaacgcggaattatcaatctcgctgctagttacatcattgttgatgccctactccggaatgcagcaatttggatctttggcttgtccttctccattggtggcacttacgtcgctggcgaggccagtacatggggcgtttacctagccacttctggtgcaatgacactctgttctgtcgtaacagcctacctgctcgtgacctatcaccgctgggggctgatgacggccagggtctggctgctattgagtgcctgcctaaacggctatgccgtctatttgagcagccacaacatccagttggtggtggcactgctttccagcctgtttattgctttgtggatgctcaagacccttgagcaaccagcagtgaaggggacgtacaaggtaatcgctgatcttcaccgtcagctatggggaatgttgaagggacaaacacaatga

SEQ ID NO: 229185 - DNA, 519 bp, Klebsiella pneumoniae; identical to SEQ ID NO: 199238

SEQ ID NO: 229186 - DNA, 228 bp, Klebsiella pneumoniae
atgatcattgcaacgaagagcggcttgctggtggccgcagaactaatcaaggaagaggccgggtactggctactacagcctcgtgaccaaaagacgccggtcagagtgaataagcaagatgacaataaacgcgctttcacgcatatgggagacgcccttcgctgggcaggtgatcctgagcttgcaaagcagttcgatgccgagggggaagaacatgcaaattcgtga

SEQ ID NO: 229187 - DNA, 858 bp, Klebsiella pneumoniae
atgcaaattcgtgactacatgacaaagttgtttgaagcatttggtgatgtagaagaagtcacccgagaaatgcttctggagcaggcggagctcattcatacgatcagcgataagtgtcagagcacaggcctgtttctggatagtcaggttcgtttcaaccagttcgttcaagagattgaggctgacgacaatgtagaggatcggttgcttcatgcttggtgctgggtaatggaccgaatagtgaaggcaccaacatcctttcacatggatggggctgtgattttgacaatgcctctggtcgccagatacctgccaccagttgaacgggagccggaaaccatcgtggtgaatctcgatgaggactacaaggctcctgtaggcaaccaaacactctgcgagctcattatggaacggaggcattggccgcaaggtgcaacgtgcgcgacccaagaagcggatggtgaaatcctctactgggacgccccggttcaggtagtagaggaaggcagaaaggccgctggcaagcatggcatgatggctgaaataggattaaagcatcaagtagacttttggttttctgacatggccgaaactcggctcgcaaccgattggaacaccgccgtcatcacacctcactgcttgctactttcctatcttgatgtgctccaaaagaacaaagtgccgtttgatgagggggtgcggctcgctgccgaatgggtaacgcaacttggtggggagtctcgtaaagataccgaggaagagccggaagctgatgctacggtgctttcccttgggcgagccacagctcattgctttaaaccttatccggacacacaaaatttctattacgaggcctaa

SEQ ID NO: 229188 - DNA, 192 bp, Klebsiella pneumoniae; identical to SEQ ID NO: 199239

SEQ ID NO: 229189 - DNA, 528 bp, Klebsiella pneumoniae
atgaggttcggttttgcaaaaaagacggggatttcagcgttcctatcagcaatgctggtgctggctcctcatgtgtgggcagagaccttcactgcaaaggttgtgggggtgtctgatggtgatacggtcaaagtgctaacggaacaaagctgcgataccggaaaagactgccggagtggcaagatccagtaccgagtaaggctcgcggagatcgatactccagagaaaaagcagccatacggctcaaaggcgaagcaggccttatcagatctggtgtttggtcgaatgatcaaagtggagcaaatcgacaaagaccgttatagccgcctggttgccaatctctatgtcgatggcaaatgggtcaatgccgaaatggtccgttctgggagtgcgtgggtgtaccggcagtacgccaaaacaccggagctgttcaagctggagaccgaggccaaagccgataagcgaggtctctgggcattaccggaatcggagagaactcccccttgggagtggcgaagaaagcactaa

SEQ ID NO: 229190 - DNA, 273 bp, Klebsiella pneumoniae
atgaacaaaagcgaactgattatgaaagtggccgaagacgctgatattagcaaagcaaaggccgaagctgcggtaaatgcgctgatcaactcagtgaaagaggtgcttaaagcgggtgggacagtagcgcttactgggtttggtactttccacgttaaggaacgcgcagcgcgaaccggacggaatccccagactggagagaacatccagatcgcggcggccaacattcctgggttcaaagctggtaaggggttgaaagactccgtgaactag

SEQ ID NO: 229191 - DNA, 294 bp, Klebsiella pneumoniae; identical to SEQ ID NO: 199241

SEQ ID NO: 229192 - DNA, 303 bp, Klebsiella pneumoniae; identical to SEQ ID NO: 25011

SEQ ID NO: 229193 - DNA, 351 bp, Klebsiella pneumoniae; identical to SEQ ID NO: 199243

SEQ ID NO: 229194 - DNA, 549 bp, Klebsiella pneumoniae; identical to SEQ ID NO: 199244

SEQ ID NO: 229195 - DNA, 195 bp, Klebsiella pneumoniae; identical to SEQ ID NO: 25008

SEQ ID NO: 229196 - DNA, 372 bp, Klebsiella pneumoniae; identical to SEQ ID NO: 199246

SEQ ID NO: 229197 - DNA, 471 bp, Klebsiella pneumoniae; identical to SEQ ID NO: 199247

SEQ ID NO: 229198 - DNA, 336 bp, Klebsiella pneumoniae; identical to SEQ ID NO: 199248

SEQ ID NO: 229199 - DNA, 489 bp, Klebsiella pneumoniae; identical to SEQ ID NO: 25004

SEQ ID NO: 229200 - DNA, 498 bp, Klebsiella pneumoniae; identical to SEQ ID NO: 25003

SEQ ID NO: 229201 - DNA, 489 bp, Klebsiella pneumoniae
atggaggttctcgaccttgtgactgacaacaagggcatttccgtcatgtcgtcgatgtcaaactcctcggccagcagtgaaatagacgatgcgaagagagctgtgaaagccttcgcaaatgcgctgggggatcatcgtgacattgtgggctcactgcaccactcaatggcaactgagtttatcgatctgggtatggactttgccggtttgaatgatggtttcgactttgggagcgtcttctcgctgttcagcttgtcgtctgccagttcctctctggacaaagtagagtctcgcgttgaatctctgatgccagatctaagacgagccgcctccaattcggcagcagagtatgcccgtgttaacgaagagttctttggcctaaaacaacaggcctgttgccaagtgcatgagttgctggtgacaaatggtatagacgtgtcagtcaagcgcgttgagtccgccgtgaacagctacagagttggaaggtga

SEQ ID NO: 229202 - DNA, 1464 bp, Klebsiella pneumoniae
atgagcgatattacacagcaaatggacaaacttgagattccaatcaagttgtcctttccagtcatcaacgttagcacttttgagctgggccgtgcagagagcgttttctctgacattgcaaagaaagtcggcaagcactttattgtgatgccattcaagaagctgcccgatccaggcacgatgaaggcaatggtggacgagtccaagaagtcctccaaaaacggtgttgtcgtgttcgacactttctttttcgaccgacaacgtgcaaacccggaaacactcccagccctcaagtcatcactgacctatctggagaatgaggggatcaactacatcatcgctggcaaagacgtcttcaatgaagagttcgtttatcacatcgatctcccggctatgagcaatcaggaaatcctgaaactgctccagacctgtgaagataacgtgaaagatggtggagtcttcgagagcaacgaacgtgctgtcatcgcaaaccacgccctgggcttgtcacacacccagatgaagaacgtcttcacctattccgcttacttgaaattcaagggtgaagaatacctgggcgagatccgaaaagaaaaagctcacatcttgcgtgatgtcggcctcgatgtgcttgaggccattgatattgggaatgtcggtgggctcgaaaacctcaaggagtttctccagatacgtaaagccggttgggacaaagaccttccggtaaaaggtgtccttctggccggtgtacctggtggtggtaaatcgctgacggcaaaagccgctgccggtgtacttggcactaccttggttcgcctggatatgggccgtttctatagtaagtatctcggtgaaaccgagcgccagttcaatcgtgcattgcagaccattgagcagatcgcacccgttgttgtgttgattgacgagatggagaagttttttggtaatgccgatggcgaacacgaagtatccaagcgcctgctgggctctttcctctactggcttcaagagcgcaagaagaagatcttcattgtggcgacggccaaccgggttcagtcgctgcctcctgaattgatgcgagctggccgctgggaccgagcattcttcattgatctgccaagtgtggctgagcgccagaagattttcgagatccacctcgccaagcagaaggccaacatcgccgcgttcgatatgcctacgctactgcgtaccaccgagggatacaccggggcagagattgaacaggccgtcattgacgcgatgtatctggcgaacgctcaggacaaagagctcaacaatgaagcgctggtggatgcggtcactcgcattaccccgaccagtgaaactcgccgagaagacatcaaccagattcgcagtttgcgggatcaaggcttctatccggccaataacttcgatgttcaagagcagaatggctctggacgaaaactcgccatcgaggactaa

SEQ ID NO: 229203 - DNA, 393 bp, Klebsiella pneumoniae
atgagccatatcgtaaaaggcaaggtgcaggtcgcctacaaagacaaagagctgctgttgaaggctctggagggagttggcgtcgttgttgaaaacgaaaagctataccgcgtgggcgctggctacaccttcgagaaatacccgattgttctgatcgaccagaacaacaaggagcaccggattggctacaaggaaaaaaacggtgtttgggagcagtaccaggaaaactacggctcttatggccgctggacgcagcaggcaagcagcaaggtgcaggatcgctacattgccttccactacgagcagcagttgaaagaggaaggtttcagcgtgacggtgaagcagcatcacgatggcactttggaactggaagctgaggaagctgtttggtaa

SEQ ID NO: 229204 - DNA, 195 bp, Klebsiella pneumoniae
gtgaaaaaggtaaacatcaagatcaagggcggcaagattgctgccgatttcacggggtttcagggtaagacctgtgaagcgctggagcagcgtattcgcccggaagagctcgaagtcgaagaaaaagagctgaaacccgagtaccacttcaatgctggtcaaacccagcacgaaacggaacagaacgaatggtga

SEQ ID NO: 229205 - DNA, 1185 bp, Klebsiella pneumoniae; identical to SEQ ID NO: 199252

SEQ ID NO: 229206 - DNA, 348 bp, Klebsiella pneumoniae
atgagcaaaaagcgcatcgtaatcaaaaatggtgaggtctgcgggtttgccgatgaggtttccttcaaaggccttgaagtgcaggaatacagtaaaacaagggtttcgcgcatcgtgccgacgagcggcattctaatgattgcgttctatgttattcgcggactttgttcagacgagtcaaagattgcggcatggactcgtgtttggcgttgccagtggaaggtgctgatcgacggtaaaagctatggaccattcagcagtcgtgcggatgctatctcgttcgagaaggacgagatctacaaacaaggcaaattctttgccgatgccactcacgaggcggcagtatga

SEQ ID NO: 229207 - DNA, 429 bp, Klebsiella pneumoniae; identical to SEQ ID NO: 199253

SEQ ID NO: 229208 - DNA, 564 bp, Klebsiella pneumoniae; identical to SEQ ID NO: 199254

SEQ ID NO: 229209 - DNA, 570 bp, Klebsiella pneumoniae; identical to SEQ ID NO: 199255

SEQ ID NO: 229210 - DNA, 546 bp, Klebsiella pneumoniae
atggaacaaatcagaaaaggcttaaccctcgaatacgcaaaagagaagcgtgagaagctcttggcggagctcaaatcagatgaacactacagccagactgaaacagtagcctatgggcaccacgacccgctcagcgttcctgtggcagcctgcgatagttgtcatggccgggcgcaaatgcagaaggttataggtcctcctgtgcgctggaatatggtctgcctgggttgtgggaaggcgatccaacaaatccagaaacgaccgtggcaagcagcaatggcgtggaaccaaattaacttgggaacacaggactacagacaactgcccctctttggacttgggagtctgtctcctgaatcagcaagacagagaatggtgggaatacgcaggaacctggagctgagaaagagcctcgccggtatcgagaggacgatagcccacaaggaaggtcaacgcccaccagggaaagagtaccagcaacgactggaagcatatctgcaatgggccatgctggcgctgaggttgctcaaagtcaaagcaagttag

SEQ ID NO: 229211 - DNA, 939 bp, Klebsiella pneumoniae
atggctgttatcaactcactccgcgctctcaaaggcgtaaccgcccccgaagaactgaaaaaaggggatggattcactatctctcctcagcttctgctggaggaagaagggtttaacacccgtggcgctttctgcgaggactactacgagcgcccggacatcaaagctggtattcgagtgctggccgatgcttacaagcgtggcgactatgttccgccgatcatcgtcaaagttatcgacggaaaggtgtatgtccgtgaaggtcatcgccgtcgccgcgccatcctgcttgctatagaggaaggtgccgacatccagttcgtgcaggtcgtagagcacaagggcgatgaagccgaacagagccttctgatcgccaccagcaacgatgggctccctctttctccacttgagcgagccgtgatctacgctcggcttgcaaactgggggtggagcgaccagatgattgcccaacgtgttggccgctcggctgagcacgttcgtatcgcccgtgcccttttggagatgcctctggaactgaaacggatgattcaggaaggctctgtggctgccacctacgctcaggagctctacaacgagcacggcaccaacgctgttgagatcctgaaaaaggcgcaggaagaacaggccagtggcaatgacggcaagaaggccccgaaaaaactgaccaaaaagtctgtcgagaaaggtccccgcctgggcaaaaaggtggttgaagccatgcaccgaggcgtgagctctattaccagtcgtctggacaacatcaagccgaacgatgacggtgaaacgttcacccttaccctgagccgggaagatgttgatgcgtttcaggagctgaaagccaagctggcggagctggagcccaaaactgacgagtccaatgaagaccagcaagagctggatttggcgggtaatcagtaa

SEQ ID NO: 229212 - DNA, 249 bp, Klebsiella pneumoniae; identical to SEQ ID NO: 199257

SEQ ID NO: 229213 - DNA, 243 bp, Klebsiella pneumoniae; identical to SEQ ID NO: 199258

SEQ ID NO: 229214 - DNA, 243 bp, Klebsiella pneumoniae
atgtcatccacattggttaaagaaaagtttggcctagaccttggtgcaatgtgccgttatgacaaaccccagcatgtcgagttcaaagtccttcctgatcagacaatccagttccgctgctcatggtttgaaggtggcggattaacctggtggcctttctacaccgagcatgatgtaaagagcgccgaggcgacctctgtgctcaatgacatattccagggtacggaggggcatgatgagtag

SEQ ID NO: 229215 - DNA, 1245 bp, Klebsiella pneumoniae; identical to SEQ ID NO: 199260

SEQ ID NO: 229216 - DNA, 450 bp, Klebsiella pneumoniae; identical to SEQ ID NO: 199261

SEQ ID NO: 229217 - DNA, 312 bp, Klebsiella pneumoniae
atggacactcaagaactgaaccacatgatagctgaggcctacagccgggatttgcaaaagcctgagctggtatcgttcaaagaggtgagtcgctgggggcgtaagtacggtttccccgtcgtatgcactctggccgatgaaagtgaagaaaagcagattcactgggctgccagtttgctcattcaagtagccggtacttggccgcgagaagatatgccggaattgctcacaccggaacggggctccgcgctgttcaacgatgcgatgcagttattggcgaatgggcttggagcagcaaatcaattgcgctga

SEQ ID NO: 229218 - DNA, 786 bp, Klebsiella pneumoniae
atggcaaaagtaatcagcttcgccaaccagaaaggcggagtgggtaagagtaccctctgtatccagcaggccttttatctggcgttacagaagaaaaagaaagtgctggtcttggatatggatggtcaggggaacacgtcctctcgactggcccccagacgagagcttgaggatggtgactacgagcccatcctcactggaaccaaaaccgcagagctgttcgcttacgagctggacggcattgaggtcatgcactgcccttgcggtgcagacctcattcatacgccgaagaatgacccggatctgtttgagatggaggctgtgcctcttgaccaagccatgaatccggctcgccatttggctgagctgtttgagaactacgactacgtgctgattgattgtccgcctagcctcggcagaaagctggtggcagcgttggtgatgtctacccatgtggcatgtccggtaaagctctctggcttcgctgtggacggcgtagaaggtctcctgaacacgattattggtgtgcgcgaggcatacaaccaaaatttggagatcctgggcatcgtgatcaacgacatggaccgctctgtcaatcacgacaaagccctcaagtcgctggagaacacagttccggatctgctgtttgagaacaaaattatgcaccggcctccgctcgatacggcgacgactgatggcatccctgtctgggagcttcgctatggacatgtcgcggccaaagaggttgaggcggtgttggaagaactattagagaaggtgggctaa

SEQ ID NO: 229219 - DNA, 1182 bp, Klebsiella pneumoniae
atggcattgaacaatttaaaaggcctgtccgaacttgctaaagccgccaaaggcaagaaaggcaaagaggttcttaccgtacctgttgacgacgttgtatccaaggtccaggttcgtaagcgcttccgtaacattgaagagctggcggcaaccttgctgaccgaagggcagcaatctccgatcatcgtgttcccgaagaatgaagaaggcaagttcgtcatccaaaaaggggagcggcgttggagagcgtgtaaacacgctggtatcgagaccattgacctggtggtgaatgataaggtccagaacaatttggacgagactgctggtgagctgatcgaaaacatccagcgggatgacttgactccggtagagattgccgaggcgttaaacctgtttattgaagaaggttggaagcaaaaggatattgctgatcggctcggtaagaatatcactttcgtatctacgcatctgtcgttgctcaagctacctgactgtgtgcgtgagttatacgataatgaagtatgttctgatacagagaccttgaataaccttcgtctcttgttcgatctgaatgaagaaagatgtcgcgccgtctgcgcggtggctatgtctgacgggattactcgtaaacaaagccgtgagctgctgaatgatgccaaacgtatcaaagacgaaatggaaaaaggcccactgactggctcccaccagaatgatgagcttggcgctggcaacaccgacgagcaatccctcaactcgggtggggatggtacgtcggaacaaaccgggaatgacgacctgaaccttgcccaggaggaactggaagggggtaaaaattccaatggtcaggacgatgatgacgaagaccctttgcgtgatgaagagggtgagcacaaagatcctgtcaagcagccagataacagcggcaaggacaaagatgaagaaggcggtgatgctcttcctcctctgccgaaggacaaggaatggaagaacgtccgggctgacagtttgatttttgctgtcaacgttaacctggatggcgagaccaaacgtggagtcatcatgaccgaccgtgttgctctggttccgtctactgtctgggttaaaacgctcgatggcgaaggcaaggaaaagcatgttcatgtgcctgtgtcagacattgaactcctgagtgtcgaaggctaa

SEQ ID NO: 229220 - DNA, 273 bp, Klebsiella pneumoniae; identical to SEQ ID NO: 25136

SEQ ID NO: 229221 - DNA, 636 bp, Klebsiella pneumoniae; identical to SEQ ID NO: 25135

SEQ ID NO: 229222 - DNA, 144 bp, Klebsiella pneumoniae; identical to SEQ ID NO: 25134

SEQ ID NO: 229223 - DNA, 282 bp, Klebsiella pneumoniae; identical to SEQ ID NO: 25132

SEQ ID NO: 229224 - DNA, 675 bp, Klebsiella pneumoniae; identical to SEQ ID NO: 25131

SEQ ID NO: 229225 - DNA, 507 bp, Klebsiella pneumoniae; identical to SEQ ID NO: 25130

SEQ ID NO: 229226 - DNA, 312 bp, Klebsiella pneumoniae; identical to SEQ ID NO: 49818

SEQ ID NO: 229227 - DNA, 501 bp, Klebsiella pneumoniae; identical to SEQ ID NO: 25128

SEQ ID NO: 229228 - DNA, 1428 bp, Klebsiella pneumoniae; identical to SEQ ID NO: 25127

SEQ ID NO: 229229 - DNA, 657 bp, Klebsiella pneumoniae; identical to SEQ ID NO: 25126

SEQ ID NO: 229230 - DNA, 618 bp, Klebsiella pneumoniae; identical to SEQ ID NO: 25125

SEQ ID NO: 229231 - DNA, 489 bp, Klebsiella pneumoniae; identical to SEQ ID NO: 25123

SEQ ID NO: 229232 - DNA, 2193 bp, Klebsiella pneumoniae; identical to SEQ ID NO: 25122

SEQ ID NO: 229233 - DNA, 618 bp, Klebsiella pneumoniae; identical to SEQ ID NO: 25121

SEQ ID NO: 229234 - DNA, 2079 bp, Klebsiella pneumoniae
atgctgaaagcccttaacaagttatttggtgggcgaagtggagtgatcgagaccgcgccgagcgtcagagtgttgccgcttaaagacgtggaagatgaagaaatccctcgatacccaccttttgccaagggcctgccagtggccccactagacaagatactggcaacccaagctgaactgattgagaaagtgcggaactctctcggtttcactgtggacgacttcaaccggcttgttttgccggtgatccagcggtatgccgcgtttgttcacctgttgccagcttccgaatcacaccaccaccgtggcgctggtggtctgttccgacatgggcttgaagtggccttctgggcagctcaggcatctgagtcagttatcttttccatcgaggggacgcctcgtgaacgccgtgacaatgagccgcgttggagactggcgagctgtttctccgggctgctgcatgatgtgggtaaaccgctctcggatgtgtccattacggacaaagacgggtcaatcacatggaacccgtattcggagtcacttcatgactgggcacaccgtcacgaaatcgaccgttactttatccggtggcgcgacaagcgacacaaaagacatgagcaattctcgctgctggcggtggatcgaattattccggctgagactcgggagtttctgtccaagtctggcccgtccatcatggaagcgatgctggaagctatctcaggaaccagcgtcaatcagcctgtgaccaagctgatgcttcgcgctgaccaagagagcgtctcacgggaccttcgccagagtcgtctcgatgtggacgagttctcctatggtgtgcctgtcgagcggtacgtgttcgatgccatccgccgcctggttaaaaccggaaaatggaaggtcaatgagccaggcgcgaaagtctggcacctcaaccaaggtgtattcattgcctggaaacagcttggggacctttatgacttgatcagccacgacaagatccccggtattccacgagaccctgacacactggccgacattctcatcgaacgtggttttgctgtaccaaacacggtgcaggagaagggtgaacgtgcgtactaccgctactgggaagttttgcctgagatgctccaggaggcggcgggatcggtgaagatcttgatgctccgactcgaatcaaacgacctggtgtttacgactgagcctcctgcggctgttgctgcggaagttgttggtgatgttgaggacgctgagattgagttcgttgatcctgaggaagtcgatgacgaccaagaggaagatgtgtcagctctgaacgatgacatgttggccgcagagcaggaagcagagaaagctctagctggtcttggctttggtgatgcgatggagatgctgaaaagcacctcagatgctgtcgaggagaaaccagagcaaaaagatgctggatcaacggaatcatctaagcctgacgctggcaagaagggtaagccgcagagcaaaccgggcaaagcaaaaccgaagagtgatacagagaaacaaccccacaaaccagaggcaaaagaggatttgtcccctcaggacattgccaaaaacgcaccacctttggcaaacgacaatccgttacaagcactcaaggatgttgggggtggactgggggacatcgactttccgtttgacgcattcagcgcatcggcagagacagccagcactgacgcaacaaactcagaaatcccagatgtggcaatgcccggaaagcaagagaagcagccaaaacaggacttcgttccacaagaacaaaactccctgcagggcgatgactttccaatgttcggtagttctgatgaaccgccatcatgggcgattgagccgctccctatgctgactgacgcaccagaacaaacaacaccagcgccagcaatgccacctacggacaaacctaatctgcatgagaaagacgcaaagaccttactcgttgagatgttagccgggtacggagaagcatcggcgttgcttgaacaagcgatcatgcctgttttggaaggtaaaacgacgctgggcgaagggcactgttgcaaatag

SEQ ID NO: 229235 - DNA, 330 bp, Klebsiella pneumoniae
atgaaaaaattagctttagtgttgatgttaacggtttcttttggcgctgcttcagccactacaatttccatcccgaccgattcgaaagccaaatacaccatcatagataaaagcttaaatggctccatggcgaccatcacgaccatgagagaggggccgtcagggacatcttactcacagcgcctgtatgactgcacatcgtggacagttaagtatcttggtgatggtgatacgctggaacagatgaaagcatccaagcctgacgaaggcatgtcaccaatagttgataattcaattgcgtattatataggccaacgggcctgtaaataa

SEQ ID NO: 229236 - DNA, 459 bp, Klebsiella pneumoniae
atgagccttgatggattctctcgagataaagtcgaatggttcaggtcgtgggtgctaaaaaagaactttttagaagtggtagatcttcattttcaactatctgaggctgtaaaaaagcactaccgactgcgcgcagatcagaaacatttgtctattgcaattagcgcttgtgaatacatgatttgcatttctgatattgccatggatgcgttgatagccaaggcgctttatcaaatttatgaatatgagcaagtggtaggcgattatccataccctaaaaccttttaccggcctagtcaccatggttactatcaactcggcgtcttgcttcgaaagtgtaagaatattaagcgtgaagaacaattgaaccgaaagatgcgtgaagaaggttggggaggcggggaaattgaactatcccaactgacaggaagtaagtttatgggttttaaaatagggtaa

SEQ ID NO: 229237 - DNA, 198 bp, Klebsiella pneumoniae
atgaaagcaacagtacgccgctacttacgcgctgccggaagcattcttgatatcgctccgtcaaccgattacgtcaaaatcgccaaaagagccattggcaccgatccattgcgtagtgatttcagacgcattggcggagattttggacgcgcaattacattagcaaatgcagcaaaagccgaagccgcaaagcaataa

SEQ ID NO: 229238 - DNA, 765 bp, Klebsiella pneumoniae
atgcaaggctgcgctaatgacaccggcaagctgattggtaaggtggccgtgctccgcatggcttttggctgtgctgatacggttcctgcgctttccgaatggaagcgactcggcgccatgaccaccaagggcttcgactattccatgaataccgtcacctctgaggctgacgatacgaaaggtctggttgagaacttggtcaacaacatggacttcaccatctcaggagaaggtgagttccgcaagaaagacaagacgacggaaatcggcgctattgccatctcgaaatatattttcgatgaagtgcaggccggccgtcagccgacagtctgggtccgcttcgacttcactggtgaagacgctggcacttatatcatgggctactttaacaccacctcctggtctggtgatttcggcacctcggatatttccaccttctccggagagtggaaagtagctgatgcagacaccgtggtatttgaggtcgctccgccggcgctggcgtttaccaccaacctgccgacgaccaagagcgtggcggccggatcggctctgaatatgtcggtcgtggttgagggtggcactgcgccttatacctacgtctggaagaaagatggcacggttgtcagcggtcaaacaacagcgaccttcaacaaggccagcgctgtttctggtgatgccggggtttatacctgtgaagtcaccgactcttccgcgactccagtcacgatcacttctgcatcctgcgcggtcactatcagttaa

SEQ ID NO: 229239 - DNA, 516 bp, Klebsiella pneumoniae
atggcactcaccgacaaacaagaaatgttctgtcgcgagtacctcatcgatttaaacgccacgcaagcggctattcgggcggggtacagcgctaggacagctaaccgcactgcgtccgaaaacctgtcaaaacctgacatccagtccagaattgccgaacttaaagcgcaacgcaatgatctggttggcataaatgcgacatacgtcctgaatcgtctggttgagatagaccagatggacgtgctcgacatcctgacctcgactggagagctaaaaccagtaactcaatggccgaaggtctggaggacgacgctctccgggctggatgtcatcgagatggcagcggagggaaacactaccgcgctgcttaagaagattaagtggcctgataaggtgaagaacctggagctgattggtaagcatatcgacgtccaggcgtttcgcgagcaagtgaaaacagagcacgtcgttgaatcaatttctgaactgatggattccttgtctcagggggcgtga

SEQ ID NO: 229240 - DNA, 249 bp, Klebsiella pneumoniae
atggaagacttaaatgcaaggcttgaagaacttgaagataaagttttggacctcaacgtatccatggtcgcacacaaatcaatgataaaggcattgcttcagtttattgagttgaagcatggcgccactgtcaaaaacgcaattagcaaagggcttttagaagctatagaagacaatacgattcaaggtgatacaccagaggcaataagctcgcagctgctaaccgagaaacttcgggaatttgtttaa

SEQ ID NO: 229241 - DNA, 198 bp, Klebsiella pneumoniae
atgtccgaaatctaccaaatcacgctaaccacccaagcaggcgaaaccttcacgggcaagatgtcacgacgtcagcctgagctggttaatggcttcgtgccgctggcgacggagacgggacagtggctgtatttcgctcctgccgatgtaaagcgcgtgcagttcacgccagtaccggcagagcagactgaacaatga

SEQ ID NO: 229242 - DNA, 378 bp, Klebsiella pneumoniae
atgactcgcctaaccgccatcgtcagcgctgtgattatctcccttattgcctcaatggcatgggctattcaccattaccgcgacaacgccgtcaccttcaaagagcagcgtgataaagcaacggtcagggcggaaaccgccgagaccgtaagcaatagcgtagtcactgcaatgaacctcatcaatgacatttcccgggcaacccagaatgcaaagaccgaactttcccaggcaggtgagaagcgcgttatctacatcaggcaggcgcttgaaggcgatcagtgtgctaagcagcttgttcctgctgccgctgctgacagcttgcgggaatacgcggacggtttacgtgccggcgccggtggtcccgataagcgctga

SEQ ID NO: 229243 - DNA, 597 bp, Klebsiella pneumoniae
atggcgcaaacactgcaatttgagaagagttatcaaaacgtactgattcccgcagagccgggaaccagcgaatacctgcaacttatccccgtagggcaactgctttgcggtgagttccgcaagccccggaattacgcattccacaagaagttcttcaagcttctgactctcgggtatcactactggaccccttccggtggtctcattgagtccgcggagcgtaccctcatatccgggtttatcgacttcctttcatccgacttcgatcagcgcgctgcgctccagaacgccgcggagatgtatctctcctctgtcggtatctcccgttcccgcgatatggcgctgctgaaacacttcgaatccttccgcgagtgggcaaccattcaggctggcttttacgacgaataccagatgcctgacggcagccgtcgccgcgtcgcaaagtcgatctccttcgccagcatggacgacatccagttcaacggcgtctacaaatcagtgctgaatgtgctctggaactacattctgcgtcgcaagttccactcgccagctgaggctgaaaatgccgccagtcagctgctgagctttgcggggtga

SEQ ID NO: 229244 - DNA, 294 bp, Klebsiella pneumoniae
atgtggagaggaaccgatcgcaccagaagccagatgatactgaccgagtatcgctacgaccctaaagccaaagactccaaatccgtttacctggtgcggcataacagccgcattcatcagactgttctggagcagcatttgacgatagagcgcgatagcttcggtcgtttcaatccgactatcacgctgagcgacttcccggaaggccttagcgaccgcgagtcgatgctcaagcttgccgactggctgcaccgtttaggtgtggctatcgaggataactggagtcaaccatga

SEQ ID NO: 229245 - DNA, 363 bp, Klebsiella pneumoniae
atggcactgaccaaaaaacagcgcgcagagctgcgcatgaagtttggcgggcgctgcgcttactgtggctgcgagcttagcgacaaatggcacgctgaccacgttcagcctgttatccgattcgatgggcaaatgcttcatcaggagcgagacgacatcaacaacatggttcctgcatgtcatccatgcaatctgcacaagcactgcaatagcctggatgactatcgccgagttatcgacgatgggcgcagagagttcctggtctccggaaaaggaaaggcgctggttcgcatgggactggttgaaatgaaacctgacccggtagtgttctggttcgaaaagtatcaaagggagactgagtga

SEQ ID NO: 229246 - DNA, 423 bp, Klebsiella pneumoniae
atgactatcacactacaggcagtaaacgagctcatcgcctccctggagagcgcaggcgagctgtcgatcaaagagacaaaggttatggcgttagcgaaagcgtaccagcacctggcggcggagaatgtggctattcgtgaacagtctgaggaagtttacgcagcaggttacaaccacgggcacctgaacactgttgacggtatcgcatacgctggttgcgtaaaagacgacttctacagcttggctctccaggtaatggctgaagtcgaaacccccgccaccgatcgcatcgtggccgaagccgaggcgcgcggagttgagaaggccattgctcacctggagaagaagttcagcaatatcggagttcagattatgaatctgcaatggctggcagactcgctgcgcaagggagcatcagaatga

SEQ ID NO: 229247 - DNA, 255 bp, Klebsiella pneumoniae
atgaaccacatcgaattcattgagaagaacgtccgcgaagagctgatgcgccagggattcacccaggcagtggctcaggggggggcataccaggcggtcgatatgtacaagcgcatgtcgcaggccagtcgcaaggggaggatttttgacgatgtgttacgccacgcaaagttgtgggctgagaagcagacattaccgtctgacaagttcgaaaagaaaagggcaaagcctgttaagcagcaaggtctgttctga

SEQ ID NO: 229248 - DNA, 783 bp, Klebsiella pneumoniae
atgaaaaataccttttccctgctaatttgcctatgtacttttatatttgttcatccagcttatgcagttcccttcccctctctcacgggatctgtcactgataccacagggctactaacgggaaaaaaagatatcatcgatcgcgctgaacgctttcaacagaatacggggatcacagtttacattttgttcacccatcaggaaaatattatcccggcaaataattctgaacttcaggcagtcgctcatcccatcactgatatggatcacaacagtatactgctgatcgtcactgctgatagccagcagatatatctgctcagctcctctgcgctccagcctcgcctcaaagccagccgcgccttaaccatcatcgtaaatcacaccagcgcttacctacagcatggcctgtggttccagggaatcaacactgcgctggacgtattacaagcggcattactacaacagcccacgccatcgctaacctggtatgcatcatcggaaaatccccatcaggatgatttcccaggccatcctctgggctttctcctctggatcttggtgtttatgtgctgcacctggatattccgttacaccacccgcctgcgttatgccctgaaatttgcgttcgccatggcctgcggcaacttatgttatcaggcattgtgcctgtactttggctcaggcgtccacactttaaaccgagtcgctccgctgtgggccacaatcatcggagttagcacatttctggccaccttactgtggacgcgaaagcgaagataa

SEQ ID NO: 229249 - DNA, 462 bp, Klebsiella pneumoniae
atgaaaaaaaatgatcgcacgctttattatatctttctcagccttggcttggtcatgatatttatttctgccgttatttattattaccaacgccattcaataggcaacgtaatacataccactggcattatcgtcgatacccagcagcgtaaacccaacccatatcgacgcaatagcgtatcccgtaatgctaagtcatggttccccgtcgttgctttccgcccttccaacgaggttactctcatttttacgtcaaaaaccagcagttcgttgtatgaaaaaagtgaaggcactacggttgacgtgatttatccaccaggaaaaccgtacgaagctaaaatatacaatatatggattaatttttttaagtggggcatcatcggtattattggactcgccttttcaggagccagtttgcttatccgtccatcctccgcaaaaggacagaggattgtgcaatga

SEQ ID NO: 229250 - DNA, 522 bp, Klebsiella pneumoniae
atgattgatatcaccgaactgacaggcgtcaccaagcacgcaaatcagcatcgtctctcaagattaatcatcgaagcacctaacgatgaattgcgccaattggctgttgaagttgagcaatacactgatcaactcattgaggcgctggagaaggcgcagcagcgtaacgccaagctggagtcttctggtgccgctcccggcatattgcgctgcactgagtgctcgttcgttcagacgaaaaacatcatcagcgttacagcagacacaattacaactgtcgaaatcgaaccggagccatgcccaaatggttgtgggcagcttcagcccgtcacctggaaagcgctggccatccaactcatgttcactactaaacagggtctttcggatttgctggaagctaagaagcgcatcgaggaactcgaatctgatctgtctgaatggacagactgcaagcacgatggtgctacctactacgacatgagcggccaagagcgctgcggaagatgtggggcggatatatga

SEQ ID NO: 229251 - DNA, 201 bp, Klebsiella pneumoniae
atggcacatatgaaagttaaagaactggtcgctgcagcttacgctgccgcacccgatattccaccggaaaaagcagagttaatgcgcaatatcgcttcacggctggatgtaacgttcatcgcccttaccgaagcaatggaccaaaacacagcgcaggctgcagtgctggcaggcccgaatggggttaaaaaccatggctaa

SEQ ID NO: 229252 - DNA, 528 bp, Klebsiella pneumoniae
atgagatttatacaaaccatttcaggcaaacattttaattatctcgatatccagcaagacgcgatcgagatcgaggatattgccaccgccctctcgcatatctgccgatttgctggccacctgccagagttctacagcgttggacagcacagcgttttatccagccggctcgtaccacaggagttcgcacttgaggcacttctccacgatgctgccgaggcttacctgcaggatattccggctccgcttaagcacctcttacctgactatcgcgcaatggagattcgggttgatgctgcaatacgtcagaaattcggcctgccggctgagcagcacccgaccgttaaatatgccgacctggtgatgttggccagcgaacgtcgcgactttgagatcgacgacggcactgtctggcccatgctcgaaggcattattccgacggatcaattcgttattaatccggttcgcccaggccaggcctatgggatgttcatgaaccgcttccaccagttgatggagcggcgctaa

SEQ ID NO: 229253 - DNA, 828 bp, Klebsiella pneumoniae
atgtcacaattaaacggcaatgctatcgagaaaattcaggaactgactcttgccgcggtccacactcaggagctgaaagttacccattgtcctacggttatgttgccatctgggtacggtattgaaagccttgagcgctttaacctcagccgcttccgcttccgtggtgccctggaaacaaccagcattaccgatttcgttcgttattcagttggctatgccgttactgataccccagcccgttgtttcatcgacgcagagagtatgtcagcccgtgctgtgtttaacatcggttccttggacgaacccggacatgcagacaacgtagcgtctatccgcctcaaaaaaacagcacctttccgggcgttgctcgcaatcaatggcgatcgcctgagccagaaacaaattgccgaatggctcgaagactggagcgatttcttgctcgctttcgatgctgaagggacaaccatggatatctccaaagcggcacaggctgttcgtcgtgtgactatccagcagactaatcaggccgaccacgaagatagtgatttcgccggtaaaaaatctctgatgcaaagtgttgaagcgagcagcaaagatgtaatgccggtcgcattcgaatttaagtgcatcccttacgaaggcctcggcgaacgccgatttagtcttcgtaatagccttcttaaaagtggcgaaccagtatttgtgctgcggatcgttcaactcgaagcacaggaagaagaaatggctaacgaattccgcgatttgttggtcgctcagttcaataacaagccggtagatacctttatcggtaatttcaaggcctga

SEQ ID NO: 229254 - DNA, 453 bp, Klebsiella pneumoniae
atgacccgcgacgatatgatttttgatgtgaactactcatttcatttagagaaactgtatttcactgttcttactagaattgacaaagcaatcactatgctattaatcgtcttgggtttttctgtttttgcacctttcatgaatttatttttattcggtgtatccgttgcttttttatctgttattcaactggtctatcaatttggacaggcagctggtctttctaaagagcagatgaggcaatatagaagactgctcgtagagctaagctctctaacagatgaagagttgcgagaaaaatacataaaaattcaagatgccgacagcattccgtggcagtcattgcaagaagctgcttttaagcgaacctgtatttctttaggaagaaattgcgagattaacttatccttgagaaaacgtgttattgcatggattgccggggatatgccctga

SEQ ID NO: 229255 - DNA, 201 bp, Klebsiella pneumoniae
atgaaagagttttgggattcattgaccaaagagcaacaaagcacattagcggcaagcgttggttctacaaccggttatctgcgtttagtttttaacggttacaaaaaggccggctttaatctggccaaaaagctggaaaacatcacatcaggccagatcactaagtttgaccttcggccagatatctattccaaacaataa

SEQ ID NO: 229256 - DNA, 483 bp, Klebsiella pneumoniae
gtgggcaatgtaacaggcaaaaatcatagcaatgatgaagtaactctgaaggtgttcaaagacagcccgcaagtttgggccggcgggctcgaagggcgtgatttagctgactggctcattgggaaagcgaatgccattttgtaccgcgtataccaccaggaaaaactggaagagcatcgtagtacggtcaatgagctggaagctgctgaagcacttattgtggcttacgctggccttggtctctctctgcaatcgtatgatcccattcatgctcctgacaaggtggcaattcagttcgatattgacctcgggagagaatttcgaattcgtcagactggcgaacgtattcaggaagggccagtacttccggtgggatattcacttctgccagatcttgctgaagcgaaagaagaacatcagcgaaagaaagcatcctcacttgctcaggtgaccagccgtaacgggtcgcaagaagatgagtaa

SEQ ID NO: 229257 - DNA, 141 bp, Klebsiella pneumoniae
atgattggtacggtgcatggcaacagcattttcgtcatggttaatggctatatcgacactacgcccaatagccatctcaatcccggtagaggcgccgccgcctccggcaaagttatcaacgataatttcacgcatggctaa

SEQ ID NO: 229258 - DNA, 894 bp, Klebsiella pneumoniae
atgcttaaaacttggaatgatttagaaacttatacccaatatgtctactcgactttgcttaacccacgagataatggagtggaagttagtcgtaacgttgtccttaagggattaaaaggtgaatatcaaattgatgtattttaccaatttgaacatgcaggctttatacatcgtgtagcgatagagtgtaaatatcacaatcgcccacttgatcgcgatactattatgccattttgcaacaaaattacagatattgggaatattatcggggttatagtcagtaagtctggttaccaaagtggcgcaaaagaatacgcagaaaaacatggcattactttactgacaactgaagatttaccaaaatttaacatattggttgccgattacttgataaattcaattttacctacaaaagactggatcggtgagcctttttggattttgatggaaagagaggaagataatgtatcaggttcatactacaagtttacacaaaaacacaacggaagagatgtaatacccttattcttttcaaagcgtgaagcaattgactttctaaatgaatctgagcagtcactgcattttgcaataagaggtgttccacaacattatttgaagcgtttgatcgcaataacagagcggttaaaacctttattcttcttaatgcttcctgctttaaatgaagaacaagccaaaggtttattaattgaaccaactgaattaatgaaaagatacctactatcagaaatatcaactgaggaatatcaagagttttacgttaaaaggaagtcgcgttacaagaatgagcttactcttttaaaaatattaaaagcaatgaaaggtaaaattggtgaagaattggccgacaaaattttaaaaaataaaaaaaggtaa

SEQ ID NO: 229259 - DNA, 927 bp, Klebsiella pneumoniae
atggcaagagatataatgatggattatccgctccccgcctactggcaggactttgaaagactgacatgcgaattgtgccgcgcgctatgggacgatccaggcacacagcggcatggaagagctgggcaggctcagggaggaattgatatatctggccgtgataataatcataatggtcagagagttgtggttcagtgtaaaaaaagggtgtggaaaactgtagcttcaaaggaaacaccagctagctctctaacaattcaagaaatcgatgatgaaataaaagaattcattaattcagggaaaattgctgatcgttatattatagcaattacggggttgagggataaatcacttcagaatcatattgactccataaatgactctaaagttaatacttttgaagtaaatatctggttctgggatgaatatagtgaatggttaagtgaaaaccctaaaatagaagcaaaatattatcacgatattgttaagtttcgcagtgaatatagctctgaagaattgttctgtgaaatgcttcattctgcttttgatcgacctgcctttcatactgaattctattgtgaaaacaatatagacaactttttgcaggcacttgagagtattcaacaagcattaactacaggaaatcttgtaaaccgagacgggcatgtacaaaatcaagttcgtatacccgataaaagaaaattacctcttgaatatcaacaattgaagaaaaaaattcaaaatctaagggattatactacgcaggaggtacgtacaggcgctatcacacagcagaatgagtggttaatcattagtaatagtgtcattataggaaagatgaatgcatttagaatagagatcatacatctattaaacaaaattctagaccactatgggtttgaacatttttcattagaagcctattaa

SEQ ID NO: 229260 - DNA, 3120 bp, Klebsiella pneumoniae
atggttgattgcaccaagccaattgctgagtccaataattttatcattttggacaaatacaacccggactggaagattaccgagagctaccagagcgaaggtgatctggagcgtgagctgattcaggatttagttaaccagggctatgaatacctgccaaccctgaacaacaccaaggctatgctcgccaatgtcagggaacagttgcaaagccttaacaatgtggagttcctggaggctgaatggcatcgctttgtagaaacctggatggacaagcccagcgatggcgttgtcgaaaaggcccgcaaaattcatgatgattatgttcatgatttcgtcttcgacgatggccgtattcagaatatctatctgctggatagaaaaaacgtccttcgcaataaagtgcaggtcatcaagcagtttgaacaagcaggcacgcatgccaatcgctacgatgtcaccattctggtcaatggcctgccgctggtgcaaattgaattgaaaaaacgcggtgtcgctatacgtgaagccttcaatcagatacaccgttacagcaaggaaagctttaacagtgacaattctctgtttaagtacctgcaactgtttgttatatccaacggcaccgatacccgttactttgccaataccaccaagcgggataaaaacagttttgatttctccatgaactgggcgaagtccgacaacacgttgattaaagacctgaaggacttcaccgccacgttcttccagaagcataccctgctcaatgtgctgtttaactacagcgtgtttgacagtagccagacgctgctggtaatgcgcccctatcagattgctgccaccgagcgaatcttatggaaaattaacagtgcctttaccgcgaagaactggtccaagccagaaagtggggggtttatctggcacaccaccggatcgggcaaaaccctgaccagctttaaggccgcacgtctggcaacggaactgagctttattgacaaagttttctttgtggtcgacaggaaagacctcgattaccagaccataaaggagtaccagcgtttctcgccggacagcgtcaatggttctgacaatactgcaggccttaaaaggaatctggataaagacgataataaaattatcgtcacgactattcagaaactgaataacctgatgaaggcggaagcggacttgtccgtctatcagcagcaggtggtgtttatttttgatgaatgtcaccgtagtcagtttggtgaagcacagaagaacttaaaaaagaaattcaaacggtattaccagttcggttttaccggcacgccaattttcccgcaaaacgcattagggtcggaaacgaccgccagcgtttttggccgtgagttacattcttacgtgattaccgatgccattcgtgatgaaaaggtgctgaagtttaaggtggactataacgatgtccgcccgcagtttaaggcgctggaaaccgaaaccgacgagaaaaaactcagtgccgcggaaaatcagcaggcttttcttcacccgctgcgcatccaggaaatcacacagtacatactgaacaacttccgccagaaaacacatcgcactttccctggtgccagaggttttaatgccatgctggcagtaagtagcgtggatgcggcaaaagcgtattacgcgacgtttaaagagctacagaaagaggtggctaataaatcagccagctataaaccgttgcgggtggcaactatcttctcttttgcggctaatgaagaacaaagtgctatcggtgacattactgatgaaagctttgatactagtgcaatgaatagcagcgccaaagagtttctggatgcagccattgatgattataacgctcactttaaaaccaatttcagcactgacagcaacggctttcaaaactattaccgtgatttggccctgcgagttaaaaatcaggacatcgacctgctcattgtggtgggaatgtttttaaccggttttgacgctccgacgctgaacaccctgttcgtcgataaaaacctgcgttatcacggcttgatgcaggcattctcccgcaccaaccgtatctttgatgccaccaagaccttcggcaatatagtgacgttcagggatcttgaacgcgcaaccattgatgctattacgctgtttggtgataagaacaccaaaaatgtggtgctggagaaaagctacaaagagtacatggagggctttactgatatcgtgacaggtgaggctaagcgcggctttatggatattgtgacgaccttggaacaccagttccctgatccggctagcattgatagcgagaaggggaaaaaagccttcgttaaactgtttggtgaatacctgcgggctgaaaatatcctgcaaaactacgacgaatttgccatgctgaaagatctgcaaaaagtcgatatcagcgattccgatgccgtgaaaaccttcaagacagcgcattatcttgacgatgaaaagtttgccgaattacagaccattcgtctccccacagaacgtaagattcaggactatcgttcagcctacaatgatatccgtgactggcagcgtcgcgagaaagtggctaatgacaaggataagtcaaccactgactgggatgatgtcgtgtttgaaatcgacctgttgaaatctcaggaaattaacctggattatattcttggtctgatttttgaacataacaggcagaagaaaggtaaagaggcattgactgaagaggtcagacggttaattcgctcaagtctaggtaatagggcaaaagaaggtctgattgttgactttattcagcagactaaccttgatgacatgccggacaaagctagcatcattgatgcattcttcatttttgctcagcgtgagcagctgcgtgaagctgaagcgttgataaaagaagaaaatcttaatgaagaggcagcgaagcgctatatccgtacatcgttaaaacgcgaatatgccaccgaaaatggtactgagttaaacgagactttaccaaagcttagtccgttaaaccctcagtacaaaacgaaaaaacaaaccgtttttcagaaaattggtgagtttattgagaagtttaaaggggtgggtggacaaatttag

SEQ ID NO: 229261 - DNA, 1200 bp, Klebsiella pneumoniae
atgagcaagacactcctggaaatagcccaacagctaagtacgcctaagaaagtcaagaaaactgtctctgaaaaaacaaaggaagttgaagagaccaggcccgtgccaaaggtgcagttaatctacgctttcaatggcacaggcaagacacgtctttcccgggatttcaagcaatggattacgtccaaagttattgacggagaaggtgatgacgaagctgaacagtcggagttgtcgcgcaaaaaaatcctttattacaatgctttcactgaggacttgttttactgggataacgatctgcaagaagacgcagaaccgaagttgaaggtgcagccgaattcctataccaactggttgctgaccttgctaaaagatttgggacaggatggtaatatcgtccgttatttccagcgctatgcgaacgacaagctaacgccacacttcaatccagattttaccgaagtcgctttttctatggaacgcggcaacgatgagcgctccgtccacataaagttatcgaaaggtgaagaaagcaacttcatctggagtgtgttttacaccctgctggatcaagtggtaacaattctcaatgtcgccgatccggatgcgcgcgagacccacgaatttgatcaacttgaatatgtattcattgatgatcccgtaagctctcttgatgataaccatttgattgaactggcggttaatcttgcagggctgatcaaatccagtgaatccgatttgaagttcattatcacgacgcataatccactattttataatgtgcttttcaatgagctgaacggaaaagcttgttacatgttggagagttttgaggatggtacatttgccctcacagaaaaacatggcgactctaacaagagtttttcctatcatctccacctaaagcaaaccatcgaacaggccattgttaacaacaacgtggaaagatatcacttcacgttactgcgcaatctgtatgagaaaacggccagttttttgggctaccctagatggtccctacttttaccagacgacaaagaactctatttgaatagaattatgcagttcacaagccactgtacgctatcgaatgaagccgttgcagaaccaacgccagcggagaaagcaacggtcaaactgttgctcgaacacttgaaagataactataacttctggcagcaggaacaaaaaaatggttga

SEQ ID NO: 229262 - DNA, 1212 bp, Klebsiella pneumoniae
atgagtgagctgaattttttaggaaagcttctggatgggattgaaattaagtggttgccgattggcgatattgctgaaatttatggtggattaactggaaaaaccaaggctgattttgaaaaaggtaatgccaagtatatttcatacaaaacaatttttggcagcttaaatataaacaatataccaaatgattatgtcgacgttcgtgaaggtgaacgacagaataatgtcagatatggtgatgttttatttaccggctcatcggagatagctgaagaggcaggcatgtcatccgcagtcacatcacagtttgatgagcctgtgtacctaaacagcttctcttttggtgttaggtttaacgatgatattaaaataaagcctgaattctcaaaataccttttcagaacaagcatgatgcgtacagaaattgcaaaaactgcgagtggtgtaacacgctttaacatttcaaaagctcgattcaaaaaagttttaattcccgtcccctgcccggacgatcaggaaaagtccctctctatccagtcggaaatcgtccggattctggatacctttaccgctcttaccgctgagcttaccgctgagcttaccatgcgtaaaaagcagtacaactactatcgcgaccagttgctgagttttaaagagggtgaggttgagtggaagacattgggagaggtggcaacctttcggcgaggtacggcaattactcagaagcaaacaacacctggtgacatacccgtagttgccaatggaccaacgccaacatactttcacagcgagagcaatagacaagatgaaactattgtcatcgctagatcaggtgcctatgcagggtatgtgagtttttggaatcagccaatatttttaactgatgccttcagtgttcaccccaacctaaaaattgtaaagccaaagtttctttactatgttctacagaacaaacaagagcatattcacgcgatgaaaaaaggtgccggtgttcctcatgttcgagtaaaagaatttgagtcatatgatgtacctattcctcctcttgccgaacaagtccgcatcgtaactattctcgataaattcgacacactgacaaactccatcactgaaggccttcctcgcgaaatcgagctgcgccagaaacagtacgaatattatcgggacatgttatttagcttcccgaagccggatgtggtagaggcgtga

SEQ ID NO: 229263 - DNA, 579 bp, Klebsiella pneumoniae
atgaatattgaacaatcctggacaccagactggtttctggagtctgtcttgaactggcatacggatagtatgatcaaccggtatgcttgcctgcgggctattcgaatagacctgttctacaaaaatggaacgccaagatatgtacaacccggacaccaccaactggaactggatatccaattattaatgaaaaacatgatgagtctgcgagccgtagtaggttatttctgggtcatagagtggactgaggatcaccgctaccacgcccatgcagtcttctggttagatggtaatcggacccagataacctatccatgggctgcgaaagcgggcgagctatggagcaacattacagacagggaaggctggcatcaccgttgcgaatacaaggaacactatcgagcaaatatcaatatccctgttcactacaacgatcctggaagtattaccaacatacggcaggtactcgcctatatgacaaaaatccaacagaaggaggggttgctactgcacggctgcaatgaagtacctgagcgtccactgacaggtcggccacgacttcccctgcgactcaactga

SEQ ID NO: 229264 - DNA, 597 bp, Klebsiella pneumoniae
atgaaagactataaaccgcgttacgaagaacttcaaaaatgctaccagacttggttgacagattttacgaagctgactgtccgccagggaatgtgccatcaaaacatatatcattatcatagtctgacggttggctgtctcaatttccctgggaaagaagctgttattgctattgtgcctcactggctgcaccggcttatttacggaaaggcagaggcggcatcattatcgatagatgatgacctgagcgtaagcttattaacgcaggagcacctgttagcccaccatcctatgcttgaaggtgttctgctttccgaatgtgtccgtttaaaacaacgttcactggcaaataagctcaccagcctgtttcagcagtttagagggactgagcttcgtctaaagcttgtctggttgtgctggtacgatttgatgttggggaattgtcttgctgactggattgaaagtctaaagttcaaatcaagcgaggaggtaaataactgggttaatgaccggcaggctgagaaccacatgcttaccagcatgatggatgagtatgtctgctttgcctaccgcactgtactcgatccgctgatttga

SEQ ID NO: 229265 - DNA, 207 bp, Klebsiella pneumoniae
atgaacacccatctttctcttttagaagaccagtttgtcaatatggcatatatcaccagtctgactggtttaacggacaagtggttctataagctaattaaagatgatgttttcccaaaaccaataaaaatgggtcgtagctcccgctggctaaaaagcgaagttgaagcttggctccaggaacgtattaaccaatcccgtaaataa

SEQ ID NO: 229266 - DNA, 732 bp, Klebsiella pneumoniae
atggaggagtatgaattcgatgaacgggaaatgcgtaaaaagagactgcgacaggcaagtcgcctaaagtggttgaggaaaaacccaagggcaatgcatttctttctctttcatttactagcgaacaaaaccgtagcactcgccagtacgaacatccgaacaaagctcgatatgccacagtttcatatccatgcccccgatgtggtcatgtcccctcaaaatacgggaaaaataaataataaaggcgagataaatttccaggatttagacataaatctgcaggacttggatctgaatttttccccaccaaaatgtgagcaagctaatggattagacttctccaaggtaactaatacggatgtcattccagatgtaatggaaaaaataatcgataccattttgaaaatgtacccatcgacgaggttagcagaccaggctatcacggaagtgatgggtgattgggctaatgccagcaatcagttccctagagcattttcatggctggataagaataatgaagagcaatgtttatgggtttgggagcaaatgaggaagaaatatatttctattaataccaaacctatttcctgtgagcaacgctaccattttattattgctatctttgataactggaaagggtggagtgacgagcaactaggttatctgaaagaaaataaaaaaggaaggatgggaagttcatttcgcatgggttgggtggtactagcactttaa

SEQ ID NO: 229267 - DNA, 876 bp, Klebsiella pneumoniae
atgaaaaaatcagaaggtctaaaggccattgaaaagccactagcgtcactcccctatgccattggcagacatattcttgaccatgttcaaaaactcactcactacgaaccagtcatcgggatcatgggcaaaacaggcgcgggtaaatcatctctctgtaatgcgcttttccagggtgaggttacgcccatcagtgatgtccacgcctgcatccgtgacgtaatgcgattgcgtctgagcagtggtgaccatagcctgatactaatagacctacccggagtaggcgagagcgagcaacgggataaagaatatgaatctctatatcgcaatattctccctgagctggatctcatcctgtgggttatcaaagccgatgatcgagccttctctgtggatgaacgcttctaccggcgagtgatgactggctaccaacaacggtttctgtttgtcgttaatcaggttgacaaaatcgagccaagccatgagtggtatgtcaccggcaatgcaccatcaccgcaccagtgggtgaatattgaggccaggctggcgtctattcgccagttattctcaccacatcatccggtttgcgctgtctcagcgagaacagaatggaatctcccatcaatgatagaaacgatgatgtgctgcctgccagaccgagccaccagcccattggcgacacaactgcatgggaggttatgtagtgaaccggtaaaaaagcaggctcgtgagtgctttggtaatgcggtcggggaggtatttgattctgcggaagcggcatcatttattcccgcgccactgaaagcagttattcgcactgtccgcgatgccgtagtatcagctgctcgcgccgtttgggactggattttcttctga

SEQ ID NO: 229268 - DNA, 702 bp, Klebsiella pneumoniae
atggttcaggttgaacgtcgtcatgatcggcttgccgtccgactgtcgttaattatcagccgtctggtggctggagaaacactggatttacgagcgctggcaactgaatttggtgtatcggttcgaactctacgccgggactttcgggaacgtctgatgtacctggatctggagtatcgcaaaggccgatgccgcttgctatccggtagccgccagagagagttagcggtgatgaaatttgcccgtcagtcaggcgttgaagctctgtttcctgatatggataaccatctggtcagttcactgttgagcggatcaggagagtctccttgccttatctggcagggaacagaccaggtttcatccccagaatcaggcgtattcactcggttggtgagcgcgatatcagaacatcgaaaggtgacgctgctcggtaacggttgccgctgtacaggcctcgctccctatcggctggttctgcgttacggcgagtggtatttgacaggcgagcatcagacccggatagaagtatttcccttgacggatattcgtgcagtcacgctccacaacggcaggttcgctcctgatatagcgatgcgcgatatcctctctcacccggattttcttcaggctttaccccactttcgctttttccattcattgcttgtcgcaactgacggcgggcttatacctcagaagggataa

SEQ ID NO: 229269 - DNA, 648 bp, Klebsiella pneumoniae
atgaaattacttaccactacattgctggctaccagcatttgtctaagtgcagtttttccggctgacgctggcaatatcgttggctctgtcaaagcctgggagtacatgcaggctgatggctggaaatcagctgatggcatggatgacaatacgctgcacaatatgctctaccagaccaatgttattgataactacccgtggacgaagcagtttttgctacgtacccgtggtggtggtgcaattttcctggccgataagaaaacccacactattcgtcaattaaaactgaatcctgtcggtgaaatctacaacgatattgaaacggtttatcagggagatgataaaggggaaggctgctactttgccgttattgataaccaggcttcggtacgtgataaggctatcgatgctcttatataccccgactggtctgcaccccaagatacggatgctgttcttaaggttaagattgcaaaagtcagacaacagatagccccaaaagtcattatggtgatgccagataattgtgtgaataaacaacagcaagccacattggcggctaagcgctcggaagaggataggaaactacagcaatgggtcgcacagcaaagcttagcggaattgtgtcgtcgcacaggcaactgctga

SEQ ID NO: 229270 - DNA, 546 bp, Klebsiella pneumoniae
atggaaaaggattgtcagaaagatatagatataccttctttcacaatagtaagggtatgggcaaaacctacttacagcaaaatcatgccactcgtcagccgattggctaaaaccttgccagccattgtcgttttaatgctgtgccatccgtcatctgcttacgcagatgaacaacgctatatcagtatccgcaataccgataccgtgtggactcccggtaatatctgtgtgtatcagttccgtctggataatggtggtagcggtgtgggttttggcccgctgtctgtttcgctggggctgaaagacaaggcgggcaacacgttggcgacgggaataatggacgtagccccctttggcgacagcgatgctactcgttctcaggaagcttttcttgagcatgaatgtgtcgaaaacgtcagcgctattgaaatcatgacggcgaccgaagagcgcaacggccatcaggctaggctgccactgtccgttttcgaccctcagtattatcagccactgtcagtatcggttgctgtgaataaggcatcataa

SEQ ID NO: 229271 - DNA, 471 bp, Klebsiella pneumoniae
atgtctgtatttaatttatccccggtatttcctgcaaacgagcaacgcgtcattcgtcgggcattacgcctgctggagaaatatcagcgtcaaccgagtgagccatttacctccaccagcttcactaagacctggctgcaattacagatggctcatcaggagcgtgaagtttttatcgtgatgtatctcgataatcagcactgcctactgggatgcgaaactctatttaccggcacactcagccataccgaagttcatccccgcgaagtggttaaattagctctgaaacacaatgccgctgcggtaattctggcgcataaccatccgtcaggtacgacagaaatcagtcagcaggacaaacacatcattcagcggatagtgaaagcgttagcactggtagaagtgcgagtgctggatcatttggttgttgggaacgaagtggtgtcttttgctgagcagggcttgatttaa

SEQ ID NO: 229272 - DNA, 189 bp, Klebsiella pneumoniae
atgcacctgcagaaattagatctggctttcccgctgtttgtcgaacaactggaagatatgctgtgtgctggcgaactaaatccacatcagcaacgtcaggtgaaaattcaacttgcgagtttaacctgtatagctgatacccttggtagctgcggttacgtttacatttctatttatcccacaccgtaa

SEQ ID NO: 229273 - DNA, 1134 bp, Klebsiella pneumoniae
atgtttcaactttaccggtcacatgatttaacacggcaattagcccctgaagattttcaatacattttgacgccagcaggctcgctgagagaggcgtgtatacattacgatctttcttatgaagggaacggccatagtctctcttttggtcttcccaacaaaaaatacagtttatctccacatgaaagaccgtatgagcgaaggcatcgcagttacgtagatcccatctatgataaggtagagcacgatctacaaattggctggcttgttggtgtggatacctccaggcgctggagcagcgaccggaacccgttttacatcgacgataccggcgatctgatttttacccctacagcctcatcctggcatgcatggtataaggatgaaatcacgagcgcctaccggcacgctattgccgaccgacaggggcgtaaacctgctcccactcaacggatgcattacgattattacggcccggcagcaataccagaggggaaaacgctgaacagtaaagccgttggcagactgctagcggctggtggtgtgtataacggcaacattgaaggatttcggcaaaccgcggaacggctgggcggcgatgctgtgaaggggtatgacagtgttttaaacgaaactacgtccggcatgatggttgctgcggcctcactattggtcatcagaaatccgatggcggcgcaggaattgacaagctatctggggaaatacaaacaagcccatgttctgctggatgatatgaatgttacccagcttaattacctccgccgcaatcgtgccgagtacaatgcgctgcgtgggcaattcaacagcactgtgcggcctaattttctcaaatctctttccgatcaccctgacgcattatcaacatttgattccaataaccttctacgcttagcaaatggaaatgtaccatcggggtggcaggtccatcacaaaattccccttgatgacggtggtacaaatgcctttgataacctgatactaatccaatactcaccatatcactctgccttatcaaagatgcaggcgattatcaccaaagaacttccatacaatgccagcacagatgttttgtggccttctccaaatggcgtgatttacccggtcgggaaataa

SEQ ID NO: 229274 - DNA, 312 bp, Klebsiella pneumoniae
atggctaaacgtatgcaagacaaagagagcattgccgggatgtcctggctggttctgctgatcattgcttgctggggtggacttgttcgctacctgatagatgtgaagcagagcaaggcaacatggagcttgatcaatgctcttgcccaaatggtggtttcagggtttaccggcgttattgctggcctggtgagcattgaaagcggactgagcatttacatgatactggccacttccggaattagcggggcaatgggttctgttgctttgacctatttctgggagcgcattaccggagtcaaggcgccatga

SEQ ID NO: 229275 - DNA, 783 bp, Klebsiella pneumoniae
atgaagttggaagcatccctcaaacacttcagccctcagggcatgcacatcagcgacgacgtgaaaagcacatcaccgaatcgtctgaacggtacagacgttatgaccgggatcggggtgaccagcagtcgggcgcggttcgggctggcggcattcttcggtaaggctggcatcagtaagacggacgaacagcttgcaattcaggcgctggcgcagtttgccatcaaaaacgctcctaaaaatgtccgcaaagccgctggtgacaagctcggcgcctgcatgttgacgctggcgcaatttgcctttgcggaatactcacgttcggcggccaccagtgcaacgtgtcacagctgcagcggtaccgggtttatttccagccatgaagatgtaattaagcaccctggtattttcgatgctgacggtgtcgaagtgaaggccccaaagattagaaatgaactggtgaaaagggtctgtggagtgtgcggaggaaagaaagtgatccatgcgcgatgcaggtgtagtggtaaaggggaggtcttagatcgcaaagcgaccaaagaacttggcgcaccggttttcaaaacatgtgaacgctgctctggtaatggcttctctgttgtaccctctgcgacggtacaccgcgccattctgaagcgcctcccggatctccatcagtcttcgtggtcacgcaactggaagccgttctatgaagggctggtggatacgcttcacaaaggagagagacaggccgcggctgaatttgagaaggcgacctgttattaa

SEQ ID NO: 229276 - DNA, 984 bp, Klebsiella pneumoniae
atgaagacgacagatgccgttatcggacgctggccagaagtgttcaaagcatttgggctgccgccagtgaccggaaagaaacactggtcgaaagcctgtccggtatgcgggagagccggcaaataccgctgcgacaacaaagataaccgaggcacctggatctgcagttgcggcagcggcgatggctggaagcttctcaccctgacacagagtaaaaacattgctgagttgtatgcagaagtggatcagattatcggcaacgtatgggaagggaaggaggcagtcccgcgccagcgacaaatcaaaaccgttgaccaggagcgcgaagcggttctgcgccagttctcccggatgccgtcgctgaaagacacaccggcccagggttaccttaacggcaggggcattttcacgcttccgtctgcagatacttcaagatattgcgccagccagcctgtcagcggtggaagggggcggcttcaggccatctggtcactcgttacggatgagaagtctaatctctgttacctgcatcgcacgctgctggatggtgagaagaaagccagtgtgaatgtcactaaaaagcaactgatgcttcaggatgagtctgtgattaagggggcctcatccgtcgccatccggttgtttcctgtagcttccactctggggattgctgaagggatagagacatctctttcctgcaagcagctgtatggagtcaacacatggtcagttatcaatgccaacttcatgtcgaaatttgtcgctccgtcaggcgttaaccacctgattattttcaccgatatggatccgcactctgccacgggtcacgctgcggcatgcgcatgcgcacataagaatttactggcgagaaacgacatccggaaggtcagcgtcaggtggtgtgacaatggcgattttaacgacctgcttctgaatggcgatcaggtcagggaattggttttttacagaaaggtggccgcatga

SEQ ID NO: 229277 - DNA, 1503 bp, Klebsiella pneumoniae
atgcttaacctgaaacctaaagctaaacaggtcaccggtctgcagatgcttcacgatgactggcacaactatcgcacattcctgctgtacgcgccagtcggctatggcaagacgttcatttctgcctatctggctgataaagcactggatagcggtaagcgcaccatgtttgttgccccgtacttaactctcgtccggcagactgccgacaggttcattcagtatggcattccggaagacgagatcagttacgtatggcgtgatttcaaacctcacgacccggaacggctggttcagattgccagtgccgacacactgatccgccgggattttccggataatatcgacctgctgattgtcgatgaggcccacatgaaacgtcgcggcctgctggagatcatccgggaccgggatattcgtgtagtagggctttctggtacgccgttctcaccgtggatgggccaatactacgagcgcctgattaaacccaccacgatgaaagagcttattcagatcggcgacctcagtccctacgagttttatgcgccaaccacaccggatctgaaaggggttaaaaccacagccagaggaggcttcggtcgggactttgacgaagaccagctggcggaaatcatgggtgactcgacgctggtcggggatatcgtgacaaactggctgcagaacggcgaagatcgaccgacgatatgcttttgcgtcaatcagtctcatgcaggtttcatcaccgccgaatttaaccgcgcaggcgtgactgctgaaatcatgattgacgtgaccccgcccgaggagcgtcggatgataattcatcgcttcgagcagggggcaacaaaaatcatcgtcaatgttggcgtgctgactgccggttttgacagtgacgtgcgctgtatcatatacgcccgcccgaccaaatccgaaatgcgttggctccaggtcctcggacgcggattgcgcacggcacccgggaaagatcactgtcttattttcgaccacagcgggagcatccatcgccttggttatccggacgatatcgagtatgacgatctgccgggggaaaacgatggcatgaaagccgccagcggttacaacgaaaccgaaaaaacagagaagaaaccaaaggagtgcaggcagtgccatttcattaaaccggccggggtttacgtgtgtccgaaatgtgggtttaagcctgtcggtggggaaaacgtggagaccgatggatcaagaaaactgcaccgccttagccgcaaagaaaagatttacacccgcagcgataaacagtcctggtggagccagattaagggttatcaacaacagcgccagctcagaggtaagcctctgagcgatggctggtgcgcacataccttccgggacaagttcggtgagtggccaaacggcctgtcaaatttcccgatggaaaccgggcctgaggtccggggttacatcaaatccaaatttattgcgttcagtaaatcacgaggtgctgcctga

SEQ ID NO: 229278 - DNA, 546 bp, Klebsiella pneumoniae
atgagcagcgagagcaccaataaacaactcgattttctccgcctgttccgtcagggctgcaaacagatccgcgtcctgctgcgtgaaaacaaggcagctgcagatttgtttctgtacctcgcggaaaacgctgatatgaacagcggggcggtggcggtggatcaggccgtgcttgctcacgaactggagtgttcagaccgtcatgttcggcgggcgattaaagcgcttgaagacggcggttttgttcgccgcgccggtccgacagttttcgctatcaacccatcgatcatctggggtggatacgataacgcaatgcgctcatcgctctacatgacgatggatcggggggcagcgaagaaagttcgttacgtatttaacccggcatcggaaaaccttgtaccggcttacgtcggtgtggcacccgttgacgatgaacacgattcgatgggacgccaggcaatccagaacgacagagataaaaacaaaaagcgggaagtgctcacaacacaacccgcccgtactgcggagactaaacgtaatgcttaa

SEQ ID NO: 229279 - DNA, 342 bp, Klebsiella pneumoniae
atgcaacaggatttcgtcagggttgaaatgccagtgctgtacagccaggcagacgctcagtggattcaggagcagctaggcctacttccagtcgctatgcggcagaaggcgcaggtgcgctattcggaagtttatcagttggcgtttgatgctgagcctgtgagttatcggcaggaaaatcgggcgcggcatgctgccaatactcgccttcgcctgtttgtgggccggtaccacacggcggctatgggattgactgaaaaagcgacactggccagcacacactccccagccggagcagctgctgagatccagccagagcaggcgactgagaagtggtggtga

SEQ ID NO: 229280 - DNA, 1263 bp, Klebsiella pneumoniae
atgcttcattttcttatttatgatgtgctaggaacaccggcgatactggttggtttattttcactgatcggtctgctgttgcaaaaaaaaggaatttcagacgttatttcaggcacgctgaaaaccatcatgggttttgtcatattgaccgccggcgccggtattatagcctatacgttaaccatctttagccagttatttgaacattctttccatattcagggcgtggtgcccaacactgatgccatggccgctctggcgcagaagaattacggcacggaaaccgccaccattatggtattgggcatgctgatcaatatcgccctggcgcgtctaacgccattaaagtacatctttctgaccggacatcatacgctttatatggctgcgatgctggcggttatcctgtctgtagggggcttgtcagggggatgggtggtggccatcggggcggttattctcggtgcgatgatggtcatctccccggctatcttgcagccgtttacccgtaaaataaccaacaccgacgatctggcgctcgggcattttggatctattggctatctgctgtccgcgctggtgggcaaaattattggtaaaggtagtccctcgattgaagagatcaaagtacctaagtcgctcaatttccttcgcgactcatcggtggccatctctctcaccatgatgattctgtttctggtgctggtgctcgttgcgggcaaatcctttgtcgaggagaccctgagcgctggtcagaactttattatcttcgccattattcagtccctcacgtttgctgcaggagtttatatcatcctcgccggggttcggatggtgattgccgagatcgtcccggcgtttaaagggattgcggacaaactggttaaagacgcgaagccggcgctggactgtccgacggtgtttcccttcgctccgaatgccgtcatcgtcggcttcctcgcaagctttgtcgcagggctggtcagtatgttcctctgcccgctgttcggcttgagcgtcatcgtcccggggctggttccccactttttctgcggggccacggcgggggtttacggcaacattaccggcggacgtcgcggggcggtggtaggggcttttgctcacggtctgctcatttcgttcctgcctgccattctcttgcccatgatgggggatatgggactgggctccacaacctttggagacgcagactttggcgttgtcggcatcgtgctgggtcatatcatcgcaatgtttaactaa

SEQ ID NO: 229281 - DNA, 1533 bp, Klebsiella pneumoniae
atggctctacacaacagaaagctctcttttacgacgccgatcgtcgtggggtttgccggtattttgctcagctttatgctgatcgctatttttgtgactctggcgcaacagaaagattttctcgaagattatcacgatattaaccgcaattttacccataacctggcgatcaactatacggaaaccctgctgcgggaaaatgattttatcctcgggcgcgcagccgccttctttgcccggaatgacgaactgaatcgcgcagtcaatgtggagccggagaaagggttaaccacgctgatgcagttacagaacatgatgccaagcgtctcatccatctcgctggcggataccgagggccactatctgcgcgccccggaggtgctggaaaacgaagacagccgggctttcgatcccagaacgcggccctggtttatcaaacaggcggaagccagcaccttcagccactacaccagtccgtatatggattatttcacccaccatccgacgattaccattttcaaacccatcattaccccggaagggaaactcaagggcagcctggcctttcatctcgatctcacctccatggggttcgcgctgcgccagatggtggcgcccgtacagggggaattttttgtggtgcaacgggatggcaaagtggtcctgcactccgacccgggcgcgctgtttaaacccttcgtcagggacgagctgatggataaaatgaccagcggagaggggcagctttacgatcccgggagcgacacctggtattactattactcctttaccaatcccgactggtttgtgattttccgtgtcgataacgccaccctggtcaatctgacacgtcatgagaccaatttagtgatcggcggtttcactctcgcagcgatcattattatcctgttcggtctttatctgcgtcatgcttcccgtaccgtgctgatgaatatcatcaatgcgattaaaaccggtgacgtcaaacgcgccccgcgccttgaggcgatgctgagtaaagcgattgaaaccaataaacagcgcgaactgtcctacgtccgccaggcgaccatcgacgctctcaccggctgcaaaaaccgccgcgccttcgacagcgatattgccgccctgatgaacgatcaccagccattcgccctcgcgctggtcgatatcgataactttaaatcgatcaacgacacctggggccatctcaatggcgatatcgtcctgcgtaacgtcgctcgcgaagggctacaggtcctccagccgctggagatatccctctatcgctacggcggcgaagagttcgcggtggtctttcctgccgaacatatcgataacgcccgcacgctgctggaaacatggcgggtaaacgtcgaacgacgcacctggcgcgaagatggcctgacggtcaccttcagcgccggcctcggggaatggaatatggagccactggataagctggtggtgagcgtcgatgaagcgctgtacaaagccaaacagcagggtaaaaaccgtatcctgcgcgcgtaa

SEQ ID NO: 229282 - DNA, 1272 bp, Klebsiella pneumoniae
atgttcgccctggctgacgtcaactccttctacgccagttgcgagaaggttttcaggccggatttgcgcggcaaacctgtcgtcgttctcagtaacaacgatggctgcgttattgcccggagtgctgaagccaaactgctgggtataaagatgggaaccccctggttccagctcaaagaggcgcagtttcctgaaaaattgtacgttttttccagcaactacgagctctacgcgagcctgagtaaccgtgtggtcgccctgctggaagagctgtcgccccgcgtcgaacaatactcaattgacgaatgtttcctggatgcccggggaattggccactgtatggatctggaggattttggcaggcagctgcgtgggcatgttctcagtggaaccggactgacgatcggtgtcggcttcggcgccacaaaaacactggccaaatcggcgcagtgggcgtcaaaggaatggccacaattcaggggggtgctggcgctgtcgcccgataatccacgcagaacggcaaaattactcagcctgcagccggtggaagaaatctggggcgtggggaaccggatagcgaaaaagctgcacgttatggggatcaccaccgccctacagctgtcgctgacgaaccctacatttatccggaaaaacttcaacgtagtgctggagcgcacggtacgtgagctgaacggcgagagttgcatttcactggaggaagcgccgccgccgaaacagcagattgtctgcagtcgcagcttcgggcagcggatcaccacctacgaagaaatgcgccaggccgtctgccagtatgccgagcgcgcggcggaaaagttgcgcggtgagcgacagtactgccggcatatcagcaccttcatcaagacatccccttttgcggttaatgagccgtattacggtaacgtggccacggaaaaactgcacacccctacccgtgacacccgggacattatcgcggctgcggtcaggtctctggacaggatctggctcgatggccaccgctacgcaaaagcggggataatgctcaatgatttcagtccgaacggcgtcgcgcagctgaatctgttcgatgacgtgcagccacggccgcacagcgatgcgctgatgaaggtactcgacggcattaatcattccggactcgggaaagtctggtttgccggacggggtattgcgccggactggcagatgaaacgggagatgctgtcaccggcatataccacccgctggaaggagctgccggttgcccgtttctga

SEQ ID NO: 229283 - DNA, 795 bp, Klebsiella pneumoniae; identical to SEQ ID NO: 95251

SEQ ID NO: 229284 - DNA, 3258 bp, Klebsiella pneumoniae
atgcaatcagcagcacatcaggaaaaacacttccagcaatacatcattgaccggttggtagatcagggctggaagctgggtgattccaagttctacgacaccgagcgggcggtgtaccccgaagacctggaaagctggatcaaaaccagcggccagcaggaaaaatgggacaagctggaacggctcaacggggccaaaacccttgaagtgctgatggaccgcctagataaagcactggagaaacaaggcaccatgcaggtgttgcgccagggcttttctattgccggttgcggcctgatcgagatgaccgaggtcgcaccggaagacaagcgcaatgcagcagtcattgagcgctaccaggccaatatcctgcgcgtggtgccggagctgaagtatcacccggcccgtgaatttgccattgatctggtgctgtttatcaacggtctgccggtggcaaccgtcgaactgaagaccgacttcacccagtcctgcgaagcggccatggatcagtaccgcaataatcgcctgccatatgacgccaagaccaaacgcagggaaccgctgctgaccttcaagcgtggggctgtggtacatttcgccatgtccgactctgaaatcatgatggcgaccaagctggatggagaaaacaccttctttctgccgttcaataaggggcgcaaggacgaaagcggcacggtacatgcgggtaacccgccaggtgagattaaggccgatggtactcaggaataccctgtagcctacttctgggaggaggtctgccagccgaatgcctggctgcggattttccatagctttgtctacgtcgagaaaaaggacgtggtggatattcagggcaactggtcgaagaaagaaaccctgattttcccgcgctttcaccaatggacggcagtgaaccagatgctggccgatgctcgcgaaaatggcgcaggcatgacctacctgtgtgaccacagcgcaggttccggcaagaccagcaccatttcctggacggcccatgacttggtgaaactgcgcgaagataacggcgacgcggtgtttaacagcgtgatcattgtcaccgaccgtaatgtgctggacggccagcttcaggacgcggtgaagcagattgaccatcagtttggtgtgatcgccgccattgaccggcagaagtcatccaagtccaagagcaaacagctctcggatgccttgttgtctggcacgccgattgtggtagtcacgatccagaccttcccctacgcgatggaagccatcatcactgacaaggccctgaaagggaaaaactttgctgtgatcattgatgaggcgcataactcgcagactggctctaccgccgctaagctgcaagccgcgctggggatgagcggacaaggcaagatgtccaccatgacggtggatgaactactggagcaactgcaaaagtcccgcgcccgcccggacaatatcagctacttcgcctttaccggcacgcccaagcactccactttgatgctgtttggtcgcccgacagatccaagccaaccgatctcggacgataacccgccgcaagccttccatctgtacaccatgcgccaggccattgaggagaaattcattctcgatgtgttgaacggctatgtgccctacaaaacggccttcaacctttccaagcagcttgaagacagcaagcgggtaagcggcaaggccgccaaacgcgccctggcacagtggatgtcattgcatcccaccaatgtgacccagaaggtacagtttatcgttgagcacttcaccaaaaacgtcgcccaccggctggatggcaaggccaaggcgatggtcgtgaccagctcccgtgccgctgccattcgctacaaaaaggcgtttgaccgctatatcgagcagcacagcgagtacggctttattcattcactggtggccttctccggcaagatgaccggtaagcaggtgatgcaccaggatgacagcgagttcaaggatgatgtgtttatcgtcgatgagaacgaggaattcaccgagcagagcatgaacccggatgtccacgggcaggatttgcgctttgcctttgaccgcccggaataccgggtgatgttggtggccgacaagttccagactggctttgaccagcccaaactggtcgccatgtacgtggacaagaaaatcgccaaccatgtggagattgtgcagaccttcgcccgcctgaaccggacggcgcccgggaaggatgaagtctttatcatcgacttcgtgaacgatccagagaacgtgcgcaaggcctttgccacctatgacaagggcgctcacatcggcgaagtgcaagacctcaatgtggtctacgagatcaaggagcgactggacgagcacggcctgtacgacgagaaggacttggccgcgttcaaagaagcccgcttcaaaaccatacgtgacatcacccatactaaatcgccacagcacaaggcgctgtatgccgctacagctggagcgacggccttgtataacgacaagatgaaaatgttgcgcggtggcatggcaacctgggaagcagcgtttgagaaggcccgcgccaagggtgatgaggcgggcatgaagtctgccgatcaccaccaggatgagtatgccgagcaaatcaaggcgctgatgggcttcaagtcggacctggggcgcttctgccgtacctattcctatatcgcccaactgattgattttggcgacccggagttggagaactttgccgctttcgccaagctgctgcaaaagcgccttcagcacgaagcaccggaaaccgtggacttgacaggcctggtgcttactggctttgacatcaatgctcgacccgatgacgtagaagacgaaggcaaaaccccggtattgcaaccagcaggtgcaggcggtggtggcgcggcaggcgacaagccgaaattcgtcaaagagattatcgagaagctcaacagcctgtttggtgaggcgacgccgatccaggatcaggttgctttcgttaatcagatttcagcgattaccggtgaaagcgatgtcgtcatggctcaggtggaaagcaacacccgtgagcaggctatgaaaggcaacctccccggtgctgtgcagcaagcggttgttcgtgctttgtccagtcatcagaagctggcaacccaggtgctcaagtctgaccgtcagggcatgaccgcattggttgatatggtgtatgacctgctgcgtgaaggcaaagacatcgatctgggtatggattaa

SEQ ID NO: 229285 - DNA, 339 bp, Klebsiella pneumoniae
atggaacttatcgatcaccagtttggcgttgggcagatactgagcaaaggaacgcttgaagggtcgccacatatccgtacagacccattccaccttgtcagcatccggcaaatccttgaagaagggattcaaatgctcttgagtacgatgctccaacatatcaaagacgttgttggttgccagattggtgattacacagcgataccctccggccaggttcacttcgtcaatacccatgatgacaggggtttcgtaacgaacggtttgggagagttcctcaatgagatcgtgagcgatgttcttgacggtgttcaccgccacaccggtttgctcggctaa

SEQ ID NO: 229286 - DNA, 231 bp, Klebsiella pneumoniae; identical to SEQ ID NO: 222286

SEQ ID NO: 229287 - DNA, 891 bp, Klebsiella pneumoniae
atgaagatattactgattggcaagaatggtcaggtgggctgggagctgcagcgttcactgtccacgctcggtgatgtggtcgcggtggattactttgataaagagctgtgcggtgatctgactaatctggacggtatcgcgcagaccgtgcgtattgtccgcccagacgtggtggtgaatgccgccgcacacacggcagtggacaaggccgaaagcgagcgggagctctccgatctgctgaacgacaaaggggtggcggtgctggcggcggagtcggcgaagctgggggccctgatggtgcactattccacggactatgtgttcgacggagccggtagccattatcgccgggaagatgaggcaaccggcccgctgaacgtctacggcgaaaccaagcgcgcaggtgaactggcgctggagcaaggcaacccgcgtcacctgattttccgtaccagctgggtgtatgccacccgcggtgccaactttgccaaaaccatgctccgcctggcgggtgagaaagagacgctctccatcattgacgaccagcacggggcgcccaccggcgcagagctgctggcagactgcacggcgacggcaatccgtgaaacgctgcgtgatccggcgctggccggtacctatcatctggtggccagcggcgagaccagctggtgtgactacgcccgctatgtgtttgaggtggcgagagcgcacggtgcagagctggcggttcaggaagtgaagggcatcccgacgacggcctatccgacgccggcgaagcgtccgctcaactctcgcctgtcgaatgaaaaattccagcaggcattcggggtgactctcccggactggcgtcagggtgtggctcgcgtggtaacagaagtcctgggtaaataa

SEQ ID NO: 229288 - DNA, 1296 bp, Klebsiella pneumoniae
atgagtatcaaagttcagcacgtcggcaaggcgtataaatattatccctccaaatggaaccgggtcattgagaaacttctgccgggcgataagccgcggcacagcaagaaatgggtattgaaagatatcaatttcagtattgaacccggtgaagcggtcggcattgttggggtgaacggcgcaggtaaaagtacgttactgaagctgctgactggcaccactcagccgaccaaaggcagcattgagatccaggggcgtgtcgctgcgctgctggagctgggcatgggcttccatcctgactttaccggtcggcagaacgtgtatatgtccgggctgatgatgggcctgagccgggaagagattgagcgcttaatgccggagatcgaagcctttgcggatatcggtgactacattgaagagcccgtgcgcatctactccagcgggatgcaaatgcgcctggcgttcgccgtggccacggcctcacgcccggatattctgatcgtcgatgaagcgctttccgttggtgactcccgctttcaggcgaagtgctatgcccgtattgcggacttcaaaaagcagggcaccacgctgctgctggtctcccacagcgccggggatatcgtcaaacactgtgaccgcgccattttcctcaaaaatggtgatatctgtatggacggcaccgcccgtgacgtgaccaaccgttatctggatgagctgtttggcaaagccgacaaaaacagcgcgccaaaaagcgaaacggcaacctcgtcagccagcggcgaaagtcagatgtctctcgatgagattgaagatgtgtaccacacgcgcccaggctaccgtccggaagagtaccgttgggggcaggggggtgcaaaaatcattgattatcacatccaaagcgccggggttgattttccgccttcactgacgggcaatcagcagaccgatttcctgatgaaagtcgtatttgaatatgactttgattgcgtggtaccgggtttgttaatcaaaactctggatggcttatttctatatggtaccaactctttcctggcctcggaaggccgggaaaacatttcggtatcacgtggggacgttagagtatttaaattcagttttccggttgatttaaatagcggtgactatcttctgtcgtttggtatttcagagggaagcccgcaaaccgaaatgacgccgctcgatcgtcgctatgactccatcattttgcatgtaactaagagcatggatttctggggagtgattgacctgaagtcgactttcaatagttacaaatga

SEQ ID NO: 229289 - DNA, 1515 bp, Klebsiella pneumoniae; identical to SEQ ID NO: 52478

SEQ ID NO: 229290 - DNA, 1545 bp, Klebsiella pneumoniae; identical to SEQ ID NO: 23311

SEQ ID NO: 229291 - DNA, 4224 bp, Klebsiella pneumoniae
gtgaaagacttattaaagtttctgaaagcgcaaactaaaaccgaagagtttgatgcgatcaaaattgctctggcttcgccagacatgatccgttcatggtctttcggtgaagttaaaaagccggaaaccattaactaccgtacgttcaaacctgagcgtgacggccttttctgcgcccgtatctttgggccggtaaaagattatgagtgcctgtgcggtaagtacaagcgcctgaaacaccgcggtgtgatctgtgagaagtgcggcgttgaagtgacccagactaaagtgcgtcgtgagcgcatgggccacatcgagctggcatgtccgactgcgcacatctggttcctgaaatccctgccgtcccgtatcggtctgctgctggatatgccgctgcgcgatatcgaacgtgtactgtactttgaatcctatgtggttatcgaaggtggcatgaccaacctcgaacgcaaccagattctgacggaagaacagtacctggacgcgctggaagagttcggtgacgaattcgacgcgaaaatgggcgcggaagcgatccaggcgctgctgcgcaatatggatctggagcaggaatgcgagcagctgcgtgaagagctgaacgaaaccaactccgaaaccaagcgtaaaaagctgaccaagcgcattaagctgctggaagctttcgttcagtctggcaacaagccggagtggatgatcctgaccgttctgccggtactgccgccagatctgcgtccgctggttccgctggacggtggtcgtttcgcgacgtctgacctcaacgatctgtatcgtcgcgtgatcaaccgtaacaaccgtctgaaacgtctgctggatctggctgcgccggatatcatcgtacgcaacgaaaaacgtatgctgcaggaagcggttgacgccctgctggataacggtcgtcgcggtcgtgcgatcaccggttctaacaaacgtcctctgaaatctttggccgatatgatcaaaggtaaacagggtcgtttccgccagaacctgctcggtaaacgcgttgactactccggtcgttctgttatcaccgtaggtccatacctgcgtctgcatcagtgcggtctgccgaagaaaatggcgctggagctgttcaaaccgttcatctacggcaagctggaactgcgtggcctggccaccaccatcaaagccgctaagaagatggttgagcgcgaagaagctgtcgtttgggatatcctggacgaagttatccgcgaacacccggtcctgctgaaccgtgcgccaaccctgcaccgtctgggtattcaggcattcgaaccggttctgatcgaaggtaaagccatccagctgcacccgctggtttgtgcggcatacaacgccgacttcgatggtgaccagatggctgttcacgtaccgctgacgctggaagcccagctggaagcgcgtgcgctgatgatgtctaccaacaacatcctgtccccggcgaacggcgaaccaatcatcgttccgtctcaggacgttgtactgggtctgtactacatgacccgtgacagtgttaacgccaaaggcgaaggcatggtgctgactggcccgaaagaagctgagcgtatttatcgcgccggcctggcctctctgcatgcgcgcgttaaagtgcgtatcactgaatacgaaaaagacgacaatggtgagtttgtcgcgaaaaccagcctgaaagacacgaccgttggccgtgccattctgtggatgatcgtaccgaaaggtctgccgttctctatcgtgaaccaggcgcttggtaagaaagcgatctccaagatgctgaacacctgttaccgtattctgggtctgaaaccgaccgttatttttgcggaccagacgatgtacaccggctttgcttacgcagcgcgttcaggtgcatccgttggtatcgatgacatggtcatcccggagaaaaaatacgaaatcatcagcgaagcggaagcggaagttgctgagattcaggaacagttccagtccggtctggtgaccgcgggcgaacgctacaacaaagttatcgatatctgggctgcggcgaacgatcgtgtatccaaagcgatgatggataacctgcaaaccgaaaccgtgattaaccgtgacggtcaggaagagcagcaggtttccttcaacagcatctacatgatggccgactccggtgcgcgtggttctgcggcacagattcgtcagctggctggtatgcgtggtctgatggcgaagccggatggctccatcatcgaaacgccgatcaccgcgaacttccgtgaaggtctgaacgtactccagtacttcatctccacccacggtgctcgtaaaggtctggcggataccgcactgaaaacagcgaactccggttacctgactcgtcgtctggttgacgttgcgcaggacctggtcgtcactgaagacgactgcggcaccctggaaggcatcaccatgacgccggttatcgaaggtggcgacgttaaagagccgctgcgcgatcgcgtactgggtcgtgtgactgcggaagatgttctgaagccgggtaccgcggatattctggttccacgcaacacgctgctgcatgagcactggtgtgacctgctggaagcgaactccgttgactccgtcaaagtgcgttccgttgtatcctgtgacaccgactttggcgtctgcgcgcactgctatggtcgtgacctggcgcgtggccacctcatcaacaaaggtgaggctatcggcgttatcgcggcacagtccatcggtgagccgggtacacagctgacgatgcgtacgttccacatcggtggtgcggcatctcgtgcggctgctgaatccagcatccaggtgaaaaacaaaggtagcatcaagctcagcaacgcgaagtcggttgtgaactccagtggtaagctggttatcacttcccgtaataccgagctgaagctgatcgacgaattcggtcgtaccaaagagagctataaagtaccttacggtgcggttatggcgaaaggcgacggtgagcaggttgccggcggtgaaaccgtcgcaaactgggatccgcacaccatgccggttatcaccgaagttagcggtttcatccgtttcactgacatgatcgacggtcagaccattactcgtcagactgacgagctgaccggtctgtcttcgctggtggttctggactctgcagaacgtaccgcaggtggtaaagatctgcgtccagcactgaaaattgttgatgctcagggcaacgacgttctgatcccaggcactgatatgcctgctcagtacttcctgccgggtaaagcgattgttcagctggaagatggcgtacagatcagctcgggtgacaccctggcgcgtattccgcaggaatccggcggtaccaaggatatcaccggtggtctgccgcgcgttgcggacctgttcgaagcacgtcgtccgaaagagccggctatcctggctgaaatcagcggtatcatttccttcggtaaagaaaccaaagggaaacgtcgcctggttatcaccccggtagacggtagcgagccgtacgaagagatgatcccgaaatggcgtcagctcaacgtgttcgaaggtgaacgtgtggaacgtggtgatgtggtttccgacggtccggaagcaccgcacgacattctgcgtctgcgtggcgtacatgctgtgacccgttacattgttaacgaagtccaggacgtataccgtctgcagggcgttaagattaacgataagcacatcgaagttatcgttcgtcagatgctgcgtaaagccaccatcgaaagcgcaggcagctccgacttcctcgaaggcgagcaggtggaatactcccgcgtcaagatcgcgaaccgcgaactggaagcgaacggcaaagtgggcgcaacgttctcccgcgatctgctgggtatcaccaaagcgtctctggccaccgagtccttcatctccgcggcatcgttccaggagaccactcgcgtgctgaccgaagcagccgttgcgggcaaacgcgacgaactgcgcggtctgaaagagaacgtcatcgtgggtcgtctgatcccggccggtaccggttatgcgtatcaccaggatcgtatgcgccgtcgcgctgctggcgagctgccggcggcaccgcaggtgagcgtggaagaagcgtctgccaacctggcagagctgctgaacgcaggtctgggcggttctgacaacgattaa

SEQ ID NO: 229292 - DNA, 786 bp, Klebsiella pneumoniae
atgcttattcgtaacatgctcattaaatattattcggcagctggtagtgaaggtagtgatggcggtggctccggtagtggtgcgcccgagattacgccggaaatccaaaagctgatcgatgagcaggtcagtgctcaggtttcaggcctgaaaaataaaaatagtgagttactcggtaagctcaaagagtccactgagtcgcttaagcgttttgaaggtatcgatcctgacgcggtgaaaaccattctccagcgtttctctgatgatgaagaggcgcaactgatcgccgccgggaaaattgacgaggtactggataaacgcactgagcggctacgtgctgatgttgataagcaaatcaaagccgctaacgaacgcgctgaaaaggcggaagcgttctcgagcaaattccgtgatcgcgtcctgggggatgctattcgcagcgcagcgcttaaggctggcgcgctgccagaagcatccgacgatctgattcttcgtgctaaaggcacattccagctcaacgacgaaggcgaggccgtagcagttgatgcaaatggcgatgttctgtttggtaaagacggaaaaactccgctcaccccggttgagtgggctgaatctctgaaagagacggccccgcacctgttcccgcgtgccgaaggctccggggctggtggtcataaacccggtggcggtggcggtagtctgaaacgttcagaaatgagctcaagcgacaaagcggactacatccgcaaacatggccagcaggcctatctcaaattgcctaagtaa

SEQ ID NO: 229293 - DNA, 195 bp, Klebsiella pneumoniae
atgacgatgttgatcgcgagctgcgcgaaagatttacccgccccggtggtggttgataccgcctgcagttgggtgcggatcatctacctgaccgaccacgatatcgacgtgctggataagcagaccaagcgcgacatcctggcgcacaacaaagcagtgcaggccaattgccagagcattacccctactcagtga

SEQ ID NO: 229294 - DNA, 279 bp, Klebsiella pneumoniae
atggtaaatgatccttcagcactggttaacgcactcacctgtactgtgattgttcttgctttgatgttttaccaacgtggtggatcccgacacaggccgggaatatcattcctggcttatctcatggtgctggtttacgccagcatcccatttcgtttcctgtttggcctttacgagtcatcccactggttggtggtgctggcaaacatcctaatctgcgccgccgtgctgtgggctcggggtaacgtggcgcgtctggtcgatacactgaggcactaa

SEQ ID NO: 229295 - DNA, 150 bp, Klebsiella pneumoniae
atgaaaaaaatcatcatggccgccatcgtggtcgcttcgctatgcctgagtaacgttgtggcagctgcggatgtcgtcataaccaccggccagcagggcttaacctacattttaaaaaaattagctgaaacagccgatcagtcttcttaa

SEQ ID NO: 229296 - DNA, 129 bp, Klebsiella pneumoniae
atgcaccggcacaggtgcagaaatgataaagccctggactatgccaaggctattaataagaacttacaaataattatgcggctgaacccgaatcttcatcagggccagcgtttgcggccggcaaagtga

SEQ ID NO: 229297 - DNA, 480 bp, Klebsiella pneumoniae
atgacagcagatttttctccagttaaaaagggtacgatattgctcctttcaggttcgaaggagcatatctacttcatttgtaatgatccggttttctatcctaagattgcaaaggcttcatttcttgcagtgaatctcacttccatagttgaaggaattgaacatgatccgacatgtgttttgaatgttggagatcatactttcgtcaaacatccgagctacattttctacgggaaagccgacatatttggtgttgaaacgattgctggtcaagttcaaagtggagacattagagttcaccagccgtgcgaagactcgacgtttcaaagaattttggacggttttacgcaatcatcatttgttaagcctaagatactgaattattatcagaaatattgtgtttctgctacggctgagccagaagtcactttgccggccgcaaacgctggccctgatgaagattcgggttcagccgcataa

SEQ ID NO: 229298 - DNA, 558 bp, Klebsiella pneumoniae
atgttctgcgaagaaagagtggctcagatggccgcctacctgctgtcgaaagacggtgggcgcatgccatatctgaaactgatgaaattgctgtacctctcagatcgtgaatcaatgaatcgtttcggtgagtctctaagtggtgaccatatggtcgctatgccccatggcccagttttgtcgcgatccctagacatgatcaatgacagagagcaggggcaagagatctggaaaagttgggttgataagccagatcgttatgatttagctttgaaacgacagcatttcgatagaaatgatttagatgaactaagcgattctgatctttcaattctcgaaaatgtatattgtacctttggtcacatggataagtgggaaattcgtgactatacgcatgaaaaatgcgctgaatggaaagatccgaaaggtggttcatatccaatcactccagagagtgtgttcagtgcgttgggtaaatccgatgagcaggttagacttttgtctgacagaatgagagaattctcagaactagctcggattaccagtggactgaaatga

SEQ ID NO: 229299 - DNA, 759 bp, Klebsiella pneumoniae
atgaaacttgaatcattaccgaaattttattcgccaaaatccccaaagctgaatgatgaaacgccggccaccggcggtacttctctgacgattacggatgttatggctgctcaagctatggtgtctgctaaggcacgatttggattcaatttgttcctcgcaaaaatgggaattcaggatcccgaaccggctatccagcagttaatcaactacgtaatgtcgttaagaaatcccgtaatatccaagctttccgagaatgtgcgtattgaaatggcatcttgcttagccgcttttgcgtttaacgattatgcaagatctgccgcaagtaagagcacatgcccgcattgccatggacagggactcattcgagaggtaaaggatgttgttaaacatgctggtgtgaaaggcattcccccttttattaaacctgaagtggttgaatcaacatgcagacattgtgcaggaaagggttggataagcactgcatgtagggactgtcatgggcgcggtcttgtactcgataaaaagcgtactgagttgcataaagtaccggtacaaaaattatgtggacggtgcaatggcaagggttacagccgtttacctactaccttggtaaaaggtcgggtaattcggttggttccggatatgacaaattatcaatggtatagcggctatgctgaggtgatcaatattctcgtcacaaagtgttggcaggaagagagctatgccgaggctgaattaaaaagaataacaagttga

SEQ ID NO: 229300 - DNA, 1005 bp, Klebsiella pneumoniae
atggcaaaaccggactggggcgagcttcagcaacggttcctgtccgatcatgccgcaaccggcgtatcaccgaaggattggtgtaaagcgcagggactgaactacgctaccgcccgtcgatatatcaagaagccttctgcgcaaactgcgcaaaaaagtgcgcagaaaaaagtgcgcactgcgcaaaaggaaaaatgcgcagaagagctggtggaagatgatggactcaccgatcaacagcgtttatttgtcgcggaatacctgaaggacaacaacgccacgcaggccgctatccgtgccgggtacagcaagaagacagcgaatgagcagggagcaaggctgttagcaaaagttagtattgcgcaggccattgcgcagcagcagaaagcatccattgtgcgcacgcttggcagcgctgatgaagtgcttgagcagatgtggcggctggcaacattcgacgccaaccaactttctcagtatcgccgcgggagctgccgttactgctggggtttcggtcaccagtatcaatggcgcgatgcggttgagttcgaagagaagctggctgaggctttagcgaagaaagggaaagagccaaacgacagaggcggctacggttacgaccataccagctcgcctaacccgaaatgtcctcgctgtaatggtgatggcatcggccagcctttcttcgccgatacgcgcaagctggcaccggatgctgcgcttgcctattccggtgtgaagcttggtaagaatggcgttgagataaccgccatcagccgggagcgcatgtacgaggcggtgataaaacgtctcggcctggctgatagtgagttcgcccagcgtctgcagcagattgaaatcgagcgccggcagctggagatcgacaagctccgtaaagagctggccgctgacccggaggatgacgaaccaacgccagttgcaatcaatatcaacgtagtcgatgcacgagtgagggaagaggatggcgatagcaccgacgcttaa

SEQ ID NO: 229301 - DNA, 189 bp, Klebsiella pneumoniae
atgccggtatgcacgatttcaatagaagtaaaaagccgctggtggctaccgttctacgtcaagacactgactttattctgtctgatgttccagcgcgagcctgattacgaaaagatttccgcatttatcgcgaagtatggcatcggccagaaagtgaaggcgggaccagtgcgaaagaatacggagtaa

SEQ ID NO: 229302 - DNA, 330 bp, Klebsiella pneumoniae
atgtttagcgttctttatcacccggaagccagggaagaagccacagcattacccgtaaaaatcagggtgaagtttgaccgtctcatcggcaaactggagtatgacgcccgattactgcgggagccggacacgaagcccctgggcgatggactttttgagatccgcacgatggggacggacatagccaggggaatctgggtataccacaaaggcaataccatcatcatgctccgtgttttcatcaagaagtcacagaaaacgccagcgaaagaaatcgatctcgccaaaaagcggttagcggaggtacttaatgaaactggtaagccataa

SEQ ID NO: 229303 - DNA, 282 bp, Klebsiella pneumoniae; identical to SEQ ID NO: 101047

SEQ ID NO: 229304 - DNA, 1182 bp, Klebsiella pneumoniae; identical to SEQ ID NO: 92418

SEQ ID NO: 229305 - DNA, 210 bp, Klebsiella pneumoniae
atgttctgcaatgtctttggcgctgagaataagatcggcagtttcgctttttgccgacgtcaggtcggtatgtgcgacttcagcttctttattcatttcggcaaggatctttttgacattcatttcaacgatgaagctgctgcccaaaccattaccgcacacgataagcacttttttcattctgttttccttcagtcaataacggcctga

SEQ ID NO: 229306 - DNA, 2181 bp, Klebsiella pneumoniae; identical to SEQ ID NO: 186045

SEQ ID NO: 229307 - DNA, 267 bp, Klebsiella pneumoniae
atgttttcacagtatggcgaatatgcactgatgatcaccctgaacaacggcgttctcaaggtctattccggtatgactgataacccggaaactctactgaccggatgtccggcatttgattacgtcatgctgggcagaaacagctcggtttctggttctacagtgtcaaactctggattctggggaggctggctgcagaaagccgtactgttcgattcggcgctcagtgacgcggatatgattgcgcagtttgacctgctcgcataa

SEQ ID NO: 229308 - DNA, 432 bp, Klebsiella pneumoniae
atgactgatatcaccgaactggcgcaatcggaaattaatgatgcgttggcccagctgaagcagatcagcgaataccccacgccgtctactcaatacgctcgagtgctgcgtaaatacttcgcctcgctggtagaggcgctggagcttaaggaagagcagcgcgctaactggtcccagatggcgcagaaattgggggaagacttggatgcggcagagaagcgcatcgccgagctggagcgcgaacaggagcaacttcgcccggtaggtgtaatgagcgagaaagcatttcatcgtcttgaaaacagaaactgtcgctttattgctctgtggccgcgccctggtatctttttgcagcgcaagcgacccgaggacggcgtgatcgtttatgcgcgtacagctgccgccgctggcatcaaggtggaggctgagtga

SEQ ID NO: 229309 - DNA, 753 bp, Klebsiella pneumoniae
atgcgaacaatacatgccgccatgctggcggggtgcctttgctgcgccctgatgccggctttcgccaaagacgcgggctggcagtggtacaacgagaaactgaagccccgtgatgaggacaggaaagccgtaccagcggcaccaccgccgcaaatggatattctggagaaactcgccacactccaggcggccaccaaacggtcgttgtacgaagccattctgtatccatcgtctgaaaacttcgtgaagtatttccggctgcagaactactggacgcagcaggcaggtttgttctcgatgagtgcgaagaaagccatgctggaaaaccccgaactcgattacaacctgcagtacagccactacaacggcacggtaaaaaaccagctcgccgctgattatgccgaacagcgtcaggctatctccaccctcgcacagcactacggcgtgatgttcttctaccgggggcgcgaagcgatcgatggccagctggtccaggtgattaaaaattttcgcgaaacctatggcctgagcgtcataccggtgtcggttgacggcgtgattaaccccatgctgcccgacagccggacggaccagggccaggctgagcagcttggcgtgaagttcttccccgcgatgatgctggttaacccgaaaagtggccaggtgaagcctctcagttacggctttatcagtcaggacgacctggcgaaacagttcctctatgtctccagcgactttaaaccgaatttctaa

SEQ ID NO: 229310 - DNA, 240 bp, Klebsiella pneumoniae
atgcgaaatattcgttttccggatttagatatcaccgggatgtgggtgctggccgtgggcgtgtttttccacctgatagcccggcttgtcagaaaacagcctgagctggccgtccaggccggggaaatcttcgggctgggtatggtggtgttcgggggataccgcattcttaacgccctgattgctgaagccgaaaaagaggagaaagcctgtgaaaaacagcctgatgaacctcgctaa

SEQ ID NO: 229311 - DNA, 558 bp, Klebsiella pneumoniae
gtgaaaaacagcctgatgaacctcgctaagacgccgctggcggcactggctctttcccttgcactggccgggatggcacatgcgggaacgctcgatgaggtgaagtcgctctgggatccgcggggtatctccggtactgaaacggcctccccgcagagcgacactccccaggcggtgagcggggcatctcagccacgctggttacgactcagcaacggaaagcaggtggacctgcgcgactggaaagtggtgctgttcatgcagggacactgtccatactgccataaatttgacccggtgctgaagcagctggccggacagtatggcttctccgtgttctcttacaccattgacggacagggtgatgacgcgtttccggaagcgctgccggcgcctcctgacgtgatgcagacctttttccccaatatcccggtggcgaccccgactacgtttctggtgaacgtaaacacgctggcagcgtacccgatcctgcagggcgccacggatgcacagggctttatggccagagtggatacggtatttcagatgatgcattag

SEQ ID NO: 229312 - DNA, 393 bp, Klebsiella pneumoniae
atggctaagatccaagtttatgtaaatgacaaagttgcagagaaaattaatgcgatagcagttcagcgtcgtgctgaaggtgcgaaagagaaagatattagctattcaagtattgcatcgatgttgcttgagcttggtttgcgtgtctacgaagcccagatggaacgcaaagaatccgggtttaatcagatggcattcaatagagcgctgcttgaaagcatggttaaaacacagtttactgtgaataaggtgctggggatcgaatgtttgagtcctcatgttcatggtaacccaagatgggaatggtcagggttaatagagaacatacgggatgatgtaagtgcggtgatggaaaaattctttccgaatgaaagtgagattgaggatgagtag

SEQ ID NO: 229313 - DNA, 702 bp, Klebsiella pneumoniae
atgtgtgcgatggatcgtagtggtgatgacagcttaagtcaatcggttagggatgctcttcttcacataaaagggttgtataacacctctcctgtctctgtttgcgtaagaaaccaacaacgcgatgtactatattccaacacatcatttgaacaaatgtatgacttttttaaaacagaatgtgtagcaggtagtttctctggatcatttgatgaattggagttgatgttttcccaattagaacttgattgcatggtgctaggcaaaggttgtgtgttaagtaaaattttttcgtgtggaaaatcaaattttcaaattcggattgagtgtatcagtcatttggatgatgattattattttttttggcaaataaatcttatgataacggttccattacccagccggaaaatggaggttatcaaatcaaaaggtaagtcagattttgatgaggctattgcaaggataagtgatttgaatatgattcctctttcattttatgttcttggttttagttgtttggatatatcaagttatatctgtgtgcctgagagaattgtgaaaaaaagaatcgatcggtcgaaagagaaagtattggagagttatccttcttttagctcatttatattggattgttacaagaccaggaaaatatattttttcattgagaatgtttacgaatatataatgttaatgaaatgttaa

SEQ ID NO: 229314 - DNA, 369 bp, Klebsiella pneumoniae
atgaatgctgtattaagtgttcagggctctgctgtctctgagaaaaccaaaccgtcttttatgtcccgcgttttcaataaaaagaaagcactgaaagtcgctaaagttgcgctgccggttgctgctgtggcggcgttcttcccggatgctgcgatggccaccaccacggcaaccgacctgatgaagtccggggatgcgaccgttaaaggcacgtttggtaagcaatccagcgtagtcaaatgggttgttctggcagaagtcgtcgccggtggcatcatgtacatgatgaccaaaaacgtgaagttcctgtttggcttcgcgattatttccacctttataaccatcggtatgtcggtcgccggttactga

SEQ ID NO: 229315 - DNA, 597 bp, Klebsiella pneumoniae
atggcagaagaaaaacgccctgtactgagcctgaaacgaaaaccggcggagaacagtacgacccccgcagaggcgacccctgctcctggtgtggtgcgccgtaagaaggtcgtggtggtctcgtccccgccggcctggaaggcaaagaaagcgaaacttgagaaggttaaacaagtggccgaagccgccgcgcgcaacactgcgccggcgccggttaaagcggtaaagacgccacctccggtgcgttatcttcgcctgctgccgccggaacaggccattatgacgctgaaggctttctggccacagctgttcgacggaaactccccccgtctgctggtaacgggcatgcgcgaacagctgtttgccgatattgtgaagcgcgacctgccgctgtcgcataaacaggtgatcaagtgcctgaagagtctgacccggtctgcgggctatctgtcccggatgaaggtgggggcctcccgctatgatctgcaggggaatgccgtcgcgaccgtcaccgcagaggaagcgcagtacgccagtgagcgcatgatgaaagaactcctgcgaacggagcgtatgcggagccagtctgctgactga

SEQ ID NO: 229316 - DNA, 222 bp, Klebsiella pneumoniae
atgtccgcactcgataaagcaattaaagctgctggctcagcccgaaagctcagtctcgcgcttggcgtgacgagtatgtctgtaagtcattggaaaaatcgtgaccacggagtagtcccgcccaaccacattctacccattttcaatatgacaggtgtaacaccccacgagttgcgccccgacttgtacccgaaccctaccgacggtttgccgcaggagtag

SEQ ID NO: 229317 - DNA, 426 bp, Klebsiella pneumoniae
atgatttattgcgcgtgcaaaccaaatatttacaatgactctatgagaaaagaagaacccaacctcgttttggtagaacgacttactgagatcactgatcgcggcgttaccaaagcagacatggcacgcatagccggagttacccctcaggccgtaaacggctggttcaaaaaaggagtaattagtaagaaatcagcgctggctatagccgatgcggttggtatttctgttgcttggttactcggtgaagacgttgatgagaaagacggactgaagcctgacgaacagcgcttactggaactctatcgccagttgcccgacgaagagcaaaagaacatgcatcgcattttcgcaattcgtctaaaggaactggatgagttatatgaaaaatatatgaatagacgagtcaaaagtgacaatagctag

SEQ ID NO: 229318 - DNA, 1218 bp, Klebsiella pneumoniae
atggatcagactgttcagcgcccgccggtccttattcagatgggtgatcaccagagtctgcgactgtgcctccggggtccgtccggtatagtccttcaccagcgcctcgtagagcgtcgcgggctgaccttccggcagggttttcccctcgctcagtgccttttctatctccttttcctgcttctgtgtgaattccaccacagaactgcccggcgcccaggcgccttcttttctcggcacctgctccggcgtgacctgctcaatggtggtcagggcgcggtgcacatcccgctcaatcaggctgtagaccgccggtcgcagctcaggtacctggcgcacaatctctttcatgatggcaacgtcggcggcgctgcgctgctgcgtcagcctgaacggctggcccgacgcgatgggcggcagctggtcggtatccccgctgggcaccgcccgtccaccgccggcggcgatgagggagtgggcttttgccatatcggccagccccaccatcgagctctcgtcgagcaggaacagggtgttgctgaaatcgggtgtctgcccattgcgctgcagcagctgcgtgtcgtggaggaacgacgccgtcgtgcgcgcatccacgccggcactctgcatttccccgaccgcgcgatgcgtcggcgccagaccgatgacgcgcgggcgggtctcttccggcagcagactgatggcactcatgactgcccggaactgggtggttttccccaccccggcatacccctgaaccaccgtgaaccggtccgtgctctccagaatcatccgggtcgccgcccgctgtccggcggtcagttccgtcatcagactgtccggcacgcggtccatcaggggggccaccgcgtctttaccttccagcacccgggtcaggatgcttttctcggcgtcccaggcctgacgggatatcagcaggtcattgccacgcccgggtgccaccggtacattcagcaactgccccgacctgatttgtgcctggatggtcgtgtcgatgtccgccatcgaaaccttcccgcccccggtttccattgccgtcgccagcagctggggccgggagaaggtcaggtcctggctctcaagcagcgggatggccaggtgaatggcctgttctgccggggtatgcagcccggccttctgctgcgcaatggccgcatccagatccgtctcgccggatcgggacttcagctgctctga

SEQ ID NO: 229319 - DNA, 1077 bp, Klebsiella pneumoniae
atgccgcgacagcttctccgtcgtgcgcgccgcatcctgcgccgagtacagccggaggtgacttccgctctgtgccagctggttgagggtggcgttatccagctcacgctgcgtcaccgacgcaaagaccgttgccgtctcgctaaccgacctgccgggactttccacccagccgtgggcgactttaataccgtcaaacacgcccgcgcccacggccagggtctgcgtggttttctgccccggccgctgtaccgtcagctgcccgtcctccacgttcatcactgtgacgctctccccgcccttaaggcgtgtgtccggtatcttcccgagcaccgccagacgttccccctctgccaccggcagtgtatctgcccggaaaagcgtccactggctgtcgaccgcggaaaccttcagatccagacggaccccatcccggtctttcagggtcagcatattgctgctcgcggtcacccggtcaatgacaaagcgatcgtgcgtccgggtctccggatcccagcgttccatcaccatcccctcccggtaataatcccgcacgccccggcttttgctgtccagccacaccggcgtcagggctgtaatggtcgtgtctttctcacccagcaccccctcctgtctgagggagtctcggatgaggccgttgagtacgctctgttcacgcgtcccgctgatttgggccacgctttcctgcccttcacgtacgctgacggcaaactcctgtgccagccggctgtagcgtgctcctttatccggttcactgatgatgtcggctgtggtcttatgccccccctgccagcgatacgtattcacgccgctgtccttcagcaccgtcagcgcactgccggtcccgctgcgcttcccgctgtcggagagcaggacctgcacgttatggcgcatcgcgccatcgagcagggaaatcgtttccttcaggctcagcttttccgcctgatccacgatgagtgttccgcccggaataaacgccgtcccgtcctgcagggcggatttaccggtcaccgtttccccggccagacgcacatcaccggcgagaaaatctcgtga

SEQ ID NO: 229320 - DNA, 261 bp, Klebsiella pneumoniae
atgaatcacatcgaatttattgaaaagaatgtccgcgaggaacttcttcgcctgggcttcacgcaagcagtggctcaggggggggcataccaggcggtcgatatgtacaagcggatgtcacaggcaagccgcaaagggggaatgtttgacgatgttatgcgatacgcaaagttatgggctgagaagcagaccagcgcagctgaacgccgggaagcaaagcggaaagtgcgaaagggcggcgaccaggctgggttgttctga

SEQ ID NO: 229321 - DNA, 249 bp, Klebsiella pneumoniae; identical to SEQ ID NO: 17230

SEQ ID NO: 229322 - DNA, 411 bp, Klebsiella pneumoniae
atgcgccctaacattacaatcaccatccccacgccttacctcccaattgacccgcgtctggtggtgctggttggtgctgatctggtggcggcggagcaataccggctgtatcaggccgctgaccgcccaacggagaaaatcgccgcgcagctgctgggtgaaaccatcgcgggccgtaaagccattatcccgccatttatgccgggcaaacgtatggtggtaacgccgcttagcaacctgcatatctacacccagcgcaatacccgtatgcgtaaaggtgaatttgttgaagaccgtaagcagttcgaaaacaaatacctgcgtaatgaaggatatgccgttgaagtgccggaattgtatgccgccattgatgagtcggcagtgactatcggcaaggtatcagggggctga

SEQ ID NO: 229323 - DNA, 591 bp, Klebsiella pneumoniae
atggcaagattccgcatcaatccagattcagatagcgctcctgttcttaacagggttcttgacgcctacgggtttactcaaaaattacagttagccgaccacctaggaattgcttctagttcaatgtctaaccgctacaaacgtggcggactccccacggacataatggtgaaatgtatggcggaaacaggtgtcagcttagaatggctagcgactggccaggggaagaaatttgaaagcgatgaactagacattatgaaaatgcctagaaaaaaactagttgacggacaactttatgactctggttatgtcatgtttgataaagtatttttcaaagcagggattcccctcccttcggacccaatttgtgtacaagatgaaaaagcacaatacatactcgatcagaactttgcagaggtgtttgatggtgaatggttagtaaatatcgaaggaaaaacaagcatcagaactctaacacgcatcccaatcaaaaaagttcgagttagcggtgtaggtatggcttttgattgtgcgctagaagatattgatgttattggcagagtgttactgattatctccgagggaaactaa

SEQ ID NO: 229324 - DNA, 213 bp, Klebsiella pneumoniae
atgtgggctgaattcgaccgtatcagcccaatcggcgatattcgcggcgatattctcaatgctcagctggtatctgcggtttacggagcgcagggcggtaaagtcaccattgaagatgctcagcttcagtggagcgcagaagaggttgaggtaaacgacggcggcgatccctttgcagggctggaagcggcgctgctggctgcgtcagcatag

SEQ ID NO: 229325 - DNA, 429 bp, Klebsiella pneumoniae
atgaaaatcagtattccgctgccgtcactcagcgaacaaaagaaaatcgcttatgaggaaggcataaaagagaatgtgcgacagctgcaggccaatctgaatgcgccggtgattgatactggttcagaaattaatgccgccgaattcggcgataagcatttgttgaccgaagagagtgggtgggaaccaccagccggcgaactgattgatgcatggtttactcagttcaaacgtgctttccctgaatacaactcagataaaaagctgggttatcttctgggtatggtcggcagcaataccgatcgcagaatccgaacgttcagaactggcgaacggccgataccctacgggatatggcgccgctttttagttgtcacagggcgtgtcaatcaggaaatcttcgaggtgaaaggtttcttttctgactga

SEQ ID NO: 229326 - DNA, 288 bp, Klebsiella pneumoniae
atgaaactctctgagttgacgattacaaagacgaacttccctgaggcagatttctggattgttcgtcgaggctctttaaaaacctgtggtgaaccgaccaaaacctttaacccggagcatatcggagtaaaggtggtcaggaccgatatccttcttcctgattacctttactactgcatgatgcacctgcaccgctcaaaggtatgggaggccagagccacaggaaccctgaacctcgtcaacataaagatttcagatgtgcgttctatcgagttggaaccgcgctga

SEQ ID NO: 229327 - DNA, 312 bp, Klebsiella pneumoniae
atggcaaagcatatgcaagacaaagagagcattgccggaattacctggctggctctgctgatcattgcggggtggggcgggctagtccgtttcctgatggatgtaaagcagggtaaggcgaagtggagctggataaacgctctcgcgcaaatcgtggtatcgggattcaccggggtcatcgatgggctcatcagcattgaaggtggcctgagtatttacatgattctggcgactgctggtatcagcggtgcaatgggttctgtcgcccttacgtatttctgggagcgtattacaggagtgaaagcacaatga

SEQ ID NO: 229328 - DNA, 540 bp, Klebsiella pneumoniae
atgacagcagaccagatcattgaagccatcctcggcaaagagggggggtatgttaataacccgaatgataaaggtggccctactcgctggggtatcacgcagaacacagcgcgtgcctacggttacaaaggcgatatgaaagagctctctcgggaaactgcgaaagaaatctatatgcagcagtactggctggaacccaaatttgacaagatcgccgaactgtcaccatcaatcgcagaagagttatgcgataccggcgtcaacatggggccgcgtgtttccacaacgttcctgcagcgttggctaacggcactgaaccaacgcggcaaactgtatcccgacctgaaaccggatggcgtcattgggaacatcacgatcgccgcgctgcgcagttacctcgcagtacggggtagcgccggggtcacagtgatattgaaagggttgaactgcagtcagggcgcacggtatctcgaactggcggaagcgcgggaagccaatgaagaatttctctacggctgggttaaggagcgtgtcctgtga

SEQ ID NO: 229329 - DNA, 168 bp, Klebsiella pneumoniae
atggccggagtgccgctccctctgtccctgaatgatatcgagctttacctggcatcgcgcaccattctgatcgaccgcattgagtttgacgcagcgatactggctctcgatgatgcctggagagctgagtgggctgaagagcagaaaagacaggcaaaagtgaagtag

SEQ ID NO: 229330 - DNA, 933 bp, Klebsiella pneumoniae
atgactagtcgcccacagatgattattaatgttcttcaggctaatcctgatgagcaatttacagcccgtcagcttgcccaaaaaatcattgatcactatggcgcagagcttgctgtaaagcgtcaaaatcctcgattcgccagtgatgaagatttcttgagtcaaatagctgctgaagtcggtgggagcagaaccgttcaggcaaaagcgatgtgtcctcaggttatgacgcgtgacaaacctcggcccagactttattactggggtaaggaaatcgataatggtgtgcaacaagagtcatcttttgatattgctccgactccgtctgctgagacggtagctttttctgagcatgctctttacccgcttttgattgagtacctttctgaagaagaagaattgctttgccgtcgtatcgatgaaaagcgttcaagcaacaacaaaggccttggggcaaaccattggctttatccggatattgttgctttgcagcctctcgataagggttgggatagcgttgtgcaaaactgcgtacggtatagcgaagggcgtttaacccgtctgtggtcttttgaggtaaaacgtcagcttaaccgtagcaatgttcgagaatgtttcttccaggcagtgagcaattcaagctgggcccattttggttatcttgtcgcgaccgaaataaatgaagataagcagcgtggtgtagaaagagagctgcagatgttgtgtgcattgcatggtattggcgtgatccttcttaatcagcaagatcccggtaatagccaaacgctgattcctgcacgagagcgaacaagtattgattggcaatccgtcaaccgcttggtggtagaaaacaaggattttaaagagtttatcgatctggtttccgattatcaccagacaggaaaaatacacaaagctctctggaataaataa

SEQ ID NO: 229331 - DNA, 309 bp, Klebsiella pneumoniae
atgattatcgccgccgaagtgaaacgtgatgaacaggggtactggacacatcctgcgctggtacgaagtggctgtgaaacttccgcagaattaagttactggctcagaacccataaactccagtgctttgtgatgacaatgcgcgatgaagcgcctgaagctttcgctgccggatttacggatgaagccccagatgcccgtggctggataccggagccaccggatgatgatggatggtttctgggatctgtccacgataccggcgacggacccgtctgctactggtttcggcataccacaaaatcctga

SEQ ID NO: 229332 - DNA, 357 bp, Klebsiella pneumoniae; identical to SEQ ID NO: 216383

SEQ ID NO: 229333 - DNA, 267 bp, Klebsiella pneumoniae
atgttttctcagtacggtgaatatgcgctgatgatcaccctgaacaacggggtgctgaaagtatacagcggcatgaccgatagcccggaaactctgctgaccggatgtccggcatttgattacgtcatgctgggcagaaacagctcggtttctgggtctacagtgtcaaactctggcttctggggtggctggctgcagaaggccgtactgttcgattcggcgctgagtgacgctgatatgattgcgcagtttgacctgctggcttaa

SEQ ID NO: 229334 - DNA, 1350 bp, Klebsiella pneumoniae
atgcctgctctggttcctgtcgtgcgtgatatggagggtaaagtacctgtctggctgaaagatggtgattttgatacaaggggggtaactgacgagttctcagacaaggtcgcgggaaaaggcactgccattccagccgccctggcgatgcttcccagtgaggtcgtttcaccccagcaggtgcctttattccgggacgctgcagggaatgtccccgtctatctcgttgacggtaaactagccgcgtatggcgtagactcgtctctgatcaacttgatttatgccgggcttcagggcctttttcagccaaatatgaaatttaccgatgggcggagtgcctggcgctggcgggtagcaaaatcgaagtacaaacttttggtgggagcaaaactgaaagtcggttttacgggggattcatggacggagaaacgcgccatcccgcagatgatggcaaacatcctttactctgaatacagcaaagctggcgaaggctggataaattttgcgtcggctaacggtgacacccttaacggtatgtcgttcaacatttccggctggacgacttacgatgcatcagagacaactgcggagccgacgtatggctgcgcactcgatggtttgtgtctctacgcaaccggcacggcagccaggatcacgctcaacgcggtcaacgccacctctctctctatctacttcaaagatacggcaggtgtcttccgctacaccattgacggcggcacaccagtagtggtcacgggcgcaggaactggcaatgtgaccaaagtggatgtcacgggccttagctctaccggaactcatcagctggtcattgacctgacgggtaatactgacaccgtggttatctacggcgtttatgcgtccatctcgtcgaacggcgtggaaatccaaaaatttggtaacgcgaacatcacggctgacggttacacaaaggtcctcagtaatatcagctactttgcccaacagctgaacccggacatcatttttatgattatcgggaccaacgactaccggctggggcggacgctatcgaacttctacacagcactgacttcctgggtgcaggcttataaagcggcgcttcctgatactgctctggtcctgatcgctccagcgcaatgtaatgccacaggtagttaccccctggcgtcatatcgcgacatcatgagaaaagttgcgaccgaaaacggtgctgagttttatagccttttcgacgatttcccagcgtcctggacaacagcgaatggctatggtctgtggaatgatgcactgcacctcaacaataatggcgcggattttctttctcgccaactttataaatactttctttaa

SEQ ID NO: 229335 - DNA, 171 bp, Klebsiella pneumoniae
atggcgcatcgcgccatcgagcagggaaatcgtttccttcaggctcagcttttccgcctgatccacgatgagtgttccgcccggaataaacgccgtcccgtcctgcagggcggatttaccggtcaccgtttccccggccagacgcacatcaccggcgagaaaatctcgtga

SEQ ID NO: 229336 - DNA, 408 bp, Klebsiella pneumoniae
gtggctgatgaaaaactgacggatcaggagaaagggtttatctccagcaccaccattccggtattcaaatacctggtcgatccgcagatgctcggggtgtctaactcacttatttaccagctgacggactatatcggctacgacatcctgctgcagtacattcaggaacttatccagcaggcccgggcgatgatttcaaccggtaattatccccagtcgacaatggatatgatcatggaaaacctcaaccaggcgagtgtccagattgccgcttttcagtcccgtgttcaggttcagcaggacgccttgcttgtggtggacagacaaatgagttacatgcgccagcaggtctctgcccgcatgatgacccgctaccagaataactatcattttggggggaatctgtaa

SEQ ID NO: 229337 - DNA, 549 bp, Klebsiella pneumoniae
gtggtagttctcgtctttgttgacgaatatccagaagaactggtcaagggctgcggtttcgcagtacatagccgcgctcaggtggtaatcgcgctcgatgatttcccggtgcagcttcgcgcgcaggccttcctgcttaatgttccacatactgatggttttcaggtccgcaccaatgcgcaggccgcccatgtctatctcaaggtcagggcgcacgcgaacttccagcccggtttcctcatcaatgccgaaatagctcacctcgacggcacggctcgggtgcgtcaacaacttgccagcggtcgggtgattcaacagtgctttctgaatggccagtgccgtagccagctgctggcgggtaaccagcacttttgcttccgggttctcgcgccatgcatccagcagctcgtcggcaaacacggcatccggttttaccgatttcacggcctgaatcagatcggcctttgtgccagagactttcaggggctgcgccttctgtgcttcctgagcaaccatgtcaggattaataagcgccagctgttccagtaa

SEQ ID NO: 229338 - DNA, 867 bp, Klebsiella pneumoniae
gtggcgccagtcattgctcgccagtttggagccagcatcggccaccgggcggacgtgccaaatgcaactatcacggcgggcggtggcggcaaatcgcagttggtgacgccgacgctgattcagatgggatatggcgagcgcccagggcaggagccgcgcgtgctgcaactggacaagcctctgggtactgttaccgccggcggaaacaaattcgcgacggtgagcgcgttcctggcgaagcactacggaggaaattacaccggacccggtgttgggttggatgaaccgacacatgcagtgacgacagttgaccatcatgcagtagttgcggcgcatcttatggtgaacaataccgggcatcctggcggttccgtggaatctcctgcgcatacggttacaactggcaatcaccacgccgttgttgcttctcacctagttaagttacgtggtacttgccgtgacggacagcggactgatgcaccgatgccgaccattaccgctggtggtcagcacgtcggggaagttgaaaccactctcgctgttgagcattacgacgaagagcgtgcgcaacaggtgttagcgttcctgaaagagtactgcggagccgatagtaccgggctggtggaaatcgccggggtaacttaccgaatcgttgatatcggcatgcgtatgcttcagccgcatgagctgtaccgggcgcagggctttccggagtggtacatcatcgatcgggattaccgcggggtgaagtatgcgaaggataagcaggttgcacgctgcggcaatgccgttccgcccccgttcgctgaggcgctggttagggccaatctgccggatctatgtcaacagaagggaatggctgcttaa

SEQ ID NO: 229339 - DNA, 552 bp, Klebsiella pneumoniae
atggctaagggctggaacattgacccggccgcattcgccgggctggtggccgaagatgtcaaactacgccagcggacaatcgccattcaactgctgaatgaaattgttcaacggtcgccggtaggaaacccggagctgtgggctatcaacgcgaccgcggttcaatacaacaaagctgttggggaatggaacgaatctctttatgccgatcctgccaatctgacaaagactggccgtctcagaaagaaagtccgtgttaatgacagcatggatatcaggcgcccggctgagtatcgcgcaggaaccttcagggcatcgcattttgtcagcatcggcgaacctgatcattccgtcccgaccgaaccggatccgcgcgggacaatgacgtttcttaatggcaaaaatatcattgaccaggcgccagcctactcggtgatttacatccagtcgaacctgccttactccgtgcctctggagaatggccactcaacgcaagcgccgacaggcgtctatgccgtctcgtttaatggtgtaattcaggcctacaaatga

SEQ ID NO: 229340 - DNA, 393 bp, Klebsiella pneumoniae
atgacccttacagaaatcagaaatgctgtcatttcccgaatggcggcacagaccgctattgcctctgatgcggtggattatcccaatggtccggtatttgaccccagcaaccgcgatatctgggcccgcctcaccaacattgcagggcaggcaggcgcaaccgagatcggggatgggccggtcgtccacaggacgggcttactcatcattcagctgtttgttccggtcggctccgggacgttgcttatctcccgaacggccgaccagctaacggagctattcgagtttaaggacgacggaaagctgagttatttcgctgtttctgctgtgccggcgggtgagaccgatggctggttacagctcaatcttcaaattccttatcgcgctctgtag

SEQ ID NO: 229341 - DNA, 915 bp, Klebsiella pneumoniae
atgtctttatgggtggtcatagggcactcgctgggttgtttaccacaattgagaggcggtgtatcaccaacgctgtataacatatttgcagttgatgtgtttatcatactaagcggatttgtaattttctttatgataaacacaaaaaaacaaaattacgcagaatatataacgcaaagagccttcagaatatttcctgtatatttgcttgcaacgcttgctagtattttattgattgggtttaccaaggatatgtttgcattaatcccaaatggtgctttagctcaagggaggataaatacaataaacgcattcctggagaatccaatccctcacgtaatgtcacatatcactctgtttcaggggttgatcccgtccgtagttcttccgttcgcagccaataccataatcgggcaggcgtggagtgtttctatcgaatggcagttttatatcatagctcccttcattttcatattgatgaagatgaacaaaaaaccatctttaaatatttacctttttttgatggtgttttcccttgtggtaatgggaatgatattaaagaatggtgctttcataagcagtaagttaccaatgttttttgttggcttcctgtcattcttcttttacagggattactcagataaattcaacgggcaagaactcatctctatatatgtggtaattataatcttgagtgttttagttcttaagggtgagtcgctggctattcttatttggtttacggttctgtttgctacgctgatatcagttgttaatcaacaaaagagctacatatcgaaagtattaactaataagtatgtattgtatataggaaagatttcttactctatctatatggtgcatatgatcgcagtggcggtatctatatacattctgtctcttatacacatctga

SEQ ID NO: 229342 - DNA, 792 bp, Klebsiella pneumoniae
atgggccggctcgctgtacgggccaacatctttcagggatttaatgacagtttgcgatgcgtattatgtgttaaagggagtggtaatactgttgggtcggtgaaatacagtctaattaacgatccgttagctgagccagatgtcgcctacgtcggtacagggcgaaccatgcaggtaagccagctgcagatcgagaagaatacctaccactccagctcagcgtactttcctgatggcgcggtcggtggcacagccagcgcgaaccgccaggcagacgcagcccgcctgctcgatattcctgcgggcgtgaaatcaaacttttcggcgtttgtgaagggagtaatgacacccgccccactaggtaacgccggcggtaatatcctgttctctctgctgaataacacggcgctgaaatacgttggtttcggtctgggcgcagctgacagctccaatgcgttccagtctcttgctgcgcacaatattaacgccggcagcacgctggcgggcattccgttcaccggaaaaatgttctctcagtacggtgaatatgcgctgatgatcaccctgaacaacggggtgctgaaagtatacagcggcatgaccgatagcccggaaactctgctgaccggatgtccggcatttgattacgtcatgctgggcagaaacagctcggtttctggttctacagtgtcaaactctggcttctggggcggctggctgcagaaagccgtactgttcgattcggcgctcagtgacgcggatatgattgcgcagtttgatttgctttcttaa

SEQ ID NO: 229343 - DNA, 990 bp, Klebsiella pneumoniae
atgaaagccatgttttttttaatctgcatcgcgttctcaacgttcagtggccgcgccgccgcagacccctcctgtgagggccggtttgttaacccgatcaccgatgtgtgctggcgctgcatcttccctctgtcgctcggcagcgtgcaggttggtaaaggcgacctgcctgataccagcaatcccggcagtcccctgcagctgtgtccggctccgccaccgctttttgttcgtcccggactggccatcgggtactgggagccgatggccatgacggacgttagccgttcgcctggctgtatggtcaatctggggggcttcagtatcaatctcggcaagaccggcatggggaccgcgagaaaggacgacaagcaggtgaacggcgccttctatcacgttcattggtacaagtacccgctgacgtactggctgaacatcatcacttcggcaggctgtctggaaggcggagacatggatatagcctatctgtccgagattgacccgacctgggtggacagcagcctcaccaccattctgaatccggaagcgatcctgtttgccaaccccatcgcgcagggcgcctgcgcagcggatgcgctggccagtgcattccatatgcctctggatgtcctcttctggtgtggtggaagccatggctcactttacccgtttaacggccaggtcagtaatgagtccagcccgctgcagtcgtcggtactggtcagtgagcgtatggccttcaagctccaccggcagggacaaattatggagagtatcgggaaggacaaggcagtctgttacgaatatccctccccgatcatcccgaaagaacgctggcgctatcagatggtgaacatgtatccggacagtggtcagtgccatccgcttggacgcagcgtgatgcgctgggaggccggcaaaaatccgcccaacacccgcaagaactatggctacctgatgtggcgtaaacgtaactgcgtatttttgtaa

SEQ ID NO: 229344 - DNA, 192 bp, Klebsiella pneumoniae
atggctatgactacctgccctaagtgcagttccacaaggtttgaaatgaaagaacacccagtcgcatacagcaaatatagaattatgtttattcaatgctcagcctgcggcgctgccattggtacaactgaatatcacaacactaatgccctcattaagagtcttgcccaaaaattaggtttcagcgtctaa

SEQ ID NO: 229345 - DNA, 186 bp, Klebsiella pneumoniae
atgaaatattgtcctgaatgcggttcaaatgatgtggtgaaggataagcaaagaggcggttggaccggtgattatatttgcgagaactgtggatttaataatgatcctagcgagttctggtccgagactgagtataagatgagaaagagagcgaaaagcctacccggctatcgtaataaagaatga

SEQ ID NO: 229346 - DNA, 1128 bp, Klebsiella pneumoniae
atgacaaacctcgggcgcgagcctgtaactgtcgtcgttgaagttaaggacgagcaggggaatgttgtgagagaacaacctatgcaaacgcatcgcaacacctggctggtggaacgtcgcggcgctacggtaacgcagttccgcgctcgctcgaacggtggtgttgagccggtgagtcaccatgttgagtcggcccctgtggtcaaccgcaaggtagaaactccggcaccgcaagtacaacctgcggccacacaaccggaagagcaaagcagcgaaaataagccgaaagttgttccgatgtttcgtgaacaacctaagccttggttgcttgagctccaagaagaaatggagaagagaatggagcgcgaacgcgcttacagtgctcgtctccgtgagaaaatcgagaaggtatggaacgagtgtttgccgttctccagtcatgtgactgagccaatgcgtctgtacttcaaaaaccgcgagctgctgttcaaagttgatgaagtagaaaaaacagactgtctgcggttcaatccggctatggcctactacgacgaagatggcaatgaagttgggaaattcccggctatcgtctgcgctatccgagatgtggaaggcaacctggtaacgctccaccgcacctatctcacccaaaacggtaaaaaagccaaggtcggcaacgccaaaaagatgatgcccattcctgacggtttggatgtcaatggcgcggccatccgcctcggtgaaccgactgagggtatcctgggtgttgcagaagggctggaaacagctctgtcagcttatcgagtcactcaaatcccggtttggtcaacggtcaatgccaccctaatggagtccttcgaggttccagaaggtgttcacaccgtactgatctgggctgacaaagataagtctgtgactggggagaagtcagcgaacgtgctgaaagccaagctggagaagcgcggcattcgtgtgtacgtcctgctgcctaagctcccgatcccgcccagagcgaaagggattgactggaacgatgtcctgatgagtcagggaagcctcggtttcccgaatgctcgctacctgcgcgatttcattgcgagaaggagagctgagtatggccgtcattga

SEQ ID NO: 229347 - DNA, 279 bp, Klebsiella pneumoniae; identical to SEQ ID NO: 25105

SEQ ID NO: 229348 - DNA, 234 bp, Klebsiella pneumoniae
atgaaagtagaagtcacaattgataaacataaaaaactccctgatggcgccgtccctgcgctcgaacaagaattgctacgccgcttatctcagtcctatgacgactgcaaagtaactattcggcgcacaagcaacgatggccttagcgttctgggcggggctgatggcgataaaaagcgtgtagaacaaatcctgcaagagacgtgggaaagcgcagacgactggttttactga

SEQ ID NO: 229349 - DNA, 1014 bp, Klebsiella pneumoniae
atggatgattcagctaaaagtacgcagggagttgatttatacggatctggtaagtggagttcaggggatcagctgtttggtaagctaggtaaatggggaactgggttatctgctgaggccggagttaaaggcagtgcgggttggacccacagctcgggtaacacagataatgttggcacttccggtcgtgaatcgaatgacagccgacatgataccagtagtcaggcggccaaagactttaaggaagcatccgattactttaccagccgcaaaaccaccacatcgggcaacattaccgataataatgccagctcgcgtgttgaccagtttgccgcgtcactctccagtgccaaaaacagctatgaccagtatacaagcagccggacacgcagccatgagtacagtgagatggcgtcacgcacagagagcatgactggccagatgaacgaaaacctgactcagcagtttgcgaactttgttcagcatcgtgctccacaggatgccgaggccattctgaccaataccagttctcctgaaattgcggcgcagcgtgaagccctggcgcgtgaattcgtcaaagagcaggtagaacccagggttgatgctgcgtatcaacagggtcgtgaaagcattggacagaatatggctggggtgtcaggtggtggtgacaatggatcggtaatggccgactaccgacaaaattctggtcgtatcgatgctatgacgcaagatgcgggtattaaggataatgtggatcagaaagttggtgggatgattacagagaataaacaacagcagcaggaaacccgcgaaaacatacaacggcaaggcgcagaggtgaaaaatgagaatactgaaatggaaaaggaccataaaacaaaagcaaatgagtttaaaggtgattataatgaaagaaagagtaaggtgaaatctttaccaggagctgactcgcctactgagttagaggcaaaagcggcgaaaattcaaaaggattatcttgatggtaaaaggtaa

SEQ ID NO: 229350 - DNA, 537 bp, Klebsiella pneumoniae
atgagcagttccgctggatttggtggaatatttcctcttgagataaaatcaaacccggcagctggaagtttttttatagcttttgcaatgtcagtttttccagctagtaaatcagatagtccattatcatttgaaacttcaaaaagcttatgcgtatatcccttacgtaaatctgcatcaataaacaatactttcttattactttgtgcgattattgctgaaagattggtgctgacaaatgttttcccagcatttggacttgcacctgaaatcatcaatatattatttcttgcttccatcattgcgaaatgtagactagtacgcaaaccacgtatagcttctattgcaagatctgcaggattttcgattgctagtaaaccatcgcgatattcattaactcctttaattttattccgtttaaaactttggctcgtttttttagaaaaagtttccgatactggaatgctcgcgtatacgttaactcccaattcctcaagttgttcaggcgattcaatccctcttcttaagaacacttga

SEQ ID NO: 229351 - DNA, 1341 bp, Klebsiella pneumoniae
atgactaacatgagtcaggctccggcgacggagaaaaagggcgttagcgatctgctgggatttaaaatcttcggcatgccgctccccctttacgcatttgcgttaattacactattactttcacatttttataacgcattacccaccgatatcgtcggcggctttgccatcatgtttattatcggcgctatattcggggaaattggcaaacgcctgccaatattcaacaaatatatcggtggcgctccggtgatgattttcctggtggcggcttattttgtctatgccggtatttttacgcagaaagaaatcgatgctatcagcaacgttatggataagagtaacttccttaacttattcatcgcggtattaattaccggagcaattctgtcggtaaaccgccgcctgctgctgaaatcactgctcggctatattccaactatcctgatgggcattgtcggcgcgtctatttttggcatcgctatcggcctggtgttcggtattccagtggatcgcatcatgatgctgtacgtcctgccgatcatgggcggcggcaacggcgcgggcgcggtccccttgtcggagatttaccactccgtcaccggtcgttctcgcgaagagtattactcaaccgctatcgctattctgaccatcgctaacatcttcgccatcgtctttgccgccgtcctcgatatcatcggcaaaaaacacacctggctgagcggcgaaggggaactggtgcgtaaagcctcgttcaaagtggaagaagatgagaaagcgggacaaatcacccatcgcgaaaccgccgtcggtctggtgctgtccactacctgcttcctgctggcctacgtcgtggcgaagaaaattctgcccagcattggcggtgtggctattcactatttcgcgtggatggtgctgatcgtcgccgcgctgaacgcctccgggctgtgctcaccggaaatcaaagccggtgctaaacgcttgtctgatttcttctccaaacagctgctgtgggtgctgatggtcggggtcggcgtctgctacaccgacctacaggaaattatcaacgccatcaccttcgctaacgttgttatcgccgccattatcgttatcggtgcggtgctcggcgcggcgatcggtggctggctgatgggcttcttcccaatagaatcggccatcactgcaggcctgtgtatggccaaccgcggcggctccggcgacctggaagttctctctgcctgtaaccgtatgaaccttatctcttatgcgcaaatctcctcccgtttgggcggcggtattgtgctggtcatcgccagcatcgtgttcggcatgatgatttaa

SEQ ID NO: 229352 - DNA, 534 bp, Klebsiella pneumoniae
atgttaacccatcaaataatacaaagtgaagtcgaagagttaaaacagcttctgactgagagagatctgacgatcccctcattttggagttgcgtctggcctggtctgttatgtatgttgtggtttctgctgtcatcctatttttcttatggcatcagtgatttttcaactagcatggataagttaggagcaatggtgtttgcaggggcaatgggagtgttttcaaccattgcgatagcaaatacacgctcattgtttctatctctaccggaagatttcaggaggaagtcgatattttttaagtgtatatccaaaaaaagcaagctttatggcttaactattttagttatgttttctttgtttgcattcactacttcatcaattggatggaatgttgttggtttctgtgttttgactatgtttagtattgtaataacagttatggtgatgaatattgaccttggtcgttatcagttggctaccctgacgtctgttattgaatcggttagaaataaaggtgtaaaactgcaataa

SEQ ID NO: 229353 - DNA, 1026 bp, Klebsiella pneumoniae
atgagcattactaaaaagaacaataaatggctactggatttctaccctgagggcaaaccaaagggtagaccagcaaagcgtatccgtaaaacgttctccacaaaaggcgaggcgctagcttaccaaaaccatattattgaaaacgttcatattaaaccctggttggaaggcaaggaagatcgccgcaagcttcgcgacctggttaaccagtggtttgatgagcatggtgtaaacctggacgatggcgagaagcgaaaagcggcgatggagtttgcgtgtgaaagcatgggcgaacccggcgcgcatgaatttaacgccaccctattttccacctaccggaaaaaacgcctttccggggaaatagtgcgcacgcagcgtgttaagcaagtttccccgcgcacaatgaatcttgagttagcctatttccgagcggtattcaacgaactaaaacgtctgggacactggaagcttgagaatcctttgactaacatacgccctttcaaatctgaagaggctgaactggcgtaccttgaaaatgaagaaatcacgcgcttgctaaacgaatgcatgaaaagcaggaatgaaagcacgtactgggtagcttgcttgtgtctaataactggcgctcgctgggatgaagctgaatccgtaacaacgaaacaaataaaaaatcttaaagtcagctttttcaaaacgaagggtaatagaaacaggactgtgccaataattcaggtgttttatgactcacttcccaaaccagagaaacctggacgctattttaaatcatgttactcagcattccggaaagccgtagaacgtgctgaattgaatctgccagatggtcaactttctcacgttttacgtcataccttcgcaagtcatttcatgatgaatggcggcaatattcttgttttaaaacaaaatttaggtcatacagatataaaaatgacaatgcgttattctcactttgctccagaacatcttgaagaatctataaaattgaatcctctgaggacaatattttga

SEQ ID NO: 229354 - DNA, 219 bp, Klebsiella pneumoniae
atgcatgcctttatttttctggtgctgatgacgccgagtagtggtggtggaatttgggatgttactcccatgcctaatacagatgtctgcataaaaatgctacgggtactcgaagcacgtggaggcagaggttacggaagtaatacaggagagtgcattgaaattaaaacacgcgagcctttgaacagcgtgatagaaacattgagtgagggtgggtaa

SEQ ID NO: 229355 - DNA, 594 bp, Klebsiella pneumoniae
gtggtcaacggccagttcaatgacaacctcaaaaccggtatcagcattgatgcaggaacgctggctaacaacggtatcgctccccgcccgggtaagaacgggctgatgctgaactgtcaggcagagcgtaacggggtgaccgggctccattatgactcgaccaaaattcaggcagatggcggctattcattctccgacatgcacatcaacgataacgcccaggatgcgattttaatcgaggctggcactaacaccctggcggatgttcgcttcgacaatatggatatcaaaaataacggtcgttatccggtgaatgttgccagcggcacctttaccgacctcgacttcacgaatcttcgcatgctgcgaaatggcggcgataccgcgtttaagctggacggcaatatcacgcggggctcgattcatgattgtaagcttcgctcacagaatggcgccgcagcgattaccggtgcagggacgatcagccatttcgacatcgccgaaaaccagtacaccgataccaacagcaaccccatcaatctcaccggcacactgactaacgtcacctacggccgcaacccaggactggagtaa

SEQ ID NO: 229356 - DNA, 594 bp, Klebsiella pneumoniae; identical to SEQ ID NO: 229355

SEQ ID NO: 229357 - DNA, 993 bp, Klebsiella pneumoniae; identical to SEQ ID NO: 226851

SEQ ID NO: 229358 - DNA, 585 bp, Klebsiella pneumoniae
ttgtctggaaaaatttggacgggaacattaagtggctttagaaaaattgaaaatgccaatcaaggtgataaagatgagggtttatcattttataataccactcaattgtttagtatagaacagtggatggagttcgttcaaaaaaaccccgaaatgggtagtctaataaactttaatggtttccctggtagcgaaatttcaatatcaaatttaactgtggtatcacctgacgcgtataccatctgcttgagtaagataagagatgacgcgctatttagaaatgactttgggcaatactgtgtaaaaataaatgacactgaaaaacttttctttacaatcattatggcagcaatggaaaaaaatcctaatattaagcattaccgccacgggactgtggaatacaccaagaaaccattgcgcgatctgtcagaaaaactatactctttgtttcataaacccgagagatactcttggcagcaagagtatagattttcctggatcggtaatcaaacccaagaaatatcaccatttctcttagacacctgtaacttttttacaaatagcataattgaagacttaacttaa

SEQ ID NO: 229359 - DNA, 1152 bp, Klebsiella pneumoniae
atgaaacacattgtagttatcaatagttctgaattcagtggtgttgagttattagataaattgcttaaagaaaaatacaaagtcagctactttcgtaatcttgcttacatacgggactgggactcctccagaacggacgatgttcttcgacgtcttcataatgttattgatctacctaatacacatacaccagaaattgtcagagatgctgttggtattttaaatgacagtcaaccggttgatgcacttatttgtatcgatgatttttcattagaagctgctgcctgtgcagccgagcatataaatgtaccattcagcagtgtgaacgctgttaaaacaaccaaaaataagttattgtcacgccagattctcgaaggaacagataaaaatgccccttgggttattcatgaacgtgattatcataaacttccgtctgttctggcgtccgtagaattgccggtaatagtcaaacctgtcacatcagcttcaagccggctggcatacattattaaggaacgggctcagattaacctacttattaataatatcgaagaagaaatcaatgagttaccatcatcctataccgatttctttaaccgtggttttcttgtagaaaaatatttaactgggcctcttgtttctgttgagatcggaagaataggtaattcttattacccatttatggtaactagcagaattcgttgtgccagtgataacgttattgaactgggtagtgttatgccttcttctcttaatgataaggaggagcaggaatgttttaaactggcaatatccgcactggataaaataggactcgataatggtatttttcatatcgaaatgatttacactaattccggccctgcaatagtagaagttaatggcaggctcggaggtcgcaccattccggttctttatgaacttgcgactggtaatagcatgtttgaacatcttatcaatatttctcaacgtgctgaaccaaaagcagagtccgtttaccaggggcaaaaagcggtttcgtttttctttaaagcggaacaatacggtaaagtactggacggtacatccagagcgttaccacaaaatctcgcaagttatattcaatctgtctcttatacacatctgacgctgccgacgatatgcagtgtgtag

SEQ ID NO: 229360 - DNA, 174 bp, Klebsiella pneumoniae
atgctgccggccggcatgaacgaggacggcgtcatcgaggacatgcaggcgtatgacgcctggctggcagatgagcagacacagcgggatatgcagcggcgtgaagaggtcaatatcaaccacagccaccgccacgatgaacaggatgatgtcgagattggggggaacttctga

SEQ ID NO: 229361 - DNA, 876 bp, Klebsiella pneumoniae
gtgcgggcgatagctgacggttccgtcgtttcactccgcaaaagctcagacaagcgcgacctagcaccattcaacatcaacgccgataaacccaatacaaaggggagtaatgatggttatgtgctcataaagcatgaaaccgagatcggtagcggtgatgaaggaaaagtggctttctattccttatacatgcatctgaagtcgctggctgaaactgttaaagccggtgataaagtttaccgtaaggatcctataggccttccaggcatggttgatggagtgaatgctttccatttccagattttctgcgatgatgacaacatcagcaagctaacgggcaggaaaacaggagagctggatatttcgaagaatggccgcaccgatgcggtttatggtgatattcacttttatctgccaccgcagacaaagttttatgacaaggctccagcagataacagcatttctaccaccggactttctgaactatataccagcaatgtgcctctgtatgccagcatgactctggcccaaggcaagtgcacgatggttactcgtcagaaaaatacgcagactgacggaaaatatgatctgctgggtgaaccactggttaatgcagatggtgatgactacgaatacaatctctataaaaccgcgatgcggaattataaggagagcccaagtgccgggtttgaattacttcgctttgggcgagtgatcaacacggaccatgaaacactggtaccggcagacgcaccattatggatgacagtcaattacccgggtggtaaaggggtgatcaaccttgctgattccagtattaaaaagtttagtgacgctgatttccctcactggacgggctggcagaggctttgttga

SEQ ID NO: 229362 - DNA, 258 bp, Klebsiella pneumoniae
gtggatccttcactggaatatgcctgtaagcgaattctggagctggagcagttgttgctggtggatgttcctgaaaccgtttggcccgccgaggttgcaatggttctgtctcaagttgaaagcgccgggattctccaggcgcaccacaagcaacgactgcagcaccatatcaacagaatgtggctcgaaaaaatgccggtaccgtcaattatcgccgcggcccgttcgctggcctgcgccatggagaaatacgtgtga

SEQ ID NO: 229363 - DNA, 300 bp, Klebsiella pneumoniae
gtggaggcagaagttctggatttcggagtttttaagaataggcagatcgccaattttaatatcggaggccataccatcacgcttcatctggcgggccacttctttgggcttatcggaaagctggcgcccgccggtattctcatcctcactctgctgtttcccctggcggcccagcacccaactggcgatgaagaacgtcacgatacagataacaagagaaaccacggctgcaaagacgaaactggtccacagctgctctccgcaccagacagtatatttatcggccaggatttgttctga

SEQ ID NO: 229364 - DNA, 234 bp, Klebsiella pneumoniae
atgctgcgaaatggcggcgataccgcgtttaagctggacggcaatatcacgcagggctcgattcatggttgtaagcttcgctcacagaatggcgctacagcgattaccggcgcagggactatcaaccatttcgacatcgccgaaaaccagtacaccgataccaacagcaaccccatcaatctcaccggcacactgactaacgtcacctacggccgcaacccaggactggagtaa

SEQ ID NO: 229365 - DNA, 474 bp, Klebsiella pneumoniae; identical to SEQ ID NO: 196301

SEQ ID NO: 229366 - DNA, 177 bp, Klebsiella pneumoniae
atggacttcgaatttatttctctaactttgcttgcagtagttgcacctctcgtgctagccctcatttcaaatagaaaccttaaagaattaaaacaaaagaaactcgatttcgaaaacaccagaaatctaaacaaacaaaactttgaagccaaaaaagacaagctcaaatttcgctaa

SEQ ID NO: 229367 - DNA, 234 bp, Klebsiella pneumoniae
atgctgcgaaatggcggcgataccgcgtttaagctggacggcaatatcacgcggggctcgattcatgattgtaagcttcgctcacagaatggcgccgcagcgattaccggtgcagggacgatcagccatttcgacatcgccgaaaaccagtacaccgataccaacagcaaccccatcaatctcaccggcacactgactaacgtcacctacggccgcaacccaggactggagtaa

SEQ ID NO: 229368 - DNA, 312 bp, Klebsiella pneumoniae
atggctgaataccagttaagttttgatggttttgttcgacttttttttgcaatggcaatcattatctgcggttacggctatgtaattattggtgtttttataagagatgcgcttgcctatattttaatgttgtttgggcttacaggtctcagtgctttattttctttaatggtattcatggataaaaatatgtgggccggttctcctgatttgacgctatcagtaataacgggatttttttcagccacagtgatcttttatatgttttatgtcttgatttattactttgatcggatgggggcgggtgaatag

SEQ ID NO: 229369 - DNA, 267 bp, Klebsiella pneumoniae
atgctgactgcccgcatcgatgcctgggaagataacgcggtggaatttgaagaatttaatacgcgcttcgaagcaggcaaaaacggtgtatcgttgctgcgggttcttatgcagcaatacgggctttctcagtccgatttcgaaaacgagataggtaataaatcgctcgtcagccggatcctcagtggtgaacgcagtctgacctttgatcacatgcgggcgctggcaaatcgatttcaaatcccggtctcgatgtttgttgactga

SEQ ID NO: 229370 - DNA, 381 bp, Klebsiella pneumoniae
atgtttattcctgataaataccgttcagtcacctggctgaagggcgggcgcgtatacccgcagctcgactgtttcggcattgtgaacgagatacgccgcgatctgaatttacccgtctggcccgattttgccggggtcaccaaagacaacggcggcctcgaccgggaagcgcgccggatgatgcttacccttgagcgctgcgaaccctgcgaaggggccggggtggcctgttattccgggtcgactgtcacccacgtagggatcgtggtcagtatcgatggtctgttgcatgtggcggaatgcaacccgggtacgaacgtcacctttctgccgttgccgcggtttaagcgccgatttgtcaaagtggagttctggcaatga

SEQ ID NO: 229371 - DNA, 381 bp, Klebsiella pneumoniae
atgttcaaccctgataaataccgttctgttaaatggcagaagggcggtcgctcttttccaaaacttgactgcttcggcattgtgaacgagatacgccgcgacctgaatttacccgtctggcccgattttgccggggtcaccaaagacgacggcggcctcgaccgggaagcgcgtcggatgatgcttacccttgagcgctgcgaaccctgcgaaggggctggggtggcctgctattcagggtcgaccgtcacccacgtagggatcgtggtcagtatcggtggcctgctgcatgtggcggaatgcaacccaggcacgaacgtcacctttctgcccttgccgcggtttaagcgtcgatttgtcaaagtggagttctggcgatga

SEQ ID NO: 229372 - DNA, 483 bp, Klebsiella pneumoniae
atgctgattgttaccccaaaaattgatttaaatggtgaacgctggtttttcccctacaaaaagccagaaaacagccaggaagaatacactccggaagaggaatcgcttttcaaacttcgcctgctggtggccagcagcgagaatcctcaatatcgctcccgtaacgcgctggtgcgccgccacatcgataagatggacgcaggttataaggtaggcaccaaagaatttaatctcgccagagtgggcgacatcgactctgttgatgacttgctgatcgataatgtcgcgcggtttctgttgaaggggtgggaaggtgtgggccagttggtagatggcgtagaagttgccatcgactacacgccggaagtcgggatcgccatgctgaaacagcacccggagctgtactggctgatactggctgaggcggcgcaaattgctcagggtaaagagcagcagactcaggaaaccgtaaaaaagccttag

SEQ ID NO: 229373 - DNA, 273 bp, Klebsiella pneumoniae
atgaacttcacgataaaatcccgtaaaaccggcgaaattttcagtttttacgcacccgagagtggcggttatgtccacctggagtccccgggacactctggtaacacaggtgctcagatttgctgtggtggagggttcatggggagtacgctttcctgtggcgcttctgaggacgatctggccagtgttgcccgtaaatggtaccgacagttcgtgagggagcggcgcaaattcttaattatgtcgggccagtattctgaggataaccagtga

SEQ ID NO: 229374 - DNA, 159 bp, Klebsiella pneumoniae; identical to SEQ ID NO: 95254

SEQ ID NO: 229375 - DNA, 213 bp, Klebsiella pneumoniae
gtgaaagaggttatcggggacgtcattcgcggactggagcgtgaccggccgggtacggagaaaacgacgctaccggatgatcctcagttccggcgccaggaggcggcgattcagcaggtggcctcagaaactctgcagcgtgagcgtttgcaggctgtggagcgggacatggtgcgtgacctgaaccgcgagaaaaccctcgggggcgactga

SEQ ID NO: 229376 - DNA, 327 bp, Klebsiella pneumoniae
atgctgcacgaaacccggcagtacggcattccggcgacactgcgtgggctcgtcaataacgacatgaggaccaccactgacgcggtgctgcagctggtgaaggatggcgtgaccgacggcgtgcagattgacccgacactatacacacagtacggcatccggagtgtgccgtctctggtggtacggtgtcaggccgggtatgacgtggtacgtggtaacattcacgtcaaacaggcgctggagaaagtggcacagaccggtgactgcgcacagctggcccggcaaatacttgatgcgcactcgaatgccgccgggagccagccatga

SEQ ID NO: 229377 - DNA, 309 bp, Klebsiella pneumoniae
gtgctcgttctgttacttctgcgcaaatacacccggctggagttcgttagccatgccagcctgctgctgaaaacatggtctgtaaagctgggggctatcggcgcgctggttggcgtgtgggcgcagtcgttcccggatgctgctctgcacgcctgggcgatgctgccgccggacattaaaaacattctgccaccaaacattgtggcactgattagccctgcgctggttgtgctggcggtgctatcgcaatacgtgcgccagccttcattgaaagataaagccgacgaactgaaggagccgcagcaatga

SEQ ID NO: 229378 - DNA, 405 bp, Klebsiella pneumoniae
gtgaaagcgtactatatacttggacataacgttgcatggcttaacggtatatgcctgattctttttgttattggtttggtcggtgcgctggcaatggttgccatccctgaaaaattcaatcttcgagttaacagaggcgatacattcatatactgtgcgcttatagcggtggttgggttttccgggatgttcgttatctccattcactcattttcgatggatgaacttgaagcaggtagacactggaaagatgactgccggacacttgaggtaaacatgccgacaggcgcttttaccagccctgttaataaactggactgtgatggcatcatcattaatgtgcctggtgggcagtattattcctatatccatcagtgggaattatataaagctaactcaaaatga

SEQ ID NO: 229379 - DNA, 162 bp, Klebsiella pneumoniae
atgaacaagcccgtcgtgccggaacttgttgaacgggaacagcctgaacacctgcgcgaatatttccatgaacggttccgcgtacatcgactgaacagtcagcagctgccgcgcgcaaatgcacccgaatataataaaccgggcgatgatcagcagaattga

SEQ ID NO: 229380 - DNA, 174 bp, Klebsiella pneumoniae
atgatgtacgtcatcccttatgcgctgatcgctgttggggtggggttctttgttgccggagtgacattagcgatccgcaattttttcagttatcaccttaagaccctttttattctgagaaatgacagagttaaaaagaatgctgtgcgtaatggaggactggatgcgaattaa

SEQ ID NO: 229381 - DNA, 174 bp, Klebsiella pneumoniae
atgatgtacgccatcccttatgcgctgatggctgtcgggatggggttctttgttgccggagtgacattagcaatcctcaattttttcagtcatcacctgaaaatcctttttattctgagaaataacagagttaaaaataatgctgtgcgtaatggaggacaggatgcgaattaa

SEQ ID NO: 229382 - DNA, 267 bp, Klebsiella pneumoniae
atggacgctatctttgacagagtcgtaagggaattttttccaaatacaaccatacctttttggaaaaaatggctgttcaggacggcatttggcaataaggtattttctcgcttaatatataacgagcgactcgttaataaaaatggggtcgagtgggttaatgcagttgttgaactccttgagttgaaatgtgaaagcgaacaccaccaacttaacaacatacctgggcatggggctacggttgttatttcaaatcggctttgttga

SEQ ID NO: 229383 - DNA, 144 bp, Klebsiella pneumoniae
atgctgtctgcgataatgtcgtccgcgtccggcgacgtctgggccatatccagcccggtgccggatgatgtcccgccgacctccgtactgttgacccagttttcgctgcgctcatcaccggaaacgtccgcgcctggcgggtaa

SEQ ID NO: 229384 - DNA, 252 bp, Klebsiella pneumoniae
atgggaaatgtcccgctggtgccttattaccgaccgggcgataaacgcatcgcacaggatctggcggaactggcagcagacaatcaggcttttttactggcaaatcatggcccagtggtttgcggtgaaagcctgcaagaagccgccaacaatatggaagagctggaggaaacggcaaagctgatttttattctcggtgaccgcccgatccgttatctgaccgcaggtgaaattgcggaattaaggagttaa

SEQ ID NO: 229385 - DNA, 744 bp, Klebsiella pneumoniae
atggcttttctcccggtggatgaggtctggggagtcgggcgccgcctcagtaaaaaactggaggcaatgggcattaaaacagtgcttcaactggcggatacagatatcaggtttatccggaagcattttaatgtggttctggagcgaaccgtgcgggagctacgcggggaaccatgtctcggtctggaggagttctcgccggtaaagcaggagattgtctgtagtcgcagctttgggcagcggatttccaccttcgaagagatgcgccaggcgatatgcttatacgcatcccgtgccgcggagaaactccgtggcgagcatcagtattgtcggttcatctcagcgttcgttaaaaccagtccctttgcgcttaacgagccgtattacggaaacagcgcatcagtaaagctgctaactccaacccaggacagcagggacatcatcaccgcggcgacgaaatgcctcgatgtaatctggcgagacggacatcgctaccaaaaagcaggggtgatgcttggggatttctacagtcagggcgtagcgcagctcaacctgtttgatgacaactcgccacggaagaacagtgaaaagcttatggaagttctcgaccatctcaacgcgaaggacggaaggggaacgctgtattttgcagggcagggtatccaggcagcctggcagatgaagcgggaaatgctatcgccacgttacacaaccaggttttcagatttacctatcgtcaggtaa

SEQ ID NO: 229386 - DNA, 219 bp, Klebsiella pneumoniae
atgtgcggacgctttgctcaatcacaaccccgtgaagagtacctggcttatttgactgaagaagccgagcgggatatcacttgtgaccccgaaccaatcagccggtacaacgtggcgccagagacaaaggatttgttccggagtgaacgtgatgagcaactgcatctcgatccagttcactgggttacgcacctggttggtgggataaaccaccactga

SEQ ID NO: 229387 - DNA, 1275 bp, Klebsiella pneumoniae; identical to SEQ ID NO: 137868

SEQ ID NO: 229388 - DNA, 1203 bp, Klebsiella pneumoniae
gtgtcaatcaagagccaggcgtatttatataagcgaaaagacggcatctggatgtttcagatattcgtgcctaagtatcttcgattcttatatccatgccggatgtggcgtaaaaccacctcaacccgcgatctcaatgaggctcgtcggttcaggaatcacctgttattagaatgggaagagcttaagcgaaagtacaatccgagcaaccccgatcagtggttgcagcagtcaatagccgccttgcataccgaagggaagaagaacaagagccgtcctcaacttgtagcgagatcctgttcaattcccactctgtgcctattacgggacgaatacgccgaaagctataaagatcgtcgctcttattcaacgttaagcaaatcagcgcgagccgttgagctattccttgaaagtgccaaacaaccggacattgccttagaaaggataggccgccgcctggtgactgagttcctcgagacacaaaaggagaagggagccgccgatcaatctcgtcaaaactggctaacgtgtttagggagcctctacgagtttgcaaagcgccgctacgatggcataccagaccgcaacccttttcacggtcataacctcgaagcacgtcacacgatagaaagttatcagccgtttgagcctgaccagatgcaaaagctactggatgcagcagagccggagatcagaaacattataatgatggggcttttttcaggatgcagacttgatgaactggcaagcctcaagaaatccgagatccagacggtggaaggagtacggtgtttctacatctcgaagtcaaagaccaaagcggggatcaggtatgtgccgattcattccaaactatctttgattgtcgatgaatatctaagccatagctacggagaatacctgttcccacaggccaacaagattaaccgcgctgacggtaagaaaggcccgttctattctcaagcgttcaccaggctacgccgtcgtgttttgcctacagctacagatcgccaatgcttccacagcttacgagggatgttcataacctgcttagaccgtgccggagtgcaggaaaccagaatcggagccatcaccggacacactgaacagaaagcgaaaaccgaagcattccgcacctattcccagggagcgagcatggaagagttagcggggtacgttgaattagttacctataacatgtag

SEQ ID NO: 229389 - DNA, 1851 bp, Klebsiella pneumoniae
atgcttgagctaaacgtaagcaaaatcaacaacgtagtgacatttactgtcgataaaagcagcattgccaccgcgaagaaagctgccgatgacctgcataagtatttccagaaaatagccgatcctaaaatccgctttcagcagcagaaacaacgtagacagaaagcacgccagatggctgatgatgcccgatttaatgataaacctcggaatgctgccgaaatgaaagcgcaacgagcagaagagaagaaaaaggcgagagaagaaaaagccaatctgagagcgcagcagcagctacagcgccgccaggagacggcagagttaaaactccgtcatgcagggctacagctaggcgggattaaaggaaaatacgggatggaccccaagcaacaatacgaggctctccgctatatccgtcaacaaacagaggcctttgctcagggacaaattagctctcagcgaatgaatgccctaattcgtgagcgcatcaccctggagcgcagggcagcagcagccgcacagaaagcggctcaggcacagaaaacaaattatgtcggggctgccaaaaagctcaaagatcctaacagcaaagaatacggcattgccagattgcagagtgctgcaacgggatttgggagcatatttgccgcaggcaacctcgctgcacgtattaaacagacaggggatgaaaacctcgaactgatcaggatgagcgagcgagttaagactaatcctaatgcaatcaagacgatggtgacatggggtcaacagcatggcgttgattccgctaatacctcaaaagccgtcgataacatgaaagacgttcgagaacgccttgctatgacccttaacgatgctcaaatgaaaaatggcgaatggaaaggcggagacggtggtattacagccatcatgaacaaatttggatggtcaaaggagcagatcgggaaattccaggattccccactcgattttatccaggcaaccgtaaatgaaggtcaacgtagagggatgaaacaggctcagattggtacgctgatcgagagtttaggtgatgacctgatgcactacactgacatgttcatgaataacggggcagagtttatcaagacgctgaaacagcttaaagagagcggtcagacgttaaacgatgaacaaataaaacagataatggagtacggggatctttctacgaaaatggcggctctgacaaacggcctggacattaatctgtttaccgggtttatggatggatttggaaaatctggtgatcaactaactgaaaacactaagaatctcaacgagagcgctcatctcctcggagagggattaggcaatctggctacacaggtgacaggtgcaacagttcaaatcagtcagagcgtagaggcgattaatcaatacctccgtgacaagttcccgtcctggtttagcggtgataacaatcagcctgcggcacagcagttgtataacggggccgtaggtggctcagccgatgctgtggcagcttggattagatcaaacacaggaattgatacgcagagtgttggccctgctgttatggattggttaggaatgggacgagcatcaacagggacggctgcaaacaactacagcctatcagggcaatctctccgcgatggcgctatggctctgccatcaaccccggcactgagctatcaggtgaatccggtctttaatttaacagtagcgccggaagtgcctctgaccctggttagtgatgcctctagactcagcgattatattgattttcaggcgagggcatctgcccgtagttttgaacaatcattaacattgcaaataaatagtgggcagagcacaactggtggatga

SEQ ID NO: 229390 - DNA, 1032 bp, Klebsiella pneumoniae
atgaataaacttgctattgggagcgaagtcgtagacctggctccaattttccaggcgcttcctgagcgcaattatttgctcaatgctctcgacctttttgatggtgtcggaattacctctccaaaagttattgtttcgcagcttgtagaagacaattattctctgttcaacgagcctacctcacgtggatcgagcgaacataacgtaacggcacgccagaacgggcaggagtggctgattgaagcgccctatttcctgcgggaagacatgttcactccggcctctgtacaaggcaaacgtaaacaaggcaccgacttcgaggaaaccgtagccgacctctacgcagagtataccgctaaacacaaaatcgcgtacatgcgtactcgtgagagttatcttgcacgtgctctgttcaaagggcaagtgtatacaccgaaaaccaacgacctgttaatcgattatgcaactctgtttggtgtctctccaatgacgcacactgtgagcgcagctaccccagcgaaagatctggatgaggtgctggataaaatccaacaggcagcaggcggattagccgggcagattgagagggtggtcgtatttgccaagcccgcagcgttcagttctctgcgtttctctgacgcaatggctactgcgttccagtacgtagccccctacgatagccgtaatgttgtattccagcggaatgagctattgccgggcgtgagcaccttctccatgccgggcagcccaatcgacgttatcaaggtgacagacccgctcctgatcgcacaaatgcccgatgatgcagacatgattgctatcccggtattcagcaaaggcagcaacgtatatcaagtgatgtatggcgcagcttcctctacattcgccctgcttgatgcggctccggctgaattctatagctggggataccagaatgagcgagggagtgagtggaacgttatcactgaaaatacggcgttatgtgtcaataacgggttaggtctgcaagtgaaaatcacgctcggctcgtaa

SEQ ID NO: 229391 - DNA, 360 bp, Klebsiella pneumoniae
atgatcaatctgacagacctatttccctaccgtaaatcgttcactgaccttgtgagcttcgcaacagacagctttgcagcagtagacagcaaaacctttgcgtctctccctgctgacgtagaatgcggcgatgctatcacctctacaggcgctgcgtataccagcggagatgacattctcatcgtagtttctgattttgttagcgctggctctaataaagccgtaaatgttctgcgtgcgcctaacgtcggctcctacgtgggattaaaaatcgataatgttaatgtggccgataaagcagccgctgtagcagcccttgaagccaaagggttcgtttgccgtgtattctacacctcgtaa

SEQ ID NO: 229392 - DNA, 201 bp, Klebsiella pneumoniae
gtgcttctaatgaacgaaccacaaaaccataaaatccagaaaatgcaagatgatttcaaaaatctcagcgaggcgcagaaacagtttattgctaaatcgttagatgtttctatagatgaggtggacgctctcattactaaaatgttatcgcctcagaaaatctctatgcaacaacggattaatcaacgaattaataaataa

SEQ ID NO: 229393 - DNA, 360 bp, Klebsiella pneumoniae
atgaataactccacctcatacaacactctgcaatctgtcctacaaacctaccacgataatcacgctatccctatgctgaagctattgaacgaaatgcaacgcgacagaacgcctgaaagcctcctggcggcgattaacgcgcaagatttagcacaagcaatgctttcgcacgttggcgacgtagcgagccgtatagcggctatggaacattcatcgctaacacaggaggaggctgatagtatttcagaagaaatttctgatgctctgctgctgctattgcagagtattgaggaaacctgcgaaatggcgcttgaactggcgccgaacaccaaaacacgagaaaatttatacaactactag

SEQ ID NO: 229394 - DNA, 225 bp, Klebsiella pneumoniae
atgcatcaacaaacaacgcaaacgaaaagattcgaaaaacttttaaactggtgccaggggcaggtgagggaaatcgagtttattctcgaggatgcctatctgagcgaagaggagaaaatagcagcgcttgaagaacttctggataaatgcctcactctgcaatcgcctctcatcgtactaattaataaaatcagaacagcaataacacaattaaaggatcaataa

SEQ ID NO: 229395 - DNA, 1449 bp, Klebsiella pneumoniae
atgaaccaaaaaagaccgatagtagcctacgttgatgcaatttgcggatctggaaaatccacgacattacagcaatacattaaatccagtttattaaccaactctgatgcaatcccccctcgttacctcctcgtgatgccgacacatgatttgtgtgaacaggtgaaatctgagctagagcacagggatgtacgaagctatcacgtagacattgaactgaacgcagtaaaaaatcttatcagtacgttggaaaatgactttcaacattctgttattatctgcacgcatgagtgttttaaacactactgctatcgtgctgagtttgaaacggaacttcaaaaccttctccgtaatttcagtatttttgttgatgaaatcccggatgccatgttcggtgcatacataaaagctacgcatacagacagaacagaggaaaacttcccgtttattaaatggctggatgagaggaacgggcttttatttttaaatgagagctatcgtgatgatctctataaatactggcatgagaaacaggctaatggcgaggaactaaaacgcctcctgtgggctatcctacaaggcgctgggctgctttacgaagagaataaacatttatttgcattcactgcatcaccgattatcaaatccgcacaatgggctgaaaatctcacagtgttaggtgctggctcttctcgtagtctgttcgtctgggctgctgagcatgtggcagggtatacggtagaagaggctaaaccgtctctacagccgcctgaggagcgcaggaagcataaacgaggtgctatcaccctgatggcagtctgtgagaacagatgcactctcacgagcctacagcacgtgtttaacgaccatttgcaggaaatcatccgccgtgttcctggcgagttcatttttgccaccaacagagacaaatctatttgtgaattcacaacgataggggatgagattctctccagtggctctcgtggtgagcgtgtttcaatggcctcctatggattaaaccactatcagcacatgcacaatgctgtgtttctcggatgcagcaatctggacagagatttccagggtaaatggcgacaatacgctgatctaaatagctggaacgttgaggagttcgaacagaaacaacgtgcagcaatgaactatgaacgctgttaccagtttattagccgcacatcgatcagaaatacagccatacgcgagcctctcgtgttcgtagtgccggatttagcctctgctgaatacatcaaggaatactattttcccggtgcatccatcgactgtttcaactttgagaaacctagaaaaaaggttaaaggaaatggaacacgtgcaaaggtgcaggaatgtaaagcgcaggggatgacacaaaaacaatctgctgaatccctgggaatgggaatagcaacaatcaaacgtaattggaactag

SEQ ID NO: 229396 - DNA, 159 bp, Klebsiella pneumoniae
atgaacattcgttttagcattgaaacccacaaactactaattgaacgagctaaccgcgaggataaacccgcagcagcattagttaatgaattaatcacagcaatcctacagcaagaggaaaataatgaaccaaaaaagaccgatagtagcctacgttga

SEQ ID NO: 229397 - DNA, 618 bp, Klebsiella pneumoniae
atggcaattagtaaaggtgcaagacgcacagacggactagagagcgccgaacaggtgcagatggtagtagaggaaatcgcaaagaaaagtcagacagtggcggatctgttcctgttaggagtagagacacagctccggggcgtggacatgcgggaatggaaatggagtgatctggatattggtagcaaagtgctgcgcattacacaggacaaaaccaaagaagccgtagaggtggagttgacggagacagcaagagacgtattacaggctcgttacaacgagcgtggggagaatgtatacgtgttccagaatgacagcaaccgtagcagaggtaagccgatcagccgttctaaaatccacgctgaaattcagtacgccgtggacaagctcaaggcgcggaaactccttccaccggaagcagtgatcagtatgcacagttcacgaaaaaccgtggcgaccatagcgcatttgaaaggtgaggatttagaggtgattagcaagatgttaggccatcgctcaacggaacacacacgcgcctacataggtatcacacaggccaaagtagatgcattgagaacgaaatattccaccggaatcaaacgaggaaaacgctcatga

SEQ ID NO: 229398 - DNA, 204 bp, Klebsiella pneumoniae
atgaaaccattaatcgtgctgacgctggcgctactgccagccctggcgaatgccggacagattacgatgaccaatccacaggaggaacagacggagaacgggaaaacgttatgcatctatgagaatgccaattacacgttcacctacctaactaaagggaaatgcccctatgccaaaactttcgacacaggggaaagcaactaa

SEQ ID NO: 229399 - DNA, 276 bp, Klebsiella pneumoniae
atgagtaagatttcttatagctatgagattacagggaaagagggcatacaaactgactccttcgagactcgctcaactcaagaaaaagatatcaacgaggaagtaataggagatttagttcaaaagttgagtattaataatattggatgggcaacagaacgaaatgaacgtctgtcttcactacgcgtgaattcaacctggctgttaaaggctggtgtaagtaatcttcgtcgcgacatacccatcgatttagagaagtattcaaaagagaactaa

SEQ ID NO: 229400 - DNA, 729 bp, Klebsiella pneumoniae
atgaaaccagtcattttagtggtggatgatgacagggcaatgggcgagctgctcagcgatgtgctcggcgcgcacgcgtttgaagtgcttgtcagccagaccggcaacgacgcgctggcgacggtggcgcagcgggcggatattgcgctggtcttactggacatgatcctgccggatacctatggcctgcaggtgctccagcagctgcagcgcacgcggcctgagctgccggtggtgatgctctccggtctgggcagtgagtctgatgtggtggtgggcctggagatgggcgccgatgattacatcgccaaaccgttcagctcgcgggtggtggtcgcccgggtgaaagcggtactgcgacgcagcggggcgctggccggcgaggcgtcgggcgccggtgctggcctgacgtttaacggctggcggctggataccacgcgctgtgaactgtataacccgcagcagcaggcgatcccgctgacccagggagaatatggcctgctgctggcgctggcgcagaacgcgcgccgggtattgaatcgcgaacagctgctggcgctgacccataacgaaagcaccgaggtattcgaccggaccatcgatgtgctgatcatgcgcctgcggcgcaaaattgagctcaacccgcatcagccgacgttgattaaaaccctgcgcggtctgggctatgtcttttccgccgacgtgacccacagcgagaaggcggcgtag

SEQ ID NO: 229401 - DNA, 333 bp, Klebsiella pneumoniae; identical to SEQ ID NO: 227077

SEQ ID NO: 229402 - DNA, 171 bp, Klebsiella pneumoniae
atgcataacaaaaaaataaatcagcttttgatcggcgctatgctggcggccatggcgcctgccgtgagcgccgcggacatcccggcgtggaacggcagcgcgctggggtttgaagccgggcagcaaggtctgctgggcgatatgctagggaaggtgcgaacaagttcctga

SEQ ID NO: 229403 - DNA, 543 bp, Klebsiella pneumoniae
atgaccacgattgtcggtggcgtagatattgagtccacagggctggacttcacatccggccacaaaattatcgaaatcgcgataacccgttatgaacttgaaacccagaagcacatcgacagccttgagatgcgcttcaatccgcgtcgcagtatcgatccgaaggcgcaggcggtgcatggcatttcactggaagatctggcgacggaaccgctgctggctgaccacgcaggcaagattgctgcgtacatgggcgcatgtagtgcgttagtcgcccataacggagaggcttttgaccttccgtttattcgccacgagttcggtagctatggggtgaaattgccaaatatccccatcgtagacactatgctagatgggttgtgggctaccgaggatgggaagcgtccacgtctggaagagctggccttttcacttgggttcacttacgaccgtgataaggcccatagtgctctctatgataccgagctgatgatgcagtgtttcttcaaagctcgggaaaaatatggttttttcgacttttaa

SEQ ID NO: 229404 - DNA, 420 bp, Klebsiella pneumoniae
atgatagacgaacttcccctctcggatgaattagatcgtaaagcgattgaagcactgatccgcattgctgacgaacaatcccgctctttgatgagtgaacgtgaagcacgtctggctatccgcgcagtgtttgagtccgttcaagggcttgttggggaagaggtaggcgaagccatcaatgtggcgatgtcgcagttcaatggcggcaccaagcgccctctgtttcctatgcacctcaaactctcaggcggcacggttctgttcgtatccgtttgcctggagaccaaccaaatccagatcctcaacacatcaacgggcgaatggcgcgcgccggtcgtctgcgaaagtggcgaggacgcactgaaaaaggctgctcagtttgtgcgtggcgcactgctgaaaggcgcgaagaagctgtaa

SEQ ID NO: 229405 - DNA, 645 bp, Klebsiella pneumoniae
atggattaccggattggaatcactggcgcacagggcagtggaaaaacaaccctggcaaggtacatcgatgcgcattatggcattccgtatgtggatgccggcgttggcaagctgatgagcagtctgggggtgaaggttggcgagcgtttgcccctttacgaacgtcttcaggttcagatggagattgccagacatatcgagatgatcacccgcggcgttgaaggttttgttatcgaccgcacgccagccgatgtcatggcttatacgcttgacctggtcggccagaccaatgaagaccgctgcatcgagctggctctcgacattgagcagttttgccacaaagcggccatttccaacttcaatgctatcgcgggtcttcgcccgggcgttgagctttccagcaaagatctcgcgcgtccccagcgaggatcgctggaccgtctctatgttgctcgcatcgatgcgcttatgtgcggtgagctgacgaaaatcaacacccttccccaaaccggcgatctgcaggtgttcgttatctctgaaaagtgtcgcacggttgaagcgcgagccagatcggtattgcgagtgctggacagagctgctgaaaacatcgagcgccgtataacaggacgagtgaccttccactga

SEQ ID NO: 229406 - DNA, 477 bp, Klebsiella pneumoniae
atgaagatgattgcagctgtcggtcgcaattatgaaatcggcattggcaacgaacttccctggcgttgcccgaccgatctgaaactgttcaaacaactcaccaaaaacgccactgtcgtgatgggacgtaagacgatggaaagtcttaaacgcccgctgccagagcgccataacctcgttttgacgcgctctcgtggctatatccccaatgggttctaccccgctggcatcgatgacgttttgagactaccagatccggtctgggtgattggtggcgggcagatttactcgctctttatgccacacgtagaagagatatggctgtcgcatattggcgtggatgtgccgggcgcggatgcgttcttcccggcgccaatgatgcgttctttagggttcgtaccagtcgaaacggcttatacccaacgtgcaaatgaggatgagcttggctttttgcaaatcgtatacagaaggtcgtaa

SEQ ID NO: 229407 - DNA, 903 bp, Klebsiella pneumoniae
ttgataagattgtttttactgattttagctctgcttttagccgttcctacctacggactttcagtattagcttgcctgtttatccatgaatggcttaataaacaggaggcgaaggctatatataaaatctttaacactcagttagattacctgagtaatacaggaaatatgaatcagacggatttctttatgacgagaagcggcgtaaaaaaattcttgtcaatgtatttgattaaagggtttcatacaaaaaccgtatcagaaaacgatactattacttatagcggtattgttttttttaagtttactgaggtgactgccgtctattttacttatcccaaaaactcttataggcgagttaccatagactacgatatcttgaattatagagagcttatggactatgcgaatcccgaaataatggacgagcttaaagagttggctagagataaattaagcaaagccgccaacgcaaaaaaagttacgaatctaactagattcaattcagtgtttggtatagattttaatgtgttaaacaaggatgaaatagtttctataattaagcagttgattaggagttctgatgtttatttaaagaacacgcgtcaggatgttattacagacccatcgtttattagacaactgctatctacagcttttggtgaagaatttatagagatatatgatgatgttcaacgcgaatctcagagaatgtacgagtatatttcagaggcagggttagatttcgaaccaagtgaattttatgataagaatctcgataaaattgaccttttcaccttagataatcacctattaaaaatagaccacggtcagcctgaagggttaggacgctacctgacacgtatgcgaaaaataaacgatttattcaaagctatacggtag

SEQ ID NO: 229408 - DNA, 618 bp, Klebsiella pneumoniae
atgcatttagaaaattgcctggaagatatgaatgtcattagcaatgctcttgctaccgtgacttctaacgtttcacgcttttcgaatgcaaacagcactccgaaagcattcccgaagcgtgtacacacaaaatttaagatgcgtccccgtataggcggcatcacaaggtcgacgaggcccggttttgcagattcccatgagttcagactgccgcaaacggaaggcattccggttcaagagagtagcatggttgctctattggctgaaattgaacgaagacttgaagagctgacgacgaaacatgttcggttaacgcatcacatttcagggtacagcgcagaacaaatccgcgatatgttcggtgaaagccggtatgaagatctgaaaaacattgatctgaccatccgcggattagagggctttgttaacaagttcatccgtgacgtcgatcagccgcatccctacatgaaacgcttgagtgatgctatcactgagtaccgtctggcggtttctgacctcctgatgattctaaatcagtgctttaacgaggtagaggttatcgaatcgcagacaggcctcattgatgagcacgtcttcgaaaatttctctttccattaa

SEQ ID NO: 229409 - DNA, 915 bp, Klebsiella pneumoniae
atgcaacatgaaaatatcgtattaattgaggaagtatacaaggactttacagataaaatagcaaatctcaacgatttttcacacactgtaaaaaagaatacagaaaatattgctttagacattgaaaaaaaaagacaaagaattgaatgcaatccgcccacaaatgaacatgataaattaatacaagaaaaaataggaaagacatttaggagtcatttattttacaacccttataatgacgaaccgacttcctatggatatagtgaaatagatgtctacaaagagatggaactttgcctgagtcttaaaaacaaacaatatcaatggctattaaccgaagcctacgaactatttgaggattacattgagtctatttatgcttgtgctggttatataaataacgatttctggccggcttcagattatggtttaattagtgtttcggacataaagtccatggatttcagttggtttcaagctacagcaaggaagaagaaagaggccaccaaagcagtacttaataaattaagggctgaaatagaaaactttgctaaagtcgagacaacaaattcagctaaaaggaattatcactttttaattacaatgattgaaaatatgaggcatattattgtacacaatggcggatattttaacgataccgaactatttattagcaacaccattcagaaatcaggaattaatggtaagaaagtacaggattatgaaagttatataaaatactttattggtgaaatgcaaggtaaggacgctgtatcattaatcgaagtgccatctgttaaatatccagcacatatgaatgcacatgtcagcagaataagcttccttattaatattttactggagtattcatttatggttatgactgagttgaaaaaatattttcaaatacagtga

SEQ ID NO: 229410 - DNA, 1167 bp, Klebsiella pneumoniae
atgactttgtggactgactcatatcaaagttcaattgactcaatcagtaattttatcgacaataatttcacacattataatgaaattcctgaaaatttatctcgcctagatgattcagtgttagcggattgtataattgtagttgcatggcgttactttaaaaacttatacattcatcgccgagactcgcttaacaaatatacttcatataatcagaaatttttacaccaaggcaacacccctagcttacaagaattaaaagatgataaattttacttcctaaataaaatattaagaatattatttgagtacaacttttgggcttctgatgattttggcccgcccatgttcttacgccctgaaattcttgaaaaactggacaagctaaaaccgccatcagatttccaagttaatttcatttggatcgagcgatctatgcctgcggctttgacaaaagatttattgctatccgataaattttcattcttaaccaaaattgcagttgacgtagaaaacttagaaagcaccatatctcataatattgagaaggggcttgaagatgtcgaaaacaaaacgaatgaattaagagagcaagttaatgaacttatacaatcttccaactcgtcaatacactccttaaacgaatatgattccaaactaaaagagtataaaagtgattataattttgttctgttgagtaaagcattctcaaacttacgaggaaaaaaaagaacagaattccagattaataattttatcgtcttgattttttcgctatgcctaacttgcatccccctgattgccttagcgaatcacataaaaggctggtatattgtcgagttaaacttgagttcgcttgcttattacttgccactcctttcactagagttgttactgttctatttcatgcgcctttattatattgaagggaaggctattaaagctcaattgctccaaatagatcaacgccttagtctgtgtgagtttatacatgattacgttgagaccaaaaagaactctggtgctgaaaaggaatcttggtcgctgtttgagaagttgattttcagcccaatacaggttacttctgaaaatataccgtctttactggatggtgcatcatctattgccgagttagcaggaaaagtattgtccaaggattctaaatag

SEQ ID NO: 229411 - DNA, 1200 bp, Klebsiella pneumoniae
atgagtgagatgagctatctggaaaagttactggatggggctgaggttgaatggaaacctttgagggaagtttgtgattttaaaaatggatttgcatttaaaagcaacttatttaaagaaactggattaccgatagttagaatcacaaatatagatggttttaacgtgaatcttgatgaagtgaaatacttttcaccaaatgattacaaggaagatatatcctcctttgaggtgtcaatgggggatatagtaattgcaatgtcaggtgccaccacaggtaaggtaggtttctataaaaacgaaacaagatgttatctcaaccaacgagttggtaaattcgtacctaaacgtaaccttttaaacaataagtatttataccattttctgttattgaatactgaggccatctatatccttgctgggggcggagcacagccgaatctcagctcaaacgcattgatgtcaaaattacttattcccatacctagctcttccaacccggaaaagtccctcgctatccagtctgaaatcgtccggattctggataaatttactgctcttaccgctgagcttaccgctgagcttaccatgcgtaaaaagcagtacaactactatcgcgaccagttgctgagttttaacgatggtgaggttgaatgcaagacgctgagggaaattatacagatgcgtgctgggcagcatatttcgaccagtaaaatcatggaaagaagagaagatgattatgtatatccatgttttggtggaaatggcattcgtggttacgttaaacaaaaaagtcatgatggagaacatctgttaatagggcggcaaggagctctatgcggtaatgtcaaaagaatgaagggccagttctatgctactgaacatgcagttgtagtttcagccctgcccgggattaatattgactgggcgtttcacatgttaacagcaatgaatctaaatcaatatgcttcgaaatcagctcaaccgggacttgctgtggggaaattgcaggaattgaaattacctgtgccttcaataaagagacaggagtacattgcatcaatactggataaatttgacatgttgactgactccatcaccgaaggccttccccgcgaaattgagttgcgccaaaaacagtacgaatactatcgtgatttactgtttagcttcccgaaaccagaagccaccagcaactga

SEQ ID NO: 229412 - DNA, 330 bp, Klebsiella pneumoniae
atgatcgcagccgaaaaaatcaaaaagcgagagcgtgatgcctctcttcgcgacctttggcgcacaccgcagtggttgtttgtcgccatccaacgttacataggcgtaaagttcgatgtggacgtcgcctgcaacaaagataatgttctcttgccgaactttataggtgttgagcgtgatgcgctcaagtgcagctggggagaacctggcacagtggcgttccttaacccgccctactccagaatcaacccctggatagacgcagcaattcgcgagcaggcgcgcggagtgacgacagtcatgctgataccacaatccctcgatacgtag

SEQ ID NO: 229413 - DNA, 843 bp, Klebsiella pneumoniae
atgagcgcagttaccaacaatgttaaaaacgatgacctggatgaactgactgcgatgctgcaatctctcgacgaaccagttcagaacgctgcgaaaatgagcggtgtcgacgagatcgacgatcttctctctggtctggatgatgcaatcgcaaaaccagtcgaggcggtggcggatgaagtaatgaatgccagctctaccggggatctgagtagcgtgctggaagagcttgagattgagcacgaatcggtgaagatcgaagaacccgagcgtgacctgattgcggagattgtgaacgagccagcgcctgaacttgacgctcgaagtactgagactaccggtacagatccaactcctttaccttcagtggcgtcagagcctaaacctgaagaagagcagccaaaacgccagaaggcaaaatcagagcgtgcgccggccaaacctcgcttcaagctggaaggtaaggacgaatcgttctatgcgtcagccggtctggaaagtgagagctttactgctgcattcgaaggggcgccagtcaaagcgaaagacaagatcttgaacctgttgaactggtttaacggtgggccggaaatcagtgtctacacggtaatcgcaatgcgctatatccttgacgcgaacacggtgaccagcaatagcattaaactggcgctgatgagcaacccggagaaaccatacccgctcaacactgcttcgactcaggctggccagatgatggctgtgtttccagcgactggcatcgcaaccagagaaggtgggaatttaacacttaataaagagtcgccgatcgtaaaaaaatttatagcggagtattccattggatga

SEQ ID NO: 229414 - DNA, 1023 bp, Klebsiella pneumoniae
gtgaacattgatgtaaatgccattttaaacgatgcagtcaaagatatgcccgtagctaacatcatcgtgataggaaagactggtgtagggaaaagttctctcattaatagtgtatttcgtggagactttgcgagaactggagtagggcgccccgtaacagaaaatataaatgtaattaagaaagaaggtgtcccattacaaatcattgatactcagggacttgaagttgcggattacgagaaaaccagattaaaaattgaaaactatataaatgaacataacaatagtgaaaaatcagagaattatgtccatctcgcttggctatgtattaatgacaccggtaaacgttatgaaaatgcggaattggatatagctaaattcctgataaacaaagggataccagtcatagtagtactaacaaaaacaaataatttcacaaacaatgaatttgcgaaagaggttgaggtcgcatttaaaaactatagccattccgtatgtctgactcgtgctattgaagaaacaatttatgatgaagatgaaccggatgagatcataggtaaaagaaaggttagaggcatagatgatttaatccaaacctcgtatgaggttattccagaagcacaaaaaaaggcattttccaatgctctttcaattaaaaacaagaaagcattggatataaaaaaggagcaagccagtaaagaagttattgccgcaacggccatcgcagctgcggccgcagcaacaccagtcccattttcagatgcatttaccttagtgccaattcaagtcgcaatgattgcaaaaatcagttacacctttggaatggatgtatctaaagtggccttaacaacaatggtaacgtctttaataggtgctggtggtgcagtttttgtaggacgaacaattgtcacagggctattaaagatgatacctggtgtagggagccttgttggaggggcaatatctgcaacaacggcaagtgcaatcacaaaagttctagggaaggtgcgaacaagttcctga

SEQ ID NO: 229415 - DNA, 753 bp, Klebsiella pneumoniae
atgctaaatactacgcaagcaacatttagcaatttgcgcatttatcattttgctaaaaacgacaacaatgcagggatggaaaataaagaaatcagaaaagccaacctggaatctctgtacgagaagcgccagagcgagtctggaatgacaaaggcacagttcgccgaactcattgagacaagcccggcagctcttagccagcttctgggtccaaatcctcatcgcaatattggcgataagatggcccgcaaaattgagtctgcgcttaatctgccttttggctggatggatgttttacatgccaaagaaacatcttcgaacgtttcgtttcgaggattgaatgagacgaaaggaagttatcctgtaatcagctgggtaagcgcggggcaatggatggaagctgtagaaccatatcaccgacgagcgatcgatcgttggtacgatacgactgttgtatgctctgaggactccttctggctggatgtaaaaggagattcaatgacctctcctgcaggtctgagcatacctgaaggggctgctattctggtagatcctgaagtagagcctcgaaatggaaaattagtggttgccaaactagatggcgataatgaagctacttttaagaaactagttatcgatgctggcagacgctttctaaaaccccttaaccctgcttatccgatgatcgaagttaacggcaactgcaaaatcattggggttgtcgttgacgctaaaattctgaatattccctaa

SEQ ID NO: 229416 - DNA, 234 bp, Klebsiella pneumoniae
atgagtacagaactacaccgctggcgtaagggcgccacaactgacgaatgggcacaactagcgaagctggcgaatacgaccccgggctatctggatcagattgcctacggtaatcgccgtgcatctcccgaaatggcatccgcaattgaagatgctacaagattttttcacagccaggccccggtgctcaaagaaagccttgtattcgtcactccgcgtaatacggcactctga

SEQ ID NO: 229417 - DNA, 153 bp, Klebsiella pneumoniae; identical to SEQ ID NO: 222574

SEQ ID NO: 229418 - DNA, 1266 bp, Klebsiella pneumoniae
atgagacttataagtgttcgaattgaggggttttggggggttaaagatgtatcgtttgattttttcagtgactataatttcataataggaccaaacggcataggtaaaacaacagtattaaatttgataacctctgtgtttaaggtcgatatagactctatagcaaaggtccaatttgatcatgtattaataggcgttattggttttgataataatctatataatatagatgttacaaaaggaattggcgatgatgatgaatgtattataaattttcaaattttcaacttgagtagcgatatcaaagctttttcgagaatgtttagaactgtgttacaagatagaaatgatgattacaatagagttagaaggtttccaaggaattattttcagtatgaggatgcaaagaaaataattaatgaaatgataaatatagtttggcttccgattgggaggtttactcctgaaaatgataaagaatatagattgtctgctcatggtaattctgttgatatgcggcttgatgctgtacttgaaggtatagtgaaatatgcatcagtaattaataaaaatatatcaaacgaaatgacagaatttcaacgagacgctttgatatcctccatagattcatcttatactgaggggttgaaaaagaataaaaataaacgagactcatctcacgatatgcatgatctgatggaggtttttcaagaggttggtattcctgaagccaagtataaaaagcgcgttttaaaaatgttcacggttcttgaagaagtggtgagtaaaatcaaggaagggaaagagaatactcttactcaggaagaggtgacaaatgcatttagtttgtccagaactagatatcttgtcgaaagatataatgaatacaaaacaaaaaaagattttatttctaataaaattaatttttttattgagcagttgaatgcgttgttcagcgataggaaagtttttttcataactgactcgaatgaattggcgtttattagcgaggggcgagatgatttgagtttgtttgatttatcatcaggtgagaaacaattgataatattgcttggcgaagtgcttcttaatgaaaataacccctgtgtatttatagcggatgagcctgagatatctcttcatgtttcatggcaagaaatgcttgcagaggtaatgggtcagttaaattccaacatgcaagttatttttgcaacccactctcctgacatagtatcaaaaagaaccgataatataattctaatgtaa

SEQ ID NO: 229419 - DNA, 879 bp, Klebsiella pneumoniae
atggaggcggtgtattttactagaactacgggtggcttaactgctcaaagacatttttatggctcagagtatatggtttatatagaaggtaaagataaggagtcaaagggtactacatacgatgaaaaatattacaaatctattctgaattattttctaccaggaaaaaaggtgacaattaaagtcgtcggatcttgtaatgatgtactgcacacatacaagaaaatattagattctaatattacgaatactatatgttttattgatcgtgattatagcggtattacctttaattatatttctgattacaggttaatcagaacttatggttatagttgggagaatgatttttggtctattgagttatgtcattccctgataaataacttgactaattacgatcctaatgcgcttagggaattatctaccaagcttaagtttggcatttcacggctagcattcttacataaaattaatgtcacatgcactctctttgagtttaatatcttggcgttagggtgtaagggacagggtggaattatatatgattctaaatctgattttctagttagtaagtctgagataaaaagaattgttcttccattaaaaaaacgcccagatataaaagagttgcattttttttataaacaaattaaagcactgccagaaagattgattcaaggtcattattttgaatatatcttactgcgtgcaataagagatgtgtccaaaaaatactctcctgaaaatactacagcacccgagaaaacgattaaaaccatctctttttctcaattcatggggaaaccatcagattttttacctacagcggtcattgattattaccaagagaaattaaagttttttttggaaaaatag

SEQ ID NO: 229420 - DNA, 1230 bp, Klebsiella pneumoniae
atgaaaaaaccatgggaacgaagacttaaagacctttcgcacttgctagaaggttgtgcgaaaacatatttttcacccgaactctttcggttgaacctaaatcagtttttgcaaacggcaagaacaattactttcatcatacaaaaaaatcaaagtgatattaaaggttatgatgagtggtatcctaagaatgtgatcgagaaatggaatggcgatcacattatgacatgggcaaaaaattctcggaatactattgaaaaagaaggcgatcttgaaatgtacagtgaagcaaaagctacactgatattttcatatcttgaaactcaagatatcgagattaaatctagccagagtttacttaagcttggtacgagtgaactagtgaaaattgcccataaaaaattcccgtcgtatataaccgatgatgcagttattaaatcggaaagacgctgggtggctaatacccttaaagattatgaattattgtatgcgttgactgttatttatagccgtatgtatgagtgttgtaggtcgttaggttttttaattggggagccaattagtgaaacaataaaaacaccaacacattacgattctcataatgatgagattagacgtgttacttatttgaagttaaaggatttatccaaaaataaaatgacatttgagattgtcgattttgatgaaaatgttatacctaacgctctcaaagaaaaggctatattaatgaagccttcaaataatatgaactctactaaagaattaataggtttttcttcaaagattgctgaaatgacattcttagagtacggttttcatgttcaaactctgatgctatttgatgaaggctatcaagttattgatttaattaacacgaattttgaggatcaagctgataagtatatattttggaggtatgtggctgatagggctcatatgtataaagcttatggatttatatggatatcagagctttggcttcgaaatgctaatagtggatataataaatccatacaaagcatgcctattatcggagaacagctgcaaattgttggggttgatagagaaaattatcagagaatcatttcttgggatatagtgagagcgggtgaaaatgacatgcctactttaggtacacgaaaggagcaggagtggagcaatgggaaagcatatttcatgcgctcaattttgcaagcgataggagctgacactgatatgctaaatgattaa

SEQ ID NO: 229421 - DNA, 297 bp, Klebsiella pneumoniae
gtgggcgccaaagccatagttgaagctggatccctgcaggccatcgccatgggccacttcgatggagtcgaccccggccttatccagcgcgctggcgatctgctgcacctgcgccagggaatactggtgacgaatagcgtgcataccatcgcgcagcgtcacgtccgagatataaagttttttaccgttcatgctgtcgctcccgccgcgctgtgcattgccccggccatttgctccgccgtcgccagcgccgccgaggtcataatatcgaggttgcccgcgtacgctggcagatag

SEQ ID NO: 229422 - DNA, 348 bp, Klebsiella pneumoniae
atgatgggcatgcatcccggtggcggtctccggcttcagcaccgccttcagggcgcggaagcggtcgcgaatgtcgttcatgttcatcgccccgccggaatccaccacatagatacaggtcgcgccataagattccatcttcagcgcctgctgcgccagctcctgcggggagatcatatggctcatcatcagaaaaccgacggtgtccatccccagctcgcgggcaaaggcaatatgctgcgccgcgacgtccgcttcgctgcagtgggtggcgacccgcaccacccgcgccccggcctgatacgccgctttcagatcgtgcagcgtgccgatgcccggcagcagtaa

SEQ ID NO: 229423 - DNA, 531 bp, Klebsiella pneumoniae
atgaaatatccaaccgtatcagtaaacggcgtttcagttcgtgttgatgactatggacgttacagtctgaatgacctgcacgcctccgctgtaggcagtggtcaggccaaagaaaatcagggaccaagtcagttccttcgctccaaaaaggttaaagatttcgttcaaaccttagccagaatgcaaaaatgcactctggaagaaaatcaaccagttaaagttattaacggcggcgtaaaccaaggtgtatgggccctggaaattgttgcaatacgctatgccgcatggctcagtgctgagtttgagatccgggtttaccaaacctttcagtctcttgttcgacagggctttgatgctatggcccgcttaaataaaattgaccatgtgataaacaccgaaaccaaggaagtgagccagtgtgcaagccgtatgggcaaatggggggcgggaggacggaaacgcctactcttggcagctcgcacccgtgtggttgatgaggttcaaatgtatctgcctggatttgaggcgtga

SEQ ID NO: 229424 - DNA, 297 bp, Klebsiella pneumoniae
atgcagttcctgatggcgctggcgctccggatgggccgcacgctgggcgaactgcgacaaaccatgacggtcggcgaattcaggatgtgggctgaatacgatcgtatcagcccgatcggtgatatccgtggcgatattctcaatgctcagctggtatcagcggtttacggggcgcagggcggtaaagtcaccattgaagaggctcagcttcagtggagtacagaagaagatgaggcaagcgacagcggcgatccatttgccgggttagaagccgctttgctcgccgcttcggaataa

SEQ ID NO: 229425 - DNA, 405 bp, Klebsiella pneumoniae
atgtcaaaactgagtcttaaagcactggcactggccccgatggcgggctttcgtaaaaaagaagtcaccgttccggaatgggataacgccaaagtaatcattcgtgagccatcagcagaagcctggattcgctggcagggcattgccagccctgaaccacccaaaccaccggaagggcaggatccccaggaggcaccggaactgaccccttcagaacgagccttccgcacgatgcgggctgatgtcacgcttttcatcgatattttgctggataccgacctgcagtccgtttttactgtcgatgacaccgaacaggttgaagcgatctatggccctgtgcattcgcggctgttgaagcaggcactcgatctcattcgtgacgcggatgatgctaaagcaaagtaa

SEQ ID NO: 229426 - DNA, 348 bp, Klebsiella pneumoniae
atgacagaagatgatctctatggcttgctgtcgccgctggcagacgggcgggtttatccgtatgtagtatcgctgggcagcgacggccttcccgatgttcccgcgccttacatcattttctcgataccgagtgatgttgctggggatgttttctgcggccaggcagagtcgacactgcgcattcaggttgatgtatgggctgaaacgaatgacgaagcccgggcgttacgcctggatgccctggctcgcctgcaggtgctttcacctgtcgaggtgacaaaaattcctggctacgacacgacaacccatcttcatcgggcaaccctcgaaataacggttattgcctga

SEQ ID NO: 229427 - DNA, 123 bp, Klebsiella pneumoniae
atgaaacgcataacattaaaagaagccaacaaatcgcttcgcattattgtgaaagagaccggatatgaactccatagcggagccggattcgccgaatacgatgtatttggaagtcgcggatag

SEQ ID NO: 229428 - DNA, 528 bp, Klebsiella pneumoniae
gtggacgcttatatttcatatcaatctttattggcatatcgtgaatctgccgattgggcattttgggggatggctgcagcatggctaagtgcggcattatcttttgtgacgctctttattgctggctacaccttgaatacttggagaaaacaagaagctttaaagttgaaagtaagcttaaagcaggcaattcttgagcttgaaaccgttctgcaggcaatgccattggactggtcatttgtcgagatgaatgcaggtagaatgatggtagaacaatttaatccatcccgtgattcaagctctggaaatgtgcaactttattataagagaaaagatttagaagaatcctttagggctgcttcgaagtgttggattatgtgtgatggtttattcaaaagaagcgaagttggcaaagcttgggatgagtttgataaacaattcaaggattatattcgtaagagtggggacagaaaagagttagaattaaaactaaaagctacatatacaaaaatgaaattgtttaaatga

SEQ ID NO: 229429 - DNA, 291 bp, Klebsiella pneumoniae
atggaagagaaagatatcgaagaatctttggtgatatgcgagattttaaaaaagaaaatagtaggtcttttagctgagcgagataatctgtttatccaactcaaaagtgcctttaaaacaagtaggcgggatatatttgacaactcaatagttagtataaatacaggcccaatgaagctagcccttgatgaaattgaaaaagtagatgataagattgataaattagttacacgatttaatcggcgcgcggaggaagcaggaaagccccgtttaaaaatttatcatcgttag

SEQ ID NO: 229430 - DNA, 798 bp, Klebsiella pneumoniae
atggctgacatggataatccaggtaaattaatctggcacgtttcctgcgatgagtcaggaactggtggacaacgattctatgggtttggaagcctgtggatgaaataccaacgtcgtggcgacttcgttcagatgatccgcgagcttcgtgaaaaacataactgtaccgatgagctgaaatggcaaaaagctcattcgaaacaaaatgctgcattctatgatgatgttattgaagctttttttaaacatcagtggcttgcatttcattgcatcattattcaaaaagcgcatgtaaacaaagaattccatgatggtgattatgacttagcaatgcgtaaacactttactgaactactgacaaaaaaaatcatacgagttatacgcaaattccctcatagagaatgtgagttccgtattgatgttgatccaatagcatccaggtacgataaagctgatgaggctctccataagattgcaaacaacataatcaaaaacgcaacagggaaagaagaagccattaagactgtaatcacaaaggattcaaaggaatcggcccaaatccaaatctgcgattttttacttggtgcagtcatgagtgcgtaccaagacaaagcctcaaacccacgaaaaattgcagtagcaaataaaatcgcaagttatttaggttgggatgggtttcactatgatacttggggcacggagcgaaaatttaacatttggtatttttatgaccctacaaagggaccgcgtgagcttcaaacaaggaaggtaacgctcaagtacccattgccagaataa

SEQ ID NO: 229431 - DNA, 477 bp, Klebsiella pneumoniae
atgatgaagttaactatcaggcagcaggaagttcttaacctgctcattgagtaccagcgtgtccatggattcccgccaaccacctatgaactgaccggcatgttgggttgtcggtcccccaatgctgcggcaagtcatctcaaagcgctggagaagaagggcgcgatcaaaattacccgcggggtttcccgcggtataagcatcgttaattttccccctcagagagaacttgtcataaatcttaatactctcgttaaagtcaaacttagtgatgtcgcccttgtgtttttggagcgtcagcatgaagaaaaccgtattcgccacccctctatttttggtgagtttgaaccaccatcaaaggatgaaaatgggtttacgaaaatgacgctatggggcctcatgtccgaactggggaagctatgttattgcggtggggaagttcctttcgaacttaaaattcccctggaggatgaatga

SEQ ID NO: 229432 - DNA, 243 bp, Klebsiella pneumoniae
atgacgcctgagcagttagccctctcagaggcaattgaaactgctggtggccagtctgagttggcccggaagcttacagcaagctccgggaaggaagttaaacaacaacaggtatggaactggctcaacagagaaaaaagaccgcccattaagcaatctcagcacattgagagcgttactggtatcccaaaagaaagactgcgtcctgatgtattccaaaaatttacagattcagccggttaa

SEQ ID NO: 229433 - DNA, 639 bp, Klebsiella pneumoniae; identical to SEQ ID NO: 190458

SEQ ID NO: 229434 - DNA, 882 bp, Klebsiella pneumoniae
atggaagataagctctatgtatttaactacacacacaatagaaataagattttcgccaatctaatcagcatcatagatgggattcttgcagatggatacgtacgggatgaagaagtgctatatctcgatacttggctacttgaagccaaccagaccattagaaatggtatgatcaaaagtctaagcacaagggtatctaaaatactggccgatggggttgtttctgatgatgagcgcagtgagttaaagaaacatcttaatgatatacaaagacaaatacttgatatacccgatgtggatttattctccaatgagtcagatctgcatctattgaatggtctttgcaaaggcttaatctcagatcgaacattaagtgaagaagaggtgagataccttgactggtggttaacgcagaacggggcgttaaaaagtaattacccgggaaaggaattatacgctttagtaaaagagatcctgagcgatgggataatcacagccgaagaaagtgaaaatctacacaaggctctggtggattttaccggttgcgaccttacaagcggcgtcgtagatggtcttgccactaaattaccattagacaatgcagctgaagtatctgttgaaaataagatgttttgcttaacgggcatctttttggcaggaaagagggcccatgttgaagacttaattaaaagaaataatggcctaattgccagcggtatcacaaagaaaattgattttcttgtgattggtacactttcctcacgagactggaaattctccagtcacggaaggaaaattgaaaaagcagtttcgtatagagataatgagggagctaagttgaagatcatttcagaagaaatgcttttcgatgcactaccatga

SEQ ID NO: 229435 - DNA, 801 bp, Klebsiella pneumoniae
atggggttaataaccatggctaaagactcaaaggttgtatacggcgccagcggcaaaacgaacgttttagcgtttgaacctgaaaaactgcacctggttatcgacaaaacgcacccgctttacgatgagcgcatccacctgcctatcagcgaggcaatggtgctgaacatcatggaccagggcgttcttgagccgattatcgtctggaaagacccggagacagggctgtcttgtgtggttgatggccgccagcgtgtgcgccatacactggaagctaacaagcgtctgacgaaagaaggcaaagaaccgttactggttccggcagtcgctaaacgtggctccgccattcgcatggcgcaggcgatggtaagtgctaacgaaatccgccaggcagatacaccgctgggccgagcaaagaaaatggctgatgcgctggagcgcggccacgacgaggacgatttagcgctgatgtttggcgtgagtgtccagaccgtacgcgcaacgctgtcattgctggatgccacccaggctgttcgggatgcagtggagtccggaactgtcaccgttacccaggcgcgtcagcttggtgcgctcccacctgaagaacagcggacaaaagtggcagaaatcgagctggcgaccgctggtaccaaaggccacgaaaaagcccgtcggcaacgtcagatactcggtgaagcaaagccgcgtatcaaatcgcgcaaggaaattgcaaaagccctcgaagatgccagcggcgaatatgccgaggctctgcgctgggtgcttggggaggcgcaatga

SEQ ID NO: 229436 - DNA, 465 bp, Klebsiella pneumoniae
atgaacatcgaaacagtaaacgagctcatcgcttccctggagtcggcaggcgagctgtcgatcagagagcagaagttcctgaagctggctaaagcatatgtgcagctggctgcggagaacatgtcgatgattcgcttgttgtccgacataagcgacaaccacgttgaatacttctctgaaggcgaaggaaccatgttcgcgggtgtgccgctggattatgtttcagaaatcaacatgtacgtttcccgcgatgttaatgctgaaaacccggtcccagccaccgatcgcatctatgccgggattaaggctgatggggtggaggaaatggcgtcaacttaccgcggttttgccaataaggatggctgctctgtaaacatgaaatgcagctacaacctcaccgcagaacgagccgaaagctacgcggcctatattcgccaccagatgcgcgagggggccgacaaatga

SEQ ID NO: 229437 - DNA, 270 bp, Klebsiella pneumoniae
atgagcaagtcatacatagtgattctgcaatacctgtggtgcaacgaaactggcggaggcattgaatacacctctgactgcgtcaaatttgataagcgcgataaggctatcaggcacggatttaagctgcgtgaaagcgacgatttcaacatcggagttatcgagggcggcaaattgatttcgtttgactggatggataagccggttggtgaaagcgaagacacgctggcacagattgccgagctaattagtccggaggatacagaatga

SEQ ID NO: 229438 - DNA, 783 bp, Klebsiella pneumoniae
gtgaccaagagggatgacttcaaagcagccacgaaattagcgcttgcccgtcgggctgcacatttttgctccaatccgcgttgtctcaagctcacgatcgggccccactccgacccaaacaaagctttgacttcgggtcacgctgcacatattcatgcggcctccgaactggggccacgctacaagacctcgcagaccgtcgcagaacgaacgtccatagataacggtctgtggctttgtcgggagtgcggagtcattgtcgatggtgacgactgcgcttacgacgcggacttgcttcgcaagtggaagcgagaccacgagaatatggtatcagaggtccgcaccgaaggatattcacgcagccttgccttgcttcaatctgggcgcatggaaccgcagatagcgaaggaaatcgtctctgcaatgacggaccgtcgttcgttatgggccacattcgatgccgaatgtcccgaccacgtacgacagtcgcttgatgaacttcgtcgacgattcaccgctattcgagggaatctcctcgacggaacagcacttgatgaaatactactgtcgctaaccaagacgattctgattttcttcgacgcgatgaagtcagtcgaccttagaacattacgatgtagttcaggtaatcctgagtggctccatttcaatgacgcactgtcagcacttcggaaatccataggaatgcagattgccaaccttgcaaatgcctacggcattgccttgtgcaaagatcttcagagtattgctccgaccagaatctag

SEQ ID NO: 229439 - DNA, 912 bp, Klebsiella pneumoniae
atgcagccggaattcaagctacaaggaatcaaaaaattcagcaccttcaccggattctgcggcggccacgacaaagccatattccaaccgattgaagatgtagcgttcagtgcaacgaacaagcagctgaacatatacgcctatcgggctgcagccaaggaattacactccatccttgagtcaaaagctttttgcgaagttctgctgggtgacaagttaaacgttaatgactttccagcgcacttccagatgacgctaccgcagatcaagtcaggcgaaatcaaggtccctgacttcattctcgaagccatgttgcaaggggagaagaaccatcaaattcgggtactgcacatgcagtgcgaacatagcatttctgaactgcagcaaatctgcgacgagttgacagacactatcgaacgcgaggagtcgttgggattcgagcacgtctaccatgtcctcgacggtgctttccttgtagcatgctgcgcgtcgtttatcccatacttcgaccatgatggcagtcggatcatatccaagcaggaggagcagcgaatggctcgatcaagcgcagcgagcaatgctgaaataaagaacgtgatgctcaacgtttttccggaaggcgataaaacccatgtcatcttcaccttctctaagggtaaccagagtttcaaggcgtcgatagaacgactgctcaagctagaggatgaagcgctgaagattggcctttcaaacatcgtgctcaactacgttgagaactccgcctacggtccgaagtacattaacgataacttcagccctgaacagatcaaacacattgcggaggtgttcgcggtctccgtattcgacagaagtaagtttcgaaggagcggtatcaacctatttgttggaagaccaaccgctgcgaccaagtaa

SEQ ID NO: 229440 - DNA, 279 bp, Klebsiella pneumoniae
atgtctgtagaaactataaaacaagtgcttaccaacccctttggaaccgcgcgactccttgaggggcacgctgtattaagcagagcaaagaccgcaaacataactgatgaacagttaagagtactatacccggaccttcatggaacaaccgatgctgaaatcgatggatttgtgacgctgggtaacaggttcgtcaaaggtgaggttcgctgcaatgggtccgccttccctaaggagaaaaatacgacttcaaatcttaaccccgataatcaaagctag

SEQ ID NO: 229441 - DNA, 1248 bp, Klebsiella pneumoniae
atgtcgaaaaaagcaaaaaataatgaggaattgattaaggtcgctatggccaaaaattcactaaaaaatttggataaattttttattcatcagtgcatggtgaggagatttttcaaatataatccggaagtttttaaaaaactgaaagaattcaggagccagttggagcgtatcgctgaaaaaaatctggtatgttctgtgtcgcgagcccatgttgtttattatgtaatgaatgcaatgcagaatagaagaatgttgacatttcttaaaaacggcagcattaccgaatgtcgcaattttctttttagtctgatcgagccgatagactctttattcatggtcaagattgaagacctgttggatgatgaagttgtgtatgaaatcatagatttgatgatttttacatggccgactattgatgatatattgagtaaaacgaatatgctccgttatttcacgttttacgcttcaactatcgttatagatttccaaaaactgatggtaatgcagaaactggctgaacaggaggagatcccattgtatgcgattaatgctgagttttccccagagttgacaaagtggactggagtttcattcaacctccttgcaaaatatccggcgaatgtttatgaaagacatggcttaggtaaaatatatcgggacatttattgcctttttaattgtggtggagccgtaaggaagttcaattcgaataatgttactattattgatgatagcattggtaacgtggtagttgatggagaaaagagcaatggcaggatgtatctttcagttccttacaccgaattaccagtcgatattgatgaagccatgagaatatttaaaaatactgtatctaatctattaaaagataatggggtttatcgctacaatacgggagatgcggactactggcattcgaacttctacaacaaaaatgatggtgcttccatgccaagcacccggaataaaaataacatcgttcttcttaagcagataaattctattttaaaattacaatctggattgctggtctgggacaaggtaaacattgatgagaagtcaatagaagactcatgtgaagaggtcggtaggttgattgaaaataataatgtttttacacgttctgaaagcacactggccaatgactatgaatacgttgcatcattgataaatccagaatcaaaatctggcggggatctgttgagtaaagttttatcaaaaaaaaataatatcgtggtgaaatag

SEQ ID NO: 229442 - DNA, 1962 bp, Klebsiella pneumoniae
atgaattacctcgatgatttgcctaagcgggatcagaatcatgttcacgatacaatggctaagactgcgttcgaagcttttatcgcttcgtcaggtgtggttctcaaacagagttcagatgacaatgattacggcactgattaccagctcgaaataatgcatgatggaatggcgaccaatgtccgacttcaggtgcagctaaaaggtactgctgcaggttttaatacagatggatctgtcagtatttcagttaaacgttcaaacctgaattatctcctgatgagtccgggttcactttatgtctgtcttcatattccgacaaacacgctgaaggttacctctgctcagagtgtactaacccgctatcaaaatatgggcccaagctggcagtctcagaaatccgtcaccgtcaatttcgctgaagatttgaccattcagcaccttatcaagattacctcactggcccgccttagcgcacttgacgcgcgcaaccgacgcgtagctcataggaaaatgaatgaaaatgacatggtagaccatgtaagggaattgctaacagtttatgaagtcgcagatgatactgcctctgcggttcatcaacttataaacctttacaatagtaatcagactgaagttatcagtgctgcatatgaacgattcaaaacagtattaggcgaagaacatccagcaatgatgttttgctatatggccgagattgatcttgcaagtgctaataaaatttttgaccgtcagcgcgttgaattaggtattctgaaattgaaggcttattcgcttgctgatggtgcagatcgtgctgggttgcattactccattggtaatggatttgctgccctgaatgatttcaacgaagcactagaagaatataaaatagcatgcgagctcaataagcagaactctgacaatgaactcatggcgatgattttcaaaaatatggggggcacctatgctgctctcgaaaatgaaaatcaggctgtcgagtgttacctgcaggcattgaaacacaatccttatctggctgaagcccattatgcactgggtctttattatcacaacactggccagttcgaaaaggctttggaacaactggataaaattgtgttttccagcgatacgcaaggaagtttaattgatcttcagggctggcgtatatcggctctcttcaatgtgggtgaaggcaggtctgcgtttagagaaattaacgccctattgagccaggcagataaggcacagtggatatggccatggtgtttaaaaattgtctcgcagtttggccgtgaatcaatcgagaatgcgaagcttagtcttaccttttgggaatcggctttgcgccattctcctgaaaaccctttagttcaacgagaattgctgctggctataatctacctgcgaaatcgcaacataaatgttcataaaacttatctccaatttaaaaatgatcttgaggcctgcgcaaataaaatagggtcagatgcagcaagtgtactgtgggatctgctgggtcattgggcagaggatgaggaactgggagatgaagccatattatgttttgaaaaagcctattctcttcagaaaggcgattacgggttatgtctttcaatcgcgttgaataaacaacacaggtatgaagaaagtaaaaacttgatgaaaatctatacgttagccttccctaatgacgatcagggatggtaccgattggcgagcacttatgatttgatggggcaattggagaaatgcattgagccttatcttcatagcttgtctcttaatgtcgataacgaccatgcatggtttaatctgggtggtgccttcttcaatatgggtaattacccggaagcacggcgagtctggaaagaagcagtaagtagatttccggaccatgaactaactgcgaaaatcagagctgatatccccttcatactgaccgatgagccattacaataa

SEQ ID NO: 229443 - DNA, 549 bp, Klebsiella pneumoniae; identical to SEQ ID NO: 102282

SEQ ID NO: 229444 - DNA, 363 bp, Klebsiella pneumoniae
atggaggaaatgattaagccatcacttgggaaaagtgatacggataagcccaagagctcacagccttctgttaatagcgagtctaaatcagggatgtcttatcctggttcaatcgctgctcaaatcggcaccggtgaacatgcaaaagattcttttatttggatgatcctaaaatattgcttttatcttggcgcaatttttagcggggggatgatgctggcatacttccattatgtattcgatagaaatgaaccagataagattgatatcattgcagcgcttaaagatgtttggtcaattttcactccaatactaactttagctttaggttatgcttttgggaagagagaacaaaaaccttag

SEQ ID NO: 229445 - DNA, 276 bp, Klebsiella pneumoniae
atgtcatttaaattgtcagtattaaaaacagtccagattcattatctcggtggatatctctgcgacaaggatgttgaaatagatttaatttatgcagttgaaagcgtccgtcaggatgacactggtcaggtaaaagcaacattgtcagtgcgttatgatgacaatgcaaaggtcatcgtaggtgattaccctatttcgctggatacctcatcatcaaaatcatgggcagcgcaggctgaaatacagattatggaaatgccagaattttctcaataa

SEQ ID NO: 229446 - DNA, 168 bp, Klebsiella pneumoniae
atgcgtgaactggctgttgagtataacgtcaacttcattagtggatatcagctattcccgaaaacgtacgataacagcaatggggcctgggaggatggtttgcacctgagctctcttggcgcatatatattgacaaataaaatcaaaaaagaattttttcaggagtaa

SEQ ID NO: 229447 - DNA, 921 bp, Klebsiella pneumoniae
atggcgacagagcaactgcggtggggcgtgagccccctgtgctggaccaacgatgtactcgaggatttaggcggtgatattcccctggatacctgcctgcgcgaggcgcgggaggcgggctatcagggcattgagttaggacggaaatttccccgccaggcatcaaccctgggcccgctgctggcggcggctgacctgcgcctggcgtccggctggtacagcggcatgctggccgaccgcagcgtggaagcggagctggaggcggtgcgggagcacgcccagctcctccggcagctcggcgcgaaggtgatggtttacggcgaatgcgggcaactgccaggtgaaaccccgcttgatgagcctatttcgctctcgccgccgttaagccgcgtcagccttgcggcgtattgccacaagctgaatacctttgctgacctgctgctgcgcgactatgacctccagctggcctatcaccatcatctgatgatgctggtggagcacgatgacgagctggagcggtttctgtctcacacccatgacaacgtcgggctggcgtttgataccgggcacgcctttgtcgccggggtcgagatcccgcgcgtattgcacaaatatggccaccgtatccgccatctgcatctgaaagacgtgcgtccgcaggtgctggggcgtctgtatcgggaaaacctgagctttaacgaggcggtgcgcgccgggctgtttaccatcccaggcgacggctgcatcgactatgcgccgatcctcgactttgtccgggacagcgactaccgcggctggctgattatcgaagccgagcaggacccggcgatggcgccgccgctggccaccgccagccgcgcctatgcctggctggcgcaccatttatcttccccttcatcgtcagaggagtacgcatcatga

SEQ ID NO: 229448 - DNA, 789 bp, Klebsiella pneumoniae
atggctagttttttacagcaaataaagcgctcagaggattatttttcagagcttaatgatacggcagaaattcgattggcctttatggaattagttgttcaaaatgcttctattttatatccatcattcaagcatgatagagtattagctgataagttaaaaaaatatttgacgttgaaaacagttgatcaaaatgctctctatagaggacttttcatacaggctgttgccatattcgaagatttcataaggaatatggtaaaccatattatcgagtgccacaaaataaaagtaaaaaaatacagtaaactaaatgatgttttgcagaattacttcattgcaagctccgggaatgttcttactcattatggtagaggaacggttaatggtgtgaaatataactttgaacaattaaaattaagtttaatgtcttgtttttctgatagtgatgattattatatagaaccaagggtatttacgatatcaatgggcaattgtacatcttcacgagttgaaaaattattttcaaagttatgcctagatgacgatatatttacgtcaataagcggtactactgaattaaaaaaaacagtaatggaaaccaggaaaagtgcagtttcccttttgataaaagaaaaattagatcgtatcattcatatacgcaatgatatcgctcatggggaactaacggtatcaatcagtaaagatgagtttgatgatactagtgttttcctacgttctcttataaaagctcttgccgagaggtgtcaatctcttcagacacagtag

SEQ ID NO: 229449 - DNA, 510 bp, Klebsiella pneumoniae
atggaacaaatagaaagaagtaaaagatatcttaccagaatggagaaaatatactcaggagtattttcttcttcgggtcatgataaagaagactacgatgatgatatagtttcttttttcatccattgttatcacgtaagagattggattatcgaacttaacacattgaatataaagtcaggtcaggtggatatattcatcaataaacaccaagcattgaagatttgcgctgatttagctaatggttctaaacactgtaagttaactcgttcattacggactggacgccaacctcatattgcggctaaacaaaaacaaacatctacttggtattcaggaacaggtggtggagaagtaatgacatgcaaatatactattttatgtgatgggcaattatatgatgctttagatttagccagagagtgcattcaactttgggactcttatacttctgaactcaacgccttaaaaaatctagagattaataatgactctgctagcacattatag

SEQ ID NO: 229450 - DNA, 351 bp, Klebsiella pneumoniae
atgaaagagattatatttaataaaagagaaaaagaaaaaaacgaacttattgctaacatcttacaaggatactgtgatgagatatatgctatttatgaaaaacatcctgaaacagcaatcgatatcttgaatggtgggtttctttcaggcgtcatatatgatattttgataactcgcgagatgaagaaatactctatcaaaaatgatatatctgatatcaatagaagagatttaaaaaccacaatattatattggcatcaagaacacatcattgaacttgttatgagaaatctaaagcaggataaaaatcaagatcctatttattggaagctaaagttcacagtgatctga

SEQ ID NO: 229451 - DNA, 237 bp, Klebsiella pneumoniae
atgacaaatacaatatctgtcgcagtaagtatgttgtgcgaagaaaccccaaaagtaatgaatgctattcaagagcgttttgaaatatttgttgccattacgggatattcagtagaagaaatcatggatgacagcaacttgcttgacgagttaaatcgatttattaataacgaattagttaatgatttagggttggaatatggttccgttatcataaatatcggttataacaactga

SEQ ID NO: 229452 - DNA, 207 bp, Klebsiella pneumoniae
atggaagtcaatggtgatggggatgccaatgcttatctggatgatccagagtttatgagtacatttattatttatgttattgaccatattcagaataactttaaaagattcaccgctcaagaaggaaacaatggtgatattcatgaggttaactttgaacaagtcgctgccatgttagtaggatattcagaaagctttagaaaatga

SEQ ID NO: 229453 - DNA, 204 bp, Klebsiella pneumoniae; identical to SEQ ID NO: 80643

SEQ ID NO: 229454 - DNA, 1494 bp, Klebsiella pneumoniae; identical to SEQ ID NO: 13713

SEQ ID NO: 229455 - DNA, 837 bp, Klebsiella pneumoniae; identical to SEQ ID NO: 22759

SEQ ID NO: 229456 - DNA, 804 bp, Klebsiella pneumoniae; identical to SEQ ID NO: 19906

SEQ ID NO: 229457 - DNA, 333 bp, Klebsiella pneumoniae; identical to SEQ ID NO: 121748

SEQ ID NO: 229458 - DNA, 279 bp, Klebsiella pneumoniae
atgacaactattttgcatccaaattacgttgttgtatcaaagctaatatctaagtttgacattacacatgacagtagagatgaaaatatcaacatcttgatttctgtcatttatgacttggataacggcattacaatcgaacactacattaataatcaggaagaggccgagaaaaaatgcattgagaaaaatagattttcaaggaagtttaaaaatcgcattgataatatatcatctgaagaaacccgcccagctaaaaataatcccaaacccaaataa

SEQ ID NO: 229459 - DNA, 408 bp, Klebsiella pneumoniae
atgtctgatgctttaaagatcatcaacaatgttcgtactctccgtgctcaggctcgtgagctaacacttgagactttggaagagatgttagaaaaactcactatcgttgtagaagaacgtcgtgaagaagaagcctcatttctcaaacagcaggaagagaaacaggccaagctggaagcattccgtcagaagctgttggaagatggcatagacccggcagaattactttcaactgttagcccatcttcttccaagaccggagcgaaacgcgccccacgtccagctaagtataaatacatcgataccgatggttctgaaaaaacatggacaggtcagggccgaactcctcgtgctatcgctgctgccctcgaagccggtaagacgctggaagatttcgagatcaaataa

SEQ ID NO: 229460 - DNA, 1248 bp, Klebsiella pneumoniae
gtgagagggggatttaaaataaaaaaattaaacatagcgagcgtaatatgtttgacaatattatattcaagtcatgcagaggctgtttatccggtcacaaactatacactggatccttatttgatggggcgatcacctcaatctatgggaaatggaataatcgaaacattagtttcaatgaacgacaagctggcacaagcaaccataacagcaaatgagaatcagaagaatgctgttgtcagtaatgcaagtcaggcaatccaagaacagcgtatgaaaaatatcttaaacagaatacctgatgccaacgcctgtgaagaagtcacaagcgcaggtggtcgtggtgcagcaggatcgaatacaagctcagcgaaagaggctttatctgaaaacagcgttaagatgtttacgcaagcaaataccggaataaatgaggccaagaaaaacatcatgggcagggtatcaataaatgtttgctctgaagatgatgtgaaatataacagaggtgggtgcaatgctataggtcagtatcctgataaagataaatcggcatcaagcctaattacaccaccattatctacatcagatgcattgtctaataaggtttcgaatcagtcttattctgtggagcagattgaagttgctgaagcggcaaaaagaaatcttataggtaacttgcctgttgaaccattgaagaacaaagggttagaagacacaaatgaaggtcgagaatatttatccgccttttcgagctttgtctccagaagcactgctggaacaaacgccattgattccgtactggcaatgaaaaaagcaagtaatgtatcagtgaactccagaggggccaaaataggatccacattaggttctacgcagggagcaaaccttgcttggtcagatgcttccgtaaaaaacaagtatgcgaccttatttcccggcacaacattcccggataatccttcagagtgggaaatgttaagatatgagatctattcacgctatgcagatacaacaggtgctgacgcttggcaggtaaaaatcagtagtgctgatgaaaaagaaactgcgcatgagcaggcaagaatgcaggcacttgatttaagattacaaatgcttcaaatcgaaagaacagaagacacaaatattttgcttgcggctctgttaggacaacaactacaaccggttgataagcaaatgctgaataatttaaaaactaatgctacaagagcgactcaggcaacaagataa

SEQ ID NO: 229461 - DNA, 1635 bp, Klebsiella pneumoniae
atgagcctgtttgataaagaagaaagactattgcttcctgaatggacgaagtcaatcgactccctaaagtctcctgaaattaaaccttttaatggtggagatttttcctcattgtctgataatacagatgacttatatgaaaattttgttcttaataaaaatttaggctcagcaatagagttgttaaatgttgcttatatagaaaaccgagaagcagaatcgagagttgcggcaagatttattgtgcagggatttgatttaccaccacaaatcctacaatttgctaaattcattttaagaggtggtaagcatgatagtgaaccaactgaaactcaaaaaccaatcatctcaatattaagaggatggttgcataataatcccaaagatgcattagcatggcttgatttagcaagggcttacgtatcaattggtaagctggattcagctgagaaagctgttacagtcggtacaaatctattacctaatcatcgttggatcattagagttgcttcaagattttatgttaataataatcaaagtgataaagcccattatctattgtctaagcatccaatgttaaaagaagatccatggttactatcagccgagatcgcggtggcggaaagttatagtcgccctttgaaaatggtatctcaagcgagaaaacttattgagtctgaaagattttctcctttgcatcttacggaattggagagttcaatagcgacaatagaattgtctaatggagcattaaagaaagcaaaaaaattatatgtaagttcattacgaaaacctaatgacaattccttggcacaagcaaagtgggcagaaaggaatgcgaatctttcgaatttagttaatagtgaacttttgtttagtcaacaaggtgcatacgaagcaaaaatgtgggagaaatactataattatgatctttcttctgctatagattttggaattaaatggtttgaagatgagtcctattctgttcaacctgcaataatggttacctatttgtcgtcagttttagacaactatgcattatgctatgaatatgctgtcaaaggtttgggaatagacaagcacgatgaaacgttaattttaaacaaactattttctgagatatgtctcttggatagagtggagcaatgtattaactgggaaagggtaaaagaatgggagggggctctcaaaagtcttgctgctgttgataacgagaatacggctgcccatgctaatgctaacttgggccttttgcattataaaacaaacagatttgaattaggtaaagagtattatgcaattgcctgtgatcttttctcaaaaagtaaaaatgcgtcaggcattgtagcaaatatgaatcactatcgtgagtgcgttcttgctgatgtttcatggaaagacgaagtgttctatgaaatggaacaggcttataaaaacagtctagccagaaaagaacctgctttagtttattatttcataaaaatgaatatgttaaaagagaatccactgaaatgggatgaaataaaatcgacgagtttagatttaagcaatcttattgcgaaagaagaaaaaaaagataagattgtaactttcgatttcgatcctaaatcaccgaagataataatatccaaataa

SEQ ID NO: 229462 - DNA, 1080 bp, Klebsiella pneumoniae
atgactaccacaactccagctaataaaatggtcggcttagaattaaacaacgaatggcttgttgaaagaattataccagtaggaacaaaaacgggcatcggaacgggggggaacttttcggtgtcttatgaagtgaaaaataaaaatacaggaaagatggcatttctcaaagcctttgattttgaaaagacaatgcaggaagctttgtctaaaggccacgattttatgaagataatgtcagtgcttacgtctgattatcagtttgaggataaactaaatgaaatttgcattgaaaaaagaatgcgaaatgttattaaagttcttaacaaaggacaatcggtaattgatggtagaatagtaccatatttaattatggagctggccgaatccggagatataaggatgtatgtcgaaagaacaaaggatgtcagccttgcaatgaaattaggatacctgaaagatgttacaatgggtattagacaattacactctgcaaatatttcacatcaagatttgaaaccttcaaatgtaatggtgttcgattctttaaatgctaaagttggtgatttaggcagagcaagtttacaaggtgtaccacatcgttttgataactttccgattactggagatcaaaattatgcgcctcctgaacaactctatgggctgatagcccctgaatggataaatagaaggcagcgttgtgatatttatcagttaggttcaatagttgcttttttatttactggcagaaccgttaatagtttgatgagagagtttgttcctacagaaatagcaccgccacgttggggggggagtgggaatcaatacgatctcgctttaccttatttagagaaggctttttttcaaagcttaaaggtatttgatggggttcatccagattggttaggtttaggtttgaaaaacatagtgttgcagtgtagtcatccaagttatgaaaacagaggaatgcttaaaggaggcgggatagcaaagatagaattaggtttggatcgacttataactcaattcgaccttttaattcaaaaattgaaggtttttggtctcagcaataaaatataa

SEQ ID NO: 229463 - DNA, 2319 bp, Klebsiella pneumoniae
atgatactcccggcagcaggtggtttctgtgccgctcaggttatggtgctgtggatgattaatcagggagtcggtctggcagataccgtctggaatacctatgcatccaacccctcagatggggctgttattaccacatctgcatcttatcaggagcttgatcgcatagcgaaaaccgcctttatcaataacgtctgtatgttaaaggcgggagaattatggaagaaatcagcagcagccgatcccttcccacacgtcacgcctgcttttgaaatgacaccggagaaaggtgcctatttatacacatacagttatggagccagcaatgccggtaatgatatgaataaaaatttactggtatccaaggctgcatgtggaagcatcacgcttacagacccgaaggccaaagcttcttatgacgaacaggctaaagctcaggctaccattgctgctggcggcatgtatatggcttatatgccacaggatataaagacgaatatttcagatgttattgaggcacacaatgccgcattcatcggtcttgataatagtatgaaaacgctggctgaaaagtatgtggccgataataatattgatattcagaccggaataaacagcgcaacggcctcatatgtatccattattgatactgcagtacgaacagttttctccactggcgaccagtgggatgatttcaaagaaaatgtccagaaagacggatggtttatggctggcgcatggagtatgaaactgatccgtgtgcaggatgcgattaatggagcagctcataatcttcctgtaggtgggcaagcgacaatggaatacggagatatattcgataacagcctgaacgcgattatggcaaaagtggctcaggatatggcgaaatcaacgacagcttcaagatatgcgaatggtattgatgcgcaaaaccgaacggaagccaataccagtggtaaaagtggcgctggccctaaaacagatgatgctggaaaaatagtttcttctcttcaaagtgaagccaataagagtatttctggtgcaatggcgggttttctcagttccagcgttattaatggaagaaagcaagggaaaattgtttcattttcaaccgacacaaccgctgccaatttacaggcgataaacccgttattagccgttaaagggcttggggatacaatcagtgccgctggctggacgttattaggaagttctgcggttgttggcgcaggccttggcgcatggacatcagcgactgcaagctgggtatcaggtgcatttggcgctatggggattgttatgccactggttatcccattatggatagctggcgatactttagccgtcgttattcctatgttgccttacgtcatgtggtttggtgtttgcgtcggctggatgatcctgtgccttgaagcaatggtcgcagcaccattatgggtaataacacatttacatccagacggtgatggcgtagtgggtcgtggtggcgctggttatggtctggttttatcgttaaccatgcgaccagcgctaatgataacaggattgatagcagcctatacgatgctccctatccttggtgggatcgtcaatgaaacattctccggcgcgtttggcatgatgtcagccaatgccgggataggtatcatcgagtcactggctctcattgctgtttatattgcgatgatgttcacggtagtgaagaaatcactttcactgattcacatcatccctgatgaaattatgaagtggcttggtgttcatggtggtcagagcatgtcgggttacgcacagtcggcatcaaaaggtgttgaaggtgctatgtttaccaaaaccgtgttggatcaggtttcccatacctcaaatgcgatgggtaatcagatcaggaatgcacaaatcaacaaagaccgtgaacagcaacgtgagcttcaccaacagcaacaggctcaacaggggaaagcacaggcggctaataaagccaatgatacgggatctgcattcagaactcatatgagtaatgctggcccactggatcagcaggatgaatatcagtctcttgaaagtgctaactcggcttacaatgcggctgaggcagcagatgctgttggtgatacagcaggcgcagcgggttatatgaatgtagctcaaaaggctgctaacagagcagtatcatttggtgaacataacagaccgttgctgcctataagtttacaggcccaagcttcaccaattgaaagctttaaggctccagataaagggaatggtagtggatcttccggtggtagttcatcacccactgaaagtaatgacagataa

SEQ ID NO: 229464 - DNA, 636 bp, Klebsiella pneumoniae; identical to SEQ ID NO: 104002

SEQ ID NO: 229465 - DNA, 819 bp, Klebsiella pneumoniae
atgtacttgcgtgaacctcaatttcatttaaagaattccaaactcgctgaagtgtttaacactattttcaacgaccttattgtcgggagacaagatgttgaaacattggaaacagaattgtattcatatgacatttatgttaagaataccattttaaccgtctttattttccgtgctgaaatcgtttctctcttgggtgaaaaagacgtagaagtattaggtttctgttacccacgagagttggagcaaaagattattgacgtgtctgtcaataaaaactatcagacggtgtttaaagttcccaacggtatcaaagatttagaaaccgttgaggtgcgtaacctccgtttacaatcccctgggttctcagagttgtatagtcgtttctttatcaacccacattactacattttaaatgcgtatcctgtacactgcgatccaaaacttacttttgttgagcccgcaccactaacgcctgaacaagaagttgaagcagcagcgtacgaccgtttttgtttacacgatttgcctaagtttgaaaaagcaaagacatcactgattaaagaaatgggggttgcctttagccgtattcctgaaatgtatggacggttccgattaaagcggaaagatccaaccacagacctgctttctctgcatcttgcagcatggcagctatacgtacagcaaactgctgatagctttctgtgccttgtgaatatttactcatctcaggaagctctgagagcttgttggcgaatagatggcgttgtttatctgttatttttgaaaagaggtctaatgtattcggatctcttttag

SEQ ID NO: 229466 - DNA, 522 bp, Klebsiella pneumoniae
atgtcagtaaccgcgattgtggtaatgaaccacgaaaacaaattaacaaccacgcaaaacccacttctacgtgttaaagaagtagaagagatgttgactaagtatgcaaaagacgccgttgtatttattgacgaacgtcagtttgatttacgtcgtgcgctttcagacggcgcccgtgaattatttgccgtagtaggtgaacaaaataaacccattgttggggttgaaaacattttacctaagtcagcagagttgttaattaaacattactacaaagcaaaaacaagcgatgttgtgctttttatttctgcttctcaacttgacagagtgaaaactcacttagatcaagtcgtgctggttactattaataaccccagtcgagaattagaaactatcagtaaagggtttactgatgaccttaagtctcgtgtgaaccgtaaaaaactgtccatgacggaatggtctatcgctcaatcaacagaagagcataaacgtcgttactctgttaaaatctattcatag

SEQ ID NO: 229467 - DNA, 792 bp, Klebsiella pneumoniae
atgattcgtatgattcttgcaattaacaaccaatgctttatcggtaaaaacaacacactgatgtatcgtttgaaagacgatatgttgaacttcaaaaagatgacacaaaacaacatcgtggtgatggggcgtaaaacatttgagtcgttgaataatcgcgggttacctaatcgactaaacgtggtggtgacatcaaaagcggaaacgtttgaagacattcagaccatcacaacccatgacatgaaacgttctgaaacctttaccaaagaaggtcatgtcgtctacatcactcctgatagctttatcaatcagtttcttccttttcatcgtgacagcgaagatgaaatctgggtcattggtggtgcgcaggtatatgaggcagccactccatttgcatccgaaatcatttgtacatttgtggatgatgacgaagtaggtgatgtagcgctaaaacctaaactctttggcgggtttactcatttggcaacattaaagtctgtcgatgtggatgaagacaacgataagccttatgaaatcacccagttagtgagacacgaggatttagaacataaacttcgtgaacttcaggctcagcaacatgagatggagaaagaacagactcagaataatcttagcactccgttagaaaatggcgggttaagacaaggtgaagcttttgttatagctgcgactacttcggctgcgctatcacaaatcgataccgaatccagagaagactccagtgactctgattcaagttcatctgattcaagttcttcatcatccgactaa

SEQ ID NO: 229468 - DNA, 1542 bp, Klebsiella pneumoniae; identical to SEQ ID NO: 30088

SEQ ID NO: 229469 - DNA, 309 bp, Klebsiella pneumoniae; identical to SEQ ID NO: 84049

SEQ ID NO: 229470 - DNA, 660 bp, Klebsiella pneumoniae
atgaacactatctattgggtgatttccatggggctgctgctgaacataccatcactggcaccagtgctgtttcttcgtaaggcatcaaagaatgtgaaagtatcgatggcgttgaggctttttctgctaaatgccttcttagttatatcgctagtgacggtatcgcagaacacgacacaaaaatacggactgtttcctatatggttggtcattgttgctattgtgctgtttttggtcacactgcttccaacggtgaaattcattcgtaagcatttaaccgtaggtaaaagcagggctgttatcctctcatcattcctgattgtctatgccgtcagatttaatggcgtgttttcagatgtgaatggaagtggatatacgcttaatggatacaatgtggtgtggacgttgttcttcctgtttgcctgcctgctggcttatcttggttgtgctgggagtaaaacatattctggttattctgcatcgtcatctgcatcgcaaccagattattttaagccgaccaaagaatatgagacgcaatcacagattgattacgatattgctgtgaaggggcggagtgttctatctgatcccaatctgagtattgttgagcagcagcgttatcgggatgctcttgagaaaaaagaaagagaagattggtaa

SEQ ID NO: 229471 - DNA, 558 bp, Klebsiella pneumoniae
atgcgtaaatatttaacgattgcagctcttggtattttgttaacaggttgcggcgaaaagagtgatttcgaaaaagccattaatgaaaaaatcagcaaaaacggtgtttgctatggttttagtaaagagaacaacgctaaagttgttgaagatttcagacttggtactcctgtaaggtttaatatttatggcagagatgatgtcgatcctgttttaatcggtttgaaaaataccggttttctgaatatttcatatgaacaggaaatgtttaaaagagtcgcaatattagaaacaactgataaaggtcgtaatacaaaattttgggatagcaataatggtgcctgtgttggtaatcgtgctgttgctgaggttaaaagctggactgaaccgagtgaaggcaatggcgttaaaatgacacaagtgacctatacgtggaaactcgatgacgttccgagctgggtggataaaaaagctttctctggcgttaaggggatggctgaacccgaagaagcgaaaattattctggtgaagaccaataacggctgggccgctcggtaa

SEQ ID NO: 229472 - DNA, 408 bp, Klebsiella pneumoniae
atggaaaacaacaacgagcaaagctctatggaaatcttcgaaaaagagcaaaaaatcgcttttgttgattcgttcagcaatgctgctttgtcttacgaatacgaacaggcgggcttcaccattaatttaatgcaacgctcggttcttctctttaaccataatataaagaaaaacgtaatgtcttcgacattgcgtaaaaatatgaatagcacatttatatatccatatagcaacatcagggaaatcaactactcgctgcctgattgcagatccgatgatgccgagatctgtattatgactgatgatgtattaaatccagtctggacgttcagggttccatctcacgcacattatatttgcgagcaatgggtggaagtatttaatagccatattttctttggcccataa

SEQ ID NO: 229473 - DNA, 2205 bp, Klebsiella pneumoniae
atggccgagtttatcccgccgctgggcaccgcagaccctcagatttttatggataatgtcaggcgcctcgatcagcttatgcagtcctcggagttaacctttcccgaccgcgcgggtgaactgctgtatacctggcgtggtatccatcaaactctgatcccgctcagtaagcagtatatgaccctggcagcagcgcaggaagatatcgctaatataccagtcaactcgtttacctatgtcagagatccatcaggcaacgcattagcactggaatatcagaatgtggccggagttttaacagccacaggacgtaaaatgccgtcacggtcatcaatggtcattggtattgtggattcgtgggttaataacaccctttatccctttgattcattgtcatcgccgaatgaaaactcggtgtcgatgaatgtagctgctgtaagcactattgcataccgagaggcttactctgctttattatctcctgttgctgtaggagatattatcactgtccgttataaatacagcggaaccgacggcgccccaaccattggattaaaaacatcgctgaacggcacatttgtgagtaatcagccaacgttgacctcttcaaatgactggcaggaagtgcagcttaccgctaccgcagctacagcaacgctcctggctatcggggtgaatacaaggcttgcaaccactgttcagttatcgattatcgcctacgcatcgaagaagaatgctattaccacagcaattcttaactcactggatagcatttccagtttaaatggaaaggcgcgtattggttctgtggattcgtgggttaataacaacggatacccattctctgttttctcgcaggttaataacaaccgagtaaactacgtcaattcgacgggcgtctattcggagatgtatgcgaatattaacgtgccctctggcggctctttggcttttagctattctctggacgccacagccgggcgattattcgctagattagcgaacggcagcgcatggacgggtgacgaagtgcaactcgccggcggcggtgccaggcagaccattacactcgtggccgcggcagacacaaaacagttaaaactgtataccaaggaggaaatatccgcagggtcttttttcgcggaagtaaactacgggcaaaaaaatgcgctgacagagcagattgattcgctgtattcggcagtggcatcagctaacgctgttctggccatactgtcccaaagctcaacatttgattcatttgtaaaaagctcgccttacacctacacgttaagtgatgcaggtgtggcttacaaacaggcaataagcacggtggacaatatcagcggattgaacaccgtaaagatgatgtacaaaatatcttcatcgaatgcagctttaaaaattcagagcaggaacggaaacaactggggggcaaatgagagaactctggtagctgatggggattatcatgaaattgacttgccgatagcctcggggcaggtattttccggttggggtgtatactcatcagccaaagctggaggatattctgctgatgtaaccatgatccctatctctgcaaacggggtgtttttcacgccagcaatggctatcctttatggcctgatggccgcttcggcttcccttgacagccgcgtaacagctctggagaacggccaggccaccgatcaaaatacagatgtgattttccctgcatacttctatgcagtggatggtcgcccgctgcgtttttacggtgccaatatggtcagtggtacccgaccatggcacaacaacacagacatcgttctttccagtcatgggtatgaaggtaaatcggtactgcttaaagatgtagttcctgacgcgatgataatgccatcggaaattaatgggccaacgctgaacatcaacgcgcgggcagacggttctggaaatgtattccggaagaaagctgcgttcactaaactggcggcgactcagacaggaaacgtaaaagtcgccacaataatggatagtcttggagaacggtgcgttccgtggctttattttgccctcaacgcgacaggggcgacatatgcgggcgcaggttcccgaaaaacacgcggcatgacagacgatgggggtatacacttccaaatacgccggcggatggcatcccatttgacggccgtgggggctggacgacgttcgactatatag

SEQ ID NO: 229474 - DNA, 657 bp, Klebsiella pneumoniae; identical to SEQ ID NO: 147166

SEQ ID NO: 229475 - DNA, 753 bp, Klebsiella pneumoniae; identical to SEQ ID NO: 67165

SEQ ID NO: 229476 - DNA, 552 bp, Klebsiella pneumoniae
atgaaccgtttacctgcactgtcagaacagcagtggagcgatgaacaacgccagcttgcggaggagattatcaacgggccgcgcggcgcgctgctgccgccgtttgaaccgttgttgcgcagcccggaactgatggcccatgcgcagcgaatgggggagtatctgcgctaccgtagcgcgctggggcagcggttgtcggaactggccatcctgctgaccgcgcgtcactggtcgcagccggttgaatgggccattcatgcgccaatagccagggaaaaagggatcccggcgcaggcggtgcaggcaatcaatgaacggcctcaaccagaggcgctggcggctgatgaatgggtggtttaccatttttgccagcagctgcatcagcataaaaaagtcagcgatgatacctggcagcaggcaatcgatctctggggggaaaagggcgttgtcgatctgattggcgtcaacggttattacagctttctttcaatgatcatgaacggcgcgcagacgccagtacccgacaccagggattttattcttcccgcataa

SEQ ID NO: 229477 - DNA, 249 bp, Klebsiella pneumoniae; identical to SEQ ID NO: 164713

SEQ ID NO: 229478 - DNA, 207 bp, Klebsiella pneumoniae
atgcagcgggagctggtcgagctgaggaagctcatcgagaagcaacaattgttgcttgaggataaacaggaggcggaccggcttcgggaacaggtggtcgggttgcaaaatgagcgtgacgcaacagctcaggagctggaaaaagtgaaatcggagctggaagctacgcggaataatggcttttggaaacgcttatttggtggatga

SEQ ID NO: 229479 - DNA, 582 bp, Klebsiella pneumoniae
atgtgcggattctgccatccggatattgaggtttttttcgtgaacattgatgaagttgctaagtggcgtccttttaaggatcaggatggcaatatatgggatttgtcatttcttgatgcacatgaggtttcttatactcattgttctcctggtaaacctgacattgtgtacaagttcactgtttcttactcatttcattgtttttgcaaggattatccagagcagactgaggaagaaaaattatcgttgatgtatgatgcaggcaaagactcgaggccattttgtaagatccgatatgctcttgctcgagataagctgagagctatcattgaaggattggggaactcgaaggttatccatgctggctatggtagttatgctgttgtagagattacggtgaatgaaggtgaaagtgagttctactttgtgccttttaaggtatatcgtgagcgtaaaaagctgcgccttcatgtaacaagtgcttatcctgtcaatgagagaccgtcaggtaagccagttagctttttcaagatagctcacaatctcctgcgcgggaaaccattacctaaaccccatatgtaa

SEQ ID NO: 229480 - DNA, 150 bp, Klebsiella pneumoniae
atgccatctgagtatgatgaacaacgggatacgactgatgctctgcttcccggcgaatatgacctttttgatttaatggcgcaggttactgaagagaacctgcacgccccggtggattttgggccgcctgtcggccgggaagcgttatag

SEQ ID NO: 229481 - DNA, 312 bp, Klebsiella pneumoniae
atgagcaatcaaaacatattcgaaatactaacgagtgatccggtatccctaaacatgtggaacctgaaatcaaacctgatcctcgccatacataagacggtaagagataacggctggaaccaaacagaggcggccgcacatctaggcataagccaacctagggttagcaacatgctgaaagggaagctggacaagttttctacagattcactactggaaatcatgttcaagctgggttacaaattagacatgcaagtacacccatcctctgaagtaattttagagatgggcatgaaaaaggcgatgctgtga

SEQ ID NO: 229482 - DNA, 336 bp, Klebsiella pneumoniae
atgtccgcaagcgaaatgaaagagatttgtctagacgtaactggtgttgataaagagctaaagtctttacctattgataaagctttagcttttttgcacaacttgaagttggttgccgctggaattgaaccagaactgaaagttgaacacctgaaagtagttgctccaggcgtgattgagttgaagataaatggtagccctgcttatcgttgtgtgtacacgataaaatcacccggcaaggtgatcgtgttacgtgtcttcaagaaaacgactaacggacctgcacgcaaagacttagaagtcgtgaagcaacggctgaaaaatctcaaaatatag

SEQ ID NO: 229483 - DNA, 231 bp, Klebsiella pneumoniae
gtggcgcggctgcagtgccgcagcggcgagccctgcccgcaaagcggctactggcagccggcgtggcggccccgtgaagggatgagcgaacatgccatccgttacttccgcgagggagacatcatgccggtggagaaggtgaccttcgttcgcccgcgtccctggccgctgcgcgacagactggtcgtggaagcacaggagacggtgtggcgccgggtcggcgaggcataa

SEQ ID NO: 229484 - DNA, 1020 bp, Klebsiella pneumoniae
atgacttccgctctgcgccagctggttgagggtggcgttatccagctcacgctgcgtcaccgacgcaaagaccgttgccgtctcgctaaccgacctgccgggactttccacccagccgtggccgattttaataccgtcaaacacgcccgcgcccacggccagggtctgcgtggttttctgccccggccgctgtaccgtcagctgcccctcctccactttcatcaccgtgatgctttccccgcctttcaggcgtgtgtccggtatcttcccgagcaccgccagacgttccccctctgccaccggcagtgtttctgcccggaacagcgtccactggctgtcgaccgcggaaaccttcagatccagacggcccccttcccggtctttcagggtcagcatattgctgctcgcggtcacccggtcaatgacaaagcgatcgtgcgtccgggtctccggatcccagcgttccatcaccatcccctcccggtaataatcccgcacgccccggcttttgctgtccagccacaccggcgtcagggctgtaatagtcgtgtctttctcacccagcaccccctcctgtctgagggagtcacggatgaggccgttgagtacgctctgttcacgggtcccgctgatttgggccacgcttttctgcccttcacgcacgctgacggcaaactcctgtgccagccggctgtagcgtgctcctttatccggttcactgatgatgtcggctgtggtctgatggccaccctgccagcgatacgtattcacgccgctgtccttcagcaccgtcagcgcgctgccggtcccgctgcgcttcccgctgtcggagagcaggacctgcacgttatggcgcatcgcgccatcgagcagggaaatcgtttccttcaggctcagcttctccgcctgatccacgatgagtgttccgcccggaataaacgccgtcccgtcctgcagggcggatttaccggtcaccgtttccccggccagacgcacatcaccggcgagaaaatcacgtga

SEQ ID NO: 229485 - DNA, 294 bp, Klebsiella pneumoniae; identical to SEQ ID NO: 104040

SEQ ID NO: 229486 - DNA, 303 bp, Klebsiella pneumoniae; identical to SEQ ID NO: 104039

SEQ ID NO: 229487 - DNA, 360 bp, Klebsiella pneumoniae
atgactttaaaaaatatactactacagggtttggttttgggagatgaacatattcattcagtaaagaatgtgttatcagatgaaaaaaataataagattataattagcgtggcatttgcaagaaaaaatggagtgcatctgctcaaagagactctctccaagttcaaagataaaattgaactattcgttggtattgctaatggtgtaacctcaaagcaagcggtagaggaaatcattagatgtggtatttctccatatttaataaatatgggaacagtatcgagaatatttcaccctaaaatatatctcgcttttcagaacgaaggcatacatattatcctgtctcttatacacatctga

SEQ ID NO: 229488 - DNA, 426 bp, Klebsiella pneumoniae
atgccattcaacttatgctggagaaagccaaacctcccagagggggatctgcaactgctggttcaaggacatgcttctggcgtgttacgccttacacaggctggctatactgacagtggtaaagttattgatcaaacggaatatttccggtatcaggtattctctggattgctatggtatgaaattgatggaaaggaaatggctgaggcaaccttccatttacaaataaaaggtacatcggtaggtacgtttaagcttaaattaagccataaaccttcatgggaagcaggccagaataattatacaaccggattgcactgggatgacgccaaatatttgattcagcgtcgtgatttagtagggtgtgatctcgaactatacaaggccatcgatgaaaacttcgattttttaatttcaatacattga

SEQ ID NO: 229489 - DNA, 339 bp, Klebsiella pneumoniae; identical to SEQ ID NO: 30181

SEQ ID NO: 229490 - DNA, 567 bp, Klebsiella pneumoniae
atggaacatggtgccagacaaaataccacccgcgttatcgctgtgggatttatcagtctggggacactcctgaccctcagtcttgcgaccaatattatccagggcataaataattaccgtctgcagacggaacagaaagtggcggtgacaccgatgttattccgtgcaccctttgcggtgtctcagaaccaggctgacgcctcttatattgagcagctgggcctgtccttcgttgccctgcgtctgaatgtcacgccggaaacggttgatgcccagcatcagcagctactccggtatgtattacccgcctcgcagaacagcctcaaggtccagctggctgaagatgcgaaacgcattaaagacaataacgttaattccaccttttatatgacgtcgatgcgtgcctggccggcagagaaccgcgtggatatccggggtgagctgaaaacgtggattggggattccaaaccctacagtgaaattaaaagctatgtcattcagttcagtcgtgtcgatggtgtcagctggctggcgcgttttggagaaataaataatgaaaaaaattaa

SEQ ID NO: 229491 - DNA, 1629 bp, Klebsiella pneumoniae
atgaaatttaaagcagatcagacagctcaaaaactacgtggtggttattatacaccacaaaacatcgctgactttacaaccaaatgggttcttaataacaaacctaaaagtattctagaaccgagttgcggtgatggtgtattctttcagtctctatacaataataaatttgacaaaaacactaaagtacaaggttatgaacttttcgatatagaagctaaaaaatctatggagttatgcaaatccttaggtttttcagacgttgaaatcacagaaggtgattttctggaatgggcaaaaatggcaattcagaaaaaaaatacttctttcgatgctattattggcaaccctccctttatacgttatcaattcttagaaaaggatttccaagaaaatactgaagcaattttcaaattgcttgacttaaaatttactaaacatacaaatgcatgggtgccttttattttgtctggcgtttcgctcctcaatcccggaggacgtcttggcatggtaattccatcagaaattataaatgtaatgcatgcacaatccttgaggacattcttgggtgagcattgctctaaaattgtaattattgatccaaaagaaatatggttcagtgaaaccttacaaggcgcggtcattctattagttgaaaagaaaattaatctggattgtgcatcacaaggtgtcggaattaaaggggtcagtggcttcgattttttacaaaaaaatcccgaagatatattcaacgaaacaaatacaatcaatggtgataccgtaaaaggtaagtggacaaaagccgtcctagataaaaatgaagttaaccttcttaatgagattactaaacatccaaacgtacactcttttgatactatagcaaatgttgaagtgggaatggtcacaggtgccaatgagtttttcctcgtaaataaagatgtagttgacgcatttgatttaagtgagttcacccatccaatgtttggaagaagtcaacattgccaaggtgttatatacgatgaggttcaacatttagctaatatagagaataagcttccagtttattttttatatttggataaagaatttcatgaactacctaaaaaaacgcaagaatacattttcaatggtgaattacagggctttcacaagcgatataagtgcagaattcgaaaaccttggtataaggttccctctgtatttagcacaaaattagctatgcttaaacgatctcatgatgctccaagattaatttataatcaatatcaagcttatacaaccgatacagcctatagaattaaacctaaatctaatattaatgaggaaaaattgtcctattgtttcctcaatcctttaactgctatattcgcagaactagagggtcgttcttatggtggtggcgtaatggagcttgtcccttctgagataaggaagctgtttatccctctaccggaaaaaattgagttcgatttatctgagttaaataactctatgatgaacagatccatggagcaaattcttgcagagcaagggaagaaaatattctctcacatgggatatgatgacgaagtagttgaaaagttaatacatatttggaataagttaaaaaatagaaggcagcgaagttag

SEQ ID NO: 229492 - DNA, 963 bp, Klebsiella pneumoniae
gtgttcggtattcagtcttatgcccagctggaagacatctatggcgttaagcctgccgccacgctctttgacgtgatgaacacccgggccttcttccgctccccgagtaaagagattgcggagtttgctgccggtgaaattggtgagaaggaaatcctcaaggccagcgagcagtactcctacggtgctgacccggtgcgtgatggtgtatcgaccgggaaagaaaaagagcgggaaacgctggtcagttactccgatattcagacgctgcctgacctgtcctgttacgtcacgctgcccgggccgtatccggccgtgaaactggccctcaaatacaagccgcgtccgaaaattgccgagggatttattcctcgcactctcgatgcgcgggtggatgcacggctcagtgcgctgcttgaggcccgggaagctgaaggcagccttgcccgggcgcttttcacgccggatacgccggaacccgggccagctgatacagacagtcacgccagtgaacaacctgagccggtcagcccgcctgcgccagcagtaatgacggtaactcctgcaccggtaaaatcgccgccgacaacaaagcgtccggcagcggagccttccgtcagagcaacggagcctcccgtcctgcggggcacgaccgtaccgttgatcaaaccaaaagcagccgcagcggccactgctgcctcaacagcatcctctgccggtgcccctgcggcagctgcaggcgggacagaacaggaactggcgcagcagtcagcggaacagggacaggacatgctgccggccggcatgaacgaggacggcgtcatcgaggacatgcaggcgtatgacgcctggctggcagatgagcagacacagcgggatatgcagcggcgtgaagaggtcaatatcaaccacagccaccgccacgatgaacaggatgatgtcgagattggggggaacttctga

SEQ ID NO: 229493 - DNA, 219 bp, Klebsiella pneumoniae; identical to SEQ ID NO: 216545

SEQ ID NO: 229494 - DNA, 951 bp, Klebsiella pneumoniae
atgaaacagcatgttcaggtctacaccgacaaccgtgagggctggataaaggccatcaagaattcacctgagaaagcgacggcgcacgatattcttgaaccccgtaacgaccgggcggtgaaaacagccgatctgctgttcgggcgggcaaggccactggatgaaaccgccgcgggccgggcagccctgcagcagtccggtctggcacagggaagttcaccaggaaaattcatttctccggggaaaaagtaccctcagccgcatgtggcgctgccggcatttgataaaaacgggaaagccgccggtatctggctcagcccgctgaccgatcgggacggacggctggaggctatcggcggagagggacgaattatgggcaatgaagacgcccggttcgtggcgctgcagaacagccgcaacggagaaagcctgctggccgggaatatgggggaaggcgtcagaatggcccgcgacaatcccgatacgggggtggtggtgcggctggccggtgatgaccgcccctggaaccccggggccatgaccggtgggcgggtatgggctgaaccggcgccggtggctccggtaccgcaggccggggctgacattatcctcccgccagaggtactggcacagcgggcggcagaagaacagcagcgccgggaaatggaaaaaaaggcggaacagactgcccgggaagtggccggggaggcgcgtaaagccggcgagccggcggaccgggtgaaagaggttatcggggacgtcattcgcggactggagcgtgaccggccgggtacggagaaaacgacgctaccggatgatcctcagttccggcgccaggaggcggcgattcagcaggtggcctcagaaagtctgcagcgtgaacgtctgcaggctgtggagcgggacatggtgcgcgacctgaaccgcgagaaaaccctcgggggcgactga

SEQ ID NO: 229495 - DNA, 579 bp, Klebsiella pneumoniae
atgggcaatgaagacgcccggttcgtggcgctgcagaacagccgcaacggtgaaagcctgctggccgggaatatgggggagggcgtcagaatggcccgcgacaatcccgataccggggtggtggtgcgtctggccggtgatgaccgcccctggaaccccggggccatgaccggcgggcgggtatgggctgaaccggcgccggtggctccggtaccgcaggccggggctgacattatcctcccgccagaggtactggcacagcgggcggcagaagaacagcagcgccgggaaatggaaaaacaggcggaacagactgcccgggaagtggccggggaggcgcgtaaagccggcgagccggcggaccgggtgaaagaggttatcggggacgtcattcgcggactggagcgtgaccggccgggtacggagaaaacgacgctaccggatgatcctcagttccggcgccaggaggcggcgattcagcaggtggcctcagaaagtctgcagcgtgaacgtctgcaggctgtggagcgggacatggtgcgcgacctgaaccgcgagaaaaccctcgggggcgactga

SEQ ID NO: 229496 - DNA, 312 bp, Klebsiella pneumoniae
atggctgaataccagttaagttttgatggttttgttcgacttttttttgcaatggcaatcattatctgtggttacgggtatatagttatgagcatttttgtaaaggatacccttactcatattttaatgttactgggtcttgttgggttcagtgctttcttttctttcgttgtatttaaggataaaagtatgtggagcggctctcctgatttgacgctgtcagtaataacggggttttttacggccacagtgatcttttatatgttttatgtcttgatttattccttttgtcggatgggggaaggtgaatag

SEQ ID NO: 229497 - DNA, 219 bp, Klebsiella pneumoniae
atgcatgcatttatttttctggtactgatgacaccgagtagtggcggtggtatttgggatattactcccatgcctaatactgatgtctgcataaaaatgctacgggtactcgaagaacgtggaggcagaggttacggaagtaatacaggagagtgcattgaaattaaaacccgcgagcctttgagcagcgtgatggaaacattgagtgagggtgggtaa

SEQ ID NO: 229498 - DNA, 579 bp, Klebsiella pneumoniae
atgggcaatgaagacgcccggttcgtggcgctgcagaacagccgcaacggtgaaagcctgctggccgggaatatgggggagggcgtcagaatggcccgcgacaatcccgataccggggtggtggtgcgtctggccggtgatgaccgcccctggaaccccggggccatgaccggcgggcgggtatgggctgaaccggcgccggtggctccggtaccgcaggccggggctgacattatcctcccgccagaggttctggcgcagcgggcggcagaagaacagcagcgccgggaaatggaaaaacaggcggaacagactgcccgggaagtggccggggaggcgcgtaaagccggcgagccggcggaccgggtgaaagaggttatcggggacgtcattcgcggactggagcgtgaccggccgggtacggagaaaacgacgctaccggatgatcctcagttccggcgccaggaggcggcgattcagcaggtggcctcagaaagtctgcagcgtgaacgtctgcaggctgtggagcgggacatggtgcgcgacctgaaccgcgagaaaaccctcgggggcgactga

SEQ ID NO: 229499 - DNA, 579 bp, Klebsiella pneumoniae; identical to SEQ ID NO: 229495

SEQ ID NO: 229500 - DNA, 690 bp, Klebsiella pneumoniae
atgccgagttatggttatcgacgcgtgtggggcatcctgcgcaagcaacgtcgcacagagggacagccacctgtgaacgccaaacggctctacaggataatgagcgagcataacctgttgttgttgcatgacaaaccagagcgaccgaagcgtgaacataagggcaagatagcggtggcagaaagcgatatgcgctggtgttcagatggcttcgagttcggctgcgacaacggcgaaaaactgcgggtaacgttcgcgctggactgctgcgaccgtgaggccatagactgggcagcaagcacgggaggctatgacagttcaaccgtgcaggatgtgatgctgaggtcggtggaaaagcgcttcggcgacaggttgcccgatacagcggtgcagtggctgacggacaacggttcagcgtataccgcgtatgaaacgtggaggttcgcgagagagctgaatctggagccctgcacaacagcggtgagcagcccgcagagtaatggcatggccgaacggttcgtgaaaacgatgaaagaagactatatcgcgttcatgccaaaaccggatgtgagaacagcactgcgaaaccttgcagtagcgttcacgcattacaatgaaaaccacccgcacagcgcgctgggatatcactccccgagggaataccggcggcagcggacatcgttaacttaa

SEQ ID NO: 229501 - DNA, 225 bp, Klebsiella pneumoniae; identical to SEQ ID NO: 216550

SEQ ID NO: 229502 - DNA, 318 bp, Klebsiella pneumoniae
atgcgtatgtctctgatgtttgcagccgtgacgcttttaaccggtattaacctgttttttattccgtttcagcctgttccggctctgtggggggctatcctggccgttgcttttgttctgattaatgtcgtggcggataagctgcgcctctggagtggtattgcgtggattatcgttgccggcatcatcataacgctgatgctgaaggggaaagagccgggtgacgaatttcgtgtcctgatcaccgttttcgctttcctggcttcaatctggtatagcgttgcgcagttcaggaaggaaaataagctccgttcctga

SEQ ID NO: 229503 - DNA, 318 bp, Klebsiella pneumoniae
ttggtagcatcaccctccaaccctgaccagcgcggcgactacgattccgaaaacaaggccgccctgacgctgcgcgagctagagcgctggctcacattggcggtcggcacctaccacggttcggtgcacaacggcctgctccaaccgccggccgcgcgctgggccgaggccgtggcgcgtgtcggcgtaccggccgtcgtcacacgcgctacttcgttcctggtcgattttctgccgatcctccggcgcacgctgacccgcaccggctttgtcatcgaccacatccactactacgccgatgggcactgttgcaaatag

SEQ ID NO: 229504 - DNA, 486 bp, Klebsiella pneumoniae
atgacgtcttccgtggagcgtaagcgaaacacggcgtcagttatttccgatgcaaagccagaagtacagagcaaaccggaatacttccatctttccatatgtgtggaaggcccggccagcacggatgactccgccttgtcctctcttgcctcccgtgttgtccgcgaagcagaaaatctgtatatccccggcgtcaatcgccgcgacagcgctgacgacgtgtttgcctggtccgtgcagactcagtttccttctgacaggctcttcggcacacggattttcccgtcaaccggctggtttgaacgtccggatatgattaaacatccggtgaaatgctactgcgtctgcctgcagtacacgactgaaacattgccatccacactgtatgccctggtcgatgaggccggacggcaggtggcgaagtcgtatattaaaggcgggcactgccctggctcagagggctataccttctgcataacctcttaa

SEQ ID NO: 229505 - DNA, 486 bp, Klebsiella pneumoniae
atgacgtcttccacggggcgtaagcgagacacggtgtcagttattcccgatacaaagccagaagcacagagcaaaccggaatacttccatctttccatatgtgtggaaggcccggccagcacggatgactccgccttgtcctctcttgcctcccgtgttgtccgcgaagcagaaaatctgtatatccccggcgtcaatcgccgcgacagcgctgacgacgtgtttgcctggtccgtgcagactcagtttccttctgacaggctcttcggcacacggattttcccgtcgaccggctggtttgaacgtccggatatgattaaacctccggtgaaatgctactgcgtctgcctgcagtacacggctgaaacattgccatccacactgcatgccctggtcgatgaggccggacggcaggtggcgaagtcgtatattaaaggcgggcactgccctggctcagagggctattccttctgcataacctcttaa

SEQ ID NO: 229506 - DNA, 384 bp, Klebsiella pneumoniae; identical to SEQ ID NO: 51105

SEQ ID NO: 229507 - DNA, 489 bp, Klebsiella pneumoniae; identical to SEQ ID NO: 227992

SEQ ID NO: 229508 - DNA, 444 bp, Klebsiella pneumoniae
atgaacaaatatatacgttcgacgggactgtatgcgtttttatttccagccagtttaaaggactccgggcagacagcagcagaaaaaatagaacaactgaagccggaatttatccaccgggaaaggcgtctggaaatctatctggaattattcattgtgtttctcactgcaggtgctctgctgttatggataatgagatttttatttaatctctgcgtggatgactggatagccagcggtgacctgcgagtaaaagacctgtggaatattatgatgtacgccatcccttatgcgctgatcgctgttggggtggggttctttgttgccggagtgacattagcaatccgcaattttttcagttatcaccttaagaccctttttattctgagaaatgacagagttaaaaagaatgctgtgcgtaatggaggactggatgcgaattaa

SEQ ID NO: 229509 - DNA, 390 bp, Klebsiella pneumoniae; identical to SEQ ID NO: 227799

SEQ ID NO: 229510 - DNA, 585 bp, Klebsiella pneumoniae
atggttttaaagagagtagaagatatattcgtctcaagttgtattttattgttaatttctcctttgttaatattaatttctattgttattaaattaacatctgcagggccagtgatttttaaacaaacaagatatggtatagatggtaaaccaataaaagtttggaaatttcggtcaatgaatgttatggaaaatgatagtgttgtcactcaagcaaaaaagaacgattcaaggatcactccatttggtagttttttacgaaaaacatcgttagatgagttacctcaatttatcaatgttttagtcggtaatatgtctattgttgggcctcggcctcatgctgtcgctcataatgaacaatataggtcactgattgaaggctatatgttacggcataaggtgaaaccaggaattactggactggcacaagtaaaaggctggcgcggtgaaacggatacattagagaaaatgcaaaagcgagttgaatatgatttagagtacattcgagaatggagtatttggctcgatattaaaattatattacttacaattttcaagggttttgtaaataaatccgcgtattaa

SEQ ID NO: 229511 - DNA, 294 bp, Klebsiella pneumoniae
atgatgtgcatcagcctgctgtgccggctccgcctcctgattctgagcctgctgttgcccgttcttttccgcttccagttcttcgatggttttcagctgaaatccatcctggaacacgacggtcacttcgttaccggcaccaatcggaatgaccgggtgatactgctcagcccttttgatgtagtactcgctcagcgtctgcgcagctttagatgcaccaccgccgccacccattttcagaacatcaccggcgccaacagatgcggttgcccccaggccaactgccggctgtga

SEQ ID NO: 229512 - DNA, 171 bp, Klebsiella pneumoniae
atgctgccggccggtatgaacaaggacggtgtgattgaagacatgcaggcgtatgacgcttgggctgatgagcagacgctgcgggatatgcagcggcgtgaggaagtcaatatcaaccacagccaccgccacgatgagcaggatgatgtcgagattggggggaacttctga

SEQ ID NO: 229513 - DNA, 357 bp, Klebsiella pneumoniae; identical to SEQ ID NO: 223061

SEQ ID NO: 229514 - DNA, 540 bp, Klebsiella pneumoniae; identical to SEQ ID NO: 95796

SEQ ID NO: 229515 - DNA, 2829 bp, Klebsiella pneumoniae
atggccgagtttatcccgccgctgggcaccgcagaccctcagatttttatggataatgtcaggcgcctcgatcagcttatgcagtcctcggagttaacctttcccgaccgcgcgggtgaactgctgtatacctggcgtggtatccatcaaactctgatcccgctcagtaagcagtacgcgacgctggcggcagcgcaggcggatatcgcgaatattccggtgaacgccacaacctacgtgcgcagtcaggacggcagcgcgctggctgtggaatatctcaacaattctggaacgctccaggctaccggacgaaaaatgccatcccgttccagtgtgctgatcggcgtggttgactcatgggttaacagcactatttatccgtttgataccctgatttcaaagaatgaaaactcactgttggtgcatgttggggcagtaagttcgataacctatcgcgaagcttacagcgacctggctgatccggttgccgctggcgatattattaccgttcgatataaatattccggtactggtggggtgccgtcagtagggatgaagaccgctattaatggcgtatttgtcagtaaccaggtaaccctgacggctggtgacaactggcaggagattcaactaactgcaactgcggcgacggcaaaattactgacagtaggagttaataccaggctggatacagatataaagttagatattatcgcgtacagtaataagaaaaatgcaatcaccagcgctattttgagcatcatggacagtattgcctcattaaatggtaaaactaaaataggctcagtcagttcatgggtaaacaataatggttatccattttctgtatttactcagttgaatgataaccgcgtgaattatggaaaccccggaggtctctattctgaaatgtacgcgaacatcgatgttccttccgggacgtcagttacgctgagttactcacttaatatcaactcaggccgccttttcgcgcggctggcaaatggcagctcatggactggtgatgaagtccagctggcgggcggtggtaccaggcaaacaattaccctgacggctaacggtgacagcaaacagcttaaagtctattcaaaggctgagatatctgcgggcagtatttttgctgaggttaactacggtcagaaaaactcactgaccgagcaaatcgactcgctctatacagctgtcgcatcggcgaatgcgatcctcgcgattttatcccaggattcaactttcgattcagtggtgaagagttctccttatacgtacaccgtcaccgatgctggaaatacatatcgacagttgctgaatacagtcgccacagttaacagcgctacaactgtgaaaatgatgtacaaaatcgtttccagcagtgcggcattgaagatccagagtcgtaatgggaatgcatggggggctaacgaaaagtcgttgatcgcggatgggagatatcatgaagtggatttacctatctcatccggacaggttttctccgggtggggggtgtattctcaggccaaaccaggcgggtattctgctgatgtaaccatgatccccatctctgtaaatggggtgtttttcacgcctgcaacggccatcctttatgggctgatggcctctttggcttccctggacagtcgtgtgacagctctggagaatgggcaggtaacaaaccagaataccgacgtcattttcccctcatacttctatgcagtagacggacgcccgcagcgcttctacggggcgaacatggtcagcggcaatcgcccgtggcgcaatggagcggatattgtcctgtccagtcacggctatgaagggaaacccgtgctgttaaaagacgcagttccggacgccatgatcatgccttctgaaatcaatgggccaaccctaaatatcaatgcgcgcgccgatggcgccggcaatgtattccggaaaaaatccacgttcacgaagctcgccgcctcgcaaacaggtagcgtaaaagtcgcgactatcatggactcacttggtgagcgatgtgttccgtggctatacttcgccctcaatgccacgggtgcaacctacgtaggcgccggttcccggaccactcgcggcatgacagatgacggagggtatgttttgccgaacactccttcagcaggcatcccatttgacggtcgtgggggctggacgacgttcgactatatcggaaagacgcagaagacgaatttcagccaacctttcctgcgcgatgcgacgagcacagattttgctgcatatccgcagtattgctacgacaaggcgtggtctggtcagagttacgcagaaaaccccaacttgtccgcgtatcatattttcgacgtgacagcatggatggctgcggctggagtgagcgcatcagacaaactggttgtcatcattcagctcggatacaacgacctctactacagctatacgcctcagcagaccgttgatgcacaggaattcatgatcgccaaattccgcgaaaaaatcgccaacgcccggtttgtgatttctcaccaggcatttggctggtcaggagtcagcgcccctcaaagatggccagaattcgctaagtggatcacgcagaagctgcgcaagtttgataaccgtatcagcgagaaaattctcgtcgcccctgcatgggcacagctgagctacaaatacggaatgaacgaaactatcacagcaaccagtgatacgggcgtgcagactgtatcgttacctgacgatgtccaccccggtgagctggggggagcgcagtggggcgatgctctggttgctcctgttctggcagcctggaatttatag

SEQ ID NO: 229516 - DNA, 2607 bp, Klebsiella pneumoniae
atggccgaacttaacccgccactgggcacgacgacgccggaaatattcatggacaacgttaagcgcgctgacgaactggttaacggtccggcaggaacggttgacgaccgcggcggtgaaccgctcgatacctggcgcggaatgatggcgaagaatgaagcccttacagaggagacacgacagaatctgattcctctcagccgccagtatgcgacgctggcagcagcgcagtcggatatcgcgaatattccggtgggctctacgacgtattaccgcagcccggacgatagcgcgctggctgttgaggtaatcaacaacggcgggacgttgcagcctaccgggcggcagatgccgtctaagtcatatctggattctgtcagtgcggtgactgggcagatttattctgatgtagggcgcggctcactggtcattaactatttcgacaaagagcggactacggatggttttgcggttggctctaccggctcgctggtcgcaaatgcggcgtactttgtgagtgacatgatacccgcactcgacggtacgcagtatgttttcgctgtgaatgtgtcacaactggcattttatgatttacagggcaatttcatttcctatgttgcaggcgccactgccggaaccgtttttaccacgccagccaggactcgttatatccggttctcgcagacgctgagcactggcaaatccggacagatgctaattaaaggtgcttctcttcctgctggttacattggggccggtctggtcgaccctttctccgccaaacgaactgccctggagcaggcaattgatattagctcacgtgcgaacgctctggtacgaaacctgtttgataaaaaccgggctaacgacggatatgcgctctcgactaacggcagtctgacggcaaatgccagctattttgttactgactatatcccggtccttcccggagagagttacatcctctcatctggtacgcaggtattatgcttctatgatcctgacctgagcaaaacgtcaaatattgctgtcgctgctgcaacggcttttaccgttccaactggttcctattacctgcgtttccagagcacgccgctatcgggtaaagaaagtctgatggttgttcacggaacctctctgccgtcatcctatgtggggtttggcgcgctgacaactccagaggcaacggcaatcacccagtcaatcagctggggaattgcggacggtactctggccgccatacgtaatatgttcaacaaggatgttgcgctggataattatgcgctggcgactactggagcaccctatgtggcatccggatattttgtcacgccatttatcccggtaaaacctaacacgcaatacatcgcaagcagtgcatcaggtgtggttgtctattttgatatcaacaaaaccaaaattttgaacaccactattgctgccggaaccgtattttccacgccatctggtgcggtttatgtccggtttcaggtatacggtctttcagcaaaaaacacactgatgatggttgaaggctcagcactccctgcgagctacctgtcgtttggttcgccgacgtcaacttacgttgatacaaaatcgctgactgtagcgcgctcggtcgcactgtccctgcaaaaagtgtcggtgaatctctataacagtgaacttgccctgacagatacgggtgtttcttatcagaccggcgggttgacatcttcagcgggggatttcgcaacaccgaaaatgatggtcactcctggtgactggttcgtgtcgacatatggttcagggggaggagcgttctacgggcttgatggtacattcctcagcggcttccagaatctggtcgcaaatacgccttatgctgttcctggtaatgcatattttgttcggttccaggtctacaacctgacacgcttgaacagcctgatggtttcacctggtcaggctgttcctgctggatatgttcctttcggtgggcaggggcaggaattgccctggcagggaaaggggatcggattccttggtgacagcataacaaacacggggaattacattgcgccactactttcccggaccggtatgcgccagattgccaattatggcgtaccgggtcagggagtcagaacgatggctgattcactcaacgccaccactattgatgcgatggatttcatttcgattctgggagggacgaacgattatgggggaaatcgccggctcgggacaattgcagacgccagggcggattatgacgatacgacggttaaatcgttttattacgatgtgttcttcgtattgaacaaaatctataccctgaaaccaacggtacgagtgatgttcagtacgccgatgaaacgaggtacatttgaaagccagccagtttatccggcggcgaactcagcgggctttacgttgccacagtacgtgcaggccattagagaagtgtgcgcgttattcagtgtgccagtctgcgatttgtttgctgaaagcggaataaatctctataacctgagcctctataccggggataacctgcatccgaatgccgctggcggagagttgatagcccggagaatggcaagcgttgtgaatatgctttaa

SEQ ID NO: 229517 - DNA, 549 bp, Klebsiella pneumoniae
gtgctgattggctatgcgagggtatcaaccggggatcaaaacctcgatttacagaaaaacgcgctgatccgcgcagaatgtgagctggtttttgaagacaccgcgagcgggaaaaatgccagacggccgggattgaggcgcgccttacgcaggcttaagcccggcgacgtgctggtggtctggaaactggaccggcttggacgcagcgtgcgtgatctgattacgctcgtgtcggagctgcaggctcgcggggtgaattttcgcagcctgaccgacagcatcgataccagtacgcctgcaggccgctttttcttccacgtcatgagcgccctggcggaaatggagcgcgagctgatcgtcgagcgaaccagagcgggtttagccgcagcgagggagcaggggagagtcggtggccgtcgccgggtaatgactgaagatgtggtggagcagtgccgcagaatgctggagaacggcgctacccggcagcaggtggctgatgtgacaggcgtggacgtgaaaacaatctacaagtacctcccggcgacttga

SEQ ID NO: 229518 - DNA, 567 bp, Klebsiella pneumoniae
gtggcaaagtcagtacccgcaatttttctcgaccgtgacggcactattaatgtcgatcatggctacgtccacgaaatcgacaattttgaatttatcgatggcgtcattgacgcgatgcgcgaactaaaagagatgggctacgcgctggtgctggtcactaaccagtccggtattgcccgcggtaaatttaccgaagcccagtttgaaacgctgaccgaatggatggactggtctctggcagaccgcggtgtcgacctcgacggtatctactattgcccgcatcacccgcagggtgcggttgaggagtaccgccagacctgtgattgtcgtaaaccgcatccggggatgctgatttccgcccgcgactatctgcatatcgatatggctgcttcttatatggtaggggacaaactggaagatatgcaggcggcagcggctgcggatgtcgggactaaagtactggtgcgcaccggtaaacccctgactgaagaagcggaaaaagcggcggattgggtgctaaatagcctggcagagctgccggcggcgattaaaaagcagcaaaaataa

SEQ ID NO: 229519 - DNA, 207 bp, Klebsiella pneumoniae
atgacagtttgcagattatgccaggccgaacccatgttaatgacaaagccggaaactgacggggtgatcagcttttatgtttactatgttgaatgctccgggtgcggagtgggcaccaaaagattttctgagcagtccttaactgcagatgaggccattcagaacgcacaaggccaatgggagctaatgaacaaggtcgatccttaa

SEQ ID NO: 229520 - DNA, 1236 bp, Klebsiella pneumoniae
atgagcgtaactcaaacatggcgaactgcagtacccacgcccggggtttatcgcaattatccacctaaccctttatatgtagatacgataaatgggagcgcttcaggaaccggttctattgataaccctgtaaatatgctatctctcgctcttggtttatgcgcggggcttcctgattacgaaataaaaataatcgcgccagaaaatagccctttgcgacaagaggttatttttgacacgtcattagatgtgactttatccggtgtagatagtgaaccttggtatactttcggttcggaaaaacacacatcaggatggactcagaacggccaaatttggcgcaaaacgcttggctatacatctgtgctccaggtcgtcgtcacgacgatggcagagacagtcggcgatcgtgatgatttctttttcaaattggtacagaacacagccacgccaacgacaccggctgcaggtgaatatggatattcaagcggggttatttatgtccgcttgccagatgattccagtcctaacctgcatactatagagatatcccggcgtaactttggggttggaacaattggtttcggcctgctgacagtaaacgactgcgtagccagatattgcatgattaacggcatatcatgcggacaatctactcagcctgccggaactggttatcttactgtaaacaactcacttattgaatattgcgcaaatggtggtgtcggcggtacgggccgaaatgaacttatcatctgcaacaatgtaaaagcgtacaggataagtaatgacggatttaaccagcatgcaccgactggtggtcaagggaagatgatccttaatggttgcgatggaagctataacggagataaggcaggtcaatcagctcagggtgcatccaaccatgagacaacgacaatgattttaaatggaggaacatttaattttaatgtctcaggtggaatggtcgttattgataatgcccgctgtgatattcatggcgacacgcaatatggtcctgtaatgatgaatggaaacatgcgacttggtaataccgcaggaacaattgccaatcagggcggttgcgcatggctaaataactcagttggcactgtaacggggtctgtgactgtagaaaacggcggcggtgtaggcgtaagaagagattccggcgctgtagttgatggaataacaaccatccattcaataaataacgcattgccagatattttgtga

SEQ ID NO: 229521 - DNA, 786 bp, Klebsiella pneumoniae
atggcagaagtaccgttaccttcacctactcaggctcctgtgccaagcactgatataagaaatcaggtttatgctggagctatgcttgataaattcattaccagctctggagatttaacatatacagaccggttagggaatgaacatcccaccattgatggtataaaaaaagaagttgatgatattactgaagtcgttactgatgccagagacgaagccgtacaggctaatcaggaggtacaggaaactgctgctcagttaccaacaaaacaacaattcactgagttgcaggtgtctgttgatagcattactgcagacccaacaaatgcaataacctccataactatacctgcgctagatttcagcctggctattggcagtgcaagctttggaatgatcgccagcaggctttcaggatggcagtttactcatggcgcagatgcatcagtaaccaaaatgatagatttgccgtcgcactggacaaaaatgcgtatttctcttatttgggcgaaccttgtcgcaaatactggggatgtcagtttttccgggttaatccagagttggtctgccggtgagtcatttaatcaggctccagcaggtgggggaattgtcgcagctgcgaacgccaccccgtatatagggattgaaacgcaaatagcccttgatctaccagtggacccaacacggcacaccaccattcgcgtaggtagaaacggctcctcggcaagcgatacgctcccaacagcaatggtgttatttgctgtaaggctaattaaggtggcataa

SEQ ID NO: 229522 - DNA, 189 bp, Klebsiella pneumoniae
atgccgtacttcttcctaattttcgtcatcagcagccaatcatcgaatatgcaggtggtgcccatgcagagtatggagcagtgcaaagcagccattaaggcgatgaaagctgcagatgataagagggagtggagcgatatttcaccacacgtagataatattcaatgcgtagaggtgaagggtgcctaa

SEQ ID NO: 229523 - DNA, 177 bp, Klebsiella pneumoniae
atgttcataatcgaaagccccgagcagcgcctgaagcgcgttctcaaagaaaacgccggtaaattcaccatcgacgaagacggcggcatccataccaactggcagcatccagaggtgcaggaaaccatgcgtaagcattttgaatcgctgagaaaaattaaggtggaacggcaatga

SEQ ID NO: 229524 - DNA, 492 bp, Klebsiella pneumoniae
atgatcagcggaatcgagcttatgcagcatgcactgggtatcaatgagcgtaacagaacgccataccgcaattacttcctcgctggagacggccatgcggataacgagatgtgggaaaaactggtttctgatggcttcgcaacttcccggccagcgcctgattttgttggcggtggagtgctctatcacgtcacagataagggagaagaattggctattacttcgcttcctgaacccaagaaaaagacacgatacgaagaatatctggatgctgatagttgcctgccattcggtgaatggctgctgggttaccagcttcccgaagtcgaatatgaccgtcatggaaaatgccggatgttcagatgctcatacgatgcaacttatggctacccgcgtcgtgatgttcagagcgaatggtgcccgacaaagaaagcagccaaagccagttacaaagaggcgttgcgcaagtcaaaacaggagcgtgcagcatga

SEQ ID NO: 229525 - DNA, 129 bp, Klebsiella pneumoniae
atggaaaaccgttacgactttgagaccgtattcgcactgctgaacgaaatggaagcatgcctgaataacgttcgccgactgaatgcccagttggatgaaagtctgcgagctattccactggcagcttaa

SEQ ID NO: 229526 - DNA, 969 bp, Klebsiella pneumoniae
atgagcgaaataatggatttagtcgtcatcgagaaaaaaaacgcgatggcggttttcaccaataacgaccagctcgacccgcttatcgaagcgatcgaaaaagaggctcgcagcctggtgccggacgtgaccaccaaaaaaggccgtgatgctatcgcatccatggctcacaaggtcgcgcgctctaaaacctacatcgacaacgcaggtaaagacctggtcgctgagctgaaagccctgccaaagcagatcgacgaaagccgccgtgttgtccgtgagcgtctcgatgcgctgaaggatgaagtgcgtcgcccgctgactgaatgggaagccgaacaggagcgcattaaggccgaagaagccatgaacgcactgcatgccgaagcgctgtccatgaatgaagagttcgatcggcagttggctgctcgtattgagtctgaccacgaaatggccctgctgatgaatgacgctttcgaccgcgaacaggccgagaagaaagcagaagccgaacgccagcgcattgcccgcgaagaagagattaagcgcctggcagaagagaaagcgaagcgtgaagcggcagaacaggcgcagcgtgaaattgacgccgcagccgccagagagcgcgaagcgattttggcaaaggagcgagccgaacgtgaacagcgagaagcagctgagcgtgcggagcgcgaaaagcaggccgcaatcgaagcggagcgccgcaaagctcaggaagaagccgatcgcatccgccgcgaggcagagcaacgcgaacaagtccgcctggcggaggagaaacgcaaggccgaagaagaatcgcgccgcgccgctgatgttgaacatcgccgcggaataaatacagcagcggtacaggctcttatcaatcagggcatccctcatgaatgggctaaagcctgcatcattgctgtagctctcgggaaagtccctgcgacagccatcaaatactga

SEQ ID NO: 229527 - DNA, 285 bp, Klebsiella pneumoniae
atgaacgcataccgcgcatatgacgtgatcgaagagcgtaagtgggctgaacaaacgctgtccgaagagaaggaaaagtggattgaagatcgagcaaaagaggtctttgccagccttccagaggatccctacgcggcactacgccagtctgtatcgcccaaggcgtttccatatgaaggcctccgtagcgataaggctggcgaggtatacaacgatttgcgcacagcaatagcttacgcccaggcggaatacgactgggatcaccgcaccggctgcccgttttaa

SEQ ID NO: 229528 - DNA, 1629 bp, Klebsiella pneumoniae
atgaatcgaagaaaatttatttcttttttgtctttttcggcattgtattcttcttcccgattgagttggggaagtgatttatatcatataaagtctatgtctgaattacgtaattttaaaccggagtatatcgggcaggaggtttatctcgagtcctactacgttggagttggcagaggaggaggatattttacatttcacgaaggtgttcgtaatgataatggtggtacagttataagcgcagttggaggaggctactggcttcgaagattacataatgatctttgtttggtttatgattttggtgcacgagatgacatagatggttttgatagtacaaatgctattcagggagcgatagataattgtaatcatataagcttgggagggggtaatttcaatatatcacatccgctataccttcggtcaaatattatttttgatggcgacttcggttcactttcttcattagtgcctaaaaattctgcgtttatgaaaggatctatatttgcgccagggaactaccatccggattttttacagaagatcataaaaaaacaaattcttgattacaaaaacaattcaattaaactgaatgatgttagcggttttagaaaaggtgatattgtaagaatatcttctcatgagtcaactttgagtttcggcttttgggttgaaaactatattcagctttcaagaataataaaagttgattctttgaataagaccttgataattgagcaccctgtttcttttgatggtgaacttgagttatgtctcgcatcaacggactcggtaaaagcaagattcgggcgtccattattttgttgcacagatacaattgtccgtaatactgaaattaatacttgggattattggattgcagatagctgtacatataatatgctttttgaaaacatatatggttcagctaaatctgttgtgtatggcaacagctattgttacactacttttaaaaatatcagaattaaatttacaggctcggtctctgagttggcatttggctcgcactttaccactcttgaaggtatttacgcgatttcatctgatgaaggtgtttctaaaaaagaaatgatcagctggacggaggctggaagaaattgtacgctttctagatttttgcttagaattaataacaatgaaacaccaagtacgattattagaatttccgggcattcaaatgccatcattaaaaatggtcagatttttattttctcaaattcaaataatatacttagtgttgaaaattatgggaatggtcaacccgaatgtgcgaatattacttattcaaacattgatgtttatgctaaagaaagtattaatgttttttgtgatgtttttaaagctaatgatactgctactatcgaaaaggtatctttccataatgttagatactttggcatgaaacccaaggtcgctttattacgacttcgcggaacccctttgaataccatctcaggagttgacgctatcatttactctaaatatggtggtgatgcaaaaattgcacatgctaaagggaattatattcacttaactagtgttgcatatgaatcaaatacagaggattattctacaaataatgttacatattctaaggtaaattaa

SEQ ID NO: 229529 - DNA, 729 bp, Klebsiella pneumoniae
gtggtcattgagcatcagagcaccccggacagccatatggcgttcagactcctgcgctatgccctcgcggccatgcaacagcatcttgatcgcggccataaagcgctgccgctggtgatccccatgctgttttatcatggcagcatttctccctatcccttttcactgtgctggctggacgagttcccacctgactcaccggcaaagcagctttatctcggggcttttccgctcgtcgatgtgaccgatattcccgacgacgccatattacagcatcggcggatcgcgcttctggaactggtccagaaacacatccgtcaacgcgatcttagccatatcctccagcagttggtggaggtggtgctgatgggatacactgaccaccagcagttcaaaacgttatttacctatatgtcgctgcatggcaatagcgccgacccggacaactttatcgaccagctggtcgaacgtctgccgcaatatgaggataccctgatgacgattgccgagtacctgaagcagaaagggcgcgaagagggaaaacaacgctggttacaggaaggcttgaacgaaggtttacaggcgggggagcatcgcgaagcctgccgcatcgcgctgatgatgttagagaacggcatggacactgaaaccgtattgcggatgactcgcctcagcgcggacgaactggcgacgctggcgcgccaggcacgccagtctccccccgcttag

SEQ ID NO: 229530 - DNA, 1527 bp, Klebsiella pneumoniae
atggccagttcacccgcagaggaaatcattttacgcacccgtggtatttccatgctgttccccggcacggtggccctggataacgtcgactacaacgtctggcgtggcaaagttaacgtgatcatcggcgaaaatggcgcgggtaaatcaacgctcatgaaaattctcgccggtgtgcaacagccgagcctgggcgaaatggaactcaacggcaacatagtccatttctccagcacccgcgaggccgccgcccacggcattggtatggtccaccaggagctgaacctgtttgaaaatcttagcgtcgcggaaaatatctttcttggtcgagagctacagcgcgggcttacgccaattaacgaagcagagcaggaacggcaagccgcggagctgttgcagcgactcgatcagccgatctcgccgcgggagctggtgggtaacctgaaggtcggtcagcagcagttggttgagatagccaaagcgctggcggaaaatgcggacattctgatccttgatgagcccacctccgccttaagcaaaaccgaggtggatatcctgtttcgggtcatccgcgagctgacgcgtcagggggtgtccattatctacatctcacaccgtctggaagagctgatggccatcggcgacgtcattaccattctgcgtgacggcaaattccaggcggaggccagggtgagtgaaattgatgtgccatggatcgtccgtgaaatgctgggaagcgatccggtaagtcattttcttcccccgaatcgccgcttcggtgccccactgctggaagtggagaacctgacctgcgtgaatgccgcgggcaatacggtggtggataacgtcagttttaaagcacatgccggtgaaattattgggatctacggtctaatgggcgccggacgaaccgagctgtttgaatgtctgctggggacagcgcgccactactttggcaagatctggctggacagcaaaccggttccccagcggttaaccacggccgaacgcatccgcatgggcatgagtctggtgccggaagatcgtaagcggaccgggatttttccgatctcttcagtcgccagcaatctgaccattgccagcctgtggcgtcgtcttcagcgcggggtaaccattgccaataaagaggaagaggccgtcgtcgccagcacaattggcaatctatccatcaaggtctcatcaccagaagtcgagatccaggcgctcagcggcggcaatcagcaaaaggtggttattggccgttcgctgttaaccaatccgaaggtgctgtttcttgacgagcctacgcgcggaatcgacatcggcgccaagggggatgtgtttcgcatgatggtgcaattgtcgcagcagggaatggcggtggtgttctccacctccgatttaaaagaaatcatggcggtctctgaccgtatcctggtgatgtcaggcggcaaactgaccgccgatatcgttcgtgaccaggccgaagagtcggcgctggtttcagcaagcgctcaggggttctaa

SEQ ID NO: 229531 - DNA, 2139 bp, Klebsiella pneumoniae
atgacaccgcatgtgatgaaacgtgatggctgtaaagtgccgttcaactcagagcgcattcaggaagcaattctgcgtgcagctaaagcagcgggagtcgatgacgcagactattgcgccaccgtcgcagaagtcgttagccaacaaatgcagggccgcgcccaggtcgacatcaacgagatccagaccgcggtggaaaaccagctgatgtccggcccctataagcagctggcgcgcgcctacattgagtatcgccatgaccgcgatagccagcgtgagaagcgcggccgtctcaatcaggagatccgcggcctcgtcgagcagaccaactccgcgctgctcaacgaaaacgccaacaaggacagtaaagtcatcccgacccagcgcgacctgctggccgggatcgtcgccaagcactacgcccggcagcacctgctgccccacgatgtggtgatggctcacgaacgcggcatgatccactatcatgacctcgattactcgcccttcttcccgatgttcaactgcatgctgatcgacctgaaaggcatgctgacccagggctttaagatgggcaacgcggagatcgagccgccgaagtctatctctaccgccaccgcggtgacggcgcagatcatcgcccaggtcgccagccatatttacggcggcaccaccatcaaccgcatcgatgaagtgctggcgccgttcgtcagcgaaagcttcaaaaagcatcgcaagatcgccgaagagtggcagatcccggatgccgaaggctatgcccgcgcccgtaccgaaaaagagtgctacgacgccttccagtcgctggagtatgaggtcaacacactgcataccgccaacggccagacgccgttcgtcaccttcggattcggccttggcaccagctgggaatcgcggctgatccagcagtcgattctgcgcaaccgcattgccggcctcggtaaaaatcgcaaaaccgcggtgttcccgaaactggtgttcgcgatccgcgacggcctgaaccataagttcggcgacccgaactacgacatcaaacagctggcgctggagtgcgccagcaagcgcatgtacccggatatcctcaactacgatcaggtggtgaaagtcaccgggtcgtttaaaacgccgatgggctgccgcagcttcctcggggtatgggaaaacgagaacggcgagcaggtgcatgatggacgcaataacctcggcgtgatcagtctcaacctgccgcgcatcgccctggaagcgaaaggcgatgaagccgccttctgggcgctgctggacgagcgcctgcagctggcgcgtaaagcgctgatgacccgtatcgcccgcctggaaggagtgaaggctcgcgtggcgccgatcctgtatatggaaggcgcctgcggcgtgcggctgaaagccgacgacgacgtctccgagatcttcaaaaacggccgcgcgtccatttctctgggctatatcggtatccatgaaaccatcaatgcgctgtacggcaaccagcatatgtacgacagcgaggcgctgcgtgagaaaggcgtggccatcgtccagcgcctgcgcgacgctgtcgatttgtggaaggaagaaaccggctacggctttagcctgtacagcacgccgagcgaaaacctgtgcgatcgcttctgccgtctcgacaccgccgagtttggcgtggtggaaggggtaaccgacaaaggttactacaccaacagcttccacctcgacgtggagaagaaggtcaacccgtacgataagatcgatttcgaagcgccgtacccgccgctggccaatggggggttcatttgctacggcgagtacccgaatatccagcataacctcaaggcgctggaagacgtgtgggattacagctatcagcacgtgccgtactacgggaccaatacgccgatcgatgagtgctacgagtgcggttttaccggcgagttcgagtgcaccagcaagggctttacctgcccgaaatgcggtaaccacgacgccgcccgcgtttccgttacccgccgggtgtgcggttatctcggcagcccggacgcgcggccgttcaacgccggcaagcaggaagaggtgaagcgccgcgtgaagcacttgggcaatgggcagattggttaa

SEQ ID NO: 229532 - DNA, 1143 bp, Klebsiella pneumoniae
atgttgtacccggtgaaagcgacctacgacatcatggcgctgatttccagcttcggcatcgcctaccggctggcggagaagtatcgcactctcgatccgttgagcgctggagcgatgtcgctggtggccttcatgatgacgatcccgcagaacacgctgtttacgccggtacacggcgcggcggaggtgattaaaggggtgatcccggtgagcatggtcggcagccaggggctgtttgtcgccattgtcatttcgctgctgtcgacggagatttatcgtttggtcgccagccgcaatctcgttatccgcatgccggacggcgtgccgccggcagtggcgaaatcattcctcgccctgatccccggcttctgcgtgctggcggtggtgctggcgctgcgcctggcggtcgaggcctcgccgttcggcgatatcaacagtatgatcgccaccctgattggtattccgatgcaccacgtcggcggtacgctgccgggcatgattatttcagtcattttgattggtattttgtggaccctgggcctgcacggcgacgcgattgtgctggtgtttatccagccggtatggctgtcgaatatgtccgagaacctgacggccttccagaacggtcagccgatcccgcatatcattactcagcagttttacgatctgtggattgcccccggaggtaccggcgcgctgctggggctggtgatttttatgttgctgcgtagccgtagccagcagatgaaacagctggggaaaattgccgcgcccggggcattgtttaacatcagcgagccgatggtgtttggcatcccgctggtgatgaacccgtactttttcctgccgtttattttaacgccggtgctgctggtgatcgtgtcctataccgcgatggcgaccgggctggtggcgccgcccgccggaatcgcactgccgttcaccacgccgatcttcatcagcggctatctggcgaccggagggcatatctccggcacggtgctgcaggtggtgaatttagcgatttcgctggtggtctactatccgttcttccgcgcctgggatcggctaaaggcaaaagaagagcacgcctcggcgcaaccacaagcgagcgctgcgattgctgatgccgaccgcgcataa

SEQ ID NO: 229533 - DNA, 1284 bp, Klebsiella pneumoniae
atgatggagaatcaaaacaaagtaatgtctaggaaagttattccaccgggttacaagctgacggaagtgggagtgattccagaagattggttattacaaaaactaggcttacatgcatcatttcgaacgggaccatttggaagtgcgttgcataaatcagactacgtcgatggtggtattccagtcgtcaacccaatgcaaattgttgatggaaaagtggtaccaactttttcaatggcgatttctggtgatgcagccaaaaaattagcagagtttcgactttcggttggtgacgttgttattgggcgtagaggcgatatgggcagatgcgctgtgattactgaaaaagaaaatggatggctttgtggtactggctcaatgattattcgcgttaagccgtcatgtgatgcagcattccttcaaagaattctatcaagcgcttcagttatttctgcaattgaaaatacctctgtgggaactacgatgataaacctcaatcaaggtaccttgagagagctacagatcgtacttccagaaaataaaaatgaacaaatcgctattgccaatgcactttctgacaccgatgagttgattgcaatcctagagcatttgatcgccaaaaaacaatccatcaaaactgccaccatgcagcaactgctaactggtcgtactcgcctacctcaatttgctaaacatcccgatgggactatcaaaggatataaatccggcgagctagggcatattccagaggattgggaagagcgcgaaataggcaagttcgccccattgcaaagaggttttgatttacctgccagtaaaagaagtgaaggattatatccagtagtatattcaaacggcatagttaacactcataatcatttccaagttaaaggtccaggtgtggttacaggtagatctgggacattgggaaaagttcaccacattgcgtgtgatttttggcctcataatacatcgctttgggttacaaaattcattaactcagattcaaagtttgtctactatatttttaaatatatcggttttgaacgcttcgcaagtggttcaggggtaccaaccttaaatagaaacgatgcccatagttttaaagtggctattccttcgtcattaaaagagcaaactgccatcgccaccatcctttcagatatggatgctgaactcacggtgctagagaaaaaactctccaagatccggaatataaaacaagggatgatgcaacaactgctgaccgggcgtatccgtttaccactggataaccagccatga

SEQ ID NO: 229534 - DNA, 390 bp, Klebsiella pneumoniae
atgtacgccaaatcctttctcgctctcgacgataacggtggtctgaacgatgcacgtaccgagcagacagccccttatgatcgcgatacctgccacctctgcggtagtgcgctgcaatgctatcctgagtacaacagcgaatgcccgtggttcgaacacaccgaaacgggtctcaccagcaatagtcaacagcattgtacccatgccaatccggatgccagtgaacagcaactggtcagacggttgcagcgcctcctgtccgatgccactcccaaggtgagtaaagccgactggcaatgcatacaatgcaagaccaattaccatggtgagtgttactgcctaccctgtgataccggagacttcagccagtcaaaatgggtgacatcatga

SEQ ID NO: 229535 - DNA, 207 bp, Klebsiella pneumoniae
atggcaacccgtccctcacttaccgaagaccagttcattgacatggtatttatcactagcctgacagggcttactgataaatggttttataagctcatcaaagatggtgccttccccaaaccagtcaaactggggcgcagttctcgctggttaaagagcgaagtagaaaactggcttcaggaacgtattaaccagtcccgtaaataa

SEQ ID NO: 229536 - DNA, 885 bp, Klebsiella pneumoniae
atggttaagctggtggggaatgacagtagtaagattaaatatcttgaaaataaattaattgagaatggttatcacttctattctggtggggtagataaagattaccgggcatatcaggtgcgggttttcaattatcttatttcactgaatattccagagcaggaaataaatgctttctttgctaaagtagataatagctatgcaagcggctttccatccgaaaatgaactggattggtaccgtaatgatccacgagcaagcttatggttgtcttgtgagttatatgagaaattaaaagaagaagctcctacgtacaatattgattttctatctccagaagcattacaacctgatcataatgtgagaattgaagcgatacgtcattgtatggatgaatggcctatgtattttacaacaccggctgaattcattaaggataaaagtattgagtgggctgagttacttgatcaacatgatttattcagaagtgttagatccagcaaggtcgatgtctgttcttggctaagagattacttaagagggaatacatcaataggtctgaaacgtatttgtggtaattcttccgaggaaataatgtcgtggtgctatgcaagttactttatctggagaaaaaacaacctgcattctccggattctgtcgagttgttcattagaaagtttaagagtgcctggtccactcaaaaaaacagaaataaaaataaagaagagaaaaaacttgtgacaatgagtgtaaatatctctcagcaggctcatgatatgctgagagatatgtctatgaaagactcgatgtcaaataacgcaattatagagagtgctatccttaggttatataatagtaagaatagtaaagtacattccaaataa

SEQ ID NO: 229537 - DNA, 315 bp, Klebsiella pneumoniae
atgaaagcatatgctatgctaacaatcattctttctacttttctattaactgcatgtaatagtgaaccaagtcaagatgatatctacaatgcattcaaaagtgttgtagataaaaccaatgccagcatgaaagcttttgattcaagagtgtcagaaaaagaccttttaaaaatcgattatgtaaaaaaagtaagctgttcggaagaagcaaacaatgtttacaactgcattgtcgatgcttctattagcaacaataaacagacgaaaccaattaaattagttaaagctgatggtgtctggaaagaagttcagtag

SEQ ID NO: 229538 - DNA, 1209 bp, Klebsiella pneumoniae
atgaaagggatgcaacggataaagaggcataagaactttatcaatgtcgtaaagtatgtgttgaagccaggttctcatcacagaagtgatcctgtggttattggtggcaacatgacaggtgattgtgccaatgaactgatagctgagtttgatacggccagcaggctcagaaccgacattgcaaaacctgcatggcacaactcgcttcgtcttcctcaaggagataagctttcaaacgaacaatggaaatcgatagctgatgattacatgcaccgtatgggattcaatgacactcatcttcgttgttatgttctgcatgacgacagtgcaggccagcacatacatatcattgctaaccgaatagattcagtatcaggaagggttaacttaggaagacatgaaagccttaggagcggtcgtataatccaggaacttgaaattaggtacgacctaacgataacaaaaggaccagtaccactaaaaccagagaatacgggaaaagagaaaaataatgtaataccaacaaaagccaagaagctttcaagaaatgaaaccatgtatgaaaaacgaacaggtgaggtctgcaataagaagcaattacaggttattcttgacaaaagtttggcagatacacctgatcttttaacttttatcaagaggctggaaggagctgaagtatcctggacggcgaatgtcgccagcacaggcaaaatgaacggcttctctttctcttaccgcgatattgctttcaaagcttcacagttaggcaagggttactcttgggcaaatcttcaaaagcaacttagctataacccggatcacttagaagctctgcgaaagggtatacagaccaaggaagttcctgctcctgctcctgctcctgctcctgctcctgctcctgctcctgctcctgctcctgcaacagtgttgaaaaccactgagagaaaggaaagtatcgttggaaaaattgcagaactggaattacggctcagagaagacaaacgaaacgaaatcgtaggaaagattcttcaaaaaaatgcagtacaaaggcaaaaacactccaggcttagtggctggattccatttttaagaaggttcatagagcttctcagaagctatgggaagaacatcctccaccaggtccctccaaacttctcagtagtctattcatcacatcacctgaaatcttcaagaaaaattcgtttatag

SEQ ID NO: 229539 - DNA, 969 bp, Klebsiella pneumoniae
atgcgcaatgagaatttatacttaatagatacaataaaaagaagaatatatgattttgatagctacaaaaatgaatttaataagaaaaaaactcttatttcattagatagcaactgttgcactgatttgttgtgtaactattggtcaagtcggtttgcaaaattgtatggttatgaaatgtgtgcaaactactcggccttagaaggtaattcgtcttcttttgatgatgaaacccaaaaatacatacgctattgttatataacaaaagcaaaacttgagagttatggatataattttcaacgacaagagtttacaaagagtttccttgatgcttttaaccatccagcaacggatatccataatagtggaattcaatttcttagaagagtttatgaaatagaggatttaaatttaaaagttatcatcgataattttctaagttttggtcctgtcaccaaatccaaacaacatttaattaatccattcttggttcatactgcattgttttattcatacagaaacaaagcgaatataaaagataccccagcgacttttttgaagaaacagcaatatgacaatcccaaaaataaaacaaaggatcaaatagcttataatgtatatatggactgctatattctcttccacacatttcacttacctgttcaaatgagtaacgttattagaaccacacctatgcggttagaaccttatatgtcattacctattgcaacatttgataaaggaatgatgctattcgcaaaagctttttttactctttataatatatttgacaagaattattttgaaataagaaacaacttagaaccaatttttgttaaaaaagatattataaataagttatcagaagaagatatatcaacattacgaagtgaatgctatccttccgctgacgacgaatgcataaaagaaatagtatatgaattattagtaaaccgattagtgttttaa

SEQ ID NO: 229540 - DNA, 207 bp, Klebsiella pneumoniae
atggaatctattaaagtttgcatcggtagcatcctttttataataatgaatgttttagccgtcaataactggaatagcactgaaaattatgttgctttgtttaatgtctctgttttgatcagcgatatattcataacattatgtgtcgtggtgtttgttttggactttgtttttgttttttgcaggaaaaatctttctgataaatga

SEQ ID NO: 229541 - DNA, 513 bp, Klebsiella pneumoniae
atgaaaacaatagctaaaataattattgccttacacatcactttagttattgggattttagctggccttattatcgacaacagcttaatttcaaagcatcccgaaggatatctttttacttccatttgcattatctcattcggcatttatttattgcaaaaacacagggcatcatacaaaattctgaatgatttaattctcgctatatcagccggaattattgcctctgaatatttatttttcggcaataaacaatttgatattatccctgttttaagcttgaaagatagcgatccacaaacatattatttaatgatatcaaaatttatagtagtaacctgttgccttacagcaaaagtttttattaccctaaaagaatttttaagtctcagaaaaaatgaaaaattatctggcaaatatccaagtgcgataagaacgtttttctcatttatcagaaagatttttcctgcaaaaaacaaaaacaaagtccaaaacaaacaccacgacacataa

SEQ ID NO: 229542 - DNA, 252 bp, Klebsiella pneumoniae
atgaaagcttacacacttaaagaaaataaagattccggtgaacttcacctttttgaaggggatatgtatccaaaagattcagaatataaatgtaattcaaaggcaaaatccatatgtaaaaaaatggacaaatcagatagtaaagaaaatcgtttcacatgtgctactgaacaagaagcaagggagaaaatcgctaaaattgggcgaaaagtttgtgggacatgtgtaagccatttatatgaatcctactaa

SEQ ID NO: 229543 - DNA, 429 bp, Klebsiella pneumoniae; identical to SEQ ID NO: 97409

SEQ ID NO: 229544 - DNA, 285 bp, Klebsiella pneumoniae; identical to SEQ ID NO: 97408

SEQ ID NO: 229545 - DNA, 174 bp, Klebsiella pneumoniae; identical to SEQ ID NO: 97407

SEQ ID NO: 229546 - DNA, 705 bp, Klebsiella pneumoniae
atgaacccattcaaaggccggcattttcagcgtgacatcattctgtgggccgtacgctggtactgcaaatacggcatcagttaccgtgagctgcaggagatgctggctgaacgcggagtgaatgtcgatcactccacgatttaccgctgggttcagcgttatgcgcctgaaatggaaaaacggctgcgctggtactggcgtaacccttccgatctttgcccgtggcacatggatgaaacctacgtgaaggtcaatggccgctgggcgtatctgtaccgggccgtcgacagccggggccgcactgtcgatttttatctctcctcccgtcgtaacagcaaagctgcataccggtttctgggtaaaatcctcaacaacgtgaagaagtggcagatcccgcgattcatcaacacggataaagcgcccgcctatggtcgcgcgcttgctctgctcaaacgcgaaggccggtgcccgtctgacgttaaacaccgacagattaagtaccggaacaacgtgattgaatgcgatcatggcaaactgaaacggataatcggcgccacgctgggatttaaatccatgaagacggcttacgccaccatcaaaggtattgaggtgatgcgtgcactacgcaaaggccaggcctcagcattttattatggtgatcccctgggcgaaatgcgcctggtaagcagagtttttgaaatgtaa

SEQ ID NO: 229547 - DNA, 393 bp, Klebsiella pneumoniae
atggcaaagatacaggcatatgttagcgatgaagttgctgaaaaaattaatgccattgtggagaaacggaaagctgagggcgccagggagaaagatgttagtttttccagtgtgtctacgatgcttgtcgagttaggcttgagagtttatgaagcgcaaatggaaaggaaagaaagcggctttaatcagatggctttcaataaggttttgcttgaaacagttttgaagacacaatttgcaaccaacaaaattttgggaatttcttgtttgagtccacatatctcaggtaaccaaaaatttgagtggcgatttatgattgataacattctggaagacactaaagaagtggtcgatacattctttccagaatcagaagatggtgacgaagagtaa

SEQ ID NO: 229548 - DNA, 519 bp, Klebsiella pneumoniae; identical to SEQ ID NO: 102166

SEQ ID NO: 229549 - DNA, 363 bp, Klebsiella pneumoniae
atgggacgttcaataccggtgaagattggtcagaaggaatttgcatcaaaacagaaagcccgcggctattacatggatcaacgacctgacgtgaaagctgtcgggatcatttcagaaggtgactattttgaagagctgaaggaactgttcaccctctattgtgacagttgtccgggctgggaactgaacggtcgtctgattaaacattttacggttcagaatgaacctcgttttacgaatggccgctgggtgtcacatccctgctataaggtccaactgagcaacggtgagctgagaccgttttcggttgaaaaggcaatagacgccatcgtaaaagcagctgcagctgatcaacagaaatag

SEQ ID NO: 229550 - DNA, 2211 bp, Klebsiella pneumoniae
atgactcaactcaggatccggggcgtaagaagctacgcgcctgaccgggatatctgctttgatctcagcagtaaggtgacactcatctacggccagaacggctcggggaaatccacggtatcaggctatttttatgaccggcaggcggataaatatcggcactgtgcctttgagagcccgcacatcagccactttcaggtctttaatcaggaatatattgacagcaaatttgcccgtgcggactatcagcccgggatcttcactctcagtgaggccaatcaggaaagccaggataaaataaacagtaataataaagaaagaacaaaactgagtgcccgcctggagaaacttaatgaggagattgcagaaaaagaagggatgaaagaaacgatcgtcgaccactgtgccagggatattttcaaccggacagtcaatgacaggaaaatcctcagcgatttccttgagggtgccaaaattaaaagatcgttttacgaacgtatggttgcaacaccactttcagacgtgcgtaccacaacggagaaactgactgataaatggcgaatgttaagtcaaagcgaaggaacgcttgtcagcgaaattcatattccacgaacaactgtcttaacggaagaaacaataaaactgatgcaggaacctgttgtgcctgtaagtagcacgcaattctctgcactcatccagaaaatcggtaatgcagactgggtgcgccaggggcagcattatatacacgacgatgtttgccccttctgccagcagccctttgatgtcatggccttttcgcgcgaactcactcagatgttcgatgagtcttatcagacttctcttggagtgctgagccaggcagcagaagggctggctcaggactgtgatgccctggccgaatttgaacaccgcgttgcaacccattctttcgttgatgagggaagtcagattttatctctggtgaaagcggtaaataaaggctttcagattttgttacagcaactccttaataaaattaaagaaccgtctctgaaggtacagcctgagaaccttcaggaatccctgttcttactccagaatgaagtggacgcgttcaatacccgggtaagggaaaataaccgactggctgaaaactttacccatgaaaaaaagtccctgcacgctgatgtaatggcgcatctcagagggatttgcgaagagttctttaccgaacgtgacaggcagcttggtgagctacaaaatgaaattaacagtaggttgcgttatggcgggatcctcgaagcaaacaagaagcagctggatgacgagacgaatgccctgaccggacaactctcggacatacaacccactattgacagtatcaacgcgaatctcagactgctggggatcaccggctttgagatcatctgccatgatactgagatgaaactataccgtctgcgccggggaagcgagcctgagaaggctgaagtattcaaatccctcagtgagggtgagaaaacaatggtttctttcctttatttcatagaatcatgctccggcagtctcacccctgaaaccattcatccggagaataaacttattgttattgacgatccgatttccagcctgtcacataactatatttatgaagtcgcagctctcattaaacggaaaattataaagccaggtgcagcgagacatgtagtgatactgactcacaatatgtttttcttccaggaaatactgttaaacagcggccgcctgcaggataacagagaggcaccggtgaactggtctctgcttcgaattattaagtctgactacagttcctgcgagaagctctccatgcacgagatgctcaatgaatatcaggcgttatggcagaccctgaaagacgtcagggatggaaaaacccagcccgttgtgctgtttaacacaatgaggaatattcttgagtattatttcagctttgcctgcaagaatgaaaaacttaaagaggccctggagtctctggcaaccgaacacagcgatgccggagagtatgattcattttatcgggctattaaccggcactctcattctgatggccgaaatctcttttctacaggggtcatcgataaggaacgttatctaagtatgtttagaaaagtgtttactcagacagacgacgatgatcactatcttgccatgatgggggaatcagcagacctgcaggaaacagtggagtaa

SEQ ID NO: 229551 - DNA, 534 bp, Klebsiella pneumoniae; identical to SEQ ID NO: 102164

SEQ ID NO: 229552 - DNA, 1368 bp, Klebsiella pneumoniae; identical to SEQ ID NO: 102163

SEQ ID NO: 229553 - DNA, 135 bp, Klebsiella pneumoniae
atgaccaaaaaaacattgtgtatggactctttcattattattcatttcgcttataaaaaaaacgctcccgatcgggagcgtaagccagtgacttcggcgtcaaatgagggtctgacaagtggagctgcgggttaa

SEQ ID NO: 229554 - DNA, 174 bp, Klebsiella pneumoniae; identical to SEQ ID NO: 98242

SEQ ID NO: 229555 - DNA, 249 bp, Klebsiella pneumoniae; identical to SEQ ID NO: 179542

SEQ ID NO: 229556 - DNA, 222 bp, Klebsiella pneumoniae
atgttatcgaccgccgtcttaccacacgtcttgcagcaaaccggcttgagatatctgacagacactgccgacggttgctggagcgctatcgtgaacatgggccgctttcacttgttaaccgtcgtcgtggccagcctggcaaccggcaactcatgccgggcctcgctgaacgagcactacgtattatccgcgaacgctacgctgattttggtcccactttag

SEQ ID NO: 229557 - DNA, 225 bp, Klebsiella pneumoniae
atgcagcttctgtacgtcagttctgaatccactttcacctattttgaagccacccgcggttatctggaacgttacggtaagcctgtggcgttctacagcgacaaggccagcgtcttcaggatcaacaacaagcaggccaccggcggagatggccagactcagttcggccgtgccatgaacgagctgaacatcaccggtatctgtgccaataccagaattggttag

SEQ ID NO: 229558 - DNA, 2505 bp, Klebsiella pneumoniae
atgggtaaaacatctatttcggaaatcttatctacttatcatcatttgcaattagaaaacgcaaatgaagccgctacaagactaaaagtgatagatcgggtcttaaaggaagtcttgatgtggactgatagtgatatcaaaccagaagaacatgtcactgaggatggtttgacaacctatgctgattatatactaaaaacagccaatattgcgcttgttgtggaagctaaaaaggcaggacctagcttcactgtcacgccaggaaaaaggaaggtaaagcttagtaatagttttttacagtgtgatcttggtgaagcaataatacaagccagagactacgcaagaaaatttggtatagattatgccgtcgctacgaatggaaatgtctgggcatgctttcctgcccagaggcatgataatgtgaaatttaatgattcaatagcgcttgtgttctggtcacttgaagattgtctacatgagaattatcaagaattctatgatttgcttagtcgtgaaaatgttatatcaggaagtctggaaacagctctcttgggtcgcgtcgaaaatcaaatcgagtttagaaagttaaagaatttttattctcagcaaaatagaactcagactaataacccgatatatcatttaattgcagatgagttaagattggcattttctgattccatactttatttagatgaagattcctttgaaaaatgttatgtttcaacgccagaaactatgcgattcgacagtaaaattaggatgaatattggtaggcgttcaaatgttctgaatggtgaggtattaaaagggttaaatgataaagatacacaaagaataatcgataagttccaagtgaaaggaaagaaaaagatacacatcaaggacagcaaacctctagcaatcttgctactcgggactgtgggggcaggtaaaacaacctttcttcattacatgagaaaggttagaataaaagagattttttcaaataaagaagataaattgacgccacattggcttcatatagatttccttgataatccatcagaaagctcaatagtagattttatctacaaatcaatcctcgaatacatcaataggcatccaatcttaagtaatcagacgtttgtatttgatgcatttagagaagatattgaagcaattaagtcggggcctctttttctattgagcgaggagcaaaaaaactctcgcatctccgattttttatatgagcaatataaaaacatcagaccttatgttgataaaataatcagtcacattacaaaaacaacatcttttttccttgttatagataacgttgatcaaattgagcttgatgatattcagtcccggatatttacagaatcattttcaatatcgcgggcactttcattaaaccttgtgctctcattgaggcagtctacttttatcaaacataaaaattctccggctatagatgcttttgattttgaaattatacaaatagatccaccaagaattagcagtgtaatagcaaaaagatttgctctagtaaaatatatgaccagtaataaaagtggtaatttcatcgcagaaaatggtgctaaagttgccttagatgatatatcacaattagtcgatattatcagtgggtctgtactgggaagtgagattgggacacgtattgaggtacttgcgacggatgatgtgcggttagcattacgaatgactcgtgagttcctagaaaggggttatacgagcccaggtaaggcagtacaaatctttagagaacaaggaagatatcttcttccccgacatgaggcattcagagccattttattgggtactgaattgacatatagcgagtcaacatcgactattgctaacccatttgattcgaatttagcagtgactcaaatgcaattattaagactgtacgttcttaatgttatagtttcgtacgctagcgatcctgcattccgacaaattgatggttcggtaataactgaaaaattaagaacgattggtgtaggcgactcttttacacatcgcgtacttgttgatttatgcaataaaagatttttatttactgtaaatcacggtgagcctacagcttcatcaagtttcataccatctcggttgggtggttatattgcaaaagaacttattagtaatttcacattcatagaatgtatgctttatgatacatatatagctgatgctaagacatgggggaaattgagagatctgagcgggaaaattgagtctgaaagagatgtaataaaaaggatcacgatgcgtgtaagccgagcgaaaagtttttattatcaaatggaaaagcttatttctccgctttgttctgaggctattattagaggattgccttcacaatggtgttctaatcctcttcgggagcgtttacccgagttaagaaaagagttaggaagggtccttcattctgcgaaaaagacatatcaaccaaaacaggatgatacgtctaagtatttccttgatgaatcggtataa

SEQ ID NO: 229559 - DNA, 495 bp, Klebsiella pneumoniae
atggtgggaacaattctgctcagcaattcagacgttttccgcagcgagacgtgctgtgcgcattgggactaccctgtgttcatttctgtaacaggccaactaggccatgtaatcccttccggctttttcagcgaaataagacccgccacatataaaaaagttggctacatgctactggtgagcgttcattacatacccagctggttgagtacaaaaaaacagacagctaaatttacatttcgtgccatggcctgccgtctgtgctcccacctttttaccttgttctgggtcaataaaaaagaaaacatctttgatgcaaatcactacatttacaaattagaatgcatcttggaaacaaagacatacataattctattatgtgtcatccagcctctgttcggtgatactgccagatcactttgcgttaaaacagagtcatttttttggtggcaagacttcgctcaactagtcgttccgtcacagaagcgcatatag

SEQ ID NO: 229560 - DNA, 3813 bp, Klebsiella pneumoniae; identical to SEQ ID NO: 204979

SEQ ID NO: 229561 - DNA, 2973 bp, Klebsiella pneumoniae
atgccacgccgctcaatcctgtccgccaccgagcgcgaaagcctgctggcactgccagatgccaaagacgaactgatacggcactacacgttcaacgaaaccgacctgtcggtgatccgtcagcgtcgcggcgccgcgaatcgattgggcttcgctgtgcagctttgctacttgcgattccctggcacctttttgggcgtcgatgagcctccgtttccgcccctgttgcgcatggtggccgcgcaactcaagatgccagtggaaagttggagcgagtacggccagcgcgaacagacacggcgggagcacttggtcgagctgcaaacggtttttgggttcaagcccttcaccatgagccactatcggcaagccgtgcatacattgaccgagctggccttgcagaccgacaaaggcatcgtgctggcgagcgcacttgtcgagaatctgcggcggcagagcattatcctgcccgccatgaatgccatcgagcgcgcaagcgccgaggccatcacccgtgccaaccgacgcatttacgcggcgctgaccgattctttgttatcaccccaccgtcagcgcctggacgaacttctcaagcgcaaggacggcagtaaagtgacgtggctggcatggctgcgccagtcgcctgccaaaccgaactctcgccacatgctcgaacatattgagcgcctgaaatcctggcaagcacttgatctgcccgcaggcatcgagcggcaggttcaccagaaccgcctgctcaaaatcgctcgtgaaggtggccagatgacgcctgctgatctggcaaagttcgaggtgcaacgacgctatgccacgctggtagcgctggccatcgaaggcatggccaccgtcaccgatgaaatcatcgaccttcacgatcgcatcatcggcaagctgttcaacgcggccaagaacaagcatcagcagcagttccaggcttccggcaaggcgatcaacgacaaggtgcggatgtatgggcgcatcggtcaagcgttgattgaggccaagcaaagcggcagcgatccgttcgccgccatcgaggccgttatgccctgggacaccttcgccgccagcgtcaccgaagcgcaaacattggcgcggcctgccgactttgatttcctgcaccacatcggtgaaagctatgccacgctacgccgctacgcgccgcagttcctgggcgtgctcaaattgcgggctgcgcccgccgccaagggtgtgctcgatgccatcgacatgctgcgcggcatgaacagcgacagcgcgcgcaaggtgcccgccgatgcgccaaccgcattcatcaagccgcgctgggcaaagctggttctgaccgacgacggcatcgaccggcgttactacgagttatgcgccctgtcggagctgaagaacgcgctgcgctccggtgatgtctgggtgcagggttctcgccagttcaaggacttcgacgaatacctggtgccggtcgagaagttcgccactttgaagctggccagcgaattgccgctggcagtggccaccgactgcgaccaatacctgcatgaccggttggaattgttggaggcgcaactcgccacagtcaaccgcatggctgcggccaacgacttaccggatgccatcatcaccaccgcgtcaggcctgaagatcacgccgctggacgcggcagtaccagacgccgcgcaagccatgatcgaccagacagctatgctgctgccgcacctcaaaatcaccgagttgctgatggaggtcgatgaatggacgggcttcacccgccacttcacacacctgaagaccagcgacacggccaaggacaaaaccttgctgttgacgacgatcctggccgacgcgatcaacctgggtctgaccaaaatggccgagtcctgccctggcaccacctacgccaagctgtcttggctgcaagcctggcacatccgcgatgaaacctattcgacggcgctggccgagctggtgaatgcgcagtttcggcaacccttcgccggcaactggggtgacggcaccacgtcatcgtcggacggccagaacttcagaaccggcagcaaagcagaaagcactggtcatatcaacccgaagtatggaagcagtccaggacggactttctacacccatatctccgaccagtacgcgcccttaagtggcaaggtggtcaacgtgggcattcgtgattcaacttacgtgcttgatggcctgctgtaccacgagtcggacttgcgcatcgaggaacactacaccgacacggcaggcttcaccgatcacgtgtttggcttgatgcatttgctgggatttcgcttcgcgccgcgtatccgtgacttgggcgaaaccaagctattcatccccaagggcgatgccgcctatgacgcgctcaagccgatgattagcagcgacaggctgaacatcaagcaaatacgcgcccattgggatgaaattctgcggctggccacctccatcaagcaaggcacggtaacggcttcgctgatgctgcgcaaactcggcagctacccgcgccagaacggcttggccgtggcgttgcgcgagctggggcgcatcgagcgcacgctgttcattttggattggctgcaaagcgtggagctgcgccgccgcgtccatgcggggctgaataagggcgaggcgcgcaacgcgctggccagggcggtcttcttctaccgattgggtgaaatccgcgaccgcagttttgagcagcagcgctaccgggccagcggcctcaatctggtgacggcggccatcgtgttgtggaacacggtatatctggagcgtgccaccagtgctttgcgtggcaacggcacggcgctggacgacacattgttgcaatatctgtcgccgctggggtgggagcacatcaacctgaccggcgattacctatggcgcagcagcgccaaggtcggtgcggggaagtttaggccattgcgaccgctgccaccggcttag

SEQ ID NO: 229562 - DNA, 2985 bp, Klebsiella pneumoniae; identical to SEQ ID NO: 86716

SEQ ID NO: 229563 - DNA, 258 bp, Klebsiella pneumoniae; identical to SEQ ID NO: 86715

SEQ ID NO: 229564 - DNA, 1479 bp, Klebsiella pneumoniae; identical to SEQ ID NO: 86714

SEQ ID NO: 229565 - DNA, 828 bp, Klebsiella pneumoniae
atgaataataccgttattgcctgcgttgacggttcgccgtcgacccgagcggtttgtgaatacgcggcatgggccgctgctctgctggattcacctctgtcgctgctgcacgtactggagaaagatgcgcatcctgccgtgtcagatttgaccggaagcatcggcattgatagccaggctcatctcaccgaagagctggtgaaagttgaaggagagcgtagtcggttattaatggcgcagggcaaagccatactggctggctgtgcggagttgctgaatgatgccggtcatgctgatgttcaattactgcaaaaacatggcgcgtcggatgaaatcctggctgatttaggggatgttcgcctgatggtgctgggccgccgtggaacgcagaacccggttggcagccacctagaaagaattattcggctgcagaaaaaaccggtacttatcgtgccggaggcttattctacaccgaccaaagttatgttcgcctatgatggcagcgatgagagtcgcaaaaacctgacgcgcctgacacttagcccgctactcaatggtctggtttgccacatcgtgatggttaagggggatacacgaaccttgcaggaagcacagaatgtgctgcaagaggctggcattacgaccgaaagccacatactggaaggtacatccgttgctgatgcgctctgccgttacgctaatgaaaacggcattaacctgattgtgatgggtgcctatggccattcgccattgcggcgattctttatcggcagcaacaccaccgccatgttggaaaaaacacaaattccactcttaatgctgaggtga

SEQ ID NO: 229566 - DNA, 996 bp, Klebsiella pneumoniae; identical to SEQ ID NO: 26737

SEQ ID NO: 229567 - DNA, 969 bp, Klebsiella pneumoniae
atgactaaatcacctatcaaatgggctggcggtaaaacccgcgtcatgccgcagctgctgatgcaactgccgaaagccgattgtttaatcgagccgttcgttggcagcggtaccgtgtttatgaacacggaataccgccgttacatcctctgcgatagcaatcgcgcgctgatcaatttctttcgtgtgctgacttccaacaccgagcgactgattgatacagctcgcggaattttcctgggtggcaataacgaagagcaatattacaagcgccgtgcgctatttaactccatgcagtggagcgatacgggcaaggctgatactgctttactttatgccgctttgtttctgtatctgaaccgacattgctttaacgggatatatcgcgtcaatcagatgggtgatcataacgtcccgttcgggaaatatggcgcaccttactttccgactgacgagatgcgccgctttgccgaaaaggccaacgacacaaaagccgttttcattgatggcgattttcgtcacaccatcccttacgttatgcagctggcatatgacgcggttatttactgcgacccaccctatattccagccagcaagacagccaacttcactgcctacggcaagccatttaccctggacgatcaccgcgacctggttgcaaccctgctcgatgctcatcgccagcagggcatccgcgcgctgatatccaacagcgataccccggaaacccgcgagatctactccgctttcaagctccatgccttcagcgtccgccgctctgtcagcgccaaaagccgcgatatggccggtgaagtgatcggcgttcttcgccgcgatgtgggttgcaactctggcgcatgtggagcttggacgagcgccactgaacatctgcggccggcggcgatgtggatcgggtttgacccggccgccggattcgataacggggagccatctgatgaacacgcttga

SEQ ID NO: 229568 - DNA, 2607 bp, Klebsiella pneumoniae
atgtctgattcttccgctgtagcctgggagtggaatgctaaacggcaggccattaacccaaaccacgtcgctgatcctgaaattgagtatctcaccccaaaaggcgagcggaagatgctcgcctatggtgatctcgttgatgcggcttaccgttaccccatgcgcccgcgcgaaggggaggcgcgagaagcatttgaccgtaaaggccacgccagctatctccggcgccgggtgcaaacgctcccggcatttatccgtaagcgtttcgcccagcaccttgaaaacctcgaacgcaacaagccaaaagatgcggtgcgttggttgttaggtaccttcgagcgtcatgttttacgccgtattgatgcggtgaatgcgcaatacctgcctcaaaacaacctgcccgcaattcttatcccgctgcgagatgaattccatctgctgccgtgggccgataaaaagcgcctgaaacgactggcttataagctcgccaacctgatgaaaagcgagtttatgcgcgagtttgattttcagtatgagaaaaccgctgatgttgagttttccacgctttacgcatatggctttatcgccagcaaagcgacggtgctcaatattgcgatcccgggctgggataaatattgcgatgaatcacttcaggccgaagatgcactgcgtgctattgcgcgccttcagaaagaaaaatggtggctgagtaaaatccgccgtatccatgatcgctggcgcgaacacctcatgattgcaacgggttatgtcagcaaggtggcatcgccgtattgctctgatccctgcttcagggagtggatagctcagaagaaagcaaaccttgaatttcttaatgcgatggagctggaagaccaggacaccggcgagcgtagttctttgctggataaggtcatgggtagcgtatctaacccgaagatcgcgcgccatgagctgatggtacgcatgcgcggttttgaagatatggctaacgaaatgggcctggtcggcatgttctacaccttgactgcgccgtcgcgttatcactcaacgcatgtgcaatccgggaagcgaaacgataaataccgcgacgccagcccgcgcaaaactcagaaatacctctgcaaagtatggtcgcgcgtccgtgccaaatgggggcgcgaaggcattcgcacctttggttttcgtgttgccgaaccgcatcatgatggaaccccacactggcacctgttgttgttcctgcgaccagaagaggctgagtacgccacagctattttccgcaaacacgcgctgcgtgaagacggtggcgagccaggcgctcaagagcaccgttttaccgtcacgccgattgatgaaaaatttggctcagcgacgggatacatcgcgaaatacatctcaaagaatatcgacggttacggcatggatggcgagttagacgacgagtccggccagccagtcaaggagatggcaaagcgcgttcgggcttgggcttctcgttggagcattcgccagtttcagcagattggtggggctcccgttactacctggcgcgagctgcgccggctgggtagccgtgagctggtattgcatccggaacttgaagcggcccgcgcggcagctgatgcgccggactggccgggatacaccaacgcccagggaggcccatttgttccgcgagattgcctgcgcgttcgcctcaactacgaatacaccgaggatggaaatgattatggtgacacggtcgccaaaatcacaggtatctattgcccgtattcgggcggtgattctgtcatttttacccgcaccaccgattacaagattgtgccgaggagtaatccgtcgccggtcgagaatttgaccttagaaggccgcgcagcggcccctcggagttctgtcaataactgtacggggcgcgccggattggacgaaaaaccaccgtcagaaactgcggtgccagctgataaaactccgcccgacgacagttcagtgacagaacttccgctgaatatcgatgttttgaggcgatattcacgccagcaaaggcaggagatcaccagcaggctaagaaaatcctcccgcgaaagctcagatcaagccttcacgcgcaccgcgcgcggcctgcgcacgtcgattgatgacgaaagcgcgctgaaatgggggccaaaagttatcgccgcgaaagatatgagcctgacgccagaagaggccgagcggcgctggcgcgagcagctgcggctcgaggcggaacggcgcgcagataactacgcggcggcggttgcggagtatcagaagaaaaaaacagaggccgcattgcgccaggcgcagcaaaaagaagcgacgcagaaacacggcatctccgaagaggtgatcgccagcatcgccgcgcagctccgtgactgtcggattttcgttagtgatgacgtcgtgcggtcaatagccgacggcgcccgcgttcgccacggcggccacctgctcgctgcggataatggccggttgcacgaagtgaaggtatggcacgcaggcgagaaagataaaccaacctccgaatacatggcagtgcgtgacctgatcacgcgctggagtaaggttgttaaccgaaaaaagaattga

SEQ ID NO: 229569 - DNA, 1380 bp, Klebsiella pneumoniae
atgaaaattgtgatccaagaaccggatttgagtaacggttttgatgaggcagatatttttaatcgtaaaaaactatttcaccaaatagtaagattgatacaaagctctccccaaaagagtcttgtttttgcgcttgatgataaatggggcaatggtaaaactacatttgttaaaatgttccaatccgaaatagaaaaagaagataactatgcaatagacgcaatatactttgatgccttcgaaaatgattatcaaagtgatccgtttatatctttatcatctcttttatattcacacgtagaatcaaagaaaaccaaaggaaagaaggttggagataaaattctttcagggataaagaaagttggctccaatctcttactcaacggttctaaatttgcgctaacagccatctctggtgggatcatatcatccaataaaatagatgggataggagaagtcataaccgattctttaaaatcagacgttgagggttttattgaagacagaataaaatcaataaataatgaaaaaaaagatataaacgatttcaaggaaagcttaaaggaaataatcacagtaaccaataataaaaccttgattataattgatgaactggatagggcaaggcctgattatgcattagatcttctcgagcgaataaaacatttattttcagttgatggtcttgtttttcttttggttatgaatagagaacaattcgaaaaaagcatttcatgtagatatggaaatattgactctagaatgtatttaaataaatttattcattactggttctcacttcctaaaaaaaacgtatcctccaagcatgtggttttaggtaaatcaccaacaacaaatttcgactatatatcccatgttcttgaaaaaagtaacatcacctcttttcacccctcaggggtttttattagaatactatcattcttaattgatagaaataacgcttctttacgagaagtggagcgatgcctatccgttctcgctgtagttgacaaccctaaagagtttaatgcgattacaaataattattataatgctgggttggcactagttgtatttctaaaagtatttaacccagccttgctggaagagttgatttttcgtgaaaccaattattctgatttcatgtcaaaattaaaaaccaacttccctgacacccaaagcaatataatcactcagagtcacctatcttttttaacatcattagttagatatcattttttaagcaatgaagaattgagacatatgcgcttaagtaaagatcagtggattatagacattgagaaaacaacgattcacaatcttagaacaatgataattgaagatattgcctcgtcaattgataacatgcatattaattaa

SEQ ID NO: 229570 - DNA, 396 bp, Klebsiella pneumoniae
atgagagcgacagccattcttgccatcgtgatgtttgccctgctgatcgccgctgtcagcggccttgcgtggcaaagccataagcgcgaacaggcagagcaatcactgaccggcacccgggaagaactgaaacagaccggcaacgtgctggccgaggtcagggcgctacgccaggacgtcaaccaggtggaagccggactgaagaaattaaaccagcagcgcaccgcaacgggagagcaccgacgtgaaaacatcaaaaccgcactggccggcgacctctgcgctgttggtactgtgcgcgctactgtcgctgacggcctgtaccagcgagcagaagagatcaccgccgcagattattcaggagcccttacccgaaagcctgacggcaaaaactga

SEQ ID NO: 229571 - DNA, 564 bp, Klebsiella pneumoniae
atgcgcagcgccgaaggggcgacagccaggttgtccgccatcacggtagcgctacgcaccctgtggacgccggttgcctgcccggtggacttactgccgtatctggcctgggcgctctccgtcgatcgctgggataaagactggccggcagaacgaaaaattgcggctatccagcgctcctactggctgcatcgtcggaaggggacgcgcgcagcggtgcggcgggtgattgaagatatgggcttttctgcctcgttcgcggagtggttcgacgctggcgacgagccgggaaccttccggcttgaagtggatgttaacgaggtcggactgacgccgaagaccctggacgaattgaaccgcctgataggtgatgccaaacccgtgagtcgccatttgtcacaactgacgatatccgtcacatcaagaggggaagcacatgcaggcggcaccgagttcagtggggaagtggtgacagtgtatccggcagattatcaaccggatgatgcggcaatttataacggacttttcttttttgacggcaatattcattattcggagagttaa

SEQ ID NO: 229572 - DNA, 678 bp, Klebsiella pneumoniae
gtgggcaacataaacgaaaaggagcagtgggaagacagtgtcccgctgctctcgcgggatgaaaaagttgagggcggattaacgggcgcagccaacgcccaggcgataccgctcgccaaccgtacgcgatttttaaaaatcatttctgattcagcactcaagattgcagagcaggcccgtactgccattaatgccctgcttgctgatccggagaacgccgtcacgtccatcaccatcccggcaaaagattttgatcttgcgtcaggagcagccacttacggtgtggttgctcagcgtatcgcagggtggcaactggcgcacggggccagcgtgtcactgtcaaaggtgattgatttaccctctcactggcaaaaaatgagaatcacccctgtctgggcgaatctcgtcgctaatgacggcaatgtaagtctgtcgggcgaggtgcacagctgggccgccggggagtccttcaaccaaccgccgaccggctacgcgacggttgctgaggccaacgccacgccgtatatcggtgtcgagacagagcttgcactcgaccttcctgtcgacccggcccgtcataccaccatccgtatcacgcgaaacggcggctcagccagtgacacgctggcaacgtccatcgttatcctcgccgtgcggctgtccaaggtagacccatga

SEQ ID NO: 229573 - DNA, 1236 bp, Klebsiella pneumoniae
atgagcgtttatcagagctggcgaacagccatacccgtacccgtggtgctgcgaacctatccgcctaatcctatctacgtggatactgaaaatggttcagcctcaggaaccggcaccattgataagccggtgaatcagctgtctctcgcgctggggctttgttctggtctgccggattacgagatacgtatccgagcgaatgcaaacaacccgattcgacaggagatcgtcgttaacacctcaaaagatgtgatgttgtctggtatcgacggagagccctggcatacatttggctctgaaaaacacacatcaggatggacactaagcgggcagatttaccggaaaaatctggggtacacctcagtgcttcaggtcgtgatcacaacaatgaccgaaacggtcggagacagacacgacttcctgtgcaagctggttcagaacaccgagacgccgaccaccccggcggcgggtgagtatggctactcaggcgggattatttatgtccggctgccggatgattccagtcccaacctgcacaccattgaggtttcaaggcgaaatttcggcgttagtacgattggcttcgggatgctgacgataagtgactgcgtcgcgcgctactgcatgatcaacggcatttcctgcggactgtccacgcaaccagccgggacgggctttctgaccgtcaatgattccgtcgttgaatattgtgcgaatgccggggttggcggaacgggccggaatgagctgatcatctgcaataacgtgaaagcccgacgaatttcgaatgatggttttggtcagcacgcccccgtaggcggtgtcgggaaaatgatcctgaacgggtgcgacggaagctataacggcgataagccgggacaatcggcgcagggagcatcaaaccacgagtttacaaaaatggtactcaacggcgggacgtttaactacaacgtctccggcgggatggtggcgattgaagacgcgcagtgcgatatacacggcgatacccagtacggccctgtcgtgatggatggcaatatgcgactgggtaatactggcgggactatcgccagccaggcgggatgcgcctggctgaacaacgccaccgggacagtgacgggggctgtgacggttaaaaatggtggcggggtaggtgtcagaaaatcggcgactgcctatgttgagggtattggcgaaattatctccacaggaaacgcgctgccagatatcgtctga

SEQ ID NO: 229574 - DNA, 1077 bp, Klebsiella pneumoniae
atgtccggaaatacgtttaacaccattctgaccagtaaaggcgtggaagctattgcgttggctgcggtgagtggtacgccagtcaatatcgcgtttatggccgtgggagatggcgccggaaatgtacccgccccgtcacctgatcgggataatctggtcaatgaaacctaccgcacaagactcaacaggctggttattgccgatcaggccgctaatgttatccgggctgaagcgatcatccctccgcaaattggtggattctggctgcgtgaagcggcgctttacaatgaagagggtgaatgtattgctatggccagcctccccccgtcatacaaaccgttactgactgagggctccggtaagctgcatgccgtcaacctctggattgccgtcagtgacacggcagcggtggagctgaccaccgatttttcggttgtgctggcgacagtggaagagttgaaccgggccaaagacgaggcgaaagactacgccgatgaggtggctggctcactggataccagcatccagcaggccatcacagcggccatcgcagcggcaaagcgtgacttctgggaagaggataatcccgtcggtaccgtgaagttttacgcacagaacgtcaacccaaacgagcgctatccgtggtcggaatgggtgtacaccggcgagaataaaacgatccgcgtggcaaaagcggacggctcaaacgtaggcacgatcggcggcagcgataccgtcacgctccagaaggctaaccttcccgctgtacagattgacgtgaccggcgaaaccagcgaacaggtggaacagaagctgaccaccacgcgcggcggtgttcacaatcatggtggggtggccggtaaagataatccctgggagattggcggcgatgtgcgtcagctctttaacccaaaagagctgggtgtgaccgatgacgccggagagcacgaccacgaagtcacggtaccggcgcacaaacactcgaccagtggtaaaacggcaaacctcggcgagggtaaatcgttcagcgtcgtcgaagcccacactctgctgatgtgctgggcgcgggtggcgtag

SEQ ID NO: 229575 - DNA, 300 bp, Klebsiella pneumoniae
atgtccgttattctcagtaagccggttaagcgcggcgatcaggaaattatcaccatcactatcaccgacaccatcaaacaggcggggtcgctgcgtggtctgcgtctggttgacgtgctgaacttcgattttgatgcggtctccaccctgctgacgcgcaccaccagtccgcagctgaccagcaccgaaattgccgcactggcaaccggtgacttcaccgcgctctgtgaagagatcacgccttttttgacgaaaccggctccgtccgtaccgaacgtggcggagacggggagcgaataa

SEQ ID NO: 229576 - DNA, 462 bp, Klebsiella pneumoniae
atgtcttcgttaaaattctccgttagccgccaggaagcgctccttatcatgatcaccatgttctggggagggacgttccttgccgtacagtacgcggtgagcctcagcgggccgctgttttttgtcggtttgcgtttcgcgaccgccgcgctggcggtgggcctgctttcgctgcgcactctgcgcggtctgacgtggctggaggtgaaggccggggtagcgattggcgtggcgattgcgctggggtatggcctgcagacctggggactacagaccatctccagcagtaaatctgcctttatcaccgcgatgtatgtgccgctggtgccgctgctgcagtggctgtgcctgggacgtatgccgggggtgatgtcctgcgtggggattgtgctggcctttattggtttaattctgctggccgggccggaaaataatctgctggcgcttggcgtgggcagatga

SEQ ID NO: 229577 - DNA, 1980 bp, Klebsiella pneumoniae
atgaaaattacacaaatggagatcaaaggttttaagagctttgataatgtagggcaaactataaatataaattcattcaccagcttaattggagggaatggaacaggtaaaacggctgttctcctcgcattgacaaggatgtttggtgtcaaaagctccgatagaattattcaagttgatgatttttatgttcctcctggagatgaaatcgatactcaagatgaaagagagctatcagttcgtgtaaaattcgaatttgcagacctaaaagatggtgaggacgattcggttgctgatttctttaagcatttaatttcaagtgctgcaggagagatcccattctgtatagcaaaattaaaagcaaaatggacaaagactaatcttgctgagggcgatatagaaagcgatctggtatgggagataggggagtctgaaaaaaatataacggcatatgaaagatccaaaattcatgtccactatgtccctgcttaccgagatcctgcccaacaactgaagcaaacagccggaaccatcatgcaccgtttgataaatgcagtcgaatggtctgaacaaatgggggcaacagttgatgaggttgctgtttcaatcggaaatcagttccaagaagaagttggagtccagacaataacatcttcattaggcagaaattggaaatcccttttcactggtggttacttcgaagaacttcaaattaagccagtagtgaatggtattgaagatgtattaaaacatatcgatactgtatttttaccaagtccagatactcaaccattaccaactgaaagattgagtgatggtatgaaatcattattttatttatctttagttaaatctgcatttgatattgaagatgagataataagttctgacggcaaacaattatcgatatcagtagaagcattagatcctccaaatttaacgataatattaatagaagaacccgaaaaccacctttcaccacaatacttaggaagaatagttaagctgtgtgaagagatatcagaaaatgatcgagcacaagttgttttgacaacacatgcaccatctttacttaatcgggtagaaccggagaatataagatattttcgtcttaatgataataaaaatacagtagtcaaggaaatattattaccaagcaaaggtgaaggcgatgcagaaaatgttgataccttcacatatgttaaggaggccgtaaaagcatatccagaaatttattttgctaaagttgtcatacttggtgaaggggatagtgaagaaattgtaatacctaaaatagcacaagtaaatgggatagagcttgatacttcattgataacatttgctcctttaggtgggcgatatgtaaatcatttttggaaattactcaatgagctttcaattccacatgttactcttctcgattatgattttaggagaggtggtggtggttggggaagaattaaatatgcagtcaaacaattaatttctattggtgcggataaaaatgaattattgagggtcacttcaggaattttaagcgatgaagatcttgaagaaatgcatacgtgggatgagaatccagataatgaatcgggatggatagagtgcctgaaggattataatgtttatttttcctatccctatgatttagattggataatgcttaataaattctttgaggattataagacatttgttccagaaaatggaggcccaagattgccaaaggatgatgatcctgaatataacaagaaagttgaagcagcaatagcttcagttttgaaaaaagaagaaaaagacattgatattaagaagttcgatgactttgaaaaatatttttggtatcgctacttatttttaggaagaggtaagccattatcgcataattatgttctatccaaaatggaagacgataggttaagagataatagtcctgaagttcttgatgagcttatcgaaactgttagaggattactttaa

SEQ ID NO: 229578 - DNA, 486 bp, Klebsiella pneumoniae
atgagtgtggtggaagttttgcgggagtattcagaggtatggaaactatttggtcaaatgcctgattctgccactgtaaatagtgagcttgcttctgtctttcttggcataagcatcaaaacccttgcccgatatagacaaaatgggggagggccaccttatatccaataccaagcagaagatacgaaagcgagaaatcagcgggttctctatgtattaggtgatctgcgagtttggagagatatccataaagtaagtagttcaatgcatggtgctcaggttcgtggcttggcttttacatcattgaccgattttatagaagaacatccttttattgttaaaaataaaatcatccaaaaaaggaaaataaaaaggttaggagttagatattcagatactgacatatacgatgatgtcatcttagggcatatactttgtgtggaagaaacggttttaacaagccaaatatctaataacgatttttaa

SEQ ID NO: 229579 - DNA, 1464 bp, Klebsiella pneumoniae
atgaaaatgacactcaatcagtcgattataatcaataagttatctatcgacgtcaaaccaagtctcgatcaagatgggcgagtagtgtacttacccaacatagacagaaaaccttatattatcactgacagccatcgtgattcaccagtcggtttcggtgtcaaaatcagtgcaacgaaaaagacctatatcattcaaagacgagtatcatcagcagacaatcgacctgcaacaggtggcaaggcaccaaaacaggttattagatctaccattggtaatgtctcggatttcgccagcattgatcaggcacgcgagactgctcgcaaattcgttgaaacgatgaagttgacgaaaaggaatccgaatgcagtgaagcgggagtctgatgcttctgaactcactatcagtgaagtgtttgctcaatatcgtcaacaccttcttggcaggtctaaaccagctaaacccaacacacttaatgtcctgaacaaagcagaaaacaggctttctgaatggtcagggcttcgagtgaaggatttaacaggcaatgaaattcttcgtaagtttgatgaaatcgcaagtagagcaaggacagcatctgagcaaacattcaggtgggcaaatgtagctgtcagacatgcaatcgagatcgaagcaagtaatgcacagactcaacaaagacaaccatcactgtcatacaatccattttcaattctaaaagtgcagaaaaaatttaggactcgatcagaactggaagatagctacaaagcaaaaggtgtcagaaatccgctttcgccaaaagatactcttggacgatttttaacagcattgtacaacaagagaagcttcaaccggcttgggtgcgattatctgctacttaccgttctcttaggtgctcgtaaggaagaaacagcttctctgtgttggcgagagtctcttacaaaggaagaagctaaaacgacaagctatgttgacctgagtaacagaactatccgtttttacgacactaagaatcgaaacgatcacgagcttccgatttgtgatgctgtcaaaagaattttggaagatagaagagacatagtaaacgatacggtaacccggaaggaaaaacagaagtgggttttcccggcccgttcttctcgaagtaaagttggtcactattccgatagcaaaagtctaagggaatatatctgccaagaggcgggaatcctgaagcttggtatgcatgatctacgaaggacatttggtagggttgctgaagaacttgtttcatatgccgtcgttaagagactgctcaatcacagaaatacaacagatccaacagaaaggtatgcagaacctgatcaagaacggatttttgaagcattacaaaggattgagttgcatatgcttatgactgctcctaaattatacaatgtgttacttgcttcggctaagtatcctccattacctgaaacgagggagtga

SEQ ID NO: 229580 - DNA, 1428 bp, Klebsiella pneumoniae; identical to SEQ ID NO: 215351

SEQ ID NO: 229581 - DNA, 2898 bp, Klebsiella pneumoniae; identical to SEQ ID NO: 220608

SEQ ID NO: 229582 - DNA, 606 bp, Klebsiella pneumoniae; identical to SEQ ID NO: 107131

SEQ ID NO: 229583 - DNA, 2088 bp, Klebsiella pneumoniae; identical to SEQ ID NO: 119357

SEQ ID NO: 229584 - DNA, 951 bp, Klebsiella pneumoniae; identical to SEQ ID NO: 119358

SEQ ID NO: 229585 - DNA, 1308 bp, Klebsiella pneumoniae; identical to SEQ ID NO: 119359

SEQ ID NO: 229586 - DNA, 396 bp, Klebsiella pneumoniae; identical to SEQ ID NO: 95944

SEQ ID NO: 229587 - DNA, 351 bp, Klebsiella pneumoniae; identical to SEQ ID NO: 119361

SEQ ID NO: 229588 - DNA, 654 bp, Klebsiella pneumoniae; identical to SEQ ID NO: 119362

SEQ ID NO: 229589 - DNA, 435 bp, Klebsiella pneumoniae; identical to SEQ ID NO: 119365

SEQ ID NO: 229590 - DNA, 546 bp, Klebsiella pneumoniae; identical to SEQ ID NO: 119366

SEQ ID NO: 229591 - DNA, 744 bp, Klebsiella pneumoniae; identical to SEQ ID NO: 25800

SEQ ID NO: 229592 - DNA, 219 bp, Klebsiella pneumoniae; identical to SEQ ID NO: 119369

SEQ ID NO: 229593 - DNA, 684 bp, Klebsiella pneumoniae; identical to SEQ ID NO: 119370

SEQ ID NO: 229594 - DNA, 258 bp, Klebsiella pneumoniae; identical to SEQ ID NO: 25801

SEQ ID NO: 229595 - DNA, 1275 bp, Klebsiella pneumoniae; identical to SEQ ID NO: 119372

SEQ ID NO: 229596 - DNA, 357 bp, Klebsiella pneumoniae; identical to SEQ ID NO: 119373

SEQ ID NO: 229597 - DNA, 471 bp, Klebsiella pneumoniae; identical to SEQ ID NO: 25802

SEQ ID NO: 229598 - DNA, 249 bp, Klebsiella pneumoniae; identical to SEQ ID NO: 119381

SEQ ID NO: 229599 - DNA, 564 bp, Klebsiella pneumoniae; identical to SEQ ID NO: 119385

SEQ ID NO: 229600 - DNA, 411 bp, Klebsiella pneumoniae; identical to SEQ ID NO: 119388

SEQ ID NO: 229601 - DNA, 222 bp, Klebsiella pneumoniae; identical to SEQ ID NO: 119401

SEQ ID NO: 229602 - DNA, 435 bp, Klebsiella pneumoniae; identical to SEQ ID NO: 119402

SEQ ID NO: 229603 - DNA, 312 bp, Klebsiella pneumoniae; identical to SEQ ID NO: 119403

SEQ ID NO: 229604 - DNA, 537 bp, Klebsiella pneumoniae; identical to SEQ ID NO: 119404

SEQ ID NO: 229605 - DNA, 141 bp, Klebsiella pneumoniae; identical to SEQ ID NO: 21635

SEQ ID NO: 229606 - DNA, 366 bp, Klebsiella pneumoniae; identical to SEQ ID NO: 119406

SEQ ID NO: 229607 - DNA, 1980 bp, Klebsiella pneumoniae; identical to SEQ ID NO: 119408

SEQ ID NO: 229608 - DNA, 501 bp, Klebsiella pneumoniae; identical to SEQ ID NO: 119409

SEQ ID NO: 229609 - DNA, 780 bp, Klebsiella pneumoniae; identical to SEQ ID NO: 119410

SEQ ID NO: 229610 - DNA, 1164 bp, Klebsiella pneumoniae; identical to SEQ ID NO: 119411

SEQ ID NO: 229611 - DNA, 261 bp, Klebsiella pneumoniae; identical to SEQ ID NO: 83582

SEQ ID NO: 229612 - DNA, 3216 bp, Klebsiella pneumoniae
atggcgaaacctgaaattgcaactgaaagaacccgtctgagtattccctttgacgatcgccaacgtgcaatacgtgcggccggcaaactggctgatggcagtaatgctctggactacgtgaaggaagaaaaggtgtggtatgcacagccgggggccaacctgagccggctgaaagagtggatttttgaccccaataaggtgatcgaagaaccgcccctggatattcaggccattgaagatgaatttacggcgtggcttgaagagcgcggtgccattatcaaagaccccatagagttcgatggccagaagcattatgtcgatacagtggacggtaaagctggttcaagaaagggggtgtatgccgctttcctggatggccggcctgcagggtggtacagggactataagaacggtggtgaaattcagaaatgggtatctaccggcgcagcccctaaccctgaacaaatggccatgctccgtgctgatgctgcggcaaggcgtgaacaaagagctgcagcgcaagcggataagtttgatcagaccgctaaccggttgatggaagaatataaccggcttccggatgccacgggagatctggcatacctgaaaaacaaacaggtcattgccgctaacggccttaaagctgatgagcggggcaacgttgtgatccccctgtttaatgctgatggcgagttcaggacccttgagcgcatctggtccgacggtagtaaacaccttgaaaaagacggccaggcatgggggagttttttcgttgtgggtggccaactgaaggatggtgacaacctgctttatgccgagggatatgcgacagcagccagtatcagcgaagccatcaatcagcctgtgatcatgacggttaatgccggcaacatggtggaagttgctggccgcctgaaagacgcctttccaaacagcactcattacttccttgctgacaatgacatttataaagacgagaacgttggactagaaaaagcgacagaagctgcagagctgactgccggccatgttctggtccctgcctttagcaacccgaaagaagggcttacagactacaacgatttgcatgtctctgaagggctggagcaagtcagattgcaggtagaaggagccattaatcaaataaacagggtagacactatgccgactgataacccgaacattactgacgttaatcacagctcgactgacagcgctgccgttgcagcccctgaaaatgccgcgccggtggccagcgcccctgcagctgctgaaccggtggaagccgcgccggtggccagcgcccctgcagctgccgaaccggaggaaaccgcaccggtggccagcgcccccgcagctgccgaaccggaggaaaccgcgccggtggccagcgcccccgcagctgccgaaccggaggaaaccgcaccggtggccagcgcccccgcagctgctgaaccggaatacgccgcaccaacagatcgagacggtgatgatgaaaagagtaatagcgccagtgatcttgaggcgtatgccgctatgatggcctttggcggtgaaacaactgacaccgctcagcaaaagcctgaagggatagcgcccagcgaacctgtagctaataccgccccggctgaaaatgaaaccgaggagaagaagaaaaaaacaaacgaagaactggaaaacggcatacgctgggcaaccaacgataatgcagaaacgcccccaaaagaacgtatagacctggaagggttaattgcccggtttgggtacagagcagagaaagactatacggcgtatacgcttgatgggcaggatgcgttttacgattacggctcacatctgcgtatggctacccctgaagccagccagagtgacgagatgatcctggcggccgttcttaccgcggataagcaacatcatcgtggtattgaaatcaccggcagtgacgaatttaaagagcgagtgtttaaccttatcagtgaatacaacattgaggtgaaactgactaacccagaacaaagggttaaattgctcgaactcaaaaaagcaaatgaaacagcaaaagaaacggcaaaagaaaatgttgctgattcaaaagcgaataagcaggaaggggtaaacgaaaaggcaaattcatcagttcagcaaaatggaatgcgctgggaagaatcggcctctgtacaaccgaagaagcagaatgcatctgatactcaaaaggaagataaagctgcgggtgaatcctgggagaaaggcgttatcgtcgcgcatggacgtgctaagtatgagtggaaagatgatgaatccatgaactactttgtcaccctcaaaaatgaacatggagagaagacactctgggggaaagaccttgagagagcggttaaagatgctggtgtagacaccgaacgtcttgttacggtcagaaagctgggatttgtggatgttgaggtgaatgcacctgtccgtgatgaaagcaacaagatcgttcgttatgaaactatccagaccaaacgtaatgagtgggaagtaaaacctgtatacccacagccaacagcagggaatgaacaggcctataagccttctgaactggttccgtatgatgctgcaaccttccagaagctccgcacaacaattcagcagattaccggtgttgatctcagccgtgaggccgtgcctgaaaaagaactgtattggttcctgccgaatggtaagccagctcctgaaagcatgacaaaacccacaggctataaactccctcaagagtcaaaaaccgcgggtacacctttgctggtcgcaccgcataaaaaaggcgaacgacctgattattaccttgttgagtctcgtaaaggattcatgcaggggatcgcaaaggataaggaatctggcgagtaccatagcgtaattggtaaagtgaacaagcgtattgataaagatggaaactggaaaacgtatatgacactttcagcaatcaataaaaattctgaaagtggaattgttttgcacggatacggccatgttgatcagggaggtaaaaacctgctttacaaaaacacaattgcaaatgaaaaacagcctcagcatttacaaccggcctcagatgaggtaaaaaacaaaacagtaatgaagcagctttttcatccttctaatgctgcaaaaagaaaagatgatgaaaggagagaacagactcatgcaccagtcgcaaagtcagcgcctcggccataa

SEQ ID NO: 229613 - DNA, 537 bp, Klebsiella pneumoniae
atgatgaaaggagagaacagactcatgcaccagtcgcaaagtcagcgcctcggccataaaacaaaaaccctactcgtagcagtagggttttcctgcatttctgtgagctcatttgcagccacacagacctgtgcagcatacgaactggcaaaagctggtgctgatgctgcctataaacaggaggttgaacggattaacaacgccgctaaaagtgaatccagtacatctgattctctcggacagtgcctggggtcgctatcggtatcactaaaaatccctcagtttccgtctatcagcgacatcattgataaggtgaaggatgaggtatgcaatacggttaaatcgaagattaatgagaagtgggggagcctgactaatacgacgctggacccgtggtcaacgatttcatcccgactgccagatacgtcaggtatcctgcccaacgcatcttctaagaatgtgcaattaaacaatccggcagctgcgagtggaagtggtgaggatgcaaacagtgatgcattcccgttccatttgtaa

SEQ ID NO: 229614 - DNA, 411 bp, Klebsiella pneumoniae; identical to SEQ ID NO: 119416

SEQ ID NO: 229615 - DNA, 714 bp, Klebsiella pneumoniae; identical to SEQ ID NO: 119417

SEQ ID NO: 229616 - DNA, 159 bp, Klebsiella pneumoniae; identical to SEQ ID NO: 147216

SEQ ID NO: 229617 - DNA, 432 bp, Klebsiella pneumoniae; identical to SEQ ID NO: 184501

SEQ ID NO: 229618 - DNA, 1350 bp, Klebsiella pneumoniae; identical to SEQ ID NO: 119419

SEQ ID NO: 229619 - DNA, 705 bp, Klebsiella pneumoniae; identical to SEQ ID NO: 119420

SEQ ID NO: 229620 - DNA, 531 bp, Klebsiella pneumoniae; identical to SEQ ID NO: 96007

SEQ ID NO: 229621 - DNA, 390 bp, Klebsiella pneumoniae; identical to SEQ ID NO: 119422

SEQ ID NO: 229622 - DNA, 495 bp, Klebsiella pneumoniae; identical to SEQ ID NO: 119423

SEQ ID NO: 229623 - DNA, 3051 bp, Klebsiella pneumoniae; identical to SEQ ID NO: 119424

SEQ ID NO: 229624 - DNA, 1209 bp, Klebsiella pneumoniae; identical to SEQ ID NO: 119425

SEQ ID NO: 229625 - DNA, 651 bp, Klebsiella pneumoniae; identical to SEQ ID NO: 119426

SEQ ID NO: 229626 - DNA, 2181 bp, Klebsiella pneumoniae; identical to SEQ ID NO: 119427

SEQ ID NO: 229627 - DNA, 654 bp, Klebsiella pneumoniae; identical to SEQ ID NO: 119428

SEQ ID NO: 229628 - DNA, 231 bp, Klebsiella pneumoniae; identical to SEQ ID NO: 25792

SEQ ID NO: 229629 - DNA, 1056 bp, Klebsiella pneumoniae; identical to SEQ ID NO: 119430

SEQ ID NO: 229630 - DNA, 789 bp, Klebsiella pneumoniae; identical to SEQ ID NO: 101531

SEQ ID NO: 229631 - DNA, 858 bp, Klebsiella pneumoniae; identical to SEQ ID NO: 101532

SEQ ID NO: 229632 - DNA, 828 bp, Klebsiella pneumoniae; identical to SEQ ID NO: 28366

SEQ ID NO: 229633 - DNA, 213 bp, Klebsiella pneumoniae; identical to SEQ ID NO: 25793

SEQ ID NO: 229634 - DNA, 1656 bp, Klebsiella pneumoniae
atgggcattatgatacagccaacaaaaaaccgtttcggcgtttacctcgtccgtaaggccgtccccaaacacctgcaaggcatcctaaataaacgtgagatcaagttcacccttgataccaaagacgtgagggaggccagagaacgtgcacccgcaaaaatcattcagatcgacatgatgcttaggctggcagaaaagcagcttgaagcggaagagtccttaactgatgccgatatagagatgatcgctggtgtatgggcttcacgtaccatgcagaatggcgagctaatccgggatcgatacctcgttgaagatgttctcgatggtaaaacaggaatgttccactcgccggaaaacgacatcattcacgactggctggaagaccgcgaacgcaagccccgctacaagtcagaaacatggcaggcagaacgtgacgaatccatctgcaaactgatggttgtagagctggatgaagctctggaatacacgcccctcattctcaccccggcctggcgaatccgtctggcatggcgactggctgaacggcgtagcgatatcaccaatgcttaccttctgaatcttcgcccccagcactacgccagaagcaaaggtctggacgcccttcccgcagaaagacccgaaactctcaccttcgcagacctgttcgaacgctataaagatcacgttatgcgtcatgaaccactgcgtgcagaaagtcggattatcgcctacacaacatcggcaaatcggttcattgagtttattgggcagaaggccgtagaggacatcaccgttactgacctcgccgacttccgtaacctgctcgaaaagctcccatcccgtccttctaaggcggtacggttactgccactgcacaagcaggtggacgctgaaggtgaaaaaatcagccctgtccgtgttgaaaatatgcttaaagagctgtcgtcggtctttcgcgtcgcggtagaggacggcaagctaactgagaacccgttaggcaagctgaagaaacgtaaggtcgtcgctggcccggcagtcgtcaggtctttcagtcgcgatgaaatcagccgtatcttctctctgcccgtcttccacggtgaagaaacgccgtatggagctatggcgtactggataccgataattctctactactgcggtgcccgcgttgaggaaatcgcccagctccgtaagggtgacatcgtggaggtggacggtacaccctgcttcaggctgacaatgggtgaaggccagtcgatcaagatgggtaacacacgccagttcccgatacatagccacctgattgagctgggcttccttgatttcgtgcagtccagcaccaatcagctctttgccgataagtccgaagtgaaccggaaatattcatacaactacggtcgctggtgggggaactacattcgggaacacggcctgacgcggcagggcatcaagccgacccacagcttccgccatacgctcgttacgctatgccgggatctgaacattcgcgaggaaatccaggacagcattctcggacataacgaaaattcatctgacagagcgaaggccagtcacggttatggtgaaacaagcgtacaggcccagcgtagcgtcatcgagcaaattccaaggctgaatcttcagcggagccacacttaa

SEQ ID NO: 229635 - DNA, 258 bp, Klebsiella pneumoniae
atgaattacctaagattgattatcgatcacgagaaacgtgccactggctataactgtgcgattgatactgagctggatgaactcccggcagccatcaccgaagccgtctacaagcatgtgaaggactaccggggcggcctcacctatgaccgggcagatttcatcatgcgtgacctcctgtggctcctgagcggctatgacgtcaaggctatcgttaccgatcatactcagcgtgaaacacaggtttatccattctga

SEQ ID NO: 229636 - DNA, 2448 bp, Klebsiella pneumoniae
atgttgctcaagtttgatgagcttaatgctctccctatccctgacgttttcactaacgtcactggtctcggcaccaaatcctacggcactgattgcgttatacctgaagatgacacctgtccgctctgtggtcatcataactgcttccgcctgcacaccgacaccaatcaggcacactgctattcctgcggcgaccactccagcgtgattgacctggtgatgaaactctgtgacctgtcatcaccggtggaagcagcaagcgctatcacaaaaatggagttcgaaccatatactccggcgacagtcgtccaggcagaaccagagccggatacccgtaatctggagcgggtggcagaaatcaacgcggcaaccgctgagtattatcaccgaaatctgctcggtaagatggatgcactcgtatatcagacggtaacgcggggtcataacgttaaaactttgatggtgactaaggtcggatatgctgatggcgggcttgtagcggcactacgtgagcgtttcagcgaagaggaaattctggaaacaggaatggcccgcctccagaatggtcgcctagtagattttgcacctgccggggtgtatgtctacccgcatttcgtcgatgggaggggcgtccgtttcacctttaaagatcccactggtaattttaagttccagcagccgaagcggtactggttatcaggtgctttttggtacggacaggactcgctggaacgttctggtgccatcgcactggtcgaaggtgagaatgaccgactggcgttgatggaagtgtatgatggcccggtactggcttctattggctccatcagtagtgaacaggtggggttcatcaaatcgctgggccgcgaggtgattaccttcttcgacaatgacgacgctggggaccgttaccgccagaaattcgatgcccgtcacattatcgtgccggagcggggcggtgatattgacagctatctccgtggtggtggtgactttatggctctgctcgctgtgttcacgccgaagtttgaggtcatcaagccgctactgcctggtgcctgtgggtctgaaagcttcaacgataccggtaatgccaaccgtatggcccgtctctacggacccgatctgcggtatatccgtgaaaccgatgcgtttatccagtgggtagagcacagctgggttccggccggagtgcaggtgctggagtttgccaagcggactgccgctgcggtgcttgccgaaggtcaggtaatgatcgcatccgatgacgagaatatccgtaagcgtggagcggaccaggttgcctatgccaatcgcctgcataacctgggactcatgaaggcgatgatcgagctggtcaaaccgaaggtggagattcgcacggtggaactggacgccgacccgatgctcgttcgtgtcaaaaacggtgtgattgacctcaagatgcagcgctaccgtgaaaaccgccgtcaggacctgattaccagtgtctgcccggtggaatatgacccgaaagcggccagtcttctgtggctgcggttccttgcagagattacctgcggtgatgccgagctggctgcctttctgaagcgtcttgtgggctacatgctgacgggccggaccgatgaacaactcctgtttttcttctacggtcacggcagcaacggtaaatcgacgttcatccagattattcaggccctgatggggagctacgcgacgcagattaacagtgacgtcctgatggctaaccgcagcgttggtggtcccaatgcgtcactcgccaaactgcccggtaaacgtctggttgttgccaacgagctgcccgaaggtggtcgcttcgatgacatgctcattaagtcgatgaccgggggcgacacgctggttgcccgtcaggtctacggcaagcatgaaattgagttcaccgctcagttctcgctggtgattatcggcaaccataaacctgcgattcacgatatgtcacacggaatgtggcgtcgtatgtgcctcatccctttcgcggctcagttctcggcggaacaggcggacccgacgcttccggctcgtttgctggctgaactgcccggcatccttaactgggcgctggagggggtcgcagagtggcaggagcacggcctcaagcgctccctcccggccgcagtagtcaaggctaacgacgattaccgcgaagagagcgacctgctgggtgagttcctgagcggctgtatccttcagcctgacgcctacaccccggcgacggaactttaccaggcattccagacgtttgcctgcgagggcaatgaatggcgtatgacccaacgtgtctttaacaaaaagatggctgaacgtggcttcaccaagcttcgtcgtgacagtaaggccggtttccgtgggattgctctcactgccgacatgccacgcgtgtttgagtcggtgaagctgaccgtgtag

SEQ ID NO: 229637 - DNA, 432 bp, Klebsiella pneumoniae; identical to SEQ ID NO: 203538

SEQ ID NO: 229638 - DNA, 198 bp, Klebsiella pneumoniae; identical to SEQ ID NO: 162130

SEQ ID NO: 229639 - DNA, 540 bp, Klebsiella pneumoniae
atggcaattataggatacgcccgtgtttcgactacggggcagtcgctggagcagcaactgacggcactgacagagtgcgaaaaagtttttcaggaaaaaatcagcggcagtaaaacggataggccacagctacaggcaatgcttgagttcgcccgctccggggacgtcctgaaagtaaccaagctggatcgacttgcccggaatacccggcacttgctggaaatcacagatctgcttcattcaaaaggggtaacgttacagatacagaaccttggcatcgacacggccaccccgactggcaagctgatgctgaccatgataggggccatcgccacgttcgagcgggagatcatgcttgagcgtcaggccgagggaattgccctggcgaaggctaaaggtgtctataaaggccgcaagccaaccgccatggaaaaacgagacgaggtgctgtaccttctctcgcaaggcattgccaaagcgactgtcgcgaagcggctagggattagcgtgtcgagtgttcatcgtattgcagccagttga

SEQ ID NO: 229640 - DNA, 3132 bp, Klebsiella pneumoniae; identical to SEQ ID NO: 160188

SEQ ID NO: 229641 - DNA, 1311 bp, Klebsiella pneumoniae
atgagtactatggaacaagtggaagtggggaaataccatccgtatcctgagtataaggattcgggggttgagtgggtcggtgatataccacatcattggcaaactaagccggccttcgctgctgtaatggagcaatgcataaaaaacagtgatggtgcagagtcgaatgtcctctctcttagctatggaaatatcgtagagcgtgatgttgaaaataactttggtttgctaccagaatcattcaatacataccaaattgttaacccaggcgacattgtcctacgtctcacagatttgcaaaatgataagcgtagcctgcgtgttgctcgctctacattgcgaggcatcattacatcagcatatttgaagctggtttgtggtgatgaacttgataaccgatatgcatatcgtcttttgcattcgtacgatacaacaaaggtgttttatgggatgggggggggactgcgtcaatccatgaaatttgaggattttcgccgcttaccattcttgttacctccagcagaagaacaacgcaccatcgccgccttcctcgactatgaaaccgctcgtatcgacaagctgattgcacaacagcagcgactgatcgagctgctcaaagaaaagcggcaggcggtgatttcccacgcggtcaccaaaggtctgaaccctgatgctccgatgaaggactccggcgtagagtggctgggtgaagtgccggagcattggctggtatcgtctttgaagttcatttataagaatcttgattacaagcgaataccacttagtgctgaagaacgggggtcaaagcaaggtgattacccctactatggtgcgtcaggaattattgactcgatcgatgattatttgttctctactgatcatgtgttagttggggaagatggtgcaaatcttgtaatgcgttcaacgcccatagcttttgtcgctacaggtcagtactgggtgaataatcatgcacatatactgcgtatgaatgatggtctaaatagctactgggctgcggttattgaaaatttggacatatccccctttgttactggttctgctcaaccaaaactcacagcagaagctcttggtaacttaatcgtggcatatccgaagacattgcaagaacgcattgagatacaagagtttattaatagagaaaaacctaaatttactactttgatagatagagctgaacatcaggttcacctcctcaaagaacgccgcaccgctctaatttccgctgctgttacaggcaagattgacctgcgtggctggactgcatcgactcaggaggcagccgcatga

SEQ ID NO: 229642 - DNA, 1977 bp, Klebsiella pneumoniae
atgaccactaatatttcttctttagccagccttatctggtccgttgccgacctgctgcgtggtgatttcaagcaatcccagtatggtcgcatcatcctgccatttactgtactgcgtcgtcttgagtgtgtactcgctcctactaaggcacagatactggcaacagtagaaaacacaaaggcgctgccagatctcgcgagagataaattactgctcaatgcgtcaggtcaggcgttctataacacctcgccgctggaactgagcaaactgggcgaaaatcatgtgggtgataacctggacgcctacgtgcgggctttctcgaaagacgcccgtgaggtcttcgaacatttcagcttcgaagcgagcattaccctgctggaagacgcggacctgctgtataaagtttcccgttcctttgcgacggtagacctgtcacctgaggcggtcgacaactaccacatgggcctggtgtttgaagaactgatccgtcgctttgcggaaagttcgaatgagaccgccggggagcactttaccccacgtgatattgtgcgtctgacgacctctctggtgttctctggtgatgatgatgtcctggcaaaacccggtgttgttcgctccatctatgacccaacggcgggtactggcggcttcctgtcctgtgggatggaatacctgcatgaactgaacccggcagctcgtcttgccaccttcggtcaggagctgaacccggagtcctatgctatttgtaaagccgatatgctgataaaggggcaggacatcagcaacatcaagctcggtaacacgctctccgatgaccagcttcgctttaaccgtttcgactactgcctgtcgaacccaccattcggcgtggactggaagaaagtagagaagcaggtgcgtgatgaagctgataaacagggctttaatgggcgcttcggtccaggtctgccacgtgtatctgatggctctctgctgttcctgatgcacctcatctcgaaaatgcagcagcccggtactgacagtactggttcccgtatcggtatcatcctgaatggctccccgctgtttaccggtggtgcagggagtggcgagagtgaaattcgtcgctatattctggaaaacgatttgctggatgccctggtcgcactaccaaccgatatgttctacaacacgggcattgcgacctatgtctgggtactgtcgaaccacaaacccgcagaacgtaaaggcaaagtcctgctgattaacgccagtgatatgcattcaccgatgcgtaagtctttaggcagtaagcgtaagtttctgagcgatgaagtactgaaagagattgtcagtctgtacagccgctacgaagaaagctccatcgccaaaatattcccgagtactgcttttggttatcggcgtattacagtagaacgaccgctgaaactggcgttctatccacatgacacggaacgactggcgaacctgcaagccgataaggcctggacgaaacttgatggttctttacaggtggctatcctggcagcactggcgagcttcactgatgacaaattgctctcacgtgataagttcaagaagcaagtcaccaaagcgttaggtgatgtgaagctacctgctccggtattcaagctactggtgaatcatctggctgaacaggatgatgcagccgaggtgtgcaggactaagggtgaagcggaaccgaacccggagctgcgggataacgagaacgtgccgttaggggaagatattcacgagtacttcaaacgtgaagtactgccccatgtaccggacgcgtggattgataccggtaagacggacccgctggatggtcaggtggggattgtcggctatgaaatcccgtttaaccgtaacttctaccagtaccaaccacctcgtgatttagctgagattgatgctgatctggatgcggttgctcgtgagattatgcaattgctggcggaggtgcattcatga

SEQ ID NO: 229643 - DNA, 138 bp, Klebsiella pneumoniae
atgctgttcggtcattggttaaatcaaagggaaattcctgatccgtacaaaaaaagtgaggaagcgtttgcttcagtttatcagttaattgagcaagccggcatgcgctgggttgataaattaagcggcagttattag

SEQ ID NO: 229644 - DNA, 2166 bp, Klebsiella pneumoniae
atggcatctattactaataagaatgaaataaaggactcgggtgaactggatttaggtcgccttttaggagaactaattgatcacagaaagcttattatatctgtgacctcgctttttactttattagcactaatttatgctttgtttgcaactcctgtatttcaagctgatgcgctagtgcaagttgagcagaaacaagcgaatgctattcttagtaatctaagtcaattgttgcctgatagccaaccgcaatcagcacctgaaatagctttattacaatcaagaatgattttaggcaaaacagttgatgatttaaatttacaaacacgagttgagccactttatttcccattgtttggaaagggatgggctcgtttgacgaaaaaaaatgctggtagtttggatgtagtcaagttttatctatcgggagcaaatgatgaagatgcacctgatgctgaagttagagtaattgataaaaatcacttcgagattacagttaatgacaatgtatataaaggaacagtaggggagttattacaaaataatgatgtaattataaaagtagatagtataaattcagaagctggtaatgaatttaaactaacatattatagtcgctataaagcgatagctaatttacaagaaaacctttcggtaattgataaaggtaaagatactgggatgctaactctctcactgagtggtttcgatccagtattgattcaaaaaatagttgataacattgcatccaattatttagctcaaaacatagcaaggcaagcagcgcaagatgcaaaaagtttagattttctgaatgaacaattgccaaaagttagaagtgatcttgacttagcagaaagtaagttaaatgaatatcggaaaaaaagtgattctgtagaccttacacttgaggcgaaggcagtattagatcaaattgttaatgctgataatcagttaaacgaattaacgttcagagagtctgagatttctcagctgtatactaaagaacatcctacatataaagcattattagaaaaaagaaaaacgctacaagatgagaagaataaattaaataaacgggtttctgcaatgccttctacacaacaagaaattcttcggctgagtagagatgtagagtcaggtcgagcggtatacatgcaactgctcaatcggcaacaggagttgagcattgctaaatctagtgcaattggtaatgtacgaattatagataaagcgattactcagacaaaaccaataaaaccgaaaaaggtcgttatagttttatcgggaatattaataggcattatattttcagtcataattgtattgttgcgtgtgtttttaagacgtggtatcgaatctccagaacaattggaggagcagggtatcaatgtttatgcaagtattcctgtgtccgaggaatttgctcataatatactgaagaaaaataaatcagggactaagaagaatgttgaatatgctcatttcctagctgtagaaaatcctgcagatttggcaattgaatcaataagaggattacgcaccagccttcattttgcaatgatggaagctagaaataatatattaatgatctctggtgctagtccgaatgctggtaaaacttttgttagttcaaatttagcggcagttatatcccagactggcaaaaaagtcctgtttattgatgcagatatgcgaaaggggtacacgcataagctatttaaagcgagtaatgaaaacggattatcagattatttatcagggaaagtcgaactgcaacatattatccagaaaatccctgtaggagactttgatttcataccaagaggtattgttccacctaatcctgcagagttgttaatgcataggcgatttggtgaattaacaaactgggccaatgagcattacgatatcgtaattatggacaccccaccagttttagcagtaacagatgcagcgattattggcaattatgtagggactactttacttatagttcgttttgaacagaatactgttaaagaaattgaagtgagtatcaagagatttgaacaaagtggcgttattgtaaaaggctgtattctaaatggcgtggtaaaaaaagtaagcagttattacggttatggctatcaacattatggctattcatattctgacgataaatag

SEQ ID NO: 229645 - DNA, 210 bp, Klebsiella pneumoniae; identical to SEQ ID NO: 109941

SEQ ID NO: 229646 - DNA, 447 bp, Klebsiella pneumoniae
atgttaactgatgaagaatttattaatatcatcaaacttacgcctcttatttctatagattttattgtaaagaacaagcgtaatgaaattcttctaggtaaacgagtaaatagccccgcaaggggctattatttcgtgcccggaggtcgtatcttgaaagatgaaactataaatgatgcatttcttcgattaagtctaacggagttaggtataagcataccaaaagatttatggaattttcatggtgtttatgaacatttttatgaagataataaatataacaaattatttagcacccattacattgtacttgcgtatgaaacaatattaacagacaaaataaacttccctaccaaccagcactctaaatataaatgggtcctcgaatcattagttggtaaagacgaaagaattcataattacacaaaaaattattttccggcatga

SEQ ID NO: 229647 - DNA, 966 bp, Klebsiella pneumoniae
atgtcccaaaagcgtgtatatatagcaggccataatggcatggtaggttcggctcttgttcgtaatcttgaatctagaaatgatgttgagcttattttaaaaactagacaggaacttaatttactcgatcaacaagcagtaaacaatttcttcaaaactgaagaaatcgatgaggtttatctctctgctgctaaagttggcggtattatggcaaataatacttatcctgctgattttatatatgaaaatttaatgatagcttctaatattattcatgccgctcatgtcaatgatattaataaactattgttcttaggttcttcctgtatatatcctaaacttgcaaaccagccgataagtgaagcagaacttttacaaggaacgcttgaaccgacgaacgaaccttacgcaatagcgaaaattgcaggtataaaattatgcgaatcatataacagacaatataatcgtgattaccggtcagttatgcctactaatctatatgggccttttgataacttccatccaactaattctcatgtggtacctgcgctaatcagacgtttccatgaagcaaaggaaaatgatcaggctgaggttatagtatggggaagcggaaatcctaagcgtgaatttttatatgtcgacgaaatggctgctgccagtgtatatgttatggagttgaataaagatgtctacaatcagtttacggaaccaatgctttctcatatcaatgtaggcaccggccgcgattgctcgataaaagaattagcatctgcaattgctagtgtggtcggttataaaggcaagattactttcgatagtaccaaaccggatggcacacctaggaaattgctagatgtgagccgtttggccgcattgggatggacttcaaaattatctttacacgatgggttggttgatacctatcaatggtatttggataatcaagatacctttagaaggtga

SEQ ID NO: 229648 - DNA, 861 bp, Klebsiella pneumoniae
atgcgttattttcgcctgtgtattatctccctgttagccaccctgccgctggcggtacacgccagcccgcagccgcttgagcaaattaaactaagcgaaagccagctgtcgggcagcgtaggcatgatagaaatggatctggccagcggccgcacgctgaccgcctggcgcgccgatgaacgctttcccatgatgagcacctttaaagtagtgctctgcggcgcagtgctggcgcgggtggatgccggtgacgaacagctggagcgaaagatccactatcgccagcaggatctggtggactactcgccggtcagcgaaaaacaccttgccgacggcatgacggtcggcgaactctgtgccgccgccattaccatgagcgataacagcgccgccaatctgctgctggccaccgtcggcggccccgcaggattgactgcctttttgcgccagatcggcgacaacgtcacccgccttgaccgctgggaaacggaactgaatgaggcgcttcccggcgacgcccgcgacaccactaccccggccagcatggccgcgaccctgcgcaagctgctgaccagccagcgtctgagcgcccgttcgcaacggcagctgctgcagtggatggtggacgatcgggtcgccggaccgttgatccgctccgtgctgccggcgggctggtttatcgccgataagaccggagctagcaaacggggtgcgcgcgggattgtcgccctgcttggcccgaataacaaagcagagcggattgtggtgatttatctgcgggatacgccggcgagcatggccgagcgaaatcagcaaatcgccgggatcggcgcggcgctgatcgagcactggcaacgctaa

SEQ ID NO: 229649 - DNA, 762 bp, Klebsiella pneumoniae; identical to SEQ ID NO: 101528

SEQ ID NO: 229650 - DNA, 384 bp, Klebsiella pneumoniae
atgagtaaaaagtttaacaaggaagatattgaattcgttctcgataaaataaatggctgggaaggcgatttaacttgggtcagtctttgtgattccgtagaggatcatttcggtaaaaaaccaacgagacaggctctttcaagacatacagtaatagcttatgcatatcagcagaaaaagagaactaaaggtgaaactgttaagcatattaaaagtcctcaaagtcttgcctatgcttcgaataaaatcagtaaattagaaacagaaaattcgaggttagttagtgaaaataacaggcttctacttatggttagagatcttcaaatggttgcatatggtaaatgtattagagaagatcaaatttttcccaaaaacaaaaaataa

SEQ ID NO: 229651 - DNA, 456 bp, Klebsiella pneumoniae; identical to SEQ ID NO: 25798

SEQ ID NO: 229652 - DNA, 267 bp, Klebsiella pneumoniae
atgctggcgcatccagttagccccacgcgcaaacacgtctactgggtctccatagtaatatcctatttcatatgcctgctctgctgtcatctcgtcaggaattaccaacactggctgcgcgtggcgatagagcggaataaccttgaaaccactcaaccacaaatctcttgcgcgcccatcgtgactggtgacatgccacatatcgagatgatgccatgcctacaacactggctcgctgtccattgcggccttgcggcgttcctgtag

SEQ ID NO: 229653 - DNA, 1200 bp, Klebsiella pneumoniae; identical to SEQ ID NO: 221241

SEQ ID NO: 229654 - DNA, 546 bp, Klebsiella pneumoniae
atgtttctcgcttacaccggcgcgttcttcaccctcagctattctcctctgaaagcgattatccagggcacgccaaaagcgctctggccgtcggtgatgacccgccttaacgtcaacggaatgcccgccgcggcgatgtggctgcagtgtctgctggtcggggtgtttatcgtactggtatcgttcggtggggatagcgcttccgcgttttataacaagctgacgctgatgaccaatgtctctatgaccttgccttatctgttcctgaccatcgccttcccgttcttcaaggcgaaaacccatcttgaccggccgttcgtgatcttcaaaaaccgtccgtcgacgctgctggcgaccggcgtggtgctgctggtggtgaccttcgccaatatcttcaccattatccaacccgtcatcgacagcggggactggaacagcaccctgtggatggtgggtggaccgatcttcttctcactgctggcgctggggatctacgaaagctaccgtcggcgcatggcgtccggcgcgctggtgatggagagttaa

SEQ ID NO: 229655 - DNA, 459 bp, Klebsiella pneumoniae
atgcacgaaaatgaatggctggagaaacggctcgcatatattcgcggactgagcgcaccgaacgaacaacagcgccttttgctcatgctggcgcagttgccacagccaacaccgaatgaccgccgcaagctgggagtgctcattcgtgcagaaaaagccgcagagagggcgctaaaggctcgcgctgatgctgctaaagtgctgaacgccgaacgtcgcgccattcgcaaagcacgtgaccacgaactctacaaggcggcaggtctgatgggcgtggccggcgtggttgaccgccaaaccgggcggctcaatgtggatgccggcctgcttgtcggattgctcatggagctgtccgccggtacactaccggacagcttgcaccgggaaacgcttaaatctcgcggggatgctgctatcgctgcccgtgagaaaaaaaataaaacgaatcaggctggctaa

SEQ ID NO: 229656 - DNA, 1440 bp, Klebsiella pneumoniae
atggcgattgcacgactcaacatgaaagcgggaatgaaaggccgtggcgcagaccactcggcctacatttcccgtgagggcaagtatgcaaatcgtctggaacggggcgagcgactggaggccaccgaccacggcaatatgccggaatgggcgaaggacaatccgcaacagttctggctggccgccgatgcgtatgagcgcaagaacggcacttcataccgtgagatggaaatcgccctgcctcgtgaactgaacagcgaacagcgtgaggcgcttgtcagggactggacggagcaggagctgggcgacaaacacgcttatcagtgggctatccacgttcccaccgccgctgacggaggtgagcagccacacgtacacctgatgttctccgaacggcagcgtgacgggattgagcgcgagccagatcagtatttcaaacgctacaacagccggaacccggaagcaggcggagcgcggaaggggtacggtgagcatggcggccagccgcgcacgctggagcagcggcgcgaggagcttgtcgccctgcgcggccgctgggagaccaaagctaacgaacaccttgagcgagccggccagcgcgaacgtatcgacatgcgcagctatacggcgcagggcaaggacgccattcctgaaaaaaagcagctaccgagtgaatggcgcgacgagcggaagcgtgcagaaatactggatttccgcgctgcaaaagccgagcaggaacaggctcagaaagacgccggcaaggtgctttatgagcacaacagcgcggtagagcactatcgcggcgttgtggccgcggtgccggagcaccggctgaaaaactcctcaccggacagcatcgctctggatttgcgagaaaaactcgtcgggcagcgcgttgacagcgatccggccgtagtggccgcacgggagcaggaagaaaaaaccggtaaggcactggagaatgcgcggcaggaacgggacaaaacccggcaggaagccgagcagcagcggcaggagcagcaacgatgggaagaagaaaaccggatgcgccgctggctccatgacaagggcatcaaaaaggacgagcgttataccggactgcaacagcaacgggaaaaatcagagcagcaggcacaggccgccgtgcagaaggagcaacaggcagaaatgcagcaccggcaggccgtcactgcgcgggaagaaaccgaaactgatgtccgtcagcaggccaatgaaaaatggttcgagcatcatcatacggccgtgaaagaggccgccgccgaacgccagcgggaacttgagcggcaggagcgggagcagcagcaggcaaaacaggctgaatatcagcagttgatcgcccagcaacagcggcaacgtgagcaggaaaaagagcaggaacacacgccggaacggcagcacgggcgcggaatgagcatgtaa

SEQ ID NO: 229657 - DNA, 2106 bp, Klebsiella pneumoniae
atgaaaaaactgtcacttaactggtctgggaatgtgggtcagtccatcgaaaaagcccgcacactggccgccgaatactcccgccgtgatgtacccgacaacgcaccggccgatctgcgcgactcggccagtcagggactggaaacgagcaaggggtttgcgttgtctggccgtctgctgcaaagcgaactggtctacggttcagatgtgccgctggcgcagttcggcactgtgctgatcccgctggtactggcgttcacaaccctgcttctctactggctcccggcatggctggcattcattccggccgtcttatgggcgctgtttgccatcatgaccggtggttttacgctgggctggtttgccggcgttctggcgctgctcctgctctggggatctgatatttcgctgttttcgatgggcgggacagcgcagatgctccagtttggcaccggtatgacgctgacgctgatttcgctggccgctctgccgctctgtcaccttctgcgccgcgccgagcgctttaccatcatcaacgatgacgctaaagccggcgcaatcattctgtccgcctcacgtcaggcaaaagcccgcgaaaagcagacagaacgcgccgcacgcgacacctcgccgctgatctggctgggtgaggcgcagggcgtgacatgggagaagggggatattatggcgcccgatccggcgtcacgcgttgccctgtcggccgctgacctgtccacgggattgcttgtgctcggtggcaccggcaccggcaaaacgtccggcgtgttcaggccggttatccgtcagtggtgtgagcacaattgcggtggcctgcttctgatggacggaaaggggcagttaccggccgaactggccgaaagcaacaggggaataacgctgctgaccccggataacccggaaacgcctgtcccgctgatcgatggcctgaatgccgaagaagtggccgccgtgctggtttctgtctccggcaaggggaatgataaaggctctgactggacatttgcggccgaaaaacagttccgtttctctgccctgctcgttgagctggctgtcagcgttcaggctgcaccgtggacgctggccaccattgcccgctgcgtgtctgatacggcatttagggacacgctgattgaggcggtaagcgcccgtacagaaacactgtcacctgaactgaccacggcggcgctggatttctggctcaaggaatacccggagctggcaaaagccgaagggtataccagttctgtgcaggggattgtgaccgcgtggctttctccgctggtcggccacaggaaaatgcatggctggattaatgccgccgaaggggttaacccttctgatgtcctgctcggagcgcggtacggcatagggattgattcatcggtatatggcgaactctgcaccgcagcggttaacgggttcatcaaaaaacgcctgtacaacgaggcaacgcggcgcggggataactggaaagcagactgcacaaatacggcggccatgattgtgatggatgaagcggatgtgctgctcgatgaaaccgatgccggcattctgccgcgtgggcgctcactggggctgaatttcgtggttggcttgcaggccgtggaacaggcggaagccgctttcggtgggacgcagaacgcgccaaaagccctggcgatgctggcgcagctgcgctccgttgtcgcgctgtcatcaacccatcacaccgcgcagtatgtctccgatcgtgtggggttcgggctgccacttgagccggtatcgctctctaccgtgccggatatgcgctataccgtactgcaacgggcggcggcctcaccgtttaacgacgaggaaaacgagttccgcagctcgataacgctcgatattccgcatgtgattagtcatacggttggcaaaatgatggatcacaaaaatgcggccggcgaacgtctccagttggcaaaagagcctaagccgtggatctcaccgcaggaatgcaacatgctcacggcgacggagggcgtggccgttgtggtactcaaccgcgccggcgctccccgccgcgatgcgatagagctggttcccgaatatcgcgccggctga

SEQ ID NO: 229658 - DNA, 390 bp, Klebsiella pneumoniae; identical to SEQ ID NO: 106559

SEQ ID NO: 229659 - DNA, 162 bp, Klebsiella pneumoniae
atgacagagaaaaagcaatcagcaaatgccaagcgtcaggcggcgtttaaggccagacagagagaagccggccgcattcagcgggtgctgtggctgaccgatgaagaggtgaacgccgtcaaggcgttactggataaaatgcggggggatgaacgtccgtaa

SEQ ID NO: 229660 - DNA, 300 bp, Klebsiella pneumoniae
atgacctatgaaatcgactggcggccgggggcggttgaagatatggccgccctgtttgagtatctggccgaaaatgcctcgctatgggacgccagaaacgtgacagaccgcctgatagccgccactgaacgactggaagattatccccgtttgtacgagaccgacgagcgatacggcgagggcgtccggcgtatcagcctgctcggccagcatgtgctgtatgaggtgaacgacgaggcacggcgggtaaacattctggccgtggtcggtcagcgtcagaaccccttatcggtacgctga

SEQ ID NO: 229661 - DNA, 264 bp, Klebsiella pneumoniae; identical to SEQ ID NO: 106556

SEQ ID NO: 229662 - DNA, 126 bp, Klebsiella pneumoniae
atgaatactgaaaccaaaaagctgacgctggatgaacttctggcacaatgcaatcccgatgccggcatgagcgatgaagatcgccagtgggtaaatcagccccctgccggcgatgaaatcgcgtga

SEQ ID NO: 229663 - DNA, 702 bp, Klebsiella pneumoniae
atgtctgatttgatagcctacaaatctaacgcccttatcgaggcaagttacaggctcaccttacaggaacagcgcttcctgctggtctgtatcagccgcctgaaatccggggaagatgccccttcgccggatgaacaaaaaaccatgaccatcacggccgcagagtttcatgatgcttttcctgacatgggacggcagcacgctgaagccaagctcaaggaagcgatagatcgcctctgggacaggtcagtcatcatcaaaaacgaggaaaaacgcgaggagttccgctgggtgcagtaccgggcgcagtatctcaaaggtgaggcgaaagtagagatcaccttctccgatgccatcatgccgtatctgacacagctaaaggggcagtttacgcgggtagtggtgaagaacgtttccagcctctccagcacctacagcatccgtatttacgagctgctccagcagttccgcagcaccggcgacagaactatttcactcgatgacttccgatccatactggaactggaagataaatattctgatttcaagatattgaacagagacttaataaaaccggccatcgctgagctgaacgaaaaaagcgatctggccgtcaccgtcgagacggtgaaaaaggggcgaaccgttgtcgcgttgcggttccggttcaaagaggacaagcagatcaagatggccgtatga

SEQ ID NO: 229664 - DNA, 216 bp, Klebsiella pneumoniae; identical to SEQ ID NO: 154564

SEQ ID NO: 229665 - DNA, 492 bp, Klebsiella pneumoniae; identical to SEQ ID NO: 154565

SEQ ID NO: 229666 - DNA, 324 bp, Klebsiella pneumoniae; identical to SEQ ID NO: 160891

SEQ ID NO: 229667 - DNA, 573 bp, Klebsiella pneumoniae; identical to SEQ ID NO: 101536

SEQ ID NO: 229668 - DNA, 1287 bp, Klebsiella pneumoniae; identical to SEQ ID NO: 101537

SEQ ID NO: 229669 - DNA, 231 bp, Klebsiella pneumoniae; identical to SEQ ID NO: 112534

SEQ ID NO: 229670 - DNA, 849 bp, Klebsiella pneumoniae; identical to SEQ ID NO: 199678

SEQ ID NO: 229671 - DNA, 408 bp, Klebsiella pneumoniae; identical to SEQ ID NO: 141634

SEQ ID NO: 229672 - DNA, 705 bp, Klebsiella pneumoniae; identical to SEQ ID NO: 8686

SEQ ID NO: 229673 - DNA, 516 bp, Klebsiella pneumoniae; identical to SEQ ID NO: 223624

SEQ ID NO: 229674 - DNA, 231 bp, Klebsiella pneumoniae; identical to SEQ ID NO: 121864

SEQ ID NO: 229675 - DNA, 1176 bp, Klebsiella pneumoniae; identical to SEQ ID NO: 211267

SEQ ID NO: 229676 - DNA, 1425 bp, Klebsiella pneumoniae; identical to SEQ ID NO: 211268

SEQ ID NO: 229677 - DNA, 1047 bp, Klebsiella pneumoniae; identical to SEQ ID NO: 211269

SEQ ID NO: 229678 - DNA, 474 bp, Klebsiella pneumoniae; identical to SEQ ID NO: 211270

SEQ ID NO: 229679 - DNA, 948 bp, Klebsiella pneumoniae; identical to SEQ ID NO: 211271

SEQ ID NO: 229680 - DNA, 1539 bp, Klebsiella pneumoniae; identical to SEQ ID NO: 211272

SEQ ID NO: 229681 - DNA, 912 bp, Klebsiella pneumoniae; identical to SEQ ID NO: 211273

SEQ ID NO: 229682 - DNA, 741 bp, Klebsiella pneumoniae; identical to SEQ ID NO: 211274

SEQ ID NO: 229683 - DNA, 675 bp, Klebsiella pneumoniae; identical to SEQ ID NO: 211275

SEQ ID NO: 229684 - DNA, 726 bp, Klebsiella pneumoniae; identical to SEQ ID NO: 211276

SEQ ID NO: 229685 - DNA, 1671 bp, Klebsiella pneumoniae; identical to SEQ ID NO: 211277

SEQ ID NO: 229686 - DNA, 1794 bp, Klebsiella pneumoniae; identical to SEQ ID NO: 211278

SEQ ID NO: 229687 - DNA, 486 bp, Klebsiella pneumoniae; identical to SEQ ID NO: 211279

SEQ ID NO: 229688 - DNA, 2583 bp, Klebsiella pneumoniae; identical to SEQ ID NO: 211280

SEQ ID NO: 229689 - DNA, 591 bp, Klebsiella pneumoniae; identical to SEQ ID NO: 137100

SEQ ID NO: 229690 - DNA, 1035 bp, Klebsiella pneumoniae; identical to SEQ ID NO: 211282

SEQ ID NO: 229691 - DNA, 651 bp, Klebsiella pneumoniae; identical to SEQ ID NO: 211283

SEQ ID NO: 229692 - DNA, 630 bp, Klebsiella pneumoniae; identical to SEQ ID NO: 211284

SEQ ID NO: 229693 - DNA, 318 bp, Klebsiella pneumoniae; identical to SEQ ID NO: 137104

SEQ ID NO: 229694 - DNA, 468 bp, Klebsiella pneumoniae; identical to SEQ ID NO: 211286

SEQ ID NO: 229695 - DNA, 1902 bp, Klebsiella pneumoniae; identical to SEQ ID NO: 211287

SEQ ID NO: 229696 - DNA, 1113 bp, Klebsiella pneumoniae; identical to SEQ ID NO: 211288

SEQ ID NO: 229697 - DNA, 1149 bp, Klebsiella pneumoniae; identical to SEQ ID NO: 211289

SEQ ID NO: 229698 - DNA, 1272 bp, Klebsiella pneumoniae; identical to SEQ ID NO: 211290

SEQ ID NO: 229699 - DNA, 264 bp, Klebsiella pneumoniae; identical to SEQ ID NO: 137110

SEQ ID NO: 229700 - DNA, 645 bp, Klebsiella pneumoniae; identical to SEQ ID NO: 211292

SEQ ID NO: 229701 - DNA, 897 bp, Klebsiella pneumoniae; identical to SEQ ID NO: 211293

SEQ ID NO: 229702 - DNA, 966 bp, Klebsiella pneumoniae; identical to SEQ ID NO: 211294

SEQ ID NO: 229703 - DNA, 207 bp, Klebsiella pneumoniae; identical to SEQ ID NO: 137114

SEQ ID NO: 229704 - DNA, 789 bp, Klebsiella pneumoniae; identical to SEQ ID NO: 137115

SEQ ID NO: 229705 - DNA, 384 bp, Klebsiella pneumoniae; identical to SEQ ID NO: 211297

SEQ ID NO: 229706 - DNA, 210 bp, Klebsiella pneumoniae; identical to SEQ ID NO: 137117

SEQ ID NO: 229707 - DNA, 519 bp, Klebsiella pneumoniae; identical to SEQ ID NO: 211299

SEQ ID NO: 229708 - DNA, 1374 bp, Klebsiella pneumoniae; identical to SEQ ID NO: 211300

SEQ ID NO: 229709 - DNA, 798 bp, Klebsiella pneumoniae; identical to SEQ ID NO: 211301

SEQ ID NO: 229710 - DNA, 411 bp, Klebsiella pneumoniae; identical to SEQ ID NO: 137847

SEQ ID NO: 229711 - DNA, 429 bp, Klebsiella pneumoniae; identical to SEQ ID NO: 211303

SEQ ID NO: 229712 - DNA, 1566 bp, Klebsiella pneumoniae; identical to SEQ ID NO: 211304

SEQ ID NO: 229713 - DNA, 564 bp, Klebsiella pneumoniae; identical to SEQ ID NO: 137844

SEQ ID NO: 229714 - DNA, 750 bp, Klebsiella pneumoniae; identical to SEQ ID NO: 211306

SEQ ID NO: 229715 - DNA, 933 bp, Klebsiella pneumoniae; identical to SEQ ID NO: 211307

SEQ ID NO: 229716 - DNA, 1224 bp, Klebsiella pneumoniae; identical to SEQ ID NO: 211308

SEQ ID NO: 229717 - DNA, 627 bp, Klebsiella pneumoniae; identical to SEQ ID NO: 211309

SEQ ID NO: 229718 - DNA, 1161 bp, Klebsiella pneumoniae; identical to SEQ ID NO: 211310

SEQ ID NO: 229719 - DNA, 690 bp, Klebsiella pneumoniae; identical to SEQ ID NO: 211311

SEQ ID NO: 229720 - DNA, 543 bp, Klebsiella pneumoniae; identical to SEQ ID NO: 211312

SEQ ID NO: 229721 - DNA, 2310 bp, Klebsiella pneumoniae; identical to SEQ ID NO: 211313

SEQ ID NO: 229722 - DNA, 981 bp, Klebsiella pneumoniae; identical to SEQ ID NO: 211314

SEQ ID NO: 229723 - DNA, 1551 bp, Klebsiella pneumoniae; identical to SEQ ID NO: 211315

SEQ ID NO: 229724 - DNA, 990 bp, Klebsiella pneumoniae; identical to SEQ ID NO: 211316

SEQ ID NO: 229725 - DNA, 1005 bp, Klebsiella pneumoniae; identical to SEQ ID NO: 211317

SEQ ID NO: 229726 - DNA, 942 bp, Klebsiella pneumoniae; identical to SEQ ID NO: 211318

SEQ ID NO: 229727 - DNA, 1029 bp, Klebsiella pneumoniae; identical to SEQ ID NO: 211319

SEQ ID NO: 229728 - DNA, 1497 bp, Klebsiella pneumoniae; identical to SEQ ID NO: 211320

SEQ ID NO: 229729 - DNA, 609 bp, Klebsiella pneumoniae; identical to SEQ ID NO: 211321

SEQ ID NO: 229730 - DNA, 1263 bp, Klebsiella pneumoniae; identical to SEQ ID NO: 211322

SEQ ID NO: 229731 - DNA, 1236 bp, Klebsiella pneumoniae; identical to SEQ ID NO: 211323

SEQ ID NO: 229732 - DNA, 1239 bp, Klebsiella pneumoniae; identical to SEQ ID NO: 211324

SEQ ID NO: 229733 - DNA, 1041 bp, Klebsiella pneumoniae; identical to SEQ ID NO: 211325

SEQ ID NO: 229734 - DNA, 810 bp, Klebsiella pneumoniae; identical to SEQ ID NO: 211326

SEQ ID NO: 229735 - DNA, 1359 bp, Klebsiella pneumoniae; identical to SEQ ID NO: 211327

SEQ ID NO: 229736 - DNA, 1269 bp, Klebsiella pneumoniae; identical to SEQ ID NO: 211328

SEQ ID NO: 229737 - DNA, 1029 bp, Klebsiella pneumoniae; identical to SEQ ID NO: 211329

SEQ ID NO: 229738 - DNA, 1200 bp, Klebsiella pneumoniae; identical to SEQ ID NO: 211330

SEQ ID NO: 229739 - DNA, 1065 bp, Klebsiella pneumoniae
atgaaaaagatcgcactctctctgatgacgctgggtctgctgcagtcgacggcggcgctggccaccgccccgacgccggtgccggcggcgattgccgaacacaacggcccgatccgcattgccgtgatccgcaacctcgggtctgacgataacaccacccagtttgtcgccggggcgctgcaggaaggcaaaaagctcggtttcaaaatcagcaccttcctgagcaacggcgatgacgccaaattccaggacttcgtcaaccaggccatcagccagaaatacgatggcattattctctcccaggggcgtgacccgtattccaccgccctggtgaagaaggcggtggacgccgggatcaaagtggcggtgttcgataccgcggtaagcggtgagatccccggggtgacggtcagccagcaggatgacgcctcactgaccgagctctcctttggccagctggtgaaagacttcaacggtaaggccaatatcgtcaagctgtgggtggcgggcttcccgccgatggagcgccgtcaggcggcttaccagacgctgctgaagcaaaacccggggattaaagagctggagtcgatcggcgccgtgtcatccgatgtgcagggcgacactgccaacaaggtgggggcgatcctcgccaagtatccgaaagggaaaattgacgcgatctggggcacctgggatgcctttagccagggagcctataaagcgctgaaagagaacggccgcaccgagatcaaactctacagcattgatatttccaaccaggatttgcagctgatgcgcgaggccggcagcccgtggaaggtgagcgtggcggtagatccgaagcttatcggcgcgaccaacgtgcggctgatcgccaataagatcgccggcgagccgacgccagccacctacgacttcaaggcggcagcgattccccaggcgctgctggcggcccagccgggagcggtaaacgtggcgtcgctggggaaaattatccctggctggggccagaccgaagactttatcgcgccgtggttcgcgacgctggaagcgaagaacaaataa

SEQ ID NO: 229740 - DNA, 999 bp, Klebsiella pneumoniae; identical to SEQ ID NO: 211333

SEQ ID NO: 229741 - DNA, 1503 bp, Klebsiella pneumoniae; identical to SEQ ID NO: 211334

SEQ ID NO: 229742 - DNA, 1089 bp, Klebsiella pneumoniae; identical to SEQ ID NO: 211335

SEQ ID NO: 229743 - DNA, 744 bp, Klebsiella pneumoniae; identical to SEQ ID NO: 211336

SEQ ID NO: 229744 - DNA, 303 bp, Klebsiella pneumoniae; identical to SEQ ID NO: 211337

SEQ ID NO: 229745 - DNA, 405 bp, Klebsiella pneumoniae; identical to SEQ ID NO: 211338

SEQ ID NO: 229746 - DNA, 198 bp, Klebsiella pneumoniae; identical to SEQ ID NO: 211339

SEQ ID NO: 229747 - DNA, 2106 bp, Klebsiella pneumoniae; identical to SEQ ID NO: 211340

SEQ ID NO: 229748 - DNA, 414 bp, Klebsiella pneumoniae; identical to SEQ ID NO: 211341

SEQ ID NO: 229749 - DNA, 852 bp, Klebsiella pneumoniae; identical to SEQ ID NO: 211343

SEQ ID NO: 229750 - DNA, 1608 bp, Klebsiella pneumoniae; identical to SEQ ID NO: 211344

SEQ ID NO: 229751 - DNA, 1176 bp, Klebsiella pneumoniae; identical to SEQ ID NO: 211345

SEQ ID NO: 229752 - DNA, 1242 bp, Klebsiella pneumoniae; identical to SEQ ID NO: 211347

SEQ ID NO: 229753 - DNA, 1008 bp, Klebsiella pneumoniae; identical to SEQ ID NO: 211348

SEQ ID NO: 229754 - DNA, 993 bp, Klebsiella pneumoniae; identical to SEQ ID NO: 211349

SEQ ID NO: 229755 - DNA, 795 bp, Klebsiella pneumoniae; identical to SEQ ID NO: 211350

SEQ ID NO: 229756 - DNA, 204 bp, Klebsiella pneumoniae; identical to SEQ ID NO: 211352

SEQ ID NO: 229757 - DNA, 1209 bp, Klebsiella pneumoniae; identical to SEQ ID NO: 211353

SEQ ID NO: 229758 - DNA, 2229 bp, Klebsiella pneumoniae; identical to SEQ ID NO: 211354

SEQ ID NO: 229759 - DNA, 624 bp, Klebsiella pneumoniae; identical to SEQ ID NO: 211355

SEQ ID NO: 229760 - DNA, 936 bp, Klebsiella pneumoniae; identical to SEQ ID NO: 211356

SEQ ID NO: 229761 - DNA, 831 bp, Klebsiella pneumoniae; identical to SEQ ID NO: 211357

SEQ ID NO: 229762 - DNA, 951 bp, Klebsiella pneumoniae; identical to SEQ ID NO: 211358

SEQ ID NO: 229763 - DNA, 1521 bp, Klebsiella pneumoniae; identical to SEQ ID NO: 211359

SEQ ID NO: 229764 - DNA, 936 bp, Klebsiella pneumoniae; identical to SEQ ID NO: 137627

SEQ ID NO: 229765 - DNA, 621 bp, Klebsiella pneumoniae; identical to SEQ ID NO: 137628

SEQ ID NO: 229766 - DNA, 1545 bp, Klebsiella pneumoniae; identical to SEQ ID NO: 211362

SEQ ID NO: 229767 - DNA, 1068 bp, Klebsiella pneumoniae; identical to SEQ ID NO: 211363

SEQ ID NO: 229768 - DNA, 798 bp, Klebsiella pneumoniae; identical to SEQ ID NO: 137631

SEQ ID NO: 229769 - DNA, 786 bp, Klebsiella pneumoniae; identical to SEQ ID NO: 211365

SEQ ID NO: 229770 - DNA, 606 bp, Klebsiella pneumoniae; identical to SEQ ID NO: 211366

SEQ ID NO: 229771 - DNA, 894 bp, Klebsiella pneumoniae; identical to SEQ ID NO: 211367

SEQ ID NO: 229772 - DNA, 1257 bp, Klebsiella pneumoniae; identical to SEQ ID NO: 211368

SEQ ID NO: 229773 - DNA, 447 bp, Klebsiella pneumoniae; identical to SEQ ID NO: 211369

SEQ ID NO: 229774 - DNA, 2034 bp, Klebsiella pneumoniae; identical to SEQ ID NO: 211370

SEQ ID NO: 229775 - DNA, 588 bp, Klebsiella pneumoniae; identical to SEQ ID NO: 139520

SEQ ID NO: 229776 - DNA, 1473 bp, Klebsiella pneumoniae; identical to SEQ ID NO: 211372

SEQ ID NO: 229777 - DNA, 1665 bp, Klebsiella pneumoniae; identical to SEQ ID NO: 211373

SEQ ID NO: 229778 - DNA, 696 bp, Klebsiella pneumoniae; identical to SEQ ID NO: 211374

SEQ ID NO: 229779 - DNA, 1023 bp, Klebsiella pneumoniae; identical to SEQ ID NO: 211376

SEQ ID NO: 229780 - DNA, 351 bp, Klebsiella pneumoniae; identical to SEQ ID NO: 146911

SEQ ID NO: 229781 - DNA, 348 bp, Klebsiella pneumoniae
atgaaaacactgtcgcgtcactcggatacggcaaaagcgttcgcatacctgctgaaacagtgggaggccctgaacgtgtactgcagtaatggctgggtggaaatcgacaacaacatcgcagagaacgccttacggggagtggccgtaggccggaaaaactggctcttcgcgggttccgacagcggtggcgaacatgcggcggtgttgtactcgctgatcggcacatgccgtctgaacaatgtagagccagaaaaatggctgcgttacgttattgagcatatccaggactggccggcaaaccgggtacgcgatctgttgccctggaaagttgatctgacttctcagtaa

SEQ ID NO: 229782 - DNA, 1818 bp, Klebsiella pneumoniae; identical to SEQ ID NO: 214324

SEQ ID NO: 229783 - DNA, 1401 bp, Klebsiella pneumoniae; identical to SEQ ID NO: 191098

SEQ ID NO: 229784 - DNA, 240 bp, Klebsiella pneumoniae
atgcgaaatattcgttttccggatttagatatcaccgggatgtgggtgctggccgtgggcgtgtttttccacctgatagcccggcttgtcagaaagcagcctgagctggccgtccaggccggggaaatcttcgggctgggtatggtggtgtttgggggataccgcattcttaacgccctgattgctgaagccgaaaaagaggagaaagcctgtgaaaaacagcctgaagaacctcgctaa

SEQ ID NO: 229785 - DNA, 753 bp, Klebsiella pneumoniae
atgcgaacaatacatgccgccatgctggcgggatgcctttgctgcgccctgatgccggctttcgccaaagacgcgggctggcagtggtacaacgagaaacttaagccccgtgatgaggaaaggaaagccgcaccagcggcaccaccgccgcaaatggatattctggagaaactcgccacactccaggcggccaccaaacggtcgttgtacgaagccattctgtatccatcgtctgaaaacttcgtgaagtatttccggctgcagaactactggacgcagcaggcaggtttgttctcgatgagtgcgaagaaagcgatgctggaaaaccccgaactcgattacaacctgcagcacagctactacaacggcacggtaaaaaaccagctcgctgccgactatgccgaacagcgacaggctatctccaccctcgcacagcactacggcgtgatgttcttctaccggggccgggaagcgatcgatggccagctggtccaggtgattaaaaattttcgcgaaacctatggcctgagcgtgataccggtgtcggttgacggagtgattaaccccatgctgcccgatagccggacagaccagggccaggcagagcagcttggcgtgaagttcttccccgcgatgatgctggttaacccgaaaagtggccaggttaagcctctcagttacggctttatcagtcaggacgacctggcgaaacagttcctctatgtctccagcgactttaaaccgaatttctaa

SEQ ID NO: 229786 - DNA, 255 bp, Klebsiella pneumoniae
atgtcgtacagcctgtggcgggacaggcaggttaacgcatttatgacaaccaaccgggcctgggggatccagtgcgacactgtttctcaggccgcgtgggtgatcagggacggggagcgggtggaccttcagataaattatctgcctctgtactgcagcggttatcgctttgaagcccgtgatgatgcaggaaaggtacagcgccagctcgataaatacagtgtctatcagcatctgtcacgccagtcgcattaa

SEQ ID NO: 229787 - DNA, 1317 bp, Klebsiella pneumoniae; identical to SEQ ID NO: 222352

SEQ ID NO: 229788 - DNA, 5262 bp, Klebsiella pneumoniae
atgatgtcgattggctccgttaaatcagcgggcagtgccggtaattactatacggataaggataattactacgtcatcgggagcatggacgaacgctggcagggtaagggggctgaggcgctggggatcgacgggaaagccgtggataaggcgctgtttacggaactgctgaaagggaagctgccggatggcagcgacctgacccggatacaggacggcgccaacaggcaccggcccggttatgacctgaccttctcggcccccaaaagcgtgtcggtcatggcgatgctgggcggcgataaacgccttatcgatgcccacaaccaggcggtaaccgaagcggtgcggcaactggagacgctggccgcgacccgggtcatgacggacggtaaaagcgaaacggtgctgaccggaaatctgattgtggcgaaattcaaccacgacacgaaccgtaaccaggaacctcagatacacacccatgccgtcgtcattaacgccacgcagaacggggacaaatggcagtctctcggcacagataagatcggtaaaacaggttttatcgagaacgtgtacgcgaaccagatagcgttcgggaagctttaccgggaggcgttcaaacccctggttgagaagcttggctatgagacggaagttgtgggcaaacacgggatgtgggagatgaaaggggtccctgtggaaccgttctccacccggtctcaggaggtcagggaggccgcagggcccgatgcctccctgaagtcacgggatgtggccgcgctcgatacccgcaagtcgaaagaagccatcgatccggcagagaagatggtggagtggatgaacacgctgaaggagaccgggtttgacatccgggggtaccgtgaggccgccgatgcgcgagccgcagagctggcccgtgcacctgccgcgccggtgaacactgacggtccggatatcacggatgtggtgacgaaagcgattgccggtctcagcgaccgcaaggtgcagttcacgtatgccgacctgctggcacgcacggtcggccagctggaggcgaaggacggtgtgtttgagctggcgagaaagggcatcgatgccgccattgaacgggagcagcttatccctctcgatcgcgagaaaggcctgttcacctcaaacatccacgttctcgatgaactcgccgtcaaagccctgagtcaggaggtgcagcgccagaatcatgtctccgtcacgcccgatgcgtctgtggtgcgccaggttcctttcagcgatgccgtcagcgtgctggcgcaggatcgcccggtaatgggtatcgtttccggtcagggcggtgcaaccggccagcgggagcgggtggccgagttaaccctgatggcccgggagcaggggcgtgacgtccatatcctggcggccgataaccgctcacgtgattttctcgccggtgatgtgcgtctggccggggaaacggtgaccggtaaatccgccctgcaggacggaacggcgtttattccgggcggaacactcatcgtggatcaggcggagaagctgagcctgaaggaaacgatttccctgctcgatggcgcgatgcgccataacgtgcaggtcctgctctccgacagcgggaagcgcagcgggaccggcagcgcgctgacggtgctgaaggacagcggcgtgaatacgtatcgctggcagggtggccatcagaccaccgccgacatcatcagtgaaccggataaaggagcacgctacagccggctggcacaggagtttgccgtcagcgtgcgtgaagggcaggaaagcgtggcccaaatcagcgggacgcgtgaacagagcgtactcaacggcctcatccgtgactccctcagacaggagggggtgctgggtgagaaagacacgaccattacagccctgacgccggtgtggctggacagcaaaagccggggcgtgcgggattattaccgggaggggatggtgatggaacgctgggatccggagacccggacgcacgatcgctttgtcattgaccgggtgaccgcgagcagcaatatgctgacccttaaagaccgggacgggggccgtctggatctgaaggtttccgcggtcgacagccagtggacgctgttccgggcagagacactgccggtggcagagggggaacgtctggcggtgctcgggaagataccggacacacgcctgaagggcggggagagcgtcacggtgatgaaagtggaggaggggcagctgacggtacagcggccggggcagaaaaccacgcagaccctggccgtgggcgcgggcgtgtttgacggtattaaaatcggccacggctgggtggaaagtcccggccggtcggttagcgagacggcaacggtctttgcgtcggtgacgcagcgtgagctggataacgccaccctcaaccagctggcgcagagcggaagtcacctccggctgtactcggcgcaggatgcggcgcgcacgacggagaagctgtcgcggcataccgccttcagcgtggtctcagagcagctgaaggcccgatccggcgagacggacctggatgcggccattgcgcagcagaaggccggactgcataccccggcagaacaggccattcacctggccatcccgctgcttgagagccaggacctgaccttctcccggccccagttgctggcgacggcaatggaaaccgggggcgggaaggtttcgatggcggacatcgacacgaccattcaggcacaaatcaggtcggggcagttgctgaatgtaccggtggcgcacggctacggcaatgacctgctgatttcccgtcagacctgggacgccgaaaaaagcatcctgacccacgtgctggaaggtaaaggcgcggtggcccccctgatggaccgcgtgccggccagtctgatgacggacctgaccgccggacagcgggcggcgacccggatgattctggaaagcacggatcggttcacggtggttcaggggtatgccggggtggggaaaaccacccagttccgggcagtcatgagtgccatcagtctgctgccggaagagacccgtccgcgcgtcatcggtctggcgccgacgcatcgcgcggtcggggaaatgcagagtgccggcgtggaggcgcgcacgacggcgtcgttcctccacgacacgcagctgctgcagcgcaatggccagacacccgatttcagcaacaccctgttcctgctcgacgagagctcaatggtggggctggccgatatggcaaaagcccactccctcatcgtcgccggcggtgggcgggcggtgtccagtggggataacgaccagctgccgcccatcgcgccgggccagccgttcaggctgacgcagcagcgcagcgccgccgacgttgccatcatgaaagagattgtacgccagatgcctgagctgcgaccggcggtctacagcctgattgagcgggatgtgcaccgcgccctgaccaccatcgagcaggtcacgccggagcaggtgccgagaaaagaaggcgcctgggcgccgggcagttctgtggtggaattcacgccaaagcaggaaaaggcgatagaaaaggcgctgagcgaggggaaaaccctgccggaaggtcagcccgcgacgctctacgaggcgctggtgaaggactataccggacggaccccggaggcacagtcgcagacgctggtgatcacccatctgaataaggaccggcgggcgctgaacagtctgatccatgacgcacggcgggagaacggggaaaccggcaaagaggaaatcaccctgccggtgctggtcacgagtaacatccgtgacggtgaactgcgcaaactgtcgacctggacggctcacaaggaggcggtggcgctggttgataacgtataccaccgtatcagcaaggtggataaggctaatcagctgatcaccctgacagacagtgaaggaaaggagcgatatatctcaccccgggaggcatcggcagaaggcgtcacgctctatcgtcaggaaaagataaccgtgtctcagggggaccgaatgcgcttcagcaaaagtgacccggagcgcggctatgtggccaacagtatctgggaggtgcagtctgtttcgggtgacagtgtcacgctgtctgatggcaaactcacccgtacgctgaccccgaaggcggatcaggcgcagcagcatatcgacctcgcctacgccattacggcccacggcgcccagggggccagcgaaccgtatgccatcgcgctggaaggggtggccggtggtcgggaacagatggccagctttgagtctgcctatgtggcgttatcccgcatgaaacagcatgttcaggtctacaccgacaaccgtgagggctggataaaggccatcaagcattcacctgagaaagcgacggcgcacgatattcttgaaccccgtaacgaccgggcggtgaaaacagccgatctgctgttcgggcgggcaaggccactggatgaaaccgccgcgggccgggcagccctgcagcagtccggtctggcacagggaagttcaccaggaaaattcatttctccggggaaaaagtaccctcagccgcatgtggcgctgccggcatttgataaaaacgggaaagccgccggtatctggctcagcccgctgaccgatcgggacggacggctggaggctatcggcggagagggacgaattatgggcaatgaagacgcccggttcgtggcgctgcagaacagccgcaacggtgaaagcctgctggccgggaatatgggggagggcgtcagaatggcccgcgacaatcccgataccggggtggtggtgcggctggccggtgatgaccgcccctggaaccccggggccatgaccggtgggcgggtatgggctgaaccggcgccggtggctccggtaccgcaggccggggctgacattatcctcccgccagaggtactggcacagcgggcggcagaagaacagcagcgccgggaaatggaaaaacaggcggaacagactgcccgggaagtggccggggaggcgcgtaaagccggcgagccggcggaccgggtgaaagaggttatcggggacgtcattcgcggactggagcgtgaccggccgggtacggagaaaacgacgctaccggatgatcctcagttccggcgccaggaggaggcgattcagcaggtggcctcagaacgtctgcagcgtgagcgtctgcaggctgtggagcgggacatggttcgtgaccttaaccgcgagaaaaccctcgggggcgactga

SEQ ID NO: 229789 - DNA, 585 bp, Klebsiella pneumoniae; identical to SEQ ID NO: 226848

SEQ ID NO: 229790 - DNA, 219 bp, Klebsiella pneumoniae; identical to SEQ ID NO: 229497

SEQ ID NO: 229791 - DNA, 312 bp, Klebsiella pneumoniae; identical to SEQ ID NO: 229496

SEQ ID NO: 229792 - DNA, 405 bp, Klebsiella pneumoniae; identical to SEQ ID NO: 111143

SEQ ID NO: 229793 - DNA, 393 bp, Klebsiella pneumoniae; identical to SEQ ID NO: 224058

SEQ ID NO: 229794 - DNA, 651 bp, Klebsiella pneumoniae
atggtagcgggccgggatcagctggaaaccgcctttacggtaactgttgagcacctgctgttcagcggcgagagaggcctctgtgctgtctgcggtgtacgtggtgatattaaagaagtaggacaccagggaggtctggttggtcgccagtcgctggcggatatcgccccactcctgcatttcctttatcacgttcggaaaaaacttcgcgtaggaggttttgcttttcttctccacgtccatgaatttcatgttggcttcattctgggtcttcacctggtcctccaccatcagcgtcagcgtaatgacaaaggggcaggaaatggagagctccgggttaagcaggttggcgtagttatccgcggaggtccagaggaaggccatttccggatcactctccagatggtagctcgtcacccgggttacgcactctttcccgtcacgccccaggcggccaattttcagatgaccggcggtgacctgcatatcaaagctgtcatcgacacactgatagttcagatcctgataggggtccagcttatacggtacgcggtacatctcgtgcgggtccgggtttataagctcgcgcatcagttcgaccagcccggcagcatcaaggatacgcgtcggaatataggcaccgcccagtga

SEQ ID NO: 229795 - DNA, 1272 bp, Klebsiella pneumoniae; identical to SEQ ID NO: 221107

SEQ ID NO: 229796 - DNA, 858 bp, Klebsiella pneumoniae; identical to SEQ ID NO: 102269

SEQ ID NO: 229797 - DNA, 285 bp, Klebsiella pneumoniae; identical to SEQ ID NO: 102270

SEQ ID NO: 229798 - DNA, 336 bp, Klebsiella pneumoniae; identical to SEQ ID NO: 139380

SEQ ID NO: 229799 - DNA, 348 bp, Klebsiella pneumoniae; identical to SEQ ID NO: 203618

SEQ ID NO: 229800 - DNA, 231 bp, Klebsiella pneumoniae; identical to SEQ ID NO: 112534

SEQ ID NO: 229801 - DNA, 876 bp, Klebsiella pneumoniae; identical to SEQ ID NO: 213968

SEQ ID NO: 229802 - DNA, 231 bp, Klebsiella pneumoniae; identical to SEQ ID NO: 139462

SEQ ID NO: 229803 - DNA, 426 bp, Klebsiella pneumoniae; identical to SEQ ID NO: 104046

SEQ ID NO: 229804 - DNA, 228 bp, Klebsiella pneumoniae; identical to SEQ ID NO: 213970

SEQ ID NO: 229805 - DNA, 651 bp, Klebsiella pneumoniae
atggtagcgggccgggatcagctggaaaccgcctttacggtaactgttgagcacctgctgttcagcggcgagagaggcctctgtgctgtctgcggtgtacgtggtgatattaaagaaataggacaccagggaggtctggttggtcgacagtcgctggcggatatcgccccactcctgcatttcctttatcacgttcggaaagtacttcgcgtaggaggttttgcttttcttctccacgtccatgaacttcaggttggcttcgttctgggtcttcacctggtcctccaccatcagcgtcagcgtgatgacaaaggggcaggaaatggagagctccgggttaagcaggttggcgtagttgtccgcagcggtccagaggaaggccatttccggatcactctccagatggtagctcgtcacccgggtcacgcactctttcccgtcgcgccccaggcggccaattttcagatgaccagcggtgacctgcatatcaaagctgtcatcgacacactgatagttcagatcctgataggggtccagcttatacggtacgcggtacatttcgtgcgggtccgggtttatcagctcacgcatcagttcgaccagcccggacgcatcaaggatacgcgtcggaatataggcaccgcccagtga

SEQ ID NO: 229806 - DNA, 633 bp, Klebsiella pneumoniae
atgatctgcggcggtgatgtcttctgccttgatggtgaatgtgacaaagccacgtccgggaagagcaacgactttgggcaggcggtgtctgagttggcggcactggctaccgcggggaaggacgtcgcggcactgaacggggtggatgtccgggccttcaccggaaaagcgaagttctgtaagaagtttgctgccggcttcagtaactgctgcaaagacagcggctggggccaggatgtggggctggcacgctgcagcagcgaggaaaaggcgctggccaaagcgaaaaaagacaagctgacggtcagtatcggggaattctgctctaaaaaggttctggggatttgcctggagaaaaaaaggagctattgccagttcgactcaaaactggcgcagatcgttcagcagcagggaagaaatggtcagttgcatatcggttttggcggcgccagcagtcctgactgtcgggggattacggttgaagagctccagaggatcgactttaacatgcttgatttcaccaattttatggacgacctgatgaaaaatcaaaaaataccggaaaacgatgttctcaccaataagaccaaggaacgaattaaggaaatcatgagtcagcaatccgcgcaataa

SEQ ID NO: 229807 - DNA, 186 bp, Klebsiella pneumoniae; identical to SEQ ID NO: 222347

SEQ ID NO: 229808 - DNA, 1086 bp, Klebsiella pneumoniae
gtgagcatcatccagcacgttggcgaacgggttaaacttgagggtatcgccatcgaggtatacgccccccatgttttcacacagggacttatagccatcgcccatgtcgaacacccaggcaaacccgccggagtcgagcacactgcgaatgaggggctgaatcagaccggttttacccgccccggacgtcccgcagactgccatgttgaaattggtattgttcattccctcgtagaacaggtcgatgaacgccagctgatttcggtaggtgggcgccaggagtcccgccggcgccagcgggctgtcagcgacgatcggcaggaggttagccacctggaacgtctccgcccgcttcaccacgcctgccgcctgcagctctttaaacaggccctcaccacacttgaacggcatcatggccagaaagttacgcaggtgatggtagcgggccgggatcagctggaaaccgcctttacggtaactgttgagcacctgctgttcagcggcgagagaggcctctgtgctgtctgcggtgtacgtggtgatattaaagaagtaggacaccagggaggtctggttggtcgccagtcgctggcggatatcgccccactcctgcatttcctttatcacgttcggaaaaaacttcgcgtaggaggttttgcttttcttctccacgtccatgaatttcatgttggcttcattctgggtcttcacctggtcctccaccatcagcgtcagcgtaatgacaaaggggcaggaaatggagagctccgggttaagcaggttggcgtagttatccgcggaggtccagaggaaggccatttccggatcactctccagatggtagctcgtcacccgggttacgcactctttcccgtcacgccccaggcggccaattttcagatgaccggcggtgacctgcatatcaaagctgtcatcgacacactgatagttcagatcctgataggggtccagcttatacggtacgcggtacatctcgtgcgggtccgggtttataagctcgcgcatcagttcgaccagcccggcagcatcaaggatacgcgtcggaatataggcaccgcccagtga

SEQ ID NO: 229809 - DNA, 1086 bp, Klebsiella pneumoniae
gtgagcatcatccagcacgttggcgaatgggttaaacttgagggtatcgccatcgagatatacgccccccatgttttcacacagggacttatagccatcgcccatatcgaacacccaggcaaacccgccggagtcgagcacactgcgaatgaggggctgaatcagaccggttttacccgccccggacgtcccgcagaccgccatgttgaaattggtattgttcattccctcgtagaacaggtcgatgaacgccagctggtttcggtaggtgggcgccaggagtcccgccggcgccagcgggctgtcagcgacgatcggcaggaggttagccacctggaacgtctccgcccgcttaaccacgcctgccgcctgcagctctttaaacagaccctcaccacacttgaacggcatcatggccagaaagttacgcaggtgatggtagcgggccgggataagctggaaaccgcctttacggtagctgttgagcacctgctgttcagcggcgagagaggcctctgtgctgtctgcggtgtacgtggtgatattaaagaaataggacaccagggaggtctggttggtcgacagtcgctggcggatatcgccccactcctgcatttcctttatcacgttcggaaagtacttcgcgtaggaggttttgcttttcttctccacgtccatgaacttcaggttggcttcgttctgggtcttcacctggtcctccaccatcagcgtcagcgtgatgacaaaggggcaggaaatggagagctccgggttaagcaggttggcgtagttgtccgcagcggtccagaggaaggccatttccggatcactctccagatggtagctcgtcacccgggttacgcactctttcccgtcacgccccaggcggccaattttcagatgaccggcggtgacctgcatatcaaagctgtcatcgacacactgatagttcagatcctgataggggtccagcttatacggtacgcggtacatctcgtgcgggtccgggtttataagctcgcgcatcagttcgaccagcccggcagcatcaaggatacgcgtcggaatataggcaccgcccagtga

SEQ ID NO: 229810 - DNA, 993 bp, Klebsiella pneumoniae; identical to SEQ ID NO: 226851

SEQ ID NO: 229811 - DNA, 246 bp, Klebsiella pneumoniae
atgatgcactgtccgttctgcaaaaagtcggcgcatgcccgcacctcccgctatctgtcggagaacgtcaaacagcgctatcaccagtgcaccaatattgagtgctcggcgacgttccgcaccactgaagccatcgacgaggttatccggcccccggcggagaaagcgccgcctgtcgcggagccggtcacacccccggcaccccgtaacgtgcagggctgctacagctcgccataccgtcattaa

SEQ ID NO: 229812 - DNA, 447 bp, Klebsiella pneumoniae
gtgctggcctttgaacgtgaccagctgaaagccacctgcaacagcaccgcaaagacattccgccaggcgcatcatgctgtgctgagtaaatatgctgaggaagagcttaaccgcgcgctgaatgacaccctcgggccactggtccgggcgatggtgctgaaagcagaggtgatgggaaatccactggccaacaccaccggccatcaggggtacatcgagccggagaaggaggttatgcagcaggtggtcaccttcctgaccgggaaagtgagcgccttctctgtcacgccagcggatgagccggtgctctccctgaccggcttcccggccgtcaccctcccgcatatggaccacgacgccgccagcacgcccggcgagcgtaaggtctggcaggagaaaatccgtcagcgcgaggctgacctgaaagcgcgggggctgctgccatga

SEQ ID NO: 229813 - DNA, 381 bp, Klebsiella pneumoniae
atgggctattcgttcacgtctccggaggtggtcagggcgcttgtcggagcaaaacgccggggcgtggatgtgaaagtcgttctggaccacaaagccaataccggcgagcgtaacaaggccagccgtgcagccatgaatctgctgatcagcgcgggtataccggtccggacggtggatacctacaagatcctgcacgacaaagtgattatcgctgacgggcgtaatacggaggtcggttcgttcaacttcagtcgcgccgccgatcgtgccaattcagagaacgtgctggtcgtgtgggatgaccctgttgttgctcaacgctatctgcagcactggtcgtcacgctggtcgaagggaacggactggaaacagacgtactga

SEQ ID NO: 229814 - DNA, 651 bp, Klebsiella pneumoniae
atggtagcgggccgggatcagctggaaaccgcctttacggtaactgttgagcacctgctgttcagcggcgagagaggcctctgtgctgtctgcggtgtacgtggtgatattaaagaagtaggacaccagggaggtctggttggtcgccagtcgctggcggatatcgccccactcctgcatttcctttatcacgttcggaaagtacttcgcgtaggaggttttgcttttcttctccacgtccatgaatttcaggttggcttcgttctgggtcttcacctggtcctccaccatcagcgtcagcgtaatgacaaaggggcaggaaatggagagctccgggttaagcaggttggcgtagttatccgcggaggtccagaggaaggccatttccggatcactctccagatggtagctcgtcacccgggttacgcactctttcccgtcacgccccaggcggccaattttcagatgaccggcggtgacctgcatatcaaagctgtcatcgacacactgatagttcagatcctgataggggtccagcttatacggtacgcggtacatctcgtgcgggtccgggtttataagctcgcgcatcagttcgaccagcccggcagcatcaaggatacgcgtcggaatataggcaccgcccagtga

SEQ ID NO: 229815 - DNA, 564 bp, Klebsiella pneumoniae; identical to SEQ ID NO: 223605

SEQ ID NO: 229816 - DNA, 651 bp, Klebsiella pneumoniae; identical to SEQ ID NO: 229814

SEQ ID NO: 229817 - DNA, 444 bp, Klebsiella pneumoniae; identical to SEQ ID NO: 226850

SEQ ID NO: 229818 - DNA, 228 bp, Klebsiella pneumoniae; identical to SEQ ID NO: 215004

SEQ ID NO: 229819 - DNA, 195 bp, Klebsiella pneumoniae; identical to SEQ ID NO: 215000

SEQ ID NO: 229820 - DNA, 228 bp, Klebsiella pneumoniae; identical to SEQ ID NO: 215001

SEQ ID NO: 229821 - DNA, 429 bp, Klebsiella pneumoniae; identical to SEQ ID NO: 102320

SEQ ID NO: 229822 - DNA, 309 bp, Klebsiella pneumoniae; identical to SEQ ID NO: 138910

SEQ ID NO: 229823 - DNA, 309 bp, Klebsiella pneumoniae
atgattgtgcccgtagaggttgatcgcgatgcgcggggctactggacacacccggcgttaatccggagttgctgccagaccacgccacagctgatgtggtggctgcgcgtccagaagctggagtgcttcgtgatgagtatgcgtgacgaggctacagaagcattctgtgccggatgggatgatggcccgccagacgcttctgcatgggagctggttcctccgcccggtaagggttggtttcttggttcagtacatccacgggaggaggggccggaatgctactggttccgtcataccacaaaagcctga

SEQ ID NO: 229824 - DNA, 321 bp, Klebsiella pneumoniae
atgaaaacgcctctgccgcccgtattgcgtgccgccttgtatcgccgtgccgtggcctgtgcctggctgaccctgtgcgaacgtcagcaccgctatcctcacctcaccctcgacgcgctggaaagcgccatcgccgccgagctggagggcttctacctgcgccagcacggcgaggaaaaaggccgcctgattgcctgtgcgctgctggaagatttgatgcaggccgggccgctgaaagccgccccgtcgctgtccttcctcgggctcgccgtgatggatgagctctgtgcccgccatatcacatcgcctgtactgcactga

SEQ ID NO: 229825 - DNA, 264 bp, Klebsiella pneumoniae
atgagaaccaccactgacgcggtgctgcagctggtgaaggatggcgttaccgacggggtgcagattgacccgacactatatacgcagtacggcatccggagtgtgccgtctctggtggtacggtgtcaggccgggtatgacgtggtacgcggtaacattcacgtcaaacaggcgctggagaaagtggcacagaccggtgactgcgcacagctggcccggcagatgcttgatgcgccctcgaatgccgccgggagccagccatga

SEQ ID NO: 229826 - DNA, 291 bp, Klebsiella pneumoniae
atgaaagtaaacgtcgcgagcgcggttaaaaacattgttaactgggcctttccactcttttttttgggtggtctgctgtatcttgtttacgatgattacagagataacggtacagcgactgaagaacagttattaatgatttctcatgaaataccctgtgccggtgaggattttcgaacggcactccgtaatagcccgggaccattaacccttcgcgatgcgaagaaaattgccgctaaatgtaacgagaaatataaacaacttaacgcactgaacgctataagcaaataa

SEQ ID NO: 229827 - DNA, 309 bp, Klebsiella pneumoniae
atgattgtgcccgtagaggttgaccgcgatgcgcggggctactggacacacccggcgttaatccggagttgctgccagaccacgccacagctgatgtggtggttgcgcgtccagaagctggagtgcttcgtgatgagtatgcgtgacgagtctacagaggcattctgtgccggatgggatgatggcccgcctgacgcttcagcatgggagctggttcctccgcccggtaagggttggtttcttggttcagtacatccacgggaggaggggccggaatgctactggttccgtcataccacaaaagcctga

SEQ ID NO: 229828 - DNA, 162 bp, Klebsiella pneumoniae
atgaacaagcccgtcatgccggaacttgttgaacgggaacagcctgaacacctgcgcgaatatttccatgaacggctccgcgtacatcgactgaacagtcagcagctgccgcgcgcaaatgcgcccgaatataataaaccgggcgaggatcagcagaattaa

SEQ ID NO: 229829 - DNA, 228 bp, Klebsiella pneumoniae
atgcagacacaggcgatgcgtgtttatcagatcacatttaccggacgcgatgcaaaaggcgttattccgatgtttacccgcgtgaaagccatgaccggaaagggcgcgattaaggcgtttattgagcgttacaaacctgttcagggctggtttctgggcgatcccgaagacattaccgacaacgtgcaaaaggaggcagaagaagcagagagcaaaacgcagagatga

SEQ ID NO: 229830 - DNA, 267 bp, Klebsiella pneumoniae; identical to SEQ ID NO: 214999

SEQ ID NO: 229831 - DNA, 231 bp, Klebsiella pneumoniae; identical to SEQ ID NO: 121864

SEQ ID NO: 229832 - DNA, 264 bp, Klebsiella pneumoniae
atgaggaccaccaccgacgcggtgctgcagctggtgaaagacggcgtcaccgacggggtgcagatcgacccgacactatatacgcagtacagcatccggagtgtgccgtctctggtggtacggtgtcaggccgggtatgacgtggtacgcggtaacattcacgtcaaacaggcgctggagaaagtcgcacaaaccggtgactgcgcacaggtggcccggcagatgcttgatgcgccctcgaatgccgccgggagccagccatga

SEQ ID NO: 229833 - DNA, 222 bp, Klebsiella pneumoniae
atgttcggtcttgatgcattccatctggcgcgagttcaattcgcttttacggtctcatttcatattatcttccccgccattactattgggctggccagctatctggcggtgctcgaaggcttatggctaaaaacaaaaaatcccgtctggcgctcgctgtaccatttctggtcgaagattttcgccgccatttcggtatgggggtcgtttccgggctggtga

SEQ ID NO: 229834 - DNA, 1494 bp, Klebsiella pneumoniae
atgacttctcaagtcgctaacccaccggtgcagtcgatacgcctgctgttcagcgcattgctgctggtgatgctgctttcagcgctggatcagaccattgtctccaccgcgctgccgacgattgtcggcgaactgggcgggctggacaagctttcctgggtggtcaccgcctatatcctcagctccaccatcgcggtgccgctgtacggtaaatttggcgatctgttcggccgcaaaatcgtgctgcaggtggcgattgggctgtttctcgtcggctccgcgctctgcgggctggcgcagaatatgacccaactggtgctgatgcgcggcctgcaggggctcggcggcggcggcctgatggtgatcagcatggcggcggtcgccgacgtcatcccgcccgccaaccgcggccgctatcaggggctgttcggcggcgttttcggcctggcgacggtgatcggcccgctgatcggcggttttctggtgcagcacgcctcctggcgctggatcttctatatcaacctgccgctcggcctgttcgcgctgctggtgatcggcgcggtattccacagcagcaataaacgcagccagcatcagattgactggctgggggcgatttatctcagcatggcgctgctgtgcatcatcctgtttacctcggaagggggcagcgtccatgcgtggaatgacccgcagctgtggtgcattctggccttcggcatcgtggggatcatcggctttatttacgaagaacggatggccgccgagccgattattccgctggcgctgttccgcaaccgcagcttcctgctgtgcagcctgatcggcttcgtcatcggcatgtcgctgttcgggtcagtcaccttcctgccgctctatctgcaggtggtgaaggaggcgacgcccaccgaggccgggttacagttaatcccgctgatgggcggcctgctgctgacctcgattatcagcgggcggattatcagccgtaccggtaaatatcgcctgtttccgatcctcggcaccctgctcggcgtgaccggcatggtactgctgacccgcattaccattcactcgccgctgtggcagctgtacctgtttaccggcgtgctgggagcgggtctggggctggtgatgcaggtgctggtcctggcggtgcagaatgcgatgccggcgcagatgtacggcgtcgccacctccggcgtgaccctgttccgctcgattggcggctccatcggcgtggcgctgtttggcgcggtgttcacgcacgtgctgcagagcaacctgcaacaactgctgccggaaggcgcggtgctgccgccgggaatgaatccggtggcggtccagcacctgcccgcggatatccgcctcgactacctcgacgccttcggcgcggcgatccacgcggcgtttctgatggcggccggcattatggcggtggcgtttgtcctctcatggctgttaaaggaggcgccgctgaagaccgcgacgcattaa

SEQ ID NO: 229835 - DNA, 333 bp, Klebsiella pneumoniae
atggcagcaacctttctcgatatcgctatcaccccggacgtgatggatgtgcagcatgaaatgggcagcgactcgctgtggcaaacgccgcacagtcgccgccaggccgaccgcttcggcgacagcgaagcggggatgatcgccacccgcgacagcttttatctggcgacggtgtcgcagagcggctggccctacattcagcatcgcggcggcccgccgggtttctgcatctgctggatgacaccaccctggcgatggccgatttcggcggtaaccgccagtacattactaccggcaatctgcgcggcagcgaccgggcctgcctgtttttga

SEQ ID NO: 229836 - DNA, 537 bp, Klebsiella pneumoniae
atgagccgtttagcagatatccgtgaacaagacgccaccggcaaagccgccgatattttcgccgggattaaaaaagcgatgggcaaagtgccgaacgcctacctggccatcggcggccactcgccggcggcgctgcagcaggcgctggcgcacaatgcgatgctccataaaggcagcctcagcgcccaacagctggaggcgattaatctgtcggtcagcgaagccaccggctgtgactactgcctggccgcgcacaccctgatggcgaaaaaagccggcttcagcagcgagcagatccatgccctgcgccgcggggagtatgcggaagaggcgcagcttgatgcgctggtgaaattcgcgcagaccctggtgaccaccaccggtacgctgccggaagccgacgtcgccgcgctgcgcaacgccggttttagcgaccagcaggtgattgagattatcagcgccatcagcgccatcctgttcaccaacatggtgaaccgggttaacgacacggtggtcgacttcccgaaagccgattaa

SEQ ID NO: 229837 - DNA, 606 bp, Klebsiella pneumoniae; identical to SEQ ID NO: 190284

SEQ ID NO: 229838 - DNA, 1032 bp, Klebsiella pneumoniae
atgcctattactaaagagataatacaactaatggatactctggctgagtctattgctcataccattaaagattatgtaaacaacgacttttgtgatgaaaatgataaggatcatgtgttaaagtgggtatcccaatttgatgaagatgaccgcttatttgttttaaaacaaactgatcttcttttgaaaaagcagtattttaccaaagataattttgaaatacttttagataatgccataaaggatacggcaagtaaaacattgcatgatacttctttcttagatgtgcaacttgacggtaaaagccaaagtgacatgttggaaatacttaataatagctgtttaaatactcacaacttcccaattaatatcaataattatacaaagaataggttcgtttatcaggatgatgttgttttcactggtgatagagtttgtcgagatctcgaagagtggataattcattccgcgccacatcaatgttcattgcttattgcatctctgtacacccatacttcggccctgtataatatagaaaaaaatcttatccaaacaataaatatatcaggaaagagtatcagtctatcccttgtttgcttcggaaaaatatatgaaaacaaattcataatgaggaatcagtctgatgtattctggcctaaagaagaaaatgttaacattccaaataatctcgatccaataaggtttataagtactgcacctcaaggccaggcacctggacgcacagggttcgctgcgagttatgttttcgaaaatggaaatgacagagacagatttgaaaagattttatgtgaaaaaggattttatataatatcactctgtaataatcctgcagcctcaatgaaaccactaggttataaaacatatagaggcctcggttttggtggcaccatatttacctacagaaactgtcctaacaacacccctcttgttttttggtggggcaatccaaatatggaagattggaatccgttaagcaaatggtatccattgatgatgagaaaaacatactaa

SEQ ID NO: 229839 - DNA, 1290 bp, Klebsiella pneumoniae
atggaaaaaaatgttggtaaccacaataaaaattctgatgtacttatacttaaaggtatgttgaacaatttaaaagatggtttaaataattttgaattattgcttaaattgcagtttaaaatattggcgtgcgtgatgagatgtgagcgaaaaattaagtctcttaaaaaggataatgctaacttaaggtcggcattaaaaaaatcaagacttccaaaagaaaaatccctggcagtaaaagaaaaaattaaatacaattctgaagtaattgctgcagaaaaattcaagatatatacgtataaaatgtttggcgatgctgttgcatttttatacatcgataaatatacaattaaacagttatactacaatgtacataattacaatattaaagaaacatcgggggatttgagcggtaagtctggattgcgagaggaatgggaatgcgtaaaacttgcatgtgataataaagttccagctctgttgcatgatattacaatgagtataaggcatggagatgtatcacttttaggtaaagatgaaccatttattattgagatgaaatcaagctcaaatacaaataagagagttgagcggcaaaaatctaaccttgaaaaattaggaagtttcatagcaaaagacgaagccgaaaattttcgagggattccattgttaatcaggaaaaatttgttaactgaagaggaatcatattctcagattttaaatgagtgtcttaatgattgtcgcagcaaaggaatggctttggtagaagctgaaaaaggattttacatctgcgcagttagagaagggaatatggcttctatgctagaaaatatagattttgatgaaaaaaaagaagtttttcctgtatttctcaatcaatataaaaataatggggagtggctaccattaacaccatttactctattaattaacgatccctacgatctccatgattttatcgaaggggaattaacaatagcttgttttttaatgctcgatgaatacaaaaaaattgctatagaactaggctatgaattagtttttgtttctaatgatgaatatagtatcttgttaaaaagaattggtgaagatattatatttggtgtttcctggcaaatgttgttaagagttccattagagatgatgtcaatgtcatggttgataaaagaaagtattaatgtatatagtaactcactaggaaatagcacccataaagatgaattaaatcaggggcaggggaatactaaaaattcattattcgaaaaatacaagaatttattttctcactaa

SEQ ID NO: 229840 - DNA, 1374 bp, Klebsiella pneumoniae
atgagcgggtgtatatttaacagcaaaacattgggttcttatgatttttcatcacatttaattgagatttcaaacgatgaattaaacataagtttaccgcaagcacaaaatatcatagacaataaaagcatatatgattttaatgatagcgaaattgaattttataaaacatatctccatgaaacaatccatttacttgattgttctacaactcactgggggttaaattattcaggtcgactatataactattttaaatatgaaacaaaggaggcttttgataatttattagttgatgatactgagattattttacattatcacttcaaaaacaacagtactaataaattaaattataaaaatattaaagcatcattacaatatgatgacgatatgggtgtgtatatcagagtccatttctttgggtatgtcaataattatcaagaaatcctaaacattcctttaagcatgctagctattttagaggggcatgcgtacgctcaagagcaattatttcattgggaaatattagaaaaaaggaatgatttttttaaattaaaaatgcttgaaaatgaaataaaagaaaagttgcaacaaacagacttagtagagtatacatgtgttttatctttcatcgatcagttattcccatcattttcaataaaattaaaattaaagatgtgtatttttttatgtcgttcaagtttgaacgctgacattctaacaagaatcactattccagactggttaataagagaaattttctcaaactctccgcctgattatgtcaactcccttagacttgatataaacagaggtaatagtactcccgcagttttcttcatatatcttatgtctcttgcagtctacaatgaaactaatattatcatcgatggtactgatttttactcttacatggagagtattttattaaatactatctacgaaaacatgcattttgagtctttaagagaaatatccgacattagcatcgatcacaaaatatctctcttgcaacaaaatggggctcatctagtttcagaattagctaatgagtctaaaaactatagttggtattctttcgacctacgcgaaattaaattaccaggagtactattgtgtgatgaataccaatatttatatcccaaaaggaacttgtccattgatttggaagactacatcgataaaactcttcaaagagcaataaggcttgataagctaaaaaataatgaaccgagtaaaaaacagcatttagaccctagggttgcctcagcttggcttcaagatattaagtcaggtaaaaatagccgtatgatagttgagtactcttttgacgatgaagataatatggaagtaaaaaaatatattagataa

SEQ ID NO: 229841 - DNA, 837 bp, Klebsiella pneumoniae
atgaaaaacaaactgttaatacaacagaacattagtttcggcaaccctggacaaattacattcagaggaggaaacaatattgataacctggtaaataaaacattatattgggattctattgttaacttaaacacaggattagtaggctcccctaccagccaggacattgaaacacttaggcgagaaggtattttcgaagatgttaaagttgatgtcatcggtgaaggtgaggtttcaatgttggttgcagaggcaaccaaatcaaagatactcactcttttagatgacaaaagtataaactatatcccggataatttatcaccaagagttcttgtaaatgaagggatcgctcataacacaggcggtgctttaatccacatagtcaattccatgccattcattgatgttaacacgccattagatgaagttcttgaattcaggcaatccagaaaagaacaattaaaacatctcacaaccactttaaactcaatggaattgagagtgttagaagcacaaaatcaggcaatggagttaaagaaagtgatgaatgaaattgacatggcatgtttagaaatatatcgcttgtataacgaaaagaactttactttaattccttctgccataaaattaaacttcaacatgaaaaatatactcgcagtaggtgcttccgtgtatgcaggggcaagctatttactgccgcagacaggagcagctgtagctgcattggttggtggagcggcgtcagtcataagttgggaaggctcagtaagaataaagggttctcataataccaatccttttagctataccgcagaggtaaggaaacacttcaagtaa

SEQ ID NO: 229842 - DNA, 744 bp, Klebsiella pneumoniae
atgagcctacgactgccaacgatacttcctggtaccgggtataaacacatcagcgaatttgttgttgatgatatttttgctgatcttcccaacaaggccggtctggttggagcgtattttctttcttcgcaggttggtagccctctcgtcaactacgccgaccttaacaagccgttgctcaaagttggcgcccctgccgttggtagcgagtatgctacgaccgggaccgcgaatttctacgatacgcagctgccctctacgccggtaatgacggttatgggtatcagcctgccaggcgctgattcgcagaatggtgtattgcttgctaactactctcagtcacccatcagcggcgatacgctccagtattatctcggccatgctaaggcgttcggtcaaatggggagttcgattgcgtcggcggatacagttgtaccaactaccgatcttcccgctggcgtgctggcgataacgggtggcgttattaaaaatgcttccgtaaaagcattcgcttacgatcctgtaacgaatgctatgatctcatcaatttccacgagtgcggggcgaacggtaacaaccgacagaacgctacgcctcggcacgtcatacgcaacaacgcaattcactgggggctcaaacatttccgttgtgctggtatacaacgtagaactaaccgatgctcagatactggcaaatgctcagtggctgaaaaacagcttcggagtggaatggggcctttggtaa

SEQ ID NO: 229843 - DNA, 1500 bp, Klebsiella pneumoniae
gtgacgctcaatactcatcaggtcagttattacatgactcagcgtaaaaaaggtgtaacccagcatatctcggccatgaaggccggtatctctgttcgctcaggtcgcaggatcgaaaaagatcagtggtctaaaaccggtaatcgtcactggcggacacgtaaagatccgcttgaggccgtctgggacagcgagcttgttcccctgttgaaggaaagacctgctctgatgcccacgaccctgctggaaatgctgcaggataaatatcccggtcagtaccccagcagccttcgcaggacgatgcagcggcgggtgcgcgagtggaagctgcagtatggtgccgagcaggaagtgatgttccggcaacttcatcagcctggcctgcgcggcctgtcggactttaccgagctgaaaggtgtagttgtcaccatcggtggcaagttattgacgcataagctgtatcacttccgcctggagtggagccactggagctggatgcgggttgtactgggtggtgagagcttctctgccttggctgaaggcctgcaggaagccctcgggcaactgggtggcgtaccaacagagcataaaacggacagcctgcgggcagcatggaaacaccagggtgaagacggtcgccgcgagctgactgagcgctatgctgccctctgccagcactacggtatgcagggcgtgcacaataacgccggtcgtggccacgaaaatggttcagttgaaagcgcccacgggcatctgaaaagacggatccgccaggcgctgatgcttaggggcagtaacgacttcagcaccgtggaagaataccaggccttcatcactcagcaggtcatgcgccacaaccgcaacaaccaggatctggtgaaagaagagcgcccccatctgaaaccactgccgctgcgtcgcagcgccgactatgacgaactgacggtgagggtcagtagcagcagtaccatcaacgtcaggcacgtcgtctacagcgtcccttccagacttgtcggtcagctgttacgcgtccgcttgtgggatgatcgcctgagctgttacgtgggtagcagtgaagtgatgagctgcgcccgcgtcaggccagaaaaagggaaaacccgggccaggtgcatcgacttccggcatgtgatcgacagtctggcgaaaaagcctggtgcgttctgccatgccacgctgagaaatgacatcctgccggacgatgaatggcgaaaactgtggcgtcgcctgtgcaatcatctggagccagagatggctggtcgcctgatggtacacgccctgaaactggcggcgggctatgacgatatctcgatcgtggcacgggggatggaacagatgctgaataccccgggtgagctggatctgcaccgcctgatgcggttcctggggataaaggaaaaggagctgccgacagtcagtgtggttcagcacaacctgagtagttatgaacagctgttgcgcggcaaaggaggtctgcagtga

SEQ ID NO: 229844 - DNA, 756 bp, Klebsiella pneumoniae
gtgagcaatatccaccaccttgagcgtagtctgcgcaaactgcgtctgacccgcgtcagcgctgaatggcatgcgctggagaaacgggctctggcagagggctggaccccgtcacgctatctgctgacgctgtgcaatgaagaactcctgtggcgcgagagcgaaaaactgcgccgctataaaaaggaagcccggttgccggtggcgaaaacgctgggtgagtatgacttcagccaggtgccggaactgaataacgctcagttccggcagctctgcgaaacgacagactgggttgatgccggagaaaatgtcctgttgttcggtgccagcggcctggggaaaagccatctggcggcagcgatcgtggatggcgttgtaggactgggctaccgggcccggttctacagtgccggagagctgctgcaggagctgcgaaaagcgcggacacaactgaaactgaacgagcttctgctgaaactggatcgctaccgggtgatagtgatagacgacctcaggtatgtcaaacgcgacaacgcggaaacgggtgtgctgttcgagctgatcgcccatcgttatgagcgcggcagtctggtcataaccagcaatcatccgttcagcacgtggggcagcatcttcgtggatgaaacgatggcggtggcggcagcggacaggctgatccatcacggatatatgttcgagctaaaaggagaaagttaccggaagaagacatcgaaggcagtaaccagcgtggcttaa

SEQ ID NO: 229845 - DNA, 465 bp, Klebsiella pneumoniae
atgagccggttaaccgccattatcagcgccattgtgatctgcctgatagtcagtctcggatggttggctaggcactaccacgacaacgcgactgagttcaaaaggcaacgtgacgagaaggttaaagagctaaaccttgcgaacgagaccatcaccgacatgacaactcggcagcgagatgttgctgcactggatgccaaatacaccggagaactggcagatgctaaagccactatcgatcagcttgaacgtgatgttgcttctggcaagcgtcggttgcagctcaacgccagatgccccgcgagcggagcgaccggcaccggcggcatgggcgatgcttccagtccccgacttactgactccgctgaacgggattatttcaccctcagagagcgaatcgtcaccatcaccgggcaagtgagctaccttcaggactatatccgcatgcagtgtagtagacgataa

SEQ ID NO: 229846 - DNA, 378 bp, Klebsiella pneumoniae
atgaaactgactttaccatttccaccgagcgtaaatagttactggcgcgccccgagcaagggaccgctgaaaggcaggcatctggttagcgagactgggcgcaagttccagcaggcagcgagagcggcgattattgagcaactgcgtgccgttccccggccatcctctgatctggccgaggttcacatagtgttgtatccgccggatcagcgccgtcgggatatcgataactacaacaaagcgctgttcgatgccctgactctaacaggcgtctgggaagacgacagtcaggttaagcgcatgctggtggagtgggggaacatcgtgaagaaagggaaagtagaaatcaccatccgacgttttcgtgcagctacctga

SEQ ID NO: 229847 - DNA, 696 bp, Klebsiella pneumoniae
atggaggatgctgaaaacagcctgtccagtgcggcgatgacgcccaggggacggctacgggtggatgtaccgagtccgctggcccgccttattctggtgccggcgctaccggctttccacgcccgctaccctgatatccagatcgacatgggtgtgagcgaccgggtagtggatctgatcggcgacaacgtggattgcgttctgcgcggtggtcaaatcaccgaccagtccctaatcgcacgccatgtcggcgatttgcaaatcggcgtctacgtcgcccccagctatgtggaacgccttggcgctcccgcacacccgcgcgagctgcaaaatactgaccattgcatagtgggattcttgtcctcacgcaccagtaagattgatcctttggtactgtgcagtgagaatgaacgtattgaaatcacgggcaactacgtacttgccgtggatgatggcaatgcttacctcgaagctgggttagttggcttaggcgtgattgcgctgcccaactatatggcggcagcgcatcaggccgttggcgctttgattccattatttacacaatggcggattagcccaatgcctctgtacctggcgtttccaccgaaccgccatgtcaacgccaagctgcgcgtttttattgactggatcgttgaattgatggagcagcatgtccccattgccaacaatcagtga

SEQ ID NO: 229848 - DNA, 492 bp, Klebsiella pneumoniae
atgaaagtaactgaacccagactgaatacgctgatcgataacctgaacaccctgatctgtgaggacagcctgctcacgcgcaaggagcgtgaaacgctggtactggccgtcgccgccatcggcgccatgaaagcgcgcgtcggcatgaaaaagcccgcgataccggcatcgtcgaaaccgaaggaagagaaacaggcacctgtacctgacccacgctttccgaatgcccgccaggcctgggtggctgaagaggaaactttattactggatgcgctcgatggcgtcccgaatgatgatattggtaagcatcttttctggctttccgagaaactggggagaacgccgttcagcgtcgcctgcaaaatcgcgtcactaagacgtctgacaaatggctggaaagagcagttcagggaagtttcggataaaattcgcttgtccggcctgagcatcagtgattatcttaagcagaacggcacggtccataacgcctga

SEQ ID NO: 229849 - DNA, 831 bp, Klebsiella pneumoniae
atggttaagccgttctctcaaagatatgggcatgttgaagtagaggatgtttttcagttgtatggcttaaatgaccaaactagaaaggcgatttggaattgcttatatttggaagttttcggaaacagtcttttgagtttgatcgcgccaatatgctcaaagaaaatatggattcattattttaacaaccctgcagatcacgttcctaattatagcaccgatacgatgagacaagattctcagctaaccattataaaacgttatatatacggagaacagtggtataaagtatttgatttgattgagtctattttcttgtatgtttcagagcaccgtaattgtgatttagctgacccccttaatgatacctttggaaaatatggcgttgcctacagggtaatcgatggattaattacgcctatatcagatgaagtggaaattgaaagtattgagggagcgttggctaataacacggaatccgctagaaatcatttcacaagagcgctagagttaatggcagatagagagcagcctgattatagaaactcaatcaaagaatctatctctgccatagaatcattgtgcaagaagatctctggtaatgagaaagggactcttggggattgccttaaaactattgaggataaaggacatattcatccagcaatgaaacgagcattccaacagctatatgggtatacaagtgaccaggggggaatacgtcacgcgttaacagatgatagtgaggagcccacattagaagaagctcgttatatgctggtgatatgtagcgcctttagtaattatcttgtgtctaaaatggctgattaa

SEQ ID NO: 229850 - DNA, 384 bp, Klebsiella pneumoniae
atggcatacccgtttgaagagatggtacagaaacttattgaagctggttattctcgtgaagatgctatggcggctgtagctgctgatgctcagcgcgtagcagaagagaagcgagccattgcaaccactacaacattacgcaatacatatggtggctttgatttaaataaagctaaagagtttttctccgacgctcgtaagcaggaagaggctaagaagtattttgacccactggaaggaatgcaatccactgacaatctgtctaaacgtgaacagatggatatgattcgagggaagcacgttggtaaaacagagaacgcttctcctttacagagcgttaacgctggtattgatttctttaaatcattgcgggaaggtaaataa

SEQ ID NO: 229851 - DNA, 297 bp, Klebsiella pneumoniae
atgaattatacagaacatagcattaaactactaaatgaagaagaagcagctaagcattccccctttggcattgcttatgccctttcaactaaatatcccccaatggacagcaagcattgtcagataatcagtgaagcattattcctcactggcattgagacatcattgtatgagcgccgctattgttccccattgaacgctgtagcttctgacatacattttacagctgaagaattagacacgctcgcagagctgctggaagcgtttaaagacatatcaaaaagaaaaggaaaataa

SEQ ID NO: 229852 - DNA, 186 bp, Klebsiella pneumoniae
atgtgccagctgtcggtgaaagagatattcctcagcgaggcgtaccgcgcctttggcgacgccctgtttctgtcgctggcggaaaccaccatcgaattcgccagccacgatccgcagcgcgcccgggagattatcgccctcggctttgaagccatgtggcacgccctgcatgaggcggacgcctaa

SEQ ID NO: 229853 - DNA, 1248 bp, Klebsiella pneumoniae
atggcagcaaaactttttacatgccaattattcgaaagtaaagggctaaataaagctatatatttttctggattaagttatgacctcatcattcatccatatgtttatggcgaacctctgacatccattcaacccatatactaccttgatgaactagaggctattgcaagattaagaattgaaccgccaaaaccaatctctgaaaaagaaattgagtatttaatagataactatttattcgaatactcactcttagatagcgattccaggatgtgctcaaaaataacaaagcctgctttttggcctttcgagtcaaacgacctctatcaatatcatgacaataaaaacactagagcactaacacttgatccacttaatgatgaaagtattgttagtttacaagatgcttcaggagaggaatggaatttcactgatttttgctttgcaaaaccattaattttcaatcatttggaaaattgcgccataaatatcaagaaactatataatgagaaaataaatgccatcattgctcctgactctcaccgagatggatatatgggaagattgagactaattgaaagtgaaaatgaagttttagactatactcaggctcttgatttagaatacaaaatatcattccatagaataaagagcattgatacatttgagatcgagtctgaaattatatcaggagatattatagacattcctgtccaaaaaataaccacaaataaaacttattcacctttattgctttcatattatttctctggactacgagaaagaaatccgttactgagcttcactgggtattataatgtcttagagtattatttggaagatgctgcaccattaataggactaacaactgctcgcacagaaaaagaaaatttaagacatgtcatgaatctaataactaatcataatgaactttatcaattcataatgaacttttcgcggcacctagttactaacataggacaagatatcatttcatcttcaggtgttaaaatcactggcgttagcgttcaagacgaaccaatattagtgactaacattagcgactggctctataaaatacgttgcgcagtagtacactcaaagaaaagtaggagaggacaaaccgaagctatctttgaaccatattcagatgaagccgataatatacaagcagccttgagtgtaatcaaatggttatctcaaaaatgtattttaaaagataatgagttaacgaactctgtaccatag

SEQ ID NO: 229854 - DNA, 156 bp, Klebsiella pneumoniae; identical to SEQ ID NO: 110363

SEQ ID NO: 229855 - DNA, 951 bp, Klebsiella pneumoniae
atgaaaaaacggaaaaagcttaagatctccactaaaaataaatcttatgacgtaaaggattcgccattttataagctcaaaaccaaaaaaaaacttgccggacttctttgcgttagtgtgaatgatttatctattttgagaaaagacgaaggtaattactctgtttttgaacagctgtctaaaaaaggcaagccacgaaaaatacaaaagcctttagagaaattagatgtagtgcatacgcgaattgcgagtttattatcgcgcattgcgttaccagaatatctgcattcaggtagaaaaaagtgttctaatgtaacgaatgctaaagctcatcttaaccatgaaaagatgatgacaactgatattaaggcctttttcccttcaacaacaagggtaatgatattttcatttttcttttcagtgatgaaaacgtcatctgacgttgctgatattttgtcgcacatatgcacctgtcatgaccggttgccaacaggaagtcggattagtatgcctttggcctactttgcaaactctagaatgtttagtgaaatgtatgagctttgccaaaaattaacagttaacatgactgtttatgttgatgatctgactttttctggcgctaacgtaaatcgattattctgtgctgtgattcgtaaggttatctgcaagcatgggcatactatgcatcctgataaaacaagattatatgctaaagaccaacccaagttggtaactggagttattgtattaggtgactgtttgaaagttagaaatgagcaacatcgcctaatggctagagatattgagtattggaaaataattaaagatgtggaaagtgctaaagaaacatcgattgcaaaaacactctttggtcgtttgcattcaatgggagttattgaacaacggtataaatcgaaagtcctcactttaaagtttaataccgcaaattaa

SEQ ID NO: 229856 - DNA, 360 bp, Klebsiella pneumoniae
atgataacccggccagcactgaaaacggtttcagtgctggccgggttgaacaacgagtcctgcgaggcgttagcttgttaccagattaacaccgagtgtcagcaaattcgtcaccgcacctgcaatgactcctggggttccatccttcaccgcactgataatcttatcgcccatcgtttcattaccgccaagcgcctcaggctttttgttgagcacggcgagagctttctcggtcagacgcacatccataaaatacgtttgatggtcggtttcatactggatgtatccattttcaccaagaaaagtgaatgtaccttcaaccacactacgcaattgatttattgctttcatttccggtga

SEQ ID NO: 229857 - DNA, 195 bp, Klebsiella pneumoniae; identical to SEQ ID NO: 110359

SEQ ID NO: 229858 - DNA, 1044 bp, Klebsiella pneumoniae
atgccagagggattcatccagagttttaaacttaaagttcatgaaagcgatgggatagaatatgaaaatttgttttcaaaggttatgtcgtattatattcctgggttcgaaagagtgaaacctcatggcaatataggtgacagaggtaatgatggatgggtatgtggtgtcggtgtttattaccaggtatacgccccagaggatttgcttagtaatgaaaagaaatcgctagataaaatgaagggtgatttcaaaaagctttatgaatattggaatgccatttccacagtcagggagttttattacgttgttaatgataaatataaggggataccaccgcaccttaataatgcaatctccgaaataaaaagtgaatacaaactaaataaagccatggtgattggtgctacggcccttgagggtttttttataactctgagtgatgaacagaagaattatatttgtgggcgatcgaatcgtattcagttctcaacagagcgctaccttatagagcgtattacaaaaaggatgtatcttcaggactggaataatatcagcgagaatcttatcgctaactctatgcaaactgaagttgttgatggattttatgaggcttgccaggccgttctggcaacccaaatgccaggccgacttcccaatcttgacttctcaatgattgaacttgctaaccatgcacattgcctttgcgaacatataactaatatgaattttgcaagtaacataaatggcttttggaaaatggatatgagttggaagagagtcagaatggatcaagataaatatcatgaaaaatataacacctacgaacactggagaagagagttgtttcggctgcattataacttagctcatgctttaaatcttttctctgtagaggttagaaaatcacttgagcctgatttcttttttggctcccaattcggaataagtgatagtatgggtgcctataatcatatggaacctatgctttttattcctggatcatactgttcaaattatcgagagctgtttggtgacgtttga

SEQ ID NO: 229859 - DNA, 2265 bp, Klebsiella pneumoniae
atgaccagtattattgaaacacctaaatggggcgacgttcctctaattacccgcgcagataaagtcgagggtggtcgcggcggtgcggctaatattcaggcgcaggaactggcaaaccgcactttgcttttaatgcagacgctggaaggttattccgttggcgaaaaaccttacaacaatgcggcaggcgcacaggctgatgttgataaggggctgattaagcctgatgctatctttacggtgcgtactgatgatgccgattactggctggatgaatataaaaatattaatggcatcgccacgccaaccgggaaaaagttacccagcgataaaatgctgcaagaaattaaaaataactttttccagtcacgtcatgatggcgatgtgatgttggattttgttgatgatgactggttctcattttttcgcgtgatggcaagtggggcgttcggggccattaactgcatggtcgcgcctgatggtttatatgttaaagacatggcgatgtcgcatgaggatggcgagccagggttgatttatcgtgacccggaaggatttagcgtaaatattgtcgggccagatggtatcgggcaacgtccgggaacgctgaatggtggcggaaaatttcatactgaaaccacggacagcgcctggttgcgtctggaagatatcgacgggttttattctgacgtagctgaccagtcagggaaagcggcgcctcatgcgctgagtggtgatggtgagttcactacgaaagccggtggtatgggttggctgaatcttgaggatgaggaaggttttttcaaagcgctgacggatagggatggcgagctaatcggggttaaagatacccctgttgaaagccttaatctgactgctgctgatgcgcaaaacaaggcgtattcgcagaatgttcgcagtcgctataacgccgcggtgcagcgtcttgttaccggtttgattcatctgctgatttacagccagagtctcggaacgcaacaggagggatggcccgctctgagtcaaacccctgtaaagggttttgataacctgatgctgggcgattcgatccgaccagccagcagaacagacccggcgtttgcgcctttgggagatgcagtattaaaaccgttgcgtgctgtcgttcagaacggcaccggaaacgcgatgataagcaatgaacaggttgcagccctgccggcaggttcacctaatgagggcgagggaggggtagctattgcaaacggtctgcgtcgtctctggttacagcgaaattgtctggagcgcgacccgtcgcgtcgatttgttctgtccagcaccggcgtaaacggtcgcagtattgagcagctttccaaaggtgcgacgcctgaactatatcagcgtccgcttcaggctgttcagcaggtgaaagccctggctgataaggaaggcgtgtcttattccatcggggcaatcatctggattcagggggagtggaattaccagaaaagggatggctctaacgacaaagcgacttataaggcgaatctcgaaaaactctataacgatatggtagccgatatggctgtcggcatcgccggacagaaagcgccgccagctattttcatgtaccagaccggggccggttatacccgtgatgatgctgatttatctatcgggatggcgcagtgggaattttgtcgcgaacatgataacgcttaccttgtcacgcctgcgtatcccttcccggataaaggagggcatctggggccgaatggctatcgctggatggatatgcaattcgccaaagtgatgcaccaggtattaaacgaggggcaaggctgggagccgctggggccgattagaattatcaatattgggcgtgagatttacgtgttttatcacgtgccgtcaccgccgctgacgttcaggccgtcatacgtgaaaaacgttgccacgatgtatgtcgataaaggttttcgtgtgaccgacagtgccggaaccgtagctatcgccgccgttgaaattgtggcggatacgattattaaaatcacagctggccgggatatcaccggcaatgcaaagttgtggtatggcgataaaactacccatgaaggaaacggcaacgtttttgatagcgacaaatttaactcgctggaaaatttcattttcgaagcggggacgggccagtatgaggccgaaaatataccggagctggtaggtaaaccatacccgttaaataacgcatcagtgcaattctgtctttcgattccttacggagagtaa

SEQ ID NO: 229860 - DNA, 729 bp, Klebsiella pneumoniae
atggttatggtcatcaaatctaacgtgccgtctaatatcattgcaaacccggatggatggaatccaccgtttaacacagatggtcttttatatgcaggtatttacgggcgcgggaatctgtcgaaaaactttgcagcaggtggcgcggatgcggtcgtgtctggctcgcctgtagtaagcaatcattttgccactttcgatcttaataactttattgatacgggagtgccaacggcgaaggaaacgacgctgattgctgttgtgaagaaagtaaatcccacactgcgacaattttttatttcttcttataatggtacaggtgacgctggtcgcagtctggttattgataagggaacggcaaggctgacattttattcgcattataaaaatacagaaactaatgccaatacagtgctgaattgttatgccacattaaatgtgacagccggagagcctgcgtttatctatggccgggacacgggtaaaaaaattaatgtcgcgagcatgaccgacaagctgagcggggagaatatcccgacggctgcgtttgaaaccattgtaaaccctgaactgaaatacaggattggtcgaggtattagcagtgaggttccgggggcatcggatatcggcgcagcattgatttttgaccgcgcattatctgatacggaaataaagtcaatttacgattacttccaggcctactacgcccgccgtggcatcagcatttaa

SEQ ID NO: 229861 - DNA, 1425 bp, Klebsiella pneumoniae
atggcgagtttcccacagggatttttatggggcggcgcactggccgccaaccagtctgaaggcgcttatcttgaaggcggtaaggggctgaccaccgtggatacccttccccacggcgcccatcgcctgccggtaaaattaggcctggagaagcgctttacgctgcgtgaagacgaattttaccccagccaccaggcgatcgatttttaccatcgctataaagaagatatcgccctgatggccgagatggggttcagcgtctttcgcacctccatcgcctggagccgcctgttcccacgcggcgacgaacagcagccgaatccgcagggcatcgccttctatcgctcactgttcgaggagtgcaaaaagcacggtatcgagccgctggtcaccctgtgtcattttgacgtgccgatgcatctggtgatggagtacggctcctggcgcaaccgcaaaatggtggattttttcagccactacgcccgcacctgctttgaagcttttgacggcctggtgaaatactggctcaccttcaatgaaatcaacatcatgctgcacagcccctactccggcgccggtctggtgtttgaagagggtgaaaaccaggagcaggtgaagtatcaggccgcgcatcacgagctggtggccagcgcgctggcgacgaaaatcgcccatgagattaacccgcaaaatcaggtcggctgtatgctggccggcggtaatttctacccttactcctgcaagccggaagatgtatggatggcgctggagaaggaccgcgaaaacctgttctttatcgatgtccaggcccgcggcgcctatccggtgtgggccgcgcgggtgttccgggaaaaaggggtcacgattgcgaaacagccgggcgatgacgagatcctcaaaaacaccgtcgatttcgtctcctttagctactacgcgtcgcgctgcgcctcggcggagatgaacgccagcaacaccaatgccgccaacatcgtcaagtcgctgaagaacccgcacattccggccagcgaatggggctggggcatcgacccgctgggcctgcgcatcaccatgaacatgatgtacgaccgctatcagaaaccgctgttcctggtggaaaacgggcttggcgcccgcgatgagatcgatgccaatggggacatcaatgacgactatcgcatcagctacctgcgcgagcacatcagggcaatgcgcgatgctatcggcgacggcattccggtgatgggttacaccagctggggctgcatcgatctggtctcggcgtccaccggcgagatgagcaagcgctacggctttgtctatgtcgatcgcgacgatgccggcaacggcaccctggcgcgtaagcgtaaaaagtcattcttctggtaccagaaggtgatagccagtaacggcgccgatctcgactaa

SEQ ID NO: 229862 - DNA, 1341 bp, Klebsiella pneumoniae
atgactaacatgagtcaggctccggcgacggagaaaaagggcgttagcgatctgctgggatttaaaatcttcggcatgccgctccccctttacgcatttgcgttaattacactattactttcacatttttataacgcattacccaccgatatcgtcggcggctttgccatcatgtttattatcggcgctatattcggggaaattggcaaacgcctgccaatattcaacaaatatatcggtggcgctccggtgatgattttcctggtggcggcttattttgtctatgccggtatttttacgcagaaagaaatcgatgctatcagcaacgttatggataagagtaacttccttaacttattcatcgcggtattaattaccggagcaattctgtcggtaaaccgccgcctgctgctgaaatcactgctcggctatattccaactatcctgatgggcattgtcggcgcgtctatttttggcatcgctatcggcctggtgttcggtattccagtggatcgcatcatgatgctgtacgtcctgccgatcatgggcggcggcaacggcgcgggcgcggtccccctgtcggagatttaccactccgtcaccggtcgttctcgcgaagagtattactcaaccgctatcgctattctgaccatcgctaacatcttcgccatcgtctttgccgccgtcctcgatatcatcggcaaaaaacacgcctggctgagcggcgaaggggaactggtgcgtaaagcctcgttcaaagtggaagaagatgagaaagcgggacaaatcacccatcgcgaaaccgccgtcggtctggtgctgtccactacctgcttcctgctggcctacgtcgtggcgaagaaaattctgcccagcattggcggtgtggctattcactatttcgcgtggatggtgctgatcgtcgccgcgctgaacgcctccgggctgtgctcaccggaaatcaaagccggtgctaaacgcttgtctgatttcttctccaaacagctgctgtgggtgctgatggtcggggtcggcgtctgctacaccgacctacaggaaattatcaacgccatcaccttcgctaacgttgttatcgccgccattatcgttatcggtgcggtgctcggcgcggcgatcggtggctggctgatgggcttcttcccaatagaatcggccatcactgcaggcctgtgtatggccaaccgcggcggctccggcgacctggaagttctctctgcctgtaaccgtatgaaccttatctcttatgcgcaaatctcctcccgtttgggcggcggtattgtgctggtcatcgccagcatcgtgttcggcatgatgatttaa

SEQ ID NO: 229863 - DNA, 921 bp, Klebsiella pneumoniae
atggcgattatcgccgagtatcagcagcggctggtcggctgcggtgctatcgccggcaatgtgctgaaatgcatcgccatcgatccctcgctgcagggggaggggctgagccttaaattactgaccgagctcctgacgctggcctatgagctggggcgcagcgaactgtttttgttcactaaaccttgcaatgctgcgttattttccggcgccggcttctggccgatagcccaggcgggcgaccgcgccgtgctaatggaaaatagccgcgaacgactgactcgttactgccgacagctggcgatgtaccgtcagccgggaagaaaaatcggcgctatcgtgatgaacgccaatccattcaccctcggccaccgctggttggtagaacaggcggccagccagtgcgactggctgcatctgtttgtggtcaaagaagatgcgtcctgcttttcctatcacgatcgcttcaagctcattgaacaggggattaccggcatcgataaggtgacgctgcatcccggttcggcgtatctgatctcgcgggcgacgttccccggctatttcctgaaagagcagggggtggttgatgactgccacagccagattgacctgcagctcttccgcgagcgcctggccccggcgctgcagattacccatcgctttgtcggcaccgagccgttgtgtcccctgacccgtaattacaaccagcgcatgaagtcactattggaagcgccaggcgacgcgccgcccattgaagtagttgagcttgcgcgaatcgaaaaaaatggtggacccgtgtcggcctcccgagtgcgcgaactctatcgacagcgcaactggcaggcggtcgcggcgctggtaccgccggggaccctctcttttctgatgcaactggcggaaagcgaacatcaaaccgcctga

SEQ ID NO: 229864 - DNA, 294 bp, Klebsiella pneumoniae
atggaaatgaagattgacgccctggccggcacgctggagtccagcgatgtgatggtcaggattggaccggcggcgcagccgggcattcagctggaaatcgacagcattgtgaaacaacagtttggcgctgcgattgagcaggtagtgagagaaacgctggctcagcttggcgtgaaacaggccagcgtggtggtcgatgataaaggcgcgctggaatgtgttttgcgagctcgcgtacaggccgcggcgctgcgcgcggcgcaacagacccaattacaatggagccagctatga

SEQ ID NO: 229865 - DNA, 303 bp, Klebsiella pneumoniae
ttgcagtccgggatcgatggtatcctgcatattgtggactggctgccggtgcgtctggtgggggtggtctatgccctggtgggccatggtgaaaaagcgctcccggcgtggtttgcttcgctgggcgaccgccattcgtcgcagtatcaggtgttgacccgcctggcgcagtattccctggcccgtgagccgcacgtggataaagtagcgacgccgaaggctgcggtatcgatggctaagaagacttcgctggtggtagtggtgattatggcgctgctgacgatttacggtaccctggtttaa

SEQ ID NO: 229866 - DNA, 1764 bp, Klebsiella pneumoniae
atggcggtggaaaaactgattgtcgatcatatcgacacctggaccacggcgctgcagacccgctccacggccgggcgcggcagctcgggtaagatcgacctgtacggcattaagaagctgcgcgagctgattcttgagctggcggtgcgcggtaagctggtgccgcaggatccgaacgacgaaccggcgtcggaactactgaaacgcattgcggcggaaaaggccgagctggtgaagcagggaaaaattaaaaagcagaagccgctgccggggattagcgaggaagaaaaaccgtttgatttgccggtggggtgggagtgggtgcgattagaagatgttacagataatatccattatggatataccgcatcagccgatgtaacaaaaaaagtaaagttattgaggattactgatatccaagatgataaagtcatttggcgtaatgttccgggttgtgaaataaaggatagcgatattgaacagtatcagctccaacctaatgacattgtcattgcccggactggcggaacggtcgggaaatcttatcttgttgatgaccttcagtatattgctgtttttgcctcatacctaatacgccttaaatatataaaattcacaaatgcaaactatactaaaatcttcctaggtagccaattatactggttacaattatataacggagttactggtactggtcagcctaatgtaaatggaaatacattaaaaaaaatgtttttcccactgccaccaagtagtgagcaaaataaaatatgttcaagagttcaaacattattgaatctctgcgaacaactggaacagcactccctgatcagtctggacgcccatcaacagctggttgaaaccctgctaaccacgctaaccgacagccagaacgccgatgagctggccgaaaactgggcgcgtatcagcgagcatttcgacacgctgtttaccaccgaagccagcattgacgccttaaaacagaccattctgcaactggcggtgatgggtaaactggtaccacaggatccgaacgacgaaccggcctctgaactgctcaaacgtattgcgcaggaaaaagcgcaactggtaaaagacgggaaaattaaaaagcaaaaaccactgccaccgattagcgatgaggaaataccgtttgaactgccggaggggtggaaatggtgcctattcgaagacgtcgttgatattcaaagcggtataactaaaggaagaaatttagtcaaccgaaaactaattactattccttatctacgcgtagctaacgttcagcgtggttatcttgatctgtcagaggttaaagaaattgatattcctgaggaagagcaagataaatatcatgttattaaaggtgatcttttaataacagaaggtggtgactgggatactgttggtagaacaactgtgtggtgtcatgaatggtatatagctaatcaaaaccatgtttttaaaggaagaattataggaaaagagattgatccatactggcttgagacatacatgaatagtccttattcaagagattattttgctagtgccagcaagcaaacaaccaacttagcatccattaataagactcaattaagaggatgtcctgtagcgatccccccaagtagtgaagcaaacaaaatcatgctcaaattgaatgattttaatgaattatgtgaaaaacttaaattacagctccaatccgcccaacaaacccagctccacctggccgacgccctcaccgacgccgccatcaattaa

SEQ ID NO: 229867 - DNA, 243 bp, Klebsiella pneumoniae
atggggcgtatcgttggcgatggtgcattaaacttcgagatagtcgatatagccgtcgaccccgcccatcaggggcgtggacttggccgaatcattatggaaaacattattcgctggctggacagcaacgcttataaaggcgcttatgtctctctggtggctgatgtaccggaactctacgcgaagttcggttttgagttagtccgcccggaaagcgaaggaatggcgagagtctgggggtaa

SEQ ID NO: 229868 - DNA, 204 bp, Klebsiella pneumoniae
atgaaaatcaccgtagaacaaccctcagccagagaactggtcgatcgctcgcgagtcctggtgcatgtgatgctcgagcatcctgacgatatcggcccgaattatgcgttgcttctcatccttgccgaccagctacaactgttaagggatgcttttgaagaggatgagatcagacggcttagggatgagaaattacctcaataa

SEQ ID NO: 229869 - DNA, 939 bp, Klebsiella pneumoniae
atgaaaaattatgtattgattctatcaagtatgtatgatttttccacggatttggttgttcagcgactggaaaataatggcgataattttattaggctaaacaaagagcaattaagtgattatgagatttttttagatcccataaatacaatcctaagggtgaaaggtgaatatgttgatgtagaaacatctaatgtaaaatcagtttggtttcgacaaccagtttttctaagaaatactccagggcgtagcattgatataaatgagcagctttcattatcacaatggaatgcttttcttaggggattaatggtttttgataaggcgtattggatgaattggccgcaagcaacatatgctgctgaatctaagccatatcagctaatgattgcaaaaaagatagggttttgtgtacctcaaacgattattagtaattctcttggttttgagaaactcccttcaacgaagtttattataaagtcgatggataccgttttacttaaagaaaatgatgattgctattttacatacacatcgaaagctaatcctgcggactttactttagacaaaaccaaacaagcaccgataacgtttcaagaatatattgaggataagttagatattagagttactattgttggctccaaagtatatgccgttgcaataaaatctaatggtaatgctatctctgatgattggagaaccttaaaaaaagaagatcttgaatatgtcgacattgaacttcctgttagaattaaaaaactttgcatagagtatgttaagttacttgggttgaattatggtgctattgattttatcaaaacaaaagacgaatatatatttattgaaataaatccaactggcgagtggggatggctttctaatgataaaagagaaattgattacgatattgcaaagaaattatctgaggctaattaa

SEQ ID NO: 229870 - DNA, 609 bp, Klebsiella pneumoniae
atgttttctagaattattgaggaagttttcccatttctttatttttactatattgccaacaaaaaaacagttagtgtgtatgatatcaccttttcaaactttgagttttactcagggttatcggatgaaaaaatagtcgagagacttgaaagcgagcataatagagccaaggagatagatgataagacttttaaatttacattggcattaagtatatcattaagtattataagtgccggtgccagtggggttgttaaatttcttcctgaaagtcaattaagtccatatatatcgtttgtgttttttctttcttctttttatatgctgtgtggaggtcttatctcattaggttcattaaaaactctaccaaaatttgggtatggaacgtattttgagatcaacaaaaatagagaatctttaattaaggctattattggtcaggaaaaggttaatataatacggcatataaggaatgagctttcttatatgagtttgcgaaatgggtttttactaatcctctttgctcttattttgtgtttatttatattggctaccagtttttttgtgagtcacttacgatttgaaccgttgacatcttactgtctatga

SEQ ID NO: 229871 - DNA, 1044 bp, Klebsiella pneumoniae
atgacagcatcagaccgtactctcaccacctcccttccgctgcgcaggggctcagaagggtttaacacgagtcaggattatctggttaaaggactcattcccgccggggcgctgtgcagtatttacggccccggcggctcttttaaatcctttctggcggtatcgctggcgtgccatattgccagcggtacgtcatggggcggaaggcgagtcaatcaaggggctgtgctgtttatcgccggagaaggaggaaccggtgtatcacgacggatccgcgcctgggaactcagcgttaatgacgaaatggcgctcgataacctgtttcgcgtcgactgcccgatctttccagccgctccgggaagcatcgagcaggtgatcctggcggcaaaggacattcagaacatgaccggaatgccggtacggctgattatcctcgatacgctggcccgctgttttggtaactcagatgaaaacaccgcgcgggatatgggcgcatttatccaaggttgcgacgccattcggtatcatacgcgcgcagcgatgatgatcgttcatcactcgggtaaggatcaggagcgaggcgctcgcggttcaagtgcttttcaggctgctctggatgccgagtttaacgtcaggcgtgagggacgtcgcaacgctatcaccctgagttgtacaaagatgaaagatgcggagatgccggaggtcaccgcctacgatcttgaggaagtcgttatctataccgatagtgatggcgaaccagtgacctcgctggtactgaacgacgagccccggcaaccagacgatgacttactgagtagtggcataccacccggcgttcctcatatcacccgcaaccatacggcgttatggcgctgtattaaccaacgcatcagccagaataagccttgtacccgcgcgctcttgcgcgaagatctacgggctaagggaattaacgtcgagaagaaattttcgcgctggctggagaagctaattcgcgaaggattgatatttgtaaatggtgaggaaattaaactcaatcactag

SEQ ID NO: 229872 - DNA, 876 bp, Klebsiella pneumoniae
atgtcgaaacttacaaaacgcatggaaaaactcgccctgctggctggcggcagttttaaaacagtccatgatcgcctccgtatcgccgggcgtttaagccagcatctgcacaagctgaatatccagattcaggatctccagcatctgaaatcgtcacatattgaaagctacgtgatggcacgacgggaagcaggaattacgccacgcacgctacaaaacgagatggctgccctgcgcaccatccttgctcagtctggacgtcaaaaatttgcccaatcggagcgcatcagcaataaagcgctcgggctgggtaacgccagccgggcaggaacgcatctgccattaacctcagaacgctggttgtcggcgctgtctgcttttcatgaaaaggatgaagggctggctctgacgctggagcttgccagagcaatgggtttgcgttcacaggaagcggtgcagtgttgtcagtctctgaagacatgggccgctgcgttagagcgtggagaaaatcgattgcaggtggtttttggcaccaaaggatcacgttcccgtcagacggtggtgctcgaacctgaaaggctacgcagcatcctgaaccaagctatccccctgatgacacaacgcgggggacgtttgctcaataaacccgatctgcgcgccgcaatgaattactggcgtgccagcgcagttcgcgcagggctgactggcccctatgcaccacacagtctgcgctattcatgggcgcaggaggcgatggcgcactaccagggactggggctgagtataaaggaagccagggcgatggttgcgatggatcttggtcatggcgatggtcgagggcgctacatccagcaagtgtatgggaggcaatcatga

SEQ ID NO: 229873 - DNA, 633 bp, Klebsiella pneumoniae; identical to SEQ ID NO: 106964

SEQ ID NO: 229874 - DNA, 1095 bp, Klebsiella pneumoniae
atgctagcattcacacagcttatattagttcggaataaactaagggagatatcagaatctccctacttttctaaagatatgcataagtatctttctgttcttcaagaagcagtagataagttatatgaaaaacatgggacaattgctgatgaaataattacagaatgtacttttttcatcactaatgcagttaactttttcactggtagcaccacaaaaaaaataccctatgagattgtttattgcttaaatgacgcctgtaaaaagtggataagtgaagaaacacttattactacagccctatcgccagatatgcatggattttatttcagatctgtaagcaaacaatcatatgatttacttgaacagactttaggtattagtttcgaagccgaattaattcagatttcattacctgaaatgtacagaagacgaccgctatgctctacacctttatatcacgaactaggtcattttgttgattttagtaaaggtatttctgaactggctattctcaactatcgttcagttaatcaaggtacactcccgatcccgaagggaccccagggaattgttgaatgggctacattacctgattttatttggctgaatcattgtaaagaattctttgcagatcttttcagtgcacaattcgttggaaaaagtggggtggagttcttatacaaattagcaggttctcatcctgcaagtgacactcatccatcaacagaaaaccgaattaaaattgtaaacgattttttaaacaatgttaaaaacccagttgttgatatgtttaatgcggtaatttcagccttacataaacaagggaagattatttcccccagcttaacattacctttaaatttacttgatgtaaaaactacttttgataatgtacgtccctttgtaattaataaccacaatgaaatgcatgcatttattaatagtagctggcagtatttatgtaccgaatgggaaaatccgacaggcatatggaagggattatcaaaagaatccatagaaaaaaccataaatgatttggttgaaaaatcaattcgaaacgtaatgatacttgagaaatggagtgcgcagtga

SEQ ID NO: 229875 - DNA, 777 bp, Klebsiella pneumoniae
atgcgtgatctgatccttcaactcagcaaaagttcgatttattcaacaaagccaggaaaaggatgtctggtttttcggcgtatggatccccgtcttccggcgacggaaaatgtcatcttcagaacatgccgtaattattacgccagcggtaactccattcaggccgtacgcattataacctcaggctatttctggctggaagacagcaatggattagtcaaacttaacgctaagactggtagagcggaatcatcgtattcggttcccttccgtacggaaggggatcccagaacgcgcaccatgaagttatcgaacgatgatattgcccgaaattcgccgtcaccgctgggttctcgtgaagcacactggatagcgttacattatgcatatttgtttcctccggtgaacaatctgaataaaagaaggattgggacatattttattgatagcctcagcggcaaatggcgctttagcgcagagctgaaaaatgctgacagcattgatgcaaccgcacgctccgctcatggccgtttttatgctcaggctggttgtgaaaagccatccggatcgggaacaagaattgatatctgggaggtggcaactgcgacgagaattgcctcattgcagcgtccgaaatattgtgggttgcaaggaatggcttttaactggcagggaaatacgctgattctggtttatcgcggtaaatggctacgggtaaggatgccggatggaatgcaggatgccgcaagtgcagacgccattcctgagcagggataa

SEQ ID NO: 229876 - DNA, 282 bp, Klebsiella pneumoniae; identical to SEQ ID NO: 5229

SEQ ID NO: 229877 - DNA, 354 bp, Klebsiella pneumoniae; identical to SEQ ID NO: 5230

SEQ ID NO: 229878 - DNA, 963 bp, Klebsiella pneumoniae; identical to SEQ ID NO: 5231

SEQ ID NO: 229879 - DNA, 684 bp, Klebsiella pneumoniae; identical to SEQ ID NO: 5232

SEQ ID NO: 229880 - DNA, 222 bp, Klebsiella pneumoniae; identical to SEQ ID NO: 8585

SEQ ID NO: 229881 - DNA, 435 bp, Klebsiella pneumoniae; identical to SEQ ID NO: 19248

SEQ ID NO: 229882 - DNA, 261 bp, Klebsiella pneumoniae; identical to SEQ ID NO: 19235

SEQ ID NO: 229883 - DNA, 297 bp, Klebsiella pneumoniae; identical to SEQ ID NO: 5319

SEQ ID NO: 229884 - DNA, 822 bp, Klebsiella pneumoniae; identical to SEQ ID NO: 8707

SEQ ID NO: 229885 - DNA, 510 bp, Klebsiella pneumoniae; identical to SEQ ID NO: 5294

SEQ ID NO: 229886 - DNA, 384 bp, Klebsiella pneumoniae; identical to SEQ ID NO: 5293

SEQ ID NO: 229887 - DNA, 672 bp, Klebsiella pneumoniae; identical to SEQ ID NO: 5292

SEQ ID NO: 229888 - DNA, 360 bp, Klebsiella pneumoniae; identical to SEQ ID NO: 5291

SEQ ID NO: 229889 - DNA, 567 bp, Klebsiella pneumoniae
atggcgggtgatgcactgacattccgtgtggcgtttgtcgttcgctggctgctgtgggtcgtcaggtttgtggttatctggccgctggccacaatggccctgatggctctgtttgttttatggaaggacaacaccacgccggggaaattactggttaaggagattaacttcgtaagacaaacagcacctgccggacagttcccggtcagtgaatgctggttttcttcctctgattcttcaggcagatcagaaatacaggatatctgccattaccgcgcggctgatgctgcagattatgtcagggagactgaccggtcactgatgcaactggtcaccgcattctgggcaacgctggcactgatgtatatgtcgtttgcggcaggcaccgggaaatatccggtgctgcccggaaaaatgaaatgtatccgggtggtaaccgcagatgaatatctgaaggacgtttatacggaagacgcttccctgccgggaaaaatcaggaaatgccatgtttatttccctgatgaccgaacaaacagaagcaacggagataaaaatgaacatgcgtaa

SEQ ID NO: 229890 - DNA, 369 bp, Klebsiella pneumoniae; identical to SEQ ID NO: 5354

SEQ ID NO: 229891 - DNA, 477 bp, Klebsiella pneumoniae; identical to SEQ ID NO: 13002

SEQ ID NO: 229892 - DNA, 219 bp, Klebsiella pneumoniae; identical to SEQ ID NO: 5327

SEQ ID NO: 229893 - DNA, 2631 bp, Klebsiella pneumoniae
atgagtaataacccacttgaggccgtcactcaggcggttaactccctcgtcacagcactgaaactgcctgacgaatccgcaaaggccaatgaagttctgggcgaaatgagcttcccgcagttcagccgtctgctgccgtaccgtgattacaaccaggaatccggtctgttcatgaatgacaccacgatgggctttatgctggaagccattcccatcaatggggcgaataagtccattgtggaggcactcgatcacatgctgcgcaccaaactgccgcgcggtattccgttgtgtatccatctgatgtccagtcagctggttggtgacaggattgagtacgggctgcgtgagttctcctggtcaggtgaacaggctgaacggtttaacgccattacccgggcctattatatgaaagcggcagcgacacagtttccgctgccggaggggatgaatctgcccctgaccctgcgccattaccgggtatttatctcgtactgttctccctcgaagaaaaaaagccgggctgacattctggaaatggaaaacctggtgaaaatcatccgggcgtcgttacagggggccagtatcgccacacagacggtggatgcacaggcctttatcgatattgtcggggagatgattaaccataacccggactccctgtacccgaaaagacgtcagctggacccgtattctgatctgaattatcagtgtgtggaggacagttttgacctgaatgtccgggctgattacctgacgctgggcctgcgtgagaacggcaggaacagcacggcccgtatcctgaatttccatctggcccgtaacccggaaatcgccttcctgtggaatatggccgacaactacagcaacctgctgaacccggaactgtccatctcctgtccgttcatcctgacgctgactctggtggtggaagaccaggtgaaaacccacagcgaagccaacctgaagtacatggacctggagaaaaagtcgaagacctcctatgccaaatggtttccgtccgtggagaaagaggcgaaggagtggggggaactgcgtcagcgtctgggctccggtcagtcttctgtcgtgtcctacttcctcaacatcacagcattctgcaaggacaacaatgaaacggcgctggaagtggagcaggacatcctgaacagcttccgtaaaaacggttttgagctgatttcaccgcgctttaaccacatgcgcaatttcctgacctgtctgccctttatggccgggaaagggttgtttaaacagctgaaagaggccggagtggttcagcgcgcagagagctttaatgttgccaacctgatgccgttagtggcggataaccccctgacaccggcaggtctgctggcacccacctaccgtaaccagctggcgtttatcgatattttcttccgggggatgaataacaccaactacaacatggcggtctgtggcacctccggggccggtaaaaccgggctgatacagccacttatccgcagcgtgctggactccgggggctttgccgtggtgttcgacatgggggatggctacaagtccctgtgtgagaacatgggtggcgtatatctggacggtgaaaccctgcgttttaacccgtttgcgaacatcaccgatattgaccagtcagcggagcgtgtccgtgaccagttgtcagtgatggccagccccaacggtaacctggatgaagtgcatgaaggtctgctgctgcaggcggtcagggcctcctggctggccaaagagaacagggcacgtattgatgacgtggtggatttcctgaaaaacgccagtgacagcgagcagtatgccgggtcaccgaccatccgcagccgtctggacgaaatgattgtgctgcttgaccagtacactgccaacggcacttacggccagtattttaactccgatgagccgtccctgcgggatgatgcgaaaatggtggtgctggagctgggcggactggaagaccgtccgtcactgctggttgcggtgatgttctccctgattatctacatcgagaacaggatgtaccgcacgccgcgtaacctcaagaaactgaacgttattgatgaaggctggcgtctgctggacttcaaaaatcgcaaggtcggtgagtttattgagaaaggttaccgtaccgcccgccgtcataccggtgcctatatcaccatcacacagaacatcgtcgactttgactctgacaaggcctccagtgcggcccgtgcggcatggggtaactcctcctacaaaattatcctcaaacagagtgcgaaggagttcgcaaaatacaaccagctgtatccggaccagttccagccactgcagcgcgacatgattggtaagtttggtgcggccaaagaccagtggttcagttccttcctgctgcaggtggaaaaccattcctcctggcaccgcctgtttgtggacccgttaagccgcgccatgtacagctctgacggcccggattttgagtttgtgcagcagaaacgtaaagaggggctgagtattcatgaggcggtgtggcagctggcgtggaagaagtcagggccggagatggcttcgctggaagcctggctggaagaacatgagaaatacaggagtgttgcatga

SEQ ID NO: 229894 - DNA, 393 bp, Klebsiella pneumoniae; identical to SEQ ID NO: 5106

SEQ ID NO: 229895 - DNA, 1374 bp, Klebsiella pneumoniae; identical to SEQ ID NO: 5107

SEQ ID NO: 229896 - DNA, 2823 bp, Klebsiella pneumoniae
gtgaatgaagtctatgtgattgccggtggtgagtggttacgcaataacctgaacgccattgccgcctttatggggacccggacgtgggattccatcgaaaaaattgcgctcacattgtctgttctcgcggtggccgtgatgtgggtacagcggcacaacgtgatggatttgctgggctgggtggccgtgtttgtgcttatcagcctgctggttaatgtccgtacatcggtgcagattattgataacagtgacctggtccaggttcaccgggtggataatgtgcctgtcggactggcgatgccactttcactgacgacccgtatcgggcatgcaatggtggccagttacgagatgatattcacccagcctgacagcgccacctacagcaagacaggcatgctgttcggggcgaacctgattgtgaaaagcaccgattttctgtcccggaatccggaaatcatcaatctgtttcaggactacgtccagaactgcgtgctgggggatatttacctgaaccacaaatacacgctggaagacctgatggcctccgctgacccctacacgctgattttttcccggcccagcccgctacggggcgtttatgacagcaataataatttcataacctgtaaagatgcgtcggtcacgctgaaagacaggctgaatctcgatacaaagacgggaggcaagacctggcattattatgtgcagcagatatttggcggcagaccggacccggacctgttattcaggcaactggtgagtgacagttacagttatttctacggctccagccagtctgccagtcatattatgcgccagaacgtcaccatgaatgccctgaaagagggtatcaccagtaatgcagcccgtaacggtgataccgccagcctggtcagtctggccacgacttcgtcgatggagaaacagcgtctggcacatgtctccattggtcatgtgctgatgcgaaacctgccgatggtgcagaccattctggtgggcattaccattggtatcttcccgctcctggtactggcggctgtcttcaacagactgacgctgtctgttctgagaggctatgtgtttgctctgatgtggttccagacctggccgttgctgtatgccattctgaacagtgccatgacattctatgcaaagcagaatggtgcaccggtcgtgctctctgaactctctcagatacagctgaaatactccgacctggcgtccactgccggatatatatctgtcatgatacccccgttgtcatggatgatggtaaaaggccttggcgcaggtttttccagcgtgtacagccatttcgcttcctctgctatcagcccgactgccagtgcggcaggtagtgtggttgacggtaattactcctacggcaacatgcagacggaaaacgtgaacggcttcagctggagcaccaacagcaccacgtcgtttggtcagatgatgtaccagaccggcagtggcgcaactgccacacagacccgtgacggtaatatggtgatggatgcgagcggggcgatgtcccggttaccggtcggtatcaatgcaacgcgtcagattgcagcggcacaacaggaaatggcccgggaggcgtcgaacagagcagaaagcgccctgcatgggttcagcagcagtattgccagtgcctggaactcgctcagccagtttggttctaaccgggggagcagtgattctgtcacaggtggtgctgacagcacgatgagcgcacaggactccatgatggccagccgtatgcgcagtgcagtggaaagctatgcgaaggcgcataatatcagtaatgagcaggcgactcaggaactggcatccagaagtacgagagcttctgccgggatgtatggagatgctcatgctgaatggggggttaaacctaaaattcttggtgttggtggaggattaggcgttagaggtggtggtcgggctggtattgattgggaagataatgatgcgcatacggcaagtagtaatactcagtcgagccataatgctcgtcatgatatcgatgccagagctacacaagactttaaagaggccagcgattattttaccagtcgcaaggtcagtgagtccggcagccatacggacaataatgctgattcccgtgtggatcagttgtctgcagccctgaattcagcgaagcagagttacgaccagtacacgacgaatatgacccgcagccatgaatatgctgaaatggcatcccgtactgaaagcatgagtgggcagatgagtgaagacctgtcgcaacagtttgcacagtatgtaatgaaacacgcgccacaggatgcagaagctattctgacaaacaccagttcaccggagattgcagaacgtcgtcgggcgatggcctggtcttttgtgcaggaacaggtacagcctggtgttgataatgcctggcgggaatcccgtggtgatattggtaaaggaatggagagcgtaccttcgggtggtggcagtcaggatattattgctgaccatcaggggcatcaggccattattgatcaaagaacgcaggacagtaatatccgtaatgatgtaaaacatcaggttgataatatggtcacagaatataaagggaatataggtgatactcagaacagcgtacgtggcgaggaaaatattgtaagaggacagtattctgaactgcagaatcaccataaaacagaggcattatctcagaataataaatataatgaagaaaagtcggctcaggaaagaatgcccggggctgacagtccacaggaactgatgaaaagggcaaaggaatatcaggataagtataagcaataa

SEQ ID NO: 229897 - DNA, 480 bp, Klebsiella pneumoniae
atgagatgtttaacccatattactctggtaacggtgatacagtttatcgcctgttatctggctagttgggggaatgccgaaacaatttttatgctgttcttcatagtactatggcagggactgtttatatggttgttctctcaaatacgaaaaaaacggaatgtgtcggatgagtttaagtttagtaaaggcgtttggtatataacgatgccagtatcttccttactctctccattattaagcctgatggtttttatcattggtacactatacgaattaaggcgagttagtggttgtgtaagcgtaagagaatggatgcaatctcaggtaaatgaacaaactaatgaagatttgcatctggattttgataatatggattttcatcgtactaatcctgcaacagggttacctatgtcaggtattggtgtggatatcggtggtaattcatatggttatagttcaaaacgatatgatgagtga

SEQ ID NO: 229898 - DNA, 738 bp, Klebsiella pneumoniae; identical to SEQ ID NO: 5109

SEQ ID NO: 229899 - DNA, 2190 bp, Klebsiella pneumoniae
atgagttttaacgcaaaggatatgacccagggcggtcagattgcgtccatgcgtatccgcatgttcagccagatcgccaatatcatgctttactgcctgtttatttttttctggatcctcattggtctggtcttatgggtaaaaataagctggcagacgtttatcaacggctgtatttactggtggtgtacgtcactggaaggcatgcgggatttaataaaatcccagccggtctatgagatccagtattacggcaaaaccttccggatgaacgctgcccaggtactgcatgataaatatatgatctggtgcggagagcagctatggtctgcattcgttctggcgtctgtcgtggccctggttatttgcctgatcaccttctttgttgtctcctggattctggggcgtcagggtaaacaacagagcgaaaatgaagtcacaggtggtcgtcagctgacagacaatccgaaagacgttgcccggatgctgaaaaaagacggcaaggactccgatatccggattggcgacctgccgattatccgggattccgaaatccagaacttctgtctgcacggcacggtcggggccggtaagtcggaggttatccgtcgtctggccaactatgcccgtcagcgcggtgatatggtggtgatttatgaccgttcaggggaatttgttaaaagttactatgatccctccatcgataaaatcctgaatccgctggatgcccgctgtgccgcatgggatttgtggaaggagtgcctgacacagccggattttgataataccgcgaacacgctgatccctatgggtacaaaagaggacccgttctggcagggttcaggacgtaccatttttgcggaagcggcgtacctgatgcgtaatgaccccaaccgcagctacagcaaactggtggacacactgctttccatcaaaattgaaaaactgcgtaccttcctgcgtaattcaccggcggccaacctggtggaagagaaaattgagaaaacggcgatttccatccgtgctgtgctgaccaactacgtgaaagccatccgttacctgcaggggattgagcataacggtgatcccttcaccatccgtgactggatgcgtggtgtccgggaagatcagaaaaacggctggctgtttatttcgtcgaacgccgacacccatgcctccctgaagcctgtgatctccatgtggctgtccattgccattcgtggtctgctggcaatgggagaaaaccgtaaccgtcgtgtgtggtttttctgtgatgagttacccacgttacacaaactgccggatctggtggagatcctgccggaagcccgtaagttcggtggctgttatgtgtttggtatccagtcctatgcccagctggaagatatctacggtgagaaagcggcggccacgctgtttgacgtcatgaacacccgtgcttttttccgttccccgagccataagattgcagagttcgctgccggtgagattggtgagaaagagcacctgaaagccagcgagcagtattcctacggtgctgacccggtacgtgacggggtatcgaccggtaaggatatggagcgtcagacgctggtcagttattccgacattcagtctctgccggatctgacctgctatgtcactctgcccggaccgtatccggcagtcaaactctctctgaaatatcaggcacgaccgaaggtcgctccggagtttattccgcgtgacatcaacccggaaatggagaaccgtctgagtgccgtacttgccgcaagggaagcagaaggtcgtcagatggccagcctctttgaaccggaggttgcctccggagaagatgtgactcaggctgaacagccacaacagccacaacagccacaacagccacaacagccacaacagccacaacagccagtgtcttctgtcatcaatgataagaagtcagatgcaggtgtgagtgttccggcaggggggatcgagcaggagctgaaaatgaaaccggaagaagagatggaacagcaactgccacccgggatcagtgaatccggtgaagtggtggatatggccgcttatgaggcatggcaacaggaaaatcatccggacatccagcagcatatgcagcgtcgtgaagaggtgaacattaatgtgcaccgggagcgcggggaggatgttgagccgggagatgatttctga

SEQ ID NO: 229900 - DNA, 861 bp, Klebsiella pneumoniae; identical to SEQ ID NO: 5113

SEQ ID NO: 229901 - DNA, 255 bp, Klebsiella pneumoniae; identical to SEQ ID NO: 5118

SEQ ID NO: 229902 - DNA, 858 bp, Klebsiella pneumoniae; identical to SEQ ID NO: 5119

SEQ ID NO: 229903 - DNA, 1182 bp, Klebsiella pneumoniae
atggcagcaaaagttacttttttccaagtcggcaacggtgatatgacactggtacgtttggccgacacccggggcacatccattctgactgatgtacatattcgctctgccgctgataaccccaatgatgacacacctgatgttgcctcggcgttacgtagcagattgaagtatgatgaaaaagatcgtccctttattgatgtttttatgctcagccatcccgatcaggatcattgcggtggtctgcgtaaacatttctggctgggccgtcctgaagattacccagatgacgacgtgaaacgttcagaaaagcgtatcattattcgagaattgtggtcatcaccattgatttttcggcgccgttccaaaagtcacacactttgcgaagatgctcaggcatttaatacagaagcacggcgccgagtaaaatactggcgggaacatggttatgcatttagcggtaatcgaatccttatcatgggtgaagatattaatggcaaaacagatgatctgagtgccattcttatcaaagctggagatacattcaccaggattgacgggcaaatttcagatgtgttctccgcacagcttctggcgcccgcaccacatgaagatgatgaatatttggaagaagctctttctaaaaacgaatccagtatcatcatgaacatgaaaatactgccctctgcatattcccgtaatcctatgcactttctattaggtggagacgcagaagttctcatctgggagcgattatgggatcgttacaaaagcaatgctgaggcactagaatatgatcttctcctcacaccgcatcattgttcatggcattcactttcctatgatagctggtcacaatggggggagaatgctgaaatttgtgatgcggcccgtaatgctttaggtcaggctcgttccggggcaacaattgtatcgagtagcaatcagatacttgatgatgattatgatccaccgtgcatccgggctaagcgtgagtatgaggatattctggacagtgttgatggttggtttagctgtacgggggatcttaaagatacagcgttccttgaatttgaagtggctggagacgggaagttaatacccgctattgttggtgctgtttcagctgcggcaagtgctgctacggccgccgcccccagggcaggtgtatcaaaccaatga

SEQ ID NO: 229904 - DNA, 855 bp, Klebsiella pneumoniae
atgagtgataaaacggtgagaactggtcattggggccaagaaagacgacttgaattcatcgattttcgcctactgtgggaaggtcggcttaaccgtgcagatctcacgacatttttcagaatttcagttccgcaagcctcattagacttggcaaaatatcaagaagttgcgccaaacaacatggtgtatgatcgaactcagaaggcttacattacgactcctgatttcaaacctgtttttgcaagctttgacagtaatcattacctgaatgaactacttgggcgagaaaatgaaatagtggatcctgatgatagtttcattgggtgggtacccccggtagccagccttcctctccctgctaggaaagtacaacctgaaatattgattgatttaattcgagccatgcaaagaaaacaggctttggttgttgattatcgctcaatgactaatgaaccagcaattcgtacgctatacccgacagcatttgcacatgatgggcatcggtggcatgttcgtgcttattgttttaagtctacaatgtttaaagattttgttcttggtaggttttttaaaatcgttgaatttgtttccccaccgacatcaattccacaagatgtggactggaatacatttattgacgtggtaataggtccaaaccctaactacgatacgaataaacgactatctattgaacatgattatcaaatggtaaaaggagaagcgaaaatccacatacgtaaagcgcaattatattatcttaatcgtcgattaaatttggatgtgaatagtgatggttcaatagatgacaaacagcagatcatcatgctcagaatagacgagtctaaaacctattaa

SEQ ID NO: 229905 - DNA, 519 bp, Klebsiella pneumoniae
atgaatgcgaatgatgttaacaaacggaataaagaatggatgattgtaatcattattatctatctttttattttgttatgtatggcaacatacgctattggggctatgtctctaggatggttaccaacaccttacgcaccattaagggtgccgctgatgtgcggagcaattgcctatataggtggttgtttatattgttttcgtgcaatttacctcaataaatgcattagaaaacaatgggatccagattggcatgtatggtatttcattcgaccactgaccagtacaatcgcaggtgctatcagttatttattccttaaggcggggttgttagttttggagtctagttccaatgtaggagctagtgaaatgggtttctttgcgctggcatttattgctggttttaacgtcgataaatttgtcgcaaaaatcgaggaagttgcaaaggctgtctggggtattgaaaaaactcgaagctcgactaataatgatgcgaaaaattcggaaaaaaaagaatag

SEQ ID NO: 229906 - DNA, 924 bp, Klebsiella pneumoniae
gtggcaaagcaaaagttcagaatcaccaactggtccacctacaacaaagctctcatcaaccgtggctctctcactttctggctggatgatgaggcgattcaggcctggtatgagtcggcaacgccttcatcacgaggaaggccccagcgctattctgatctcgccatcaccaccgttctggtgattaaacgcgtattccggctgaccctgcgggctgcgcagggttttattgattccatttttgccctgatgaacgttccgttgcgctgcccggattacaccagtgtcagtaagcgggcaaagtcggttaatgtcagtttcaaaacgtccacccggggtgaaatcgcacacctggtgattgattccaccgggctgaaggtctttggtgaaggcgaatggaaagtcagaaagcacggcaaagagcgccgtcgtatctggcgaaagttgcatcttgctgttgacagcaacacacatgaagttgtctgtgcagacctgtcgctgaataacgtcacggactcagaagccttcccgggccttatccggcagactcacagaaaaatcagggcagccgcggcagacggggcttacgatacccggctctgtcacgatgaactgcgccgcaaaaaaatcagcgcgcttattcctccccgaaaaggagcaggttactggcccggtgagtacgcagaccgcaaccgtgccgttgctaatcagcggctgagcggaagcaatgcacggtggaaatggacaacggaatataaccgtcgctcgatagcggaaacggcaatgtacagaatgaagcagttgttgggagattcactgacgctgcgtgactacgatggtcaggtagcggaagctatggccatggtgcgtgcgttgaacaggatgacaaaggctgggatgccagaaagcgtgcgtattgcctga

SEQ ID NO: 229907 - DNA, 288 bp, Klebsiella pneumoniae
atggtctgtgttgtcgggaggatgcgtgatctgatccttcaactcagcaaaagttcgatttattcaacaaagcccttccgtgggcgtaatggcagtcaggtaaagctcctctggtctaccggcgatggactgtgtctgctgaccaaacggctggagcgcggccgcttcgcctggccgtcagcccgggatggcaaagtgttcctcacaccggcacagctggcgatgctccttgaaggtatcgactggcggcagcctaaaagactgcttacgtcactgactatgttgtag

SEQ ID NO: 229908 - DNA, 195 bp, Klebsiella pneumoniae
atgaacagcttacttcctgacgatatcgatgaactgaaacgtctccttgccgaacaggaggcgctgaaccgtgcccttctggaaaagctgaacgagcgtgaacgcgaaatagatcacctgcaggcgcaactggataagctgcgccggatgaacttcggcagccgctccgaaaaagtctcccgccgtatcccgtga

SEQ ID NO: 229909 - DNA, 1341 bp, Klebsiella pneumoniae
atgagtgaggggaaattgccggaggggtgggtaaaaagcgagctggataatatactccttactattattggcggaggtaccccaagcaaagcaatccctgagtattatcaaggggatattccatggatgagtgtcaaggatatgaataaacatacccttacagatactatcgatcatattaccaatgatgcagtagaaaatagcagtacaaatataattcctgctgggacaccgattattgcgactcgtatgagcttggggaaaattgttacagcgtcttttgattcagcaattaaccaagacttaaaggcgttattcctgtctagcggagttgaacgtaatttctttattcactggtaccgttcgcaggcgcagctaatcgaaagtttagggaccggtacaacggtaaaaggaatacgtctggaagttttgaaggctctttcaattaatctcccgccatttttcgaacaaaaaatcatcgccgaaaaactcgatacgctgctggcgcaggtagatagcaccaaagcacgtcttgagcaaatcccacaaatcctgaaacgttttcgtcaggtggtgctagctgcaattgttaatggaaaattatcaacgaatactgaacaatggaaagtatattcattaaaaaatctttgtgtcagtatttcggatggtgaccatcaagctccaccaaaatctgaaacaggaatcccctttctagtcatctccgatgttaataaagggaaaattgatcttgaaaatgtatccagatgggttccagagtcttattacctggcactaaaagagattagaaaaccatctctaaatgatattttatacactgttacaggttcttttggaatcccagtagttgttaacaccactaaaccattttgtttccaacgacatattgccatcataaagccaaatagcaatttgattaactatagatttttattattctatttagaatcaccacaaatattcaaacatgcaagtgatgttgctactgggactgcacaaaaaacagtctcattatcaagtctccggaattttgaactttcagtcccttctttaaaagaacaagccgtaatcgtccatcgtgtcgagcagctcttcgcctacgccgacaccatcgaaaaacaggtcaacaacgctttaacccgcgtcaacaatctcacccagtcgatcctggcgaaagcgttccgcggtgaacttaccgcccagtggcgtgctgaaaacccaagtcttatcagcggtgaaaacagcgccaccgcgctgctggaaaggattaaagccgaacgcgcggccagcagcggtaaaaaatcctcgcgtaaaaaagcgtaa

SEQ ID NO: 229910 - DNA, 687 bp, Klebsiella pneumoniae; identical to SEQ ID NO: 135880

SEQ ID NO: 229911 - DNA, 687 bp, Klebsiella pneumoniae
atgattgataaaagcgtatcgacgctgagcgaggccatcgccgggatccacgatggggcgactattatgatcggcggctttggccccgccggccagccgacctttctgattgacgccctgattgaccagggcgctcgcgacctgaccatcataaataacaacgccggcaacggggaagtggggctcgccgcgctgctcaaggcgggccgggtgcgcaaaatgatctgctcctttccgcgccaggtggattcgcagattttcgatgatctctaccgtcgcggcaaagtggagctggagctggtgccgcagggcaacctcgcggcgcggatccaggcggctggcgccgggctgggggcggtatttacccccaccggctacggcacgccgctggcggaaggcaaggagacacgggaaatcgacggtcgccactacgtgctggagtacccgatcaaagccgatttcgcgctgattaaagcccaccagggcgaccgctggggcaacctggtctatcgcaaggcggcgcgcaactttggcccgatcatggcgacagcggcgaaaaccaccatcgtagaggtctcgcagctggtggcgctgggcgacctcgacccggaacacatcatcacccccggcattttcgtccagcgcgtcttctcgctggaaaacctgactgccgcacaacgcgcctga

SEQ ID NO: 229912 - DNA, 354 bp, Klebsiella pneumoniae
atgaaccttgatgacaaatccctgtttcttgacgccatggaagatgtccagcctctgaaacgtaataatgacgtgcactggcatcccgggcgtaacagccgggccccgcaacgcgtcgataccctgcagctggataattttctcaccaccggctatctcgatatcgtgccgctcgccacgccgctggagtttaagcgagaagggctgcagagcggcgtgctggataagctgcggcggggaaatacagccagcaggcgagcctctccctgctgcgccagccggtggaacagtgccggcagatgctcttcgcctttatggtgcaggcgcagaaagaggggttacgcaatgtgctga

SEQ ID NO: 229913 - DNA, 927 bp, Klebsiella pneumoniae
atggttatcaccgaaagcatggcatttcagattaaatttcatcatatccgcgccttcgtcgaagtggcccgggaagggagtattcgcggtgccagccgggcgctggcggtctcgcagccggccctgaccaaagcgattaaagagctggaggaggggctttccgcccagctgttcgtccgccgcagtcagggggtggcgctgaccgaaaacggcgaaagcttttaccaacatgcgagcttgatccttgaggagctgcgggcggcgcaggacgaactgctgcagcgccagggcgagcaggccgggcaaattaatattggcctcggcgccagcgtcgcccggtcgctgatgccgtcggtgatctgccgctttcatcagcagcatccgcaggtaaaggtgcggatcatggagggccaactgctggcgatgatcaatgagctgcgccagggagagctggatttcaccatcaatacctattaccccgggccgtacgaccatgagttcagctttgagaaactgtttgagaaaccgttcgcggtgttcgcccgcgcgggccatccggcggcgcaggccacctcgctgggggagttgatggatcaccactggaccatgccgacgccgcgcggcagctacttcaagcagctgcaggagcgcttcgaacagctgggacgggagccaaaggtggggatcgtctgcgaaacgttctcatcctgcatcagcctggtggtgaaaagtgattttctcagcatcctgccggtggagctgggcaacgacccgctgatggccgacaaactggtgatgatccccatccgtgaagtgttacccaccgccacctattatctgatccagcggcgcgatacccggcagacgccgctcacggcgtcgttaatcaccctgttccgccgccagagccgacaattgtttccttaa

SEQ ID NO: 229914 - DNA, 444 bp, Klebsiella pneumoniae
atgattttaaaagaagaaattgttttgggtatctacagctggcttcatatgactccggtcagcatgctggtaagaaacataaccagcgatcagggaggggattacgcgatcgtccgctttaccgtcgatagccggggggtccagatggggcctaaggcacagggccagcttctttgttcattcgggtttaatgtaaaggaatcctgtgaggccgacccaaaagacggtccaggcctcataaaggccgaaatgatgaacggtgttatgcagctggtaccggaatgcattgagctcacagacagccaaacccaggcaatcaggaaagaagtaactgtgtttaacagggtttgtgctatgcaactcctgggggggcatgggaatgcaaggtctctgtgggagaaagaaattcttccccggatgaaagtgcgcagacaactacattga

SEQ ID NO: 229915 - DNA, 960 bp, Klebsiella pneumoniae
atgaatactgactttgcccattacaacgaagagcaactacgcaaactcggtgagctgcacagtttactccgtcacagcgatatcggctcatcttaccttgcctcgctcccggagccccgtagtgttgaggagttgaatccgccacaggaaatcaatgtgactcattcggtacccgacgtcgacaccctggtggatatttaccggcagcagcgggttgataaagtccatgtcagggatgagcattattcaaccaaaatcacccgaaaatatcccgggttcgttgtggtcagaaacaatcatgatcaggtgatgtcgctggtgggtgaaatcaaccggcttcgtgacaaatttgctgatgctgtaaaagctatcactcattaccaggactcccggtcagaaattctgcatcaggtttacccgtggctggtgactttacaggtatcccgtaatatccgggtcgttactgagcaaattcgctccctggggttcacctggcaaatccctgtcattcataaatttacccggctggaaacggttatcgaccgcttacgcagggagataactgagctccagccggatatcagtctgacaaaacaggatgttgaacggctgaaacaggaacgaaccgaagaaatcatgatgctgtcgttgctcaatgacgaagtgagtcatgacgatgaaaatttgagaaaatttcggctcatccgggaaagtaactttccggctgttaacgtcaatatccggtacaccagtcctgaagatccagatgatgttcatgggccgtacaaactcaactttcgcgcgcctttaccattaattttgttcagcgaaccgggacggtttaatccgttaaaaaattacgtaaaaggtgaaaggcagaagcgcggcgattttaatgaaaaatatcgttctgtcctgccccgtatagggctggtggaagtcatcagggagtcaaaatga

SEQ ID NO: 229916 - DNA, 981 bp, Klebsiella pneumoniae
atgagccatcaactcaccttcgccgatagtgaattcagcactaagcgccgtcagaccctaaaagagattttcctctcccgcatggagcagattctgccatggcagaatatgaccgctgtcatcgagccgttttatcccaaggcgggcaatggccgacggccctatccgctggagaccatgctgcgtattcactgcatgcagcattggtacaacctgagcgacggtgccatggaagatgccctgtacgaaatcgcctccatgcgcctgtttgcccgattatccctggatagcgccctgccggatcgcaccaccatcatgaatttccgccacctgctcgagcagcatcaactggcccgtcaattgttcaagaccatcaatcgctggctggccgaagcaggcgtcatgatgacccaaggcactttggtggatgccaccatcattgaggcacccagctctaccaagaacaaagagcagcaacgcgatccggagatgcatcagaccaagaaaggcaatcagtggcactttggcatgaaggcccacattggtgtcgatgccaagagtggcctgacccacagcctagtcactaccgcggtcaacgagcatgacctcaatcagctgggtaatctgcttcatggagaggagcaatttgtctcagccgatgccggctaccaaggagcgccacagcgcgaggagctggccgaggtggatgtggactggctgatcgccgagcgtcccggcaaggtaaaaaccttgaagcagcatccgcgcaagaacaaaacggccatcaacatcgaatacatgaaagccagcatccgtgccaaggtggagcacccgtttcgcatcatcaagcggcagttcggcttcgtgaaagccagatacaaggggctgctgaaaaacgataaccaactggcgatgttattcaccctggccaacctgtttcgggtggaccaaatgatacgtcagtgggagagatctcagtaa

SEQ ID NO: 229917 - DNA, 141 bp, Klebsiella pneumoniae; identical to SEQ ID NO: 36145

SEQ ID NO: 229918 - DNA, 339 bp, Klebsiella pneumoniae
atgcagaaaaatatgactcccggcaggcgtaaaggctgccctaattattctcctgagtttaacatctcaaaactggcgcttgaaaatggcattaatgccaatctgctctttaaatggcgccagcagtggcgcgagggaaagctgctattaccttcctctgagagtcctcagttacttcctgtgactctcgatgccaccgccgtacaaccagaaccgcccgctgaggactcagagctcagcatcagctgtgaggtaacgttccggcacgggacactccgcctcaacggcactgtcagcgaaaagcttctgactctgctgatacaggaactgaagcgatga

SEQ ID NO: 229919 - DNA, 2967 bp, Klebsiella pneumoniae; identical to SEQ ID NO: 153364

SEQ ID NO: 229920 - DNA, 561 bp, Klebsiella pneumoniae; identical to SEQ ID NO: 164717

SEQ ID NO: 229921 - DNA, 237 bp, Klebsiella pneumoniae; identical to SEQ ID NO: 77389

SEQ ID NO: 229922 - DNA, 366 bp, Klebsiella pneumoniae; identical to SEQ ID NO: 25794

SEQ ID NO: 229923 - DNA, 363 bp, Klebsiella pneumoniae; identical to SEQ ID NO: 226898

SEQ ID NO: 229924 - DNA, 408 bp, Klebsiella pneumoniae
atgtctcattgccacgaaatgctcaagctaaacccgaacgacaaccaggggattcgtcatttattagcgaactattatcttgaactcgaaatggtggatgatctgagcgtgctactggatgattattcaggtgatatgcgcccgtttcttcagtatacacgcgccctcctcgcctacagacagtcatcccccgatgccgatgatatcgctaaagcagctattagctctaataagcacatcccaagcttgttatcaaagtgcaaattacaaccaaagtctaacagtggatatatcacgttaggtgaaatggatgaagcaattgattatataaaccataatattaaaccttggatcagaacacctaatgctattgaatggatcatgaatatttcctcggccaataagtag

SEQ ID NO: 229925 - DNA, 687 bp, Klebsiella pneumoniae; identical to SEQ ID NO: 158557

SEQ ID NO: 229926 - DNA, 738 bp, Klebsiella pneumoniae; identical to SEQ ID NO: 158558

SEQ ID NO: 229927 - DNA, 1470 bp, Klebsiella pneumoniae; identical to SEQ ID NO: 155376

SEQ ID NO: 229928 - DNA, 570 bp, Klebsiella pneumoniae; identical to SEQ ID NO: 16861

SEQ ID NO: 229929 - DNA, 2016 bp, Klebsiella pneumoniae; identical to SEQ ID NO: 18661

SEQ ID NO: 229930 - DNA, 1614 bp, Klebsiella pneumoniae
atgagtcagaaatacctcattcgcatcgcagagctggaaaggttgctctctgagcaggctgaagccctccgtcagaaagaccagcaactgagtctggttgaagagacggaagccttcctgcgctctgcactgacacgtgccgaagaaaagatcgaagaagatgaacgggaaatagaacatctgcgggctcagatagaaaaactgcgccggatgctgttcggtacccgttctgaaaaactgcgtcgtgaagttgaactggctgaggctctgctgaaacaacgtgaacaggacagcgatcgttacagtgggcgggaagacgatcctcaggttccccgccagttgcgacagtcgcgccatcgtcgtccgttaccggcacaccttccccgtgaaatacaccgcctggagccagaagaaagctgttgcccggagtgtggcggtaagctggattatctgggggaagtcagcgctgaacagctggaactggtgagcagtgccctgaaagtgatccgcacagaacgggtaaaaaaagcctgtacaaaatgtgactgtattgttgaagcaccggcgccgtcccgcccgatagagcgtggtatcgcgggccccggattacttgcccgcgtgttaacgggaaaatactgcgaacatctgccactgtatcgtcagagtgaaatctttgcccgccagggtgtcgaactgagccgggccttactctccaactgggttgacgcgtgctgccagttaatgacaccggtgaatgatgccctgtaccgttatgtaatgaacacccgcaagattcacactgatgacacaccggtaaaggtactggcaccgggtcagaaaaaggcgaaaacagggcgtatctggacgtatgtccgggatgatcgcaatgtgggttcgtcatctcctccagcggtctggttcgcgtactcgccgaaccggcaggggaaacacccggagcaacacctccgccccttccggggtatcctgcaggcggatgcgttcacaggttacgacaggttgttcagtgcagaacgtgaaggtggtgcactgacagaagttgcgtgctgggcccatgcccggcgaaaaatccacgatgtatacatcagcagcaaaagtgcgacggcagaagaagcactgaagcgaatcagtgaactgtacgccatcgaggatgaaatacggggattaccggagtcagagcgtcttgccgtcaggcagcagcgaagcaaagtgttactgacgtcgctgcatgaatggatggtggagaagaatggtacgctgtcgaaaaaatccagactgggcgaagcgttcagctatgtactgaatcagtgggatgccctctgttattacagtgatgacggtctggcggaggcggataataatgctgcggaaagagcgcttcgtgcagtctgtctcggaaagaaaaactttatgttctttggcagcgatcacggcggcgagcgtggagcactgttgtacgggctgatcggcacctgccgtctgaacggtatcgatccggaagcgtatctgcgccatatcctgagcgtactgccggaatggccttccaaccgagttgatgaactcctgccatggaacgtagtactcaccaataaataa

SEQ ID NO: 229931 - DNA, 351 bp, Klebsiella pneumoniae; identical to SEQ ID NO: 6245

SEQ ID NO: 229932 - DNA, 426 bp, Klebsiella pneumoniae; identical to SEQ ID NO: 6184

SEQ ID NO: 229933 - DNA, 435 bp, Klebsiella pneumoniae; identical to SEQ ID NO: 5323

SEQ ID NO: 229934 - DNA, 408 bp, Klebsiella pneumoniae
atgacgacattcctgtcactcagccaggaggtactgttatccctgctcagtttctgcaccgcgtgcagcatccacggcgttcagacccgcgagcatggtcacacgtcacgcagtccgctggactcgctggagagcgctatcggattccacatgcgcgactggtggcagccgacgaaagcaaacttcttcggacacctgcaaaagccgcagattatcgatgccctgaatgatgccggactgtccggtgctgcgcgggacgcggagaaaatgaagaaaggcgatgccgctgaacatgcagagttccacatgaaagacaaccgctgggtgcctggctggatgtgtacaccacgtccacaggcagagacggaaaccacggagtaccgtgacgaccaggcagaagccgcctga

SEQ ID NO: 229935 - DNA, 528 bp, Klebsiella pneumoniae; identical to SEQ ID NO: 5333

SEQ ID NO: 229936 - DNA, 1017 bp, Klebsiella pneumoniae
atgaatatcgtatttctgggtattgagctggctaaaaatgtttttcagctctgtgggttaaaccaggccggcaaaccggtttatacgaaacgaactggccgaaaagaattgctccagacgctggcaaatattcctgcatgtctgattgggatcgaagtgtccaccggggcattttactggcagcgtgagtttgagaaactggggcacaaagtaaaggtcatcagtcctcagtatgtaaaaccctttgtccgcgggcaaaaaaatgatggtaatgatgcacaggccatcgcagtggctctgatgcaaccgacaatgcagttcgtgccaccaaaaagccccgaacagcaggatatccaggctttacaccgggcaaggcagcgtattgtcaatcaccgcactgctacagtctgtcaaataagagggctgttacttgaccgggggatccccattggcagtgctgtctccagagttcgccgggctattcctcttatccttgaagatgcagaaaacggtctaagttcccgtatgcgcagaacaattgccgagctctatgagctctttaacgatctcgggcgtcggatccatttttttgataaggaaattgaaacagtattcaggcaatcagaagcctgtcagcgtatcgccagagttaaaggcattggccctaaaacggccacggccgttgttgctgctattggcaaaggaactgaatttatgaatggccgccactttgctgcatggctgggtctggttccacgccagcattcgagtggtgacagacaggtgctgatgaatatgacgaaaaaaggcgacaagcatctgcggacactttttattcatggtgcccgcgctgtcgtcagggttgccacgaataacaatgatggccatatgaatcagtgggttaaccagttaaaggaacggcgcggatttaataaaacgaccgtggcggtcgctaacaaaaacgcgcgaataatctggtcgatgctgagaaatgagaccgagtatcaggtagtgtga

SEQ ID NO: 229937 - DNA, 864 bp, Klebsiella pneumoniae
atgttaatacaagaagaatataacagagataagtatataaatcaaattcaatcatggactttatgcgctgatgatttcgaaaatggcacatacagaaagcctaaaagcaaagcgttaaataaaaaatatattggctataataataactactttatgaatggttttgtgtttgatatagaccaaccagaaggtgcaatcgcatgggatgattgcggattacctaagcctaatataattattcaaaatacaacaaatggtcatgctcatttgctttatgctttaaaagctcctgtatgcaagacagacaacgctagaacaaaaccattaaagcttgcaagccttatccaaaaaggatttacagatagattaaaagcagatcgtgcatatgctgatgtgctaatgaaaaacccaattaatgaagcagaatggcgtacaatctggggtaatgttgaagcgtatgatctcagctatctaagcgagtttatacccgatgacattcaagaacaaaaaagattgccctcagatggtctaggacgcaatgttaatttgtttgaagatctaaggcattatgcatataaatccgtattaaagttcaaagaaaaaagtaactatgaaaaatgggaaagagaactgatattaaaagcggatggattaaacaccttttgcaatggtagtaatatattaagctataacgagataaaagcaacagcaaagagcgttgcaaaatggacgtggcgaaacttcaataaagaatgtttttcatccattcaatcttttagaggaaaaaagaacactggaaagaaaaaaacaaaagatagaagtaaagcaatgttagaacagatcatgaaagcagatgcggagtaa

SEQ ID NO: 229938 - DNA, 1206 bp, Klebsiella pneumoniae
atggctttatataggttagaaatgcagaacgttagccgttccgatggtgtaagctcagttgcaaaagctgcttatcgtcatcgttcggttatggttgaccatagaacgggagaaatccacggcgagaaatcgctagaccgtgatgatctagtttatgctgaaatattgcgaccaaaagatactccagcttgtttgcatgttccttctgctgagttatggaatattgttgagaagaaagagacgagatcgaactctagaaccgcaaaagaattcaagataactttaccgactgaattatcaaatgaacaaaacatcgcattgatgaaagattttttattaaatcactttgtcgataaaggcataatatgtgactttgttttacataatgataaagataataaaaatcctcacgctcatgtaatgataactactagagaaataacgccgtcaggttttggtaaaaaagtaagatcatgggatgaagaaaaaactttgcatgaatggcgtaaacaatgggcaaaagttcaaaatcagcatttgaaaaaattaggtttaaaatctcgtgttagccatagaacgttagaagaacaaaaaaatataatgatcgatttagctaaaaaagcagaagatgcaaaggattttgacaagtctattctgtatttagcaaaagctattgaactagatagaccaccaatgcagaacatgagccgtaaaaaatggagaacaaaagaggggcaggaacaacgcaaacgtgaccaagcgatcagagacagggcaagagccgacgctagggctgtcaggttgttgagaggtgttgcagttgttgatgttgcttcattcgtggttcatccgttagagaaaaaagagcattcaaataataatgatttttcagttaaaaaatcgtggtggcgttctacggttaattttataaaaaatattaaagccaagttctcaactcaaaaagatattaaacccgttcacgaaaaagaacctgagttaatgactgatccggtgactggtttaacgattaccaagcaaaaatggcaggagatgagtaacagggcaaacgtaaggactccacagcctgcgatctcatatcaggttaagcaatcggacggggaagggctaaaaacggctcagaatgcgttacaggacgttttagagcacgctcatagagcaggaagcgcaaaaaggaagatgcgataa

SEQ ID NO: 229939 - DNA, 420 bp, Klebsiella pneumoniae
atggatttttataaccatgagttttataaaaacaacaagattattagagataagatagagcagtatttttacggaagtagagattataactttaagaagttaaaaaaagctgagaaagatttctttaactctgttcttattgagtttatagatgagtgcaagagagaaagagaagaggaggggacaaaaaactttaaagcatctgtaagaatggttcttaataatcatagaataaaagaaaaagaattgaagaatgattctttctactttatgactcaatcagagattaagaataagtccaaaaaatggcattacgatgtgatattaaaaagcgccctttctatttcgacgtgggaaacatcgggcgtatggtgtgattatgatattgtttatgtaaggagtaacgatcatggcgagtaa

SEQ ID NO: 229940 - DNA, 279 bp, Klebsiella pneumoniae
atggcgagtaagaaaacattagaacaaaaattagcattagcacaagatagattatctaaacttaaaaaagaagcatcgcagaaagaaagaaaagctagagaacataaaaaatttactgttggcggtgaggttacaagggtcttcggtttagattacgatctagctcttgtggtaggttttcttgaacactttaacaagttaagcgacgagcaaaaacaagcgttaaaaagcaatggtgaaagattgctaaaatcacgtctagaaaacgctgacaagtga

SEQ ID NO: 229941 - DNA, 276 bp, Klebsiella pneumoniae
atgtctcaaaaaaaagagcaaaaaacagcagaaaaaccaactgcagggccactgagaaaacacagaactagaactgaaaaaatagacgatttgaaaaaacagatcagcgatttgagaaaagcagaaagagaagagcgccaacgggcacgagatgaaaagttacttgccattggtaaagctgtttatgaaaaagcaggaaaaccgaaaaatatttatggcttgcagcagtttgtggagtcagaagaatttaaagtggattttaaaaacgatttctaa

SEQ ID NO: 229942 - DNA, 276 bp, Klebsiella pneumoniae
gtggcttctgtttctatcagctgtccctcctgttcagctactgacggggtggtgcgtaaaggcaaaagcactgccggacatcagcgctatctctgctctcactgccgtaaaacatggcaactgcagttcacttacaccgcctctcagcccggtacgcaccagaaaatcattgatgtggccatgaatggtgttggatgccgggcaaccgcccgcattatgggcgttggcctcaacacgattttacgtcacttaaaaaactcaggccgcagtcggtaa

SEQ ID NO: 229943 - DNA, 633 bp, Klebsiella pneumoniae
atgaaagacataaataatagcaaaaagatcattttcgttgagggtgatgatgattttcattttctatgcaacctacttgaaatacaaggcattaccgatgtttttgtcgaaaaaataaatggaaaatcaaaattaaaacaagcacttagagcattcaaaaacattgattctttcgatgaaaaagaaagtatttttattatattagatgctgacacatcattttctgacacagaaagatcaataattgccacattgcgagaactacaaatctcctcccccagctcgcataacgagatagctatgaatggcaatacaaaaatttctttctttataatgccaggaaaagacaagcaaggtgccattgaagatctgataattgaacacgcaagcactcgagcgttatatgaatacataatagaatttttcgaaaaaattaaaaataataaagatgacatctcagcgagtgacaaagagtacacttatccaacaaacgaaaaaaaagctaaggtacaagtctatcttagctgcaatagagaatccgactcaagaataggaatatccatgaaaaatggaataataaacacagcagacaattgctttgatgaaataaaagattttatttcaaaaatataa

SEQ ID NO: 229944 - DNA, 1116 bp, Klebsiella pneumoniae
atgataaaggaaataagtttaaagaacttcaaatgcttcaatgagctatatctaaagcaattaaagactttaaatatcatagctgggaaaaacaactacgggaaaacatctatactggatgctattttttgtttttatgatgtaaaaaacccggctgttttgttaaacattcaagcattcagaaaagaaatggcagaaataaacaaaaacaagccattttgggttagttactttcatgatatggacacatcacaaaagatgtccatagtcattcgagatgaacgctctgaagtaacacaaacatatgaaacagaaacaaatcagagattagaatcaagtttgtctctaaacgttgacaccgtactatctaaccaaaacatacctcgtcaaactatcggttctcaggccacagtaaactctttaaaaataaatgtgaccgagacacccaatgcgaaaaacagggtttccaataagcttttctctatgcaattgaaagaagatggcgtagaaataaaatccgaaataaaaaacgaaagggatgggattaattataaatttaagacagcaacaataataacaacatccagaaagataaacaaagaggcaacaattacaaatgtatctagcctactaacacaaaaaaggaaaaaagacatactagaaaacttaaaaaaaatagatgacagaattgtagatatagcaatatctgcgataggtaacaataaggaaatatatttagacattggatttagtgagctaaatgaaatatcaatgcttggcgagggtatcagtcgagcattatcttttatcagctcagtgctggtacaggaaaactcaattattcttattgatgaaatcgagaacggaatacattactcagtaattaaagacataataaaatcattaatttcatctgcaaaacaaaacaacaatcaaatatttgcaacaactcatagtcaagatgtgatacgagcaataaacgaaatagatagcaaaaatgaagatatcgcttatattagactaggaagagaaaagaactccctaaaaccaacagccgtacaattcaatatggatgatttctcctactcagttgagaacgactgggaggtaagataa

SEQ ID NO: 229945 - DNA, 192 bp, Klebsiella pneumoniae
atgacgaaacaacagaaaacagcgctgaacatggctaaattcatccagaatcagtctctgctcctgctggagaagcttaacgagcttgatctcgatgtcgaggccgacctttgtgagaaactccacgatgatgcggagcatcttttccgtacactgtcctcgagactggatgcattacaggatggtaactga

SEQ ID NO: 229946 - DNA, 402 bp, Klebsiella pneumoniae
atggccagagtgtctattagtgaggctgcccgactgacgggtaagagtagaacaacactgcacaggttaattaaagcaggtgacctgtccacctgtagcggtgagcgcaatgcaaaaatggtagatacttcagagcttttacgtgtctttggcccctttgagcaaccgaagggtgaacaccattctggacaggtctctggacagcgtgatacagcctctgctgaccagagtgaacaggtgatccgtcatctgaaacaggagattgaacacctgaacaccttacttttgtccaaggattcgcacattgacagcctgaaacaggccatgctccttcttgaaaatcaccaggcaaaattaactgaatccccggcgccatggtggaaattctggaaaaaatcctga

SEQ ID NO: 229947 - DNA, 255 bp, Klebsiella pneumoniae
ttgttgaaaagcctaaatgtgcacagtagcctgagagaaacctatctcctgaagttcaggaagtgcagcacgacagaaacccttgacagagtgtttgagcgtatcctggataaattaaatgatgaaggtggggatataaataagataaccagcttgagtggcgcgtatgatcaccgcagagctgagatctatatgaaaaaaatctatgacaaaatacctgcctctgtgtggcatctcatccccgatgagatctga

SEQ ID NO: 229948 - DNA, 1767 bp, Klebsiella pneumoniae
atgaccgttgccattaccgatgtcgtcctgcgcgacgcccaccagtccctgttcgccacccgtctgcgccttgacgatatgctccccgtcgccgctcagctggacgacgtcggctaccgctcgctggagtgctggggcggcgccacctttgacgcctgcatccgctttctcggcgaggacccgtgggtccgcctgcgcgagctgaaaaaggcgatgccgaagaccccgctgcagatgctgctccgcggccagaacctgctcggctaccgccactacgccgacgacgtggtggagcgcttcgtggagcgcgccgtcaaaaacggcatggacgtcttccgcgtctttgatgccatgaacgacccgcgcaacatgcaggccgccctgcaggcggtccgccgccacggcgcccacgcccagggcaccctcagctataccaccagcccggcccacaccctgcagacctggctcgacctcaccgaacagctgctggagaccggcgttgactccgtcgccatcaaggacatgtccggcatcctcaccccgcatgccgcctttgagctggtcagtgaaatcaagaagcgctacgacgtcaccctgcacctgcactgccatgccaccaccgggatggcggagatggcgctgctgaaggccattgaagccggggtcgacggcgtcgacaccgccatctcctcgatgagcgccacctatggccacccggccaccgaagcgctggtggccaccctcgccggcacaccgtacgacaccggcctcgatatccacaggctggagagcatcgccgcgtacttccgcgaggtgcgcaaaaaataccacgccttcgaaggccagctgaaaggcaccgacagccgtatcctcgtcgcccaggtgccgggcgggatgctcaccaaccttgaaggccagctgaagcagcagagcgccgcccaccgtctggatgaggtgctggcggaaatcccccgcgtgcgcgaggacctcggcttcatcccgctggtgaccccgacctcgcagattgtcggcacccaggcggtgctcaacgtgctgggcggcgagcgctacaaaaccattgcgaaggagactgccggtatcctgaaaggcgaatacggccacaccccggcgccggttaacgccgccctgcaggcgcgggtgctcgacggcgccgacgccgtcacctgccgcccggcggatttactcaagccggagctggccgcgctggaagcggatgtgaaacgccaggcgcaggagaagggcatcacgcttgccgaaaacgccatcgacgacgtgctcaccgtggcgctgttcccgcagcccggcctgaaattcctcgaaaaccgccacaacccggcggcctttgagccggtaccgcaggcggaagccgcgcagccagtggcaaaagcagaaaaacctgccgcctccggcgtctacaccgtggaggtggaaggcaaagcctttgtggtcaaagtcagcgacggcggtgacgtcagccagctgacggcggctgctcctgcctctgcacccgccgctgccgccccggccggcgccggtaccccggtgaccgccccgctggcgggcactatctggaaggtgctggccagcgaaggccagacggtggccgcaggcgaggtgctgctgattctggaagccatgaagatggagaccgaaatccgcgccgcgcaggccgggaccgtgcgcggtatcgcggtgaaagccggcgacgcggtggcggtcggcgacaccctgatgaccctggcgtaa

SEQ ID NO: 229949 - DNA, 252 bp, Klebsiella pneumoniae
atgactgacaatgccatcctgttaggcgaaggcttcaccctgatgtttctcggcatgggctttgtgctggtgttcctgctgctgctcattttcgccatccggggaatgtccctcgccgtcaaccgcctgttttccgagccgcccgccgcccccaaaccggcgccggccgccgtcgcgcccgccgacgatttcgcccgcctgaagccggcgattatcgccgccattcaccaccatcgccgtcttcacccttaa

SEQ ID NO: 229950 - DNA, 213 bp, Klebsiella pneumoniae
ttgcaacagtgccgactgacccgcaccgcgacgcttcccggctgggtgctggccacggccgccaccgtcggcggcccggtggcctacctgatcggcgctcgcctcggagccatgaccctgctggtgccgacggcgcttggcgtggccgccatggcctgcggctggctggtgctcatgctgttattccatctggggatggggaggcaaaaatga

SEQ ID NO: 229951 - DNA, 960 bp, Klebsiella pneumoniae
atgaacacgcaacctgtcattgggatcagcggatgtttaaccggctcagccgtgcgattcgacggcgggcataagcgtatgggctttgtaatggatgagctcgcgcagtgggtggcgtttaaacccgtctgcccggagatggcgatcggcctgcccgttccccgcccggcgctccgcctggtgcagaccccggtcggggagatccgcatgcgcttcagccacgccccgcacgaggatgtgacggagaagatggctgatttcgccagcgcccacctcgcaaccctgggcgagctgtcgggctttatcgtctgcgccaaatcgccgagctgcgggatggagcgcgtgcggctgtatgacgaaaaaggcaatcgcgggcgtaaggaaggcgtggggctgtttaccggcgccctgatggcgcgctacccgtggctgccggtggaagaggatggccggctgcacgatccgctgctgcgggagaattttgtcgagcgcgttttcgccctgcatgaactcaacgccctgcgcgcccgcggcctgacccgtcacggtctgctggcctttcacagccgctacaagctgcaactgctggctcatcaccaggcgggctaccgggagatcggcccgttcgtcgcctcgctgcatgaatgggaggatctggaggcgttcttcgaggtttaccgcgagaagctgatggcgatcctcaagcagcccgcctcgcggaaaaaccacaccaacgtgctgatgcatattcagggttattttcgcgaccagctgaacagccgccagcgcggcgagctgcgggaggtgatcctcaactatcgcgccgggctgctgccgatcctcgccccgctgacgctgcttaagcactatctggccgagtatccggatcgctacctgcaggcgcagaactattttgacccctacccgcaggatctggccctgcgcctgacggtgaactga

SEQ ID NO: 229952 - DNA, 348 bp, Klebsiella pneumoniae
atggagaaggcgcgcatctgggagatcacagaccgtaccgtccgcacctggcttagcgaagcggtggagtccgcagcggccgacggggtgacgttctcagtaccggtgaccccccatacgttccgtcactcctacgcgatgcacatgctgtatgccggcataccactgaaggttttgcagagcctgatgggccacaaatcgattagctcgacggaggtctatacgaaggtgtttgcgctcgatgtcgcggcgcgccatcgtgtgcagttcgccatgccggaagctgaagctgttgcgttgataaaaaagttaactgaagtggtcaacaaaaactggccaccgcgttag

SEQ ID NO: 229953 - DNA, 498 bp, Klebsiella pneumoniae
atgaaaaaaattataactgtagcgttatgtgtaatgggtttgtctggatgtgtaccgcctcaaggaaattacggaactcagcatcaggttaagcaagttgtgaagcgcccagcctttcctgtggaagagtacgcagcgctgcctaaaaagggtactggagtagtgaaaggtgagttgtttggcgttacccgcggaggcgatgttaagatcggcgccggccaaagcatcacactgcgtccactgacctcatacgttagaaacacaccgaagatcgatttccagacacaagaactggaacctatcgacaaacgcatttctgcctatgaccgagtcatcaacactgacgcccaaggtaaatttgaatttgataacgtgccgccaggcgagtacagcgtgttcggtatgtttagctggtacgcgggttacatgccgcaactggtgttcttgaacaaagatattaccgttaagaacggggaaactgttcaggtacagccgtaa

SEQ ID NO: 229954 - DNA, 501 bp, Klebsiella pneumoniae; identical to SEQ ID NO: 38943

SEQ ID NO: 229955 - DNA, 642 bp, Klebsiella pneumoniae; identical to SEQ ID NO: 105789

SEQ ID NO: 229956 - DNA, 264 bp, Klebsiella pneumoniae
atgaagaagcgtttttccgacgaacagatcatctgtattctccgcgaagccgaagctggggtacccgcccgtgaactctgccgcaagcatgccatttccgatgccacgttttacacctggcgtaagaagtatggcggtatggaggtgcctgaagttaagcgcctgaagtcgcttgaggaagagaacgccagactcaagaagctgcttgccgaagccatgctggataaagaggcgcttcaggtggctcttgggcgaaagtactga

SEQ ID NO: 229957 - DNA, 831 bp, Klebsiella pneumoniae
atgctgatgtgtgatgcgaccggtctgtcgcaacgtcgtgcctgcaggcttacaggtttatccctgtcgacctgccgctatgaggctcaccgtccggctgctgatgcgcatttatcagggcgcatcactgagctggcactggagcgcaggcgttttggctaccgtcgtatttggcagttgctgcgccgtgaagggcttcatgttaatcataagcgcgtgtaccggctttatcacctcagtggcctgggcgtaaaacgcagaagacgtcgtaaagggctggcaacagaacgtctgccgctgctccgtccggcggcgcccaatctgacctggtcgatggatttcgtcatggacgcactttccaccggtcgcaggatcaagtgtcttacctgcgtcgatgatttcacaaaggaatgcctgacggtcactgttgcctttgggatttcaggcgttcaggtctcgcgtattctggacagcattgcactgtttcgaggctatccggcgacgataagaactgaccaggggccggagttcacttgccgtgcactggatcaatgggcctttgagcatggtgttgagttgcgcttaatccagccgggcaagccaacgcagaacggatttattgagagctttaacggacgatttcgcgatgaatgcctgaatgagcactggttcagcaatatcgttcacgcaaggaaaatcattaatgactggcggcaggattataacgagtgtcgtccacattcagcactgaattatcagacgccatcagagtttgcagcacggtggcgaaatggaaaatgtgaaggtaaacaaaccgaccttactaactga

SEQ ID NO: 229958 - DNA, 537 bp, Klebsiella pneumoniae
gtggaaaatataaataacgatgtaccacagcatcaaccttaccgaaatgaaaaggtatttaattccggtaagacagcacttgagctcaatttttctgagacaaatggcagtgtgaatcttatccttgcggagcctttagtatcgaagccgggaagttttgactggactggtcaaaaggccttttcaacaaagctgagtgatgatgaagtgatcaccttgtgtatggcgtttcttcgccttactcatgaggctgttctgaaacataaaaaaacaaagcaccataataagcaagtctacaaaaacgtaaaagttacttttgatggtaaatccacagcaatgatggaggggggagttgtagctatcaacaaagacgagagagacattaattttatacataaaattattattgatcctgccgcttgccttcgcttaggtcttttcctcttgtccgtcatactggcccgaaatccaggggtcccatctgacgcggttctaacgtgcatgcgtcttaatgcaaatgctcaactacaaaagtaa

SEQ ID NO: 229959 - DNA, 393 bp, Klebsiella pneumoniae
atgcaatcccggatgacaaaggacattatcctgaacgcactgctgatggctgtatggcggcgtaatccccaaaaacaggtgctggttcattcggatcagggcagtcaatacacaagccatgagtggcagtcgttcctgaaatcacacggcctggagggcagcatgagccgtcgcggtaactgccatgataatgcggttgcagaaagctttttccagttgttgaaacgcgaacggataaagaaaaagctctacggaacgcgggaagaagcccgcagcgatatttttgattacatcgaaatgttttataacagtaagcgtcggcatggttctagcgatcagatgtcaccgacagaatatgaaaaccagtattatcaacggctcggaagtgtctag

SEQ ID NO: 229960 - DNA, 546 bp, Klebsiella pneumoniae; identical to SEQ ID NO: 225306

SEQ ID NO: 229961 - DNA, 546 bp, Klebsiella pneumoniae; identical to SEQ ID NO: 223176

SEQ ID NO: 229962 - DNA, 171 bp, Klebsiella pneumoniae
atgagcagccttctcgccaaagtaatggagcgcggcatcttccgcgtgccggcgcgccgcaagcgcaaggtcgaagttaagccttccgacataccgaccctgaaagactataccgcccgcctggtcgataagaagtggctacggctgagagcaaggaggccacatgcgtaa

SEQ ID NO: 229963 - DNA, 1206 bp, Klebsiella pneumoniae
atgtacaaggtctccgatcgcgacggtctatacgtagccgtgctgatctcaggcaccatctcgtttcgttacgattaccgcatcaacggccgccgggagacgctggttatcggtcagtatggtcgtgacggtatcacgctggccgaagccagggatgaactgatagccgctaaaaagcttctgaacgcaggccagtcgccggctgcagcgaagcgtgacggtatcaaacggatccgcggcgccgaaacatttacggtacataccgacgcctacatgaaacatgtggtcctggctgacagcacgcgggctatgaagcaatcagtaatcgaccgggatattttgcctgttctcggaaacaaaatgatgtccgagataacgacccctatggtgcgtgatctttgcgatcgcatagtcgagcgcggcggacgtgcgacggcggtgcaggcgcgcgaaataattagcagcgtgtaccggtacgccaatgaccgcggtcatgggttattcaaccctgccgcagatattaagccgctatctatcgcaaaatttgaggagcgagagcgttttcttaatccaagtgaaatcggtattttcttcagagccctgaatgactttagcgccatggggactttaaaaatggcgatcaaactagtcctcataaccatggtccgaaaatctgaattcgttaacgcaaaatggtctgaaatagatttccatcacagaacatggacgatcccggctgagcgcatgaagaaaagaaaggcgcacgtgattttcttgtctgatcaggctatggatctccttgtcggcttaaacatgtgcgctggtgggagtgaataccttgttcctggcagatatgacattaggaagccgctttctaacgcagcgctaaattccctcatcgacaggacagtaaaatcaattaacgatgcaggtgaaccattacagcgtttcactgtgcacgatctcagaaggacatgcagcaccaacttgcatgaagctgattatccatctgactggatcgagatgggacaggccagaacgcagaaaggaactcgaggagtatataacaaggcgaaatacgcaaagcagcgggcctacatgttgcagcagtgggcaaatatggttgatgcatggataaacggggagcattacgacctggtgccgttctccccgtctgcatttgaaaagtggatgaatgaacaatag

SEQ ID NO: 229964 - DNA, 624 bp, Klebsiella pneumoniae
atgaaagaacgcggaatgatttttaacggggaaatggtgcgggccattctcgacggacggaagacgcagacccggcgcccagtgaaattccctgtacatgataaaaaccttgggtgcgagctggctggcaatgaactggccggtgagctttcggcaggaaactatctcaacagcgcatttggcaagccaggcgatcgcatctgggtgcgggaaacatttcaggggccgttattcaattacgaacagatggatgaatacctcgaagatagctcgaaattcgaaaagccagaattctgccagtatgccgctgacggcggacatagacctgaatatcaagacgccgacgacaatttgcgtcatggatggcgaccatctatccacatgccgcgctgggccagccgcattctgctggaaatcaccaacgtgcgggttgagcgattgaagagtattagtgatcgcgatgcgctacgcgaagggtgcagtgccgccgacatgaagagtggcgactgtgtagctgatgtattcgcgcgcctgtgggcatcaatctacggttcagatagttggaatgccaacccctgggtttgggttatcgagttcaagcgcgttgaaggcggtgcagcatga

SEQ ID NO: 229965 - DNA, 936 bp, Klebsiella pneumoniae
atgagcaacgacatcgcaatcacttctcagcctggcgctaccgtcggcaccgccgcggcaatcttcagcccggaaggcatcaaccagttagtgcgctttgctgagctgatggctcagagcagggttactgttccggcgcatcttgcagggaagccggcagactgtatggctgtagcaatgcaggctgcacagtggggaatgaaccctttcgctgtagcgcaaaaaacccacgtcattaacggcgcgctgggttatgaagcgcagttggtaaatgcagccatcaccgcaatggcgccaacaaaggatcgcgttcactttgaatggttcggcccatgggaaaacgtgatcggaaagttcatcgaaaaaacaaacgacaaagggaaaaagtatctggcggctggatggtcagcaacggatgaaaaagggtgcggggtaaaggtctgggcaacgctgaaaggtgaaagtgagcctcgagtactggacctattacttacccaggcccaggttcgtaactcaactctatggggcagcgatccaaaacaacaactcgcatatctgggggttaagcgatgggcccgcctgtattgccctgacgtaattctcggcgtctacacccctgacgaattgcaagaagcagcaccgcatgttgagcgcgatattacgccaacaccagcgactgcatccggcatgaacaagctgatcaacacgaagcctgaacaaccggcggaagagaaaccaaagagcagcgacgaccgcgatccagaagaaattctgtgcgctttcactgacgcagcgatgaactacaacacgctgaaggacctggacaacgcttacaaatacgttgccaaaaagctagctaacgatgatgagcgtctggctaaagctacggacgtctacagcatccgccgcgaagagctgaatcaaatcccgatgtaa

SEQ ID NO: 229966 - DNA, 300 bp, Klebsiella pneumoniae
atgaacactcagcagattaacaacctgaaaaaaatcatgaccagcatcgacagcaactatcagctaagccagatgcattatgagcgccaggtggagctgatcgacgcgatcaaataccaccagctgcagaaacctttctacgaactggagcgcaaaggcgtgcgcaccgagattctggaagaactgatgatgagcccggaattcgaagaagctctcgcggcgtaccaggccgcgctgaccagcatcatcgcgaagtgggatctggctgaccagctggatacggcgaggaacgcagcatga

SEQ ID NO: 229967 - DNA, 1032 bp, Klebsiella pneumoniae
atggcgccggcaatttacgttgagaacgggcttgattccttcctggaaaagatccgcgccggagtaaacgaagttcctgacctgagcactgcaaagggacgggctcgtattgcatcgctggccgcacaggtatcacgcagcaaaactgctgtcgagaaacctggcagggattatctgaagcgcctcaaggagcagccgaaagtggttgaagctgaattgcgccgcttcgtcaccgaatgcgatcagctgcgcgatgaagtacgccgccctcttaccgagtgggaagaggctgaaaaggcgcgcaccgaagcactgcagcagcgccttgtggatttgcgtgcgctggctgacgtgatcgacgctgccggtaactacctgccttctgctgatattcaggcgcgcattctggaagctaaatccgtggtactggatgacagctggcaggaacgcgcagcagaggcgggagtggctaaagattcaactattcagcaactggaagcgtcgctggtaatagcgcaaaagcgcgaacatgaagccgctgagcttgatcgcctgcgcaaagaggcagaagaaaaagcacgccttgagcgtgaagagaatatccgccgtgaagccgctgaacaagctaagcgtgatgcagaggaaaaggcacaggctgaaattgatgctgctgcacgccgtgaatatgaagccagagctgcaactgaacgcgcagagcgcgaaaaaattgaagcccagcagaaagcagagcgtgaagcaaaagccgctgcggaaaaagctgagcaggaaaagaacgctgctatcgcagcggagcgccgccgtcaggaggaagctgaatcagcgcgcctggctgagcagaagcgcattgcggaagaagaagcgcgccgggccgctgataaagagcaccgccgtagcatcaatcgacaggctatcgcagacctgattgaaagcggccttacgcaggaaatggcagagaaggcactgatcgccatcgccagcgggaaggtatctgcagtctctatcaagtactga

SEQ ID NO: 229968 - DNA, 411 bp, Klebsiella pneumoniae
atgaacatcgaaacagtaaacgagctcattcggtcgctggagagcgcaggcgaactgtcgatcaaagagacaaaggttatggcgctggcgaaagcgtataagcagctggctgcggagaatgttgagctgaaggcgacgagcgatgatcgccgcacgttcataatgaacggggtgcaacttggctatattaaattaccgaaagacgaaaatggccaagctcttgaaaccattcgtattgctgtatcacaacaaaagccaacccccgccaccgatcgcatcgtagctgaagccgaggcgcgcggagttgagaaggccatcgcccatctggagaagaagttcagcaatatcggcgtgcagatcatgaatttgcagtggctggcagactcgctgcgcaagggatcatcagaatga

SEQ ID NO: 229969 - DNA, 234 bp, Klebsiella pneumoniae
atgccagtccgactattaacaaagaaacgtccgagtgatattgcaccaggcgatgttatcgaagtatttgatgagtggtatagggtcaggtacatcacttatcacggaatgattagtttatacctgcagcctgagaatgagccactttcaccgtttacagagaacgatgttctgattatctcggtcaatgatgatgtcgtgacatggattgatgttgaggtgaaaggtgcctaa

SEQ ID NO: 229970 - DNA, 1899 bp, Klebsiella pneumoniae
atgtcagaccttttttctcttgccccggagggccaggcatggatggacaatcaggctacggaaaagccatcacgtcctgaagacttcgaaccgtcagcatttcaggggagtttgtctgcattcattcgcggagccggtgaaggtgcgcttggacaagtgcagtctgccgtaggatttagcaaaaggcttatcagtgacccggcatttaccgacaatgtcgcacctaccatcaacatgttccgcgtcatgttcccggatgccgacaaagcgctgaatgagtcatatgactatttcggtaagcaactgagcagtgccagggaatacatcaagcccgaggccggaagccagggcatggccgcccaggtcattcacgggttaggtcagtttgcacctgcgatcggggcttcagttattggcggcccggtggtcggcgcagcggcggcggcaggcagtacttacgagcaagcctaccaggatgctttggcaaagggtgttgacgaacagactgcacgcaccgtggcagctgaacaaagcggattcaatgcgataggcatgggattgccagcggcagtaggtggaagactggcgacaagacttctctcaggtataggcatcaacacggcattcggtggcctgaaccgctttgctgttggtgagactctggaagggaacggctatgcagatatggctaagcagtaccgtgtgtttgacggacaggccatcctgatcgattccgtactcggggctgcgtttggcggcgctcatcactttgctgcgcgcggtaattcatttgacggcagggctgagactccgccagtggtagatgatggcgctgcggtaccggaatcagtgacaacggttgaaatgcagcctcaggaacagctatctgtttcatcggttcaggattccggcatggcgcctgatactaccgccagtgccccgggggcgacgtatgattctcgcctggcagaattgcagaatctggctggtcaggttttatcacgcggtgagcgtaaagtactagccgatgagatacaccgtgctgagtatgaaattgctcgtataggagagcagcgccaggcactgcgtgaccaacgcgtgggaaacagcagcagccgtcgcattcgtaatcgggaactggcagcgcttgatcagagggtgcaggaaattcagagcaggattgaacccagcaggcaggctcttgcggacagcactcccggcggccggttctacgatgcgcgatcagatctttccaggctggagcagggaattatcccggagagtatgcgtggcctgatccctgaatcatcagctaaaccaagtgatatcgatgcggcccatactctgaatgaagggttgcattatgatattgagtccgcgcctgttctgcatggcagcgaagccagcattaacagtcacgttgcggctatggatgaggccgccaggcagttgatggccgggcagccggtgaacgtcggcatgcaggcgcgcgggcttgatggcgttgtgcgtcctgatctactcgtcgatgcatcagagcagcgcgcagcgatggagcaggtatatcgtgaaaatgggataccagttaccgcggtagatgctggcagtgaatcgccggcgagaatgaccgacaatagtgctttcgccggaaaagaagacacttcacaggtcagcgtggatcccgattcgggagaaaccatttcctcaggtagttacgacctgatggctgcgcgcgaccttgccggcattgagccggatatcaccgtcgctcatcctgacaccgggcagccggtgaagctttcagaactgctcgccgatctggataaccagatcgcgaccgttaaaaacgaatcccgcgcctactctgtggccgcttcctgcttcctgaggaatccgtga

SEQ ID NO: 229971 - DNA, 2775 bp, Klebsiella pneumoniae
atgaaacaagcctgtattgatgccgtagccaacacgctggggcgccagccgaaagcggacgaaattaaaaatatcgaagaccgcattaaagacgccgtgcgcgtcatcgcgcgccgcaacgccagggaagggaagaccggtattcctgacgcggaaacttaccgccaggcggcagagcttgccgcggcgcaggctgtgcatgcagtgttcaagaagcgccagcgcgtcgcgcagaacgccattgtgatcgcaaaagctcgcgacacgctgaacagtgctattcctcaaaacgagcagaccccaattgcgctgcagcagtttattttctccgggcgacgcgggcgtgacgggcagccggatatcaatgttgtctcagctgaagagatggcgaccggcgcttatcaggactggacgcggcagctatccgcagagttgaccgcagccggcgacgatgtgcagaagtttttttaccagagtcaggcgttaggcgagcagcgcctgcgaaaccttttgccgtttgaccgtgaagcttccagatctggccagttgcagatcctgaaggaaatttacggcgaagacacagggaacccggcagcaaagaaaattgcgaaagtatggggggatgtcaccggtcgggccaggcaggagatgaacgattccgggtttgatataggtctgcgtgatgactggcatctgccgtacgttgacgatgcccagcttatccgcgccgctggccgcgatgagtggctttcctctcttccgctgaatgagcgcgctgctgcaatcgctgctggccgccagccgccgcaggatttcgcgcggcaggcctgggttgatgacgtatggaacactcaggaccgatcgcagtatgtgaatcttgacggcagcccgatgaacgatatcgagtaccgccaggcgctggaagccatctacgaaaccaaagtgacggaaggggccaacaagattgaccctggcgcctttatgggaagcggtggcataaagaaccgcggatcacagagcagggtgatggcgttcaaagatgcgaagtcgcatttttcatacatggaacgctacacccagcagccggttgtcggagtgatgatgtcgcacctgcagtcctcatcgcgggacctcggcgttgttaaggcgtttgggcctgatgcagccagtaacttcaaacttcttatggaccagatttatcagagagcgacgtcaaccactggtggcggccatgatattgggacgatgaatgatcagcgtcaactggtagagaggatgtttaactctatggctggtctgaacggcgttgcatcgtcaagtgtgttttcctctgctgtcggtggcctgcgcaacctgatgacttcggcaatgctaggtaccagcgtgttcaccgccgccagcgatcaggccatcatgcgcgccaatgctcaggcgctgggctttgaccgcaacggcatgcatctgtctgccaacacgttgaggaacctcttcaatggcgacgctaagcgtgcaaatgcagaacttggcctgctggttgatgcgcatgccgctgtggtatcgaagatggggggctttgacctttcccgtggtattacgggctggttcgcagagaaaacactaaaatggtccggtcttatcgcaatggaccgggccaacaaagcagcgtttggcctgttgatgtttaagaacattggcgagctatcccgaaaatataaatcccttgatgcgttaaccggaagcgatcggagggtgctggcaaacaaaggttggacgccagaggactgggctattatgagtgctgcagagttgcgcccgctgacaccaaatggtcataaaggtatgacacccgacgcgatctatggcgtgccagatgaaactatccgcaacattctggctgacagaatagagcaggttcgcgccggtagcgatcaggctcttgccgcgataggtgagatgaccgacgcgaagagaaagacgctgaaacaggcctttgacgcagaggttgaacaaaccataagcaggatggtgcgaaatgcacgtgcagaggccgcacagcatctcttgggtattacacacggagagatgaccagcgccgttacaacggcaaccggcttggatactttcgcccgtgatacttcaggagatctcctgaaaagcttcatgctgttcaaaactacgccaatggctggtatgcggcaaatggttactcgtgcgcaggatctggaaacgctgccagctgtaaaatatctggcatcctatattgccggtaccacgctggcagggatgttcgctaaccagatgaatgcgctgctatcaggaaatgacccattagatatgactaaacctcagacatggctgcaggcccttctcaaaggtgggtcgttcggcatttacggggacttcctttttcaggaccacacgcagtatggctccagtattgctggcattctcggtggaccggtacttggttttgcagagcagctttcgaaaacggtactgacgaactcgcagaaggcgatggccggtgaagatacgacattcacagctgatgcgttaaaaactgccaggatgattacccctttcgctaacctgtggtatacaaaagcaataaccaatcacctgatcctgcagcaacttcaggagatggcaaaccctgggtataacgcccgcgtgcgtgaccgcgcgatgcgtgagtttaatacaacaagctggtgggagcctggcgaagaaacgccacgtagagcaccagatttaggaaaggcggtaggtaaatga

SEQ ID NO: 229972 - DNA, 504 bp, Klebsiella pneumoniae
atgggccagaatgaatatattggttttatatatagcgaaaaaattttcagcaccaatgaaaaattaaaaagctttaaagaatcatttatttatcattggcgatatggacaccatccggattttggaaaagatagtcttttccacaagccaccctgcgtttatcctatccacctcagaaaggtgcatgttaacactggtttatatacgaacgcatacggtattagtggaactgaagaatgttggaaaaactggtctacgggtcgatataactcatctggaaataaaaaacaaatccccacatcagattcttatttaatttatgcagtatgtgaaaacaggaatgcaggcgtacttgatttctggtttcctccggctcataaagaggcggaatttgagccctctgtacaaggtatggttgaacttgctgataaattttatgaaaaaatatcaggaaaaccaatgggtagagataaagaaccatggcactctgatttcttagtgtag

SEQ ID NO: 229973 - DNA, 180 bp, Klebsiella pneumoniae
atgataaatattaatatttggtatgatgctgattccactgtttctttacctgaactggtatcaataaatattgaaagggattcttttgagaatcaatcagatctagatgactacatcattgattaccttatgaacaatgggtacggaggaaaaacaaatctaacatggcaaattttgtaa

SEQ ID NO: 229974 - DNA, 174 bp, Klebsiella pneumoniae
atggcaaaccatcgtggcggttccggcaactttgccgaagaccgtgaaagagcatcagaagcaggacgtaaaggtggccagcatagcggggggaattttaaaaatgaccctcagcgcgcctcagaggctggcaaaaaagggggtaaaaacagtcatggtagtcgtgaaagttaa

SEQ ID NO: 229975 - DNA, 1035 bp, Klebsiella pneumoniae
atgactaccccgttcagaaacacccgtattgagtttcatattctgcagtctttcccggtgacctgccttaaccgcgatgacgtgggcgcccccaagtccgccatcgttggcggtgtgtcgcgcgccagagtgtcatcgcagtgctggaagcgccaggtgcgtctggcgctgcctgattttggtattcgtctcggggtgcgtagtaaaaaaactgcctcactgctggccaacgcctgtcgcgcactgggagcgagcgaagaacaggccaccggatgcggtgaagcgatggccgcttttttctccgatgataccctgctgtttctcagcgaggctgaggccgccgcatttgccgcttatgcgcagggaaaagattttgacgccgccagcctgaaagataaagagctggtcaaagtcgccaaaaaggtggttaacaataccctggatgccctggatattgcgcttttcgggcgcatggtggccaaagcggcggatatgaacgttgaggcggcggcatcgttcgcgcatgccatttccacccataaagtgagtaatgagatcgagttttttaccgccgtggatgactgtaaaacggaggatgaaagcggttcggcacatatgggcagcctggagtttaattcggcgacctactatcgctatgtcagcttggatctcgggcaactggcgcagacgttgggtgaggacgccgatatgaaaaccgccgtcgccgcttttgttaaggcactctatgtcgccgtcccctcagcccgacagacaacgcagtccggggcctgcccgtgggaatatgcccgcgtgttactgcgtaaaggtcagggtctgcaggcttcattcgagcagccagttaagagtcagggtgaaggcttcttatctcccagtaaagcggcgctcaaaaactggttgcatacaaaagaaaaactctctggctccttgttcggcaaacaaggcgattatgagtggggtgaggacctcgactacagcattgaccgcctgatcgctgacttacagtcacatctgtaa

SEQ ID NO: 229976 - DNA, 1944 bp, Klebsiella pneumoniae
atgtatcatctcgacaataccagcggcgtccctgagatgcccgagccgaaagacacgcagactatctcgacgcgttggtttggggaaagtcaggagcaaggcgggataagctggccgggcgctgactggtttaatattgttcaggcagagttgttggctattctggagctggctggcgtaaatccaaacaaaaatgaatataatcagatagcactagccataaatgatctttcaaatgcgctaaaaaataatttgattaaaccagatggactgaagtttataggtcgatgtgcaaatattgacattcttcgtcagaccgaaccgactacagataaacaaaagattgagcttattgagtacagagacggttacaagtcaataaccggttacttcgaaagccgctccgttgtggatgaggctgaagatgatggtggtgtaaacattattacccgtgagggtaatttgtggcgtcggatctttggcaacggagtgaacgtggcgtggtggggaattcctgaaaacggagatgttaccgctgcgattacacgatctcttgattatggtaaaacccacaatgttggggtaatcatcagcccaggcaagtatctctgtaaaacccgcatcagtgttgatgttggattcacatcgctggcttgtcttgaaggatttgctgatatcaattttactgattcagacgatgaagatgcagtctggttgtacagctcagcaggttatcctgatggaatggagcaaaatacccttaatgcgcttgagaggataatttttcgtggaagtcgggttcagggacgcaatggcctcaggctgggtcatgaaatgtatgactataatggccaatcaagcattaacaaatgcacgtttatagatttcgataaggtggtttactgcactcacaatacatggcgtacaaagttcagtaactgtactttatcttctggagtatcgtttttgttccttgctcctgccggtttacgcaattctggagagagcattacatttattgatactcagatttctgacgcaaaaaacgcgccatttgatgtttcctgcgagaacttttctttaggtttctatggctcgtctgtgctgaacacgccgctgcgggtttctggtgcaggatctactgtttctattgaagggatggggaatattgaaaaccctggcagagagtcgttcctgaagtacgctgaggttactggcgcaggttcccgactgatcatttccaaatcaactatcgttatcaataagtattggttgcagacatcaccggtattttatgttggacaaaattcattccttatctttgatactgttaagtttccaggtaatccgtacgtctttgaaacaaattctgaagacggagtccgtgcgtttgttaatggtccaggtttcgtaaactcagtgaattgcactggtgacatagtatctggagccggaatgatacctctccatcggagcttatgcccgttctttaactggaattttgagcgcggcacttttgaagggtggtcgctgaataattcagggagcgtttcgcaaacggctgaggttttaaacatagccgctaaaactgggaattatggtttaaagctcacatctgtcgccggtctgaatgtttttgccacccagtcaaccaggtctcttagtggtcgatattttacattttccgtatgggctaaggtgataacgccttcgtcttccggtgggaatgcaggcaatgcaacacttacctttaaatcagagcaaggtatacaactagatggttcattcacagcgaacataagttctggtgctacggattgggccgtttacggagcgtatttacaaggccgcgttccaccttctgctgcatcagttgaagtgtctttaagggcttcgaatggtgctgttctccattttgattgcgtcttgctaaattttatttag

SEQ ID NO: 229977 - DNA, 384 bp, Klebsiella pneumoniae
atggcacagatgacactgacgttaattcacggctatgtcaccggtaaaggtactgacgatgagatgcggcatcgtaccgttacctttcgcgagctgacctcaaaagacgttatcgatgctcagctggaggccgagcgcgtggttatcggggagaacggcaaggccgtggcgtactgctctgaagtgctgatgggactgggtatgctgcggcgacagattgcctctgtgggtgagattccggggccattgtccctcaagcaaatctacgcctttcacccagaggacctggagttactcagcagtaaagcagctgctctcgatgacctgctttcggagaccgcgtcacgggggcgacctggtgccgctggcgacggcgctgagtaa

SEQ ID NO: 229978 - DNA, 354 bp, Klebsiella pneumoniae
atgagcattctgggtatggcggccattcgtgctaacggccgtgaaatcaaaaccacgggaaaatccaccctcaatccgggcggtaaaacacgcactcagcatatgggcgccggtaaggtttgggggctggcgggcaagatggcgggtccctcgatccagatgaccattgctgcggcggaggatatggacgttgtcgaaatcagtaactgggagaacgtgaccatcatgtttgagggcgataacggcctgacttacatgatgaccggtgcggcgaccgctgaaccggccacgctggacgaagacgctggcaccatcagcgccaactttatcggcaccaaactggtgaaggtataa

SEQ ID NO: 229979 - DNA, 585 bp, Klebsiella pneumoniae
atgacaacatcattttcccccgttttttctcacgcgctcgctttcgtactctccccccgtattgaaggaggttattctaatgaccccacagataaaggcggcgaaaccaaatacggcatttctgataagcgcgacggtcttgccgatggcaaaaccgacgtcgatggcgacggcaagcccgatacccgaattaaggacctgaccgaagaacaggccgggcagatttatttccgcgattactggtatccggcttattgcactgactggccagacggtatctcactctttgtctttgattcctccgtgcagcatggtgctaaaaaagcgatccagctcctgcaggatgccgtgggcgtcaccgctgatggcattgtcgggcccaaaaccaccaaagcagttatcggtgccgatgccgaatggctgctgacccgctgttttctgcgccgttcccgctattacgccgagatcatcaaagccaattcttcgcagggcaaatacctcaatggctggtttaaccgtctcgatgagctggcgaacgcctgtcaggaggtcatcggtggtcaggtctcggtcccccggagctga

SEQ ID NO: 229980 - DNA, 393 bp, Klebsiella pneumoniae
atgagtggcgatctctttggtgacgtgcaggacgacagcattctggaccatattgatgatgagatggagagttcccgctttccctcgttgctggctgaactgaacgcgttattgcgtaaggaacttgaacgctttggctatgacccgcgccattccattgaactggtcgcagccatcagcagtaagatcggcggaatgcaggtttactttccacgcggtcaggtgctggagcagctcgtcagggatatgcgtatctggcgtgattttcagggtaacaacatcccggaactggttgagcgctaccaggtgacctataaaacagtgtataaagctatcaggcgtatgcgcaggctggaagtaagtaaacgccagtattctctggacatggagtga

SEQ ID NO: 229981 - DNA, 255 bp, Klebsiella pneumoniae
atgtccaatacccctgatgataaaaattttgatatcgctggttttttactcgcaggcaatatcatggttaagctggttgaaaaaggcgttatcgatatgcgtgatgctaacgacatcgtcgccagaactcgtgctgcgtacacacaacgtgactcatataaagatgagagtcttggtagtgacgctgaggcatatctggatactctcttcaataagttatgggcgtccaggcccgatgcagtaggcaagaaataa

SEQ ID NO: 229982 - DNA, 306 bp, Klebsiella pneumoniae
atgtctgaagccaataaatgcactttaatcgaacttgatgatgcccttcgccagtgcggaatgctggagcggatacttctcatcgttaacaccggtattgaaaaaggctggtccgtaacagatgtcatgaacgttattaaccgcgaaatatcggtcattaaagcggaggttacttacaaaaatgaaaaagcccaggatgaattagttcgtcgtgagcttggcgtagatgatctggctatcattcttaaatcagattatgagcgggcgttatttcttgcctactgcatcgggcctggacgcccataa

SEQ ID NO: 229983 - DNA, 618 bp, Klebsiella pneumoniae
atgaatactttaaataccatcccggaaggttaccggattaatgctcaggggcatttagttcctgaatcacagattaaaccgctggataatctgcgtgatgaaatggtgctcggcatcgttgaggcagctcgtctgcagcgtcagtctctggtcgagttcaagctcggctctatggcgaaaatcggtgattttatcgacctttcagcagcggaatacggtgttgaatatggcggtgctaaaggtaatgtcacgctggtcagctttgatggccgttataagctggttcgcgccgtaggcgagcatcgcatctttgatgagcgcattcaggcggcaaagaagctgattgacgactgcatcagagaatggtctgccggggctaacgaaaaaatcatggcgatggtcgatcatgccttccgtgtcaataaacagggccggattgatatcaatcaggttctgggtctccgctcgctgaacattgacgataccaagtggaatgaggcgatggatgctgtggccgatgctatccaggtcacgggaaccagccagtatctgcgtttatatgagcgtcaggatgatggcacttataagcagatatcgctggatttagccaagctctga

SEQ ID NO: 229984 - DNA, 240 bp, Klebsiella pneumoniae
atgattactgaacgtattgctgaacatgttggaatggccaccgctgcgcaggcatggctgcaggcgcgcggtagtcgtgttacggagatgcgggtgtggatgcgccgcccgtgtctggaaatcacctgtccgccaactgagctggtgaacagggctaatcatctgattgaacgctgccccaccgggacccgttccgtgtggatggccacccttgaaggctgtcatgttatctggaggtag

SEQ ID NO: 229985 - DNA, 948 bp, Klebsiella pneumoniae
atgtctgaggtgaatatttccgatattcgcgaggttctgcgcaacctcgtcgatggtacccgttttacttttgctcaggttgcccgtgaaaccggcctctcaaccggcgttgtcagtggcttcatgaataacaaatatgccggtgataacgaccgcgtcgagaaagccctgcaacgctgggtcgataaacaaaactctgccgccgagctgccggagccgccgcgctttattgagactccaaccgttaaacagatctggacggctttccgctatgcgcacctgacggagtgcatcggcgtggtttgcggtaatcccggcgtcggcaagtcagaatcagcgcgtgaataccgccgcagtaacgataacgtctggatgataacgatcaccccgtcctgcgccagtgtactggagtgcctgaccgaactggcctacgagctggggatgaatgatgcgccgcgccgtaaggggccgctggcccgcgcattgcgccgccgtctcgatggcactcagggccttgttatcattgacgaagcggaccatctgggtgctgaaacgctcgaagagctgcgcctgctgcaggaagccacccgcgtcgggctggtgctgatgggtaaccatcgcgtctacagcaatatgaccggcggcaaccgtaccgttgagttcgcccgtctgttctcccgtatcgccaagcgcgtcgccattaacaaaaccaaaaaggccgatgtggccgcgattgccgatgcctggcatatcaccggcgaaaaagagcgcgatttgctccagcagatcgcacagaagcccggcgctctgcgtatcctcagccactcactgaggctggcggcgatgacggcccacggtgccggtgacgctgtcagcgaaagctacatccgcaaggcactgcgcgatctggatctggacgtagatgtttcaaccttactaaggggttaa

SEQ ID NO: 229986 - DNA, 2076 bp, Klebsiella pneumoniae
atgtttgccacggtgaatgaattagtgggcctgccaggtttgccgggaacgccacagggcatcagagccatgatgggcaaactggtcaaagacaaccaggttctgttgcgtaagcgtcagggaagcaaggcgtttgaatatcacatcgacagccttcccgcagttacccagaaagcactgcgtgaccgtcaggttaaagagctgatgaagaatcaggatgccgcgttgcctgcccctgagcattccgctgtgacggaaaagagtgatacccggttatcgctttaccgtgctcaccctgtgctgatggaacaaaagctcaccggcttaactgccgaccagcaaaagattgctgatgcccgtattgcgctggtatcggaagtcctgaaactgggtgaaatacccggattcagctgcgcgaaagccatcagggaaatcgtcagacagtcccgcagtggcgagttacctgagcatctggccgtacaggtgacgttggccaatgccaaaaaaggttcatcccgcaccctgagcgagatctccctcaagcgctggatggcggatttcaaaaaagccagaacgtcgactgagcgtctggtactccttgcgccgggtaagcgtcagcgtgtggagccggaggaaattgcgtggctgcctgattttctggcgtattaccgtaatcccaatggtgtgacgatggctgaggcatatgaggattttattaagggctggtatacgcgatatgcagatcagccggagatgcttttctctgccccgacctataacacggttcgctacgcgatggataagctgccggaagtggtgaaacaacatcgccggatcaccggtagcgaagcccgacagattgagggttttgtgcgccgtgactggctgagtatgccggtgaactacgtctggatcggggatggtcacggcatgaagatgaaggttgcctctcctgagcatggtaaccctatcacaccagaggtgacattcattatggacgggagctgccggtatattgtgggctggagtctggcgctatcagagagcgttatcgcagttgccgacgccctgcgtcacggcattaaaaataacggcgtgccttatatctattattccgataacggcggcggtgagaccaatagtacgcttgacgctaatatcaccggtatcttaccgcgccttggtgttgaccaccgtctgggtattcctgagaacccacaggggcgcggcatcattgagatcctcaacaaaacgctggggatgcgtatctcccggcaatttgccacttactacggaactggcgcggataaaagcaccacgcgtaaggtatcaaaatcccttattgccgcgctgaacgcggtggataaagggcgcgaactgacagctaagcaggagcagacccttcgcgatttcccgtcatggaatgagcttattggggagattgaagccggggttcactggtataacaaccgcgcccacgattcactgccgttgaaagctaatggcgagcatttcacgccagcgcagtttcgtaagtacaagctggaaaaagaaaaaacagagattgaatggctctccgatattgagcttcgtcatatgtttatgccggaggttgagtgctcggtcagacgttgtgaaattcgacttttcaataacctgtattactccgaagcacttcgcgaggagcatggccgcaaagtgcgtgtcagctacgacattcacgatgcaacgaagatcgtcgttcgtcggatggatggttcgctgatatgtgaagccatatgggacggcaacaagagagcggcattccctgtcactgcggaatactggcagaaacagaaacgtataaaaggtatgcgcgaacgtggcgagaagaaggtccgtctggccgaggccgagaatgtactcactctctccgaaccagcagggccggactggctaaacagcaatgtatatcgccccagccagcccgcccccgcgatgaaggtcgtacctgaagaagaggaatatacggaggacgaatatctgaataactcgctggatatgctggaatcaaataaacgtaaaaactcgatttaa

SEQ ID NO: 229987 - DNA, 225 bp, Klebsiella pneumoniae
atggaaagaaatgaagtgcgtgactggcatcgcattgacattgtcgccgagcttcacaagcgtggcgtgacaatgcgcagcctttccaccagtgcggggttaagtcccgacacactgaaaaatgcgctggctcgttcatatcctaaaggtgagcgcatcatcgcgaatgctctcaatctggagccgtcatccatctggcccagccgctacagcaaggacttgtga

SEQ ID NO: 229988 - DNA, 639 bp, Klebsiella pneumoniae
atgccaaacataaaagaaaacagtttttcttttgattgcaacgcgaaagaaagcattcaggataggctgaagtatctcttcaaagggagatccatgcgacaggcatccattgactgggggcttccgtattctactttaaataattatttcgctaagggagcaacacctggtctagatgtagtcataagaatctcagcgtatgaaggcgtatcgattggttggctagcaaccggggagagcgattgggggacaggtatgaaaggagataacttcaaaactctggacgcaacagaatccacaaagctctcaatcagctcgaaggagggatttaatgaagatttttcaaagcacttcactaaaccagaagatgcactgtcactaacgtggggagctatctttgatgccctcaacatcaatgataaggtcaagttgattaatatttttgtaacctttggcgctcaaggtgtaataaaaatgtttaataatatcaatgatgttaactcgacctggtacgatttaaccaacgaggagaaagagcgcctgatccggttaaatatgcaaatgaaaaaagaggcacctgaaagtagtgaaggtgtgaccaagcccagcccatccagttccagcaagaaggccagttaa

SEQ ID NO: 229989 - DNA, 801 bp, Klebsiella pneumoniae
atgtttgatatcggcgttaatctgaccagttcgcagtttacccgcgatcatgatgaggtagtggcgcgcgccctggcggcgggggttaacggcatgctgctgaccggcacaaatttggcggagagccagcaggcgcagaaactggcgagccgctattccggctgctggtccacggcgggggttcatccccatgacggtagcagctggacgccagcggtcgccgaggcgatttataccctcgccggcgagccgcaggtggtggcgataggcgagtgcggtctggattttaaccggaatttttccacgccgcacgagcaggaggtagcgttcagcgcccagttggcgctggccgctgagctgtcgatgccggtgtttttgcactgccgcgacgcccacgatcggtttctgacgctgcttaaaccctggcttgagaagctcccgggcgcggtgctgcactgctttaccggcagccgcagcgaggtgcaggaatgcctggatctgggcctgtttatcggtattaccggttgggtttgcgatgagcggcggggactggagctgcgcgagctgctgccggcgatcccggcggaacgtctgctgctggagaccgatgcgccttatctgctgccgcgcgacctcaagccgaaaccggcctcgcggcgtaacgagcccgcgtatttgccgcatatcctggccagcgtcgcggcctggcgcggcgaggaggcgcaatggctggaggcgcaaacggacgcaaacgtcagggcgtgtggagaactaaaagatttgatacatccgggaacatga

SEQ ID NO: 229990 - DNA, 738 bp, Klebsiella pneumoniae
atgattaagtttagcgcaacgctcctggccacgctgatcgccgccagcgtcaacgccgcgacggtcgacctgcggatcatggaaaccaccgatctgcacagcaatatgatggacttcgactattacaaagatgccgccacggagaaattcggcctggtgcgtaccgccaccctgatcgaacaggcgcgggcagaagttaaaaacagcgtgctggtggataacggggatgtgatccaggggagcccgttaggcgactatatggcggcaaaagagctcaaagagggcgatgtacatccggtatataaggcgatgaacaccctgaattacgccgtcggcaacctgggcaaccatgagttcaattacggtctcgacttcctgcacaaggcgctggccggggcgaagttcccctacgtgaacgccaatatcatcgatgccaaaaccggaaaaccgatgtttacgccgtacctgatccaggatacccgggtcgtggacagcgacggtcaaatccacaccctgcgcatcggctatatcggctttgtgccgccgcagatcatgacctgggataaagctaatcttaacggcaaggtgacggtcaatgacattaccgaaaccgcgcgcaaatatatcccggagatgcgggcgaaaggggctgatgtggtggtagtggtcgctcactccggcctctccgccgacccgtatcaggcgatggccgagaattcggtttactacttaagctag

SEQ ID NO: 229991 - DNA, 1167 bp, Klebsiella pneumoniae
atgactttttggaatgattcctaccagagcgaattaaaatcaatagacctttggattgataaaaacatcagatataatgatgttattcctggcgatcttagcaagcttagtgatgatgagtttatagaagctgtattgtttcttagttgggattattttcgaaacttatttgtttcccacagggattctctcaataaatatactcaattcaatcagcgctacttacaagaaagagctctcccaaggttggataaactagagtcaaaccgtttttattttttaaatattctaataagaaatgtgtacgagcactatttctggactcaagattctgcacatcctcctgtttttgtagaaagggagacacttgaaagattagaccaactagcctccccctctgatagagatgcgcaattcttgtggattgagcgctcaatgcctgccgcattaataaagagtattttatcatcggaagaatttgttacattgagaaagatggctaacgatgtcagtgggtatgaagaaaaattcaccaaccagatagagttaggaactcagaaagctcaagaacaaatagaaaaagcttctgataaccttaaggcgttaattaatagagctgaaaattctcaaaaagatatcagtacgtatgttgataagcttaatgaatataaaagcgagtataacttcgtcttgttgagcaaagcattttcaaatttactacatacaaaacaagatgagtaccaaaaaaatcaccatagcgttattttcttttcagttttattggttcttatccccacaggggctttgataaaccatattttcgagctgtataaggttgaattcaaccttagcgcacttgcttattacttaccgatactatcgctagagttgctaatgttttattttatgcgtctttattacattgaaggaaaagctattaaggctcaactcttacagatagaacagaggctcagtctatgtgagtttatacatgattatgtggagacaaaaagtaaatcaggctctgaaaaggaatcgtggtcattatttgaaaagctaattttcagccctatacaggtttcttctgaaaacataccgtccttactggatggcgcatcatctattgccgagttagctggaaaagtcttgtccagagattcaaaataa

SEQ ID NO: 229992 - DNA, 147 bp, Klebsiella pneumoniae
atgcaacatgaaaatatcgtattaattgaggaagtatacaaggactttacagataaaatagcaaatctcaacgatttttcacacactgtaaaaaagaatacagaaaatattgctttagacattgaaaaaaaaaagacaaagaattga

SEQ ID NO: 229993 - DNA, 234 bp, Klebsiella pneumoniae
atggaattaatcccaatcccaacgtcaaatgtgacagtgccacgtagttaccgggtagccatcgtggacgcctggtggctggtgaaagacggaaatgtattcaaaacgaagtatcccggaaattacatgttcaacccagacatacgagtggttgagcgtgtctttaccaacgagctgcaaaacggttacagcgttgaacagcttcccctagcgtttatcgagtacagaggatga

SEQ ID NO: 229994 - DNA, 726 bp, Klebsiella pneumoniae
atgagaattgaaaatccgataactagcacaaacaaacatggcgaaaccatccagtcgcacccggcattcggtcttgtcaaaaccagccgggtacatacaaccggcattcgtctattcgattcggagctgaaacaccacgaatacattgagatcggtgtatacgaagcagaaatgacgatggatcgtgagcatccgacccctagaagaagcacctataagcgcagaccgatcgtagaaattcgactcagccaggcccagtgggcagcaatggtcagcagcttcggcgttggcgatggggtgccttgcacaatttcttaccgcagttcaggagatgcagaacgtctccctgatattgcagaacagaagagcattcgtgacaagttcgagtctcaaattgaggcaacggcatctaaagaaattgaacggattatggacgaagttgctcgtttaggagagctggttaagaagggcagagcagggaagcgtgagctggaggatgtgtatgcatctttgcgcgcagctacggccaatttgccatctaatctttctttctccaccaggttgatgcaggagtcgatggataaaatcgtatcgtcaggcaaggcggaaattgaggcatacgtatctggcgccgctatgagagctgggatgtccgacgtgatcgaagggccagacaacctacagattgacattaaaagtttgctagagaagggagaatcaaagtga

SEQ ID NO: 229995 - DNA, 444 bp, Klebsiella pneumoniae
atgagcctgacctcggctggtgcatccgaacgcaacggcctcggtcttgcgctccccgtatcgggccatcgcttcctgatcttcaacatactcaacgttctgcttatagccgtcttgtttgttgttataagtgatcagcgctacggacggccggtcttttcgagcagagcctttataggtaaacaggccatcttttacgtttgcgttggtaaacagcatgacaggatcagacgggctgtcctgcatgatattcaccatgccaccagcccagaaaaccatgccacggaaagcaccggcaatatcctgaatcagacgataagcgtcctgacgactggtgatctgggtgttgattgcaaagcgtttttctttgccgccaaagccatcatcaacctcttcgtcgcagtagcgaccgatctgataaagctggccaaggtcaatcattga

SEQ ID NO: 229996 - DNA, 822 bp, Klebsiella pneumoniae
atgatcgatacgtcaactttaccggtcagcgtcgccttccaggtatcagagacctctttccatgtttcatctttgggcagattctccggacggatcggaatctctttgagcaacgtggctgcgccaatacgcagtttgttgttgccagggctgctgattaccgcatccgtggtgcagcgcacaaaagaggacagcttgtatgtccgcccttcgacgacgcttacagattgcgtgatttgcatcgtgccagcggcgcaaacaagaattttactaccagaatggggcgcactcgctttgataacactggatacgctattccctgcagaccaccctgccaggtcacgctcaaaggaggcgttaaccagcaaattgctcggattgcttttggcagtatcggtatcgctctggatatcgctcagcgagttattcagggtagtgatgctttcactctggctgctaagggttttatcctgctgggttacggtcgactgcagacccgtgatcgccttgctattcgcagacacaccagactcaacacttcctacgcgattgtccagcgtagacaatgccgcaccttgtgatttaagggtgttgccctgctcttcaaccttctgggaaattgtctgtactgcactggcatcggccttctggccaaggcttgtttgcaacccggtaatcttgcttgcctgggaagcttgttcagtggacagcgtatgcagctcttctgcaacagaggctttgtttctgttgaattcagtctgcaaggattcacgcgcactcgcttccgcagcatcggcggtgatacgagcatttttctcctga

SEQ ID NO: 229997 - DNA, 945 bp, Klebsiella pneumoniae
gtggcaaaaaaaaatgaaacaccgaatgtgtggtctcttaataatattcctgctttggaattttgtacgttattaagggctgctgagttacttcgatgccatccaagtgatttaattcactttagccagattggagctattgaactttgtttagcccttcatgattttgaggcagcattatttacactaggtcgctgggaagaatcaaatgaatgggaggaaaagttcccccctaaattaatgacaaagtatagtaacaaatcacctttaagtctttttatgccaaaagctgaattggatatgagcccagcatcaaaaatgcgagttaagcgggtttatcaaaatgaggatatacctggattaaaaaagccgattttatatctttccggactttgggcattatcaataggttacttgcctcattcattttttaatgcattaaaatataatgaacaaatcacacttactcctttcaatttatcatttaaagaagcagacatcccaatgagtcaagaggattattgtagcgataattacgtagttatggctcacccaataacagaacacctttactcatctggtctgctaaaagaaggagaagtaaagccgattgcaacaataacggtaaacgatatttttgttactaggcttcaaattgaaaaagtatgcaattttattgggagggaaataccaaatgttataaatggaggggttagccaacctcaactttctgaaacgatgatagagaaacccgttagaacaacagcaaaacaggctgaacttattgttgctttacttagagggattggcctaaccgatgatgatctggctggtagcgtgtcacaacttaggaataaagccagcaataaagtaagcgacctcccattcccggatgatgataaagcgttagttgaatggttacgaagaggaggggtaaaccggtaa

SEQ ID NO: 229998 - DNA, 198 bp, Klebsiella pneumoniae
atgtcccacaatcttatccgacttcccgaagttcagcgccgcactggttatagcaaggcgtggatctatcacatgatgagcgagcgtcgctttccatccccagtaaaaattggttctcgtgcgatcgcgtttatcgagagcgaaattgacgaatggattaatcagcgcattgctgaatcgcgtggtgaggtagtgtaa

SEQ ID NO: 229999 - DNA, 786 bp, Klebsiella pneumoniae
atgattaccggtgcacggcgcaaaagcctctctctggctggcctgatgtatgcaaaagttaacgctctgcaggcggtgcgccacagcgggaacctgtcaaaacctgtcattctgtgggccactgatagtggctctgttgaagtgtatttcgagacaagtaagcgcgcgggtaagggttcggaaactgactatcgggaagatagcgtgtccggcgccggcggtggatgcggggcccatcacaccgccagctataaattgccgcaccgtgacaaaaagggcttgcggtctgaaggtagaccggtctatggttatagcgcaccagcaaaatctggtgccgggattggtctcccggtaatgttatcggcgatacatgacgcgccaagcgtctttttttgtgtcgttagctcagtacacccttttttctgcgatacgggtataatccgtgccgctcgcaaaattatggtgggctgtgtaggggcttcttcggaagcgccggtttccgataacgccggtaagaccaactctgcacagtccaccacccgcaagattggtctcttcggtggtggttacaaaaaccagttatcggaggctgccgccatggctactacccctaaccaaaatccgcaatttatttggattatcgccgctgttcgccgcgattgcccgacaattaaagcccaaattcaccatatcgccgcaccgtctgagcgtgacgcccgtcgttcactggctcgcgatcatgtctgctttttcgccggccgcatccgtctggaggtggcagcatga

SEQ ID NO: 230000 - DNA, 309 bp, Klebsiella pneumoniae
atgtcagcagattttagattacaagaagaacaagatagggttgacgaagaaaatcgcgcgatctacgccgagattgccgcaaaactggtcatccttggctatgatcgccactctgcgatagaaaaggttaaaaaagtgaatgagaaccgggagtattatagaaatgttccaggtgcttacatcgaaggtgatgagtaccatccaaaccaatggacaatagacgagtgtaactatccaaaagagattgcaggcaagtttaactcgcggcaggtgcataagatctctcaagagcttattgatgatttctag

SEQ ID NO: 230001 - DNA, 261 bp, Klebsiella pneumoniae
atgagtcctatcgacgatctaacgataggctttgaaacccttgtgtgtctcattacgggactggatatgcggctcgacgcggcgactcagccggccggcttcgtaatctttttcctggcagagtctgagtttttgtccagtatgacccgtctggagggttttgaatgtatccgcaatcagtttgatgtcatgcctgttcgctgcggcgacgaccagcgacagaggaagcccattggcatctgtcatcagactgcgctttag

SEQ ID NO: 230002 - DNA, 336 bp, Klebsiella pneumoniae
atgaatgctcgcttcgctattgctttgttcctctacttttctgccgctcaggcttttgccgttcaactttcccaagctgattgcaattacgcaattgaaaagctaaaagcgtttaacgcagatgggaatgctcatccggggcaaagaaccacctttgaggagaaagccacctatgcatatgcagaggcttgcgaaaatagtggtctggtaacaatctatgggtatttgcgagaagccccagaggcttcacctgaagtgactgaattttgccagaacaatgcaaaaagcaggggcgaggctgaacgttgtcttgcaacaggtaaactagactattaa

SEQ ID NO: 230003 - DNA, 1971 bp, Klebsiella pneumoniae
atgagcatacgcacatctcgtactatgctaacactgagtataatcttggccggtacgtccatcggcagtactcaggttatcgcagcagagcagacgttctcgcccgcagaaaacacagctccgctgcacgtgatgacaccacctttatccgccgatgataagagtatggtcctgatatgggaaaagccacccagtgccgataaaactatcgttgattatgtggtatatcgcgatggtgtgcggctaggtaccgcgcggaaaaatcaggacacattttcaccggcaaaggcctacatcgacaatttttatagtaagctggcaaatgatggctgggcacagaaaattgatttacgcaccttcactgccgtcggtctacaacccgatcacgaatacaccttcgttgtacgggcgctttatgacgacggaacagagtcttcccaaagtacggaattgaaaacacgcaccacaacatcaccacatatcattgatattaaaaaccttggtgcaaaaggcgatggaaagtcagtaaatactgaaatcattcaacatgcgattgacgattgcactatcgtgcgcttccctcagggatgtaaagtcttgattgccgatggcgtgtataaaacaggcgcattgttcctgcacagcgacatgaccttagagatcgataaaaatgccaccttgctgggctctgatgattctaaagattatccactagataaaggttattacctctatcactataaagagcatcctcagccactgcgtcccccttcacttattaatgcctatgcttacccggataaaggcgaaacgcctcccgggacatttaaaaatatccgtatcgttggcagcggaatcatcgacggtaacggatggcaacgaggggttaagcctggcggcgctggcgagataactgatgaattgggggatacgcttcctcagtaccgagccagcaatgcgaacaatatcagtaaagatggtatccttgccaggaatcaaacagagcaagccgtagccgaaggtgaggagattaaccgggcttacaaaaatcgtcgctccagcctgatgacgatgcgtggtgttgacgggttctatattgccgggttaaccgttcgtaatcctgcgttccatggcatcatggtattaggatcaaaggatattaccgccaatggtctgacgcaccagactttcgatggtaataatgccgatggtatcgagtttggcaatagtcaaaatagcattgtgtttaataacgtctttaataccggcgatgacagtgtcaactttgccgctgggtttggaaaagaaactgaaatccaccaccaaaaggcgcaaagcggtgcatggatcttcaataactatttccgtaaagggcacggggcgatcgtcaccggtagtcacactggggcctggatcgaaaaaatccgcgctgaagataatgtgatgtatcaaactgacgttggcttacggatgaagagccgtccttactatggtggtggggtgcgggaagtggtgttccgcaacaacgccatgaaggatattgcgaaagaaccgtttatctttaccatcaaatacagtgccgacgttaacgatacactgccagcccagttaccggcacagtttaaagatgtgctggtggaaaatattacggttgatggtaccaaggcaaaatcaagtatcctggtggatggtatgacgatgggcgaaatggcagatgactatcacattactttcccgcgtgatgcttatcatcagaatctgcatttctacaacgtacaatttagaaatagtccgccgaccgatatcagctttttacgggatagcgagtttaacaatgtgactttcctgaatacacctcaggcgtggcagttcgccaacgttgagaagattagtgtgcaagataatcacaacaaagagcaagtcaccgccttgggcgataaaaaaattattcttgaagccagtaaaaaataa

SEQ ID NO: 230004 - DNA, 474 bp, Klebsiella pneumoniae
atggcgacgttaaaggctgagtgtaaaatatttattgtccaatccattgcgtgctacgaaacaccttctcaggtagtggagtccgtaagggagaaatttggtattaaaatctcccgccagcaggtcgaatcacacgacccgacgaaggtcagcagcaaggggctggctcaaaaatgggtagacatattcaacgccacccgtgagcgcttctgtaaagaaacatcggacattccgatcgccaacaaggcctatcgtctgcgcgtcctcgacagaatggctgcagacgccgagagcatgaagaattatggaatgacggccgatattctggagcaggcagcgaaagaggttggcggagtgtacaccagcaggctgaatgcagagcatgcggacaaaatcagcggtaccgctcagaaccagtctacggggcttagcccagaagaagcctctgaggcctacaagaagatgatgaaataa

SEQ ID NO: 230005 - DNA, 471 bp, Klebsiella pneumoniae
atggccggtttattcaatactggcgatgctagggctatgttcaggcatttgcaaattaagtgggttagcttctacagtaacccgacagaagagggactcattgataccctgttcccgatgaaccaccttagggaatggatcgtacgtgaggagtatagtgatgagcaggtctcagctcaggcgaaaatcctggatgaacagctttgggcgatggaagaatacaaaatagttaattctctgtgtaaccatacgaagcactacaagcctaatctgaaaaagaacccgccgtatgtaaccaccgaactcaagggggcaagagctgggctaatgaaatgcggagatccgctagatgttagccactttatggtggatggccgagaggttcgtgatattttcattgaggtataccggatctactatgcatttttcgaaccagcagatgagaatgattatcaggcttataggggctga

SEQ ID NO: 230006 - DNA, 1143 bp, Klebsiella pneumoniae
atggcgatcttcaatcatttcgaactcggcctgatcaatcctgaatttgattcaccgttagttgatgttcttactgaactggaactcctcaggcacctgaggttggaaaccgacgtccatccgattctgttcgcacagttgaaagacgtatttcatatgttggaaagtcttggttctgcgcggatagaagggaaccatacaacccttgctgactatgtggaaagcaaggttgagggaacgcaaagctcaactgatcagctaaaagaaatttataacattgaagaagcaatggagttcattgatcgccattttagtaatggtgaccagattacagaacatttcattcgagaactgcatgggcttgctgtcacaggtttagaccgcgagggggatagaactcctggtgcctacaggcagcacaacgtcagtatcgcccaatcagaccatatgccaccagaccatatacatgtacaaggctacatggctgaattaacggcgttcatcaatcgtgcagataaacccaagtatgatttgatgaaaatcgccttagcacatcatcggtttggttggatccatccattcgggaacggtaacggcagaacagttcgtctgctcacctacgcgctgttgattaaatatggttttaacgttcaggttggtggccgcgtactgaaccctacagcagttttctgtaatgacagggaacgctattacgcaatgctttccgaggctgataaaggtactgaaagtggtctggagaactggtgcttatatgtgctgtcagggatatcagtagagctgaaaaaagtggatcagttaacgaagcttagttttcttagttcgaagattctctatccggcagtagactattcgtcagaaagagggctgataaacgaacttgaagcaaaagtgcttaaaaaggcagtggaaaagggcactatcaaagcaggagatttacgtgacgtattgccagagctaaagtcggcgcagataacctaccaaataggaaagctaatcgaacgcggtatgctccaacctgttgaggaaggggcaagaacttacacggctaagttttctaattcctttctcattcgcggcgtgatcaccacgctgagagctgaaggatttataccgaacctgtag

SEQ ID NO: 230007 - DNA, 315 bp, Klebsiella pneumoniae
atgaaatttcagcttgctaagctttaccgtggggatagcttctgtggcttcggtatcgctgttaacggtcaactactcgatagactggcatctgtcataattaataccgagccaaatataattcccacggcaaccgctgtattcaatctggataaaagcaccgttgaaaaccaggtggtaattaatcttgatgaccctgtcgctcgaattaattttgaaagtaaaccttcggatgaagtattcgaaaaaattaaaaatgcagcatatgaaggcgctgagaaaggctaccggaatgcagtaaaaagccttcgctga

SEQ ID NO: 230008 - DNA, 345 bp, Klebsiella pneumoniae
atgagtaaatcactgaacgcacgttgcatccgctgctgggaagttgaatttaaaccattctgcgactcaaagcgcaatccgtactggcgcaagcgtgaccttcgtgggtatatccgcgaagcggcgcttaccaccgcttacagtatggtcgagagcatggctgaacgtaacgccaaagttgactttgacggctccctacaaggctggactcctgagttctcagaatggtaccggaagcgtcgtgaagtgtatctcaaagaagcccgcgaccaactgaatgaagaagctaccaacgacgagatcgacgaagaaatagagaacgaactggaggcctggaatgactga

SEQ ID NO: 230009 - DNA, 348 bp, Klebsiella pneumoniae
atggaggatgctgaaaacagcctgtccagtgcggcgatgacgcccaggggacggctacgggtggatgtaccgagtccgctggcccgccttattctggtgccggcgctaccggctttccacgcccgctaccctgatatccagatcgacatgggtgtgagcgaccgggtagtggatctgatcggcgacaacgtggattgcgttctgcgcggtggtcaaatcaccgaccagtccctaatcgcacgccatgtcggcgatttgcaaatcggcgtctacgtcgccccagctatgtggaacgccttggcgctcccgcacacccgcgcgagctgcaaaatactgaccattgcatag

SEQ ID NO: 230010 - DNA, 468 bp, Klebsiella pneumoniae
atgggcaacagaatgtggatgattcgtggcgatggcggcaagctctatgacgattttcgcgataagcaaattgtaggcatcggttggtctcagctggctccattagtcaaacccggcctgtcccgagcccagttactggccttataccaggaggcagatcccttaacaaagctgggaacagcccgttctggtgcatcgcaggtctggcgttttgtgaatgagatccaaaagggtgattgggttattacctattcgccagccaatcgtacttatctgctaggtaaggttacatctgatttccagtaccaccctgaatgggtagaagaggggatgggaatcgctcgacaggttaaatggaatactgaagaaatcgatcgcgatcgattgtctgttgctaccaaaaacacattgggctccacgctaacggttttccagcttccagaatatgctctaaatagctgcgcctaa

SEQ ID NO: 230011 - DNA, 2190 bp, Klebsiella pneumoniae
atgtcctggcttaattccctcttagtggcgcttacgtctgtggaacctcattgggttcccgtcaccgttatcgtccttgttagctttgccgtcatctgctttattttcttttatttatcaagagccatcaaaattgttaatggcctaaaaaaatatacaaaatcaatcagcagcgttgaaaacagtgcaccagaggcccagcttgagcatcttaagagcctgtttcagcggcctgagctcaggcatgcgtggaatgagttcaaagaatcgttacacccgcagcgcgaactggagaacggggaagagaaaatcgtccgcattagagctactgcaccaagtgccagctttttctcggagcaacaactggtcgatattccgctgaataccgaattcttcaaacacttacctggaatcctgaccggtgtagggattattggtaccttctatggcctgatgattggtctcaatcacttcgatcccagcacaccagagcaggtctccagcagcgtcaataatctgttgcacgatgtgttgtacgccttcctaggttcggcatttgctattttcgcctccattattgtcacctggctggaaaagctatccatcgccaagtgctacaaatatctggaaaaattcacagctgccctggactccctttatgacagtggtgttggtgaggagtaccttgcctcgctggtgaaatccagtaatgaaagcgcgactcaggctcgccatctgaaagagagtctggtcaccgatttacgcgatatgttgctgcaactggcagataaccagaaagtagaaaacgaacggttagcagccacgcttagcactacctatcgtgaatcagggcaacaatttgccgagcaagtcagtggcgcgattgaaaacagcctgaagtcgccgctagataaaattgccggtgcagtgcagaccgccagcggcgatcaaagcggcatggtacaaaacatgctgcaggatgtgctgactgcgtttatggcgaaactcgacaccacctttggtcagcagtttacaaacctcaacgacatgatggggcaaaccattggcgtgattcagacaatgcaaactggatttgctgcgttgttacaggacatgcgtcaggtgagtgatgattcccgccagggtagcgcgcagctcattgagcaactgttgtcagagatgaagtctggccagcaagctatgcaggctggtatgaatgacatgctcactagtcttcaggcatcggtggctaaaattggcgccgaaggtgagggggccggagagcgtatggctcgccaactggaaaaaatgttcgccgatagtgaggcacgagaaaaggcgcaggcagagcatatggctgcctttatcgaagccatccagagctcggtgcagcagggacaaagtgccacaatggaaaaaatggcaacttctgtcgaggcgctgggtgagcaattagggagcctctttgggcagatcgataaggggcagcaacagatttcagcaaatcagcaagcgaatcagcagtccctgcatgaacaaactcagcgagtgatgagtgaggcagacgatcagattaaacaactgattgaaacagttgccagtcaacaccagggcaccactgaaacccttcgcctgcttgccgaacaaaccaaccgacagattcaggatatgcaaaacggcgcggataaaatgcgtcaggctgccgaacgctttgaacatgcaggtgagcgggtgtcggaagcaaaccacctcaccgctgatgtgctgaataaagcgcaatcagcaggttcatctctctctcttgccaccagcgaactcgcgtctgttgttgctgattatcgtaacaatcgggaagctgttagcaaatctattgccatgctggagttgctcgccgcaaatacgcagtctgaacaaaccacgcgcagtcaatttatcgccgatcttaagcagcacggtgagcatttgcagagttataacagggaggctcagacctttatggaaaatgtcagtgacgtgctcgggaaaggatttgaagacttctctgaaggtgtttcacgcagcctggataaaacgctgggcaaactggacgtcgaaatggcgaaagcctctaatctactcgccagttctgtcgaacagctcggagaaagcgtcagcgagcttgacgatgtcctgtcacgcgtgcgtgcgtga

SEQ ID NO: 230012 - DNA, 741 bp, Klebsiella pneumoniae
atgtttggaaacgcatttggcgttaaaaaacgccgtagcgatgaggcggagaaaccattctggatctcttatgccgatctgatgacggctatgatggtgttatttctggttgtcatggttgcgtcgttgagttccgtgacacagcgtattcaacgtgcggagcaaggtgaaaaaacaagggggcaggatatatccagattgtgtgagcgtctggaactgcatgcccgcaacgtgaacaaaactatcgttgtggattgccatgataaccgcatcagctttggtgaggccggacgcttcgatcacaaccgttttttcctgaacactgaggggcaaaaagcactgcaggatgttgttccgcttgtgttggatgcagccgacagtgaagagggtaagaagtggttcaagcaaatcgttattgaagggtttaccgacactgatggctcatatctgtacaacctacatctctccctacaacgctctgaatgggtcatgtgtagcctgctcgatagccgcagcccactgcaaaaaagtatttccgcagaacaacagatccaaatccgtaaacttttccttgcagggggagtctccttcaataatgccaaggaaagcaaggaagccagccgtcgcgttgagttacgtatgcagttcttcgggctcaaagataaacgagataaggctgatgaggtggatttcccccctgtggttaataaagaagtttgccagctggtaatgccccaatga

SEQ ID NO: 230013 - DNA, 1683 bp, Klebsiella pneumoniae
atgacgcccgcactgaattctctttctcaacgcattgctgtgaagctctcttccattcaacgggatgacgattatctgcgtaatgatttccatacgttaacatccgcggccctggatatggaaagacggtttgataaagcagaaagaattccttcgccgccacaagaaatgcggctggaggctctgcgtcgcctccgccttgcggaagaactcactgagagagaatggcggatggtattttatagtcttgccgataacgatccgttatatcctgaccggccaatcttgctggaggatgatatatttttccctgaggtcgacaacgctatcaagacgcggcttgaatctaaggagttgaaacgcaaggattggactgcactttgttcaagttattttgcttatcagcatgagtctcccgagaaaaatccacactggtgcatactacgtggacatattgcccaaggttacttcgtggtgaaagccgctatacgacgcgaaaaatcatggatgaagacaattgagctttatcacgacatttttaccccgcaagctggaggcgttatttccaggcagttacttgcgggtgaaaacaattcgctctcgtcattagataaaatcgcgcaaatccccgatagcagctggctatggaagcggatcttcgcggtgcttttagcgcaactggacacacttgacgatcctcagtttctggaaaaaattagctggctgttaggtctggcttcacagtgggttcgctttcgtgatgacatcatgacggagactctgacccgctattactactctgtctatcgcgatcaagaacattcagcgttgaagcaagctgcgctggaattctgggataacccccagttgaaaagccagcagaataaatggcatcaatatgtctccgagccggttgctgcaatggtccggggatggttagcaaaacaggacctgacacatttcttcgagctgttgcgcggtaatggcgatgtcgatcaggcacgattgcactattggttgcgtttcgccaatcaaatgggattcactcgtatcgtcatgggacctgatgcctggcaagaccgtggaagtgactttgtgaaattccgcgaagaaaataaggggcgattgagctatttacgaggcggacgtagctttgataacgccatgattatgcaaatcaacgattatctattcgtcgaattttccgggacaggaaatgcgatgtacgcctatcgaataggccacgcgccatttaaccctgaatcacgtacgattgatatcaacattcatctaaaagatcaggggcgctgcgcgctcaggttgccccatgcacctcgtgctgaggggtataacaaagtccggataaccggctggatgctgaaatacgacgatgagctacgcaagttgggcgttcggtggatggcggaagaacccgtcaagtttgtcgataaaaaagcctcctctcccgcttctttgtctggcatcaaaatcattaatcctctgcgtgatacggcaattcaaagcctggttgaaggtgcttcatgtgtcgtcagcgataatcgacaaaaaggtggcgtactgtctgtactgctcaatacgcctgacgacaccatagaaagagagttgttacgactaggctttacgcctgtggcaaaagaaccgcatcgttactggatcaaataa

SEQ ID NO: 230014 - DNA, 129 bp, Klebsiella pneumoniae; identical to SEQ ID NO: 140005

SEQ ID NO: 230015 - DNA, 444 bp, Klebsiella pneumoniae
ttgctgttcggcgccagcgggctgggaaaaagccatctggcggcagcgatcgtggatggtgttgtagcccagggctaccgggcccggttttacagcgccggagaactgctgcaggagctgcgcaaagccagagcgcagctgaaactgaatgagctgttactgaaactggatcgctaccgggtgatagtggtggatgaccttggttatgtcaaacgcgacaacgctgaaacgggcgtgctgttcgagttaatcgcgcatcggtacgaacgcgggagcctggtgatcaccagtaaccatccgttcagcacgtggggcagcatcttcgtggatgagacgatggcggtggccgctgcagaccggttgatccatcacggatatatgttcgaactgaagggagaaagttacaggaaaaagacggcaaaggcagtaaccagcgcggcttaa

SEQ ID NO: 230016 - DNA, 333 bp, Klebsiella pneumoniae; identical to SEQ ID NO: 121748

SEQ ID NO: 230017 - DNA, 351 bp, Klebsiella pneumoniae; identical to SEQ ID NO: 215847

SEQ ID NO: 230018 - DNA, 2577 bp, Klebsiella pneumoniae; identical to SEQ ID NO: 129107

SEQ ID NO: 230019 - DNA, 396 bp, Klebsiella pneumoniae
atggagtattggatcgcggtttgtttctatagctttagccagccagattgctttctcttcgtttgttgcagcagcggtagcctgttcaagggcttcctcatactgaaccctaatagaacggtgatcaatacgttcatcatggccatacagtacaaggaaaccattacagatgttctgccagcctttgcgccagctttcaagcgtttcaggcttatcccattcacggacctttttaccaaagccggtagaaaggacctcacgggttgttcccatgatatggatatgtgggttacgaccattgatatcgtggataacaacatctgcgatgatgccttgcttggtaaagtgttcaagaacaaaagcagcggtgagttcaatgctttgttctggtgttag

SEQ ID NO: 230020 - DNA, 144 bp, Klebsiella pneumoniae
atgtatcacgcgctgagcatgaaagacgtgccagatttaacaaggatgattataaaccaacacctgatgaggtcaggcgttttccaagtcgttccgttaaacccgctcagcctgatggcgattttgattacataccaacactaa

SEQ ID NO: 230021 - DNA, 324 bp, Klebsiella pneumoniae
atgactaaatcgaatagctactcccctgaagtccgtgaacgtgctgtgcgcatggttctggagaacttgaaggactacccatccgagtgggcagccatcgaatccattgcacccaagattggttgtgtcccgcagacgctgcattgctgggtgcgcaaacaccagaccgacaacggccagcgacccggtcagacgactgaggaacgggaccgtatcaaggccttggagcgcgagaatcgtgagctgcgtaaagcaaacgagatcctccgcctggccagtgcttattttgcccaggcggagctcgaccgccgcaacaaatcctga

SEQ ID NO: 230022 - DNA, 717 bp, Klebsiella pneumoniae
atgcagtgctacggcgtcgtgaaagtttggaagcaactcaggcgcgacaaggtgcaagttgcccgttgtaccgttgcgcggctgatgcgccgtttgggattgcagggcgtccggcgcggccaggtagttcgtaccacggtgcctgatggcaaagccgtatgtccgctcgacaaggttcagcgccagttccatgctgaccgtcccaatcagctatgggtttcagactttacatacgtatcaacgtggcagggctggctctatgtagcttttgttgtcgatgttttcgcacgacgcatcgtcggctggcgtgtgagcaacagcatgaaaacggacttcgtgctcgatgccctggagcaagcactctacgcccggcagccaggccacgcggacggtctgatccaccatagcgataggggtagtcagtacgtctctattcgctacacagagcgtctcgcggatgccggagtagagccctctgttggtagcaaaggagacagctacgacaacgctttggctgagaccatcaacggattgtacaaggcggaactgatacaccggcaatcatggcgaagccgcgaagccgtcgaaatagctaccctgaaatgggttcactggtataatcaccagcgtctgctgggatcgattggctatataccgccagcagaagctgaggcaaacttctatcagcaacacaccggtcaggccgtggcggcctga

SEQ ID NO: 230023 - DNA, 750 bp, Klebsiella pneumoniae
gtgctggtcattaaacgcgtattcaggctgaccctgcgcgctgcgcagggctttattgattccattttttctctgatgaacgttccgctacgctgcccggattacagctgtgtcagcaggcaggcaaagtcggttaatgtcagtttcaaaacgcccacccggggtgaaatcgcgcacctggtaattgattccaccgggctgaaggtcttcggtgaaggcgagtggaaagtcaaaaagcatggccaggaacgccgccgtatctggcgtaagctgcatctcgccgttgacagtaaaacacatgaaatcatctgcgctgacctgtcgctgaacaatgtgacggactcagaagccttcccgggtcttatccggcagactcacagaaaaatcagggcagcatcggcagacggcgcttacgacacccggctctgtcacgatgaactgcggcgtaagaaaatcagcgcgcttatcccaccccgaaaaggtgcgggttactggcccggtgaatatgcagaccgtaaccgtgcagtggctaatcagcaaatgaccgggagtaatgcgcggtggaaatggacaacagattacaaccgtcgctcgatagcggaaacggcgatgtaccgggtaaaacagctgttcgggggttcactgacgctgcgtgactacgatggtcaggttgcggaggctatggccctggtacgagcgctgaacaaaatgacgaaagcaggtatgcctgaaagcgtgcgtattgcctga

SEQ ID NO: 230024 - DNA, 267 bp, Klebsiella pneumoniae
atggcgacgctggggcgtcttatgagcctgctgtcaccctttgacgtggtgatatggatgacggatggctggccgctgtatgaatcccgcctgaagggaaagctgcacgtaatcagcaagcgatatacgcagcgaattgagcagcataacctgaatctgaggcagcacctggcacggctgggacggaagtcgctgtcgctctcaaaatcggtggagctgcatgacaaagtcatcgggcattatctgaacataaaacactatcaataa

SEQ ID NO: 230025 - DNA, 3093 bp, Klebsiella pneumoniae
atgagcgccgggcgttttaatctctccgcgctggccgtccgcgagcggtcggtgaccctgtttttgattatccttatctccgtcgccgggctggtggcgttcttcggactcgggcgagcggaagatccgccctttacggtcaagcaaatgacggtcattaccgtctggcccggcgccaccgcgcaggagatgcaggatcaggtcgccgagccgctggaaaaacgactccaggagctaaagtggtacgatcgcacggagacctatacccgccctggcatagcgttgatcaccctgtcgctgcaggatcagaccccgccttccgaggtgccggagcagttttatcaggcgcgcaaaaagctcggggatgaggcgaaaaacctgcctgccggcgtctccggcccgatgatgaatgacgaattcgccgatgtcacctttgccctctttgctctgaaagcgcggggagagccgccgcggcagctggtgcgtgacgctgaagccctgcgccagcagctgctgcatgtatccggggtgaaaaaagtgaatatcctcggcgaacaggcggagcgcatttatctctcgttttctcatgatcgtctcgccaccctgggcctttcgccggaggcgatttttgccgcgctgaacagccagaatgtgctgaccgccgccggggctatcgagacccggggcgggcagatctttatccgcctcgatggggcgtttgaccgcctgcagcagatccgcgacacgccgattattgccgggggcagaacgctgaaactggccgatgtcgccacggttgagcgggggtacgaagatcccgccaccttcctgatccgccatcagggcgaaccggcgctgctgctgggggtggtgatgcgcgagggctggaatggtctggcgctgggaaaagcgctggatgccgaaacggccagcatcaatcagaacctgccgctcggcatgtcgttgaccaaggtgaccgatcagtcggtgaatatcagcgccgcggtcgatgagttcatgatcaaattctttgtcgccctgctggtggtgatggcggtgtgctttgtcagcatggggtggcgcgtgggcgtggtggtcgcggcggcggtgcctttaaccctcgccgtggtgtttgtggtgatggaggcgaccggcaaaaacttcgaccgcatcactctcggctcgctgatcctcgccctggggctgctggtggatgatgccattattgccatcgaaatgatggtggtaaaaatggaggaggggtatgaccgcctcaaagcctcggcctatgcctggagccataccgccgcgcccatgctggccggtaccctggtgacggccgtgggctttatgcctaatggatttgcgcagtccaccgccggggagtacgccagcaatgtgttctggatcgtcggtatcgcgctgattgcctcctggatggtggcggtgatttttaccccctggctgggggtgcacctgttgccggacagaaagcccgcggcggccggccacgccgcgctgtatgacaccccgcgctatcagcgcttccgtcggctgctgacccgggttattgctcacaaatggcgcgtggccgccggggtggtggcgctgtttatcgtggcgatcctgggcatgagcgtggtgaaaaagcagtttttccccacctccgatcgtccggaagtgctggttgaagtgcagctgccttacgggtcgtcgattagccagaccagcgccgcggcggcgaaaattgagcactggctgcagcggcagccggaggcgaagattgtcaccagctatatcggccagggcgcgccgcgcttttacctggcgatggctccggaattgcccgatccctccttcgccaaactggtggtgttgaccgatgggcagggtgcccgcgaggcgctcaagcggcggctgcgggaggcggtggccaatggcctggcgccggaggcgcgggtgcgcgtcactcagctggtgtttggcccttattcgccttatccggtcgcctggcgggtgatggggcccgatccgcacgctctgctcgacatcgccgagcgggttaaatcggtgctgcaggccagtccgctgatgcgcaccgtcaataccgactggggttcgcgggtaccggtgatgcatttcagcctcaatcaggaccggctgcaggcgagcggactcagctcccagtccgtcgcccagcagctgcagttcctgctgtcagggatcccgatcaccaccgtccgggaagatattcgcgccgtgcaggtgatcggccgcgcggcgggcgacatccgtctggatccggcgaaaatcgccgacttcaccctggtgggcagcggcgggcagcgggttcccttgtcacagattggcgacgtgtcgatcaggatggaggacccgctgcttcgccgtcgcgaccgcacgccgaccatcaccgtccgcggagatgttgcggagaacctgcagccgccggatgtctccaccgcgctgatgaagccgctgcagcccattatcgactcgctgccgcctggctatcgcatcgagacggcggggtcgattgaggaatccggcaaggccacccgggcgatggtgccgttatttccgataatgatcgccctcacgctgctgatcattatcctgcaggtgcgttcgctgtcggcgatggtcatggttttcctgaccgcgccgctggggctgattggcgtggtcccgacgctgctgctgttcaatcagccgtttggcatcaatgccctggtgggcctgatcgccctgtcggggatcctgatgcgcaatacgctgatcctgattggccaaatccatcataaccaacaggcggggctcgatccgttccacgcggtggtggaggcgacggtgcagcgcgcccgcccggttctgctgaccgcgctggcggcgatcctggcgttcattccgctcactcattcggtcttctggggaacgctcgcctatacgctaattggcgggacgctggggggaaccatcatgacccttatcttcctgccggccatgtacgcgatctggttccgcatccgtccggagaacactgtacaacagacagagttgcaccttcagaggtaa

SEQ ID NO: 230026 - DNA, 471 bp, Klebsiella pneumoniae
atgcgtattcatcaacagaataagtcccgtaaactgtatcgcagcgtcaatacgactacgcggcaccattctaataatccaggtgcagagtatcgctgggaacgcaatcgtaaaaaagtcggagatgagctactggtaaaacgcgagacaatgcatggcagacagaagcgcggccgagactacaccccattgttttattttctgatcaagcagattggcaaaccgtgggatgaaatattcagcgaagtatgtggacgtcttgataccaccgcgcctgtattctggttggtcgcgctacatgagcatcagcgaagggatttagtctgcattggcgaaagcagtttttatccgggtttatttgttgatgaggatggaattctgcaacaggtaaaccctttaattacgagaaaagacgttaaagtgacttgtcgctgctgtacgcacacttatatcggtgagcctgtaccctag

SEQ ID NO: 230027 - DNA, 1869 bp, Klebsiella pneumoniae
atggcaattaaacaagacgacacccaaccaaaaagcgatatggcgaccatgcctgtagttctggcggtagcagatgatttcgccgtttttaactttgattccttgctaccagaatcggcctcttgtgattatcacgagctaaataatcagttggaagcatcagctcgttcctctgatgagactcaaaaaagcgtttatgaattgttcaaggcaatttgctcatttcattttagggctgatgaccctgtccaaccgtgggggccagtatggagtggtccaaatggtcgttcttacatacctagcgacttccgaggtgaacaaaatgacattctttcaaacgtagttattaaaattgaaaacagactacttcgagctcgggtggcagatataatatggactaatgataaaaggaaaaaagacgcagctacaatagcaataaatacttattgcgaactaatagacacatacagtaaccgtagtttgcaggaggggaattataacacctttaatcatatggggaagctcgagcaattcttaagacgtgtgttcgatatagcctcgttaacacagaagaaaaactcattcccgaaaaatatacaatctgcatttgatgttgtatatgcaaaagcattagagctaaaattgtatattgtatttgaacgagtagcgcggcttggggcaaataagaagataatcgattggagtgttgttgccaaggatgccaagagactagcaagtaagactgatgctaatacaaatccggatgttgtcaaaaaggtactttatttagcggcaagtgcatttgaaaaaaatggggacaatgattctaagcgagggtgccaagagaacgcagtagagcagacacttaagatgagagagcatgtcagtcaggcttcagcaaaagcatactggacaagcattgcaataggggaactgcgttctgtaggtgggtacaaagagcgaatagcagcgttgattgccgagttgcgtgacttccagatgtcatctcgcgatgaatttgcaacattcacaatccccatagatgccgataaggagagagaagaaacatctaaaatctactcagaactctccctctcagcctgtttgcatgaatttgccctagctccatacattatatctaagagcgacttacgtcaccacgctgacactgttcgaaaggaaagtttttttagtaatttcatgggaggggtccatactgatatagaaggtaaggtctacgccaaaacgcctgcagtttctgtcgatgggaatccatcggatgagtggtacaaatctcggcatataagaactcttgatttattttatcatcacttcgcttcaggttttgtagaccctgtccgttattgtttatcaacccgattttctatagaggaacgtcattttgaatctatttccgcattaagttcattcgttccaggtggtcatgaacatatattttcgttaggcttttctcgcttttttcagggtgattatgcttctgcttcttaccttcttattcctcaacttgaaaactcaatacggttttatatgcacacattgaaccgtgagacttctaaattagataatgaacttcttcaggaagatcgttctctatctggaatgctagaaagccttcgccctgagttggagcaggtctttggtggggatttaataaatattattgatttacttttcaattacaagccaggcccgtctctgcgccatgaaatagcgcacgggaaattgtctgcaggagggtgttttagcgcttcagctatttatgcttgctggttgatttatcgtcttgtctgttggcctctgttagattgctgggttgaatatatagcaccgtctatagaggaaaactaa

SEQ ID NO: 230028 - DNA, 519 bp, Klebsiella pneumoniae
atgttaatccgtagagccagcccctctgatgcagaagagcttgccattttagccgaacgaaccttcagaaaaacgtttgaggcggataatactcagaaggatatggatcttcactgccaggcaagttattcaacagatattcagttgcacgaaatcctcagacaagactggattacattagtctgcgaatacgaaagcaaactgatagggtacgcccaactgagatgggaagaatttcctccctgtgtaaatagcattcacgccggagaaatcctgtgtctgtatgtcgatgaaccttatcatggcaaaggttttgcacaagcccttatgcagaagtgctttgctgaatttgcggcacagggatcggatgttgtctggttaggtgtctgggaacataacccaagggcaatctctttttaccgtaagcttgggtttaccgaggtgggtgaacatatcttccaggttgggacggatccccagagagatatcattatgaaacgctcaacttatgttagctga

SEQ ID NO: 230029 - DNA, 462 bp, Klebsiella pneumoniae
gtgaataatcagcatctgcgttttaccaaaggtcagtttactgtcacaaccgatcccgccttttttcagctggaagccattcacgattacctgtcgcaatcgtcctgggcggcgggcattgatgcagaaacggtcaggatatcaatccagaacagcctttgttttgcgcttctggatggaacaagacaaatcggcttcgcccgtctggtcaccgactatgccacttttggttatttgtgcgacgtctacgtactgaacgattatcagaaaagtggtcttggtcgttggttgattgaatgctgccacgcccatccagtgatgtcaggtctgcgacggataatgctggtgaccgacagcgcgccctggctctaccagaagctggggtataacccattgaaccgaccagattttgtctggcaaatcaatcgacccgatatttatcgtaaacccgggcaaaaataa

SEQ ID NO: 230030 - DNA, 603 bp, Klebsiella pneumoniae
atgaccaaaaaagtcaatttaatgaccgatgcaaattctgtcgtcaacacagtgaatgaagccgtatctcagcgaataaaacggtatcgtaagcaaaagaaaatctccctcgatgaactctcccgtcaggcaggcgtcagcaagggagcgctggttgagattgagggatgccgggccaatcccagcattgccctgttatgccgactggctgccgcgatgggggtttcggtggctgattttgttgatgtcagttccaaaccgaccgtacatctcattgctgaagatgagatccccgaattgtgggaaggtgaaaaaggcggtagagcaagactgctcgcagggtcgggtggccctgatatgaccgagctctggatgtgggaaatgcagccgggagaaaagtttgcttcaccgggccacacggaaggaacgtttgaactgttttatgtgcagtcgggcacgctcacactgggcgtacaggatcacgtgtatctggtaaaaacaggctgctcggcaacagccagaacggatgttccgcatttctatgaaaaccagggggagagcccgctggtatttatcatgaccgtgcatgaaaaagcatcctga

SEQ ID NO: 230031 - DNA, 696 bp, Klebsiella pneumoniae
gtgttaacagtatcgccgtcaattgcccctgaaatttatcgtattgccccaggttttcgggcgctcagtatctgcgtaaaagctgcaccagtgcttcatcccgacgctggagaaaccgcgctgcgggaagcctgtgaagccgtgctggccggtgaaccggagtgggcggaatctcatctggaagcctgggccgacgtttttcaaaagtttggtgccaaacctaaacgcaccccttgctcagctgatgcgttacgtaagcgcgtattacgtgacggaacgatgcccgcgctcgatcccatcgttgatctttataacgccgtgagtctccgctacgccgtaccggttggtggggagaatatctctgcctatcagggttcaccacgtctggctgtggcaaacggaacagagccttttgataccgttaaagagggtgaaacggccgttaaatatccttcacaaggagaggttatctggtgtgatgataccggcgtgacctgccgccgctggaactggcgacaggggatcagaacccgcctgggcgtggacgctcagcaaatgtggttcattctggaaagcctgccgcagatgccgctggagaaactgcacgaagccgggaagatgctgaccgacggcctggaaaaaatgatgcccggcctgtggtttgacgtcgctgtcatcgaagaacaacagcagtaa

SEQ ID NO: 230032 - DNA, 477 bp, Klebsiella pneumoniae
atgaaaatcaggcttgcagtacctgaagaggcagaggaatgttggaatataaggaatctttctatccgggaaggatgtaagccaagttattgtgccagtgtgctcgaggcctggacgcctgaagctatgcctgaacattacagggcggttattacggaaaatcctttttttgttgtcgagctgcctgatgcaggattggtggcgacggggtatctggatcttaccgaaggtagcgtagaagctatttttacattgccggattattttggtaaaggttttgctagcctgattattgagacgattaaagatgaggcggttaaaagagggttgaaacagttaatcttaagctcaacaccaaacgcgcaaactttctacgaaaagcatggttttatgtttatcaaagaaacgacatccccctcaagacttgccaaaaccgacctgcgttgcatggatatgtccatcacattatcagtctga

SEQ ID NO: 230033 - DNA, 993 bp, Klebsiella pneumoniae; identical to SEQ ID NO: 220804

SEQ ID NO: 230034 - DNA, 450 bp, Klebsiella pneumoniae
atgactgatatcaccagacttacccaggagatgaaagcggcggcagaaaaagcaaaacatgcaggggaagcgccggtcatgccatttgatacttggatctccatgctcaacaaataccagattacggtatgcccagataatattctcgctttggtagcggcgctggagcttaaggaagagcagcgagcaaactggttccacatggcgcagaagttggggaacaacttggatgcggctgaaaagcgcatctctgagctggagcgcgaccaggagcatcttcgcccggtcggtgtgatgagcgagaaagcatttcaccgtcttgaaaacagcgaatctcgctttatagcgttgtggccgcgccctggcatctttttgccgcgcaagcgccccgaggatggcgtgatcgtttatgcgcgtacagcagccccgcaggaggtgaaaggtgagtaa

SEQ ID NO: 230035 - DNA, 528 bp, Klebsiella pneumoniae
atgagctttattcagaccttttcaggcaaacattttaactatctcgacatccagcaagacgccatcgagatcgaagatattgctaatgcactctcgaacatttgccgctttgccggtcacctgcctgagttctatagcgtcggccagcacagcgttttaacaagccaactggtaccacaagaatttgcgcttgaagcgctgctgcatgacgccgccgaggcatatttgcaggatatcccagccccattaaaacgccttcttcctgactaccgcgccattgaagatcaggttgatgcagctattcgccaaaaattcggcctcccggctgagcagcacccgaccgttaaatatgccgacctggtgatgctggccagcgaacgtcgcgactttgaaatcgacgacggcacccactggccgatgctcgaaggcattattcccaccgaccaatttgtgattaatcccgtccgccctagtcagtcttacggcatgttcatgaaccgctttaaccaactgatggagcggcgctaa

SEQ ID NO: 230036 - DNA, 828 bp, Klebsiella pneumoniae
atgtctcagttagacagcggtacttttcagcaggttaaagatctggtgctttccggttatcacctgaacgatatccacggcctggcctgtccgaccgccctgctaccgcataataccagcgttgaaagcctggagcgttttgctcttgagcgtttccgtttccgcggtgccatggacacgaccagcattgatgatttcgttcgctattctgtcgcttatgcccaggaagaagaaaaagcacgttgctttattgatgccgataacatgctggctcgttctatcttcaatatcggcacgttggacaacccaggccacgctgataacgtcgcctcgatcaagcttaagaagacagcacccttccgcgcgttactggcgatcaacggcgatcaccttagtcagaagcaaatcgccgaatggctcgaagactggagtgactatctcactgcgttcgatgctgacggacagacaatgaaaattgcacaggcagcgcaggcggttcgccgtgtcactatccagcaaactaatgccgccgatcatgaagacggtgatttcagcggcaaaaaatcgctgatgcaaagtatcgaagccagcagtaaagatgttatgccggtcgcttttgagtttaagtgtgtaccctatgaaggcctgggcgaacgtcgtttcagtttgcgcaacagtcttctgaaaagtaatgacccggtattcgtcctgcgtatcgtccagctggaagccctggaagaagcgatcgccaatgagttccgtgatctgctggttggcaagttcgacggcaagccggtagaaacctttatcggcaacttcaaggcctga

SEQ ID NO: 230037 - DNA, 234 bp, Klebsiella pneumoniae
atggcgagcaaaggcattgaaaaccttataaaggacgcattagcaaacggctgtcatgtagtccgtaaagcgcatcgcttcgaggtaagcaagaaaggccaaaaatcaatcactcttattatttgtgaagatggcacagcttaccgcggagatattgacctaacgatcgccatagccattcgcactcaaaaagaaatgcgtagcgtcctcggcctgccggctaaggcaatttaa

SEQ ID NO: 230038 - DNA, 201 bp, Klebsiella pneumoniae; identical to SEQ ID NO: 189900

SEQ ID NO: 230039 - DNA, 324 bp, Klebsiella pneumoniae
atgcagaacccgctcgccaaactttccctggattactggtacaaagttatgatcctgataggcgcttttatttttcttctcaacggtgccggactccttcccgcgtaccccacagcagtcacaggcttcatatcctctggacttttcttttggggtcttggcgaatggatgaatcacccttatcaggaggtgttgaccttggatccctttaaccgtccgactggcaagatatctgggcatccacggaacgcctgtcttattgggaatatctttgatttgattggattcgtactgatcatcacagggctgattaaactcttctaa

SEQ ID NO: 230040 - DNA, 549 bp, Klebsiella pneumoniae; identical to SEQ ID NO: 183588

SEQ ID NO: 230041 - DNA, 459 bp, Klebsiella pneumoniae
atgaacatagccaagtcgatctttgaatttattgagaagaatccaggcaaaatgctgcgcgatatcactgcggcatttcctgaaaccaaaccggtaacagtgaagagcgctgttcatcgcctgtactacgacggggaacttgccagcgttgaagttactggtgggtttatctacttcgtagcgggatccatcgatattgaagaatacctgcctggtgggctttcgggggagattcttgcccttgaagcgacagccaaaaagctggaagagcaacgctattaccgccgtgcggcgacggtatggcagcaactttgtgacagcaactgtacggctaaagcaagagagcggtacctgcgtcttaagaatgcttctgttcgaaacgccagaaacatgaatgattccgccgggtcatgctatctggccggaaattactgcggaggtgacttgtgctccgattga

SEQ ID NO: 230042 - DNA, 954 bp, Klebsiella pneumoniae
atgagtcaggaagtacaagaagctatgaccgcagaagagcaaactttaacaaaaaccatcaacccttattgcctggcacttgaggaacagcgccagcgcagtgcgcattatttgaaagaggttggcgatcaatggcggacaccagatctgctgttctggggcgttaacgctatgtttggcccgctggttcttgacctgtttgcagacgagagcaatgcaaaatgccccgcatggtataccgctgaagataacgcattaacacaggactggtccgctcaccttgaagaacttggtggcgcaggatttggtaatccaccgtatagccgttctcagtaccacgaaaaacaggcagtcaccggcatgactcacatcatgagttatgcatctgagcagcgagaaaagggcgggcgctatgttttcctgctgaagtcagcgacaagcgagacatggtggccagaagatgccgatcatgtgtgttttatccgtggtcgtattggtttcgatctcccgacctggtttgtgccggcggatgataaacagaaacccaccagcgccttctttgctggcgctatcgtgatatttgataagacatggtgtggggagcgctttagctatatcgatcgtatagagcttgaggcaaaagggcgcgcaagtatggcgctggctgagtttgctgcaggaaaattcctgtcaccagtttcgccagttcagtctcctgaagtgatcatccccgatgctgttgcatcattggctgagcctgaatcccggatctggccactggaagttggactcgtctttggacaggtacaaggcgcagaggatctggagttctcccagcagaacaaactgaaggcccacattaaccagttgtggctggagcgcgtgcccaccagcgaaatcatcaccgttgctgatgggctggtcggcagcatgagggggaccgctcatgcgtga

SEQ ID NO: 230043 - DNA, 1971 bp, Klebsiella pneumoniae
atgcgtgagattattgtagataatttcgctggcggcggtggcgccagtacaggtattgaactggcaatagggcgcagtgttgatattgcaattaaccacgatgttaacgccgttgctatgcaccgcactaaccatcccgacacgcttcactattgcgaaagtgtgtttgatgtatccccattagccgctaccagtggcaagcctgtcggcctggcatggttctcgcctgactgtcgtcacttttctaaagcgaaaggtgctaaaccagtagagaaagctatccgagggctggcatggatcgtcattcgttgggcgctggatgttggcccgcgagtcatgatgctggaaaacgtcgaagagtttaaaacgtggggcccgttactcgcggcagaaatgcgaccggatccggcacgcattggtgaaactttcaatgcatttgtctggatgcttaccaccggtattccagcagatcatcctgcactgggggagtgttgcgagtttctggagttttcaccggatagcgagcaggccaagcgcttaattgccgggctgggttatgtcgtcgattttcgcgagctgcgcgcctgcgattatggtgcgccgacaatccgtaagcggttcttcatggtcatgcgccgggacgggaaaccgatagtctggccggaagccacgcacggggatccgaagtctgccgccgtgctggcgggccagctggagccgtggcgtacagctgcggaatgcatagactggtcaatccccgcgccgagcatcttcggtcgcaaaaagtcactggcagagaatacgctaaaacggattgcccgcggcattcagcgctttgtgatcgaaagcgcttcgccattcatcgtgaagtgcaatcacacaacgacacgcggcaaatacgactgtttccggggacaggcgctggacgatccgctgcagacgattacgaaaacccacggctacgcaattgcggtacctcatctgacaaaattccgaaccggagctaccgggcaggaagtcaccgatccgttgccgacggtgacggccggtaccgcaaaacgcccgggcgggaatggtcacgctctgggtattgttgaagcagagctggcgccgttcctggctggcaatggcggcagcgagtaccaggctaaaccacgccctctcgataaacccgctcacaccatcctgaaagaatcgcgcgcctgtgtcgtcgctccggttatcgcccggcagttcggcgcaagcatcggacaccgggcagatgagcccagcgcaacaatcaccgcgggcggcggcggtaaatcgcaactggtatccgcattcctggcgaaacactatggcgggaattatcagggcgccggtatcgacttggatgaaccagctcattcagttactaccgtcgatcatcatgcgctggttactgctcagattgttggtgttggcggtcgcgctgggcagagcaggccacgtgacgttagcgagccattgcaaaccatgacgacaaaggctgatgccgcaatggttacgtctcatctgatcaagctccgtggtacatgccgcgatggccagcgcactgacgagccgatgccgactatcactgctggtggccagcacgtaggcgaggttaaaacgactctggcagtcgaggactatgacgaagagcgagcgcagcaggtgctgtcgttcctgcaggaatactgcggagaggaatgcaccggtctggtggaaatcggcggagtgacttaccgcatcgttgatatcgacatgcgcatgctgcagccacatgaactttaccgggcgcagggcttccccgagtggtacatcattgaccaggattaccgcggcgtgaaatacgcgaaagataagcaggttgcgcgctgtggcaatgccgtcccgccgccgttcgccgaagctctggtacgcgccaacttaccagaaatgtgcgtgaacagagaggagcaggcagcatga

SEQ ID NO: 230044 - DNA, 477 bp, Klebsiella pneumoniae
atgacttccttgaccttaaggcagcaggaggtcctggacctcctgatcgaatatcagcgtaaacatggttttccgcctacaacttacgaactgaccggcatgctggggtgccggtcccccaatgcagcagcaacgcacctcaaggcgttggagaaaaagggtgttatcacaatcacccgcggggtttctcgcggtatcagtatcactccttcgctgttggccagagaaatatcggtcaatctcaacagcatcgtaaaagtgaaacttaatgaagtttccctcagacatttggaaaaacaacacgagcagaatcgaatccagcacccgaggatcttcggggacttttcgcccccggtaacagacgaaaatggctatacgtcaatgaccctgtggagccttatgtctgaccttggcccgctctgctattgcggaggagatgttccgtttgagttgaagatagtgctggaggctgaatga

SEQ ID NO: 230045 - DNA, 399 bp, Klebsiella pneumoniae
atgaaatttattcttccattcccgcccagcgtgaacacctactggcggtccccaaataaggggccctcaaaaggtaaacaccttgtcagcgcagccggccgtaaattcaaacatgcagtacggtcagcgatcattgagcaactgcgtgcaataccaaaaccatctgccgcgccagcagctgtagaaattattctctatccgccagactatcgccggcgtgacctggacaattacaacaaggcacttcttgatgctttgacttatgccggtatctgggaggacgacaaccaggttaagcgtatggctattgaatggggtgaaatcgtcgaaggaggcagggtagaaatcaccatagtctgctatcaaaaagtggtggatacatgtacagctgtgggttga

SEQ ID NO: 230046 - DNA, 831 bp, Klebsiella pneumoniae
atgactaaccacgtcatgggtgctgctgcatccaataatcacactttttttgttattgatggtatttctgttcgtcgtgatgcccttggtcgttattgcctaaacgatctccatcgtgcttccggcttccttgaccgccataagcctgcattctggctccgtaacgaacaaactgcgcaattgataggcgagttgcaaaatagcaactcggatatttcagaacctgtaagtgtcatccgcggcggaaatgagcaaggtacctatgtttgccgtgagttggtgtatgcctacgcgatgtggatcagcgctgtttttaatctgaaggtcatcagaacgtttgacgcgctccacactgctggggctgcaaccgtcaataccgatcgcattcaggctggcataatcctcctggaatctgcagccaaaatgctcaatctctctaattcgtcaaagctcggggcatatcagaagcttcagcaggtagcagggctgcctgatttaatgccttcgaatgccattgatgcaccagctggcgcgcaggatggttccagcagaccaacgctgtctcttagcgctttgcttaaagctaacaacatcagaatgaccgcgaaccaggcttatcaccttatggctggtcacggcatagtcgagcagaaggagcgccgcagccgaacgggtatcaatggcgtgaaaagattctggtctgttacggcaaaaggttgtctgtacggtaaaaacatcaccagcccggcaaatccacgtgagacgcaaccgcacttcttcgaatcgaaatttcctgagcttttaaagctcattggcgttgtcacgcagtaa

SEQ ID NO: 230047 - DNA, 228 bp, Klebsiella pneumoniae; identical to SEQ ID NO: 183589

SEQ ID NO: 230048 - DNA, 984 bp, Klebsiella pneumoniae
atgtctctctttaccggcggccgtgtcctgatagagcgtcagccagagaagatgaaaacactgcccactgggcggatcgccgatgcacgtcagccccttgcagaaatggacattctgcgttttttcatgagggataagagggttattaacgcagctggtggaattaacgctcttgaggcctggcttctacgacatgtcagagagtgccagtacccgcattcccactatcaccaccatgaattagtgactatgcggcatccgcctggcgccatggttgtctgctggcattgtgataatgaattacgtgagcagaccaccgaaatgttgtcagagctggcttatcagaatctggttcagtgggtgattgaaagggtgttgatcagccttggatacaataaggagcgcgaattatcgatggcggagctctgctggtgggctgtgaaatccggcattgctgacgcaataaccgagacgatggcgcaacaggccttaagactgcctgaggaacctttcctgtccgtttataaggatagcgatattgtcccgtcatttgctgcaggtgaaatccttcaggatcttgttgagggcatagacctggcggacgccagcgtactcattgagcaacctcagattgaaagtgaacccattctgaggcttagtgtcgatccgaacagccccgaatcatttatgcgccgcccaaaacgccggcgctggacctgcgaagtttacacacgttgggttaaaactcagccatgtgaatgctgtaggcaaccatcagacgatccacaccatataatagggaatggtctggggggaactggcaccaaggcccatgatctcttcgtgataccactgtgcagagtgcatcacgatgaattacacgccaatacatcagagttcgaaaagaaatatggcactcagttagagctgtgggctcgttttctggatcgggtaatgggtatcggcgtcattgtaaaagcttga

SEQ ID NO: 230049 - DNA, 831 bp, Klebsiella pneumoniae
atgaatattgaatcaattcccaaatttttcgcgcccaaaggaatgcatatttccgatagcggtcgtgcaaccgccagcgagcaactcacggtgacagatgtaatggccgcactggggatgacacaggcagaggcaggaataggcctgtcaatgtttttgggtaaagctggaatcagcgaacatgacagaaaggcatccgtcagttggttggctgaatatgcaaaatcaaaagcgcctcgatcgataagaaaagcagcagggaagaagttcccgctgtgtatgctgataatagctcggttcgcttataacgactatgcctcgtctgcagctgacagcgtagattgccggaagtgttctggttcaggcttcataaaaaaaacctcagtggtggaaaaaagccactacaaaatgagattaccgcaatgggcaaaagacctcgggcagtcaccttcggattttgaagtaaaacgtcaggtggaagagattgaccatgttctctgcttcaaatgcggcggcaccgggaaaatcagcaagcgatgtcagtgtggcggtacgggaaaaaccctggaccgtaaagagtcagagctgcagggagtgcctgtctacaaaatatgtaaacgttgtgaaggccgcggttacagtcgtcctaagtcttcgaatgcatacaggggcatgctctctgagctgcctggtctgccagaacgtacctggcgatatagctggaaacctttctatgaaagtctggttacaaaatgctttgaggaagagagttataccgactcacagcttaaacgcgtgacaaaggtgtctgatttgataaatatcgcataa

SEQ ID NO: 230050 - DNA, 678 bp, Klebsiella pneumoniae
atgtgtggacgttttgcacaagcccaaacccgtgaagagtacctggcttatttggctgaagaggccgagcgcgacattgcatacgatcctaagccaattgggcgttacaacgtggcacctgggactaaagttttgctcctgagcgaacgtgatgagcaactgcatctcgatccggttcactggggttacgcacccgggtggtgggataaaccaccgctgattaatgcccggatggagaccgcagccaccagcaggatgtttaaaccgctttggcagcacggtcgagcgatctgctttgccgatggctggtttgaatggaagcgtgaaggagataagaagcagccctatttcatccaccgtaaagacggcaagcccatcttcatggcggcgatcggcagtgtgccttttgaacgcggcgacgaagctgaaggatttctgattgtgaccgccgccgctgatcaaggactcgtcgatattcacgaccgccggccgctggtcctgacgccggaagcagcgcgagaatggatgcggcaggatgttggagggaaagaggcagaggaaataattgcagatggcgctctgtcagtagaccatttcacatggcacccggtttcccacgcggtgggtaacgtgaagaatcaggggccagaattgattgaggctatcaaaagcctatag

SEQ ID NO: 230051 - DNA, 522 bp, Klebsiella pneumoniae
atgactattctagaagaggtccaaaacgaagcctggtttgctctggtatctatctacacacatcaggagttaatggggactctggcatccagcccaacgagatatgaaatgggcaatcagcttatcgcgctaaatgcgatagttgaattattaattctgcgtattgctcgtttggcagatagaaccaagaaagtacgtaatgctaagatgctgttggagaaaggtacatatcccggtacatatgccgacgttaaattagcagcagagcggtttatgtcatttgcagcccctatcgtcaagattagacatgaagaggttgcgcacatgaagcccggcattgtgagcacctatggacctcgaattatacctacagaagctttgagggctactgagtcccttatagaactcattgatgtcgcctacgatcaacagcagtcttactcatacagagtaggctcctgcgaacctgaagttgatttaagagcatctgtggtggcaggtaaaagagtgttcgtaaaataa

SEQ ID NO: 230052 - DNA, 810 bp, Klebsiella pneumoniae
atgattaaacaaacagatgtcgattttctatacggaacatttaaagattttatagttgaagacaagcaaaaccttttaaagaattttagcgaaagatttcagctagcggttgcaatggaagtctcctttactaatagtaagtctgaactttacaatcgagttcatgcgaagaccatcaagttatcggagctgtggtactgctttgaattgctttctactgctacggaatatgggtttggtaatgcaaaggaaaaatcagaagaacaaatcaataaggaatggctggatacgctgagagtttctgcgataggcaagattgaacccgaaaagcctagaaagaaaaatctatttgttaatgtagacttaacttacaacccagtcggaaaggcaagactgatcaatgaagaacactttacaggacggtggttcttatcttcataccaagatattttgtgggcattttcgataactagaagcattcccgacacgctcccagatgatgtggcaaaggacgcattatctcactacctaaagattctaatatcgcatgctcaaggtgagcaagaacagttcctaaatcgtggttataatgcactgatgggtaatagtgcggatatgccaaaatcctccaatatactatcatttatttatgctttgaggtgtagctatgttcatcaaggtgaattaccagacagttcgcatatgccaatcgagtacaaagaatttattttagatgaatgcattaagttcctaataagttattgctctttggcttattctacagttatagatgagatctattttcattaa

SEQ ID NO: 230053 - DNA, 729 bp, Klebsiella pneumoniae
atgagtaacccattcactcttgaaatacttcaggctatcaacgattggcagcgcagtacgactaaaaatcgtggtaaaaaattagagactctatgtgtaaatcttcccgctcaatacaaaactgttgattttgcctgctacaggaaaataaatttgcagaaggatggtgtatttagcatgttcgcccactatcgtctcccggaaagaatttcctcatggtcttcttcagtcgacgtcgtcaaaaattttaaacacggtgtatcgttaaatatcgtcgaacaatcttttatctatcaaactattccaactccaaatgaaatcattcttaatcttatagcagtctacaattcttctgattttcaaagtgctcttagcctacataaaaaggatattgataatgttcatctaggtattgataaatatggtaatagccaacttgaagtggtcttaaaaaaggattttgttacacacaatgacatatacatgctgggtggtcgttcaagcgctttctgtgtttctcactctccagtcatccaaaagatgtcattaagttacttggattacgatatcagaaaaaataaagttatcgctttcaaatggttaagccatgaaataacacgacgaatcattgataggattctcaggaagtaccctcaacctttcaatgcttatgggaagagctacggatatatcatccctaagaaaagaaagaagaaatctagaaggtga

SEQ ID NO: 230054 - DNA, 654 bp, Klebsiella pneumoniae
ttgaattacgaagtgaatggaataacaatacgttcagaaaatgcagccaaacctcatactatgccatctaactatctctgcgatcatatcaaacactctctaaaaaatggccgcgcccttgattttggatgtgggaaacttagatattctgaacaattggtcgataaatttgaaactgtgacctttttagattccagaaagcagctagaaagagtacaaattataagaggtgtacaaaccacaattccacaatatgtagctaataactatagaaaagctaatgtagttccctttgaaaacatgcataaaataactagtcgttatgattttatactttgcgcaaacgtgctttccgccattccatgtaaatctacaattgacaaaattatcagcggaattagagatttattaaaggatgatggagaggcaatgattgtcaatcaatttaaaagctcatattttaagaagtatgagaggggtattaagcatttacatggatatatataccaaaactctcgcaacgcatcttactatggtttattggatgtggatgtcgtgagtaaaatttgcttggataacaatttatcagtattaagctcatggagcaaagcgggcagttcatatgtggttgttggtaaaaaaaagcatgcctaa

SEQ ID NO: 230055 - DNA, 696 bp, Klebsiella pneumoniae
atgttagaaccaccaaaaagttacaatgaaatgttgccgatgcttcataaggcaacttttattactacatttctattttatctatcattagttatttttggctacatgccattggttggcattaatgccaaatacatcccacccattaaagactacgaagagtttattaagtggatattaacattcggagttttaccaattgcattttcaattttttggtccattgttagcggggctttagatctgcataacaatgtagcaaaagtagttggcataagaaaagcatgggataattatttaattgttcagccattggcaaaaatcgcgaacgttacgaggaaattatctagtgatgaatcttacaaggtaatgagtaaattgtattacccagaagttaaagagttaaaagataaacattacgttgaacttttttggaacaaagtttattatttctgggttttctttgagcatacggtgattgcatttattactgttgtagtaataagctttgctaaattaactaatctattctctgttacaggctctttaaataatgtttggttgtgggttatttttctcgtcgtcttcaattttcttatttttatagcatctgttaagccaagaaccgaaagccaagtaagacaaatacctgatgataaaataaaagaattttttaataaaaacaatatttcttaa

SEQ ID NO: 230056 - DNA, 1266 bp, Klebsiella pneumoniae
atgtttgcactttgcgatgtgaactcattttacgcatcctgcgaaactgttttccgtcctgacctgaaggggcggccggtggtcgttctgtcaaacaacgacggctgtgtgatcgcccgttcgcaagaggcgaagcccttcgtcaaaatgggcgagccttatttcaagcaaaaggacatgtttcgccggcacggtgttttcgcgtttagcagcaactatgagctttatgccgatatgtccaaccgagtgatgacaacgctggaggaactatctccacgctgcgaaatttacagtattgatgaggcattttgcgatctgactggtgttcgtaactgtcgcgatcttaccgattttggcagggaaattcgcgagacggttctgcgcaggacgcacctcacggtcggcgtcggcatagcccagactaaaaccctggcgaagctggccaatcatgctgcgaaacagtggcagcgacagaccggaggagtggtggatctgtctaatctggaaagacagaggaagttgatggctttgcttccggtggatgaggtctggggagtcgggcgccgcatcagtaaaaaactggaggcaatgggcattaaaacggtgcttcaactggctgataccgatatccgttttatccggaagcattttaatgtcgtgctggaaagaacagtgcgggagctgcgtggcgagccatgccttggacttgaggagttcgcgccggtaaagcaggagattgtctgtagtcgcagcttcgggcagcggatttccacctacgtagatatgcgccaggcgatatgcttatacgcatcccgtgccgcggagaaactccgtggcgagcatcagtattgtcggttcatctcagcgttcgttaaaaccagtccctttgcgcttaacgagccatactacggaaacagcgcatcagtaaagctgctaactccaacccaggacagcagggacatcatcaccgcggcgacgaaatgcctcgatgtaatctggcgagatgggcatcgctatcagaaagcaggtgtgatgcttggggatttctacagccagggcgtagcgcagctcaacctcttcgacgacaacgcaccacggaagaacagcgagaaactgatggaagttctcgaccatctcaacgcaaaggatggcaggggtacattgtattttgcagggcaggggatccagaccgcatggcacatgaagcgagaaatgctttcgcctcgctatactacgcggttctgtgatctgctcaaagtcagatga

SEQ ID NO: 230057 - DNA, 543 bp, Klebsiella pneumoniae
atggctgctaatctggatttagtgcaccccgaacttaaagaaaaagtattaaaagtgatagaacagtgccagttgaaaggttgcttaatgaggccaagtacagggcttcgagatccctttgagcaaggcaggctatggcgtcagtcccgttctattgaagagataactaatagaattgacatgttcaagaagcagggggcggatttcctcgctcactgcctagaatcagttggtccgcaacacggaataaaggtcaccaatacccctccgggcctttcatggcatcaatggggggaagccgtcgattgtttttggttggttaatggcaaggctgaatggtcaccagatattttcattaagggtgtgaacggttatcacgtatacactgacgctgcgattgatattggtttgaatcctggtgggatctggaataataaagactggcctcatgttcagattagagataaggatataggcgttctggatgtatatagcattcaggaggttaataagatcatgagtgatactttcggcaagctataa

SEQ ID NO: 230058 - DNA, 366 bp, Klebsiella pneumoniae
atgtactccattggacaatttgtattgggtgggcttactactttattgatagcaataaataccagcttttctttcttccttgtatctattttagctattataactagtgggctggcgagcatggcgggacaggttcttaccaagtacatgtatcaagaaaaaatgactatgaatattgctacagtttgtgatctttacgaactaaagcatttaattacgatggataaaaacatggaagaggatgatgtcactagaaaaataacacttgaaagagttcaggaatatcaagataaatatcaaaatattttaaatgccgcaaataataaatggcaagaaatttttgttaagggtaaatctaaagagtaa

SEQ ID NO: 230059 - DNA, 2160 bp, Klebsiella pneumoniae
atgtcttcgattgtaaataagaaaaacacgcaggattcagatgaaatagatctgggtcggatcataggtgagttgattgatcaccgtaaattaattattacgatatctatattttttactgcagtagctataatatattcattatttgctacccctatataccaagctgattcattaatacaaattgaacagaaacaagggaatgtgcttttaaatgatttaagtcaaattttacctgatagtcagcctcaatctggccccgaaattattcttttacaatcaagaatgattttaggaaaaaccgttgatgatttgaatttacaagctaaagtcgaagaggattttttccctgttttaggcaaaggatgggcccgattaagcggtgaaaaacctgcgaaaattacggtgagtaggctatatgtggattcgcaaaatggaaagactcccaagctaaagttgtctgtattagataatcatgaatttactattgaaaaagaagatagcgataccatactaaaaggaaaagtaggtgttttgttaaatgaagacggcatctcattgttagtcgataaaatcgaagcaaaagctgggacttcatttacagttacataccttaccaagttaaatgcaatttctgatttacaaaaaacatttactgtgacagatcaagggaaagggtctggcatattgagtctgacattaactggagaggaccaaggacgtacaacagagatactccgtagcataagtggaaattatctaaaccaaaatatagcacgccaagcagctcaagatgaaaaaagtttagagtttcttaataagcaattaccacaagtgagaagcgaacttgatcaagcagaggataagctaaatgcttatagacaacaaaaagactctgtagatttaacgatggaggcaaagtctgtacttgatcaaatagttaatgttgataatcaacttaacggattgacttttcgagaagcagaaatatcacagctatatacaaaagagcatccaacttataaagctttagcggaaaaaaggaatacgttgctacaagaaagagcaaaattaaataaaagagtatcgtccatgcctgcaacacagcaggaagttttacgtcttggtagagatgtggagtctgggcgagcagtatatatgcagttgttaaacagacaacaagaactaagcattgctaaatcaagtgctattggttatgttcgaattatagatgatgctgttacagatcccaatcctattaaacctaagaaaacattgattgttataattggtctctttctaggtgtcttcatatctgttggtattgttatattgcgcgtttttctgagaagaggtattgagtcacctgaacaattagaagaaattggaataagcgtttatgccagtgtgccagtatcggaatcactcgctaagatgaaagcaaaaggaaaaagctttaagcatgaagataaaactttgcttgcgcttgaaaatccagctgatttagctattgaagctatacgcggcttacgaacaagcttacattttgctatgatggaagcccagaataatgtattaatgatttctggcgctagcccaaatgttggtaagactttcataagcactaacctttcttcaataattgcccatgctggtaaaaaaatattattaattgatgctgatatgcgaaaggggtatgtacataagttgtttaaagcagacaacaaaaatggcctttctgagcttttatcaggtaaaatagatgtaaacagcgctgtgcggcatatagaaacagcgggatttgactttatttcaagaggtatggtccctccaaatccagcagagttactgatgcacaaaaatttagcacaattaattggctgggcaaatgctaattacgatttagttattatcgatacaccacctgttcttgctgttactgatgccgccataatcggtcgttatgttggtacaaccttattagttgcccgatttgaggaaaatacagcgaaggaaatcgatattagtataaaacggtttgaacaaagtggtgttgttgttaaaggatgtatacttaatggcgtagttaagaaagcaagtagttattatggatatggttacaatcattatggctactcatacactaatgataaaaattag

SEQ ID NO: 230060 - DNA, 600 bp, Klebsiella pneumoniae
atgaacgaatacatctttgaattgcttggacacatctggacgtttctggtggatctgtgggataaaaacccgacattctacccaggtatgatcggcgcttacattgctgtaaccagcatacgaacacagcggcgcacttcgcgagaaaaaaactcccttgattttgaagctgcctacaaacgtaacaaagaggttgtagatgcgtgggcagaggtgatgcgcatttataaggatagaggcacagttcctgtcgaagagtggggcaggagtgagaattcgcaaacagaaggcgcaaaggcattgaagaccattttcaacgagtgggagcgatgcgcaaatgcggtgaataataggctgtacgatgataagtatctttataaggtttatggctcgacgctaatcttccttgatgtgcattttgagccatacatggccgaatgccgcaaaacaaatccacgcttttatcgcaacatgaagtgtcttgcactcaagtggcgagtgagaagggcttatgaagatgcggataaagaaacaaaagaatatcaggagcttttgaaacaatcgcagaagctggtggataaacttcatatacgtttctaa

SEQ ID NO: 230061 - DNA, 360 bp, Klebsiella pneumoniae
atgttgatcgaaaattgtaaatttgagaactgcggaactggcgtcatgattgacagttccttaagcaagcatgtggtaattaaaaatacaattgctaaaaattgtggggttggttttttagagtatgataataaaaaccattctcaaggaatccctccatcacctgatcacggaactcttaaggagctagaagataaatttaaaattattttacaaacgataaaaaaacaacaattcaccacaaaaaagacaagaaaaaggatcattttgaattcagaattttacctgcaaatgaaaaaatacttaccagaaaaagaaattcttattctgactgagaagaaaatacagcaatatctttaa

SEQ ID NO: 230062 - DNA, 321 bp, Klebsiella pneumoniae; identical to SEQ ID NO: 100860

SEQ ID NO: 230063 - DNA, 237 bp, Klebsiella pneumoniae; identical to SEQ ID NO: 100857

SEQ ID NO: 230064 - DNA, 645 bp, Klebsiella pneumoniae; identical to SEQ ID NO: 100855

SEQ ID NO: 230065 - DNA, 879 bp, Klebsiella pneumoniae
atgtcaatcagctcaaacaggacagcgataagcaggattcaaagagaactggctgatctgcgaaaaaaaatagcggatgaaagcaaaaaggaagcacaactactaagcagtattaaccagttacagagaagtatcaccagttcaacttccccatcgactgtttcctccaaaatgtctcaaatagcccgaaatacaagcgacatatccaaatgcaatgcaaaaaacgccgagttatcaaaaaaaattgctgataaaactgctgaacttcatcgttatgagacacaattgactaaagatgaagagtccgagcgcaaaaagctggaaattgcgcaaaaaaaacgtgaaaaagaacaacaggatttacaaaaaaaaattaaagaagaaatggactcacaaatacggacccttcatagtcgtatgctctccagtaaaactggtatccacgatgccattaatgatgaagatgaatctccgcaatatgatgtttttatttctcacgccagtgaagataaagacttgttcgtaaggccatttgcggagtacctgaaatctcagggcgtgaaggtctggtacgacgaattctctctcgcatggggcgacagtctcagaaagaaaatcgacaaaggacttgcgaattcacgtttcggaatagttgttatatctaaaaatttcattaaaaaacaatggacagaatatgaactaaacggattaatcgcatctgaaattgaagggacaaaaagggtattgccaatctggcacgaaatatctaaatcagaagtcatcaaatttagtccatctttagctgataaggtagcaatgaataccgcaatacagacatatgaggaaatagcggatcagttagtgaccctcctccgataa

SEQ ID NO: 230066 - DNA, 234 bp, Klebsiella pneumoniae
atgactgaagaaaggataaaaatacttgaatctgaactattacaagttcgctatgaacttgccgtaataaaaaaactactaattccagataaaactccggcatgggctttacttgtgaaagatattgcctattctgaggggctaagaccctcaccctacggtgagggatacgatatgtgtcgtctgctcgaattactttgtaaaattggggttttatcggaggagggtcactaa

SEQ ID NO: 230067 - DNA, 627 bp, Klebsiella pneumoniae
atggctgaagattattttcatattgcatctaaaatagcaccgaaatggaatttatttcctgccttaaaagtaggagatacagtcaaaacaggtgatttcaacccatttttcaattttttcctttcttcaaatttgcctacagaaaacgtgaatgttgatggagcagttacccaatggtccttgatgaagttcctggctgggataagatttggaacaatgaataccagtatgggtgtgcaagatattgcgaccagaggccattaccttgctatgcatttttgtaagtatacaagggagttaatatgggagtctgttcgtgctacacattatcctgataagccatctcggcaaaagtgtctttgggtgtgccgcggtgttgataacctggagtactggaaaccccatcttaatgataaaaaagatgatttgcttgtttaccgcgtagagcttaatggggttatacatgaggcaagtgatgagcacttaatgaaggatgatatgccttatgaagaagctgtcctgatggcgcaccgttactggaaaggtgaaattgcaaacccactagcaaaagagactctttttgaaggggatatgaagattctggagcaaatgaatcaaccttcataa

SEQ ID NO: 230068 - DNA, 363 bp, Klebsiella pneumoniae
atgttcaattggatggttgcacatgaaggggcagtaaaaattatcgcttcggcgcttcttacatttggttcaatagtactggcaattagagtgaagagccttattggcctgatagctgatgttctaaatgctcatgagaaagccatttgcgaaataaaaggaattagtgaaaacccaaaatggaacaatacagggcgcttaagcacctctgtcgatgcggggcttaaaaatggcatggctgtggcaatagaaaggtttaacgcaagaaaaggggccgttctgcttgtcgttgggtttggctcactggccttaggcggtggacttaactttgctatcgggctattgataaaactatatagctaa

SEQ ID NO: 230069 - DNA, 354 bp, Klebsiella pneumoniae
atggcggttgaaacttatgaaatttgggttcctgtaggtaccccagcaactgaagaagccctgaaaaaaatcattgaggatcacgctcatatttttgaggggatgatgatggctagttatcgcggggatcctcgctacagctaccaggccgatagttttgaaataactgacatcaacaccgatagtacaatctgcggctcaattgaatttgaggttgggatccaatattacgaaggatgcaagggtaaggattatttcgacgtggtcgatggcagtgccgattttacgtatgacaaagctacaagttgcttaaagtttgagttgaatgagactgtctggaacccagataattag

SEQ ID NO: 230070 - DNA, 207 bp, Klebsiella pneumoniae
atgccgatgaaacactcatggtttcaccatctcgaatgcacaacgcagcaggccgacgaactgatggctagatatcgccagcggggcgtaaaggtcgaacgaagcttaaaccctgactttatgacatggaccgtcagcgcgcagctggtggaggacaaaaatccgccgcggccagattcccgctggcgcaacaggatgtgggagtga

SEQ ID NO: 230071 - DNA, 273 bp, Klebsiella pneumoniae
atgagtaggaatttgataatgcttgcaaggaaatttgtgtccttacagattaccgcagatgaattcgaaacccattttttccatatgtggcgaaatgaagggagcactggtcagctaacacaagacagtaaggatattggagagtgtgcggccgaactttttattcttgctgattgttatacatcggattccgtgagaagagagagcgagttggattcagatggtttgcacaaggaggttaaagctactcttgcgaagtatcaactcctgtaa

SEQ ID NO: 230072 - DNA, 1026 bp, Klebsiella pneumoniae
atgacagcggttattaaatttgaatatttaatatctccattgatatgcactggtgggcaggtagatgaccatgtcaatggtttgaggttattaaaagaattggttagtagctctaacatagatgtcaaatgtgaggaatcgatactcaataatatgcataaggctggatattatccatgtgctaaaattttgagcaaggcatttccaggaggtgataattgtgtgcatagtgctcaagatgtatcaaaaataataaataatataattagtgatattgaagagtgcagttctgtagttacaacgcatgaaatcgaatggaactcttttacggttgttcctcctatagaaacaatatcagatgaaagaaaaaataatgtcgaaattttcttgagggatactctttcaagaaaatttctttcaagtgaggagttttctttcttttattctcaaagaaacaaaccaattcttcagtcccagaagtttttattgagcggtactattagtgatatatatcccactgatgatatggttgcgcctattgagttaacaaatgaaatcgctgcccatggtaatcttaatgactttataaataatattgatggttactctttatataaagtggctaataacatcccctctttgaaatgtgcattcttttttggttgtgttaattttttgaatgataattttgcaaacgaaaaaatagaatgggacgacttcaaaataggagatgattttttgtattcattgcaaagacatcaaggggcactagaacaagaattctcctcagtggtttatgaaactgtagtgcaagttttatgtcgccatcctaagaatgaagtcaaaccatttagagtttcttctcgttcctccgaacaacggactcacggtgatttaagagcctttcgtacccatattacctctaggcaccaagccttgagactaatgttttgggttgattcgaattatgtaataacactggcaaatataggtccgaaatttgaagagacaatttctttgccgtaa

SEQ ID NO: 230073 - DNA, 1971 bp, Klebsiella pneumoniae
atgataagaaatatttatataaagaactttaaaacactaaacatgacatcatatatcgaacttaaagaatgttctatattatgtggcgctaacagcagcggtaaaagctccttgattcaaacgctcctgatgttagcacagagtttttctagtcgatatcaggatgatagtatagttttgaatggggccttagcaaggctgggatcattttcagatatcaaaaagcataactcttctgaggaaaccataactattggtttcacttttgacgtggatgaaggttactatcttcgtgataatacaataaattcaattagttgtgagttagttattggtagaagagaccgttcagtagcaaaaatagacgaagattatcatcctataataatttcagctaaatatctcattagtaagggtggaaataataaacaaaaagattacatacatttccaatgtccgcaggattattattactctaaagatgttatatataacgtagaaaaattcaatacttctgaatttaatgatttgaagaagcggtttccaagtttaaagatattaagtcttgcaaagactggggaattagtcccctccttgatacatatagaatatgataagacaaaaaaagaaagctatgaaataataaattttttaactagaaaacagaatgttcataggggcggatattttttggaggatgcggattttggtgaggatatatatattcctaaagaattttccataagagttttggagctaataaaggaggagcgcaataaactattggatgagtttgatttgccaaatgatcttctcgacatagtgaagaaaaataaattggaaaaggatgagtatttctcctataactatgataaaaatgttttgtcacagagtgcgaaggaattattgaatgaaattaaaggtaatttcattgaaataaactattccttgcaatcaagagatattccacctgagtttgtcaataaaggtgttagtataatagagtggaaagcttggttaaactttttggatgaaaagaaaaggaaaaatttaattgtattgttagagaagcacagagacagcttacaagcaatatggtataaccatattgaaattaaaatgacaaaagatgtatacagttcaaatcttttacaagatgtagagactgcaatggctttttgtttctcgcgaagtttaaagtaccttggacctttacggcatgaaccgcaggctgtctattcgtcgagcccttatgatgccaatactgtaggtttaaaaggcgaatttacagcttctcttcttcatcggaatcgtgcaaatttaatacattacatctcaccttccataattaatggtaaaataaatgttacgaaaaagtttgataatttaaataacgcttgcaaagagtggttgtcttttttaggcgttgttgaggaagtaagaactactgataaaggcaaattagggtatgagttatacgttaaaacttcaagcggcgaaaaatggcaagatcttactcatgtaggtgttggggtcagtcaagttcttcctattgtattgatgttcttgaattcagaaccttctgatgtattaatttttgagcaaccagaattacatttgcaccctaaagttcaatcaaaattgtgtgatcttttcctgataatggcaagcactggtcgccaatgtattattgaaacacatagtgagtatatgattaataggttgagacttcgtgtggcacaagatcaaaataatgactgtcttgaaaggtcggtattatactttataaataaaattaacggaatatcagaattccagaatgtaaatattaacaagtatggtgcgattcctgagtggcctgatgacttctttgatcaaacagataaagaagtggaaaagattttgatggaagcaagtattaagaaaaataaagaaaaagccaagaggtttaccaatgacagcggttattaa

SEQ ID NO: 230074 - DNA, 348 bp, Klebsiella pneumoniae
atgctatactgtaattatatacagttagtgagtgatataagaaatatcaataagcaatttaattgttttattgaggtgtgggtagatggatcatttaccactgaaaagccggagcctgatgacattgatatacttttagtaattgattctaatagacttaatcttattcctgtgatgtttcaaccacagattgagaagtttttaaacaggcagtacattaagcataactataagattgacctgctattgttagaacatggtaaggacgaggacagaatgcattggaggggggtgttcgggcatgacagagaggacacacctaaaggtatagtgaggatatcattatga

SEQ ID NO: 230075 - DNA, 933 bp, Klebsiella pneumoniae
atgaacagtaacagtaatatgaccgctttaaaggggcgcataaagttcgttcaggataaactcgactcaatgtccgccaaatcggaaatgtcctttgcagacagactcattttcaacaatatggactcctatcttagcgatcttaaagcagaacaagttgcagaagatgcacgccatccattgctagattttatggagctaagactgaaaggtgtagttgttgaccttggtacaattccattagagttgctgggggtgatatcccataacctggctgcgcttgtccagcgcgctacccacaagcttgcttccgggaaagactctcataaggttccttatgacataaagagctcattgaatatgaggcttgctgaattatcaccgggctcaactcgacttggattaaccttttctaccggtgattgtgagcttgtggaaacggtatcaagtaaggcagtgaaggagattattgggctgctggacaccaatgacgcgtcagtaatgatgaaccaaatagccgagataggttataactctgcacaaagcctaaaaagaattgtcgaggagtgcgataaaaaccacgttgattttgatctatcatggattggcccatttagcgatggtgcgcgtatagtgaaagtaagctccaagaaaatcaaaatgttaagcgaccgtttggcatcaaccaccatatcgcaaccagttactgagtctatcgtcggagtactggcatcattatcaaaatatggcaagatggatattgaacttgatggtgagaaaatcaaagcttcatttccaatagaaatgttagatgaaatacagaaaagtcataaggttggccaacaggtttcattgtcagtagaagtaactgacatttacaatgaaaaccttggattacatcgtaaaaattaccgagttaaatctttgagatag

SEQ ID NO: 230076 - DNA, 216 bp, Klebsiella pneumoniae
atggctgtatgtatggggtacgatgatgagttgttcgcggagatgcacccgcagatagtgcaggttatcgggatagcggttatgcagctgctggttgagcagtgcgagccgtcaagagaggcgctaatagaaatgattcaggtgttgtggcaggaagaccaggtcgatctggctgtggagttggctattgacgttctgtggctaccaaaagagtag

SEQ ID NO: 230077 - DNA, 240 bp, Klebsiella pneumoniae
atgcgattgattaatcggagcaaacactctcctctgggccgccaggcgtgcgatgcggcgctggctaagcacgtagaacgttacggcgattacggacgcagccagatgaaagaaacgtatacggtgcagattgaaggagtaaaggtctgggtggaggtggtgaaccgtaaagcgagttacgtggccacggctatgaccggcatgcgccggttgagagccctccccgggcaggtcgcctga

SEQ ID NO: 230078 - DNA, 213 bp, Klebsiella pneumoniae
atggcgcagatcatttttaatgaagagtggatggttgaaaaggctctgatggcacgaactggccttggagcccggcagattgaaagttaccgacaaggagcctggatagaaggcgttcacttcaaaagagtttccccttctggcgaaaaaactttgcgcggaactacctggtacaactatccggaaattaataaatttatccgggattcgtaa

SEQ ID NO: 230079 - DNA, 1239 bp, Klebsiella pneumoniae
atggcaacactacctacaggcgtggagattcgtggtaacagaatatgcgtctggtttatgtataaaggtaagcgctgccgcgaagtgttaaaggggtggattgtaagccccgcaaacataaaaaaagctggtaatttaagagcggtaattaccagcgaaataaacatgggggaatttgattacgggcgtcgattcccctcatccaaaaaggcagtagcgattaacaccacgttacaggtgagcacatttcatgaactgtgtgaactgtggcttaaaatcaaagaaactgaaatcagcgccaatactcttaagaaaacaaaatcccaggttgatacaataataaaaatcatgaacggaaacactatgctcactgctattggatatagtgacgttcttaattgtagaaacgaattgctaacaggagaaaccttctattcaaaaaacaagcgtaaaaataaaaaaggcagaacagtttcgactgtcaacaattatgtttctttactgtgctctattcttaattttgcgtacatgtcgggttttatccaacataaaccatttgagagcgtaaaaagcctgcgtaaaacaagggttaagcctgacccacttacaagagaggaatttgcagccctcatggcaagcgaacgaggccaaagccagaacatgtggaaattcgccgtctattctggtgtgcggcatggtgagctggcggctctggcatgggaagatgtcgatctggataagggcgtgatacacgttcgccggaatctgacagcaaacggcatgttcggcccaccaaaaacagcagcaggaaaccggaggatacaattgctcggccctgccctggacgcgcttaaagcgcagcatgaactgacagctggacatccggtatccactatcacgtttcaccacagggaatacggctcaagcgaggaacagaatttgcgatttattttcatgccgcggagacggaaaggcgagcaaaaaccctgctactcgcacagcagtataggcagcagatgggaagctgcagtaaaacgcgctggcattcgccgcaggaatccgtaccatacgcggcatacttttgcctgctggctcctgacggctggcgcaaacccgtcttttatagccaatcagatggggcatgaaaacgcgcaaatggtgtacgacgtttatagtacatggatagaagaaatgaacggcgaccaggtttctatgttgaattcccggcttgggctttaa

SEQ ID NO: 230080 - DNA, 1035 bp, Klebsiella pneumoniae
atgtcgacgcagatgatgaaggccgttcaacagcacgcctttggcgggccggaagtcctgagctatgaggatgcgcccatgccggtcctgcaggccggtgaagtactggtacaggtgcacgcggtgggcgtgaacccgccggacagctatctgcgcgatggctatcaacagctgcccccggagtggcggcccgaggtccgctttcccttgatcctcgggaccgatctctccggggtggtggtggcgcgggcggatgacgtccgggaggtggcggtcggcgacgaagtgtatgctatggcgcgttttcccgaaggggcggcagggggcagccgcgcttacgccgagtacgttagcgtgccggtcagcgacctcgctcgcaaacccctaaccctgagccatcagcaggccgccgcggtgccgatgtcgctcctcaccgcctggcagttcatgatcgatcccgggcatgaggtggcgaatccgctgcagccggggccgcatcggccggtgccgctggcgggtaaacgcgtcctggtcaacggtgcggcagggggagtcggtcatttcgccgtgcagctggcaaagtggcagggcgccgaggtgattgccgccgccgcgggccgccatgaagcctttttacgtcagctcggcgccgatagcgttatcgactatacaaccaccgcagtggaggagacggtgcgtgacctggacctggtcattgatgcgccgggcgggccggccagcggccgttttttgcgtaccctgcgacccggcggcgcgctgtacccgatctttccgctcggctttgccggggcggaagaggcgcgacagcgcggagtgacggtctccaccacccaggtacgctccagcggcgcgcagctcgcccggcttgccgacctgctggacgccggggtcatccgggttgcaattgacagcgttttcccccttgcgcaggcgcagatggcgcatgagcgagcagcgcaggggcatcttgagggcaaaatcgtgctgtcggtgatggactcgtcagccgggtaa

SEQ ID NO: 230081 - DNA, 927 bp, Klebsiella pneumoniae
atgatgaaaacggaacgtccgttgtggggccggggcattatggtgtcgcctcagcattttcaacagcaggctgcgtatgcagcctggactgcggaagtgattgcccggatgggtcttaaccacccctggggagtggttgaggcgaccttcgaaccagagatgctcaaactgggccgcctgcaggctcacaggctgcaggtccggttccaggatggcacgatgattgatacggacaatgccgatgcgctgccgtccgcgctgtcgctggacggcgcgtccggcgaggcggtgatcgtgctggcgctgcccctgatgcaggcgaatggcggcaactgtctgaagccggaggaggtgaccctggtgctactgactcacctgcataccgaccatgtcggatggaataccgtctggcaggacgatcgctgggtgccgctgtttcccaacgcccgctatctgtgctcggcaaaagagctgtcgcgggtgaaaaacagcgaacgctaccgggcgctgtggcttgacagcctgctgccggtgattgaggccggccagctggagaccgtcgatgtggcgacccggccgcgggtcggcggacggatcgactttattcccacccccggccacagtccggaccatgccgcgctggtcctcgccgccggagatgactacgcctgtttctccggcgatcttctgcattccccgatccagtttgcccatccgcagtggaattcagcgttctgcggcgatccccggcaggcggaagtctcgcgacgggagatgatggcgtggggggcaagccatcatgttcaatggttcaccgggcattttgccgggccttcctgcggctggctggagaaggataagcaaggtgactatcgctggcgagaggccgggaaacaggctgcagataaggggaacagtgatgaataa

SEQ ID NO: 230082 - DNA, 180 bp, Klebsiella pneumoniae
gtgatcgcaaaacaagaattaacgggccgaattttcaatatccagaaatattcgatctatgacggcgatggcattcgcacgctggtgttttttaagggctgcaacattcgctgcccgtggtgcgccaacccggaagggctgaacagccagttccaggtgatgttctcgcacgacaaatga

SEQ ID NO: 230083 - DNA, 279 bp, Klebsiella pneumoniae; identical to SEQ ID NO: 215563

SEQ ID NO: 230084 - DNA, 1290 bp, Klebsiella pneumoniae
atgagtaacatcttccttaaagacagcgtgtttggtgaactaaaatacgaaaatgtctatgagtttttcgaaggtccaaaatttttctcagtgactaatgagataaatagtctctttgttgtttattggttaggggactttgatgacttcgaaaaatggatcatcattcctatatctgctgaacgcttagaatctttggaaagaaaaagaatagatattcgtagcgttctaatgcaccaagaacaaaagaaatactatcagttagatattttttatgaggatgagcgtgttgtagcattggctttagactcgtcagcagtctctaacaacatgactttgccacaaagtggattgtttataagctctgtactgcctgttttagctaatggtaaaataggtaaggcaattgagttttcaacgcatgaaattcatgtggagaaaactaagtcatctacagacccattagtactaagtggtgtttcgaaattattcgaatgtttcaataacttatattcatctataattaactcttttgatgaaaaggacttgatgcgaccagtggcgggtcgccctggatcttttgtgctttcttttcaggcagaaaaaatgcagacagtagagccgttattaaaagagttaaatgatctgattggtcttaagggtgatatagttagttttattaaaaataataagattgatgttcaaatgctctcagctttatttgactctgttgttaacacaagttcaagttttgaattgaaaaataactatacagatgagattgtattaacggttcgaaaaacggatgctgagttttactcaacagctttggctaagatgtctgcccaggtcgttggcggctatcaggtgccccaagcaaatttaattgatcaagtttttaaaattgtagagttaaaatggaagggaatatatctcgatctaattagtacagggctggatcctcgccatatactgtactatatacacgcaggtaaaatactaggtttacttaatgaaaatggttcaatctctgcaatgggacaacaattagctgagtctgatcatgaaaagagattaagaattgcggctcgtggttttgaggccagtcattgtggttgggcttggatacaatggagtcaggcaaaaaatctttcagagctagatcccacaacggcagagccttttttgtttgatatgtgcttatcgcttagcgataaaactaagaaacgaagagcttcgactttaagacaatggtgtgaagctttgcaaccagcttaccgagagttgtaa

SEQ ID NO: 230085 - DNA, 411 bp, Klebsiella pneumoniae
atggaaattatttcagtaatcggagtgatactgacactgctagggctctttattccgtcactaatcagtaaccattcgtcacgtaaggcagagttcaggaagcattccgcaccactgcggggaaagttgctaagcgaaattgaggctattgaaggaggctcttatccattcaggcttatcagcgatgctgatttcaaccagttgctaccttacgccccgaggcgcaggaaaaacgctctccttgatgcttacaccagttatctcgacgctcatacgatggccaccacgaagcactggcacgatgaacatccatccgatggaatgctatttttcccgacgggtttctcagtcactaattcagatgaggtactgaagaaaatgcaacctctgaaaaaagaactcagcagatag

SEQ ID NO: 230086 - DNA, 198 bp, Klebsiella pneumoniae; identical to SEQ ID NO: 179160

SEQ ID NO: 230087 - DNA, 201 bp, Klebsiella pneumoniae
atgttaacagtaaaagtgatgtcgcctggtggcggtgaagaaattcattgtggactgagcgttggcttcaaccccaaccagcagagtattgccgtatcgggaatggaccagaacgtattcctgaagcagggagaagtggcctacgtgatgaacgcaaacggcaagaccatttcacgttacgaacacctggaacgacagtag

SEQ ID NO: 230088 - DNA, 2967 bp, Klebsiella pneumoniae
atggcctttaacccggagctggggagcacgtctcccgcagtgctgctcgataatgccgagcgcctggataagctggtgaatggtgatgcgccgaccgaaccggaccgcgctggcgttgatctggatacctggcgcggaatgatggcgaagaatgaccagattcgtcagaaccttgtgccattgagtaagcagtacatgacgcttgaggcggcccaggcggatatcgtcaatatcccggagggcagcaccacctatgtgcgaagccaggatggtagcgctctggcagatgaatatatcaataatgccggtgtgctcactgctaccgggcgccgattgatttcgaaagaatatgttgatgctcttgtcgatgccatttatgaacgcataaaaccacttcaggcttcacccgatgcgctttttgacatcgtttcacgtaatggtctccgtccctttaaaatcgatgacgataatggcgaaatctcattaagtttaatcgcccgcttattaaccggggattccggtctgaatttcagcggtaatatccttgataataatgcgcctgaggggtggttattcttaatttatgcgaaaaacgggctggttatcgcaggggtgaaagaagacggaacaaaggtcggctggggcgggagtgacagcggtggcgggcaggctggcggcattacccctggcgacacggcagtgggttatgacgatattcgtaactacactggcgacgctacggttcgtgatgttgtgggtgagcgtattggcggcaggttcgtcgttgattcgtctgacacgtcatcgccggatgatggcggcggtgttctggtcggtgttgacggtcgtcgctgggtccgccagtgcgatttcgtttcttacgacatgttcggcgctccccgcataccggaggacacctatcagtcatatgctctgctttccatgcagggaaatgaagcctccgcgcaggcgctgctggccgaccaggcggcagctgatcaggccatgataaattgccatgcttttgcgaataagcacgcgatcccggtcgtgcagaatgctggccgctatctctggagcggcgagtctgtgattgttcgcacgtcatcatacctgacaggctgtactgtcgtgacctgtaaccgaagtggtctggcagaaaatcgatggggtaaagtggacggtgttaacgatggcgcgccggacccggtttacatgtaccgcatccaggggaaaaaccgcattgactttacgacttcggaactgaacgagcttaacaccacctacgcgtcttatctccggcggggcagtatgcgtcttcccatgcctaagttgtatcagtatcgcgggggatatttcgggtatatatcttccgcagtggaactgtaccgcagtggcggacgcggcaatccccgtcagcacgttcattttcgggattttacccggatcggaaggaacggggcgataactgacgtatttgtgaaaaatacgccagcaggtaccgtgtcagaggcgtggatccagccaaaagaaagcgcctggcttaacttttacccgccaacattcttcgaggctggtgctgaccgccggttcgttaatatgcagattgaacggtcgcaggtgaacatttgcgatttggtgatggagaactgggcgacaggcaatattgagtcacgggtggccatcagctcttatggagtctgcgatctccgcctgcgcaacgctacggcagaatgtatgccaaacgcgaataacggggcctacgtcatctgttttcgaaacagtattgaagttcatgttgatgcctattacgggctgcatggctggggattccagggccatcacggtgtgaaacgcctctttatcgatcgcagcgtcatgaaccgtttcgattttcactcgtttggttatgacgtctttatcgacaatacccgcttcaaggggaagcaggtgaatctccagggcggcggggcattctcaatgcgcaacattgaatttgacgttgtcccttcttcaacagcacagagcggtacgatggaggatcgccttaactacttcgtcaacatgcgtgaagattatgccggtgactgcgagtgtaacctttccattgatgggctcgtggtcagattcgatcgcacggtaagttggggagggaataacacctttacgttcgatgttgtccgcatgaatgccggaacggctttcgactacggaattgacacaaaagacccgcatacggttattggcaggaacatcgttttcgatctggacgggatgtcggcgatattgccggataatttcgccttctcattctgccggccacttaaaaatctctacaccccggccgatcgcacgtacctcccgggcctgatcaaagttgagaacatgacagcgattcatgtgccggacgataaaaacgcggtgatggcggtcttccgctgcggggatgatatggcgcaaaacccgtttggcagtcgggtgaagcttcgcccgaatggtaccaacgctgacatcatcgctgtggatgttgtcagcgtcatcaataatccggttgtggctcagaacgccagcccgacagtctatatgccgggtgaggcatcggcatgggatacggttgtggacggctcgacataccggaccagtgaatattcatggcgacctaaagtcactctgcgtaactgctatccatcaatcattaatgcgacgggtgtaaaagcggaatttgacattcacgggggattactcgcccgctacagcatcggcaatacgggaaaccgctgtcgcgtgacaggggctgatattcagcttattccggactccaccggcacgctctattttgatgcctcgaatgtcagagcaacaggctgtgactggtttgacccgatgaacggagcgacatacagcggcatacttaacggcaccggtaacgagaaccggggcacccctgcgcactcacccaatatttaa

SEQ ID NO: 230089 - DNA, 729 bp, Klebsiella pneumoniae
atgtccggaactcgtattttttgcaatcagattttctccgtcactgactggaatcacgactatgtaaccgtgccttctgtactggaaagccagtcgccgctgcccgcgcttgcctgctttgatttactcaatcctctggataacagtggacatggttatacggtgagcccggggggcgggcaggtgcgtgactggggacttcattatgaagatggctcgcttccgtcaaaaacggatttttcaaaatcaggtcagggcgcagtgtcttttgtcaccgcgtttaaattatctgcgctgagccgctacacacatatcatcagcaatcgtgttgcaggtggcggatttaacctttacttcaacaacggtctctacatgtccgtaacttacccatccgggaataccgttatagtgagtgatggtactgtcagcaagcccgaagtgaacacgtggtacgtagcatcagggatattcgatccggcaaacaataatgtaagggtccagttcagtgacctgggcgtgcggcttggaagcatcggaacggatttccctacgaacgcctcactgttagcgccattagttatagggggcgatacaacaggcagtacaacctcttcgatgctgggtgatatcgcatttgttgccctgtatgacggcgcatttacccaggcccagcgcgaagctatggttgttgtaggtcaggatgttttacgggagcgcgggcttatctga

SEQ ID NO: 230090 - DNA, 552 bp, Klebsiella pneumoniae
atgctgattggttacgccagggtatcaaccggggatcaaaacctcgatttacagaaaaacgcgctattacgcgcagaatgtgaacaggttttcgaagatacggccagtgggaagaatgcgcggagaccagggctaaaacgcgcgttacggcgattgcggcctggcgatgtgctggtggtctggaagctggatcggcttgggcgcagcgtacgcgacctgataacgctcgtgtcggagctgcaggcgcgcggggtgaatttccgaagcctgactgattcgatcgataccagcacagccgccggccgcttctttttccacgtcatgagcgctctggcggagatggagcgagaattgatagtggagaggacacgcgcagggctggcggcggcaagagagcaggggcggatcggtggccgccaccgggttatgaccgaagaagttgtggaacgaggccgccggatgctggagaacggagctacacgccaacagatagccgatgtgatcggtgtaggggtgaagactatctataaatatttgccagtaacgggatga

SEQ ID NO: 230091 - DNA, 801 bp, Klebsiella pneumoniae; identical to SEQ ID NO: 205642

SEQ ID NO: 230092 - DNA, 981 bp, Klebsiella pneumoniae
atgaaaattggtatcgttattagcggcggggatgtttctggaatgaataattttatattccagatagccaggcaggctaatgctgatatcacgctgtttaatggcggtattccagggctactggagaaaagtcatcaggatatggcgtggcgcgatctggttgattattcaattaccgcggtgccgatcattacctcggggcgaaccagtcgcaaactgcagcgcagtgaatatgaaagcattgctaaaaaacttaaatctctgcgtattgatgtgctcattatggccgggggggatggcagcctgcagtttctgaatacccttagtgaatttgagattaattgctttggtgtgggaatgactatcgataatgatgtgtatggcagtgattatacgattggtttttccacggcctgtgagcaaattattaaagaagtctctcgtttaagaaataccggaagagcgctgcccggtcgggtttttatggttgagatattaggaggctattgtggagaactaacgttgcagtccgccattaaatgtaatgcggatattgccctgatcccggaggcacagatgccgttggccgtgctcgcggaacggattacccggaagctgagtgcgcagaatagcgtcgttatcctctgctcagaaggctataccaaagagtactctcccggctttcagggggcgattgataccatgattaaacagctggaaccacaaataggtgtccgtatccgtaaaacgatcgtcggctatggtttacgcagcggtgatccaacctgcgaagagatttatcagggcactattatggccagtgaagtggttcgctgtattcagtcaggtatgaaaaataaagccataataattaattccagtaacaaacctattccgattgatttagtcagtatgaaaaaacgtctggtcgatactgaaggacatcattataaacttgccaagcaactcaatattatttga

SEQ ID NO: 230093 - DNA, 216 bp, Klebsiella pneumoniae
atgaatagcttcgtggcgtttatcgttaaggatttactcggccaggcatccattcttattgcttttattgccatgcttggcctgatcctgcaaaagaaatcgccaggcaaaaccgcggaagggacatttaaaacgctgctcggtttcttaattatgatggccgggataaacatcattgtcgccacgctgaccttcctgaatgatatcttcacctag

SEQ ID NO: 230094 - DNA, 525 bp, Klebsiella pneumoniae
atgttaacccatcaaataatacaaagtgaaatcgaagagttaaaacagatcttggctcatcaggatttagaaattccttcattctggcgttgtatctggccaggtctggtatgcatgctgtggtttttactatcatcctacctttcatattggcaaagtgactatgcctctggtcttgagagagtggctgctatggtttttgcgggggggatgggttttttttctatagttttgatagctaatacgcgcgcacactttctttcgttgcctcaatcattcaggacaaaatcaaaattctttagttatttgtcagggaagagtaagtcttatggtgtctttatcttgattctatttccttgtctggcattttatttttcatctatccatcttaatgcaatagccttttgtgttataacgtttttttgtatgatagtgactgtcatggtgatgaatattgaccttggtcgttatcaattagcgaccctgacgtctgttattgaatcggttaggaatcatgaacggtga

SEQ ID NO: 230095 - DNA, 693 bp, Klebsiella pneumoniae
atgaccgccattccccaggcgacggccattgacggataccgttggttaaaaaacgacatcatccgcggggtttaccaccccgatgagaagctgcggatgagcctgctgacgtcgcgctatggcctgggggtcggtccgctgcgcgaggcgctttcgcaactggtggccgagcggctggtgacggtggtcaatcagaaaggctatcgggtggcgcccatgtcggaacaggagcttctcgatatcttcgacgcgcgcgccaacatggaggccatgctggtgcgtctcgccattgaacgcggcggcgacgagtgggaagccgagctgctggcccgcgcccatctgctcaacaagctggaatcgtgcgaagcgagtgagcacctactcgatgaatgggaccagcgccatcaggcgtttcacaccgccatcgtcgccggctgcggttcgcagtatctgctgcagatgcgcgaacggctgttcgatctggcggcgcgctaccgcttcatctggctgcgcaccaccgtgctgtcggtggagatgctggaagataagcatgtccagcatcagaccctggtggacgctattctggcgcgcgacgccgaacaggccagcgcgctgatgcgtgagcacttactgactccgatcccgattattcagcaggcgatggctggcaagctgtcgccgcaggcagggtga

SEQ ID NO: 230096 - DNA, 378 bp, Klebsiella pneumoniae
atgaaaaagataattttagctttatttcttggtgcttcgtctatagctatcacagcttgcgcgccatcagaacagaaaattgactacaaccagaagtcaatgctgttgtcccttggtatgacaaaaaatgatgttatgcagatcatgggagcaccgcgacggacggatgtaaacgcagaacgtgagcgctggatctattggaataagacacggtatgcctacacaattgtagacaatgaacagttagccaatgatcgtttggtcgttacttttgtaaacgggaaagtaaccaaatgggggcagcaaacgctgactgatgatctcatggagtcatcacaaaaaactgcccaaacctatgctgaggcatttaaaaagtag

SEQ ID NO: 230097 - DNA, 210 bp, Klebsiella pneumoniae
atgcaagatatgaagattgaataccgcgatggcaaactggtggaactgagcattgatgatgtgagttttctttctgcgtccgccatctcctttagtcataccgcaaacgaggagccaccaacgattatcctgacaatgtctgtcggtgcaggtgagcgactggcgcccgccgtccctccccgtgaaaacctgcggatcatcgataaatga

SEQ ID NO: 230098 - DNA, 225 bp, Klebsiella pneumoniae
atgatgaacacacataagcttctggatgcatacatgttagttggtgccggtctttcacgcgtcaaatatgagattttctcaggagatgaagggtcatatgcgtttattactatttatgcatatgaacctcatttccatattaagggctatgattctttaaagttagacgacgctattgatgtcagatctcagatcgaaggacattttgtagataactaccagtag

SEQ ID NO: 230099 - DNA, 201 bp, Klebsiella pneumoniae
atgttaacagtaaaagtaatgtcatcagatggtggcgaagaaatccatagcggcctgagcgttggtttcaaccccaatcagcagagtatctcagtgtctggaatggaccagaacgtgttcctgaagcagggggaggtggcctatgtgatgaacgcaaacggcaagaccatttcccgttacgaacacaggacccagcagtag

SEQ ID NO: 230100 - DNA, 276 bp, Klebsiella pneumoniae
atgggaatcgaagctatcgcggggctggtggttgtcatcctgggtgctatcgctggcgcgttcggcatcggccatgctcgcgggaccagtaaggcggaagccaaagccgatcagcagcgaaccgaagagaacgccgccgctaccatcgctgcggcagaacgtaaggcggaagttgtgaaaggggccagtgatgtacaggaagacgttaagcgtatgggcgatgacgatgttgatcgcgagctgcgcgaaggatttacccgccccggtagtcgttga

SEQ ID NO: 230101 - DNA, 786 bp, Klebsiella pneumoniae
atggctaaagactcaaagcttgtatacggcgcaaacggcaaaaccaacgttctgatgttcgaaccggaaaagctgcatcttgttaccgacaaaacccatcttctctacgatgaacgtatcaacctgccgatcgacgaagggatggtactgaacatcaaggagctgggtgtactggagcctatcatcgtctggaaagacccagaaacagggctcacctgcgtagttgcaggccgtcagcgcgttaagcatacgctggaggcaaataagctccttttgaaagagggtaaagccccacggcttgttcctggagtcgttaagcgcggttcagcaaatcagatggctaaatacatggtcagcgaaaacgaaattcgacgacctgatacaccgcttggccgggctaaaaaaatgtcagacgcgctcgaccgtgggctcgatgaggacgacattgcggtgttgtttggctgcagcgttcagaccgtgcgtgcaacactatctctgttggatgccacacaagccgtccgggaagcggtggaggctggaactgtcaccgttacccaggcgcgtcagcttggtgcgctcccacctgaagaacagcggacaaaagtggcagaaatcgagctggcgacagctggtaccaaaggccacgaaaaagcccgtcgacagcgccaggttcttggtgaagcaaagccgcgtatcaaatcacgcaaggaaattacaaaagcactcgaagatgccagtggcgaatatgccgaggctctgcgctgggtgcttggggaggcggtatga

SEQ ID NO: 230102 - DNA, 135 bp, Klebsiella pneumoniae
atgaatattgatcctgagaattacagcaaatacaccctccgtcggttcgccgccattttggatgtgatctgctgggtgctgattgccgtagtaaccgttggtagctgcatgtttattgaatgggtgacagcatga

SEQ ID NO: 230103 - DNA, 1023 bp, Klebsiella pneumoniae
atgtacgagttgggttgctctcgaaaggaagtatctagagcgggggagcgtttagttggttgctttaggcataagcagacttacgatgataaagatgtacaaatacttcatgactggcgtatgtgccatatgtacccattagaacagcttactaaatacttagaaagagaagctaaggctgtgaactcaaatgcaattatctcttcaaggatcaaaaggcttccatccattgtcgaaaaattagctagatttccaagtatgcagctcggccgtatgcaagatcttggcggttgtcgtgctatagttgataacatagagcaagtctatgctattaaagaaaaaatattatctcttacatttaaacataaattacataaagttcacgattatatatctctaacaaaagaatctggttatagaagtttacatattatccattcatttcaaaaccaaaagtattctgacttaaatggacttaaaattgaaatgcaagttagaaccgcgatccagcatagctgggcgactgcagttgaaatggttgggatatttaggagagagtcattaaagtccagtttgggtgatgctcgatggttacgtttttttattttagtatcggagttattttacagaattgaatcgaaagaccccacattaaacaaaagtcataatgtaatttcattagaattaaaattactatcacaagaacttaatgtccatagcgtactaaatgcgttcagtcaaatagctgagcacataacaaaaagtaagttatatgatagtggatattgtgttattgtagtaaatacaaacaagaaacacatttctgtaactggcttttcaaatcaaatgataaaaagagcatcagaattttatatgaaagaagaaaaaaaatgtgctgaaaacaaacaccaggttgctgcaatggtttcagtgaattctattaatgatcttaaagcggcgtaccccgcattttttttagacactaaaacattcttaaataacttaagtagatttactatataa

SEQ ID NO: 230104 - DNA, 864 bp, Klebsiella pneumoniae
atgttttctattgaaatttttagtgaagaaattagtcgaaaacgcagtgctctctccagtgagattaaagactgtgaatggcgcatgtatgcccaaattctggatgaaaagcacacatacatgcaggctgaactgactatgatgaaagagcgggcctggaactccaaaaaatttggtccgggaatattattgtattcatccacttatctgaaaaagcataggtacactgactctcataaggactttccatcaaatgagaaaagcattgagttagcaacgcttattgaacgttattggagttcattagaggctgaacttctgagggataatgttgctgtcattatccctgaatatatctctatggatgaactctttaaatttcatcttaggtatgcacagaagtgctataaatggggtgaattagttatatcagacaatgaggatgttgcatttgaagcatttaaaaaagcatctgagttatttgataaaagcatggggatggtttggtataaaacttctgtagataaacgaaataaacttttaagtatcagaaaggagtctgggcgaaaaggagggatgaaaaaagctgaagtttatggaattatccaaggaaagcttgtggagcttattaatgttttagccccagagcagggatggggaagtaaagctgctgccgtgagagttctcattgaacctttgtgggaatttgttgaggaatcagattttatgattgataaccaaagtaaaaaatatagattagcaactgctagtcaagatgctttagctgaaactatcataaaatcttggtcgcaaaataatgaaaatattaaacaagcttttgatgcgaatgtaagaaaaaaataa

SEQ ID NO: 230105 - DNA, 138 bp, Klebsiella pneumoniae; identical to SEQ ID NO: 100845

SEQ ID NO: 230106 - DNA, 1515 bp, Klebsiella pneumoniae; identical to SEQ ID NO: 100846

SEQ ID NO: 230107 - DNA, 699 bp, Klebsiella pneumoniae; identical to SEQ ID NO: 100847

SEQ ID NO: 230108 - DNA, 1056 bp, Klebsiella pneumoniae
gtggttacctacactacgaacaaccaagccgagctccgttctcgtttcgtggaactatatggcaaaagcagtgatgattttgtcgtaaaaggcctattttccttttatctggaagacttagtgagaccctaccaaaatgtcgtgttccctgagcgcatttccaccacagcgttcaccgagcataaccctcacttgaggcctggtacgaataattggtatcccaataggggagaaaaaattggtggggctctaaacccactccactatctgaccccctgcaagacaaaagcatataccggcctactagctaagctggctaccaggatcgccagctcgacaaagaatgctcctgccaagaggttgaaagatatttatcatcgggtctttttcgatgaggttcaggatttagttggttgggattacgatgttatcaaagcgctaagtaaaataatgcctgacacgatttgctgtgtcggcgatttccgtcaaactatttacactactaccttcggccataaggcaccgcaaacacctgcgcaaaagatccactattttcagaagatgaattttgagcagcgctctcttccgagaaaccgcagatgtattcaaaaaatctgcgatctgtccgatacgattcatgcaggtctctatgaaaagactctgtcagaggtggaaaatgttcctgaagagatggtccatcattacggtgccttcgtcatcataccttcacaggtgagcgattatctcgccatgttcaaacctcaggttctgcgatggtcatcatccatggggagagcctatttgccgcctgacttggcctgtcacacctttggctccagcaaaggtctcggtttcgatcgtgtcctgattatttcaccggagaaacatctcaagtatctaggcggcgacctcagggtatttgacaacgataaaactgaggagtctagaaacaagctgtacgtggctattacccgagctcgttacagcttggcgtttgtcgttgaggaagagcatctagcagatatcaaactgccacgttgggttgggctcgtgtaa

SEQ ID NO: 230109 - DNA, 1659 bp, Klebsiella pneumoniae; identical to SEQ ID NO: 100849

SEQ ID NO: 230110 - DNA, 456 bp, Klebsiella pneumoniae; identical to SEQ ID NO: 100850

SEQ ID NO: 230111 - DNA, 1101 bp, Klebsiella pneumoniae; identical to SEQ ID NO: 100851

SEQ ID NO: 230112 - DNA, 1131 bp, Klebsiella pneumoniae; identical to SEQ ID NO: 100852

SEQ ID NO: 230113 - DNA, 771 bp, Klebsiella pneumoniae; identical to SEQ ID NO: 100853

SEQ ID NO: 230114 - DNA, 1059 bp, Klebsiella pneumoniae; identical to SEQ ID NO: 100854

SEQ ID NO: 230115 - DNA, 351 bp, Klebsiella pneumoniae; identical to SEQ ID NO: 215847

SEQ ID NO: 230116 - DNA, 1263 bp, Klebsiella pneumoniae
atgttgatgcaacatgtcggagtaggctattttgggtattaccgagcaactgcttatgcgatgaaacactcccttatgcccgagattgcgaagttaagaatgaaggccctgaacttctgggataagcatggtatccgtgccgcagctgatgcttttggcgtatcaacacgaacgctctactggtggcgccagttgcttcgcaccggtggtcctcaggcgcttattccaagaagcaaagcccccctggttcgccgttcaaggcactggcaccctgatgtgatcaaggaaatcaggcgcctgagaactgagctacccaatctcggcaaagagcagatttttgtcaggctgaaggcatggtgtgaactgcgacattttacctgtcccagtacatcaaccattggaaggatcattgccggagcgcacgataaaatgcggatggttcccgttcgcctcagtgccagaggcaaagtcaggttgataaaaaaacgctcagtgaagcccagaaggcctaaacagtaccgcccggtaaaaacaggcgaactcatagggatggacgcgattgaactcagaatgggggatctgcgccgctatattattaccatgatcgacgagcacagcgactacgcgctcgccctggcagttccttcactcaacagcgatatcaccagccatttcttcagcaaggccacaaagctctttcctgttgctatcaaacaggttgttactgacaacggtaaggaattccttggaaactttgataaaacgttgcaggaagcctcgattaaacacatctggacctatccgtacacaccgaaaatgaatgcgacctgtgagcgatttaaccggacacttagagaacaatttattgaattcaatgaattgttgctttttgacgacctgaatttgtttaatcaaagaatggctgaatatctggtgctgtataacagcaaaaggccacataaatcactcgaactgatgacgccagtggactatattttacgtgagagtaaaaattgcaatatgtggtggacccatacaattttacgtgagagtaaaaattgcaatatgtggtggacccatacatctcctgtcaacgcaaagcagaagtgtcaccatcggtgcgaaacagagatgtcatgctttggttcagagaatgcgtttgaccgcctcgctatatacttccgagcgttctcttttcccaacagaaatcacgaaaacgacaactttctcgtctataacctggtatacaaggcgatagcctga

SEQ ID NO: 230117 - DNA, 1434 bp, Klebsiella pneumoniae
gtggagcgaaggagcggggccaagggaaacgcggaacagccacacatgcgccggacgcagagccgggaaagtatgtcacagaggctgtcacgcgtgcgggaagctgcgaagcagcggaagaaagaacggtttaccgcattgttccacctcctgacagcagaggcactggagaacgcattcctctccctgagcaggaaagcggctgccggagttgatggtgtcaggtggaaggactacgccgaaaacctgaaggtcaacatagcagatctgcaccggaggcttcatcagggtagttacagggctcagcccggcaggcggcactacatcccgaaagcggatggaaaacagcgcccgctcggcatcgcctcactggaggacaaaatcgtccagtatgcgctggttaagatcctgaatgcagtctacgaaaatgactttatggggttttcatacgggttcagacccgggcgaagccagcacaatgcgctggacgcactggccacagggctggttcggaccaatgtaaactgggtactggatgccgatatcagtcagttcttcgacaaggtaagccatgaatggctaatcaggttcatagaacacagaatcggcgaccagagggtaatcaggctcatacgaaagtggctcacagccgggacctcagaggaaggagaatggcgggcatcggaggaaggagaatggcgggcatcggaggaaggcaccccacagggtgcggttatctcgccgctgctggcaaacatctacctccactatgtcttcgatctgtgggcgcatcagtggcgacgccgccatgccacaggcaatgtggtcatggtcagatacgcagatgacatagtcatcgggttcgacaagcgaatcgacgctcaatgctttcgtatagccatgcagcgcagactgaaggagttcggactcacggtacatccgaagaaaacccgactgacggagttcggccgcttcgcagccgaaaaccgcgccagcaggggaaaaggtaaaccagaaacgttcaacttcctcgggttcacgcatatcagtgggaaagatcgtagtggcaggttcatgctgatacgaaagacacgccgggacaggatgacggcgacactgaaagcgatcaaggacggactacgaaagcgctggcattactcaatccccgaacagggaaaatggctcaggagagtggttcagggatacctgaactaccactcagtcccgggcaactatcccatgatgcggaagttcaggatatacgtaacagacctctggcgacgggcgctgaggcgcaggagccagcaggatgatacgacatggacgaaagcaaacagactggcagccgtatggctgccgaaggttcgggttctgcatccatggcctgtggagcggttcaccgccagacacccaaggcaggagcccggtgcgtga

SEQ ID NO: 230118 - DNA, 2724 bp, Klebsiella pneumoniae
ttgaccaagatgaataacccaaagtttacgccgccctcgggcgacaccgcgccacggcaggtctggcagcagaccgttgacgcagtgctggcgcagaccaaaagccaggccgctgggttaagttccgcagacgccgccgagcgcctgaatacctgtgggccgaacgcgctgccggaaaagaaaggcaaaccgggctggctgcgctttctcgcccactttaacgacgtactgatttacgtgctgctggccgccgcggcgctgaccgccatcatggggcactgggtcgataccctggtaatcctcggcgtgacggtgattaacgccctgatcggtcatatccaggagagcaacgccgaaaaatcgctgcaggggatccgcaacatgctctccagcgatgcccgcgtccagcgtaacggcaagcatgagactatcccgacgcgcgacctggttccgggggatatcgttatcctgcgcgccggcgaccgcgtgccggcggatatgcgcctgattgaaacccacaacctgcgggtggaagaggcgatcctcaccggcgagtcgacggtggtggataaaatcaccgacgcgctggagggcgatctgccgctgggcgaccgggtgaacatggtcttctccgggaccaccgtcagcgccggcggcggcgtcggcgtggtgaccgccaccggcgcgcagaccgaactcggccatatcaaccagatgatggcgggtattgagaagcaccgtaccccgctgctggtgcagatggataagctcggcaaagcgattttcgccattattctcgccatgatggtggcgctgtttatcttcagcctcgcgctgcgggatatcccgatgggcgagctgctgctgtcgctgattagcctggcggtagccgcggtaccggaaggactgccggcgatcatctcgattattctgtcgctcggcgtgcagacgatggcgcgcaagcgggcgattattcgtaagctgccgaccgtggaaaccctcggcgccatgaccgtggtctgctcggataaaaccggcaccctgacgatgaacgaaatgaccgtcaaagcgatcatcaccgccgactgctgctatcgggtggaaggcgacagctacgagccgcaggggcggatcttcctcgaggggagcgatgagcccgtgcaggttcagcccggcaccgtgctggagacctggctgcgcaccatcgacctgtgtaacgacagccagcttacccaggatgagcgcggtctgtgggggatcaccggcgggccgaccgaaggggcgcttaaagtgctggcggcgaaagcgcagctcccggcggtggaggcccgtctggtggcgaagatcccctttgactcgcagtacaaatatatgtcgaccctgcagcacatcgatggcgatgcccgggtgctgatcaccggtgcgccggacgttatcttcgccatgtgccgcgagcagatgagccgccacggcgcggtgccgttcgaggcgcagtactgggaagaggagatggcgcgcttcgcccgtcagggactgcggatggtggcggcggcctgtaagccggccagccttgatgccaccaccctcaaccatgaggacctgcaggagggactgattttcctcggcatcgccgggatgatggatcccccgcgtccggaagccattgacgccatccacgcctgccagaccgccggcatacgcgtgaaaatgatcaccggcgaccacccgcagacggcgatgagcatcggccagatgctggggatcaccaacagcagccaggccatgaccggctaccagctggagcacatggacgatgcggcgctggcgaaggcggcggtggagtacgacatctttgcccgtaccagcccggagcataagctgcgcctggtgaaagccctgcaggataacggcgaagtggtcggcatgaccggcgacggcgttaacgacgcgccggcgctgcgccaggccgacgtgggtatcgccatgggtatcaaaggcaccgaagtcaccaaagaggcggccgacatggtgttgaccgatgataacttcgccaccatcgccagctcggtaaaagagggccgtcgggtctatgacaacctgaagaagaccatcctcttcatcatgccgaccaacctggcgcaggggctgctgatcatcatcgccctgctggcggggaacattattccgctgaccccggtgctgatcctgtggatgaacatggcgacgtcggcgacgctctccttcggcctggcctttgaggccgcagagcgcaacgtgatgaaccgtccgccgcgtaaaaccggccagcatgtgatggatggtttcgccgtgtggcgagtggctttcgtcgggtcgatgatcgcgattgccgcctttatccttgaggcctggctggcgccgcgcggccacagtccggagtttatccgcaccgtgctgctgcagatgctggtgacggcgcagtgggtctacatgatcaactgccgcagcagcgacagcttctccctgagcatgggtctgctgcgcaacaaaggcatctggctggtgaccggcgtcctgctgctgatgcagctggtcattatctatgtcccgctgatgcagagcatgtttggtacggaagcgctgccgctgcgctactggtttgtcactctggtcatcggcgtcgccatgttcctggtggtggaaatcgagaagcgtctgacgcgccggttccgcaaaacggcctga

SEQ ID NO: 230119 - DNA, 1080 bp, Klebsiella pneumoniae
atgattaaaaccttccgctttgctctgctggcctgcggtctggtcggcggtgccctgacggcgaccgccgcgccggcggtgccggtccgcgtcgccacggttgaactggctcctcatgctgaagaacgcgctatccccgggcgggtcgaggcgatccgcgccgtcgacattcgcgcgcgcaccgaaggggtgattgttcagcgccacttccaggacggccagtatgttaccgaaggcgacctgctgtttaccctcgacgacgcgcagccccgcgcggcgctggctctggcgcaggccgagctgaaaagcgccgaagcctcattacgtcagtcgcagcagttgctcactcgctacgagcggcttatcaacaaccactccatcagccgcaacgacgtcgatacggcccggatgcagcgcgacgtcgccgccgctgccgtacagcaggccaaagcccgcgtcgaggcccagcagattgtgctcagctacactcagattgcggcgccggtgaccggtcgcgtgggccatagcgcctttcacgtcgggacgctggtcaattcgtccagcggcgtgctggtggacattgtgcagttggatccggtgcgggtctcgttcgccctcgacgaagccgcgtttttcagcaaaaccggccagcacgccgatatccacgctctgaagcaggcgtggctggcgcagattgaggttgatggtaaacggcgcgacggggtgttgacctctatcgataaccggatcgacgcccgcaccggcagcgtagcggtgcgggccgagtttgccaatccgcagcaccgtctgctgccgggcggcagcgtgacgatcctgttccgtccgcaggaactgccgtcgcgagtgatggtcccggccgccgccgtgcagcaggatccgcagggctttttcagctgggtgctgaagccggaccacaccgccgggcagcgtcgtctgaccctcgcggggcagcaggggcagcagtttgcggtcgagaaagggctgcaggcgggcgagcaggtgatcaccgacggcgcgcagcggttgcgcgaaggcgccgcggtacaggtgctgaactaa

SEQ ID NO: 230120 - DNA, 1926 bp, Klebsiella pneumoniae
gtgtcgctggtggctaactatgtctcgatgtcgggactgctggcggcgatcaccgagggactcactggctccggcctggttgcacaggacaacggcggcaccgtactgataaccgagtcggccagtccgttcacgggtggggcgatcacgtcctcttcgctgcctgcagctgttttcggtgatgctccggtttacacctccggcacggcatcaaccggcggcagcccggcggtaacggcgaatgtgacgcttgcctataacagcgccacgggaacagccttttccggcatgccggagggggtgcaaaggctttcacttgctcaccgcgggaatgagtaccgcattgtctctaccgacggcacaacggcgacggtggcgcgcctggttaatggtgccgttgatgagtcatggccgggattcaccgcccggacgatgatcgactatgaggccactggtcttaacgacacgttgagttggctggggccgttcctggtttgccctgaaaatgagaccgtcgatatgttcgaggtgaatttctccttcccgaacggcatctgtggctttgacagcaaggggaaaaagcggcttcggcatgttgagtgggagattcagtatcgcgtctacggttccggttcggggtgggtgagtcaccagggcgagtatgcgcttaaaaacgtcaatgggctgggattcactgagcggatcaccctcagctcaccagggctggtagaggttcgctgccgtcggcgcaatgagcagggctcaaacaacgcgcgagacagtatgtactggcaggcattgcgcgggcgactgctgacacgaccttcatcctatcccggcgtgtcgctgatggcggtgaccgttgagacgggtgggaagctggcggcacagtcggaccgccgcgtaaacgttgtggccacgcgcgcctatgaaaccggaacggccagaactatctcgggtgctctgctacatgtcggaaactcgctggggctggaaatggatgtcgacaccatcaatgcgctggaatcagcgtactggacgccacggggagagtatttcgattacgctaccggcgacagtatctcagcgctggaaatgctgcagaagatagccaatgccgggaagtcacgttttctgctgagtgatggcctggcgacggtcaaccgtgaggggattaagccctggactggcgtgatcactccgcatgagatggtggaggagctgcagagcggatttaccgtaccgtccgacgatgattttgacggtgtcgacgtgacgtacatcaacggcgtcacctgggcagaggagaccgttaaatgccggacgcctgataatcccacgccggtgaaaatcgagaactacaaactcgatggggtactgaatcaggatcactcctaccaaattggcatgcgtcgcctgatgaaatacctgcagcagcgggtgacgttccagaccactaccgagctggacgcgctgtgctacaacacgggcgatcgcattgtgctcacggatgatattccgggtaacaacacgatttcctgtctggtggaggcgatgacaacggctggtggcctgacaacgttcaccgttacggagccgctggactggtctttcgaaaacccccgagcgctgatccgctatcaggatggctctgcatccgggctgatggtggcgagcagggtgggtgattttcagctgtcagtcccgcacctgagcgagtttgatgacccgacgaaggttgacctgtcgtcggcaaccatcgagccgatccgcctggtgttctgcggctcaacgcgccacgtctacgacgccattgtagaggagatcgccccgcagtcagacggaacctgtcaggttaccgctaaagaatacctggaatcgttctaccagtacgacgacgctacataccccggcgacgttgcgtaa

SEQ ID NO: 230121 - DNA, 783 bp, Klebsiella pneumoniae
atgctggaaaacttactttggactgtgctaacacgtgtttttagtttgcttatattaaattttcacggtacaacgcaattaggtatttataacatctcaacaagactgacagatgctatattaaatatacttaataccgtgataggccgacttgctcttcctgttttttcatcagtacaggatgataagaagaaacttgcgagtttctttttcaacgccactaaattatttaatattgtttcaatgcctgctttcgttggtttagcattcacttgtaagtattgggttcctattgttttgggaccaaaatggattgatgcagttccaataatccaaattattgctattatgaatgctattatgttctcaagaatatttgttagccaactcatgaaggctgtaggcgaatctaaacggtttctttttttgtcttttacttcagcatttgtgactattgtcgcagctttagttacttcaaagctttcactttacgagacaatgttggtgtggtcatccatgagagtattgatcactatcccacttggactttatcttgtggataaaatagtaagtataagggcgtttgatcagttgcggcctattgttataccttttgctattacattgatgatgatatcagtgatgcttggctttaggttttttttcggaaaaatatttacctctaatatcctttcggtgtcaatcgagattgcattgggtataattacatattgttttataatttttgttttaattaaaaagaagaaaataattcttcgttga

SEQ ID NO: 230122 - DNA, 969 bp, Klebsiella pneumoniae
atggtgcctaacaaacaaatgctggaattaaaagccaatcttatttctattgttaaatatatcaacgataaaagtaacgttatcttcatagattatccattatatcataatgttggagatctactaatattccaaggtacgcaaaagttctttgaagataataatattaaagttaagttatatagatctgctcttgactacaatgttgatgagttgaagaaacatgctgaccatcaaacgacctttatttgtcaaggtggaggtaatttcggcgatttatatgatgttcatcagaatgtccgcattagtttggttactcattttaagaataatcgtattattatactaccacagactgctcacttttcgaaccctgataaattggatcttaatcggcagatttttaaacaacatccagatgttgtgctttttgccagggatgctaaaacatttgagctttttcagacattctctgataaagttcatctgatgcctgatatggctcatcaattatatggcgaacttccgatttgtgcagttaaacataatgaacctttatattttcttcgtgtcgataaagagaaaaatgatgttcaattatcatttttgaataacaataaaatacagagtatcgattgggagaatttcgtatctgctagcgattttcgttatgaatacatattggcaaaaacatcaaggtttgctaataaaataaaatcaagttttttgaaaaacgttgcatattatttttggaacaagcattcctatagggttgttaataggagtgctcgttatttttctcagtatgatttaataattacgtcccgtatgcatggtcatattttatcatgcctcttgaataggaaaagtaaaatcatcgataattcatacggtaaaaatagtggttactttcaacaatggacaaataaaacttccttaggaaccttattgcttaaggacgaatcatga

SEQ ID NO: 230123 - DNA, 759 bp, Klebsiella pneumoniae
atgccgtatctattcactcgccttaattttgaagtcccgttttccggtgcggaatatctgaatgagtctgacgtcagccgggtgatctcagcggtgactccgcagcctggcttcttcaactggttgtttggcggctcatctgccagcctgatctcttacgacggcgctcatgccatgacgcaagccgatccaacgttgaccaaaacgtacggtgacaattacgtacagttacctgccagtgcgggcacactgaaaaatggcctccagactgaatggggagataccagcatctatacctggtgtaccgtcattcagtattcaggagctgcttctcaggtgcttggtggggctacagataactcgacaggtgaagcggtgcagatttcctctgccgggggaattgtgtttgcctataaagaaagcggcacgggcacaaccaaatcgcaggccataccggtaccgcccgggctgagcgcgggagcgaatatttttatcgcagtcacgcgcagcggcagcaacctgatagttttcgttggaggtgcggctacaaaactgacactgacagcggcaaaaaacgccaatgctgccttaaaaattggccctggtaacacatcctatacaggcgcggcaggctactctaaagaactgcgctgttatgagttcctgtactctaccagcgcagtatctgccgcagatctggataatatctatgccgcggcaaaagagcgctgtgcggcgaggggaatcagcgttctgtaa

SEQ ID NO: 230124 - DNA, 1809 bp, Klebsiella pneumoniae
atggcgaaaaacgatgagatccggcagaacatcattccgctcagcaagcagtatgcgacgttggcagcggcccaggcggatatagcgaatattccggttaactccacaacctacgtgcgtagcccggacggcagtgcgctggctgacgagtacatgaatgtagccggaacgctgactgccaccgggcgcaggatgccgtcacaggcctacgttgacggtatgcagggagatatcgactcgctcaatcagatgcggattacgttatcagattcgctgagcgacacatggcgggacgaccgtgatgaaaaaacagaggtagttctggtggcggataatgcgctaaggaaacttgtcaaacttaatatcgaaaagcagaaactggttgtattcgggaatgaggttccgcgacagggcgaagtggatgaggccagggaggcaggatctgaaacctggtcatataacggaagtgatgcagacagaattatccttctggctgacagtgccggccgcattgttcgcgaattgcgattatctgagcaggcggaatacctgttcggtaaaaaggtcggcaccggtggtgacgccagttacacccccccgcaatactggcctgagtttgtggactgtcgcgcatacggacaaagtctctccatcagcctgaacgctggagctggaatactcaccccggtaacaaacgcatttatgtttgatacggggatcgtaacgtataacaaaacactcacctcactggtcaccgtacccgacacaacaacgcagcaatatcacgatactagtcttattcatcagcttgaatatgactcgcccgcgccagacagaaagtacatggctgcggcgtctggcgtgagtggttattccatggctcagctcgaaccagggactgaaccttacacccagctcatgtccagcatagataaagcggcacagcttgcagcatcggctggctatcagtacgggttaccagttctgacattcttccagggggaggcggatgcgtatctcggtagttcttactcttactaccgtagcaaaatggttttgatgcagtcctcaatcaacgacaaagccaagagtgtttcgcgcgcaacctctgatatgccgatgattatttatcagatggcgtctcagggacgatatcagggattagtcaacccgagctctgatatcccgcgcgctcagctcgatgaggcaatcagtaacccgctgattcagttgtgcaccccaatgtatattttcccttatacagacggcgttcatcttactaatcatggctatcgctggcttggccttttccgcgccaaggcgatccgatactggatggagaacggaaaaccgtggaagcctctgtatccgatcgacatttataaagttggctcaaataccgtggtggcggcgtttcatgtcccggttggcggccttcagttcaggactgacattgtccccgaacacccgtccggagcaaagggttttgaactctggcaggatgatggagccggtaatgtcacgcggctgacaatctcttcagtgcagattgttggtccggacaaagtcaaagttaccacggcctctacattcacgggcactgtttatctggcctatggctggaccccgttaaaccgcggtgcatccgatggtgatggccgctatccgtcatggaacgccggagtcaacagcggtatctgtggaaatctctgtgactcagacaactcaaccactgatctgcatgatgcagctggcaatgcgtaccagctgaagaactattgctgctgcttttataaggaagccatctga

SEQ ID NO: 230125 - DNA, 273 bp, Klebsiella pneumoniae
atgccaaccatcgtcgccaccagcatcccgctgaataccgtggtgccgatgatccgccggctctgcgccccggcgccggtggcgagcatcatcggcatgataccgataataaacgacaccgcggtcatcattaccgcgcggaagcggcgggtagccccctctcgcgcagcgtcgactatcgacagcccctcctcgcgccggctgcgggcgaactcaacgatcagaatcgcattcttcgccgccagggcgatcagcagcaccagccctatctga

SEQ ID NO: 230126 - DNA, 894 bp, Klebsiella pneumoniae
atgagaaaattaatcgtagttgcttcagttgccgccagtttactgctcgggtgcgaccagaagagtactggcaagcgtgaaaccttgtctgaagcgcttgttgctaagtcgctttctaacatggttcccgttaagggcggcgagttcttaatgggggattttggcccattagtcggtcaaaaactacctttcagcataaaccaggatgataaggtattacataaggttgtattaagtgatttttcgatatcaaagtttaaagttaccaacgatgattataataaatatctgcagataacaggaataaaaaaacctcccattaatattctggtaaaagagtacccatccttgcaaaaaggtgattactctgttggtgtgacctggcaacaggcaaaagactattgtcagtggttaggtaaggagtctggtaaaaaatttgatttaccaacagaagcacaatgggaatatgcggcaaggtcaagagggcagtatcttcctttttcgactaataatggaaatttcgagcttggttctaatatacctgaacaaaagaaattagatgaatacacagatggttatggttttcctatttatccaattgggaaatatcctccgaatccgctaggtttatacgatatggggctaagtggagccgaatggagtaatgattggtattcaactgattattattcccactcccctgtttatgatcctcaaggtccagttaagggtaatgaaaaagttttaagggggtatgttgacggagatcgtcagtatgccttgactatattcaggcaatcgtcacaacctgtgccaaaatttgctgggcgtgatgattatcaaaagtttggagttagtcctctttttgtatttcgttgcgttattaataaataa

SEQ ID NO: 230127 - DNA, 1311 bp, Klebsiella pneumoniae
atgctgcaggaaaccatcacccgactctcgggccttgaaatccatgaaccgatggtcatctgtaacgaagagcaccgcttcctggtggccgaacagctgcgccagctcaacaagctgtcgaacaacattattcttgagccggtcgggcgcaacaccgccccggccatcgccctggcggcccttcaggccacccgccacggcgatgacccgctgatgctggtcctcgccgccgaccatatcatcaataaccagccggtcttccacgacgccatccgcgtcgccgagcagtatgccgatgaaggccatctggtcaccttcggtatcgtgccgaacgctccggaaaccggctacggctacatccagcgcggcgtggccctcaccgacagcgcccacaccccgtaccaggtggcccgcttcgtggagaagccggaccgcgagcgcgccgaggcctacctcgcctccggggagtactactggaacagcggcatgtttatgttccgcgccaaaaaatacctctccgagctggccaaattccgcccggatatcctcgaggcctgccaggccgcggtcagtgccgccgacaacggcagcgactttatcagcattccgcatgacattttctgcgagtgcccggacgagtccgtggactacgcggtgatggagaaaaccgccgacgcggtggtggtcggtctcgatgccgactggagcgacgtcggctcctggtccgccctgtgggaggtcagcccgaaagatgagcagggcaacgtcctcagcggcgacgcgtgggtgcacaacagcgaaaactgctacatcaacagcgacgagaagctggtggcggctatcggcgtggagaacctggtgattgtcagcaccaaggacgccgtgctggtgatgaaccgtgagcgttcccaggacgtgaagaaggcggtcgagttcctcaagcagaaccagcgcagcgagtacaagcgccaccgcgagatttaccgtccctggggccgctgcgacgtggtggtccagaccccgcgcttcaacgtcaaccgcatcaccgtgaaaccgggcggcgccttctcgatgcagatgcaccaccaccgcgccgagcactgggtcattctcgccggcaccggccaggtgacggtcaacggcaagcagttcctgctgaccgagaaccagtccacctttattccgattggcgccgagcacagcctggaaaacccgggccgcattccgctggaagtgctggagatccagtcggggtcgtacctcggcgaggacgacattattcgtattaaagaccagtatggtcgttgctaa

SEQ ID NO: 230128 - DNA, 1533 bp, Klebsiella pneumoniae
atgcattcatacgaggaccggattcgggccgtcaaactctattaccggtacggaaagaaagcctccgttgtcgtcatggagctgggatatccttccacaaaacagctgggccgttgggttcggatttatgaagagaagggcgatttacccagggaattaaaaccaagagaacgctattcacgtacacagaaaattgctgctgttgagcattatcttactcacggtggttgcctgtcgtacactcgccgagccatcggctaccccagtaacgaaattctaaagcgctggattgaagagttttacccaaatgcgcgtcccctggtcattcgctcaggcacaagcaaatgcttcagcccggaagagaggtctcaggccgtccgggagctctgtaaccgacgtggaaccgcgcgtaaagttgcacaaagcataggcgtcagcgtcccggtcctgtacaaatggaagaaagaccttatcagtgacgaggcttatcaatccatgcgcaaacgaaagtcagcccctcaggataaaaatcaggatgctttactcggtgaaatccagcgtctcaggaagcaggttcatcagctgcagctcgaacgtgacatactgacaaaggcgaatgaactgataaaaaaagatctgggcgtcagctttctgaaactgaaaaacagggagaaaaccctgatagttgatgcccttaagaaaaagtaccccgttgctgagttgctaagcgttctgcaacttgcccgcagctgttatttttaccacaaagccagcaaacgtctgtacgataagtatgcggaaatacgcgtgatcatggccgatatctttgaggagaattaccgctgttacggctaccggcgccttcacgcgatgcttcgcagtaacaacagagttatttctgaaaaggttgtccgcagactgatggcagaagagcagctcgttgttaagcgcaccaggcgacgacgatataactcttactgtggcgaaatcggtccggcaccggaaaatttactcgcccgggattttagttcctgcaggccaaatgagaagtggctgaccgatattacggagttccagcttccggctggaaaagtctatctgtcgccggttatcgactgctttgatggccaggttgtaagctggtcgataggaacacgcccggacgcgacgctggtgaatacgatgctcgatgacgcactcgatacgctcagcgaacatgataaaccggtgatacacagcgatcgtggtggccattaccggtggccgggctggcttgagcgtatcaacacctccggacttataaggtccatgtcgcgcaaaggatgctcgtcggataatgctgcgtgtgaaggcttcttcgggcgtatcaaaaacgaaatgttctatggcagagactgggcgggtatcacgctggaaaaatttatctgcttcctggacaggtacatacgctggtataatgagaaacgtatcaagctatcattaggtgcaatgagtcctgtgaagtaccggcagcatcttgggatcacaacataa

SEQ ID NO: 230129 - DNA, 252 bp, Klebsiella pneumoniae; identical to SEQ ID NO: 225090

SEQ ID NO: 230130 - DNA, 495 bp, Klebsiella pneumoniae
atggaggctgaaattcatcctgaaactaaaaacaaagagctagatacatcaactgacggctttggaaaaaatgatattacggaagactcagcagtccagaaaaaaatgataaaaaagactgtgggagcatacggcaaaaaggaactgcatcgtgtgttgaaaccaattctgacgctcatttttatcttgctttcaataattactataataactatattaacccgcgagagaaatgaagaaccaaaaccattaggcacaatgaataaatgcaagatttatgcgttgggagatgactttccggaccctgaattgttttctcatgcgcgaataatgctctctgatatagagatagattgtactcaggaaaatcgtgacatcttctttatggagtcactttctgccaatggattacgaaagacttcttttatggtagtttgtacaaaaaattccgagatgaactataaagcctgtcaaaattataaacggattgattaa

SEQ ID NO: 230131 - DNA, 1089 bp, Klebsiella pneumoniae
gtgataaaagagtttattgaaatttttccggacgctgatttatactcaatagttgattttttatcagacaaagatcgctccctttttaaaaataaaaaagctacaactagttttattcaaaagttacctagttcaaagtcaaagtatcacaaatatttaccattaatgcctttggcaattgagcaacttgatgtttcaaagcatgatgttgtactttcaagttgtcatgccgtatcgaaaggagtaattactggccctgatcagttacatatatgctatgtacattcaccgatacgttatgcatgggatttacaacatcaataccttaaagaagctggtttggataaaggactaaaaggattgttagcgaaatggtttttgcataaaattcgtatttgggattataggacagcaaatggtgtagaccattttatcgctaactctcattttattgctaggcgtattaaaaaagtatatggacgtagttctactgtaatatatccaccagttgatataaatcgattcacattatgtgataagaaagaggactattatttaactgcttcacggatggtaccttataagagaatggatcttattgttgaagctttcagcaagatgccggagaaacaacttgtagtaataggagatggatcggaaatggacaaaattaaatctaaagctacaaacaatataaaaatattaggctatcaatcgaataaagtcatgcaagaatatatgcaaaaggctaaagcatttgtttttgctgctgaagaagatttcggaataactcctgtcgaagcacaagcctgtggcactcctgttatagctttcggaaaaggaggagcgttggagacaattcggccatatggcgttgaaaagccgacaggtattttctttgctaagcaagaagcttcttctttaattgatgctgtaattttatttgagtcaaaattgcaggcttttgatcctgttaattgtcgtgaaaatgcattacgattttcggtggaacgatttcaaaatgaaatttcagaattcatcgatgccaaatggaaacaattccatgattacaaagaagtcgtttattaa

SEQ ID NO: 230132 - DNA, 624 bp, Klebsiella pneumoniae
gtgaggcatgctggaggtatcagaagtgcgaaaaaaataattgttgtcggtaatggtgtctcgaaagagttttcaactgatagtaaacctcatcaaccaggctacaaatatatatttgttgttggaaatagaaaacagcataaaaatgaagaaagagctttacttggatttattaatgctcaaatcgacaaggatgtaaaaatagtatttagcggggatccatccactacacttattgacctagcaaaaagaaataatgcggaatctagagttattttttcgggccgactttctaatactaaacttgctgagtattataaaggtgcggaatttctattatttccatctttatatgagggattcggtttgcctgtcattgaatccatggcatgtggaacgcctgttataacttcagacaacacatcattgggtgaggtagcaggggatgcagcttacttagttaatccaaatgatcaagagcacataacaaaagctatagaggaattatataagaatgaaaaattacgtgttgagcttaagaaaaaagggatcaaaagagctcaaattttttcgtggcaagaaactatagctaaagttgaatcttcattaaaatctcttccatag

SEQ ID NO: 230133 - DNA, 162 bp, Klebsiella pneumoniae
atgatgaatggatatgtgttcttgaagatgatgttattattgacaaacagttttctatttttattaaacaaatggatttttcggatcttaagccaggtgctctttatcttttgggagggcaagatggccttaataaccgtcataaagttgtgcgcgcaataa

SEQ ID NO: 230134 - DNA, 573 bp, Klebsiella pneumoniae
gtgaaccatttaatgatcgacctcgaaactatgggcaataaacctgctgcaccaatcgtcgcgatcggcgctgtattcttcgccccgaaaagcagtgagttgggcgcagagttttatatggccgttaacctcgccagtgctatggatcagggcgcgacacctgacggtgatactatcctgtggtggctcaaacaatcatcagaggcccgagcagctatttgtactgacgataccagaagcattgcatttgctctctctgagttgagttcatttatcagccgtcactctgacaacccacgatatctgaaagtctggggtaatggttctaactttgacaatgtgattttacgctcagcctacgaccgcgccggccaaacctgcccgtggcaattctggaacgactgcgacgtgcgcaccatggtgttgctcggcaaacaacttggtttcgaccctaagcgcaagatgccatttgatggtgtagcccacgatgcactggccgatgctcgccaccaggcaaaatacgtgtccgcaatctggcaaaagcttattcccgccaccagcaccgaagaataa

SEQ ID NO: 230135 - DNA, 627 bp, Klebsiella pneumoniae
atggaaacggttggtcagcgcattaaagccctacgcagggttacaaaaacctctcaaaaagaacttggtaagttctgcggggttagtgacgtagcggtgggttattgggaaaaggatgtgaatatcccaaacggagaatcgctggttaagctggctaaattcttcaatacatcaatagattacattctttacggcactgaatttgaaggtaccctcataactaaaatgaggcgtgtgcccgtgatttcctgggttcaagctgggcagtttacggaatgtaaggccgctgatttattcagtgatgttgataaatgggttgaaacatcactacgcattggggatagctcgttcgctttagaggtcaaaggggattcaatgaccaatccaaatggcctcccaacaatccctgaaggggcaaccgttattgttgatccagatgccgaacctcttcatggcaagattgttgttgcgcgtattgatggcactaacgaagcgactgttaaaaaactggtcattgatggcccacaaaaatttttagtcccactaaatcctcgctaccccaacatcccgatcaatggtaactgcctcattattggcgtagttaaaggcgttcagtacgaactctaa

SEQ ID NO: 230136 - DNA, 216 bp, Klebsiella pneumoniae; identical to SEQ ID NO: 199787

SEQ ID NO: 230137 - DNA, 795 bp, Klebsiella pneumoniae
atgacgcagcagatcaataatccattcaaaaaggcgataactcctgcggttattaacggcattgtcacaatgagtagccgtgaaatagctgagctaacaggaaaaaaacacggccatgtcttgagggatattcgagcatacataggagcaattcttcaaatcgaagaaggaatggaacctcgaagccttgaatggtcggatcaagggggtatgcaagttgttggagacacccctgttggcggcgttactctttcggaagaaacgaactggcagaatggtcagcgctatcctgtttatcttttggataagtcagcaacgttaaccattatcgctggttacaacattgcattaagaaaacggatcattgatcgctggcaagagctggaagaattatcagctaggccgctcgtacctcaaaccttggctgaagccctgcgtctggctgccgatatggcagaacagaatgccgctctggaagacaaagtgcagcaggacgcgccaaaagtggctttcgttaaccactacgttgaagccggcggcgccaaaagtctgcgtgaaaccgcaaaaatcctgaacatgccggaaaaggccatgatcgacacgctactgcgtgacaaggtgctgttccgtcagtccggtaacttgctacctcatgccctgcgtcagcgcgaaggcctgtttaccgtcaaaacgggtacatctgattatggccatgcctacacccaaacccgagtaactccccgcggcgtccagtggatagcacagcgttacgcctctgaactgatgggaggttga

SEQ ID NO: 230138 - DNA, 180 bp, Klebsiella pneumoniae
atggaagagaatattcaaccaatggaccgtctttatcgcgaccaacacggcattgttgtgcatgtaactggctatgacgctgcccgccagcgtgtgatttaccgccgcccgggatatgagtgggagtgtgttgctccgatgattatcttccgtgccagattcaagaggattgataagtga

SEQ ID NO: 230139 - DNA, 1050 bp, Klebsiella pneumoniae
gtgagcgtcaaattatccgcatatgtctgggatggttgcgccgctgcaggcatcaaaggcaataagttattgatcatgctgcgtttggctgactatgccagcgatgagggcatcgcatatccaagcgttgcgacgattgcgcgccagctcggcgccgggcgcagtaccgttatcactttgatcggtgagctggttaaagatggctggctgaccaaaaaagaacgtcgcttgggacagcgtagcaccagcaacctttacaccctgaatgttaccaagcttcgtcaggctgcaaatgaacattatgagggtccaaaatctggacgttcagaatctgaaccttcggattctggacgtccaggatctgaacgtccgaaagagccaaaaaatcagggttctcagggtccagaaactggacacgatccgtcagtaaattcaaatacagatccatcagtaggatctaaaccttcttgtccggttcctgcggaaccagacccgcaagtggttctcactgatttagcgaaacaggttctttcacatttgaaccaaacaacaggatcccgcttccaggtttgtgctacgtcgctagaacacatcagggctcgcctccgcgaaggctttactgttgcggaaatggcgctggtggtggattacaaaaacgaggactggaaagactcagagcaggaggaatatctccgtccaacaaccctattcatcccgaaaaattttcctggctatctcaagcgcgctggaaattgggacaaggcagggcgcccggcgaagaaaaacggtaagtgggagaagggagccaattcatccaccagcgccagttttaaccaggatgcaggtgtcgatattgccgaacgtgatcttgcctggcgtcggtaccacggccttgaaactgataacgagccgcagagcaaaatcgaggtaaaggttcgcgagaaggccgatcgcgatgggctgaaagcaaaggggcatgaccacggtttggctcagtttggatggaacaatatctggtctgtagtggccaagaacggaggggaggcatga

SEQ ID NO: 230140 - DNA, 891 bp, Klebsiella pneumoniae
atgaatcttagtccttacagtcaggcactggcgcagcttcgcgcccaggaatcacattatttgaaagaagttggcgatcaatggcggacgccggatctgctgttctggggcattaacgctatgtttggtccgctggtgctggacctgtttgccgacgacagcaacgcaaaatgcccagcatggtacacagctgaagataacgcattgacaaaggactggtctggtcggctggcggaactcggcggcgcggcctttgctaacccgccgtacagccgctcacagtaccatgaaaaacaagccatcactggcatgacgcacatcatgagttatgcgtctcagcagcgtgaaaacggcggtcgctacgttttcctggtgaagtcagcaacgagtgagacatggtggcctgaagatgccgatcacgtctgttttatccgtggtcgcattggcttcgatctgccgacctggtttgtgccggcggatgataaacagaaacccaccagcgccttctttgctggcgcgatagtgatattcgataaatcttggcgcggtgagcgttttagctatatcgatcgtgtcgagctggaagcgaaagggcgggccagtatggcgctggcgcagtttgctgtaggtctggtatctccggcccaggatgtggcaccaactccagctgttacacctgtatctgaacctgtcatggaatctcgcatctggccgctggaagtcaatctggcattcggacaggtagacggcgccgccgaactggaagagccgcaacagaacaaactgaaatcccacatcaaccagttatggctggagcgtacatcaatcagcgagatcatcaccattgccagtgggctggtcagcagtatgcagggagcggtccatgcgtga

SEQ ID NO: 230141 - DNA, 1728 bp, Klebsiella pneumoniae
atgcgtgaaattatcgttgataactttgctggtggcggcggtgcctctaccgggatcgaactggcgattggtcgcagtgttgatattgccatcaatcacgatgaaaacgccattgccatgcacaagacgaaccacccggatacgctgcattactgcgagtccgtatttgatgtagacccggtggcggcgactggcggcaaccctgttggtctcgcatggtttagccctgattgccggcacttctccaaagccaagggtgctaagcccgtaaaaaaagagattcgagggctggcgtgggtagtcgttcgctgggcgctggcgaagcgtccgcgcgtcatgatgcttgagaacgtcgaggaatttaaaacctgggggccgctgctggaagatgagatgcgcccggatccagcgcgtacaggtgaaacatttgctgcatttgtcggaatgctttcgactggcattaatgcgaatcatccggcgttggcggaggtgtgcgagtttctttccattcagcccgatagcgagcaagcccggtctttgattcaggggctgggataccacatcgattaccgcgagttgcgcgcttgcgacttcggggcgccaacaatccgcaaacgcttctttatggtcatgcgctgcgacggtgaaatcgtacgctggccagcccccacccacggggatccgaaatcactggaagtgcagagcggcagactggcgccatggcgaactgcagcagagtgcattgactggtcgttgccctgtccgagcatctttgaacgtgctaaaccattggcggagaatacgcttaaacgcattgcgcgcggtatcgagcgttttgtgctgaataacccggcgccatttatcgtcaagtgcaaccacaccagcacccggacctcgtacgattgttttaggggtcaggaacttgacgtgccgctgcagactatcaccaaaacccacggttacgccgtcgttactccttttctgtctggtaatggggggagtgaatatcaggctaaaccccgtccgatgggtaagccagcacacaccgttctgaaagaatcccgatcctgcgttgttgctcccgtcattgcgcgtcagtttggcgccagcaccgggcaccgcgccgacgaaccaaacggcaccgtcaccgctggtggtggtgggaaatctcagctggtcaccgcgtttctggcgaagcactttggtgggaactacaccggaccaggggctgcgatggacgcgccagcccatacggtgacaacaacggatcaccatgctgtcgtgacctcgcatcttgttcatcttcgcggtacctgcaaagacggccgcaaagtggatcagcctgtaccgacggtcacggctggcggtctgcatctcggagaagtccgtgctttcctgatgaaatattacggcaacgaaaagggcggagtttcactgtcggagccgctggggacggtgacaaccaacgatcgatttggcctggttaccgttgatggtgatgattatcagattgtggatatcggtatgcgcatgctgcagccgcatgagctataccgggcgcagggtttcccggctggttacatcatcgatcgcgattatcgtggcaaccgttacgcaaaagacaagcaggtggcacgctgcggtaacgcagttcctcctcctttcgccgaggcattagtgagagcgaatctccccgaaatgtgtaacgtccaaagggaggtcgcatga

SEQ ID NO: 230142 - DNA, 1062 bp, Klebsiella pneumoniae; identical to SEQ ID NO: 199790

SEQ ID NO: 230143 - DNA, 699 bp, Klebsiella pneumoniae
atgaatctacaaaatctggaatatacccgtattgaagttcgtcgagcgttgttggatttatccggcgcaacaaagggacaactcgaggcattcagcgagaacccaccagcagataagaataaaaatccacggcgcgccagccacatggtcgatcttgaaggggggattggctgcggcccgtctgtagttaaagctctgaccactcctgttcatgtgatggagactcgcagccgccgccggccgatgccacccatcaatgatatcgagtttggttattcaccgtggcgccgggctgtgaacctgctggaagagcaccaccaggcatgggtgcgctattgttatggcttcgaccttaactttcggtaccagacgataatgtgccaacacatctggactgaataccagaactatcaggtaggcagggcgatccaatcgagagttatcaaaaagctggtggggctggtctggttggctgcccaggaggttgccgcgacacggaataatgagacttataaagcctacgctggcgcagcactggcgcgtatggtttccgttgatcgttcgacatggaaaagagtgtatgccggtcattgggatcggcttaaaaaggctttcgttgagatggatagcaacgcattgcaacacatctacagccatcatgaacaaatagaagaggccagaactgaaaaatgtgattaa

SEQ ID NO: 230144 - DNA, 192 bp, Klebsiella pneumoniae
atgctaaatcaatatgatatgacggaagtggcgcgcgcggttttcaatgagttaagtgatgaaccagctacggttggggagatttcgcaaaacacgcatctgacgcgtgagcgctgtcagttaattttaacgcagctggtaatggcgggtttatctgactatcaattcggatgttacaagcgcctcccttaa

SEQ ID NO: 230145 - DNA, 1050 bp, Klebsiella pneumoniae
atgaaaaatactgtaaaaatatccagtgctgaattaatcaacgctgattgcctgcaatatcttccgtccctccctgataactccattgacttgatagttacggatccgccgtattttaaggttaagccgaacggttgggacaaccaatggaaaggggatgaggactatttacgttggcttgatatgtgtctggcgcagttctggcgtgttttaaagccgaacggtagcctttacctgttctctggtcatcggcttgcctcagatatcgaaattttagtgcggagtcggtttaacgtactgaatcacatcatctgggcgaagccatcaggacggtggaatggctgcaataaagagagtttacggtcctattttccagctacagagcgaatattgtttgctgagcattatcagggaccgtatcaaccaaaagatgatgggtatgcggaaaaaagtaacgaccttaagcagcatttgatggcgccgcttatatcttatttccgtaatgctcgagattcgcttggcgttagtgctaagcagatagctgacgctaccggcaaaaagaacatggtgtcgcactggttcggcattagccaatggcagctgccaaacgaaagcgactatttaaaactgcaggcgctattttcaaagatcgccgcagagaagcaccagaagaacgagctggcccaccctcaccatgagttagtagcaacctggcattctctgaaccgcaaatattcagaattgctggaggaatacaaatccctccggcgtcaattcgccgttacggcgcttgttccctatacggacgtttggacgcataagccggttcagttctatcccggtaagcatccatgcgaaaaacccgcagatatgctccagcagatcatcaatgccagtagtaaacctggtgatctcattgctgatttctttatgggatccgggtcaactatcaaggaagcaattaagtctggccggcatgccataggggttgagctggaaggcgaacggttcgagcaaactgttgacgagatccgcaaaatggctggctga

SEQ ID NO: 230146 - DNA, 411 bp, Klebsiella pneumoniae; identical to SEQ ID NO: 199791

SEQ ID NO: 230147 - DNA, 255 bp, Klebsiella pneumoniae
atgaacaaaatcatgcctgacaaaatcttttcagcggctacgtactgcacgtcaggcggcctgatttgtactggcctggcgcgtgtttatgactggttccatggtcttgactggaacttcattgcgcttgtcagtggtgtagtgatcggcgtcgccacttatttcacgaacctttatttcaaacgtcggcaaaccaaagcctatgaggatgcgctcaggcgggggtatgtcacgcaaccgccgcaggataaataa

SEQ ID NO: 230148 - DNA, 507 bp, Klebsiella pneumoniae; identical to SEQ ID NO: 199795

SEQ ID NO: 230149 - DNA, 1932 bp, Klebsiella pneumoniae; identical to SEQ ID NO: 199796

SEQ ID NO: 230150 - DNA, 207 bp, Klebsiella pneumoniae; identical to SEQ ID NO: 199797

SEQ ID NO: 230151 - DNA, 1488 bp, Klebsiella pneumoniae; identical to SEQ ID NO: 199798

SEQ ID NO: 230152 - DNA, 1494 bp, Klebsiella pneumoniae; identical to SEQ ID NO: 199799

SEQ ID NO: 230153 - DNA, 339 bp, Klebsiella pneumoniae; identical to SEQ ID NO: 199800

SEQ ID NO: 230154 - DNA, 1029 bp, Klebsiella pneumoniae
atgggattgtttaccacccgccagctgctgggttacaccgagcagaaagttaagtttaacccgctttttctgaccctgtttttccgccgtaccgtgaacttccacactgaagaggtcatgctggacaaaatcacgggtaaaacacctattgccgcctatgtgtccccggttgttgaagggaaagtgctacgccagcgtggcggtgaaacacgtgtactgcgtcccggctacgtcaagccgaaacatgagtttaattaccagcaggcgattgaacgtctcccgggtgaagatcccgctcaactgaatgacccgctgtatcgccgcctgcgtatcctgactgacaacctcaaacaggaagagcacgccattgtgcaggtggaggaaatgcaggcggtgaatgcggttctctatggcaaatatgtgatggaaggggagcagttcgagaaaatcgaagtggactttggtcgctcggcttccaacaacattatccaggcccccggggcgacctggtcagagcaggatcgtgagaccttcgaccctacccacgatattgatatgtactgcgatcagtcttccggtcttatcaatattgctgtcatggacggctcggtgtggcgtctcctgaacggcttcaagatgttccgcgaaaaactggatacccgccgcggctccacctcccagctggaaaccgcgctcaaggatttggggtctctggtgtctttcaaaggctactacggcgatctggccatcgtggtggcgaaaacggcgtatgtggacaaagacggtaccgaaaaacgctatcttccggagggcacgctggtgctggggaacaccgcttctgaggggatccgttgttatggtgcgattcaggatgcacaggcgcttgctgaaggtattgtgtccgcatcgcgttacccgaagcactggatgactgtgggagatcctgcgcgagagttcacgatgatccagtccgccccgctgatggtgcttccttccccggatgaattcgtggtggtcacgatcaagtaa

SEQ ID NO: 230155 - DNA, 375 bp, Klebsiella pneumoniae; identical to SEQ ID NO: 199802

SEQ ID NO: 230156 - DNA, 354 bp, Klebsiella pneumoniae; identical to SEQ ID NO: 199803

SEQ ID NO: 230157 - DNA, 585 bp, Klebsiella pneumoniae
atgggtattaaggggctggagcaagttattgcaaacctgaacagccttgatcgcaacatggtgcctaaggccagcgcctgggcaatcaaccgcgtcgccagaacggccgttaccgccgcgacccgaaaagtggctaacgaaacggtagcgggtgataaccacgtgaaaggtctcccggtcaggctggttaaacagcgggtcagagtcagtaaagcatcctctactggccggatgaacgccaggataaaggtcaaccgggggaacttaccggcaatcaagcttggcgccgcgcaagtccgcttaaccagaaagaaaggggcgcttctgcggagaggcagtgtcctgaaaatcgggaaatatcttttcagggacgctttcattcagcaattagccaacggtcgctggcatgtcatgaggcgtattgccgggaaaaatcgctaccccattgatgttgtgaaaatcccactgtctgcaccgcttaccactgctttcgaagcggagaagaaacgcatgcttgatgtggagatgccaaagcaactggccgctgcgctcaggcaacaactgaggttacacctgaaacgatga

SEQ ID NO: 230158 - DNA, 399 bp, Klebsiella pneumoniae
atgaaacataccgaaatacgccaggccgtgatcgagggtctggaaagcgtgatagggaacagcgccattttttttgatggtcgtccggctgtcattgaggaagaagatttccctgctgtggcggtttatctgacggatgccgaatacaccggggaggatctggatgcggatacctggcaggccactttacatatcgaagttttccttcctgctcaggtacctgattcccaacttgatgagtggatggaaaaccgtgtttacccggcaatctcaggcatctccgcgctgaatgggctgattaccgtgatggtgcaacaggggtatgaataccagagggatgacagcctcgggctctggagttccgcagatatgaaatattcaattacttatgacatgtga

SEQ ID NO: 230159 - DNA, 423 bp, Klebsiella pneumoniae; identical to SEQ ID NO: 199804

SEQ ID NO: 230160 - DNA, 3171 bp, Klebsiella pneumoniae
atggcccagcagattagcgaccttgttattaacctcgatgttgacagcgccacgtttacggagcaggtcgcgcggattaagaatcagctgtcagggctgggcgatgaagcggaaaaagttcagactcgccagcaacgagcagaggctgcgctggccacggcggcggcgaatcgcgctgccgcgatgtctgatatgcagtcccgccagtcagcggcagcggcagggcttagttcggaaatgcagcgggtcagtgaatccgtagaagaaacgcagcagcgcgtggcggggttcagccagcaacttcgggataatgctgcccgggctgccgtactggcccggcagcaggatgcactggcggagtcgttctttcgtcagattgacggcgttcgttcactgagtggggccacggattccttaacggcggttcaggagcagttcaggaaggcgcgcgtgcaggggaacatcacgcagcaggattatctggcgctgatatcccagaccacggcccggcagaaggaattacagcgggctgaagaaaaagccagtcagtcgcgggcccgcttcctggaacagcttaaatcgcaggttgaagagcagggactatcccgcaccgaattactgaacctgaaagcggcacaactcggtgtgactgaacaagccgcgccactgattgcccggttaaaagaacaggatagcgaatggaaaaaagggacgctcagcgccggacagtatcgccaggcactccggatgttacctgcccagtttacggatatcgccacctcaattgccggcggaatgccgctgtggatggtcctcatgcagcagggaggccaaatcagcgattcgtttggggggatcggcaatatcttcgagatcctcaaagaggaactactgggcgtcaaaacttctgctgatgagtccgaagcgtcgctgtcggaaaatgccaatgccctttctgagaatgcggagcatgccaaagggttactgcgctttcttacgcctggccggatcatcgttggcggttttgccacggcactgaccgcggtatcggttgccgcctggcaggcagagcaggcaaaccgatcgctgtaccgcgccatcacgataaccggtggaacgtcggcaaccaccacggctcagctgtggaaaatggcggatgaaataggggacagcaccaacgccagcacagcatcagtggcggaggtccttgcccggatcgccgggacggggaaatacagcacagagcagttgcgcatcgtggctaaaacctcgcagcaatggtcgcaggtcatggaggatgatgccgccagaattgaagctgcgtttggctcaatcgccaaaagtccggtcaaagcgctggctgaactgaacaaagagtacaatttcctcagtgttgcccagttacgccatattgacgaattagagcgtacaaagggtaaacaggccgccgttactgaggggatgaaactgtttgcggacaccatgggtgaacgcatgcagcagattgataatgccagcacacctctggagcagatgtgggacaacatcaaaaaatggacggcggatgcgtggcggtgggtgggtgaccataccattggtgcactgaacctgattactgacgtggttgccggtacggttgagcaggtcaggtatctacttaacagtggcgatacagccattcgcgaatttgtgctcagtgcacaaaaggccgcacaaaaaataccggggatgggggatgttggtaaggatgcgattaagcagaaccaggaatatattgaagccaacaagaaacagaatgcggaattactgaaatccattgctgaacgtgacgcccggatccgtcagggggaaatgggatacgtaacccgtgcacgggatgccagggtggccgccgggccgggccagcaggatgcggtgtcgaaagcggccgatgagattgagaaaaaccgtcgaaagaaaggccagacgcgtacgtctgcaggcgtcagtgctgttgactcagcacgggaagaactgctggtgttgcaggcgcagttacgcacactacagcttcataaaggactgaacgacaccatcagtcagcagcgaaaagacctctggaccacggaagcaaaatttcaggttctggaagaagccgcccggacccggtccctgacgaagcaggaaaaatccctgctgtcgggtaaggcgcaggttctgcaactggcacggcaaaaggcgctgctgggcgatcagattgttgcacaggaacagctgaataagcgcatggatacggcgcaaaaatacgtcactcagatggcagaaaagcagcaggctctggtgggtggagccaccctcagtgaccgtatggcccagaggcaactggcaaaagcccagctcgctgccggctggaaaaatggcggcggctctcttgatgatgccggataccggcagcaacttcaggctgcgaataattattacgaagcggaggatcagcttcgtggtaactggctgagtggcgtggaaaaggggtgggctgaatatcaggactcggcgacgaacgtttatgacgccatgaaacaggtttcacagtcaacattcagcgggctggccgatcagctcacccaactgaccaccaccggcaaagcgagctttaaggagttcacgtcatccatactgaagatgattgttcaggtcatcaatcagctgatcgtggcctatacccttcaggcggccatggggtggatcagcggcgattccagcgcctcaaagtctggtcagtcgtttgcggttccgtcgtatcgcccacccaattatgatgtcggcggttttaccgggcatggtggtaagtatgagcccgcaggcgttgtccaccgcggcgagttcgtattcaccaaagaggcaaccagccgcatcggcgtgagcaacctttaccggatgatgcgcggttatgcctccggcgggtatgtcggcaacgctgccagtccggcgagtgtgtctcctggcggtgtgatggtcaacatgggcggcgtctatatcagtagcagcaacgaacagcagtctacgcagcggtcagcaattgacagtaacgggatcctcaagcagctgaaacccgccatcattagtgtcgtcagtgaacaggcccaacggcccggcacgccactctggaaggcaataaaagaagggcgttaa

SEQ ID NO: 230161 - DNA, 1203 bp, Klebsiella pneumoniae
atggctgaccgcgccggtggcgaaatcagactgcagctgggtatcgacggtgaaggtgttcaggtgctcgtcggagcgcacgtaggcgcgattcatgtagcccggcgcgacatagccgttgccgtataccgaacgatagagcgtatgcacatcggcatagcgcaggttctgccgcacggtaaaagtgtcatcgaactgatgggagaagctgtagcccaccatcttctggcggcgggagattttattatcggactcgccttcgttgaaatcggtcggcagcttgtgcgccttaccgttggcgtcgtaatacggcaccacggtgccttcgcgcggcagccagccgtagtagcccgcatccgggtcattctggaagttgctcaggaaggtgaagtcggttttatcgtccggacgccagctaaaggagggcgccaccgcgtagcgagtcgatttcgccatctgctgctgggcatcctgactgcggccaaggccggtcaggcgatacgaccaaacgccggcatcatcaatggcgtcgctaaagtcaaacccggtctgccacagattgtcggtgcccatcttaaactgcacttctttcagcggctcggtagtcgggcgcttgctgaccatgctgacgataccgcccgggttgctgttgccgtacagcaccgaggttggcccgcgcatcacttccacacgctcgaggaagtaaggatccatggagacttcagagtagttattcccctgcagcttcatgccgtccagatactggttggtgttgacggtcgtcgaggtggtgaagccgcgaatggtgaccacgtcataggtggtcgaactgccgcgagtggagaagacgctgggcgtataggagagcgcctcttttaccgtcgtcggctggcgcatctccatctcctggcgcgtcaccaccgacacagactgcggcgttttttcaatcggggtatcggttttggtcgccgtggcggagcgttttgccgcgatagtcggcgccggtccccaggcgctttcctgggcggccggggcggcaacgacggtgatggtttcttcttgcttcggttgttctgctgcctgtgcgtagacagacatgccgctaaccgccgtggctactacagctgcgactttacgcagcgagtgatttggctgagcagtttttggacgcgccatgggtatatctctgatgaaagtgaatga

SEQ ID NO: 230162 - DNA, 357 bp, Klebsiella pneumoniae
atgcgtggtgatttctacaaacagttaactagcaatctggagaccgctcgggccgaagggttgttcaaagaagagcgcatcatcacctcggcgcagcaggcggacattaccgtcggcgacagccacgtgattaacttctgcgccaataactatctgggtctggcgaaccacccggaactgattgccgcggcgaaatccggcatggacagccacggtttcgggatggcctcggtacgcttcatctgcggcacccaggatacgcataagcagctggagaagaagctggccgatttcctcggtatggaagacgcggatcctctactcctcctgcttcgacgccaacggcggcctgtttga

SEQ ID NO: 230163 - DNA, 948 bp, Klebsiella pneumoniae; identical to SEQ ID NO: 213457

SEQ ID NO: 230164 - DNA, 2367 bp, Klebsiella pneumoniae; identical to SEQ ID NO: 211130

SEQ ID NO: 230165 - DNA, 471 bp, Klebsiella pneumoniae
atgatgattactctgcgcaaacttcctctggcggtcgccgtcgcagcaggcgtgatgtctgctcaggcgctggctgtcgatttccatggctacgcgcgttccggcattggctggaccggcagcggcggcgagcaacagtgcttcaaagcaaccggcgctcaaagtaaataccgtcttggtaacgaatgtgaaacctatgcggaactgaagctgggccaggagctgtggaaggaaggggataagagtttttatttcgatactaacgttgcctattccgtgaatcaggaagatgactgggaaagcacctctccggcgttccgtgaagccaacatccagggtaaaaacctgatcgactggctgccgggctccacgctgtgggcgggtaaacgcttctatcagcgtcatgacgttcacatgatcgacttctactactgggatatctccggcccgggtgcacgtataggaaattga

SEQ ID NO: 230166 - DNA, 639 bp, Klebsiella pneumoniae; identical to SEQ ID NO: 213941

SEQ ID NO: 230167 - DNA, 702 bp, Klebsiella pneumoniae; identical to SEQ ID NO: 121663

SEQ ID NO: 230168 - DNA, 318 bp, Klebsiella pneumoniae; identical to SEQ ID NO: 226781

SEQ ID NO: 230169 - DNA, 285 bp, Klebsiella pneumoniae
gtggacaatggtatcgactggtttttcaatttcctatacgtgaaccgcattgtgctcaccagtaaagagttcagcttgctggaattcttcattcgccatcagggagaagttcttccccgctccctgattgcctctcaggtctgggacatgaattttgacagcgacactaacgcgattgatgtcgcagtaaagcgactccgcgctaaaatagacaacgattacgggacaaaactgatccagacagtgcggggcgtgggctacatgctggagatcccggatgcatag

SEQ ID NO: 230170 - DNA, 741 bp, Klebsiella pneumoniae; identical to SEQ ID NO: 214761

SEQ ID NO: 230171 - DNA, 252 bp, Klebsiella pneumoniae; identical to SEQ ID NO: 30842

SEQ ID NO: 230172 - DNA, 777 bp, Klebsiella pneumoniae; identical to SEQ ID NO: 121845

SEQ ID NO: 230173 - DNA, 285 bp, Klebsiella pneumoniae; identical to SEQ ID NO: 102270

SEQ ID NO: 230174 - DNA, 729 bp, Klebsiella pneumoniae
atgatcccgtcatccagtgctcttgtatccctgaaaccagcccgtcaggcagcgctgcaggccatcatgacggtggaagaggctcgccagcgcggcgcacgtctgccatcgatgccacacgtccggacattcctgcgcctgctgacaggctgtagccggattaacagtgacgttgcccgccgtattcctggcattcaccgtgatccaaaagaccgcctttccagcctgaaacaggtagaagaggcgctggatatgcttatctccagccacggggaatactgtccgctgccgctgacaatggatgtgcaggctgaaaattttccggaagtccttcatacccgaacagtacgcaggctaaaacgtcaggactttgccttcacccgaaaaatgcgccgtgaagcccgtcaggtcgagcagtcctggttactgcgtcagaacctgctgggacaggctgtcacagaactgaattttcagtcaccggaaaccgtctgcacctggtacacccggtggagcgacgagtttgacgcggcagagcttgcagcaccgttctggcgctggcagtcgcgattcgcatcgctgaaggaacttgactggcttcgcatcagcggtgagccgctgtatgcagtgatgtacgaaattccgtttattgtccgggaaacacctgagcatattcgtgttgctgaacgctggcaggtgccaaataagctggctgatcggagtggtgtatga

SEQ ID NO: 230175 - DNA, 432 bp, Klebsiella pneumoniae
atgaaaacgttactgactctggatgtcctgaaaaccatgtcttctgatgagctggaagactaccgcgccgccggtgaagactttcgccgggagctgagtcacgctgtcatgcgcgatctgacctcaccgtccggctggtccgtgaatgccgaataccggtgcgaatttggcggcttctttcctgtccagatccgttttaccccccctcatggtcactttgatgtggcggtatgcagttcgggggagctgaatcctcgctggatagtggtctttgttacccgtgacggtcagccgttctctgtcgttcgcgtgatggatgcattcaaccctgaactcatcacccatactctggatctcatcgagtgtcttgacgccggtggctactcgtttgccagcatcatcagcacgctgtcacaggagggcgcacaatga

SEQ ID NO: 230176 - DNA, 126 bp, Klebsiella pneumoniae; identical to SEQ ID NO: 223594

SEQ ID NO: 230177 - DNA, 2640 bp, Klebsiella pneumoniae
atgagtaataacatcattgataccgtcacccaggctgtgaattcactcgtatcagcactgaagctgcccgacgaatccgctaaagccaatgacacgctgggcagcatgaatttcccccagttcagccgtattctgccctataaggattatgattccgcgaccggtctgtttattaataacaaaaccgtcggttttatgtttgaggcgcgtcctttacccggtgcggataaaagtatcgtcgccacactggagcatttactgcgcagcaaacttccccggggcgtcccggtcagttttcatctggtctccagcaaactggtcggcaatgatatcgactatggtctgcgtgaattccgctggagtggtaaacaggctaagaagtttaacgccattacccaggcctactacctccgggcagcggagacgaagttccccctgcctcctgatctggatttgcccctcacgctgcgtaactaccgcgtgtacatctcctgctgcgtacccaggaagaagaactccaccacgcaaattgtcgagatggagaaccagataaaaatcctgcgggcgtcactgggcggtgcctatattccgacgcgtatccttgatgcgtccgggctggtcgaactgatgcgtgagctgataaacccggacccgcacgaaatgtaccgcgtaccgtataagctggacccctatcaggatctgaactatcagtgtgtcgatgacagctttgatatgcaggtcaccgctggtcatctgaaaattggccgcctggggcgcgacgggaaagagtgcgtgacccgggtgacgagctaccatctggagagtgatccggaaatggccttcctctggaccgctgcggacaactacgccaacctgcttaacccggagctctccatttcctgcccctttgtcatcacgctgacgctgatggtggaggaccaggtgaagacccagaacgaagccaacctgaagttcatggacgtggagaagaaaagcaaaacctcctacgcgaagtactttccgaacgtgataaaggaaatgcaggagtggggcgatatccgccagcgactgtcgaccaaccagacctccctggtgtcctatttctttaatatcaccacgtacaccgcagacagcacagaggcctctctcgccgctgaacagcaggtgctcaacagctaccgtaaaggcggtttccagcttatcccggcccgctaccatcacctgcgtaactttctggccatgatgccgttcaagtgtggtgagggtctgtttaaagagctgcaggcggcaggcgtggttaagcgggcggagacgttccaggtggctaacctcctgccgatcgtcgctgacagcccgctggcgccggcgggactcctggcgcccacctaccgaaaccagctggcgttcatcgacctgttctacgagggaatgaacaataccaatttcaacatggcggtctgcgggacgtccggggcgggtaaaaccggtctgattcagcccctcattcgcagtgtgctcgactccggcgggtttgcctgggtgttcgatatgggcgatggctataagtccctgtgtgaaaacatggggggcgtatatctcgatggcgataccctcaagtttaacccattcgccaacgtgctggatgatgctcacttcgacatgtcagcagaacgtatacgcgatcagatgtcggtgatggccagtccgaacggcaacctcgatgaagtccatgaaggcctacttctgcaggcagttcaggcggcctggttaagcaaacgtaatcaggcacgcgttgatgacgtagtgcagtttttacaggacgcgaaggacagcgatgaatatgctgattccccgacaatccggggccgtctggacgagatgataatcctgctcgatcagtacacggtgaatgggatctacggggactatttcaactcagataaaccaacactccacgatgatgcccggatggtggtactggaactcggtggcctggagtcgaggccctctctgcttatcgctgtgatgttttcattgattatttacatcgagaacaggatgtatcagtcaccgcgtggcctgaaaaaactgaacgtcatcgatgaaggatggaagctccttgatttcaagaatgaaaaagtggggcagtttatcgagaaaggctaccgtaccgcgcgtcgacataccggcgcatacatcaccatcacgcagaacatcgtcgacttcgactccccgaccgcctccagcgccgcacgtgcagcgtgggggaactcatcgtacaaggccattctgaagcagtcagcgaaggaatttgccaagtataaccagctgtacccggatcagttcagcaagctggagaaagacatgattaacggcttcggttcggccaaagagcagtggttctcctcttttatgctgcaggtggaagcgaactgctcctggcaccgcctgttcgtcgacccgctcagccgggcgatgtactcctccaaaggcccggattttgagtacatgcaagcacgccggcaggagggggtcgatatccacgatgcggtatacggactggcgtgccgcaactttaaagacgaaatggctgagcttgaatcccgaataccggtgaatgacatggaggataaacagtga

SEQ ID NO: 230178 - DNA, 483 bp, Klebsiella pneumoniae
atggataatttgactggtctttcaacatttattagccaagaaaagcaaacacaactgcctttgactatcgattatcaggcagcactggcgctgcgccagatggctttggtgcaggatgaactgccgaaatacctgctggcgcccgaagtgagcgccctgctccattacgtccccgatctgcacagaaagatattgctggccactctgtggaataccggggcgcgaattaatgaagcgttggcgctgacaagaggggatttttcgctggcgccgccatatccgttcgtgcaactggccacgctcaagcagcgcaccgagaaagcggcaaggacggcaggtcgtgcccccgcaggcagtaagatccatcgtctggttcccctttccgatcaccactacgtcagccagctgcagatgatggtggccaccctgaaaatccctctcgaacgtcgcaagaaccacggcagcctggcggctgcaaattga

SEQ ID NO: 230179 - DNA, 231 bp, Klebsiella pneumoniae; identical to SEQ ID NO: 145440

SEQ ID NO: 230180 - DNA, 402 bp, Klebsiella pneumoniae; identical to SEQ ID NO: 214728

SEQ ID NO: 230181 - DNA, 558 bp, Klebsiella pneumoniae; identical to SEQ ID NO: 25303

SEQ ID NO: 230182 - DNA, 837 bp, Klebsiella pneumoniae
gtggttcatcaagccgcgctggcagaagctggtcatgaccgacaccggcatcgaccggcgctactacgaactgtgcgcgctgtcggagatgaagaacgcgttgcgttccggcgacatctgggtgcaggggtcgcgccagttcaaggacttcgaggactacctggtgccgcccgcgaaattcgccagcctcaagcaggccagcgaattgccgctggccgtggccaccgactgcaaccggtacctgaacgaccggctgacgctgctggaaacacagcttgccaccgtcaaccgtatggcgacggccaacgagctgccggacgccatcatcaccgagtcaggcttgaagatcacgccgctcgacgcggcggtacccgacaccgcccaagcgctgatcgaccagacggcaatgatcctgccgcacgtcaagatcaccgaactgctgctggaggtggacgaatggacgggcttcactcggcatttcgcgcatctgaaatcgggcgacccggccaaagacaagaacctgttgctgaccacgatcctcgccgacgcgatcaacctgggcctgaccaagatggcggagtcttgccccggcacgacctacgccaagctggcttggctgcaagcctggcacatccgcgacgaaacctacggggcggcgctggccgatctggtcaacgcacagttccgccatcccttcgccgagcactggggcgacggcaccacctcatcgtcggacggccagaacttccgcaccggcagcaaggccgagagcaccggccacatcaacccgaaatacgggagcagcccagggcggacgttctacacccacatttctga

SEQ ID NO: 230183 - DNA, 717 bp, Klebsiella pneumoniae
atgaaagtgataaaaaaccgccatcaggcctgcccggtgtgtggcggcgctgaccggttccgctttgatgaccaggaagggcgcggcacatggttctgtaatcagtgcggcgccggtgacggcctgaaactggttgagaaggtgttcggcatatcggcatccgaggccgccgggaaggtgaacgccgtcaccgggaatctgccgccggtagccccggaggtgacagcggccgcagaggccggaacggaggccgaccgcaaagcagcggccgcgctggccgtcagactgctggagaaaacccgcccggccaccggcaatgcctacctgacccgcaagggctttgccggtcgtgagtgtctgacgctgacagcttcccacaaaaccggcggcgtggcctaccgcgccggtgatgtggtagtgccgctgtatgacgggaccggcgcgctggttaacctccagcttattaatgctgaggggctcaagcgcaccctgaaaggcgggcaggtcaaaggggcatgccatctcatcgacgggcagaaacaggcgggaaaacgcctgtggatagcggagggctatgcgacggcgcttaccgtgcatcacctgaccggcgaaaccgtcatggtggcgctgtcgtccgtgaaccttctttctctggcgagcctggcccgcagcaacacccggcctgtcagattatcctcgccgccgaccgtgacctga

SEQ ID NO: 230184 - DNA, 543 bp, Klebsiella pneumoniae; identical to SEQ ID NO: 121672

SEQ ID NO: 230185 - DNA, 375 bp, Klebsiella pneumoniae
gtggacaatggtatcgactggtttttcaatttcctatacgtcaagcgcaccggccgaacggagaaggcacgcatctgggaaatcaccgatcgtaccgtccgtacctggctgaatgaagctgttgacgcagctgccgccgacggggtgacgttctcagtaccggtgaccccccatacgttccgtcactcctacgcgatgcacatgctgtatgctggcataccgctgaaagtgttgcagagcctgatgggacacaagtcactgagctcgacggaagtctatacgaaggtattcgcacttgatgttgctgcgcggcatcgagttcagtttcagatgcccgaagcggatgcggtagccatgctgaaagggaatatttaa

SEQ ID NO: 230186 - DNA, 222 bp, Klebsiella pneumoniae
atgctcagccttacgcgagctatcgacgaccaggagatcgccctcactgataccgccttcgatcatgctatctccggcggccttaacgaaataggttgcactggggtggttaatcaacagctcgttgaggtcgattcgctgctctacataatcctgcgctgggctgggaaatccgcattgtaccgggtcactgaacaatgggagtgggatgatctgacgtag

SEQ ID NO: 230187 - DNA, 543 bp, Klebsiella pneumoniae
atggcagcacgtggcgttaacaaagtcattctggttggacatctgggacaggacccggaagtgcgttacatgcccaacgggggcgcagtggccaatctgacgctggccacgtctgaaacatggcgtgacaagcagacgggagagatgcgcgaaaacaccgagtggcaccgtgttgtcatgttcggcaagctcgcggaagtggcgggcgaatacctgcgtaaaggcgcacaggcctacatcgagggccaactgcgcacccgcaactggcaggacgatgccggagtcacgcgctacgtcaccgaggtgctggtcgggcagaacggcaccctgcagatgctcggcggccgccgtgaatccggagtgcctgagagcgccgcgcagccgcagaatcctgccaccccggcacaacctgctcaggccgcagctaaatccccgaaagcgaagggcggtaagaaaggccgtcaggatgccgccccgtctcagcaaccgcctcagcctctcccgaatgatttcccaccaatggatgatgacgcgcccttttaa

SEQ ID NO: 230188 - DNA, 846 bp, Klebsiella pneumoniae
atggctaacgaacttgtgattacagccagctctcttgctgagcgaggcattgacagcgctacctggagcgccctcaaaaacagtatttaccctggcgccaaagacgaatcggtaatgatggcgctggactactgccgggccagaaacctagatccgcttctgaagcccgttcatctggtgccaatgagcgttaaggactcgaagtcgggtaaaagcgagtggcgcgatgtggttatgcctggcatcgggctttatcggattcaggccgatcgctccggtgattacgctggcgcaaaagaaccagagttcggcccggacgtcactctgacgcttaccggtattgaagtgaccgtacctcaatggtgcaagtacacggtcagcaagcgcatgccaagcggggaaatcgtcgaattcagcgcgaaagaatactgggttgagaactatgccaccgccggccgcgacactaccgcgccaaacgcaatgtggaaaaagcgcccttacggccagctggcgaagtgtgccgaggcccaggctctgcgtaaggcgtggcctgaaattggccagcagcccactgccgaagagatggaaggtaaaacgctggaagtggatatgcgtgacgttacgccgcgcaacacgacagaggctctccccctggtggccagtggggaaacgttgcaggcaattactgacctcctgacgtccctgaataaggactgggagcaggacttcctgcctctgtgcagcaacatcttcaagcgtgacattttccaggcatcacagctcaccgaagaagaagcgcagaaaggctttagcttcctccagaaaaaagcgcaggtggcagcatga

SEQ ID NO: 230189 - DNA, 525 bp, Klebsiella pneumoniae; identical to SEQ ID NO: 226165

SEQ ID NO: 230190 - DNA, 291 bp, Klebsiella pneumoniae
atgaaagtaaacgtcgcgagcgcggttaaaaacattgttaactgggcctttccactcttttttttgggtggtctgctgtatcttgtttacgatgattacagagataacggtacagcgactgaagaacagttattaatgatttctcatgcaataccctgtgccggtgaggattttcgaacggcactccgtaatagcccgggaccattaacccttcgcgatgcgaagaaaattgccgctaaatgtaacgagaaatataaacaacttaactcactgaacgctataagcaaataa

SEQ ID NO: 230191 - DNA, 525 bp, Klebsiella pneumoniae; identical to SEQ ID NO: 226165

SEQ ID NO: 230192 - DNA, 498 bp, Klebsiella pneumoniae
atgagcggcagccagtcccgcgctaagggttcatcaatcgctctcgttctgcccgttgaatattcgacggcaagttggcgacgggctctgctgtcgctggaagaccaccagaaagcgtggctgctgtggaactacagcgataatatccgctgggaacaccaggagacgatcacccggtgggcatgggggcaattcaacgaaaagctggccggcgtgcgcattgcaaagaaaacagtcgatcgcctgcgccaacttatctggctggccgcgcaggatgtcaaagccgagctggcagggcgggaggcgtatgaatatcaggcgctggcggagctggttggtgtagcaaagtccacatggacagaaacctacctccctcattggctggcgctgcgcagcagttttgtgaagcttgatagcgacgctctcatatcggtaacgcgatcacgttcacaacaaaaggcgacaaatttagatgtaagtcttgcaaaaccgaactga

SEQ ID NO: 230193 - DNA, 318 bp, Klebsiella pneumoniae; identical to SEQ ID NO: 226781

SEQ ID NO: 230194 - DNA, 315 bp, Klebsiella pneumoniae; identical to SEQ ID NO: 16841

SEQ ID NO: 230195 - DNA, 1998 bp, Klebsiella pneumoniae; identical to SEQ ID NO: 137382

SEQ ID NO: 230196 - DNA, 1278 bp, Klebsiella pneumoniae
atgatttcacgctggaaatggattctgaagcagacagttaaaaagctatggttcagggcaacgttattcgccattgtcgcgataataacggcccttttatcaattctttttaaatcaatgatacctgagtcggtttccgtgaaggttggtgcggaagcagtcgataacattctgaacatactggcatcgagtatgctggcagtgaccactttttcgttgagtatcatggtcacagcctacggttcagccactactaatgtgactcccagagctacgcgtttagttgttgaagacgtaaccacacaaaatgtactggccaccttcatcggttcttttctcttcagtctggtagggattattgccctcagtatgggagcttatggagaaagggggagagtcattttattcattgtcacactggttgtcattgccttaatcctcatcacattgcttcgctggatacagcatttgacctctctgggaagggtaggtgagacaacggcaaaagtagaacaggcggccatcgaaacatttattgcgagagcaagaaatccctgtctcggcggatatccatggcttgagaacaatgaacagccgaaaggaacggttgcagtttatccgaagaagattggctatgttgaatatattaatatggtgaaacttagcaagctgctgaccaatgatccccgtcatgtatacctcgtggcgcagccaggcagtttcatccatccatccatgcccgttttgtacctgagtcaaggccaggagtcatcaatcagcgccgatttacttgagacgattattgtctcggatgtacgttcatttgctcaggatccccgattttgtcttagcgtcatggccgaaatagcctgccgggcactttcccccgcagtgaacgatcctggaaccgccattgatgtcattggcagaggtgttcgtatactttccacttacgcgcagaataaatctgatgaaatagaagtgaaatatccttcagttcatgttgcaccacttcagaataacgatctactggaagactttttctcacctgtcgcgcgcgatggtgccggtatgagggagatacagataagagtccttaaaggactgtctatgctgagtaagggttggcctgggatattttctgaggccgcgcataatttagcatttgaaacattagagcatgcaatacgtgctgaccatatagattctgacagatgtctaataaaatcaatttattataatttatttagtggtgaagactctaataaaaaaccatag

SEQ ID NO: 230197 - DNA, 543 bp, Klebsiella pneumoniae
atggcagcacgtggcgttaacaaagtcattctggttggacatctgggacaggacccggaagtgcgttacatgcccaacgggggcgcagtggccaatctgacgctggccacgtctgaaacatggcgtgacaagcagacgggagagatgcgcgaaaacaccgagtggcaccgtgttgtcatgttcggcaagctcgcggaagtggcgggcgaatacctgcgtaaaggcgcacaggcctacatcgagggccaactgcgcacccgcaactggcaggacgatgccggagtcacgcgctacgtcaccgatgtgctggtcggccagaacggcaccctgcagatgctcggcggccgccgtgaatccggagtgcctgagagcgccgcgcagccgcagaatcctgccaccccggcacaacctgctcaggccgcagctaaatccccgaaagcgaagggcggtaagaaaggccgtcaggatgccgccccgtctcagcaaccgcctcagcctctcccgaatgatttcccaccaatggatgatgacgcgcccttttaa

SEQ ID NO: 230198 - DNA, 600 bp, Klebsiella pneumoniae; identical to SEQ ID NO: 227469

SEQ ID NO: 230199 - DNA, 2007 bp, Klebsiella pneumoniae; identical to SEQ ID NO: 223157

SEQ ID NO: 230200 - DNA, 261 bp, Klebsiella pneumoniae; identical to SEQ ID NO: 121670

SEQ ID NO: 230201 - DNA, 192 bp, Klebsiella pneumoniae; identical to SEQ ID NO: 121669

SEQ ID NO: 230202 - DNA, 261 bp, Klebsiella pneumoniae; identical to SEQ ID NO: 121670

SEQ ID NO: 230203 - DNA, 192 bp, Klebsiella pneumoniae
atgaaacttgcaccacaaagccgcgatatcctgcgccagtacaaaactctgattaacgcacgccgccgggatgccgggcagcgggaactgaccaccgcccaggtaatggatgaaatctgctattacatgacctgtcagtgtgccgtctacatcggcggacacttcatcttacagggtggaaagggcctataa

SEQ ID NO: 230204 - DNA, 228 bp, Klebsiella pneumoniae
gtggcctgggcggagtataccggcgagtgcgactatgacgcctttgatgacgcgtattacggcgaagcggaaagcgaggaagattttgcttatggctttgtggaggacaacggcctgttaaacgaggtgcccgaatccctgcgcgtctatttcgattatgaggcatacgcgcgggatttattcagcgacgggtatgtgttccatgacggttatgtcttcagaaactga

SEQ ID NO: 230205 - DNA, 195 bp, Klebsiella pneumoniae; identical to SEQ ID NO: 210511

SEQ ID NO: 230206 - DNA, 612 bp, Klebsiella pneumoniae
atgccaggcatcgggctttatcggattcaggccgatcgctccggtgattacgctggcgcaaaagaaccagagttcggcccggacgtcactctgacgcttaccggtattgaagtgaccgtacctcaatggtgcaagtacacggtcagcaagcgcatgccaagcggggaaatcgtcgaattcagcgcgaaagaatactgggttgagaactatgccaccgccggccgcgacactaccgcgccaaacgcaatgtggaaaaagcgcccttacggccagctggcgaagtgtgccgaggcccaggctctgcgtaaggcgtggcctgaaattggccagcagcccactgccgaagagatggaaggtaaaacgctggaagtggatatgcgtgacgttacgccgcgcaacacgacagaggctctccccctggtggccagtggggaaacgttgcaggcaattactgacctcctgacgtccctgaataaggactgggagcaggacttcctgcctctgtgcagcaacatcttcaagcgtgacattttccaggcatcacagctcaccgaagaagaagcgcagaaaggctttagcttcctccagaaaaaagcgcaggtggcagcatga

SEQ ID NO: 230207 - DNA, 408 bp, Klebsiella pneumoniae
atgggcgcggacgtgcttgatgttgagcgtgccgccgatcatcggtttcagcgcgtcataggcggcgtcgcccttcgggatgtagagcttggtgtcgcccaggtcgcggatgcgcggcgcgaagcggaagcccaggaggtgcatcagggcgaagacgtgatcggtgaagcccgccgtgtcggtgtaatgctcctcgatccgcaagtcggactcgtggtacagcaggccgtcgagcacgtaggtcgaatcgcgcacgccgacgttcacgaccttggtgtgaaatggcgcgtactggtcagaaatgtgggtgtagaacgtccgccctgggctgctgccgtatttcggattgatgtggccggtgctctcggccttgctgccggtgcggaagttctggccgtccgacgatga

SEQ ID NO: 230208 - DNA, 192 bp, Klebsiella pneumoniae; identical to SEQ ID NO: 217698

SEQ ID NO: 230209 - DNA, 294 bp, Klebsiella pneumoniae
atgacggtgcgcgttgaatgggaaaccgggcagggttcatccgcgggtttcccggggtttgccgacagggctaaatacaaagcctggatagcagacattgatgcccaaaagaggcagcacagcaaaaccgttccgctgcccgactataacggccaggatgtgtgcggcattacggtgcactttttaccctgcgatgacgtgaaggtgaccaccagctgctggtcaccgagaaatgcgaactatccgataaaagagcccgtcaggatgaaggagccggccgtctgtccgaagtag

SEQ ID NO: 230210 - DNA, 285 bp, Klebsiella pneumoniae; identical to SEQ ID NO: 223625

SEQ ID NO: 230211 - DNA, 195 bp, Klebsiella pneumoniae; identical to SEQ ID NO: 223626

SEQ ID NO: 230212 - DNA, 285 bp, Klebsiella pneumoniae; identical to SEQ ID NO: 210510

SEQ ID NO: 230213 - DNA, 195 bp, Klebsiella pneumoniae
atggctaactcaattcctaacaacggacgcgccgtgatgatgcgcaatcgccgcaccggcgccgcctggctggtcagcttcgactatcgcgacggcagctactggcatgagccgcagggcaatctgcgccacatccgccggccatacgcatcacgcaatatcgagccgaacctggttccagccgggacgcattaa

SEQ ID NO: 230214 - DNA, 612 bp, Klebsiella pneumoniae
atgcctggcatcgggctttatcggattcaggccgatcgctccggtgattacgctggcgctaaagaaccagagttcggcccggacgttactctgacgcttaccggtattgaggtgaccgtacctcaatggtgcaagtacacggtcagcaagcgcatgccgagcggggaaatcgtcgaattcagcgcgaaagaatactgggttgagaactatgccaccgccggccgcgacactaccgcgccaaatgctatgtggaaaaagcgcccttatggccagctggcgaagtgtgccgaggctcaggctctgcgtaaggcatggcctgaaattggccagcagcccactgccgaagagatggaaggtaaaacgctggaagtggatgcgcgtgacgtaacgccgcgcagcactccagaggcgccccccttggtggccagtgaggaaacgctgcaggcaattactgacctcctgacgtccctgaataaggactgggagcaggacttcctgcctctgtgcagcaacatcttcaagcgtgacattttccaggcatcacagctcaccgaagaagaagcgcagaaaggctttagcttccttcagaaaaaagcgcaggtggcagcatga

SEQ ID NO: 230215 - DNA, 162 bp, Klebsiella pneumoniae; identical to SEQ ID NO: 229828

SEQ ID NO: 230216 - DNA, 255 bp, Klebsiella pneumoniae
atgtcgtacagcctgtggcgggacagacaggttaacgcatttatgaccaccaaccgggcctgggggatccagtgcgacactgtttctcaggccgcgtgggtggtcagggacggggagcgggtggaccttcagataaatcatctgcctctgtactgcagcggttaccgctttgaagcccgtgatgatgcaggaaagatacagcgccagctcgataaatacagtgtctatcagcatctgtcacgccagtcgcaataa

SEQ ID NO: 230217 - DNA, 513 bp, Klebsiella pneumoniae
atgcgattaacgacgaagttctcagcctttattacgctgctaactagcctgaccatctttgtcacgctgattggcgcttcgctgagtttttataacggcattgagaacaaggtcgaaaaccgcgttcaggcggtggcgaccatgctggataaccggctcatcaccacctctttcgataagcttgaaccgcagttggatgagctgatgacgccgatcgagatcgtgcatatcgatttcatgctcaacggcaaaccgctctacagccattcccgacccgatagctatcgcccgctcggcagccatgagcaattccgtgagatcacggttcagtcgcttaaacatcctggtattacgctgcatctggtctacgttgacccgatggtgaactatttccgttcgctgtcgatcactgccccgctgtcgatctccattggcttcatggtggtaattattttcttcgccgccagctggccggccaggagctgctggagctgcgttccacgcgtatcctga

SEQ ID NO: 230218 - DNA, 960 bp, Klebsiella pneumoniae
atgatccccgccggcctgaaggccagctcagagtggttcccggcaaaagagcgctctatcgcggtgggctacttcaacgtgggttcctctattggcgccatgatcgcgccgccgttggtggtgtgggcgattgtcatgcacagctggcagatggcgttcatcatctccggggtattgagcttcgcctgggccatcgcctggcttatcttctacaaacacccgcgcgaccagaaaaaattatctgacgaagaacgtgactacatcattggcggtcaggagtctcagcatcagaccaataacgcgaagaaaatgtcgccgtggcaaatcctgcgcaaccgtcagttctggggtatcgccctgccgcgcttcctcgccgagccggcctgggggacctttaacgcctggatcccgctgttcatgttcaaagtttacggttttaacctgaaagagatcgccatgttcgcctggatgccgatgctgttcgccgacctcggctgcatcgtcggcggatatctgccgccgctgttccagcgctggtttggcgtcaacctgatcgtgtcgcgtaaaatggtggtcaccatgggcgccctgctgatgattggcccggggatgatcggcctgttcaccagcccgtacgtggcgattgccctgctgtgcatcggcgggttcgctcaccaggcgctgtccggggcgctgattaccctctcttccgacgtctttggccgtaacgaagtcgctaccgccaacggtctgaccgggatggccgcctggctagcgagcaccatgttcgccctggtcgtcggcgcgctggcagacaccatcggctttagcccgctgtttgcggtactggccgtctttgacctgctgggcgcgctggttatctggacggtgctgaaaaacaaaccggctgacgatgactcgacgccgcttagcagccgcaaaccggtcacgcagagttag

SEQ ID NO: 230219 - DNA, 1413 bp, Klebsiella pneumoniae
atgacatcgtttatgactgaagattttctacttgataccgagtttgcccgccgtctgtaccatgattacgccaaagatcagccgattttcgactaccactgccaccttccgccgcagcaggttgccgaaaactatcgctttaaaaacctgtatgacatctggctgaaaggcgatcactataaatggcgcgcaatgcgcactaacggcgtgccggagcgtctgtgtaccggtgatgcgtccgatcgcgagaaatttgacgcctgggcggccacggttccgcacactattggcaacccgttataccactggacccatttagagctgcgtcgaccttttggtattacaggtaagctgttgtcgccatccactgccgatgatatctgggaccagtgtaatgatttgctggctcaggatgccttctccgcccgcggaatcatgaagcagatgaatgtgaagatggtcggtaccaccgacgatccgattgattctcttgagcaccacgcggctgtcgccaaagacaactcctttgacatcaaagtactgccgagctggcgcccggataaagcgttcaacatcgagttggcgaccttcaatgattatatggctaagctgggcgaggtatccgataccgatattcgccgcttcgctgacctgcaaagcgccctgaccaaacgtctggatcattttgccgcacacggctgcaaagtctccgatcatgcgctggacgtggtgctgtttgccgaagcgaccgacgccgagctggatgacattctggcgcgccgcctggctggcgagacccttagcgaacacgaagtggcgcagttcaaaaccgcggtgctggtattcctcggcgcagagtatgcccgtcgcggctgggtccagcagtaccacattggcgcgctgcgtaacaacaacctccgtcagttcaaactgttagggccagacgtcggcttcgactcgatcaacgatcgtccgatggcggaagagctgtctaagctgctgagcaagcagaacgaagaaaacctgctgccgaaaacgattctctactgcctgaacccgcgtgataacgaagtgctgggcaccatgatcggtaacttccagggtgaaggcatgccaggcaagatgcagttcggctccggctggtggttcaacgatcagaaagacggtatggagcggcagatgacccagctggcgcagctcgggctgctgagccgcttcgtcgggatgttgaccgacagtcgcagcttcctctcctacacgcgccacgaatacttccgccgcattctgtgccagatgatcggccgttgggtggctgccggcgaagcgcctgcggatatcgcgctgctgggcgagatggtgaaaaacatttgctttaacaatgcgcgtgactatttcgccattgaactgaactaa

SEQ ID NO: 230220 - DNA, 3423 bp, Klebsiella pneumoniae
atgggaaagaacagcaaggcaaaacgagatttaaaaaagaaaaaaagcagtaacaaatccagagaaaaatcctctagcaagggtaacagaaactatgaagacgctatgcaaaaaataaaagataatttaacatctgtatataaagagtacaatctcgcagaactttttcttacattaagtatttctgaactatggctacctaatatctcgtcacctgtaaaacacactatagctttcaacactttgctctccatggatgttagtacatttaataaccaaaaggaacttaaaacatatcaacaagcaagcgaattttttagcattatttataagatattacctaacattcctcaaatggaagactttgtccctgaacaagactgggggcaaataaaaatgccatggggagacaatatttatagaattttttacggtagctcagtcgaacgcttatatgattatattcaagcttttggaattagatacgcagaatatccaattatccttaagcaaatggaaaatgttcttattttacaggaccagtttctatcaagcctaaatccagttgatacactctcagagttctctcccggccatgtcgaaatccctccagaaacattctggaaaggttgccatcaggctttaacggatgcctgtcatgtgtttgagaaaataagaagtcagacggaaaaaatatttattaaaaaagcaggggaatttagaagcattaactctaccgctgaattatcaaatataataatggagggcgtagcactccctgctattggtatcaacattggtgatcgtgtttatccattgtcattcaggaatatggcaaatgtaattattgagcactatgcttccaaaaaaatggatatcgattgttcagatgctatttcaaatttcatatctcagcgttttgaaagcataattgaggaaccatttctgctcctgagcagaaaaaaggtcctaccttataaattctcaggattattacagggtaatgataagttttatttatttgctctttttgacattgattcagcaagtaagttaaaagatatagaagaagacgttttcgaactttttaatcaaggtgaatgggctttatcaccgatttcatcatcacaactattaggcattcgaaatcgctcggggaaacagctatcaattgatgatattgaatttattttcataaattctaatcttactactgcaatgcatttttttgagccaccacaactaaaatatagtcatcacatcttctttctgacagagttcattgcattgtttgactcaatagagaatctaaatgaattatcattatttttttcatatttagataagaataagtcaaaaataaatccgttctttatttccgtaatagataaatttgcatctttcagaagcacttactccgtattagaagatggtgccattgattttaatatgattactcttgatcctcactggggttctaactggagatatgaagaactggaaatatactggtcacaggctccctcaaatttccctgatatcaatgtaaaatggaacatcagtaatacttatcaaggaaatatttcattaatatcgaaaaatcatttttatgtatcctggtcaacaaaaataaacaactgcacaatacatttttgtgccgattgcaaaccactactaaatgaagatcatcttaatggtcaacttctgacattattcttagaatgtgcttgtgatgcattatcacaacgaaaagatattttagagaatacatccctccaagatataaaaagaattaccgtacactgcactattgacaaaaaatatctggtcgatagtaattccgacattacagaaaattttgctcctgagttgttcactcacgtatcattaattaacaaagataattctgctgcaaatataaaaatccatattaatttacctctaatgcaatatcgtcttaatagacctcaaaatgccagtttccaggctgatgtttgtattgcattcttacaatcgctctcccaaatgcttcatatcgagttctccgaagatatctggcaacagataatcaacacagggaacagacctgcaaggatggcaatatccagcgaagagcgcacatttgatactttagaaataaaaccaaacgttcctgaagccaaacactataaactagccagaaaaacattggctaacttaattaaagagtctggagttaacgaaggtaattatgagttacagaaggccaaggatattattaaccctttagctgattttttcagagaaaaaatccacgcaacaatacgctcaatgaacagggagcacttgctacaatttgtcattgaaaactatgatgcttatgtagccgaagatcacagaaaaaagaaaaatattatgttaagccttcaacatgaggttaattataatagaacagaaaaattagcaaaacagggtactgaattcaaccgtatgtcagcaaattataggtatttgcttgaatgcactttaagtcttaactcaaaaagtgaaaccatacctactacagatgctatattacagttacttgctgatattgattggttaatcgtactttataatgcaagtgacatattgcataacgatattgatgtaggtggtttgagtatagataatttttacatcccacaagtatttttttcggaagatcgtgagattaaagaggataagtttagtgaagaacaagctggctataagttaggttataatttaaatgacactgactctgtagagtccgatattataaatgaaaaattagatgatcttgatcgtgtatttcaacaagatctaggcttcaaatactctagtttacttgctgttttctctattctgtttcaatgggcgcgatttaaccaaattaaattaaatgtttcatatcaggcaacaaagactgatatggtaaacatactgcttaacagtaatactaacttggttaatgaggaagtagagaaaataatagattttcttattcttaatcctaataagataagaaaattactgggtactgattctgaatattttgatgttcctatttccgatcacaataaacgagatcatcgatataatattcgcccactaatagaaactagtaataataatataatctggggtgctgcggcagcttatcgagcaggaacaatatggattgctcatattgcaaatggatatcttcctgccgaatttcaatggagccacatttcacatgaagttggtaagataaaagagagtattgaaaagcaattagaaataaccacttttaatattgtaaaaaggttcgcaacccaaattgaacttggcatcgactttaaaaagcgctttccaaagaaaaattttcctgacgtaggtgattttgataccttagcctatttttctgatagcaacacctag

SEQ ID NO: 230221 - DNA, 3747 bp, Klebsiella pneumoniae
atgaggatcaccgcgacccaaattgaacagtgggcggacacaagagacgctcagggaatgttgcccattttgatccggcgattaatcagtgcgaccacaacaataacagcattgagcatgcccggcggtgattctgtttcaaccagcggctgggatggtattgtccaggctgacaaaggtaacatctgggttcctgatggtgcctctttctgggaaatgggatgttcctccgacatcattactaaagcacgctcagattttcggaagagaaatcaacaaatttcaccacaggaagcgactaaaagttgctttattttcgtatcaccacgtcggtggcccaaaaaagttagctggctcaaagaagctcgggctgaaaacatctggtccgacgtttatgcacttgatgctgacgatctggaggcgtggctggaaaacactccggctgtagctctctggttcggtgaactaacgggccatactggcgcaggcattgaatccatttcccatttctgggaacgatggcgcaatcagtcacaatttccattaacaaaagaaacgttgctggcaggcagagaagaggaaaaaaacacgctgaacggcattctgtcagagaaaaaagaacaaattattatccgggcagacagtcaggaagaggctatcgcttttgcctgcgccagcttaatagaaatggggcatgaaaatatagccgcctgcattactactgaagatggatggcactttattgataaaaatccctcaattaagttctgtctggcaatgaacagtgatatttccagacaaagccgtcatcagcctgaacgaactgtttttattccattttccctaggcgatcacaatactacgggcaataaacaaagtgataccattactctggagcgtcttaccagaagcggtttcgaagagaagctcattgctttaggagaagaagaatctgatgcaaggcggttatcacgaacaaccgggcgctcctggtcagtttatcgacgtcttagggccaagaacccggcaatctcatctcccgtatggctgaccacatcgccagcaaatgcgttaatcacgttgactttggtggggtgctggaatggcaaaaaagcaggcgataaatattgcgttgaaactattgcgaaaataagttacgaagaactggaacaggaactacgcgaaatctctcttcgggatgactctccggtattacagattggcaatgtatggaaagcaaaatctcccattgagctattgtatcaactagcccctcgacttacagaaagtcagctcgaacgtttcttcttggttgtaaaacaaacgctacttaaacccgatcctgcgcttgaactcaaaaacgaagagcgctggatggcggctatctatggaaaagttcgttcagaatcagattttattctgaaatcaatcgctgactcactggtgaagctcagaatctacgctgaaagcagtgaagggaataactcagatttcatcattgctgccatcgacaatctggttagagatctgttgatggatgccgagggtgaaagatggctgtcattaaccgacgtattatgttcgttagctgaagcatcaccagaggtattcttaaaatccatagaaacaagcttacagtcaacagaggctagcgttactcgcccactaatggaaacgagcgaaagcacaggctttggcatgcgctgttggcatgctgacttattgcatgcactggaaattctggcttggaatccaaggcgattacttagagtcagccttattcttgcaaagctatcatcattaagaattcagggaaactgggccaatacaccagaaaatactctgaaatcattgctcagaccctattggccacaaaccatggctactgatgaacaaagacttatcgtacttgatatgcttatcaaaaaacacgatagcattgtctggcgttttctctatgaacaaaccgatcctttgggtggtatgtatatggaaaatgccagaccaaaatggcgggatgatgatgctggcagtgcacaaatgagagggaattttctttatgaatattattctgcacttggtgagcgaatactggatctggcagaaaaaaatgtcgaaagaatagctgcacttattaagcgaatagatcattttgaagggggctatcaagaaagacttattttattaattaaaagcacaacttcatttcctgacaaagacaaggagattgttagagaagcgttatatcattatctaaactggcataactcttataacactgatggagataaaaaaagtagagctattgcagaagatctcatgtcattcgtcgatttattaacacctcaagatattattcttgataaacgtcgactgtttactcttcaatatcctgtattacctgaaggcagtgaaagagatcatgtaaagcatagtgaaagaataagagaaatgcgaatcaatgcaatagaagaaatatacaatcatcaaggatgggacggattatcatctttactttcaatagtacaatctccctctgtaataggtgagtctctggcaacctgcaacttacatttgacagactcattctcatggattgttgaaaaattcagggataatggtttcccgttccatgatccactgatcagttcgttttataactggctccctgaagaaaaacggcttaccctgataacttcttcaatatttaagaatgagatggatagtgatgaaaaaattgctgcattccattcagtactcccacccaatatggctacatggcacaaccttacaaattaccctgaaaacgctcaaatgctgtactggaagggaataaactatccacacatctggagtgacgatgctgatgaaattgactacttcatcggaaaaatgatgcttgctgacagatatataacagcatttaatctcataaagtatcgaatggaaaaagtttcctggcaaaacctattaaaactactaaatggattccgaagtaccaccgaaaaagatgtatcaatacctgatggttggcacttgaccgaggctatagaatatcttgaatcatcgggtcaggtaccgcgtttagatttagcattactggaatttttctttttctcagcgtttagaagttgtgagaaaggagcaaaaaacctctacgcagagttactttctaacccatcactatttatgcaattaatatgtcttgcttataaaccagaatccgataaagagtataaacaagatgaatccttaatggctgcggcacaacaagctggcagagttctggatcaagggaaaggcatccccggtcagaaatcagatcatagtattgatgaatacgtatttagtaactggattgaagaagtcaggaaactagcgacagaaaatgacagaagcaatactaccgattacataatcggtgaatggctatcccgctcaaaacatctaaatgatgcaccatgggccagcataacaatcaaagatttgctggaagagacagaacgagatgaaatcagacaaggtttctattttggcactattaatagccgtggtacaacagtaagagcttatgatgaaggcggtgataaagaacgaaaactagttgaccaatacaaagaaattgccaaccagttatattttacccatcccaaactagcaagtgtctttgatgatcttgcttcacattataattttgatgctacaaatgatgatcggcatgcaaagttaagacttgaaggatattaa

SEQ ID NO: 230222 - DNA, 462 bp, Klebsiella pneumoniae
atggctacgatccccactcaaacacacccgttactttctgttcccttcaatgccgccacggacttcaccatccttgctgaccactgcgaaaactttgccgataccctcattgaaagtgacgatccggcgctacggctggcgctttgcggacggcttgccgcttgtctcgcgctgctacgtcccacgctgaacgatcccatcccgtcccatctgattgaaagcctgaccactgatacccttcccgccagttccccctgctttgaacccggttccgaattactttgtgactactcactcacgctggcgcagcttctgacggggcgggcgttactgccgaaaatggaacagacgctaaccggattactgtgtgagctggtctggtactttgccgctgaactcaaagccccgcgctggctacgcaccgtaaacagcgtgaagtttattgacgaggtgacagcatga

SEQ ID NO: 230223 - DNA, 222 bp, Klebsiella pneumoniae
atgatacagcccgactggcattccgccgacattatcgcggcgctgaaaaagcagggggcgtcgctgtccgccgtttcccgcaaatcagggctggcgtcctccacgctggcaaatgctcttaaccgccactggcccaaaggggaaaggctgattgccgaagagttgggggttgcgccggagcacatctggccttcccgttaccgcaaacctgaatactgctaa

SEQ ID NO: 230224 - DNA, 888 bp, Klebsiella pneumoniae
atggggatgctgaagcaggaaatggcccgtctggcgagacaggcaggcggcagtcataaaacggttcacgaccgcatcaggctggcgcagcggttctgcgaacgtctggtggtggcgcagaatgtgcagatccgccggttggggcagcttaaggcgcggcatatcgaaggctatatccgggaacggctggcgcagggcataacaaagcgttccctgcaaaacgagatggcggcggtgcgctgtattctgcggcaggccggccgggcaaaactggctgacggcgatcggataaacaaccgggcgctgggtctggcgggcgcgtcgcgcaacgggacgagacgtgccatcacgccggagtattaccgtcatgtgctggaaaccgcccgcatgaaagacgcggggcttgcggcagggctggagctggcgaggctgatggggctgcgttctcaggaggcagtgcaaagtgtgcattcactaaaaacgtggaagcaggcgctggagcgcggtgaatcccgtctgaccgtggtgttcggcaccaaaggtgggcggcctcgcgaaacgattattcttgatactgccgctgtcaaaaaagcgctggataatgccctgtctgttgcagaacaacgtcatggacggttgattgacaaacccgacctgaaaaccgctatgaaatactggcacagccaggcgtcacgcctcgggttaacgggcgtattttctccgcacgcattgcgttatgcctgggcgcaggatgatatttgtcattatctggcgcagggattcagtgaaaaagaggcgctggcgatgacggcaatggatttgggccacggcgacgggcgcgggcgctgggtggtgcaggtttacgggcggcgcggggagtgtgactga

SEQ ID NO: 230225 - DNA, 993 bp, Klebsiella pneumoniae
atggtttaccaggcaagcaccacgcgatatcaaacgatggagtaccgtcgctgcggccgcagcggtctgcagctaccggctatttcccttggcctgtggcataactttggcgatgaaacgcgagtggaaaccagccggcagatgctcctgcacgcttttgacctcggtataacccatttcgatttggccaacaactatgggccgccgccgggctcggcggaaagcaactttggccgcatcctgaaagagtcgctcctgccttatcgcgatgagttaatcatctccactaaagcaggttacacgatgtgggacggcccttacggcgactggggatcgcgaaaatatctggtagccagtcttaaccagagccttaaacgcatggggctggaatacgtcgatattttttaccatcaccggcctgatccacagacgccgctgatggaaacgatgcgtgcgctcgatcatctggttcatcagggtaaagcgctatatgtcgggatctccaactatcctctggcccaggcgcgggaggcggtgaagatccttaacgacctcggcaccccctgcatcattcaccagcctcgctactcgatgttcgaacgcggcgtggaagaaggactgctggattttctgcagacggaagggattggaagcatagcgttttcaccgctggccggcgggcaacttaccgaccgctatctcaacggcattccggccgactcgcgcgccgccagcagcagtcgttttctgcagccggaacaactgactcctgcccgattagaaaaaattcgtcagcttaacaggcaggcggaagcgcgtgggcagaagctgtcgcagatggcgctggcctgggtgttgcgcgaagagaaagtcacctcggtgctgatcggcgccagcaaaaccgcgcaactggatgatgccgtcggcatgctgcagaatcgccatttcaccaccgaggagtgcgcggccatcgacgccatccttgcgctgtaa

SEQ ID NO: 230226 - DNA, 1698 bp, Klebsiella pneumoniae
atgcacgaaatctttactatgatgctggcggtctatgatcgtgcggccctgatgcttatttgcctctttttccttattcgcctgcgcctgttccgcgaactgttgcataagtcggcccatactccgaaagagctgctggcggtgacagccattttctcgctgttcgcgctatttagtacctggtccggcgtcccggttgaggggtccctggtgaacgtgcgcattatcgccgtgatgtccggtgggatcctgtttggtccctgggtgggcgcgattgtcggggcgattgccggcgtgcaccgctatttgattgatatcgacggcgtgaccgcggtgccctgctttatcaccagcattgtcgccggcctgctgtcggggttgattaatcgtaaagtggcccgcgaacaacggtggaaaatcggcattctggcggggatgatgtgtgaaactctgaccatgatcctggtggtggtctgggcgccttccctgagtctcggcgtagatattgtttcgaaaattggtatcccgatgatcctcggcagcgtctgcatcggctttatcgtgctgctggtgcagagcgttgaaggggaaaaggaggccagcgcggcgcggcaggcgaaactggcgctcgatatcgccaacaaaaccctgccgctgtttcgacacgttaacagcgattctctgcgccaggtttgcgagattatccgccgcgacattaccgccgacgcggtggcgatcaccaataccgagcacgtgctggcctacgtgggcgtcggtgaagccaactatcaacgccacgacgatatgattagccccaccacccggcaggcgattcgttatgggaaaatcatcataaaaaacaatgacgaagcccaccgtaccccggagatccactccttgatggtgatcccgctgtgggaaaaaggggtggtgaccggcacgctaaaaatctattactgccacgcccatcgcatcacttcgacgctgcaggagatggcgattggcctgtcgcaaataatctccacccagctggaagtctcccgcgccgaacagctgcgggagatggccaacaaagcggagctgcgcgccctgcaaagcaaaattaacccgcattttttatttaatgcgctgaacgcgatctcctcctcgattcgccttaatccggacaccgcgcgccagctcatttttaatctgtcgcgctacctgcgctataacatcgaattaaaagacgatgagcagattgatatcaaacgagagctgtatcagatcaaagattatatcgctattgaacaggcgcgattcggcgacaagctgacggtcatctacgatattgacgacgacgtcagctgcgtgatcccgagcctgcttatccagccgctggtggaaaatgccattgttcacggtattcaaccctgtaaaggtaaaggcgtggtgacgatcggcattaacgagtgcggcaatcgggtacgcatcagcgttcgcgatacgggcaacggtatcgatcccgccgtggtcgcccgcgtggaagccgatgagatgccgggtaacaaaatcggcctgctcaatgtgcatcatcgggtgaaacttctctacggcgagggtttgcatatccgcaatctgacgccgggaaccgaaattgccttttatgtccccaataactctacgccgcaggcgctgacggagtcgctgttgtcatga

SEQ ID NO: 230227 - DNA, 783 bp, Klebsiella pneumoniae
atggcaactggcaacgcgccgcgcggattcccccggatcctgcagtggcttctcgccggactgatgctcatcatcggtctggctgtgggtattcttggggcaaaactggccctcgtcggcggaacactgtacttcgcgctaatgggcgtggtcatggtcatcgcggcggtgttgattttccgcaaccgccgcggcggtattctgttatacgccgtggcgtttatcgcctcggtgatctgggcgattagtgacgctggctggaactactggccgctcttctcgcgcctgtttgcgctcggcgtactggccttcctggccgccctggtctggcctttcctcgccagcccaccggcgaaaaaaggcccggcctatggcgtcgccgccgttctcgccgtggcgctggcggtgagctttggctggatgttcaaatccgcaccgctggtcagcgcgactgaagcggtaccagtcaagcccgtcgcgccaggcgaacagcagaaaaactgggcgcactggggtaacaccacccacggcgaccgtttcgccgccctcgaccaaatcaacaaacaaaacgtcaaccagctgcaggttgcctgggtagcgcatactggcgatatcccacagagcaacggctcgggcgcagaagatcagaacaccccgctgcagattggcgatactctctatgtctgtaccccttacagtaaagtgctggcgctggatgtggacagcggaaaagagaaatggcgctatgactccaaatcctcttcacccaactggcagcgctga

SEQ ID NO: 230228 - DNA, 756 bp, Klebsiella pneumoniae
atgactaaaattgcacttattaccggcgccaaccgcggccttggccgtcagaccgcactggatatcgcccgccagggtggggatgtcatcgtcacctaccgcggcagtctcgaacaggcggaagcggtggtcgccgacatccgcgccctgggccgcaaggccatcgccctgccgctggatatggcgcaaaccgccagcttcccggccttcgccgacagcctcggcagcgcgctggccagcgtctgggggcgggccactttcgaccacctgatcaataacgcagggcacggcgaattcgccccgctggccgaaacgcgcgaagcgcagttcgacgggctgtttaacgtccacgttaagggggtatttttcctcgtacaaaccctgctgccgctgctggcagacggcgggcggatcgttaacttttcctccgggctgacccgcgtctcctatcctggcttctccgcctacgccgccgccaaagcggctgtggagatgctgagcgtgtacatggcccgcgagctgggcgggcgcggcatcaccgtcaataccatcgcccccggcgctatcgccaccgattttggcggtgggctggtgcgggacgacgcagaggtaaacgcgcagtttgccgccatgacggcgctgggacgggtgggcgttcccgaggatattgggccgatgatcgccagcctgctacgcgacgataaccgctgggtaaccgcccagcggatcgaggtgtcgggcggacaaaccatctga

SEQ ID NO: 230229 - DNA, 2106 bp, Klebsiella pneumoniae
atgcgcgatattattcgttcccagccggtatacaccattcagtattacggccagtcgctggaatatacctcagaacaaatcctggccgataaatatactgtctggtgcggtgagcagctgtggaccagtttcgtctttgctgccgtggtttctcttgttatctgtatcgtgacgttcttcatcgccagctgggtgctgggccgccaggggaaacagcagagtgaggatgagaataccggcgggcgccagctttccgataagcccaaagaagtggcccgtcagatgaagcgtgatggtatggcctccgatattaaaattggcgacctgcctattcttaaaaactccgaaatccagaacttctgcctccacggtaccgtgggttccggtaaatcagaagtgatccgccggctactgaattatgtccgtgcccggggcgatatggccatcatttacgatcgctcctgtgagttcgtcaaaagctattacgacccgtcactggataaaatcctcaacccgcttgattcgcgctgcgcggcctgggatttgtggaaagagtgcctgacgctgccggacttcgacaacatctccaacacccttatcccgatgggtaccaaagaagacccgttctggcagggctccggtcgcactatctttgccgaaggcgcgtatctgatgcgtgaagacaaggatcgcagctacgagaaactggtcgataccatgctgtccattaaaatcgacaagctgcgcgcctatctgcagaacacgccggcagcgaacctggttgaagagaaaattgagaaaacggccatctccattcgtgccgtgctgaccaactacgtcaaggctattcgctacctgcagggcattgagaagaacggcgagccattcactatccgggactggatgcgcggtgtccgtgaggaccgacccaatggctggttgtttatctcctccaacgctgacacccatgcttccctgaaaccggttatctcgatgtggctgtcgattgccatccgcggcctgctggcgatgggggagaaccgtaaccggcgcgtgtggattttcgctgacgagctccccacgctgcacaagctgccggacctggtcgaaatcctccctgaggcgcgtaaatttggtggttgttatgtgtttggtattcagtcctatgcccagctggaagacatctatggcgtcaagcctgccgccacactctttgacgtgatgaacacccgggccttcttccgctccccgagtaaggagattgcggagtttgctgccggtgaaattggtgagaaggaaattctcaaagccagcgagcagtactcttacggtgcagacccggtgcgtgatggtgtatcgaccgggaaagaaaaagagcgggaaacgctggtcagttactccgatattcagacgctgcctgacctgtcctgctatgtcacgctgcccggaccgtatccggccgtgaaactggccctcaaatacaaaccgcgtccgaaaattgccgagggatttattcctcgcactctcgatgcgcgggtggatgcgcggctcagtgcgttgcttgaagcgcgggaagctgaaggcagccttgccagggcgcttttcactccggatgcgccggcatccgggcccgctgatacaaacagtcacgccggtgaacaacctgagccggtcagtcagcctgcgccagcagacatgacagtatctccggaaccggtaaaagcgccgccgacaataaagcgtccggcagcggaaccttccgtcagaacaacggagccttccgtcctgcgggtcacgaccgtaccgttgatcaaaccaaaagcagccgcagcggccgctgctgcctcaacagcatcctcttccggtgcccctgcaacagctgcaggcgggacacaacaggaactggcgcagcaatcagcggaacagggacaggacatgctgccggccggcatgaacgaggacggcgtcatcgaggacatgcaggcgtatgacgcctgggcagatgagcagacacagcgggatatgcagcggcgtgaggaagtcaatatcaaccacagccaccgccacgatgagcaggatgatgtcgagattggggggaacttctga

SEQ ID NO: 230230 - DNA, 684 bp, Klebsiella pneumoniae; identical to SEQ ID NO: 191330

SEQ ID NO: 230231 - DNA, 1785 bp, Klebsiella pneumoniae; identical to SEQ ID NO: 191329

SEQ ID NO: 230232 - DNA, 873 bp, Klebsiella pneumoniae
atgaatgttaaagattgtcttcgaaaaattgttttttatattaatgagcaattatccataagatatagtaaaatgctatacaagtcatattacgaccatacctttaagagcagaggatttccagctttattagtcatggttgctgatgtgcgatttttaattatattattggtagtggttccatctctatggataccatatcaagaattgcaatccagtttaggttctctttatttatctttatgtgctgcgtcgatattttatttggtttttaatttatatccagatatcttgtcaaaatttcaacctgcgcaacattgctatgataaaatattaatgattggcgttaggaggaaaaagattcttaaaattcttcacgatgaacattctcatgactggtttggcgaggctgatagatacctatcaaaagataggtatcttaaaattttatcaagtttacaacgtatcgtaattgagaaaggcaacggattgtcatttgctacggatgagaaatgtaatttttttgaatattgcttgagtgttgcagaagagaatattaaagacattaaatttataaaatccattccaaatattaacaaattagatttgtatgattcattgatttttttggagggggagatgaatagatatgtaaaggctgctacggacaaaaaagaaatattcattgatagttacattgtagcctatttaatacatgctgttgataaattgaactattattcacagaaagagcttcctcgttatgtaggaaatagatttagattaaaatttactccaacagcggaagaagaggatttggctaaagaactaacgactagatttcatgatatgatgaataataaagtgacatag

SEQ ID NO: 230233 - DNA, 1104 bp, Klebsiella pneumoniae
atgtatgcaagcttattgtcttacaaaaacttaaagcttgaaagtgaaggtaaggaactgagatgtattacagagttttatttatattctgacagtcgatttacgaatgatgtaaatgacgattctatatactgtttccttaacatgcttccccggcagtcaaggcttccatcagttgagccgtcgatcacagttcgtgtaagatggcacagcgacattaatgaaatgattttttcaggtagtgaaagttacacaaaagactttcatggtggatggtataatgatgaaatagcagctctttcaagtttattactcggtgtaagatttcatgccagctcctctactcgtaattttgattactccactggtgaatttggataccctcaagctgattattccttaccaccaaccttatcatttaaaaataacattccaatcgtcccaagcgcatcaaaacaaatagacataggtaatcttaaagcccttaacaaattacatttaatctctgagaaaaattttaactatctaataaaatcagctaggacttatcagaatgcattatggatttgcgagtcatcgccaaacatgggctggttgctacttgtatctgctctagaatgcgctgcagatcaatgggcaaaatcaaaatcaactagggaagaacgatttaggcaagctaaacctgatttatatgaacaattggataccaatgaatttagacatttaatcccaattattgctaaagaattttccacctcattcggtgcaacaaagaaatttattgatttctgcacgcatttcctgccagaagaaccgccaatacgaccaaaaatagggaagattgattgggacatcgaatctttgtcggctattttaaaaaaaatttatgactaccgctcaagggcgttgcatgggggacagccattccctgaacccatgtgctctcatcctgaagccagggatggatacgcagaacgtgcaagaccttgctcaaccttgggtggaacatggttagctgatgatgtccctataaacttgaatacattcaatcttatggttcattctattttaaacaaatggtggaaatctttattacctagctaa

SEQ ID NO: 230234 - DNA, 153 bp, Klebsiella pneumoniae
atgcagtggttcgaagccgcagacctgatcgtcaaaggcatggaaggcgctatcgccgccaagaccgtgacctatgacttcgaacgtctgatggaaggcgctaaactgctgaaatgtagcgagtttggcgacgcgaacatcgcgaacatgtaa

SEQ ID NO: 230235 - DNA, 1089 bp, Klebsiella pneumoniae
atgtttcgccggcacgttattatcgcgtttagcagcaactatgagctttatgctgatatgtccaaccgagtgatgacaacgctggaggaactctctccacgctgcgaaatttacagtattgatgaggcattttgcgatctgactggtgttcgtaactgtcgcgatcttaccgattttggcagggaaattcgtgagacgattctgcgcaggacgcacctcacggtcggcgtcggcatagcccagactaaaaccctggcaaaactggccaatcatgctgcgaaacagtggcagcgacagaccggaggagtggtggatctgtctaatcttgaaaggcagaggaagttgatggctttgctgtcggtggatgaggtctggggagttggccgccgcataagtaaaaaactggaggccatgggcatcaaaacggtgcttcagctggcggataccgatatccgttttatccggaagcattttaacgtcgtgctggaaagaacagtgcgggaactgcgtggtgaaccctgtcttgggctggaagaatttgcgccggtaaagcaggaaatcgtttgcagccgttcgttcggcggtcgtatcacggaataccatgagatgaggcaggctatatgttcatacgcatcgcgcgctgcggagaaactgcgtggcgaacatcagtattgcagatttatttccgcttttgtcaaaaccagcccctttgcgctgaatgaaccgtactacggaaacagtgcatcggtaaaattgcttaccccaacccaggatagccgggacataatcactgcggcgacaaaatgcctcgacgcaatctggcgagacgggcatcgctatcagaaagcaggcgtgatgcttggggatttctacagccaaggcgtagcgcagctcaacctcttcgatgataacgcaccacggaagaacagcgaaaagctcatggaagtactcgatcatctcaatgcaaaggatggcagggggacgctgtattttgcagggcaggggatccagacagcctggcagatgaagcgagaaatgctatccccgcgctatactacgagattctgtgacctgctcagagtcaggtga

SEQ ID NO: 230236 - DNA, 948 bp, Klebsiella pneumoniae
ttgggtgtaaatgccgtcgcggaagcaatggccaagattggccagatttggcgtgaaactccgatggctgacgttggaattgatggccagatcgagtatgttaatccagagggttttgctacggcaagaataatagccgttcaaataaaatcagggctgtccttttttaaggaaagtaaaggatgttggattttccacccggaagagaagcatcgattttactgggaaagatttccattgcctgtgcttattattattcacaacccagaaacaaagttaagttattggcaagatgttcgccatgcattaagagtttccaagacaactgatgcaaaaggtattaccatacctaaatcaaatgtcttgcaatctaccagtgctaaaaaactctttgaaggatttgcgattttagaacaagacatcatgtcagtggaagatatcctcgactatttgattaagtctgaaagtaacaatgcttcatttcctgtctcatacttcaatcttttctgtactggcctaactaatgccggacgatctttatattttggcatggatatggcattaggaatagcagaaattgaaatggataatcaaaatttaccttttgctatcgtagtcggtgattcagaacaaagttttttgttcgagtatataaagttcatcgtgcaccaacatatagctgatgtagatttttctgaatgcatgattgaatggtatgatcgtgatagacagccatcttttatggcaccgctcacttctaggggtaaagaattggtacggctcatccatgaattagaacatgagttaaagtcacaggggaaattagaaagtactggtaggttacacgctgcgcaagcgggctttgttaatttggtttttaccccaaatgagataaatagaattgcacttacgaataatattcagcgagagtacttaaaaaaggcctaa

SEQ ID NO: 230237 - DNA, 546 bp, Klebsiella pneumoniae
atgatagaattatccaatattctcgaacaagcatcactcaagattagtgaaaactacttttgtctgaatcgatttgaaagccctacggttctgcgagaaaggcactattgttatgaactgtaccaccaaatgaggtgtatatggccatctcataatgaatacatcctttcaggtgaaatagataaagcctcacattattatataaaagatcttgtcggttcatttcctatccctgatttactaatccatattcccgggacaatgaacaatgaggcaataattgaggttaaaacgaccaagttagaacgtaatggcatagaaaaggatataacaaacctatctatttttttagaaaaagctgagtataagagagctattttcctgatcttcggagaagatttttcagacaagaaacttgaaaaaatcaagagcatttattcacaaatgagcaataatggaattaacgtgcaacctatagaaatatggcttcatgaccaatttgggaatagtgcaagaaaaattcacaccctcgaaatcgctagttag

SEQ ID NO: 230238 - DNA, 309 bp, Klebsiella pneumoniae
atggtgacgatgatggccgaggatccggcgcgctggcagaccctgagccagtgggcggcggtgtttgcgatgagcgagcggaatctggcccgcctggtagtgcgcgaaacggggctgagctttcgccgctggcgccatcagctgcagctgatcctcgcgctgcagctgctgatccgcgggcagacggtgcagcagacggctcaggcgctgggctacgattccaccaccgccttcatcaccatgtttaaaaaagggctcgggcagacaccgggccgctatcacggtagcctggctacgacttcccaataa

SEQ ID NO: 230239 - DNA, 732 bp, Klebsiella pneumoniae
gtgacggaagagaccgggatgatctgcgtctcgcgccccaccaacccgaccggcaacgtcatcactgatgaagagctgatcaaactggatgcgctggcgaatcagcacggggtcccgctggtgattgataacgcctacggtgtaccgttcccgggcattatctttagcgacgcccgaccgctgtggaatccgaacatcgtgctgtgtatgagcctgtccaagctgggcctgccgggcagccgctgcgggattatcatcgccaacgaaaaaatcatcaccgccatcagcaacatgaacggcattattagcctcgcccctggcggcatcgggccggcaatgatgtgcgaaatgattaaacgacaggatctgctgcgcctgtcagagacggtgatcaagcccttctattaccagcgggtgcaggaaaccatcgccattattcgccgctatctgccggaggagcgctgccttattcacaaaccggagggggcaatcttcctctggctgtggtttaaggatctgccgatctccaccgagctgctgtatcagcggctgaaaaagcgcggcgtgctgatggtgccgggggattacttcttccctggtctggataaaccgtggccgcacacccaccagtgtatgcgcatgaactatgtaccggacccgcaaaaaatcgaagccggagtgaaaatcctcgccgaagaggttgaatttgcctggcgcgaacaggaagcataa

SEQ ID NO: 230240 - DNA, 1623 bp, Klebsiella pneumoniae
atgattaattacacaaaagaacaaagtatagcaatagagtatccatcgagtatggtattaacagcctgtcccggaagcggtaagacagccgtaattgtttctaaaatagtaaacgatttagctctttgcaacgactatcaaggtgttattgctatttcttatacaaacaaggctagtgatgaactgaaaaaaagatgtttgaaagtaatttcagacccaaagtcaagcttctttggcacgattgataaattttatctaactgagataatctatcaatatatcaagcatatttgggggtatgccgataaaataaaaatcataaaattcaatgaactagatgatgcaaccaaagataaactctcttgtttttcaaatactgaggatgtatgtaaaaaaattgacacatatgacttcaaagaagttcgtgatttatacatcaagggttatatagttttagaattcatccctttaatttctttttacgttttaataaactctttatcctgtcgtagatatctggcaaaaagatataaatccatatatattgatgaatatcaagatgctggatttattcaacacctaatttttttatccctattcaaactcggaattaaagctgttgctgttggcgacgttgaccaatctatatatgcttatgcaggaaaaagctcaaaatacttgtcatcattgttagatgaaaaaagtggctttaaaccattcgaaataacaataaaccatcgttctcacccttcaatcattaactatgcatctcgattaataaataaaaactcttctttgctaacaagcgatgctatacatgtatatagaactacaattaatggttcccaagaagatattgtcaaatggattgactctaatattggtagtatcacatccacttttggaataaaaaaagaaagtgacattgccattctggccgcgacaaatagctcagtttcgttagtatctggaataataaagacaaaatctagagcttaccttgatgatgacctttcaataataggcggggaaacatccctcttattaaaagaactattgcgatttcgttttaataaaatggcaaccgcacaagagatcattgatagtttaagagataaagtttttgagaaaaactcactaagagaaatgaggtgtgtgattaaggatgtaagaaaggctagtgagcctcaactgattcccacattacgcaaagcagtgaaattattaattactagtgacatctcctctcagcatattgatgcaattaactcagtcattcaaaacaaaatgatgcttaataattacttacctgttagtgaagatgagttgcagataatgaccttgcataaagcaaaaggtcttgaatttgattttgtctttcatctagatctttatgattggatattacctcggcgcgaatatatcaaaaattgctttgatgaggttttctctcactatgaccaatgtcttaaccttcattatgttggagttactcgagcaaaaaaagccattgtattaataaactccacggaaagatttaatttccagcatgatttaaaaagagcaaaaccctctcagtttctctcattaaacggacttgaaggactctataaaaacatttaa

SEQ ID NO: 230241 - DNA, 1701 bp, Klebsiella pneumoniae
atgtatataaatagtgtatatctcaaaggttttagaaactattctgatagttttataaaattcaaccactcaactttgataattggaagcaatgacgttgggaaaaccaaccttttgtattcactgagaattttattagataaaagtttctcagacttagatatcgagcccaaaaatagtgattttcacattgatggaaaaggcaaccaatgtgatgaattagaaataatcatcaattttcgagaaataaaagaagatgctgtactttctaagttaggaggatacgtaagtgatgactccgaaacatttattaaatacaaagcgagtagaaatactttagactacaaattatacatcggtcataaagaaactgatatggacgagattaatggtaggttttatctaaaatatcttaacctacgttacgtcaattctcaaagagatcttgctagatatatatcatcagaaaaaaaacatttgcttagacttgctcaagaaatgagggatcatgaacaggtgataaaagatgaggaaattttaaattcattaagtgatttattggttaatgtaaacgataaagttaaagagataagttatgtttcatcggcgacaaaagaattaaatgatgaattaaaaaaactatcgtataacaatgaaaaaatttctgttatgctcgactctggagcaatcggcatcgaccaattcattgagaagttagaattaagttcaaatacaaatggtaaaaaagtaatgcttggtggagatggattcaacaatcaaatattacttgcattatggaaagctaaaagtgtacgcgagcatgacactgagaacgaagttgtaatatattgcgttgaagagcctgagtcgcatctttatccacatcaacaaagaaaactatctgagtatctaattaataaattacccggacaatctcttgttacaacccattcaccacagattgccgttaattactcacctgattcaataattaaaatatgttcatccgatggtgagtcttacgctgcaagtgagggatgttctgattgcataagtgatgcatggaatggaatgggatacaggataagcatattacccgcagaagctttttttgcagatgtggtttttttagttgaaggcccatctgaaatgttattctatcaagctcttgctaaagaatgtgagattgatttggatttttataacataagtattttatcagtcgacggagtccaatttgaagtttatagaaaaatccttgattcatttgaaataaaatgggttgcacggacggataatgatgtatctaaagtacctagaaaagaagaatggcaatatgcaggattaaacagagctttagccctctgcaaatatgaaccattaaaaaatgaattagcagaaataacacaaaaacagaaattagagaagcatgccatctataaagatattctcaaacagaataatatatatgtttcaattaatgaccttgagggtgatattagtaatgaactgagtgagcagcttaaagaatatgtagggacagatgatgcagaaaaggcggctgattatctaagaggtaagaaagccacacgaatgcaagactttttaaaggaatattcaagctcgctcagctcaatatattccggagaattaatactgcctcttttaacatcagtatcactcgcaaaggagggtaagtaa

SEQ ID NO: 230242 - DNA, 324 bp, Klebsiella pneumoniae
atgcttctggcatctgtcggtcagaatgacatcatgatgtggtctgctattattgacatcctccccgccctaaagggcggggaggatgtcaactatgagtgttgcctgaaatgtcgccagcccccggtacagcagaagtatctcgggctttctgcgtttgctcctggtgggtatggcccccgcaagcgggggttattgctaactgtcgtttcaacaaaaagtaacttttttcacgttgcccctcagtacaaattaggggcttgccgcggatgtaccatgcctgaatatcttcgagtgatgatttggtgcggctttgttgaataa

SEQ ID NO: 230243 - DNA, 192 bp, Klebsiella pneumoniae
atgccgtgcttgctcatttcaacctcagccattacgtggccagcggaacgtttaaacctactgcgcgttgatctctccacctcatccggtgattcgtatgccgccggcagctacttcgtgggcatcctgcctgagtggtttgttgctacagagcaattaaacactttgtttattattgtgtcaacaaaatga

SEQ ID NO: 230244 - DNA, 618 bp, Klebsiella pneumoniae
atgatttttaacggggagatggtgcggtcattgttggatggccgaaagacgcagacgcggcggattgttaaagggactgacggcgccgtgaagttctgcaaggaatggaacatcaacggagaagaagttttcgttgttctcggcgaaaaagaccacacaggaatgaatcctgttttgggtgctatctcatgcccgttcggagcagtcggcgatcgcatctgggtgcgggaggcttttcgggtgcatagccgggctacagacgtcgctaccctggtatacaaagccagcgagcgaaattcgtggacggagcaaacccgccgtgtacccgtagctgtttgcaataaaccggcaacgcctgagaaatggactccttcgctgcacatgccgcgctgggccagccgcattctgctggaaatcaccggcgtgcgcgtggagcgcctacgcagcatgagccaggacgatgcacgcgccgagggtgttattgccgcatctggccctatggaagccggtttagcattccgcgagctgtgggactcaatctacggcgaggagagctggaaagccaacccctgggtttgggttatcgagttcaagcgagttgaaggcggtgcagcatga

SEQ ID NO: 230245 - DNA, 429 bp, Klebsiella pneumoniae; identical to SEQ ID NO: 22853

SEQ ID NO: 230246 - DNA, 168 bp, Klebsiella pneumoniae; identical to SEQ ID NO: 110172

SEQ ID NO: 230247 - DNA, 192 bp, Klebsiella pneumoniae
atgtttaataccagtcagaacgataagatggttggagtgttatcaggacctgagcggcgtcggcgtcgtacaccgcaggaaaaaattgccattattcagcagactatggagcccggtatgaccgtgtctcatgtcgcgcgcctgcatggcatcaatgcaaaccagatattcaaatggcgcaagcaatattaa

SEQ ID NO: 230248 - DNA, 657 bp, Klebsiella pneumoniae; identical to SEQ ID NO: 21682

SEQ ID NO: 230249 - DNA, 615 bp, Klebsiella pneumoniae; identical to SEQ ID NO: 122178

SEQ ID NO: 230250 - DNA, 258 bp, Klebsiella pneumoniae; identical to SEQ ID NO: 122179

SEQ ID NO: 230251 - DNA, 546 bp, Klebsiella pneumoniae; identical to SEQ ID NO: 109948

SEQ ID NO: 230252 - DNA, 573 bp, Klebsiella pneumoniae; identical to SEQ ID NO: 21679

SEQ ID NO: 230253 - DNA, 1392 bp, Klebsiella pneumoniae
atgcaactgacgctccagatagtcatcaccgatgaatcaggctccagtcgaacggaggaactgatgacaatccagaaatcaggggagacccggaacgacatcggattatcggtgtcagaatccaagctgttgctgaatacggtccagcagtcggtggtccagctgcaggcagacgaatatactcaacaccatatccggtgccctcactgccttgctgcgcgcagaatcaaaggcaaacagaaaatacggtaccggacgctgtttggcgttattccggtatccgggcttcgggtgtaccggtgccgttgtgaagagagtgatacaaagacagtcagtttgctcagcgactgggccggcgattattctcacccggcactgaaatatattgaaacccgctgggcctcgatgatctcctatgaaatgacgactcgtctgctgaaagatattctgccggtgggccacagcctgaatgcctcaacggtgaggaatcatttatgccaggtggcgcagcgtcttgacgctgaggctgaagctcattcaggttttctttccggctgcccccgcgactgggggaacctgcccaggccaggaaaaccgcttgtggtgggtatagatggtggttatgttcgcgatcgggatgacaaaaagcgtaattttgaaattattgccgggaagtctttttccgttggtgcgcctgctgacacccgccgcttcggttttgttcagaaggatgactgtcatccggaacgcaggctcatgacccacctttcagcgcagggaatgcaggccaaccagcagatattttttctgtccgacggcgcggataatctcagggacctccagttcggtatgtaccctgagtcaacgcatgtgctggactggtttcatatcaccatgaggctgacggtgctcatgcaatatgcccggggactgctggtatcagatccagaggcggggagtaaagttctggcactgctggaaagcattaaacgatatctctggcatggcaatgttgtcgctgcgctggaacatattgataattgcgttatgtattgcgatgaccctgaactcagctatcctagcctgaaatccctgcaaaaacatctggatgaaatgtatacctacatccggaataataagatgatgatcccaaactacggcgaaatgcgtcggtacggagagccggtatcaaccgcgtttgtggaatccacgatcaatgaagtgatcgccagacgaatggccaaaaagcagcagatgcagtggagcagaaaaggggctcattatttgttacagacccggaccgccgttttgaataacgaactgcaggataaatttgtctgctggtatccgggttttcaaagtgacgggaagggaccagcgatggcagcatag

SEQ ID NO: 230254 - DNA, 876 bp, Klebsiella pneumoniae; identical to SEQ ID NO: 83939

SEQ ID NO: 230255 - DNA, 1176 bp, Klebsiella pneumoniae
atgaagattgttatcgcgctggattcgtttaaaggtagctgtagcgcgcaggccgcttgcgcagcggtagcccagggattgcgccgggttgaccagacgctggagctggtcgaaatgcccgtgtccgacggcggagagggactgctgtcgactctggcggatagtccgttgcttaagggggcggtgtggcaacagcagcgctgtacctcgccttatggcctctccctgcaggcggatttcctgatcctgcccggcgagcgggccattatcgagatggcgcaaagctgtgggctcgaactcacgccgccagcgcagcgggatgtgcgtcaggccagcagctacgggctgggcgaacaggtaaaggcggcgctggacgccgggtgtcggcacttgattatcggcctgggcggcagcgcgaccaacgatggcggcatcggttttgcccaggcgctcggcgcacgattctggcgtaaggacggcaccctgctgccggctcccgcggcaggtcaggacctggcgcatattcagcgcatcgatttgagcggtctggacccgcgtctacagcaaagcgaaatacaggcctcctgcgatgtcactaaccctctgcttggcgagcatggcgccacctgggtgtatggggcgcagaaaggcgcggacgaggcagcgctcagcgagctggaggcgggaatggcgcattatagccagctgcttacgcaaaccctcggattcgacgtcagcgagcggcccggcgccggggccgcgggcggtatgggggctgcgcttatcgcctataccggcgccacgctgcgtccgggcattgacctggtgctggaactgcttaacgccgacgaccatcttcgcgatgccgcgctgacgatcgtgggtgaaggctggctcgatcggcagagcgcctttggtaaggccccggtgggcgtggcaggcaaagccgcacgccatggcgtgccggttgtggccctttgcggcgggcgtgatgagagcagccggcaattatatcaacaccatattgacgcaatgtggtctatttgccagcgccctatggcgctggcagagtcgatgaacacatgcgaaccgctcctcgccgacgccgcggagaatgttctacgaacctttctgagcgggtggcgcggagaggcacataagcggataactgtatga

SEQ ID NO: 230256 - DNA, 678 bp, Klebsiella pneumoniae
atgaagtatgtctttatcgaaaagcatcaggctgagttcagcatcaaagccatgtgtcgggtgctgcgcgtggcccgcagtggctggtacgcctggtgttcccggcgtcatcagatagacacgcgacagcagttccgtctggcctgtgatgccgcggttctcagggcattcactgatgcaaaacaacggtatggtgcgccacgacttgcggatgagctcccagcctacaacatcaaaacgatagcagccagcctgcgtcgtcaggggcttcgggcaaaggcagcccgcaagttcagtccggtcagctatcgggagcacgggctgccggtgtcggagaacctgctgaagcaggtcttttttgccagcggtccgaaccagaagtgggcgggtgacatcacctacttacgtacagatgaaggctggctttacctggcggttgtcattgacctgtggtcgcgagcggtaatcggctggtcaatggcaccgcgaatgacggcgcaactgacctgcgatgcgttgcagatggcactgtggcggcgcaagcatcctgaaaatgtcattgttcacaccgaccgtggaggccagtactgttcaacggattatcaggcactgctgaaacggcataatctgcgcgggagcatgagcgccagaggttgctgctataggttgctgctatga

SEQ ID NO: 230257 - DNA, 300 bp, Klebsiella pneumoniae; identical to SEQ ID NO: 104948

SEQ ID NO: 230258 - DNA, 1479 bp, Klebsiella pneumoniae; identical to SEQ ID NO: 104949

SEQ ID NO: 230259 - DNA, 873 bp, Klebsiella pneumoniae; identical to SEQ ID NO: 201475

SEQ ID NO: 230260 - DNA, 4131 bp, Klebsiella pneumoniae
atgatgaatattgatttcagtttaattcgcagcgcccccaaaagccgtaacgatagctttgaaacacttgccgtacagttatttaggaaaacctgtcgaataccgacagattcaacatttattagtctgcgtggcgacggtggagacggtggcgttgaagcatatttccgttcatcggacggtgccgtattcggtgttcaggcaaaatactttttccagcttacttccgcagaactcacacagattgatagttcccttaaagccgcgctaagcaaccattccaaactaaccgaatactggatttatataccgtttgacctgaccgggcgtgttgctgcgggaaagcgaggaaaaagccaggcggaacgctttgaagaatggaaaagtaaagtcgaatcggaagcgtcagcgaaagggaagtcactttctattgtcctttgtaccgctgctgttatctgcaatcaattacttgagatagacccttacggagggatgcgcaggtattggtttgatgatacgttgctgacagcagctcaaattcaacaatgtctggatgacgccattgcttttgccgggccaagatatacttcaatgctggatgtggtgacgaatgctcatgtcggcctggatttctttggtgggactggtgacttttgcgagtggtacgaaacatcattaacaccaatcgttcgagagttccgttcactgaatggatacggacgcaaatcgctggatatactcggcgaaacccgtgctacatccgccacggcattgattgaagaaataattgcctactgtgagagcatgagagataacaatgtcacggccacatcggttacagatctttgcgtcgctctgtcatccctattgacacttttcgctgatgcccgccatgctcaagaagataaattttatgaaaagcatggcaagcatagtgatacagaatcgttccgacagttccacgcagagtatatgtgtgcatttcctgccggagatatggatgcggcgagaaaatgggaagagcaggcgcagcaactgcaaaatttgctgacttctcaggtcattggtgccgcaacagcacattccttactgctggttgggccagcgggtatcggcaaaacccacgcgattgtcagcgcagcattgcgtcgactggaacatggtggtttttccctggtcgtctttggagacgactttggcaaagcagagccctgggaagtgctacgcagtaaaatagggctgggtgccgccatcgatcgttcgacattatttgaatgcatacaggcctgcgccgaacatactggcttaccttttgtcatttatatcgatgccttgaacgaaagcccgcgagaagtgcgctggaaggacaagcttcccgaattgctcgctcaatgcaagtcttatccagacatcaaaatctgcgtttcaacccgagatacctatcgcaatcttgtggtcgattcacgctttccagggtttgctttcgaacacatcggtttttcaggacatcaattcgaagcggtacaagctttcgcagcctactatgggctggatgcagagattacaccacttttttcacccgaactcagtaatcctttatttttacacttggcctgtaaaacgctaaagggcgaaggccgtgacagcctggatatttctttgccgggttttacctctctgtttcaaggacatctcaaacattgcgatgttttaattcgagaacgcctccactacgcaaaccctcgcaatctggtaagggctgcaatgatggcactcgcgaataccctgacacatgagttgccgcagaaccgaacctgggaaacctgttgcgaagcactgagcaaaatagtgggaactgagaccacacctgaatcctttttaaatgcattggcacatgaaggcctcattatcctttctgttgtagatgaggataccttcctgatccgtctgggttatcaacgctacggtgacatactccgtgctatcagccttgtggaagctcttgattcggatacagcaaaactagcggagaaaattgcagcgttaacagaagaagatgctggattgctggaagctcttgccgccgtgctgccagagaaaactgctcttgaaattactgctgaagaagtaggattaccatccgaacaagcccataagctgttcatccagtcattggtttggcgctcccgacaaagtgtagtggaagaaattgatgaacacatccatgcagcactgcatacacctggattatgggagtcggtttatgaagcgctgttttcacttagtctggttcctgaccatcgtctaaacgcaactaactggctggggccatttttacggcagtcatccttagctgaacgtgacacctacttgtcattagctgcgctgggatcatttgataacaagactgctgtctattcactcatccatgcagcactatttgctgacataacccattggcctgctgaaagccggaggctggccagtctaacacttgcctggctcacttcgtgtgctgaccgccgaatcagggatttatcctcaaaagggctaagcagaattctggcaaactacccggaaaactgccaaaccgtaatcagtgaatttgcatattgtgatgatgattacgtattagagcgtattagccttgctatctacagtgcatgcttattgtcacgccaacgcagaaatgcgtttatgccagcgctccctggtctattaagcattgcgtccgatagcgagaatattctgctccgggatacggttcagctattagtaaacttgttgaaaacaggagaatttcccacagccgtaacaagccaattacagcattaccagacaaacgtatcattaccatcacgatggcctgtactggcggatgtcaaacccctcctagatctggaacatttaccatcaaacatggtgctctggggagagtccatggccccggatttctggcgttatcaggtggtatcgaagatttccggctttgacttggagagcgccaatatcagccatgaaaacattgcctgttggttaatgcgagaagctcttaatttaggatatcccggttataaccactgcgcgctcaattatgatcgccatatcgggagtcagtatggctcgggacggggtagaaaagggtatgctgaccgactcggtaaaaaatattactggatcgccttacatcgactactgggcattctggccagtaatgttcccgcactggaagacccatattccgactacgaacctacaagtgatcatctatggtcagtcgacgtccgtaaagtcgacctgaccgatgtacgcgacatcaccgcagaaagtgtctatccagtactgatggaagaaacaaattatgcattccctgaccgcaattcagatatcaaaggttgggttcggaccgatgatttgtcaccttatgaagcttgtctgattcgaactgacaaggaaggggaacagtgggtagcgctttcacacagctattgggacgaggataaagcgccgaatgaaaatagctggaattcaccttacctggcagtgcgtgcttattattcaagcgcactcataaatgaaagcatccagaacttcaaacagaaaagtgcgcgcgatattttccaatataatcaggggaatagctgttgtcgcggttatcttgctgaatatcctgacagcccagtgtataaacaacttcttaataatgaggaagatagtgaagcatttaattttacagaagtcagtttactacgcggaagcgaatgggaatatgactactcatataccacgcccgagcgccaggataacctcattgcgccatgccagggaatcattcaaaaactcgaacttttatgggattgtcaaagcggttgggttgatcgttctggcaaacttatcgccttccaccataaaggtgcaagacaaagcggacttttcattcatcgttcggcgttgaacgcctacctgttcataacaggtgaagaacttatatatcgccgttttgctaacaggggatattttgatttagctggccgtaacggctcgcaaatagacctgaaaacttggatccagtaccgggcagacaaggcgccagtagttttacgagaagaggaactgccgtttaactgctga

SEQ ID NO: 230261 - DNA, 2085 bp, Klebsiella pneumoniae
gtgactcgacttgaaaaagaactttcccctgtcgcattgaacggttgtctctgcggtttgggacaggctcatatcgaaacaacgctgagtgcctggataccccaggcgcgggtgattggcgtggaaccaacattgattaccctggccgtcatgttcgttgtggcggggcaaaatacatcaataattccctttcccgagcgcctgcaaaaagccatgggtgagttacgggtacattcggccacagatccgcgacaagtgttactgtccgcactttccccggacacaataaacgcattagtcgtacgcgctgatacgccacgcttatgtacctttatgggtactttggtcggcatggatattcctgacagtatcagggcggcgctaagcaatttaaggcctgattttgatgcgatcaacctcagcaacgccgcagagttactgggcgctgcgcgacttatcgatccacaaattgccatattctggggagcggatgatgttcgtgaacggttattggcacgcctcacagctgaaattccgtggacggataaaattgaggttgaagcgcccaccggaggtcgtttgctgcgtagtcgcatttttcacgtcgcaccttctgtccagagcaatgtgcatgaagaagtcgtgcaactttgtgagctattgcttggactagatcctactgcagcagtagtcgccgttgatgccattgctgccgataaccttccgtcaggtctgtcggaatacgctgttgctaccaaacgcatacatcgagaaaacctacccaccaaggctctgccagaatggaataagcgctggattgccgcagcggcaaaactggttggaacagaaagttactccgcttacctgcagcgtgcgtacgctttgctggaacagcttatgccagtattggagcgtattgtagactgtgtactacggggcaaggtaccaccaccaaaaattcttgatcgtttcggtgaggtttttgagggggcttgtaacctgacttcaccacaggaaggtctttcaactggcgaggcgccggagcagcatgttaaaccgttacaaaatttactacattcctgctcggctgatttggtcaggcgctttaaccaattaccagaaggttatggtgtattcgtcatatggacaggggatctgctaaaaaatgtctgggaagcacgcagcgaaccgtggtcaatcgtggggatggaccctgagccattattgatgcggttggaaaatatccttgcctctttgcggttgttagccgccgaggctggtagcgaatcttcccatccaacaaagatgtggatagcgaaaacccgcaatgctcagcttggaaatgcactgcgtctggctaaagttgaagctgaacagcagttgaaaacgcgttccggcaggtacttacgccaaaccgaagccagactgcaggcatccggcatcgaattaacgctttatactcgtccggattggaagtccctcctgccttggccaaatgtagaacttcttgcagtggtcgacctggaaacgcctgctgattggctgatctggttcaatgagcatgcagcgcagattcgtgctgacgttggtgaaagtcgccagatgtggattatcccacgcatcgctggatttgcgatttcaaaattaacagtcggcggtatttccagtttcttttcctcgccacatcgtgttgatgattggcttgatacgctatccattcctcagctagacgatgccttggtgcgtgcagcacaacccattatcgacctgatcatagagcttgatggattacgttatttcagactgggtggtgacaagcgccctattcttgaacagaccgtgcgacaaaccgatgaacacaaacttgaaatggctctactggccttcgatgccagttcagcgggcacctctgttcataatcttcttcgaatgttgagcgacgacgttgcatctggagctgttaatcttgctcgagatgtcgcagcacttacacatggtaggttagctcccggcgctgagatactggtgagcattcaaaactcattactggcgcaagatattgccaatgcaatatctaatcaatga

SEQ ID NO: 230262 - DNA, 1506 bp, Klebsiella pneumoniae
ttggcaacatcacgtgcaggctctcatgctggtcggggttttcgatatcaagatgctgctggcgtctggctggccattcgctgctgggctaacgaactcccctatggggctgtgattcccgaagggaaagatgattacgaactaagtagtactataggcactgctctcgtgcaggtgaagtcacggcgtgaccatcttggaccatttcccgtggcggttgcagtcgggtttatacgagcgctctgggcgcgcgttgaaaatgccgccttccatacaaatctaattcttgttcttgagcatcctgttgccgaggggccagtggttgatcatttgttggctaagcatccagctctggtcagcacacttcaggatgacccgcagtgggcagtccttgccgcacgtactcaaatctggattgcaccaaatccttttgaggctgcagtggcaagtattcattgcaccatgccctgctcggatttggcggctcagattcattatggtgagttgttgaaacagattgccgcgctggcggacaaaaatggtctggtgagggatggtcgctttgaagggctgggtatatctgatgtggaaaccactcttcgtcgaatagaaccagcgctggacatggcgggaatggaatcagctttacgcgacggttactgtgatgttgtcgattttctgacaccattcaatgacccgtccttctaccagggtgtgaacacacggcctggccatctggctgcaggtcttgttgccgagcgtccgaatgcacgtcatgaggtactctccgcattagaatctgctggtgcggctttaattgttggtctgtcaggagctggtaagtctgctttgatgtgggaaaccgcgcgggcgagtcgacatactactcgatggtttgagatgagaagaggtgatgcggctgatgttcatcttctcattcagtttacccgtgcattaagggcttctcctgacgcgcctgtcgggtttgtgttcgatgacgttggtggacgttttagtcagctttggaatgcgctgcttaatgaagttaccgttggcagtggcatactactgttgggttcaatcagggaggaagacactcttatgttggcctcgcgttcccgggctcgcgaagtacgtccgctcatggaagaggctgtagcagaaaagatttggcgccaattagtggaacaaggtcagacaaattgggcgggatggcgcgagccatgggctaaaagtggcggacttcttctggaatatacgcatattttgacccgtggggaacgactgaagtctatcctcgctgaacagatagatcacggctccgcgagtccagggatgaagaactggcggttctcagtgttactgcccttgccggggcggcaggcgcggcggttgatgtcagccgattgccgaaggttcttggcattgaacaaggcgcacttacgcgagcgttacgtcgactcattgatgaacatctggtttccacaccagtggatggtcagctaa

SEQ ID NO: 230263 - DNA, 1155 bp, Klebsiella pneumoniae
atgaacgaaaccatcgaaaaactgattgccagtggaaaggaagggccatggtgggactttaaacaaacctaccaccaaaacaatgcagcccttgttcacgatatcctctgcatggcaaacgtcctgcatgacggtgaccggtatctgatttttggggtgactgatgaagggttgattaccggcgtgccggaagatggtaagcaaattaaccaggcaaatttaatcgatctgttaagaaaagtgagttttgcggagcaccattgtccggatattcagctgcaccacatcacactccagcataaggtgctggctattctacaaattcgtaacgtcagaatgaaaccttactatctaacacaggactatagcaaagaggggaaaactgttagagccggtgtcgtttacacccggcaacaagatgccaatacgcccgtaaatggctgtgccagccctggagatgtcatggcaatgtggaaagagcgctttgacctggacctggtaccaacagaccgcatcgtcaaactacttcttgactatgacaactgggagtacgatggcttcaatgaggcctactatcgacttgacccggattattccatttatatcgataatagtgagagagaacacggaggacagtactggtggtcaacgactggtattgagcaaccatacctttacgaatacattctcaaatatcgcgggcgagagctcgaacgattaccagtcgtgcattacagaaatgaaggcttaaaatttccatttccagagatagacacactgtcttatcctggaaaaagtgatggatacgagacagattattatgccgacgtttttaattttgttaaaggtaccctccagtacaatcttctaagtcatatcagggcattttattcactgccaggccgcggctcagacatgtccatgccattgaaaacacagaccaagccaccgattatcaggctaccattcctgttgtttgagagcattgaggagaaagaaacccggctgaaatttatccagcaacagcttgccaattttacgccagagggcattcccaaagatgcatcgctgaaatcaaaccaagtactaagaatggctgttgagaaacaattctcctggtgggtcttcgacctttataagcatagtaaagaatag

SEQ ID NO: 230264 - DNA, 6051 bp, Klebsiella pneumoniae
atgactttaaatgaaaagcccgatccatcaatgaagattgtaaaatcaaaaaccttgcccccagcagagggcgagcggcgggcaatacgtggctatatgggccaatatgaaagagccggcgcagccatttatgctgaattagagcgtgggcaattggagtggataggcgtggcggaccgcagtgcgggtatcgctgatgatttagtacttggatttaatggccttatcgttgggcaccagttcaaaacgtcccgtttcccaggtacatttacagtacagacactcttagtaggggctgatggtctgcttaagccattagtttgcgcctggcaaaatctttgtagtgctaacccaacgtctcacgtagaaattcgtttagttgtcaacgactatccatcagtaaacgacgcccccggaatggaagctccagctcacagcgctgccttccttgatgagtttgaacattttcccaaacgcacgcttgaggaatggcgctacagtaactggggcggtttagtcgaaatattgtttcaacattcttgcctaggtgacgatgatttcgagagattttttcatgcgttgcgcataattcatggctctgcagcagattttatacaatttcataaactcagtgcagaacaagcgagactggcgtctgatatagcaaaaatattacctcagttggtctccgataaacgagatagggaccgatggtcctgtgaagaactattaaatgaactagggtggaaagatccgaccaaaacacgccacgtacatcgctttcccatcggtgctcacgtccaacgcaaccgcgatacggaactacaacttctccagacgatacgccacacaatccaggggtatgtggcattgattgggcctccaggttcggggaaatcgaccttgctacagacaaccctggctaccgaatataacactcgggtcgtgcgctatctggctttcataccgggagctgcgcaaggtgtagggcgcggggaagctgatgatttcttcgaagacatttctgcccagttacgcagcagcgggctgcctgggcttcgccttcgagacagcagccaatttgaaaggcgcgaacaattcggtgaactgctcaaacaagctggcgagcgttatcaacgtgatacagtaagaaccatcattattgttgatgggctggatcatatcccccgcgaagaactaccagcccattcgctgttaggcgaattgccgctgcctgcagccatccctttgggcgtgacatttatacttggtacccagcgactggaactcaggcatctcaaacccgcagtacaggaacaggctgggcatccggatcgtctcgtaacaatgcatccacttgagagagtggcggtcgccaggatggcagacgttttgggtcttgattcaaccatttcgcgtgtaaaactttatgaacttagccgcggtcatccgctggcggccaattatctcattaaggcactgttatcggcagatgaacaggacacatcatgcatcctcgccggagggatggaatttaatggcgatattgaatcagtttacgcatccgcctggagagaaatcgcaaacgaccctgatgttatgcatgttctgggtttcattgcccgtatcgaagctccgatgccgctgaaattgctggcaacaatcgtagatgctcaggcgatagagcgtaccttaaagaccgtccggcatttactcaaggaaacctcaaaggggtggactgtattccataacagcttccgtctatttgtgctctccaaaccaaagataacactgggcagtatagatgaaacctattcacaacatatttatcgtgaattagctgaactatctcgtcatgcaccagagcattcattacagtcctggctaacactgcgctatctcgcccggtcaggagagcgtgatgaacttctggcgctcgcaacgccagcatattttcgacaccagtttgcacatggacgttcctgttcagagattgatgcggacatccacttggctctgattgctgcgcgttccacgtatgatggtgtaattgccacacggttgctactttgccgtgatgagatatccagacgaactcaagcactggagcatgccaatgaacttccgcgcgcgatgttaaaagttggcgatattgatgcggcgatctctttcgtccaggactttcccaatgcgggctatgaagttgttgacctgcttttggaacagggtgattttgaccgcgcgaaagaactgtttgagcaccttgaaccattgtctcaattgcatacccccagattcgagcactatggggattcgcataatctacaagaattcaaaaaatgggcaaaacgagtttttcacttccgcgacgctgagcaaattaagcaggcaatagactatttgaccgttgaggggttaaaacacgccacaagtttatcaacagatgaaaatattacctctattcgcgaacagttaaagtggacagtagtcgaggcaattgttaattggcaagcagacgttaatattcaggatacctgcaatcagtatggcattcatgagcaagagataccggttttgatgactcaggctggatttactgctaaagacagaggaaatagtaccttagcattggaattatttaagactgtcatggagttgcctgattttaatgatgtttctaatggcgggcgaagatcgattgcattattttatgccacctcgggttgcaccgatctggcttcaatattattcgaaaacctttttgcacctgcaatttcaatgggagacaatgaattagaatcaacaaaagcactgacgcttgcagccatggaacatgcgcaactttgcgttttgctcggaaaatccctgcccgacgtagtcacctccacacacgctatcttacggccgctgcagacacatgcttcagaaacgggacgcttgttggggctgtccataataaatgcatcatgcattccttctggaaatattcaaatggtctgtcgcatggtgatgagatatgtaatgcaactcaacagccattctggaaacgatacctatcaggctcaattggcattgacagctacatcaccactgatttgtacattaattaaaatttctgcgctgtgtggtaaggtcgaatataattcagtactaaatgaaattgataatgtaatgcctgctttaatattaaaaggcaatacactactccggcgtgaaatagcattggcaatgtatcaggctgacggtgaccgtgaaagggcggccgccagacttgagcctatggtaaacgagttggtagaaaatacacctagcgaacaactcgagaccctgtcagttctggcaaacagctttgctgcaattggcgatgttgatcgggcactaaacttgcttgcttcgatacatgaccactgtttaggctacgctctggcagcgcgtaaggaccctttatactctgtttggaaagacatattgattttggccaatgtggcagacccagaacaccgtgctcaacgaataggtcagttgatacaacaggttgatggtatgaaggaaaccgagggggcatctgccgcgtatcgtttgacagaagtgttgatcaatgaagcaatgcgtataaatgcgcacagtggttatatcgtggcacagaaactcagcaactgggggctgattccatggccaaaccgggtaaatgaactgattattggtatgctagatcgccgtcctgaaatggtgtttctctgtacaccaatttggtgcggactatgccttccattctacattgaaccctattatcgtgaccctactcatataggcaattatattgacgttgctgcaaatgcagcggggccttcatcaattgccaaactggtatcaattctattaccggcaatccaagttcatagtcgagcccacgagcgcctcacgctaataaatcgcctgagcaaagcggcattaagacacggttatactgataatcaacttgataatgccattactcgatggacttcagaggcccccgaagcccgccgctcctacacgccacaaaagtacgacgaggcttcaacccttgacgaacttcaacaggcatttgaatcaaatgaatcagatcctgagtatcatgcgccttatcgtttttgtgagcttgcagagtccgccgcattagacaaggtggtgcaaatgtatgagcgctggcattgcctgcagtcggatgcacgttgtcgttttttggttgcagagcggctagttaatgcgggggacacgacgttagccagaaaattagttgatgattacgataccagtagtgatcgggagatgtcatggagccaatggttaggaggaaatcgattccgtctcttccacgcgcgtaagctactcgatggagcagcaattcatcatgaagcatatgaagacttcatcagttcaattgtggctgggaaagagagcaccatgtcattgctaacagatatggcagacattcttcctgtgatctgtgagtcgccagactggcccgccgtctggtctatcctggcagagcagatgtctttcactcgcgaacaccgtattggtgaacttttcgaatttggaaatgaaaatatgaccgacgaagagttacttgcggaattgctccatttttcattacgattgcctatcaccgaagctcgacgacattcagagaaaactgcactaattctggcggtacattcaacaggagggcaaatcgtatttgagaacaccataacacgactcctgaccggcacccttgatgaaccattccaggcattgcaaattttgcttttgctaaaacagaaccactttgctgctaaatttggtgatttagtctctggccttacgaatcatcgtgatgtagctgttgctgaagctgcgtgcttgttagcacaatattggcagctacctgtatcgattgattttcatccgttgccgttgacctatcgattggcactcgacggagaccctgatcatgaaaatgctctgttagaccctgtgagtggggcaatgcgtattgaagtcgacttaggatggacacaaatgcttcgtcccgttgcacggagacttgcagagttggctgattgtgaggaaatgaacatacgccagcgtgccgcaacgtttattcagcaatggggagggctggcagcctttggtcctggagcaacaaaaaaaatcgaatctcagttacgcacactctcaatgcaaatcacctatcttaagccccatgcttacattggcatactggcacttcgtcatgtcgctggagagctgagcttggcaggcttgctctcgccaagggataaaccatcgctactggaacaaatggatgcagtacttccgccaactcctcgccctgaaatgcaaatccggccaactggcattaggcgaccgcttaaagtcaaggatgccccgtggagtgaagctgaagaaatgtggacaaatttggttgacgaggatgttaaaccctggatagatcgtgccgacgaattcgtaatagccgaggtttcacaattcaaaatgcatgatacccggcgtgctgaatatcaggtctatcgtattagcgcacctcaaattcatatttctgttgccaaattcatggcatggtatcaaagtttgcccgctgtcgtttggctgggtaagatgatcccactcgacgaagacctcgcaccgacaatagtcagacgtgtagtaagctccatcgggacaatgtcttcgccgggatatgccattacattatgtcctaatatccagatgcttctgggatggcatgaatccagcgagatgcctaatatttataccgacaaggactcaacaatcgtagcaagattagtgaactggcgagacgctgggccagtggatattgatgatgattatatatggggggaaggttgctatctgacgctttccaaagcaggcctgatacaaatcaagactctgttcggcgaattcaccgtgcgtaatttcgcaagcagggctgttcggcaattgcgacaaggcgaagcgcaaatgataaagacagctcagaatcagttcccgataccgtag

SEQ ID NO: 230265 - DNA, 846 bp, Klebsiella pneumoniae
atgaaaaaattacttataacagatttggataatactttatatgactgggtgtctttttatgctcagtcctttacggccatgcttgatgaactagtggttatccttggtgttcctgctaatgtgcttattgatgagtttaggcaggtccatataaaacacggtaattccgaatatccttttggtgctttggagttaaagtcagtacagcaaaaatacgctggagaaagtcgggatgatattataaatgctttagatggagcttttcacgcttttaattctgctaggaaaaaaaatctaaaatgttacgataaagttattgaaacattgtctacattaaaggagcaaggcgttattatcgttgggcatactgaggctcctgtaagaaatgctatctttagattgaaattcttggggcttattgaatttatgaaacacttatatacacccaaggatagatattataatgacttagacccgaaatcaaagtcttggattgaatcttatggtgattttatttttttgctcaacgaagatgaaaaaaaacccaaccctaggttgttagctgatatatgttctagagaaggttttaaaccaagtgatgcaatttatattggagattctttagttaaagatatatctatggctaatgatgctggagtcgattctgtttatgctgagtatgggcgccaacatgatccgaaatattggagtacgttagtttcaattacacactggacaaagagtgatgttgaaagagaaagtagattaaaagaattgtatggacatgttgttccaacacactctataaagtcatttgatgaattaattgaaatagtgaatttttaa

SEQ ID NO: 230266 - DNA, 1617 bp, Klebsiella pneumoniae
atgaactgtaaaactatcattctcaggtttagggacttggtaactccaactggagaaactatccagaggcaccaagaaattataaaatcgacaggatcagtgtgctggggatggtgggcaaaaccggatgaacaagtgtctggcgagttcttacaaattcaacgttaccttgcaactcctaagcaagagcttcgtatatttctttttgatagtggtcagtcaaaaatatatgaagcgcagttggttcatgtttatctcaacgggaatagaatgcaatgccctaacaaggaaaaatcaccagaatattattctgagcagcaatataatatgtggtttgaattttcttctattgctgagtgtgatgagcgtgaagtacagaattattcttattcagggaagatcacggactttttcgaagatccaactatgttctctgtttttgaaaacaaacaagtttcgagcttgagggaattaaagtatcaagatagaacaatttggtttgttgatgaatatgatcctaaacagcatgaatcacatgaaatattgttgagtaactcaaatgtcagtattcctggtgtttttccaaaacgaccgattgatttaaataatggaaaggttatctggttgtctgatattcattttgatgaagagaattcaaaacatcaattttctcaatataaccaaatcgagttatcaaaaattattattaataagcaggagttagagattgatgggcttgttgtctctggagacttaacgtggaaagctactgctgaagaatttaaaatgagtgctgatttcttccaagatatttgctctgttaaaagggttaatattgaagcaataggtttctgtccgggaaatcatgatgtcagttttagccgagtattaccagatgatgtaaaacatgcgctggaaagttatcatgaatcacaaatgggcaataaagaaatatcaaccgaagagtggggtgttttagtaggtcgagcagtgcaaccagaacacaaagataactatgagcgtttctttaattcaattgtaggtacaagtcctaatgaatatttatccatggggaaaagattcattataaagaatcagaaaattgtagacttctgcttcttgaatagcaaccaccttcagcaacataaagttgcatttcaaggacagggatttgttggtattgaccaactgagcaatgcttcgaaagagatgagttgggatggaaatgaaaaaatctctggcggatttagagttgtagttttacaccataatttatatccggtaaattatacaagtgttccatatgtgagtgtacctgctagcttagtttatgataccgaggctataataaagtggtgtttcaagcatggtgttgatttaattctgcatggacatacgcatgaaaaatttatcacgaaagttactaggaaaatcgctggcgcttcaaaaagtatttggatagttggtcttggtagttcaggggtaatttcatctcacttggttggtaataatgagttcgcagagattgatttcaatgatgatattattaaaatcaaattctttgacatcatcaataatgaaattgtagctcaggaagacactgtatacttggactaa

SEQ ID NO: 230267 - DNA, 567 bp, Klebsiella pneumoniae
gtgaccactgtgacaatacagcaggcctttgaggcctgtcagacgaacaaaaatacctggctgaaacgtaaagccgaacttgcagaccttgaacgggaataccgtgaacagctccttgccggtgacgaacaaatcccgcgcagaatgcaggatttgcgcgacaatatcgatgtgaaaaaatgggaaattaatcaggccgccggtcgctatatccgctcacatgaggaggtgcagcacatcagcatccgcaaccgtctccatgactttatgcagcagcacggcgcggagctggccgccacgctggcacctgagctgatgggatatcacgaacagcttcccgcagtaaaacagagcgccatgcagcactcggttgattatctgcgtgaagccctgtcggtgtggctggccgccggtgaaaaaattaattattccgagcaggacagcgacattttaacggccatcggattcaggcctgatgcggcttcgcgggatgataatcgcgagaaattcaccccggcacagaacctgatttacacccgccgacgtgcagaactgactgcacggtag

SEQ ID NO: 230268 - DNA, 240 bp, Klebsiella pneumoniae; identical to SEQ ID NO: 84307

SEQ ID NO: 230269 - DNA, 744 bp, Klebsiella pneumoniae
atgaaacccgaactcattatcaaagccatgcagaccgttatcagtaaacaggatgaaggcgcggaacaacgtattgccggtgcgctggccgcacttaacgaagcaaaagatgcacacacggccagcatgggtaaactcagcgacattgaggcttccattcagcgttgtgagcaggaacgacagaccgccctcagtgaaagtgcacaggccgaacaggactggcgcagccgctttcgaaccctgcgcggcaacctcactcctgaactgaaagctgaacacagtaaacgtatcgccagccgcgaactggctgatgagttcaccggtctgattaccgagctggagaaagacaaaagccacgccatgcttggagcatgctcctccggtactgcttatatcagcgcccatgaaaaagcgttcaccacttacgccaacagcgagtggaagaaggcgctggccggtatcagccccgcactgttacgtgcctttctgttgcgtatacggtcgctggaaatgagcggagaaacctcgccgcgtgcgaccgtgactcgtgagctgggtgatgccctgaatctgcagtcagccctgtatcattttgatatggagcaggagccggtcctgtccgtaaccggcatgaatcgcccggccataaccggggtggatatggcgctgttaagaagcccggccagacggatgaagcttgccgctgaactggcagcaaaagaccacgaacaggcagagggctga

SEQ ID NO: 230270 - DNA, 321 bp, Klebsiella pneumoniae
atgaaaaagccattaccgcccgtattacgcgccgcgctgtatcgtcgcgccgtggcctgtgcctggctgaccctgtgcgaacgccagcaccgctaccagcatctcaccctcgacgcgctggaaagcgccattgccgccgagctggagggcttctacctgcgccagcacggcgaggaaaaaggccgccagattgcctgtgccctgctcgaggatttaatggaagccggaccactcaaagccgcgccgtcgctgtcctttctcgggctggccgtgatggatgagctttgcgcccgtcatatcaccgcaccggtactgcactga

SEQ ID NO: 230271 - DNA, 501 bp, Klebsiella pneumoniae
atggggactactttgcttcaagaaaaccatgaaaaaattttaaacatactaaatgaagctaaagatgtggcgctaaggtattacaaattaaccaataagcctctcggaatcactggagaaatagctgaacatgaagctgcaactcttctcgggttgtcactatgttcagcacgtcagtccggatacgatgcgactgagattttggacgggaaagaatatagagttcaaatcaaaggtcgatatatgcctgatcctaaaaaagtctctgcgagaattggtgctattgatatatctaagccatttgattctgttcttttagttttgcttgatgaaaattatgatgcttttgccatgtatgaagcatcacgagatgtagtagtcgcagctcttcaagctccggggtcaaagtctagaaatgagcgaaatcagctaggcatagcaaaattcaagtccattagccgtctccgctggagcaaggttgctgaacctgagatcctttaa

SEQ ID NO: 230272 - DNA, 516 bp, Klebsiella pneumoniae
atggcaagaaaaaccaagcctttaaccgatacggaaatcaaagccgccaaacctaaagatgccgattaccagctgtatgatggtgatgggcttactctgctaatcaagtccagcggtagtaagctctggcagttccgttactatcgacctctgacaaagcagcgaactaagcagagctttggagcctaccctgccgtctcactttctgatgcgcgtaaactaagagctgaatctcgagttttattagcaaaagacattgatcctcaggagcatcagaaagaacaggtgaggaattctcaagaagctaaaaccaacaccttcttattagttgccgagcgttggtggaatgtgaagaaaaccagcgtaacagaggactatgccgacgatatctggcgctctcttgagagagatgttttcccggcaatcggtgatatcagtgtcactgagattaaggctcatactctggttaaagcagttcagccggttcaggccagaggtgcattagagactgtttga

SEQ ID NO: 230273 - DNA, 1551 bp, Klebsiella pneumoniae; identical to SEQ ID NO: 104937

SEQ ID NO: 230274 - DNA, 1455 bp, Klebsiella pneumoniae
atgtttgtcggttactttgttcatatccacacaatatatgaggttaagtgccgcgtgttcatactcacacaactcaatatcaaccaacggcagcgtttatgggcactgatggatactcacacgcgccagccgcttttatatccgttaatatatcttatagaccaacttgctttgcgttcatcagccacgcaatccgcctcacttcaagctctcaagtttttctatgaattctggcaccagaaacatggcgtgactttttgcttcagtttctattcctcgaaccacaatccattgattgccattgatgaacttacagcctttttccattatctggaaaatacgcatttatatgttccagcgttaaccataaggtctactacgcagaccacgcctcaacgtcgtacaaatattaggcatatacattcggttattcgttttatcagatatttgattaacacgtatatctcgccgagatatctagacggctcgcctaaagagctcacacgacttgccacgcagttaacgggacggttatcgatacataaagcagaattccgtactcttacccattctcgtcagatgagcaatggcacgacccataagcgctttcgaagtctgactgctgagatggtcatggctttttaccaaatcattacacccggttcaatttcaaagaaaaacccacttaatcccttccccgttggtgaaatccagctacgtaattttctgatttgcagattgcttttaaactacggattgcgtgtcagtgaattactacttttggagtgtcattcgatcaaaccaaatctccgaggggatcagttcagcctgattgtgaccacagtagatgacgacgtttcggatgagcgaaaaagattgccttcattaaaaaatgtctatgcaaatcgggtgttggcattagataaactggactttcattttctaaatatatatatccataaaattcgccctcaagcctcccatagttttctgttcacttccacccaaaaactacatccgccactgtcataccatgcagtttatgatatctttacgcggattgatgacattatgagtgtgcagtatcctgaatataaaacagatgaatattatgatgccattgaaagcatctcgcctcatataacccggcatacttgggcttatttgacacttcaacgcatttatcgtgaaaaacttcaaaaaactaaggccgactcacgccaagctgtcatggatttttctatcgttggattgatggatgaagccaaggatgaattacggttgcttggtggctggagtcacaatagccatatgcctgatgtttatgccaaaagatttctatcacagcaggctaacacggccaatcttcgccgaatcgctatggataacgaggccctgagagcaaccctttctaatgtatgcgacgaatggagtgcatatgagtcgaatcaataa

SEQ ID NO: 230275 - DNA, 1287 bp, Klebsiella pneumoniae
atgaaagacagagcgatgcaggcgttatacctgctggcacttgaccccgtctcggaaacaacggccgatcgcaacagctatggcttccgtccgtcgcgttcagcggcagatgcgattgagcagtgttttgttaatctcagtcgtaagagctctgcggaatgggtactggaaggcgatataaaagggtgttttgacaatatcagccatgactggttacttgccaacattccgttggataaacaggtactcgggaaatggcttaaagcgggattcatggaatccggtcggttatacccgacggaggctggtacaccacagggaggcattatttcccccgtactggctaatttggcactggatgggctggaagcggtgttagaaacccattttgggaagaaaaacaccaaagccagttacaaaactaaggtcaattatgtgcgttatgcagatgattttatcattacgggtatctcgaaagagctgctggaagatgaagtcaaacccctcgtggaagcctttatggtggagcggggactgcaattgtcacccgaaaagacggtgataacgcatatttccgaagggtttgattttctggggcagaatgtgcgtaagtaccacggcaaaatgctgataaagcctgctgccaagggactgcgtaaccacctccagaaagttcggcaaatagtgaaacgcaatgcggcgtcaaaacagggtgacctgataaggcaacttaatccggtactgcggggttgggcaaattatcatcgtcatattgtcgccaaagagacgtttagctatatcgactatcgcgtctggaagttgctctggcgctggtcatgccgtcggcacggtaatcgcaacaagtactgggtgaaacggaagtattttcactctgtaggcagcgaaaactgggtattccagagtatcgatgcggataacggtctgaaaaggctcgtttcctgcaaagatatcccgataaaacgtcacattaaaatcaggtctgaggctaatccatacgatccggttgacgagttgtactttgaacagcggcaggttacgcgctggaaagaaggtaaaatgcagcgaggaaaactgagattaatttgggagcgacaaggccatcggtgtccgatctgccaccagatattcagagacaatgatgactgggatgtccatcacattgtcagacgggtagacggtggcggtgacgaaatcgataatttaatgatgttgcaccctaactgccatcggttggtgcataataattgtacaccgcatgaaaaatag

SEQ ID NO: 230276 - DNA, 900 bp, Klebsiella pneumoniae
atgccgttgttcttcttcctttctgggcttttcttaatgaaaagtctgcaagttcgcggtcttccatactttatttttaataaagtagatactatactttatccttatcttatttggagtgttatacaaggcctgactgaattcttactgtcaaaatatactaacggaaatgtaagactttctgatgtttttgcgttactttggcatcccagagctcaattttggtttttatattctctttttttgaattttatattgatctctttaatattgagtttaaaagaaaaactgaaaataaatacaactattgttattgctttttcttttctttttgcaatttttatttatctggctttttcaaatatccttgatacaaatccccttaattatattgtgcacaactctgtgtttatactatcgggaattgttttctcttactatagattagatataaaaatacaaaacaatattgttttttttgcgactggttttatagtgccttttatttttcaagctatatatatatacgaaaatgtaatgggttacaaatttagtgttttagcgcttgctttttccttaattggaacaggtgttattgtagcactttgtattgctttttctaagcttgataaagctttcattaaaaacttactatgtttccttggccgttattctatgccaatttatcttatgcatgttttggtgggttctggtgttcggatttttatgtcaaaaattttgggtgtttacaatgtgggcatccatctctttttaggaatctttttgggtattttaatgcctatattattttataaattttttaaaaatattaaccttttctctttgagtggtgttttttctctggagaatctgttctcgagaaaaagaagtagcatttga

SEQ ID NO: 230277 - DNA, 717 bp, Klebsiella pneumoniae
atgaccagcaaattaaccagagagcgagttttcgctctcatcgcagagcactcttacgatagcgcgttagttgatgctcttgaacatctgctggccgcaatggacagcgagccggtggcgtacattttcaagcatccagcggggaggttgttctgggcgctgacggatgaaagcaataaaggccagagcgatgtcatgccagtctacgccgaaccgcagccagcgccggcattcccggattttgacaatgtactggaaagccttgattacgaggtgcgctgtaatgcctgggaaagtgagcatgtcatgcaggcctgtcagactacgtatgacgcctgccgcgccgccatgctgcaggaactccaaaaaagtgcaggagctgaagcaacctgcaggagtaacaaaaatgtgcaggtgctgcacaccaaatctccggcgcaatccgattgctgcccggcgcaaaaccacgtttctccggagcaaaacggcgacactccagcgcaaagccagggatggattccggtaagcgagaggatgccagaagatagtggccgttactggtgctatgtggaagagcaaaatgacctggggaaatcacactatcaatggaactgttcatggaatggcgatcggtggtgggttgaaagcgagggcggcgggattgtcacccactggatgccgctgccggcagcccctcaggaggtgaatcgtgaataa

SEQ ID NO: 230278 - DNA, 183 bp, Klebsiella pneumoniae
atgacaaacaaaaaaatgacacctgccgaaaagctcaaagcatcgcggaagcggtataaaaaaatctggcttcaaatggatatcgctaacgccaagcgattttacgagaaagaagtgctttccgttgacaccttcagatcgccctatgaaacgcgcaagaaaagagggaggacggcagattga

SEQ ID NO: 230279 - DNA, 327 bp, Klebsiella pneumoniae; identical to SEQ ID NO: 111898

SEQ ID NO: 230280 - DNA, 729 bp, Klebsiella pneumoniae
atgatcccttcgtcccgttcccttgtcaccctgcagcctgcccggcaggctgcgctgcaggccatcatgaccgtggagaatgcccgccagcgcggtgctcgtctgtctgcagcgccacacgtgcgtactttcctgcgcctgctgaccgggaacagccgtatgaacacgaccgtggcgcagcgcattcccggcctgaactgggacccgaaacatcgtctgagcagtcttaaacaggtggaagaggcgctcgatgcactgattgccagtcacggggagtgctgcccgctgccgctgccggttgatgttcaggccgaactgttccccgaggtgcagcacagccggactgagcgccggaaacagcgcagcagcctcgcctttacccgtaagatgcgtcgggaagaacgcgcaatggtgcatcactggcgattacggcagaacctgctgggacaggccgtcacggagctgaatttccagtcaccggaaacggtcatcagctggtaccgccggtgggccggtgagtttgacgcgcgtgagcttgcccctgccttctggcactggcgatcgcgatatgcctcgctggcctctctggactggctgcgggatgccggggagccgctgtatggtgtcatgcatgaaatcagcttcattgtgagagagacgccggagtctgtgcgtcaggcagaacgctggcaggtcccgaacaagctgacacaccggagccacggatga

SEQ ID NO: 230281 - DNA, 432 bp, Klebsiella pneumoniae
atgaaaacgttactgactctggacgtcctcaaaaccatgtccatcgacgagctggaagattaccgcgctgcgggtgaagattttcgccgtgagctgacccatgcagtgatgcgtgttctgcatctgccgtcaggctggtccgtgaacggtgaatatcgcagtgagtttggcggttttttcccggttcagatccgcttttctccggcccattgccattttgatgtcgctgtctgcagccccggagagttgagtgagcgctggatgatcgtctttgtgacacgtggtggccagccgttctctgttgttcgcagcatggaagcatttaacccggagttgatctcccacacgctggcattgatagcgtgtctcgatactgacggatattcctgcgccagtatcatcagtacgctggaacaggagggcgcacaatga

SEQ ID NO: 230282 - DNA, 2001 bp, Klebsiella pneumoniae
atgtcagtgaccgagtctaaagcaaaagcgccggttaaaaccagcaaaaaatcggtgaaccctgccgaatccgccgccctgaaagccgcgcttgaggctgctcaggttgagatggtgccgctgtcggcgctggtcaaatccccgctgaacgttcgcacgatcccctatccggctgacagtgtccgggagatggctgactccatcatggcgatcggcctgatccagaatctggtggttcactcgctgccggacggtatgtcaggggtggctgcaggtggccgccgtcttgccgccctgcaacagttgctcagcgagcagcgcatcgatgccgggtatctcgttgtcgccaagcgtgtcagtgacgacctggcgatggttgcctcgatggtcgagaacaaccagcgggtggccatgcatccggcagagcaaatcagcgggttccgcaccctgtcagaagaggggaaaaccccggctcaaatcggggacctgctgggctacagtgcccgtcacgttcagcggatgctgaagctggcaaacctcgccccggaactgatcaccctgctggcagaggacaaactcgacgtggagcagtgtcaggccctgagtctggagagcgacccggcacgtcaggtgcaggtgtatgaccaggtgaaaacctcatacggcagcacacccgctcacctgctgaagcgggccatcacggatacggaaatcgccgtaacccactcccgcttcgtgtttatcggtcgtgaagcgtatgaggccgccgggggcgtggtgcgtgaggatctgttcagcgcccaggagggagacggaacggctgatggggtactggttgagcgtctggttcaggagaagctggcggcggctgcgctggccatcgaacaacaggaaggctggtcatggtcactggctcgtgagggctccatcagaaactacggcgatgaccgcgagcattatctggtgctgccggcgccggagggggaattcagcgctgaggagctacagcgtcttgatgaactgtacgccacgctggaggcaacggaaacctttgaggatgaagccgcgattcaggtgctgattgatgagattgaaaatgcggcgtcagttcgggcgtggacaccggagcagaaagcggcctgtggcgtggtggtcagtctgtatgacggtgagctttgcgtccagcgtggtgtccagaagaagatccagacggcggtctctgacgtcggggaacacggtggcgatcaggctgccgtacatgtggtcacccgcagtatccctgatgcggcagaaggcatcagcatgccgttgctgaaaaaaatgtcttcagaaaggacactggcggttcaggccgaactggttaagcagccacagaaagccgtggccctgatggcctggcggctgtgcagttgcgtgtttgactactgcaccaccacccggcatccgttcgtcctgcgccttgaggtgcatcacagcggcctgaccagtgaagccccgaccggagaggaaggtcaggcatggcggtatctgatgcaggagaaagcccgtctggaagccctgctgccggaggggtggcagaaggatttcaccaccttctttaccctcgacgggcagaccctgatgtcgctgatggccttctgtgctgcctgttccgtcgacggtgttcagacccgtgaatgtggacataccggccgcagtgacctcgatggcgtggaggcggcgctgggatttcatctgcgcgactggtggcagccgacagcggataacttcctcgggttgctcagcaaggcccagattgtggcggcgctgaaggaggccgggctgaccggagccgcctcggatgccgaaaaaatgaagaagggtgatgctgccagccatgcggaacagtggctctccggctcccgctgggtaccgggctggatgcagtccccggatgccgcaaagccggacgatgcacatgctgcccctgacactgacgaaccgacttcacacgcagcctga

SEQ ID NO: 230283 - DNA, 249 bp, Klebsiella pneumoniae
atggaccataacgttttgtccccgcttgaatctctgccggatggcacgtttacccgcgagcaggctcagattgtcgccgcgcagtatcagaatgtggcgattgaagatgaccaggggacccattttcgccttgtcgtccgtcatcaggatgacggcagcatggtctggcgcgtctggaattttgaaccgggcggcgaggacatgatgaaccgttacatccgggactacggagtacgcaaaacgcaataa

SEQ ID NO: 230284 - DNA, 543 bp, Klebsiella pneumoniae
atggcagcacgtggcgttaacaaagtcattctggttggacatctgggacaggacccggaagtgcgttacatgcccaacgggggcgcagtggccagtctgacgctggccacgtctgaagcatggcgtgacaagcagacgggagagatgcgcgaaaacaccgagtggcaccgtgttgtcatgttcggcaagctcgcggaagtggcgggcgaatacctgcgtaaaggcgcgcaggtctacatcgagggccagctgcgcacccgcaactggcaggacgatgccggagtcacgcgctacgtcaccgaggtgctggtcggccagaacggcaccctgcagatgctcggcggccgccgtgaatccggtgtgcctgagagcactgcgcagccgcagagtcctgccgccccggcacaacctgctcaggccccggctaaatccccgaaagcgaagggcggtaagaaaggccgtcaggatgcggctccgtctcagcaaccgcctcagccactcccggatgatttcccaccaatggatgacgacgcgcccttttaa

SEQ ID NO: 230285 - DNA, 321 bp, Klebsiella pneumoniae
gtgcgtatgtctctgatgtttgctgccgtgacgcttttaaccggcattaacctgttttttattccgtttcagcctgttccggctctgtggggggctatcctggccgttgcttttgttctgattaatgtcgtggcggataagctgcgcctctggagtggcattgcgtggattatcgttgccggcatcatcataacgctgatgctgaaggggaaagagccgggtgacgaatttcgtgccctgatcaccgttttcgctttcctggcttctgcctggtactgcgttgttcagtacagaaaagagaagggcgaatctcagtcctga

SEQ ID NO: 230286 - DNA, 255 bp, Klebsiella pneumoniae
atgtcgcagtggaatattgcctctttttcaaaagaggagcaggacaaagttgccgtcgataaggtggccgctgctgttgcctggcaggaacgcatgaacaagcccgtcatgccggaacttgttgaacgggaacagcctgaacacctgcgcgaatatttccgtgaacggctctgcgtacatcgactgaacagtcagcagctgccgcgcgcaaatgcgcccgaatataataaaccgggcgatgatcagcagaattga

SEQ ID NO: 230287 - DNA, 426 bp, Klebsiella pneumoniae
atgtatcatgcccgtcaaaccatgctgaatgttgaggagtccgaccgtctctcgttcctgccggatctgtttggtaacgattttctggccggagagatgcaggtctatgcgctcgctgtgaaacacatcaccgattactgcggaggcttctggcatttcatccgaattccggagggcggcggctacatgatgcctgacggtgaccgtttccatctgactaacccggataactggtttgatcggtccgtcagcgcggatgcggccggagttatcattacggctctggcgatcaaccgccgtatctggctgcaccatgaacgcggtgatgctgccctgacacgccacctgatgctgcgggaatcgcagctgtgggatttcattgactctcatgacgaatgcgcagctatttacgcggctcttgactga

SEQ ID NO: 230288 - DNA, 231 bp, Klebsiella pneumoniae
atgaatacgggtttaaggcaggttctgcgatatgcaggcgtcccggttgacgccgctgaaccggtgcgccggcaattcggtagccgcctgattttaatcgtgacggttgctcttcttccgctgttgattgttgacgtccctcagtggatattagtgctctcccagattatctggggaagcggtatgtatattggtatctccgtggccagtgataaaccagatcgccggtaa

SEQ ID NO: 230289 - DNA, 252 bp, Klebsiella pneumoniae
atgacaaacatcattctgtgtgatgtgactgccagcgtcagcgaacttaaaaacgatccggtggccaccgccagtgccggcggcggctacccggtcgcgattattgaccgcaaccgccctgttttttattgtgtgcccgcggctctgtatgaacaaatgctcgatgcgctggacgaaaaagacctggtgcaattgatcacagaacgtcaaaaccagccgctgcgtgaagtggatctcaatcagtatctgtga

SEQ ID NO: 230290 - DNA, 762 bp, Klebsiella pneumoniae
atgattaacttaaaaaagtttgacaccattacaattaatgatgtatcaatggttaattttcttgatattattcataataatttcaatagaaaagatggattaaaaatcattgttactccaaatattgatcatttacaacgcttgcgaaattcagatgatccttcattttgtaaagcgtacgaaatatcagattatagattatgtgatagtcgtattgtacaaaagctgtcctcttttaatgaacaaaatattcttaatgtagttccaggcagcgatttaactagagagttacttaagcttgactgggtgagaagggcaaaagtaactattataggaacaacagagaaacaagtagaacaattaaaaaaaaattttcaattacataatattgaacattttaatccttcaatgggatttgcgaaaagaaataatgaagttgaagcttgtgttgattttattattaacagtaatcctgactttgtgttcttggctgtagggtctccatcgcaggaacaccttgcattttcactctaccaaagaataaatagcgtcaatccaaattcttttgcggctcaactattttgtattggtgcatctttagactttcttacagggaaaactaaaagggctccgatatggatgcagaaagctcacttagagtggttacatagagcgttaagtcaaccgaggagacttgtcccgagatattaccgaaatttaaagtatgtattatggtttttattgtttagaaatagagcctaa

SEQ ID NO: 230291 - DNA, 1170 bp, Klebsiella pneumoniae
atgaatatattattcttaacaacaatcttacctataaaagcaaagtcaggaggggagattgttacaaagcagataataaccggattgatttcaaacggtgccgatgttgatgtggtcggctacgttaggccagatgaaacaaatttgagccttccaacaaattataatgtcgctgaagcaagagtcattgaaacacagggacataaaaaggaaactttgaagtggcttttgagttccttagttaaaaaggtaccattttcatctgaaaaatatgttggcgctaagttcattgaaatagttaatgctaagctcagacaaaagcaatatgattatatatttattgatcatactcagatgctatggatatgtaattatttttcaaatgatcaaaaattgattttgataagtcataatgttgagagtcagctttatgatgatcttgcaaatgactcttcaaattggttgaaacgtaatattctacgtttggaatcatcgaaattagaaaaacttgaacaatcgtctataaataaaattagccaaatatggtcattgagtaaaaatgatacagcgtattattcaaagctaaataactcacaatataatagtcctacttgcataacttttgatgcattgccattattagaaccagatttattacctctacctgaagcacattatgatgtatctctccttggtacttggtcatgggatgcgaatatgaaagggcttcggtggttttttgataatgtatatcctttgttaccagtggaaattacaattcaagttgctggaaaaggtgctgattggctagcggataaatataaaaatgtcaaatataaggggtttgtcgaggatgcccaagaattcttgtcgaaatctaaggttattgcaataccatctatttctggcgctggagtccaaattaaaacgttagatgcaattaccatcgggcgccctattgttgcatccgagtttgcattacgcggtttagaagatataccttcttatgtttatagttcacgtcaagcttctgaaatggccaaccagattatgaccaatctcgaaagaaaagtaagtcaaaatgatcttttagttctaaagcatgaatgcaatgaatggtattcaagtaaaattaataacttcaaagaagtaatattaggaagtttatag

SEQ ID NO: 230292 - DNA, 291 bp, Klebsiella pneumoniae
atgagaataagggacagtattgctgagcggttagaggcatgcgggctctaccgtcgggcggcatccagatggattgaggtgatgcagcgttgcctggacgatgaggaccgagagtggatccgtcaccatcgcaatcagtgtctgaaaaaggcgcaacgtccgccggcgccgaaagaggagtttgccgacctccaccaggcggcgaaagagactcaatatcgtatgggcattgcgaagccctatggcgaagcattcaggctgcccggcaaagggaaaacggccgccgagtaa

SEQ ID NO: 230293 - DNA, 2034 bp, Klebsiella pneumoniae
atgaaactcgctgcgcttgccacgttattcgtgcctgggatggcctttgccgcctggactaccaccgactttcctgcttttaccgaagaagggaccggccgattcatcagccagaaagtggttgagaagggtacacgtcccctgcagctaaattttgaccagcagtgctggcagccttccggcggcattaagctcaaccagatgctgtccatggagccctgtcgcggcacaccgccgcaatggcgcatcttccgccagggtctgtataccctggaggtggatacccgttccggcacgccgacgatgatgatttcgctggaggaaaaagaggccagcgccgcggcgccgcagatccgccagtgtccgaagtgggacggaaaaccgctgaccatcgacgtcagcaaaaccttcgccgagggcagcaaggtccgcgatttctacagcggtaatgtcgcgaccgtcagcggcggcaaaatcaccctgcagcccgccttcggcagcaatggcctgctgctgcttgagcgtgccgagacggccgccccggcgccgtttgactggcacaatgccaccgtctacttcgtcctgaccgatcgcttcgtaaacggtaacccggccaacgacaacagctatggtcgccataaagacggcatgcaggagatcggaaccttccacggcggcgacctgcagggattaaccagcaagctggattatctgcagcagatgggagttaacgccctgtggatcagctccccgctcgagcagatccacggctgggtcggcggcggcacgaagggcgatttccctcactacgcctaccacggctattacacccaggactggtcgaaactggacgccaacatggggaccgaagcggatctccgccgactggtggatgaagcgcataagcgcggaatacgtattctgttcgacgtggtgatgaaccatgccggctacgccaccctggccgacatgcaggagttccagttcggctccctgtatctgcaaggagatgagctgaaaaaaactctcggcgagcgctggacggactggaagccgggcgcgggacagacctggcacagctttaacgactatatcaacttcagcgacaaagccgggtgggagaaatggtggggtaagaagtggatccgcaccgatatcggcgattacgacaatccgggctatgacgatctcaccatgtcgctggccttcctgccggacctgaaaaccgaatcgaaggaggtctcaggcctgccgaacttctataaccataaaccagacaccgcagcgaaagcgatcccgggctatacgccgcgcgactatctgacacactggctgagccagtgggtacgtgactacggcatcgatggcttccgcgtcgataccgccaaacatgtggagatggacgcctggcagcagttaaaaacccaggccaccgccgcgctggcggagtggaagaaagccaatccggataaagcgctggatgcggcgccgttctggatgaccggcgaagcgtggggacatggagtgatgcagagcgattattatcgccacggttttgatgcgatgatcaatttcgactaccaggaccaggcggcgaaagcggcgacctgtatggccaatattgacctcacctggcagcaaatggcggacaagctgcagagctttaacgtcctgagctacctctcctcgcacgatacgcggctgttccgcgaaggcggcaccaccgcggcggagctactgctgctggcccctggcgccgtgcagattttctatggcgacgaatcatcgcgcccgttcggccccaccggctcggacccgctgcagggtacccgctcggagatgaactggcaggatgtcaacggcaaggcggcccgcagcgttacccactggcagaagatcggccagttccgcgctcgccatccggcaatcggcatgggcaaacagacaacgctgtcgatgccacgtggttacgggttcgtgcgtgagagcggtgaagacaaagtgatggtcatctgggccggccagcagcagtaa

SEQ ID NO: 230294 - DNA, 237 bp, Klebsiella pneumoniae
atggtaaaatataataacattgacaacgaattatttcaaaagatatgtgaagtaaaagtatcagtcattactaagaatgcttttatttataaagcaataattcacattttgaaaaaaatagcaattccgcacattcgattcataatcaaaaaaatgatgactatctgcttgataaagatattgtgttttatgagaccgtgccaggtgaattattcttacctaatgccaaatttatga

SEQ ID NO: 230295 - DNA, 1005 bp, Klebsiella pneumoniae; identical to SEQ ID NO: 31749

SEQ ID NO: 230296 - DNA, 327 bp, Klebsiella pneumoniae
atgcaaaaagaacactttaaagcaaatactcaatataacgactacaaaggcactgttgcagcggacagggctgatcaagacagcttcagtgacttcctgagagctaaagggattctgaaagaaggtgagatagttaaaggtatttccttctactcagcagagcgattctttgatgtcgaggcgtatgtaactgatgaccagcacggcttacgtagagaaagagtagagataactcttgatgaattttttaaaacgttcaaacgtttctcaatcaaactctctcgcaacggggaactcgacgatcaagaaatcgagttcagggagtag

SEQ ID NO: 230297 - DNA, 162 bp, Klebsiella pneumoniae; identical to SEQ ID NO: 182004

SEQ ID NO: 230298 - DNA, 552 bp, Klebsiella pneumoniae
atggcaacgactattggatacgtgagggtatccacctctgaccagacaatagagaaccagaaacagcagattaaagaagctggttatcacattagtaagtggtatgtagatgaggcggtaagcggttctgtgagagccgtagagcgttctgggtttggtgaactactcaactatgtacgtgaaggcgatacgctggttgtaattggtatagaccgcctgggacgtaacacgattgatgttctctcaacagtagagactttacaggccaaaggtgtaaaggttatcagcttgcgtgaggggttcgacctgtcaacgccagttggtaaagcgatgttaaccatgatggcagggcttgccagcctggagaaagacctgatagcagagcgtagaaccgctggaattaaacgtgctcagtcagaaggggttcactgtggcaggccgaacaaggtgacgccaaagcaggtacaggagcttgttagttctggtttatcaccaaaggaaattcaaaaagaattgggtattagtaaggccactttctaccgtctgaaataa

SEQ ID NO: 230299 - DNA, 438 bp, Klebsiella pneumoniae
atggcagaaaaattgaaagtatcagagtttagagacagtattggagtacttgatcaatacgctcgtgaggctgaacagcttgataatgataagaatttttattatgaagaagctaagactgtattagaatctttaaaaactcaggcgaatataatagatacaggggaaaagcttaattatattgtttttaagtttggccctgatttgaaatttagatttgagttgattaacaaaataaaattcgtagagggtgaactacgtctgtatgagagtacaagttttttaaaagagtgtttaagtgatatttattcttattcatttaccttcgattcacataataactttagtgatgttgaggaagtattagatgattcagatttcagaaagcatttcagaacaattcttttaaaactaattaatcagataatagctgagtaa

SEQ ID NO: 230300 - DNA, 165 bp, Klebsiella pneumoniae
gtgaatattaatttcaaatctgaagtgtttagcaagctttaccagatggcagagaaacaggataccagcatccctgtactcattaacaaactaatcgaaaaggtccttagcgaagaggaaaaaaatgaacaaaacggaacaatccctaacagtaaaaatcgttaa

SEQ ID NO: 230301 - DNA, 1470 bp, Klebsiella pneumoniae
atgaacaaaacggaacaatccctaacagtaaaaatcgttaacgcaatctgtggcagtggcaagagttacaaactcaaacaatatataaaaaccaatcctgataaaaaggcgctgatcgccgtcccaactcacgatttagcttctcaaacacaatcagacctccagaaactcggcatccctgcatatcataatcaggtagataagggggagagcgcaacacgatcattaataaacgcgctggatgatgattttgggcgaaacgttgttattgtgacccacgaatgcctactacatttttgtctatatgcctactgtgatgagaaaacccagtataaattaagtctgtttgacatctatattgatgagatcccctcagcctggtacggggctgagatagactacaagaatgaggattataaaaaatcaaactttccatttttagagtggatagaggaacagaacggtttatattttgttcgtgagcaggacagagaaaagtttcttgcatattacgaaagtgaacacgccaacagcaaacttctgaaacaggctctattttctctgctaacaggtcagggaatgctcctggaagaggatagatattttttctcatttactgctaacccaatcctgtatagcgccctgtgggctaaatcattcaccgtgttaggcgctaacgttgggattagtgagtttgtattcgctgctaaaaccatcctgaatacagaaatctcgctggctgagaatgagttacagcctgacctgatgcgccatgttcacactgacacaaaacggattgaactgatcccggtgtttaaccagaaatgcaccaaaaaactactgagtgagtattacagcgatatcctgaacgggacacgcagagtactgagggacgaatttatctataccagcaacaacgatgagcagtacagcaacggtttttattattccacacgtgctgatgacgtgttagagggtggtgaacgtgtttcaatggcttcctatggtctgaaccattaccagcacctgcataaagcggcgtttctggggtgtgcaaacctcgatgggacaactattggtcactggcgcacatattgcgaactgaatggctgggactggcgggaacttgaggagaaacggcaagctgcattgaactacgaaaaggtttatcaattcgtttcccgctgttcggtccgtgtcagggggaacagcaataaacagatttatattgttcctgatgtcggttgtgctgaatacctcaaacaacactattttcatgacgctgtgatcaaaccagaaatgataaaaacggagagaaaaaaaagaaacacaagcaaaggggatgataaatttaacttggttaaatctctagttgatcaaggtttgaagagaaaagatatcgtagaaaaaaccggattcaaaatagatactgttaaattttatttaaaacaaatcaaaaaagcagcttaa

SEQ ID NO: 230302 - DNA, 498 bp, Klebsiella pneumoniae
atgaaaaaaatgctggtagcgctggttttattacttgctcctctcttggctttcgctgggggaagtggttacggtaatactaagtgggacatgagtccatcagaagttgttacggctcagggcaatggcgcacatctgatctcaccagaaaagtataatgataactttgggaaagtgcggattgataatgtatcgatcggtagcggtctttataccgtcacattcctctttaatagctctgatcgtcttgtgcaaaccaatgtagccagcaatgagaagaaaaatgaaggcatcgtggcccgtcaatttggcaccttgaatcaactgttgacccaaaagtatggtaagcctgagttttcggattcaaataaagcaacctggaaacttcctgacaccacggttgagttaagtcagatggtcatttctgggattatggcacagacaattgttcggtacattccaaacagtagggtggcaagcgatacttcaaacctttag

SEQ ID NO: 230303 - DNA, 552 bp, Klebsiella pneumoniae
atgcgtattaagggattatcacttttcttctgtgccgtttgtgttggttgtagtgggtactcacagcggcaagagcatttagatgttccgacctactcggagagctacgatcaagccctggggtggttagtgactgctcgttatcgggatgcagaaaatgcagaaatcgttatgtcattggttggagacttttgcagaagcaaagggaaagaagcgactctctataagacgactgctggcagcacatccacgactcaagaaatttgggcttgtcagacacccccgcagttaaatgataccgacatacttagcggggtttattgccatttcattgctaacgcgcctcgctacactgttgatttttcaaaccatcagaaagaagttgcagaacaaacctttgctaaagcctttgtagcaaaagggatcgaatatccggttggcggtttttacgagaagtatcagagtaacttcgcaacttgggcagtagccaaacatggcgaaagcagcaacaccgataaggtgcggcagtggtttgacaagcactgccagtaa

SEQ ID NO: 230304 - DNA, 411 bp, Klebsiella pneumoniae
atggcaggagtattggcaagtacggctgcggcaatcgggattattgataaagcggtgagcatcacccagaaactggctaataacagcgatgaacttgacaaggctacgctcaaacttgagttggctaatctgatggttgaacttgctaacgccaagatcgaagcaataaccactcagactttactttttgacgctgaacagaaaaataagcagcttgaagaacaactgaaagataaatctacatttatcttcaaggataatgtttattggaaagatggagatgaagttccattttgccctcattgttatgaaacaagcaatatcaaaagacacatgcaaaagtttgctgtcacgaggagtcaaaacgcttggtactgtagtgtctgcaaattgagtgctcgattatcataa

SEQ ID NO: 230305 - DNA, 561 bp, Klebsiella pneumoniae
ttgaacagagccgtagtcttagatgaacagcaagccaaagcgatcagagagtggctaaacgctcataacaagagcctgatagctgacgttacgttaatgatgcaagccgccgtactgcgtgtgggggatgccgtagcgttacgcttcgacgaagtgatcaacggtgagattgatatcgaagagcagaagacagggaagcgtaaagccctcacccttccggctccagtggtgcagatgatcgcacgtcgccgtgctgagtttccaaatgatgtacatgtgttcaggagtcagcgtaaccgctcgatgaacaagcaagcgcctgtacgacgcgaagaagtgagcaagcagatcgcagaagccgccaaagctatcggcattcatggcactgtatcggcgcacagcttccgcaaagctggcggcaatgccatctacaagcgttcagcaaacaacatcgcgttagctatgaccgtgctcaatcacagcaatatcaccgacaccaggcgctatctggacttagacaagcaagccgttagccgggtggtcaatgaaatggacttatga

SEQ ID NO: 230306 - DNA, 687 bp, Klebsiella pneumoniae
atggcagaacagggaacggatttaaggcgatatttacgacatggaagtattgtaggagaaaacgggtcagacgactggcaaactccgagagctatatttgaggcgttgaataaacgcttccaatttactcgtgatgcagcagctacaaaacagaatagccattgtgctcgatattggactaaagaagatgatgctttattaatggattggagtgcggagaaatcattatttataaatccgccatattctaaagtggaaagtttccttgctaaagctcatgagccagaaaccgcagtatttttgattccgttccgtccgcagacgggatttttcttgcgttatgtgtgggcttcacaacatttgcatgaaatgatgataatccatcgagggatacgttttatccatcctgatagggcggagtcggtacgtagcccaatgcccgtagtggtgttggtttatcgtaataagctcaggaagcgtgatcttcttattacggtgaactgtgctgatacgctgcaaaccctgcatgtggtagcggggcagaggccaggccatcccctggaacatgggcacagtatcagaaataaaattatacaggaataccaacgaggcaccaccgttgcggagttggtgaggaagtatgaaggcgaggtgtcgcggcgtagcatctaccgctgggtgaagtga

SEQ ID NO: 230307 - DNA, 174 bp, Klebsiella pneumoniae
atgaaatggttcaaagcagaagatgttgttaatgcttttaatgaaggcactatctcccgttatcaaattcgaatgaatcgtaataccgcccgccgccgtggatacccagaacgtgcagcagtgtttgatgaagcactacgtattatcgatgaagcaaaagcagcaaaagaataa

SEQ ID NO: 230308 - DNA, 162 bp, Klebsiella pneumoniae
atgagcgaaacccaaacgaaaaaaccgcgcacttgcctacacatacctgatgaaatttttcaagtcttatttagggaagcgagaaatcagagagtgacagttacagaatacatcctcaatgttctgcataaagaggcaaccaatcttaacaagggcaagtga

SEQ ID NO: 230309 - DNA, 828 bp, Klebsiella pneumoniae
atgacaaaaataaaatacatcaatactgatgtgttccaatacgtgccgactgaggatgctttcaatgaatgtacgcgaattaccaatctgaaaactggtgttacagaatacctatcccctgctgataaacagttttacgtaagaatgcgtcaccgccaccagttttttgtaaatgagcgaggaggcacctattacgatgatattgatcagcttggtgccagtattggtattagctcatcaacagcaacgcgtattgttgcaaagttgaagaaagttgggttagtggttgccacgctgtcagggcggtctaataaatggacaatactaccgctcacgccggataacttcctctttgaacgtgacattaatgcgatggaaagaggagcagcgccagaatgggtggattgtctaaaacatcccgtatttggtaacgtcaaagaagatacatctcaagaagtgaaggaagaaaagcagcaatctgtgccggaacccgatccgatgtgcgagtttgacgaattgccggaagatgaaacgccagcgccggaaaaagtgaagccaaaacccgcgaagaaaccagcgccaaagaaagcacccgccaaacagcaaaccgtttctccatttgagtttaaaaagcctcgtgatgaaacaagggattggttttatctaaagcactatcagggtgcagaacggtttaccacctttacagattttgatctcccgtatttggcactattcaaggcacagggcgcactcactaatgcttatgctctggattatctccagcttagaacagatcaaatacaacgacagttatcgaggaatacatga

SEQ ID NO: 230310 - DNA, 138 bp, Klebsiella pneumoniae
atgattcaatacataaaactgaataatacaaaccaaatccagataaatgactcaggcaagcaggtgtattattccctgttatggttttggaagggacgaaagacgaagattagctatggagagcttacagagaaataa

SEQ ID NO: 230311 - DNA, 123 bp, Klebsiella pneumoniae
atgatcatcatgctttattggacacttttcatctatataacagtttactattcagggatgttttccgttaaacggaacaataacaatgagcagaaaagaaagaaacgtattggcacgtattga

SEQ ID NO: 230312 - DNA, 225 bp, Klebsiella pneumoniae
atgcaccaacaaacaacacaaacaaaacgattcgaaaaacttttaaactggtgccaggggcaggtaagagagatggagtttattctcgaggatgcctacctgagcgaagaggaaaaaatctcctcgcttgaagaactcctcgataaatcgctaactatgcaggcaccgctcatcttattgggcaataaaatcaaaacaacaattaaacaattacgggatcaataa

SEQ ID NO: 230313 - DNA, 339 bp, Klebsiella pneumoniae
atgaacaattctacctcatataacactctgcaatctgtattacaaacataccacgataactatgctctccctatgctgaagttatcaaacgaaatgcagcgggacagaacgcctgagagcctcctggcggcgattaaagcgcaagacttagctcaggcaatgttagagcatattagcgacgtggtgagccgtatagccagcctggaacactcaacactaacacaggatgaggcagatagtatttcagcggaaatttctgatgccctgctgctgctattgtcgtgtattgaagaaacgtgcgaaatggcgcttgaactggcgccgaacaacaactactag

SEQ ID NO: 230314 - DNA, 168 bp, Klebsiella pneumoniae
atggtgatccccttgctgcttctcctttcagtgtatttgaaaaaggaaatttcttatttccctgtgattttattaaaccattatcgtattgtctttataactagttcgttagggatttatgataatagctggcatgtaaaatcactcctttatgagagcacctcctaa

SEQ ID NO: 230315 - DNA, 222 bp, Klebsiella pneumoniae
atgcttctaatgaatcagcccgaaaaacataaaatccagaaaatgaatgatgagtttaaaagcctgaatctagagcagaaaacatttattgctaaatcgttagatgtctctctagatgaggtggatatgttaatcaccaagttttctgctgaaacgcccacgaatgataaatcatctaaagggcttcaggaactattaaaacaattagcaaaaggaaaataa

SEQ ID NO: 230316 - DNA, 378 bp, Klebsiella pneumoniae
atgcaatttggaacatttcaaactctgaatggtgataacagccatgcacgatataaagtaatttcgtatgcctcggatgctgtacttcaggataaactcattcgcgtagatgcaggaatccccgattccttaatcgtcggtgatttggtcgatagtaacggcaacctcgcaacctcagttgatgtgattgaatacgtagtggtagagccagtgcttgcaggtaaaaaagctttcgtagtcgctgacccgcatcatgttattctcgctaaagcggggattgaactccgtaatctcgatgaaacagcggttttgattgctcttgcaaacaaaggttttacatttgccgattatggcactttagcactacgcacctcttaa

SEQ ID NO: 230317 - DNA, 1038 bp, Klebsiella pneumoniae
atggcatacacagatattttttctggcaatatgtatgattttgccagtccattcacatttagtacccagattaaccaaatcgtttctaatctatccttgtttaagattgaacatcacagtgttaacagcattgctttagataagattaccgatattaaaaatcttgtagcacctgaaaagatgccctacgcacattcagattggaactctgcctcacgtcctgaatatagctccgtattgtaccagcaaaaatatacaaattctctgaacgaggtgagtagccgagacctagagcagtatcgccagcgtggtgttatggatcagggtgatcagattgcattagctatcaatgatttcagcgatgcacaatacgcgcaggttagtaacactgtagaggttgacctcgtagaggcgctattagggctccgtgtgcagtcacaatatgcaggacagggggatttagatttcctagcaggtggtagcaaaaccacttatacaatggatattagcgccagtgctaacgtattccagcaattaagcgagatcggacgtattcagaacgtgaagctaggctcagggcttgcacaagctaaacagggcgtagtgatccttgcctctggcaaagctgccgtagcactacgttaccatccatccgtgaaggatttcatggtctatacgctgcctctggagtctggtgataacttctacacccgcactaaaggtgcaaaccctgctttcgaaacctggacgctaaacggtgtaacggttatcgatgtaaccggatactctttgattactgatcgtattggtgttgattcgttcgtgagtattcctgtaatgactcctgaatctaacgcttatgttcttcactctggtgttggtgttcgccatgcaacgcaagggaaagatgcaaatctgtatcatcaatatgtcacagttgatcagcgttggggataccccgccgtagcaacggaatgtagctatctcccgattgtgaatattcccgaagcgattattttcggtagcgttactgaataa

SEQ ID NO: 230318 - DNA, 189 bp, Klebsiella pneumoniae
atgcagttaatactcaaatcacacgacctccacattgctttagatgccagtaatgctaaagatttaataaaaataaaggctctgtgcgaaatgctagacattagctatccagcactaaaacagagaatttatcgcaaacaagacgtagacacagctattaaagaactcctagctaaaggaggcgaataa

SEQ ID NO: 230319 - DNA, 696 bp, Klebsiella pneumoniae
gtgccggaaatcaatgagtatggccagcaggtgaacgacctggtccctggctggcagggggcgcaagtcctgcggcggacggcgttaaatggccgtttttgccgcctggagccgctggacgttgaccgtcatgcggcggatctgtttgccgcctatgcgctcggcgacaacagcgactggacgtggctggcgtctacgcggccggagagcgtggcggcgaccgcccactggatcgcgggcaaggtgaatgatgatgctctggtgccgtatgcggtggttgacctgcgtagcgagcaggcggtgggcatcgtcagctatatggcgatcgagcgggaaatgggcacggttgagatcggccatgtcacctggtcgcgacggatgaaaaacaccccgctgggtaccgaagcggtctggctgctgctcaaaaacggctttgaccatggctatcgtcggctggagtggaaatgcgattcgatgaatgtcgcctcgcgccgcgccgccgagcggctgggctttagctgggaaggacgtctgcggcagaggctggtgcgtaaagggcggacgcgcgacagcgatatgctgtccatcatcgacggcgagtggcctgcgcgcgatgcggcgctgcgggcgtggctggcggcggagaactttactgccgacggtcagcagattaagcgcctggaggcgtttcgctaa

SEQ ID NO: 230320 - DNA, 834 bp, Klebsiella pneumoniae
atgccgacttatctgtttttacgccgtctgcgccgctcacccgccgccttcagcggcctgaccctggtgatcctgctggtgctgaccgcgctgttcgccccgtggctggcgccgcacgatcccaactggcaggatgccgccgctcgtctgcaggggcccggggcgggacactggctcggcaccgacagctacggccgcgacctgctgtcgcgcttgctctacggcgcccgcccggcgctgggtctggtggcgctggtgaccgccattaccctgcccgtcgggctgctggtaggtatcctctccggttactatggcgggtggctggagcggatactgatgcgctttaccgacgtggtgatgtcgatgccgcgcctgatcctcgccttcgcgttcgtggcgatgcttggcccggggctggtcaacggcgcgctggcgttagccctgaccacctggccggcctacgcccgtcaggcgcgcagcgaaattcagcgcctgcgccatagcgactacctcgccgcggcggagatgctgggcattcgcggcgggcggctgctggtcggccatattctgccgctgtgtctgccgtcggcgattgtccggctggcgctcgatctggcgggcattatcctcgccgccgccgggctcggctttctcggcctgggcgcccgcccgccgatggcggagtggggagcgatgattgccgacgggatgcaggtgattttcgaccagtggtggatcgccgccatccccggcgcggcgatcctgctcgccagcctggcgtttaacctgctgggcgatggcctgcgcgatattctggagccgcaacatgactga

SEQ ID NO: 230321 - DNA, 1584 bp, Klebsiella pneumoniae
atggaatggattgccgatccgtcaatctgggcaggtctcgtcacgctggtggttatcgaactggtgttaggtatcgataacctggtctttatcgctatcctcgccgagaagctccctcccgcccagcgcgaccgcgcgcggatcactggcctgatgctggcgatggtgatgcgtctcctgctgctggcctctatctcctggctggtcaccctgaccaaaccgctgattgtttttcacgacttcagctttagcgctcgcgatttaattatgctgtttggcggcctgtttctgctgtttaaagctaccgtcgagcttaatgagcggctggaggggaaagacagcgataaccccacccagcgcaaaggggcgaaattctgggccgtcgtggcgcagatcgtggtgctcgacgccatcttctcgctcgactcggtgatcaccgccgtcggcatggttgatcacctggcagtgatgatggctgcggtggttatcgccatcagcctgatgctgatggccagcaaagcgctgacgcgcttcgttaacagccacccgaccatcgtgatcctctgtctgagcttcctgttgatgatcggcttcagcctgattgctgaaggcttcagctttatcattccgaaaggctatttatatgcggccattggcttctcggtcatgattgaagcgcttaatcagctggcgcagtttaaccgccgtcgcttcctctccgccaatatgacgctgcgtcagcgcactaccgaggcggtgatgaatctgctgagcgggcagaaagaaaaagctgaactggatgctgacacggcgtcgctggtcgccgatcaggatcaacatcctctgtttaatccgcaggaacgactgatgattgagcgggtgctgaaccttaatcagcgcagcgtcagcagtattatgacgtcgcgccatgatatcgagcgcatcaacctcagcgcgccggaggaagagatccgcagcctggtggagaaaaatcagcatacccggctggtgatcaccggcgggaaagataatgaagatctgctgggcgtggtgcatgttattgacctgctccagcagtccctgcgccaggagccgctggatctacaggcgctggtgcgtcaaccgctggtcttcccggagggcctgccgctcctctcggcgctcgagcagttccgccaggcccgcacccattttgcctttgtggtcgatgagtttggttccgtcgaggggattgtgaccctcagcgacgtgatggagaccatcgccggcaatctgcccaatgaggtggaggagatcgatgcccggcacgatattcagcatcatcaggacggttcatggacggtcaatggccatatgccgctggaggacctggtgcagtacgttccgctgccgctggatgataaacgtgagtatcacaccgttgccggtctgttgatggagtatttgcagcatgtgccgcaggtgggggagaccattgagattgacggttatacgctgcgcacgctgcaggtcgacagccatcgggtacagaaggtgcagatcgtcccgccggtaaagcaggatgagctggattatgaggtgtaa

SEQ ID NO: 230322 - DNA, 897 bp, Klebsiella pneumoniae
atgaatatggcgaatttgaaagcggttattccggtcgcaggactaggcatgcatatgctgccggccacaaaggcaattccaaaggagatgctgccgatcgttgataagccaatgattcagtacatcgttgacgaaatcgtcgccgccgggatcaaagagattgttctggtgacgcactcctcgaagaacgcggtggaaaaccacttcgacacctcctacgagctggaagccctgctggaacagcgcgtgaagcgccagctactggcggaagtgcaggccatttgcccgccgggcgtgaccatcatgaacgtgcgtcaggcgcagccgctgggcctgggccactctatcctctgcgcccgcccggtagtcggcgacaacccgtttgtggtggtcctgccggatatcatccttgacggcggcaccgctgacccgctgcgctataacctcgccgctatgatcgcccgctttaacgagaccggccgcagccaggtgctggcgaaacgcatgccgggcgatctctccgaatactccgtcatccagaccaaagagccaatggtggctgaaggccaggtggcgcgtatcgttgagtttattgaaaaaccggacgaaccgcagaccctggactccgacctgatggcggtggggcgctacgtgctgtcggcggatatctgggccgaactggagcgtaccgagccgggcgcatggggccgtatccagctgaccgacgccattgccgaactggcgaagaagcagtccgtcgatgcgatgctgatgaccggcgaaagctacgactgcgggaagaaaatgggctacatgcaggccttcgtcacctacgggatgcgtaacctgaaagaaggcgccaaattccgcgaaagcattaaaaaactgctggcctga

SEQ ID NO: 230323 - DNA, 630 bp, Klebsiella pneumoniae
atgaactggcaactcatctcattttttggcgatagcaccgttttgctgcccagcgcagcggcgctgtttattgtcctgatgctgcgtaaaacgtcgcgtttgctggcgtggcagtggagtttgctgttcggcatcaccggcgctatcgtctgcgcctccaaactggcctttatgggctggggtctgggtattcgcgagctggattacaccggcttcagcggtcactccgcgctctccgcggccttctggcctatcttcctgtggctgctcagcgcccgtttctccgtcggtctgcgtaaagcggccgttattaccggctatgttctggccgccgtggtgggctattcgcggctggtcatccatgcgcattccgtctcggaagtgattgccggcctgctgctgggcgctgctggcagcgctttgttcctggtgttgcaaaaacgtacctctgatccggaaagcgtgaatatctcatggggcggtgtcgcatgcctggtgatggttccacttgtccttttacatagcggtagcaaagcgccgactcagtccctgctgggacaaatcgccaccgcggtggggccgctggataaaccctttacgcgtaccgatctgcacaagcaggcctggtaa

SEQ ID NO: 230324 - DNA, 1434 bp, Klebsiella pneumoniae
atgataaaaattgcgcgcattgccgtgacgctgggggttctttcctctctgggagcccaggcttacgcggctgggttagtggtaaatgacaacgatttgagaaatgaccttgcctggctttccgaccgtggagttattcatctgagcctgtcgacgtggccgctgagtcaggaagagatctcccgggcgctgaaaaaggccaaaccttcctattcttctgagcaagtggtgctggctcgaattaaccagcgactgtctgccttaaaagccgatttccgggtcaccggctacacttcaaccgatcagccgggcactccgcaggggtttggtcagacacagccggcggataactcgttaggcctggcattcaacaacagcggcgagtggtgggatatccatctccagggcaacgttgaagggggagagcggatcagcaacggatcgcgcttcaacgccaacggcgcatacggcgcggtgaagttctggaaccagtggctctcttttggccaagtaccacagtggtgggggcctggctatgaaggtagcctgattcgcggggatgcaatgcgaccgatgaccggtttcctgatgcagcgagccgagcaggcggcgccagatacctggtggctgcgctgggtggggccatggcagtatcaaatctccgcaagccagatgaatcaatataccgcggtacctcatgccaaaattatcggcggacgttttaccttttcaccattccagtctttagaattaggcgcgtcgcgcattatgcagtggggtggggaagggcgaccgcaatccttaagcagtttctgggatggctttacggggaaagacaataccgggacagataacgaacctggtaaccagctagctggttttgactttaagtttaaactcgagccaactctcggctggccggtcagtttctacggacagatgatcggcgaagatgagtcaggttacctgccttcggcaaatatgttcctcggcggggtcgaaggacaccacggatggggaaaagatgccgtaaactggtacctggaagcgcatgatacgcgcacaaatatgagccggaccaattatagttatacccatcacatctataaagatggctactatcagcagggttatccgctcggagacgcaatggggggtgatggtcaactcgttgccggtaaagttgagcttattacggaggataaccagcgctggagtacgcgcctggtttacgccaaagttaacccggagaatcagtcgatcaacaaagcattcccacatgccgataccttgaaaggtgtacagctaggctggagcggggatgtttatcagtctgttcgtctgaatacctcgctgtggtacaccaacgctaacaacagcgacagcgatgacgttggggcaagcgcagggatagaaataccgtttagtttataa

SEQ ID NO: 230325 - DNA, 2166 bp, Klebsiella pneumoniae
atgtcatcagttaaaaacagagccgccgataaagaggcggatgaaatcgatttaggacggttagttggtgagcttatcgaccatagaaagcttattatctccgttactgcattatttactttagttgcccttttatatgcactattttcaacccctatatataaagctgatgtattattacaagtggagcaaaaacagggaaatgcacttctgaatagcctcagccaaatgttgcctaatagccaaccagaatctgctcctgaaatagcattattgcagtcacgcatgattcttggcaaaacagttgatgatctaaatttacaggctcgggtacaacaggattttttcccattagtgggtaagggatgggcacggttaaccggtaagcaattgggaaatttaaccgtaagtagactttatttaccatcagatggcggtgaagaaattcccactttgaagctgattgtcaaagataaaactcattatagccttacatttaatgataaggaaatgtcaggaaaggttggcattttattggaaaacgatggtatagcgctaaaggttgataatattgaagcagaacctggttctgcgtttcttatatcttatgtaagcaaattaagagccattacagacttacaagatgtattttcagtctctgatcaaggaaaagataccgggatgttaagtctctcattaactggtcctgacccgttgatgcttgagaagatacttaatagcatcagtagtaattatttggcgcagaatgttgctcgccaagcagctcaagatgctaaaagtctggaatttcttaatgaacaattacctaaggtacgtaatgatttagatattgccgaagacaggctcaaccaatatcgacgacaaaaagattcggtcgatctctctttagaggcaaaatcagttcttgaacagatagtgaatgtagataatcagttaaatgaactaacatttcgtgaatcagaaatttcacagctttatactaaagaacatccaacctataaggcactaatagagaagcgtaagactcttcaggaagaaaagtcgaagcttaatcgacgtgtttcggccatgccgaaaactcagcaagacatattacaattaagccgcgatgttgattcaggccaggtggtttatatgcaacttttaaaccgtcagcaagaacttaatatagctaaatctagcgctattggtaatgttcgaatcattgataatgctgtagcccaacccaaaccggtgaaacctaagaaagcaataattttatttatagggattattttcggtggaacggtatctattggattggtgctattaagagtatttttacgtcgtggaattgaaagccctgagcagttagaagaactgggtatcaacgtctacgctagtgtgcctgtatcagaaacttttgccaaaaaaagcatgcagtctctgaagctgaagaaaaaaccagcaagggaatacgaaattttcttagcaatagacaatcctgcagatatcgcaatcgaggctattcgtggtttacgtactagcttacatttcgccatgatggaggcccggaataatgttttgatgatttccggagctagtcctaatgccggaaaaacattcattagtactaaccttgcagcagtaatagctcagacggggaaaaaggtactatttattgacacagatatgcgaaaaggttacacacataaattatttaatttagataacgaaaacggactttctgatattctttctggtaaaacagaaattattaagggaataaaacatgtcccaaatgtagctttcgattttatatctcgaggggcaattccaccaaatccggcagaattattaatgcatcgtcgattgggggagttaattacttgggcaagtcaaaactatgatcttgtcatactagacacaccgccaatactagctgtaactgatgctgctatcattggacattatgtcggtactacattgctggtcgccagatttgagcaaaatacaaccaaggaaattgaggttagttttaaacgttttgaacaaagtggcgttatggttaaaggttgtattctgaatggtatagtgaaaaaggctagtagttattatggttatggctacagtcactacaactattcttatactgaagataagtaa

SEQ ID NO: 230326 - DNA, 2166 bp, Klebsiella pneumoniae; identical to SEQ ID NO: 230325

SEQ ID NO: 230327 - DNA, 1269 bp, Klebsiella pneumoniae
atgtcccttaacgactcaaaaatcctcaacttaaaaccatccgcaaaacccttcaaagtttctgattctaacggtctgtaccttcttatcaaaccaggcggctcacgtcactggtatcttaaatatcgtataaacggcaaagaatcccgcattgcactgggtgcctatcctgccgtctccctgtctgatgcccgccagcagcgcgaaggtatccgtaagatgctggcgctgaacatcaacccggcacagcagagggcttctgaacgcagagcctgcacaccagagaaggtgtttaaaacagtggcgctggcatggcataaaaacaataaaaagtggtcgcagaacaccgctgaccgtctgcttgccagcatgaacaaccatatctttcctgtaattggtcatctgtccgtcacggagcttaaaccccatcatttcattgacctgctgaaaggtattgaggaaaagggcctgctggaagtcgcgtcccgcacgcggcagcacctcagtaacatcatgcgccatgcggtccatcagggatttatcgacaccaacccggcagcaaatcttgatggcgtgacggctccccccatgagacaccactatcccgccctgccgctggagcggctgccagaattgattgaacacattgaagcatatcatcagggccgtgaactgacccggcttgctgtcctgctgacgctgcatctgttcattcgctccagtgagctgcgctttgcacgctggtcagaaattgatttcataaacagaatttggacgatacccgccacacgcgaagccattgtgggtgtgcgttattcagggcgcggtgcaaaaatgcgcactgctcatatcgtgcccctctcacagcaggctatagctattctgaaacggattaaggaaatatccggggcttacgaactgctcttccccggcgaccataacccgtacaggccgatgtgcgaaaacgcggttaataaagcactgcgccttatgggattcgacacgaaacaggacatctgcggacatggctttcgggcaatggcatgcagtgccctgatggagtctggcttatggtcgcaagatgcagtggaacgccagatgagtcaccaggagcgcaacaccgtgcgtctggcttacattcataaggctgagcatctggaagcccgcaaggcgatgatgcagtggtggtcagattatatcgatacatgccgggtcgcatacgtaccaccttttaacacagggcgggataaaaacaacgaagctgcatga

SEQ ID NO: 230328 - DNA, 261 bp, Klebsiella pneumoniae
ttgggaagaaatgacctgcttattcgcaccttccctaatatcaatgcaatgaagaatatgctggcgagcgataaatataaaaacgtcgattccgttctggttcattacacgaaagtggaatcagacctgattaagaagcagggcgcagtattaaccgctgaacaggcacagcggatgagcagcgagtggactaaactctccagcacgttgcagtcgattttcccggacagagtgcagagctgtcgttctgataagaaataa

SEQ ID NO: 230329 - DNA, 1164 bp, Klebsiella pneumoniae
atgtctttacttgataatgataacgatatttttgaaatagaagatgaaacatatccaattgatgaattcgaattaacaactactcccaacgattttaacatgttgactataataagttttattaggtcgaaagtgtttaagattccttcttttcaacggcactttgtttgggatataaagaaatcctcaaagctaatcgagtcgctgttaataggcttgccaatcccacaaatttttctctatgaaaaagggaagaatgagtttttagtaattgatgggcaacagcgtttaatgtcactatattatttctttagtggtagatttcctaagatggaaaaaagatctgaattaaggaaaatttttgataagcatggatatataccagatgaaattctggctgatgatgattattttgtaaagtttaatcttaaacttgatggtattgtcgatggtcagttaaataaattcaatggaagaaattacgacactttaggtgagtttcaaacgacgttgaatctcgcaaccattcgaaacatgattataagacctgttgccccggactctgaagatggagcaatgtttgaaatttttaaccgtttgaatagtggtggtgtaaatcttgctccgcaagaaattcgaatgagtttatatcattccgaatttttagagatgcttttaaatttaaatgagcatccgcattggcgattaatattagctaaaaaagtcattgacgtacgattaaatgatgtagaagcgttattacgttcctttgcgatggctatataccttgataactataaaagctctgtaaatggattcctgaataatttctcgaatgctacgaaaagcttcccctctcattacattgcattttatcaggacttatggcgtgcctttatggatgcctgctccgatctcaatgaagaaagttttagaacaggaggaagccggctcagtatcacactcttcgaatctgttttttcagctagtgttgaagaatcactacgttcagggcaaattgatatcaaaaagatatcccctgcttatatcgaacgtttgaaatctgatgccgctttcataggctatagtacaggaaaaactactagaggtgagttcgttaggggacgaattaaaagggccaaagaaattctcaaggagttttaa

SEQ ID NO: 230330 - DNA, 564 bp, Klebsiella pneumoniae
atgaacgaaatggggaagcaggcaattgatagtttatacacggattttgtagaaaactatgggagactcattgaaattggcgaagtaagcttcgccaactcttataaatctcagtttgctaaagtgattcttttggcatgcgccagctattttgaatcagcaacaacacttgtaattcactcgatgttaaacccaacacgttgcaatataacaagacaattcattgaaaataaggctttgagtagacaatatcacgctctttttgattggaataatcgctctgtaaacaagttttttgcatttttcggtgcggagtttaaagctttcatggctgcaaagataaggcaagatgctgatataaaaagaagtatagataatttccttgagttaggagatttacgaaaccagttagctcatgaaaactatgccttatttagattgaatcttacgcctgaagaaatttatgaaaaatttaatgatgcccatacatttatagataatttaaatggttatatgaatgaatataaggaagcgttacaggctcagttggctcaagagccataa

SEQ ID NO: 230331 - DNA, 837 bp, Klebsiella pneumoniae
atgaaagctgtagatttaataaaaaaaatggaattgtacgtacactctgcactttacgcttgcgaattatcaattgctgctggatctgctatgtccttctcaaaggaaaaatggaatgttgggcctagtttgcatagtgctgcaaatcgaccacaattaaacaataaaatacttcctttgacactgaaaacatctgacatattccaacttgcattgcatgtaatgaatgatcttaaaattccgcagaaagaaaaaaatggtggtcgtcgaatgtttaatatcaacgacttaactcctccagatgagataatgtctgcacaaactatactttatcttttttgcttgttagaggaatacgaatttcttacttatgagaacgcacttacatcaaatctaagtagggtgtgtcatagtgatcagtacaccctgaaaaatctagaggaattaggggttgaaggagtaaagaaaaaaagtattgaaaggcatatggctacatatcaattttcagcatgccgaaaaagaattaagtattggggtaaaatggggctaaaagagttaccagagggcaaaatcactctatacgagcaaatttcaaaaagaagaaatgaattaacgcatttatctacaccaacccctgcatcaagatttgaggcagtaaatttttatttagtttgccgaaatttagtgcgtgatatagcaatatctttcgcagatgagagtatcaatgaacttgatattgaatgggatatttggagtgaacttgaacatgatgtacaaaatgatagtttagttcatgacttagcaaaagttataaacaataatcaaaatcatagttag

SEQ ID NO: 230332 - DNA, 726 bp, Klebsiella pneumoniae; identical to SEQ ID NO: 216207

SEQ ID NO: 230333 - DNA, 486 bp, Klebsiella pneumoniae
atgaagggagcagcgtttggtatcatcctgtctttaataccattgtcatcaatggcagcagactgctttgatatggctggcagggattacaaaattgatccggatctcctgcgtgctatatcatggcaagaatcacgatttaaaattgatgcgattggtcgtaatcctgttacgggttatggatcaggcttgatgcaaattgactcgcagcatttcaacgaactgtcgcgatatggaataaaaccggatcatcttcttagcgatgcttgtcttaacatctacaccggagcctattatctggctcaggcgtttaaaaagtggggcgtttcgtgggatgcagtcggggcatacaatgcaggcttcaaaaagaccccgcgccaggcagcaagacgttacgagtatgcgaagaagatccattactactacacggctatcaaagcaagcaaacgaacttcttctaaagatcagaaaatcgccatgaactaa

SEQ ID NO: 230334 - DNA, 390 bp, Klebsiella pneumoniae
atggaaagacaacaagatattgaagagcgctcccgggatttaataaaaaatgccgatgaaaaagaaaggcaagaattgaaatgttttgatctgcaatatggtgtttatttggttcttcttttccttgtgttagctggatatttttttgtgcagtatgaagattttcgagatcagcaggccgccacgccagaacaactgcaaagtattattcatgagacaccttgtgcaggtgaggtgttacttctagcaattcaaactaacactggcacttcgtcagagccattaacttttggtgacgcaaaaaagatggcgtccgaatgcaaggataaagaagagattaaagcagtacgtgaaaaacaacttaacgcactgaacgatatgagcaaataa

SEQ ID NO: 230335 - DNA, 1641 bp, Klebsiella pneumoniae
atggccatcatttatgatcgctcctgtgagttcgtcaaaagctattacgacccgtcactggataaaatcctcaacccgctggactcgcgctgcgcggcctgggatttgtggaaagagtgcctgacgctgccggacttcgacaacatctccaacacccttatcccgatgggtaccaaagaagacccgttctggcagggctccggtcgcactatctttgccgaaggcgcgtacctgatgcgtgaagacaaggatcgcagctacgagaaactggtcgataccatgctgtccattaaaatcgacaagctgcgcgcctatctgcagaacacgccggcagcgaacctggttgaagagaaaattgagaaaacggccatctccattcgtgccgtgctgaccaactacgtcaaggctattcgctacctgcagggcattgagaagaacggcgagccattcactatccgggactggatgcggggtgtccgtgaggaccgacccaatggctggttgtttatctcctccaacgctgacacccatgcctccctgaagccggttatctcaatgtggctgtcgatagctatccgcggcctgctggcgatgggggagaaccgtaaccggcgtgtttggattttcgctgacgagctcccgacgctgcacaagctgccggacctggtcgaaatcctcccggaggcgcgtaaatttggtggttgttatgtgttcggtattcagtcctatgcccagctggaagacatctatggtgttaagcctgccgccacgctctttgacgtaatgaacacccgggccttcttccgttcacccagcagggagatcgcggagtttgctgccggtgaaattggcgaaaaggaaatcctcaaggccagcgagcagtactcctacggtgctgacccggtgcgtgatggtgtatcgaccgggaaagaaaaagagcgggaaacgctggtcagttactccgatattcagacgctgcctgacctgtcctgttacgtcacgctgcccgggccgtatccggccgtgaaactggccctcaaatacaagccgcgtccgaaaattgccgagggatttattcctcgcactctcgatgcgcgggtggatgcacggctcagtgctctgcttgaggcccgggaagctgaaggcagccttgcccgggcgcttttcacgccggatgcgccggaacccgggccagctgatacagacagtcacgccggtgaacaacctgagccggtcagcccgcctgcgccagctgaaatgacggtatctcctgcaccggtaaaagcgccgccgacaacaaagcgtccggcagcggagcctcccgtcctgccggtcacgcccataccgttgctcaaaccaaaagcagccgctgctgccgcaacagcatcatctgccggtacccctgctgcagctgcaggcgggacagaacaggaactggcgcagcagtccgcggaacagggacaggacatgctgccggccggcatgaacgaggacggtgtcattgaggacatgcaggcgtatgccgcctggctggcagatgagcagacacagcgggatatgcagcggcgtgaggaagtcaatatcaaccacaaccaccggcacgatgagcaggatgatgtcgagattggagggaatatctga

SEQ ID NO: 230336 - DNA, 1098 bp, Klebsiella pneumoniae
atgaacccatttcgtgttttgtgcttagacggtggtggaatgcgtggtgtttatcaggccacgtacttacagactttttctcaaaggctaagtcagacaggttttaaacagtctgacccaggttctgccttcgatctactggtaggtaccagtacaggagggatcgttgcctgcgcattagcctctggtattcatcttgagaaggttcttgagctttaccagacttacggtaaagatattttcccacggcagcgacttcgtgcccttccttttgtaggtaaatacgttcgcgggttatgctcaggactagcttcaggtgactttgccttacgcaaagttcttaaagatacctttggtgaagaaactatcggcaaagtttatgaacgccgcgggatcggtttagccatcactactttagatttaaatcgtcactcctcaactgtatttaaaacaccgcatatggctcgcctaaatggacgagacaatgatcgactactggttgatgtatgtatggcaactagtgctgcacctatcctccgatcaattgcacgccttgaggagccaggctctggcggagcaatcgtcgattacattgacggtgggctctgggctaataatccaggtgctgtaggtatgatagaagcccatgaaattctccagtgcaggggcgagactgaacgccctgtgcatttattcatgctgggcactcttcctgtccagggaggtgaggaacttgccagtagcagtatgctgcaccgtggtgctttgggatggtctgccggcctcaaagcaatcactgcgagtatgaatgcccaggcggttgcttgcgattatatggctcggaaaattgccgagttgagaggcaatggcagttttgcatacagaatgccagctcagtgcccctctggggagctacacaaatacctcgaaaatatggatgacgcacgcccaagagtactaaatgcattagcccggcaggcagtgtccgacgttgatcacgcatgggctctggccgaatcgaataatcacatgaaagaatttcgaaccgccctgtcgattaaatctaaatctctgggagatcagcatgacgttaattaa

SEQ ID NO: 230337 - DNA, 1065 bp, Klebsiella pneumoniae
atgacgttaattaactgcaataaagaaatgaaagggtatcattcagaaaaagtaactctgtcaaataccgaccagtctgaaatgcgtgaccgtcgtgataatggaagaaaacggctcgaaaatggcctgattcgcttatcccatccattgccaaaagactttagctctcaaggttcttatgcaatgcgcaccatggtgcaggacgatttatgtgattacgacatcgatgacggaatttatttcaacaaagaagaccttaaagatggagacggtaattatcttggtgcgcaggatgcacgaaagctagttcgaaaagcgttgaaagacgacaggctggcctatgatgccgttgtcaagacaaattgcgtccgccaactctaccctgatggttatcacatcgatatcccagtataccgttcatttatcacaaaggacttttggggtaacgaaacaactgaatatgagctcgccagtggcgatgagtggactaaatctgatgcccgtaaggttacacggtggtataacaatgctgttgcttcagagcttaaaactggtcaggctgataccagccaacttcgccgtgttacaaagctgaccaagaaaatggctcgctcccgtacctcatggaaaaagaaaaccacaagcggtatttgtatttcgaaattagttgtagatcattttgtttgtcaggctggccgagatgatgatgctttacgtgaaacgtggaaggtcatcaaatctcggctgacatatagccagcgcatagagcatccagtgtttgcagataagaatcttgcagaagaaaatgatgaggccgttattttctttcaagaatgcctaactgaggcgctaaatgcacttgaagtgcttgaagagtataattgcactcgtgaaaaagccgcgcttgcctgggataatgttttcaacactgattatttcagtacagaaatcgctcaggacaccaacatgtccaaatctctcatgcgcccagctgtcagcgcatcggcatatctatccttccccgctcaccccgtcacacctaataaatcagcggggtttgcatga

SEQ ID NO: 230338 - DNA, 1767 bp, Klebsiella pneumoniae
atgagttggttactggagaatcctgcgcgctttttgcatgagcagaaggagctcaaacgccttgagagtgagcatgaatggctaaatatggctctgcgctttcaaagtgatggtaagttgtcagtggaaataaatatgactattcatggtcgtatttatgaagggaagatgacttatcctgattcgtttccagattctccaccctatattcgtcccagagaccgttccgaaaggtggtcaaaccaccaatatggtgaaggggggtcactgtgtctgcaatggcgagctgataactggcagcctgacataaccggggcggatatggtactcagtgcatttgagttactgaatacagagcagcatcccgaactaccaaattcagtcccttcagcacatcgtttaacagaaggccagattttgcggggttcgatccggcgcttaatactaaccaccgatatcatggaagcttggaataatctcccccctctatccagcgccagtttaaaaacagctaccctgttcagttctgacaaggctgtaacattcatcactcagatttccgatgtagataataatttaaaaaacgtcgaagacgttccacaaagtcttggatcactcacttacttactttcactatccggagaaggatgggtgttcaaaagtgaaggatttgacttgaaattgaaaattaaatctgcagaagatttaattcaggcgataacaaatgagggctttgatacagtagacattctggttcaggaagataataagtacaaggccagaacgatagtgttactaggtcgagatggcttgtcattgagaactttttaccttaaccctggtgatgaacccaccatacacgaattcagtattatttggccttcatccacagagcttaggttatcaaaggaatcacaacggctgacgaagatcagaatcggaataattggcctaggctcaatgggtagtaaaatcgcaacatcgcttgcccggtcaggaataaagcgatttttgttagttgatgatgattacctagctaccagcaatatagtgcgtcacgagctgtactggaatcatgttggcaaacataaagttgagggcgtaaaaagtgcactttcactgatttctgcgggtattgaagtagatgaaagtattattcgtctggcgggacaagaatcctcggtatttatggcttctatccttaatgacctttcaaaatgcgatctgcttattgacgcaacagcaaaccccgaggtttttcttcagttatccgctcttgcgaaacgctataagataccgctgtgttggggggaaatctttgcaggagggtacgggggaatgattgctcgttcccgcccgggttatgacccaaaccctttggccgttcgcgacgcattttatagtcatctttcaactcttcctaaagcgccttttgatagcgcccaaaattacgatggcagtgaagaacagcctctgaccgcatatgacagtgatgttggatttatcgctacagcactaaccaggcttgctattgatacagcattatcaagagatcccagcgtattcccttactctctatatttactcggcatgcgttgtgagtggatttttgagcaaccttttgacacgcatccagtccatgtgtctggagctggatgggataccgatgacacaagcgtcagtgaggaggatcgtttagctgccctacaagcgatactgcaaatttatgaaggagaggaacgtgctgaacctgatacttccggctga

SEQ ID NO: 230339 - DNA, 462 bp, Klebsiella pneumoniae
gtgctgaacctgatacttccggctgaacaacaggcagttataatggacgctctatctaaagccgggcgccgcgaaattggtggggttttaatgggggaacatattggacctaatgaatttatagtacgtgaaatgacagtacatcgttgtggtgcatttgcctactttgtcagacggcttgatgaagcaatcagtgggttcagtaaattttttaacgaaacaggccataattatcagatatttaactatatcggtgaatggcactcccacccgtcttttgaaccgtaccccagcagtaaggacgacagatccatgcttcaaattgttcaggataaaaaagttggggcaaacttcgcggtccttgttattgtcaaatcaggttcgaaaggtgagctaattataactgctcacacctatctcccaaatggaacgaaaagcgaatcagaaataactttgttatga

SEQ ID NO: 230340 - DNA, 537 bp, Klebsiella pneumoniae; identical to SEQ ID NO: 110427

SEQ ID NO: 230341 - DNA, 243 bp, Klebsiella pneumoniae; identical to SEQ ID NO: 15164

SEQ ID NO: 230342 - DNA, 477 bp, Klebsiella pneumoniae; identical to SEQ ID NO: 109853

SEQ ID NO: 230343 - DNA, 642 bp, Klebsiella pneumoniae
atgaaagtgaattatctggcaccgttattatgtattggcgtgttggcgctgaccggttgtaacgatccaaagaaaccctccgaaagtaatttcaaagaagccgcacagcagtatctggatactgtatacccggcatgttatatcaaagctaatttcccttacaaaacagatggtttcaacattaacaacatgccagaaatattgcatgcaatggcagaaaaagggttgttaactgaaacagaattatcgcgtaaacatattgatgccacatgggggattaaagaacgagatatagtcgttaacagttatgacctgacggaagaagggaaaaaatactacaagcaagatgcggctaaaaatatgcgaggtgagaatcttggtggattctgctttggaaaagcaacagtaacagacgtcagtaatttcactgaaccatctgatgcaatggggcagaaaatttcccgagtgacttttacatataaagttagtgatatacctgactgggcaaaatcacctgagattctgaatgccgaccgtcagataaaaaaagacgtaaactcagaacatgatggtgtgaaagtgaccaatgttttcctcctgactaataacggatggatatatcaaaagttatttggtaaatga

SEQ ID NO: 230344 - DNA, 285 bp, Klebsiella pneumoniae; identical to SEQ ID NO: 109855

SEQ ID NO: 230345 - DNA, 126 bp, Klebsiella pneumoniae; identical to SEQ ID NO: 109857

SEQ ID NO: 230346 - DNA, 924 bp, Klebsiella pneumoniae; identical to SEQ ID NO: 21716

SEQ ID NO: 230347 - DNA, 1026 bp, Klebsiella pneumoniae; identical to SEQ ID NO: 16178

SEQ ID NO: 230348 - DNA, 243 bp, Klebsiella pneumoniae
gtgccttttacccttggtgccgtactggagcagcaggagcatactgccgccctgaccgaccgccctgcagcaccggacgaaaacctgccgccgctattgcgggaagcgctgcagattatggacagtgatgatggtgagcaggcctttctgcatggcctggagagcctgatccgggggtttgaggtgcagcttacggcactgttgcaggggtccgcttgggaaagggaaaatatcctacgctaa

SEQ ID NO: 230349 - DNA, 498 bp, Klebsiella pneumoniae
gtgccgaaaaagcttgccagctaccccaagcaaaacggacttgccaaggcattgagggaaattggccgtattgaacgaacgctgtttatgctcgactggttccgcgatccggcacttcgtcggcgggtacaggcggggctgaataaaggagaagcccgtaacgcgctggcgcgtgcggtattcctgcatcggctgggtgaaatcagggaccgaaaaccggaaaatcatagctaccgcgccagtggactgacgctgctgacggcggctatctcgctgtggaataccgtctatatggaaagagcggtcgatgccctgaagcgtaaaggggtgaagatcaacgaacaactgctgtcgcatttgtctccgttaggctgggagcacatcaatctgacaggcgattatatctggaaaagcaaccggataccggcttccggtaagtttcgtcggctgagaccagctaaagtcgaaaggtcaaaaaatagccttaacgtacaataa

SEQ ID NO: 230350 - DNA, 1167 bp, Klebsiella pneumoniae
atgaaaattactatttccggtaccggttatgttggtttatcgaatggcatcctgattgcgcaaaaccacgaagtggtggcgctggatatcattcaatccaaagttgatatgattaaccaaaagatttctccgattgtcgataaggagatccaggaatatctggcggaaaaaccgttgaattttcgcgcgacaaccgacaagcatgacgcctatcgcaatgctgattatgtcattatcgccacgccaactgactacgatccaaagaccaattacttcaatacttcgactgttgaagcggtaattcgtgatgttaccgaaatcaatcccaatgcggtaatgattattaaatcaacgattcccgttggctttactcgtgatattaaagagcgtctgggtattgataacgtcattttctctcctgagtttttgcgtgaaggacgcgccctttacgacaatctgcatccgtctcgtatcgtcattggcgaacgttcagaacgcgcggagcgttttgctaatttgctgaaaaaaggcgccattaagcaggatatcccgacgctgtttactgattctaccgaagctgaggcgattaagttattcgccaatacttacctggcactgcgcgtagcctacttcaatgaactggacagctatgctgagagccaggggctgaacagcaagcagatcattgaaggcgtgtgcctcgatccgcgtattggtaatcactataacaacccatcctttggctatggcggttactgcctgccgaaagataccaaacagctgctggcgaactatgaatcagtgccgaataacattattggcgccatcgttgatgctaaccgtacgcgtaaagattttgtcgctgactcaatcctggcgcgtaaccccaaagttgtgggtatctatcggctgattatgaagagtggttctgataacttccgggcttcttctattcagggcattatgaagcgtattaaggccaaaggtattccggttattatctacgaaccagtcatgcaagaagatgagttcttcaattcccgcgtagttcgtgattttgacgctttcaaacgagaagccgatgtgatcgtctcaaaccgtatggcagaagagctgtcggatgtcgccgataaagtgtacacccgtgatttgtttggcagcgactaa

SEQ ID NO: 230351 - DNA, 1371 bp, Klebsiella pneumoniae
atggcaaaattaaattgctttaaggcttacgatattcgtggcgaactgggcgaagaattgaacgaagatatcgcctaccgtatcggacgcgcctatggcgaattcctgaaaccaaaaacagttgtggtgggcggtgatgtccgcctgacaagcgagtcgctgaagcttgagctggctaacggcctgatggatgcgggaacggacgtgctggatattggtctgagcggtaccgaagagatttacttcgccactttccacctgggcgtggacgggggaattgaggtgacggccagccataacccgatgaactacaacggcatgaaactggtgcgtgaaaacgcgaagcccatcagcggcgaaaccggactgcgcgatatccagcgcctggccgaagagaatcagtttgcgcctgtggacgcgtcccgtcgcggaaccctgcgtcagatatcggtcctgcaggagtacgttgaccacctgatgagttacgtgaatctggcaaacttcacccgcccgctgaagctggtggtgaattccggtaatggcgcagctggtcatgtgattgatgaagtggaaaaacgctttgtggcagcaggtgctccggtgacctttatcaaggtgcatcaccagccggacggccacttcccgaacggaatcccgaatccgctgctgccggagtgccgtcaggacacctctgatgccgtacgcgaacatggtgcggacatggggatcgcctttgacggtgacttcgaccgctgctttatgtttgataacgatgcagaatttatcgaaggctattatattgttggcctgctggcggaagcgtttctgcagaagcagccgggcgcccggattattcacgacccgcgtctgacgtggaatacggtggatatggtgacccgcagcggcggtacgccggtgatgtcgaagaccggtcacgcgttcattaaagagcggatgcgtcaggaagatgcgatttacggcggtgagatgagcgcacaccactatttccgcgacttcgcctactgcgacagcggtatgatcccgtggctgctggttgcggagctgctgtgtctgaagaacagcccgctgaaggcgctggtggcggaccggcaggcggcgttcccggcgtccggggaaattaaccgcaagctggagaatgcggcggcggcaatagcgcgcatccgtcaacgctacgaaccggatgccgtcaacgtggacaccacagacggcatcagtattgaatatccggagtggcgctttaacctgcgcagctcgaacaccgaaccggtagtgcgtttaaacgttgaatctaaatcaaatgtagaattaatgaaaatgatgacactggagttattagattacttgaaataa

SEQ ID NO: 230352 - DNA, 1290 bp, Klebsiella pneumoniae
gtgtcacagctgcatctgccgggcataagtcagaaatacaatgaaaatcgctactatccgctgggtgaggcatcagcctcgctcattggtgtgaccggtgccgaaaatagagggctgagtggtattgagcagagctttaacaccgttctgagaaaggacttcggggtgaaaaaaatacgcaaaaacgccagggggggcgtcatcagcgtgatccagtatgacgctccggaaactgcaccggcgatcaggctgagtattgacagtgtgcttcagtatattgtttacagccggttaagggagggggtcgagcaacatcacgcccagtcaggcgctgcggtgcttgtcagcgtaaacaccggcgaaattctggctatggcatcctatccgtcgtttaatcccaaccgtttttccggtgccacttccgctgaaatgcgtaacgtggcgattaatgacagctttgagccgggttcaacggttaaacccttcgtcattcttgaaggcctgcgccgccatattatcagcagcagcacgcttcttgacacaaggccgttcagggttgacggccatcttatccgggacgtgggatactggccggcgctgacgccgaccggcatacttcagaaatccagtgataccggagtttcacatattgccctggcgatgccttcggatgcgctggtaaaaacgtattcatccttcgggctgggaaaaccgacagggctgggccttcccggtgaaagtactggttactttccgttcagtcgccatcgatgggctgatattgagcgcgccaccttcgcttttggctacggcctccgggtaaccccgctccagttagccagagcctatgccactctcggggcctgtggcgtttatcatccgttatccgttacacggttatccgcgccggtgtacggtgagcaggtggcggacccgaagcttgccgatgctgtaatcagaatgatggaaagtgatgtgttacccggcggaagtggcgtaagggcagctgtaccgggctaccgtctggcaataaaaaccggaaccgcagagaagttaggtgccggtggaaaatatgacggggggcatattacctatacggcaggcgtcgcgccggcgagccgtcctgaagtggcactggttgtggttattaacaatcccaaagcgggacagcattttggtggctcagtggcggcgcctgtcttcggccagattatcggtccggtgcttacccggctgaagattgcaccggatgctttacgtgctccggtggtacaccgacagtccggctga

SEQ ID NO: 230353 - DNA, 858 bp, Klebsiella pneumoniae; identical to SEQ ID NO: 21685

SEQ ID NO: 230354 - DNA, 657 bp, Klebsiella pneumoniae; identical to SEQ ID NO: 21684

SEQ ID NO: 230355 - DNA, 627 bp, Klebsiella pneumoniae; identical to SEQ ID NO: 205618

SEQ ID NO: 230356 - DNA, 1341 bp, Klebsiella pneumoniae
atggggctagtaaaaaatcgctgtaaaaatggcgaccactattgggtaagtgcttatgtaacgccaatagctaagaatggttcgattgttgaataccagtctgtaaggaccaagcctgaacctgagcaggttttggctgcggaaaaattatatgctcaattgagaagcgggaaggccgcgaggccgaaattggctgctagcttttccgtgaaaatactcttgctcatatggggtagtattatatcaagcgcaatggctgccggcatgcttactgatacatcaataagcagcttattgttagccactttaatgtcaggaagcttaagctctgttagtgttttggctattctctctcctcttggaagactggttgaaagagccaggaatatttccaataacccattaagtcaatccctctacactgggcgcaccgatgagtttggccaaatagagtttgctttacgaatgatgcaagctgaaacaggcgccatagtaggtcgcataggtgatgcatcaaatcggcttagcgaacacacccgaggcctactaaaggatattgagtcaagcaatgtacttacagttgagcagcaggcagagacagatcaaatagcaacggcagtaaaccaaatggtggcaagcattcaagaggttgcgagcaatgcacagcatgctgcagatgcggccggaagagcagacactgagacggcatctggccagcgtctggtagcccacacaagccagtcaatcactgcccttgaaggtgaaattaggcaagccactcaggttattcatgagcttgaaggtcaaagtaacgagatatcaaaagttcttgacgttatacgagggatcgccgagcaaacgaatttgttggcactcaacgcagcaattgaggccgcgcgtgctggtgagcaggggcgtggttttgctgttgtcgccgatgaggttcgcagtcttgctgctcgcacacagcaatcgacaacggatattcaaagcatgatcagcgctctacaagagcgagcgcaatccgctgttacagtcatggagcaaagtagtcggcaagcgcacacgagtgtagctcacgcagaggaagcagctacagctcttgatggaattggccaacgcgttaacgaaattaccgacatgaacgcgcaaatagcgactgcggtcgagcagcagggagcagtaagtgaagacataaaccgcagtattatcaatatacgcgatgctgctgataccaatgtacagaccgggcagaataatttgcaaagtgcgaaatctgtcgctcagttaactagcgctctgagcgaactggcaaaacagttttgggaaaaacgaggataa

SEQ ID NO: 230357 - DNA, 174 bp, Klebsiella pneumoniae; identical to SEQ ID NO: 185435

SEQ ID NO: 230358 - DNA, 822 bp, Klebsiella pneumoniae
atgcgtttagcatcccgatttggacttactcattccattcgtcaggaacgcccactgactaacgatgaattggtcaaggttgtaccttctgtgttttcagaagaaaagcataattcacgtagtgatcgctatacctatattccaaccattacactgctggataaattacgtgaagaaggtttccagccattttttgcctgtcagtcacgagtaagggatgaggataaacgggggcatactaagcatatggtaagacttcgccgtgaaggggccaataaaggaacagaagtacccgaaatcattcttcttaactcgcatgatggatcgtccagttatcaaatgatcccgggtatgttccgttttgtatgcacaaatggccttgtgtgcggtacgtcgtttggtgagattcgtgtacctcataaaggtgatattgtgggaagggttatcgaaggtgcttacgaagttttgggaattttcgataaaataactgaaggcgttgatgtcatgaagtctattaccttaaccaaggaagaacagcgtctgtttggacaagctgcattaacctaccgatatgaagatgaaaataaatctccggtcagtattgaacagataattcatccgcgccgttatgaagataaaaaagatgacatctggactacatatcaaagggtccaggaaaatctgattaaaggcggtttgcctggccgaactgaaaaagggaaaagaacaacaacccggccagtaaaagcaattgatggtgatgtcaaactcaataaggcattgtggttaattgcggagaaattccgcactcttaaaggctaa

SEQ ID NO: 230359 - DNA, 183 bp, Klebsiella pneumoniae
atgggtaaagagctatctctaaataaaatttatgataagaattctagatatattaatgattctagagggcatgagctgggaaaggaaaagaaagttttcgattttgaagttgaaatgattaaaaaaagaagagaggacgctataaggaagataattgaggattcaaaatcattaaaatggtaa

SEQ ID NO: 230360 - DNA, 1701 bp, Klebsiella pneumoniae
atgagcctggctagaaagttaagagaaaaaagaagtaatccgattcatagtgctaacgaggactcctctggaggggatagcataaaccaaataacctccagacagtctatggatcttgttataggattttgcggtgctgttggctcaggaataaagtcaattgttgatgtgactgaagaagaactagatgatctaggatatgatgtttatcgcataagagttagcgagcttatgcaaaaacttttttcagaatggcgtgatgatattgttactccgtttgatagatatcataagctgcaagattttggtgatgcgttaagaaataaatattacccacatatactatctgaagctgtaatccatgaaataaaaatagaaaaaggcattgacacctcaagtaaaaaaaataaaaaggcttttttggtcgatcagttgaagcatcaggatgaaattgaacttttaagaatggtctaccaacataatttttatttactaggtgtaattagaagtgaagtagaaagaaagcgtaatcttagagatgaagggctgagtaagtcagaagtcgatatagttattcatcacgatagaaaatcagagagcgattatggtcagcagactgcgaaagctatacttgactctgattattttgttaagaataatcaaggacaaagggcgcaccttaaggctaaggttaagcgttttattggcttgatacatgggctaaatggtttaactccaaccacgtatgaaaaaggtatgtatgcagctcattcagcatctctgcaatctgcatgcctttctcgtcaagttggtgctgctatattggatgttaatgggaatctgatttccgttgggcgtaatgatgtacctaaattcaatggtgggctttatagtgcggatgatggtgtcaatgatcatcgttgtgtatacaaaggtggtaaatgttataatgaagttagaaagctaaagattaaaagcaaaatttcacaaatacttatgtcggaaagcgcttgtgaacttggtgttaaattaacagaagatcaagcagagcaactggctgatgtaatatataaaaaaacaccagtatcttctattatagagtactctcgctcaattcatgcagagatggatgctattacatcattagctagactaggtaatggaggtttttctgataaagttttatatacaaccacatttccttgtcataactgcgcgagacatattgttgctgttggaataacaaaagttgtttatatagagccatatgaaaaaagcctcgctttagaattgcatgatgatgctataaccgaggtgaatgagcatgggaaggttatatttgagtcctttgaaggtgtatcacctcgtaggtatcaaaaattcttcttttctacagatgaaaggaaagatagtttcggtaacgcagaaaagtactccactaaatataaaaatcacattgatatacagtttattgatagctatttagatttcgaaaatcgagtcgttgatatttttagaactaacacaaatattgattctggcaatcatgtcgggagaactgattcgactattaatttatcttcccagcccgtgccgcccgtgccgcccgtaccgcccgtaccgcccgtaccgcccgtaccgcccgtaccgcccgtaccgcccgtaccgccagtaccaccagtaccaccagactcgaaatga

SEQ ID NO: 230361 - DNA, 921 bp, Klebsiella pneumoniae
atgtgcgaactcgatattttacacgactctctttaccaattctgccccgaattacacttaaaacgactcaacagcttaacgttggcttgccacgcattacttgactgtaaaactctcactcttaccgaacttggccgtaacctgccaaccaaagcgagaacaaaacataacatcaaacgaatcgaccgattgttaggtaatcgtcacctccacaaagagcgactcgctgtataccgttggcatgctagctttatctgttcgggcaatacgatgcccattgtacttgttgactggtctgatattcgtgagcaaaaacgacttatggtattgcgagcttcagtcgcactacacggtcgttctgttactctttatgagaaagcgttcccgctttcagagcaatgttcaaagaaagctcatgaccaatttctagccgaccttgcgagcattctaccgagtaacaccacaccgctcattgtcagtgatgctggctttaaagtgccatggtataaatccgttgagaagctgggttggtactggttaagtcgagtaagaggaaaagtacaatatgcagacctaggagcggaaaactggaaacctatcagcaacttacatgatatgtcatctagtcactcaaagactttaggctataagaggctgactaaaagcaatccaatctcatgccaaattctattgtataaatctcgctctaaaggccgaaaaaatcagcgctcgacacggactcattgtcaccacccgtcacctaaaatctactcagcgtcggcaaaggagccatgggttctagcaactaacttacctgttgaaattcgaacacccaaacaacttgttaatatctattcgaagcgaatgcagattgaagaaaccttccgagacttgaaaagtccggcactgttgcaaagttag

SEQ ID NO: 230362 - DNA, 1611 bp, Klebsiella pneumoniae
atgatgatctcatatcaggaacttgttcgcaccttccctaactcttcttcacaattagtgaaagatggattttacatagagaatgaaaaaataactaatattattggaatagctggtcaaggtaagagtacaattttacgaaaaatatttgttgaacaactatttaatgggaacaaaattccattttttatagaacttcgtaaagttagtgatgaaggtatacgtaaatcacttcaaaatatactagtaaacttaagtttaaaaccatcggatattgaagttgaagaacttcttgcaagtaacaaaattatactgatgttagatggctttgacgaaattaattctgaaagaaaaaacacaattctccacgaaattgtcagactgaatttaacgtacaacttacaaataataaccacaacgagacctgggaccgcaatatgcagcgagccatcaattgttaattttaaagtccagttgcttgttgaagacgatattctttctatcattgagaagttaaactcaaataatgacagtatagatatagagcaactcccaaaaataaaggaaacaatacgaaataataaaaacttagtatcggtgatgacatcaccaatattggttaccttgtttcacgtttgctatccttatatggatataataccaaacaacactgttgagttttattcaaacctattcatgactttatatttaagacatgataaggtaaagaatttcgaccgcgaaaaatcatcgtcattgagtcacaatgacgcttacgattgcttctgcgctctatgcttttattcaattttcaaaaatagttacgattttactgagcaaactttaattgaattcactaaagcatcaatgcagttgaaaggtaaacatgacaattgtggccccgaaaatttagctgtcgactttgttgatgttacgtgccttatacagagagagggctacaataaatatatttttattcataagtcaattcaggaatatcatgccgctgaattcataagaaatatatcctctgataaaaaacccaagttttataatctcataatggaagacataaaacaaaacaattatagatatcataatacaatctcattcctacaagaaacagatgagatagactgtaaaaaaaatcttgtaatacctttgtgtgaacattataagatccataagtggaatgatatggaaatagttgattacaaggatttgtttagggagttttttgtggattctactgctcaagttgtaataaataacggaaattatagtgtccaggcacttaattactcaacgactttcatgagctggatagcttttttcgaaaatgaaatgtattatgatttgtacaatattgtaactaatattttattttcacatgaaaattccagatccctcccagaggaaatatttacagtaaccaaagatggtataagtcaaatcagcttaattcttttaattaataggatggatttatttgatattgcgcttgatgctttcataaaacaagttcgtgagatttatcagcatttatatgtcaattcgtccgtaactatcaaaaatgaaactgaaagtataaatgaattttttgacttgtaa

SEQ ID NO: 230363 - DNA, 363 bp, Klebsiella pneumoniae
atgaaagcgacatgcaaagaattacttgaatataaagaaaatttagaagggtgttctatcagtacagtatggtacgtgacacctccagaaagattcagtgaaaaagatttcaattttaatcagagaaaagaatttttccttcatctgctacgtatgcttttagaaacaggcaagatcaggctaggtaagcatggtgaatttttgcagggtagtgttgatgaactaatcagccgttatgatgcggctttcccgaaaacagaaggagagtgggaaactagaggtgagcatctatggttctacgaagatgattgccccggtggtatcgtctggatccatgacagcggctatgaggattggacctga

SEQ ID NO: 230364 - DNA, 1584 bp, Klebsiella pneumoniae; identical to SEQ ID NO: 230321

SEQ ID NO: 230365 - DNA, 207 bp, Klebsiella pneumoniae
atgttagttgttaaaaccccctttttagagtgggttgaaggtaaagtatctaaaaacgtgttgagcacatttagtaatactaaagaattgggggcttttttagaaaaggatattttccctggtggttatttacacagtgatattgaagtaataaataattcttttggtgatatcgctgtaaaaaacaacattctaaaattattatga

SEQ ID NO: 230366 - DNA, 1443 bp, Klebsiella pneumoniae
atgggaatcctaaataatgctaaatgggtagcattctcgcaggtgtttaaaatcctcgtacagcttgttaatattgtatatttggcaaggttaatatcacctagtgaatatggcatcatggccatggcattagtggttattaattttggaatgttggttagagatttgggaactgctgcagctatcattcaaaagaaacaactaactgacgaacttattaatgctattttttggatgaatttattcatggggataataatcgcgggagtcatctgtgcgttttctccactattctctcatctttttcattctcctggattgactcccgtgctgttgcttgtatcaataatattccctttgtctagtagttcagctacacacttagcattgcttgagagagactctaaatttaagtctatttcctttatagagatacgttcttcggttatttctgtcatcttggcgcttctgttagcttataatggatttggtgtttatagtctagtttttcaaatgataactttgactggattaacaacaattcagttttggtatatttcaaaatggaggccatctttatcgatggcgtttaatttttctcacttgaaagatatattaggttttagtgttaatttatctttgtttaattttatcaattatttctcgagaaatgctgatagtataatcattggtcgatacatgtcggcgtcagttttaggtgcttatagtcttgcttatcgtattatgttgtttcctttgcagagtctaacatttgttatttctcgctctctttttcctgttttaagtaaaaatcaagatgaccatgggaatttgcgaaaaatttatttgaactgcgtttttttcattctattccttgttgttccgttaatgtctggtttagcttatattagtaacccatttgtatattttatttttggagataaatggacgttaactgcatctattcttttatggttagctcccactgcgattattcaagctgtgctaagtagcacaggaaccgtttttatggcgaaagggcgtacggatgtattgtttaaattaggtttgttaggcgcatttctttatgtttcatcgttcgttattggtgtgaacttcggtatagttaactttgcaagattttattttttagccaatgtaattaatttttttcctgcgatgtatttgttaatgaaattgattgatggaagtttatggattcttttaaaaaaatgttatttagtgtttgttatagatatgtttatgattgtttccatgtttgtttttaataatttctatcctatttcttataataacgagtatgattttttgaattttttattgactattttggttggtggtggggtttatttgattatggctcttgttttgataaaagatattcgtttttttattgctaataaaatcattgctaaaaattga

SEQ ID NO: 230367 - DNA, 642 bp, Klebsiella pneumoniae
atgatcgcattcaatcacgttgttccggtacttaatctgtcggtgttcaacgtcagacgggcaccggccttcgcgtttgagcagagcaagcgcgcgaccataggcgggcgctttatccgtgttgatgaatcgcgggatctgccacttcttcacgttgttgaggattttacccagaaaccggtatgcagctttgctgttacgacgggaggagagataaaaatcgacagtgcggccccggctgtcgacggcccggtacagatacgcccagcggccattgaccttcacgtaggtttcatccatgtgccacgggcaaagatcggaagggttacgccagtaccagcgcagccgtttttccatttcaggcgcataacgctgaacccagcggtaaatcgtggagtgatcgacattcactccgcgttcagccagcatctcctgcagctcacggtaactgatgccgtatttgcagtaccagcgtacggcccacagaatgatgtcacgctgaaaatgccggcctttgaatgggttcatgtgcagctccatcagcaaaaggggatgataagtttatcaccaccgactatttgcaacagtgccctgtttagagtactatatgcgcctgcaacagtgggccaccgaaaatattaa

SEQ ID NO: 230368 - DNA, 1425 bp, Klebsiella pneumoniae
gtggaaacattcaaatttacgaaagttaagctcgaaagcttgccgccggccgaacgaggtcaggttgagtatggcgataccattgttaatggtctacgcatccgtattggcaccagtggtgtgaaaagcttctgtatctcacgtaagagaaatggaaaattcatccgtgccacgctgggccgtttcccggacctaactattgataatgccagagcaaaagcactcgaaatgcttggcgacgttgcgaccagcggtagaaatccaaatgtggacaaacgtgttaatgagaaggcatctgtctcgcttgccgatgcgctggatgcatatgttaagaaccgtggccaccgcctcaaacccacaactgaaaagcaatatcgcgcaatcttacaaaattattccggcgactggatgaaacaatccctcgctaccatttcgcgtgaacgtgttgagtatcgtcataaagcagtaactgatggttctgtctggtttggcgctgataaagaaactttgcgggcaggggttggaaccggtagtaaagcccaggctgacctgtgggccagagcactacgcgccgtttatcgtttcgcacatgatcattatcgtgatgaagaagggagaacgctgttacctgacccgccaacaatggtgctgagtacaaagcgtcagtggcatggcacgatcagaaagacggagcgcatccgtacccatgactttgctcgttggttaaatgccgtcgctgtagttcgagataaggccgaagaaggacgagacgatgtagctgctgcaatatgtgacgccgtagaaatgtcgatgttcaccgggctgcgtaaatctgaaatattcgaactaacctggaatcgggtgaatattggcggtcgttatttctggatagatgctaccaagaacggcgatccgcttgagctgccaatcactgaaactctgctgaatctgttccggcgccgactgaaaatgaaaaacggagatgaggctttagtgtttcctggagttaaaggaatcattaaagaatatcgccatgtaattgatcgaatcagtgccgccaccgtcccagcccccaatcctgatatgctccaaccaatcccattcaaatggcatgatgcccgccggacattcggaaccgttgctgagctggtgggcgttggtagttacatcctcaaaagactgatgaaccaccgaacgatgcggagcgcagatgttacgcaaggctaccttcatttcggtgctgacgagctgcttgagccagctgcccgaattgaacgggccatcctggaacatgctgggcttgtcgaaagccagaaagctattgatgcacagttattgtctgcgttaggcaatttgactgatgaatataagcgcaagatgctttttgaaatactaagccaaaatcatatgcaggttaagaaatga

SEQ ID NO: 230369 - DNA, 615 bp, Klebsiella pneumoniae
atgagttacttaaatcgagtagatgccgagcatgtggcaagaatgtatgcctttcagcaattggtaaaaagtttctcttcggaaaatgctgatgagcatgtgaatcgtattgaaaaagaaatagctgggaaaactattaaagaaaaaaaatggatagcgaatagcctcaccgaaatgcaactggtagagaaaaacaggccgttatcggatgatgaaaatgtgttggttaaagctgtgaacgtactaacagttcttggatatacagatctggctaaggagttaggcgctttggcagacagagttgggcgatgtgtgacgttatcagatgtttatatgaatcacattattgacggtgcggtcaaaaaaaatagaagtgacgcagcctcaggacaccgacatcatttgcatgatgaaattgtggcaattatcaaagccacctgggagaaaaaccctgctttatctaaaaagaaaatgatagcaaagttgatgaatcgttatgaggggagagtggatgaaggaacggtggatagctggataaaaaaagaaaagttattaccgcctaagccaaagaaatacataatgtctgatttggtcgtcccgaacccctatacgtag

SEQ ID NO: 230370 - DNA, 207 bp, Klebsiella pneumoniae
atgcatttggttgaatcaaatttttctaaaagactcactcgtaatgaggccgcagctcatcttggggtgaatccccagacgttggcgaactgggcgcatactggcaaggtaaaaattccctttcacaaggtcggtcggaaggtcatttacttcaagtctgatctggatgcttatctggattccacccgcagaacgcagacggtttaa

SEQ ID NO: 230371 - DNA, 261 bp, Klebsiella pneumoniae; identical to SEQ ID NO: 193888

SEQ ID NO: 230372 - DNA, 300 bp, Klebsiella pneumoniae
atgaaaaagaaaattaacagctttactgctggtggccaggctcggtctgaaatcttccctggagatattttccgagataacaggggcgagcgtgtaacggtgaaaattgtcgctgataaccggattacatatatcagggaggggtattccggagagtgcgttttcccggtcgaaagatttagaagggagttctggccggtgaaacgccagacgttcagcgaatggtgtgagtcgaataacacagcagaaaaaattcataacctgcgtgctttaattgctgctaagagagcgggcaaatga

SEQ ID NO: 230373 - DNA, 246 bp, Klebsiella pneumoniae
atgcctattacttttcaggacatcaaagaacattatgagcagtatggactaagggacataagcgacatgtcgacggcagagtataagcagtccctagccgatggtgctttcttttggatcgatcatcatgattttgttcgcagtacgctgtcagaggaaattttagccacgaacagagaacaattagatgcaatgatcgattatttacagatctatagagataacatgaaactttcctctgagtaa

SEQ ID NO: 230374 - DNA, 774 bp, Klebsiella pneumoniae
atgcaagtatataaagaaattcttgaatccttacaaaagatgactaatgtacgtttaaatattgcaatccttctaacttgcttatttttaattttcatttcacctaatgatcatttcatacttgatcctgtgtcaaaactcataccccaaagccttattttaataacgtcaattcgcctagtattttccattataaatatgattcactccatcatttctgaaaaaatagaaaaacaaaacagggagaagcaagagattattgaaaaacaaaaaaaagagcaagagaaacaaattttaaaagagactatgcgagacacctttaatacactggacgtataccaactccatattataaaggaactaataggcaaaaataacagctcacacccaaaagatgcttcacttttttctttatgcaatcaaaatatcacacaagttgtttctactggtgagacatcacaaagcgtagcactgactagcatcgccaaagatattattaaaaccgattttaacgatgatatatctcaccttgaaataagtgctgcaactagagcatttaattcaatgacgcataaggaaatagattgttttaaattgttattagaaaaaggaatgataaaaacatctctttttgatcgctataacaaaaggtattacttaccgagtcatgatgtattcaaagaatacagcaaatccattctttttatgcaacctcaaaaaggttatgagtatattttaaatccaaccttaaaagatgtattaagcagttattaa

SEQ ID NO: 230375 - DNA, 1662 bp, Klebsiella pneumoniae
ttgaccgtctgggatgagtacgcaaacgcgatcaaaacgggcgaaattccggcctgtaagcgcgtaaaacaggccgtggaaaggtacttttcagacctgagtgacccccgttatgagttcgatacggcgaccgtagagcggtttattgcgttctcccggctctgtcctcacgtcaaaggaccgctgcgcggccagcctattgaactggagccgtggcaacaatttgcctttgctaacctgctgggatttaaagtcaggaaatcaggccgccggaagtacagcagcgcctttattgaagtgccgcgcaagaatgccaaatccaccgtcgccgccatgctggctaactggtttctggtgatggaaaagggccagcaggatatctacacggcggcggtaagccgggatcaggcccgtattgtgttcgacgatgcccgtcagatgtgcctgctctcaaagccgctgaaaaagcgcgtcagtattcaggcgcacaaggtcatttacccaaagagcaacagcctgttgaagccgctggcggcaaaagcggccaccattgaagggactaaccccagcctggcgattgtcgatgagtaccaccttcacccggataacggcgtctattccgcgcttgagctgggcatgggggcccgtccggaggcgattttgttcgccatcacgaccgccgggagtaatgtagtctcggcctgtaagcagcattatgactactgttgccagattctggctggggaagagagcaacgattcgctgtttgttctgatctacgagctggacgacgaaagcgaggttgagcagccgggaatgtggatcaaggctaaccccaatcttcatgtttccgttgacgcggcgaagctggaatccaccatccagaaagcgcggggcataccgtcgcagtgggtggagatgctaaccaagcgtttcaatatctggtgtcagggctccacgccgtggatgggggctggcgcgtgggatgcctgtgcactcgactataacgaagaagagctggccggaatggaatgctacgcaggatttgacctgtcctcaaccagcgatatcaccagcgtgagttacgctttcccgttgggccgggagatccggcttctgacccgtcactatctgccggaagcgcagttgcttaacgtcgccaacaaaaaccgcgctatctatcgccagtgggtaaaagcgggctggatacgcaccacacccggcgactgtatcgactatgatcgcattcgtgacgatatcctgcgcgatgctgaaatcttcaatatcagactggtgggcttcgatacctggaacgccacgcatctgcgcactcagcttcagggagctggtctcgatgtggagccgtttcctcaaacctatctcaggttcagcccggtagcgaaatcctttgaggtattcgtcaaccgcagggtggtgcgccatcgcggcgatccggtactggcctgggctattggtaacgtggtgatggaatccgacgccaacgccaatatcaagcccaacaaaaagaaatcgtccaacaagatagacccggcggtatcagcgttaatggcgtttggtactttccagtctgagcatgaggaatttgcttttgatatgagcgacaaccacaaacaacggcttgccaagtttatagggatttga

SEQ ID NO: 230376 - DNA, 552 bp, Klebsiella pneumoniae
atgaataaaataaatatcttacaggtaatccttaagcattacaaaaccatgtcggatggtaaaggtaatactttaatggatgatatcatagtccacttcgttatacctcttgctatatctttattcctttgtctaacttacggagttatgaaaccttcgattgcatctgtctttgtaaatttcggagcaattacaactgctttgttaatgagtgctgtcataatgatatatgaccagaaacagaaaactatttttaaaatcacggatatcgaagaaaataataaaccaaagacaaacatcccgacactggagataaacaaaatggtttatgatcaactttgtcataacgtgtcatatgcaattctgacctcagtcatactcgtaatatcatcagtggttatttctttcattcctgaaaaagatattttcactaaattatatttttcggttcccgcttacctattaagttatgtggcttactcttccttttttacaactgtaataacatttctaatggttataaaaaggtttagtaaaatattagataattag

SEQ ID NO: 230377 - DNA, 933 bp, Klebsiella pneumoniae
atgcacagtgtaagcttttactcctttagaattttaacaaagaaaggtagccgcagtagcaaaccccttggcaatcttggcttaagtaataataaaaccgcatttgatatactagaggattttctaaaccattataaaatctcccccattgaatataagtcggcaaaaacaaaagtatcattggaacaacatacgaaattaaccttcgataaaaataaaggattggtatacggttatatcaaagttggaaaatatggtgaaagccacgaaataaaggatctccttcttactaaaacacaatatacaactaaagtagatgatgttactttacgtgaacgctatatattgatttaccttccagatgggctcaaagaaggcattattgcatttcatggcaatgataatatttcagctaaatctgctcttactgaatttatacttgactattttattactaagtatcaacaagaggccagaatcaatcctctttgtcataaaaacatcccccaacacatcctcgaatctgaggtaaagcaaattaaagctgttggctataaaccccctaccgatattgctgattcatttggaagcaacaaaacaaacgtaaaaacagatttaatcataaaatacaacgaaggctatatgggtagctttcgtgatttgagagataaaagactcagtaatgttatagaaattgttgaggataaatgcgatgaagtaaaggtttccttgcaacttgggaatagagtcattgtcttcagttatgatgccattcttaaaaaaggaatttcagtagagctagatgattctgatcttaacatagatcctactactggcattcctgatctagccgcacttcatgatacggtaaaaattgtagcgaatgatatactcttagaactgcatagcgctaacaagggggtcactatatga

SEQ ID NO: 230378 - DNA, 1170 bp, Klebsiella pneumoniae
atggccggctcagacgatttgtataaggtagctacagaggcgctaataaaagaattgtataaagattttaaaaatagtttgccttctataattaaacatatagttaaaccttataagaaagttgctgcaaaaagatttaaaactcctgaaagtcttctggagagtttaaagaatggtagtgttaaacaaaatgaacttattgtattggagtgtaagccaactacatttgggccatatttaaggagtcactatctaatgccatttattggttcaagtagtgatatgcgtttagggccgcaaatattaagtgcagacaatcattttgatattccaattatgtttgctcagatgtgtagtcatttaattcctgtcggcttatatcctccagttgataataatttatcacaagttaccttgtttccttcggatgcaaattgttatggttttacaggggtaataccgatagcaaataatttaatctcgtcaattacagccattatttcacaggataaagtctatcgcactggagcaccttcatatgttacagggatagtgcggcaggttacgcaatcgatgttcttagataaaggtttgccaatcgagatttatgaggagttaaggcagtctggcgatttatggtatattgatgtttattcagagggaacagaaattaacccaatgaataacggtgatgttacagagatgtgggggggtctttatgcatcgggtcatatagaagcgaaaggggaaatattggtaaagccattaattgaaggtgttatggacgcttttaaaaatgcagggtataaacctgagtttgtggagaatgagaaccctatgcggaacgattattctgtttttgcacggggaatgaggttttctattttgcctggtccttgtgtttattctattcatatggatgcagaattggcgattgattatagaagaaataaaaatatatttaatggcgtatgtgataacatactcgaagtgataatggaagcggcaagtaaaagtgatgctacgataattaatccgagagatctcgattttacatatacagattctgctaagtcttttactattttagagtcgcagtgtgcggaacaaataaaagatcctgttgctatagttgttagggattggtataggaaaaagaatagtagttaa

SEQ ID NO: 230379 - DNA, 210 bp, Klebsiella pneumoniae
gtgaaaagcgtgctgattgagtcttcgcaggttgtctcctgcaaaaccggtgaatttgtgatcgaggctgacatcacccgtattaacagcaacgtgatcctgaatggcgatgtgacccacggcggcggcgcgatgacgtcaaacggcgttgttgctgataagcataaacaccctggcgacagcggcggaacgacgggaggcccattttga

SEQ ID NO: 230380 - DNA, 603 bp, Klebsiella pneumoniae
atgactagcagcctgttaccgccgggggcgtctgcgctggagcgcaggctggcgcaagcctgttcaggtatcagtgatttaaacgtgccgctgcgtgacctgtggaacccgtggaaatgcccggcaaagtttctgccgtatctggcctgggctttctccgttgaccgatgggaggaaacctggacagaaaccgctaagcggcaggcggtcagcgatgctttctggatccatcagcgcaaaggaacggtggctgcagttaagcgggtgattgaggggctgggttactcaatgactcttgaggagtggtggaaagtagccgaccccgccgggacgtttcggcttgagatcgatctgaatgaaatcggcatcacggagccgatgatttacgagcttgagcggattattggcgatgcgaagccagtcagtaggcatctggcacaaatgacactaaccgcaggaaccagagggccggtatggctgggggctgcaatatttgacggtgaggatattagcgtttatccgccgggatacgaaccagaagacagcattcactacgacggccagcagttctatttcggcagcgttaatttctcaggaaaatag

SEQ ID NO: 230381 - DNA, 2115 bp, Klebsiella pneumoniae
atgaatattacagaaaaaaccgtgtgggaaagttcggtttaccagctttcccgcgcagacaaagtggaaggcgggacgaaaggcgctgcaaatatccaggcccggcaacttgcaaaccgtacgcagttcctgaaggtgctgattgagggtatttccgattacagggagtacacgttctttgaaaccgaagaggatccagacggcaccattgcgggattagctggcacaccacaaggtaagctgtttcgcgtcgccctgggcgagggtgaggcgctggcatttcgttatttcctgaatgatggtggcgttgccagggctgttacgggtttgctcggtcagggatcgattatcaacagcgtccgcttcttcccgtcactccctctggctgagaacgatttatctgcgggaaatattcccgagggtggcaattgctgggtgataaatcatagcgactcatcccttgctgatgagtacgcgaatgtttctggcgcactgcagcagactggccgaaaaatgctgtctcaggaagctgttgaagccgccctgcaattgattgcaaagctaacctcaagcggctttgtggatgacaattttttccccctattcgtcgatggcgccggtagtgttccggcatggtgggatgatggtttcgccgtttcaagagtcgctatgtctctgtaccagatgatttatacggacgtccgcgcgcgcctgggggattcagttaataccggggttagtggtgtgaataacaccttcttcccactggtcgtagatggcgacaataatatccccttgttctgggataacggttttaacgtgtccatgatttctgaggggtttcagcagaaagtatgggcttacatcaacgccataattgaaaaggccctgaatcagcgtatcccgctggttgatccctccttcgttccgggaataactgacgctgccgattcagtcccattctggttccaggacggcgagtttgacgcgacgggtatcgggccaaacatcaggggcatttttgcacggtggtatcaacggcggatgtacaccgccgcttataacattccgctgcataccgacgggcgcacgctatggcgctggaaagcgaagaaagcgcagcttaaagcgggtctggctgtccgcccccactttatgttgacaggcgacagctggacgcagaataacgaactggcggccgctatcgctggactgctgcacgcggattatggcgatgctggtttgggctggcgcaccgttaactacggtgctgcacgagacggttcgaatattttccgctctgccggatgggatttgtacgactcctcaccgaccagcggagcgccgctttatggctgcggtattgatggccagtcaattaatacgacgacaaacaccgcttatttcaacgtgacgaatgtacgctgcactgactgccgaatttactatcaggatcttaacgggaaatttcagtacggctacgacgttggcggggtcacgcagtggactgaggttgtctgcgggaataccggcgcgacaaaatcggtgttgctgacgggtatggctgatgaggtcaggacgatttacgtcaaaaccgacggcaacgccgggcgcgtagctattcatggtttctatctgtggcgcagcggcgtggcaggatgcgtgatgagcaaagcagggaacgcggggattctggccgatcagttcctgctgttctcagacaaaatcgcggagtacctgagcacaatgcagccagacgtcatttgcatcgtgatcgggaacaacgattaccgaatttcagaatcgacagccacattccgtaccgcactgcaaaagtatatggccgcctgccgcgctgtgctccctgacgtgggatttatcctcatggcaccaccgcgcacgaatggaacggcggcaacgccactcgttgatttccgcgatgtgatgtacgacctctcgcagacgttaaatgtcgagtttttcagtatctatgaccttttcgacacctgggcggaaatgaacggtctgggctgttttctagacaacctgcaccccaatgcagtgggcggcaacctgattgcctcggcgttgaataatgcactgattaaaggctga

SEQ ID NO: 230382 - DNA, 804 bp, Klebsiella pneumoniae
atgacaactaatgaaatctatgtacctaagctcggtgacgtcattatcccgggaacgcatccgaaaaaagggcacttcatgcagccaaacctgcctgtcattgcagggttgaaggcgatgtatatccacggcggaacctcagaactgagcatgaggaaccgcgctgacaattccgccccgctaacaaaggtcggagcgcctacaatcctggctgaatttggggctatctgtagctttggcaactgctttgataccggaaaggtctcaacaaaaaaccagacccatatcgtgatctgcaaaccggtaaagccgacggaagccaccgaaaagcagcaggcgtttatgatggggaactacagctattcaggcgcaccggcagtctatcgcggtgacggtctggcttttcttttctctgggcaaagcctttacggtgcgttcgtggaggatggcggagctacccctaccaatatgatcaactacttcagcgcagcctatgacgcctcaaaatgggcagcatttgtttcgctggtcgacggtgataacggtatcgcacgcattggcggacgtcagggcggcgcgcttgcatggcagaactcgcgcgcgttgaccaacaggactgcatatgcagatcgcacaatccgcatcggttctcatcatgcgcccgcagcctatccggcgggagcggctattacaatgggactggagctgattttcgaggctgcactgacgcaggcacaggttgcatcggttatcgatagcgttagtgagtatctcaatgcagcctgggggatctctgatctctga

SEQ ID NO: 230383 - DNA, 669 bp, Klebsiella pneumoniae
atggcgattcgtgatgagtgtaaccgatggatcagacacggagtaaataatggtggtagggatgactggaaaacgccatttcagcttttacagagtctggataatgaatttgatttcacgatagacctggcagcagataatattaatcgtgtctgtgaccgttattattctgaacaggatgacgcattattacaaagctggaagggggagcgaggattttgtaatccgccattctcaaagaccgaacagtttttagcgaaagcgcgggaatgtgatattgccgcttttatcgtggcggctcgaacgcaggccagttatttcctcaaacaggtgtttggtaatccgtattgtcatgagatcagatttctgcatcgcggggtgaaatttctgcacccggacgggattcctgctgtacgtagtccgttgccaatttgcatcctgatctatcgtaatacggtgtgtaatgacaagctcatcggggtgcattgtgctgatcgggggatattgctgcaacatgtatccggcaggcgcaacgggaagccgctacagcattcgcacggtgtccgggatggcgttatacaggcatacaggaaaggggcttctgtgcatgatttgatggaacaatacgcagtgagccgagcgaccatctaccgctgggtgaagggctga

SEQ ID NO: 230384 - DNA, 174 bp, Klebsiella pneumoniae
atgagcgatattacaaacgcaaccccaaaggggaaagcattcactactctgaaaattgatgattcaacgtttcaagccctttttaaggcagcgagagcgcagagaattaccgtaagagaatacattctttctattctcgaccaacacgcggagaaattgacagagggcaagtga

SEQ ID NO: 230385 - DNA, 744 bp, Klebsiella pneumoniae
atgacaaaaacaattgctcaaattcgggcagactaccagtatacagatgataaaggcattctaagagatcgcactctcaacattccccattatttcaaggaaatcccgtttatctactctcaaaatgttgaaactgggaaagtgaagttcagcgccagaatgcaaaagttatattgctacgttgcagactgggagaaatccggcggtgtttgttacgaagagcaatccgagcttgcaagagtttgtgatttatctcgtggaaaaacaaacgacctgatcgaactgatggaatccatcggattattatcagtaaccaaaatccagggacggagaaataaggaactacgagcactcccgctaactgatgctcacgttatcccgccagaagcactgacagcgcagcctgtagcagcgtctgacgaagagccagccccgacaatgaccaaagtcatagaggaagcagtgatcgtggctcagagcgcccctgaaagcgttgcaacaacaacggaaagcgatcaaatggtcattgatgatgatgtgattgttgaggctgtttgtgagcggctctcacgtcctgaaagtctgagacaaagccaaagattcgacacatttacagcgtatgcgcgtcgtgtcctacagaatgatggtaaacgcctaccaaaaagaattgaggagaggttagaggaacgttttgaacaactttacccacatctttatgtaagattcgatgacataggattttaa

SEQ ID NO: 230386 - DNA, 282 bp, Klebsiella pneumoniae
ttgaataaactataccttttgaacgaatccacgcaccaccaaatcgaatgtaacaccatttgccagcgtctttattatcatctcgcatccctccaacgtgaaagcggagcaataaaagccacggtgaaacacattgctgatggtgtaggaataagcgaaagcggcgcgcggtattggatgctattaatgcaagatgccgccgttattacaatggaacgccacggcaagttttacgacattaccgtaaacgaagcagtcagctttattacgacaaccaactaa

SEQ ID NO: 230387 - DNA, 126 bp, Klebsiella pneumoniae
atgatcattatgctctattggacatttttcatctatataacggcttactactccggagtgttttcctcatgcaaggataaaaataataatgggcagaaaagaacgcaacgtattagcacgtattga

SEQ ID NO: 230388 - DNA, 408 bp, Klebsiella pneumoniae
atgggcagaaaagaacgcaacgtattagcacgtattgaacgacaatccaatactctcccccccgccaaatcattagcaagccgtagagagtttagagagctatcccgcctctctatggaatggaatagtgttcccggagaatggaaaacagaaataatcgagcacgatagccctccgttatcagaggaagagcagaacgctctagatgacattctctcatcctgtgatggtggtgtctatttcaatcctcgtaaacgaaaaaaatacatcgtcaatagttcagatttgaagaagtggcaggttatgggctttgaggactatgtgtcattttgtgggtatttatcgactaatggcctcaataacctggtaaaagattttgacgcagtgtatgcagataaggaggaatga

SEQ ID NO: 230389 - DNA, 195 bp, Klebsiella pneumoniae
atgcaactgattttaaaatcaaaatcccacggtattcacattgcgttagatgccaacaacgctaccgacctgataaaaatcaaggcgttggcagagatgctagacattagctatccagccttaaaacagcgtattcacagagggcaggatgtagatacagctattaaagaactattagctaaagggggcgaataa

SEQ ID NO: 230390 - DNA, 1860 bp, Klebsiella pneumoniae
atgtcattagatctctccgttagtactctgaaaaataccgtaacattcgtagtcgataaaagcagcattgccaccgcgaagaaagctgctgatgacctgcacaaatatttccagaagatacaagaccccaaaatccgctttcagcagcagaaacaacgtagacagaaagcgcgccagatggctgatgatgcccgatttaacgataaacctcgtaatgctgccgaaatgaaagctcagcgtgcggctgagaaacagaaagccagggaagaaaaagccaatctgagagcgcagcagcagctacagcgccgccaggagacagcagagctaaaactccgtcatgcagggctacagctgggcgggattaaaggtaagtatggattagatcctaaggctcaatttgaagccctccgctacatccgtcaacaaacagaggcttttgctcagggacaaattaccagcgcccgaatgaatgccctaattcgtgagcgcatcaccctggagcgcagggcagcagcagccgcacagaaagccgctcaggcacagaaaacaaattatgttggggctgcgaagaagttcaaagatcctaatagtaaggaatacggcattgccagattgcagagtgctgcaacgggaattgggagcatgtttgccgcaggaaacctcgctgcacgtattaaacagacaggggatgaaaacctcgatctggtcagaaagtcggcccttgtaaaaaccaacccaaacgctatacgctcaatggtggcctggggtcaacagcatggggttgactccgcgagtgtggataaagcaacggatgggatgaaagatgtccgagaaaggctgggagagtcgatttcaaactctactttcgatcagaagtctggaaaatggaagggcggtaatggtgcggtagacaacgttatgaacctgttcggatggaacatcgaccagcttaaacaattccaagacaatccattagattttgttcaggcaaccgtaaatgaaggtcaacgtagaggcatgtcccaggcatccatcgggcacctgatcgaggattacggggatgacctggcccactacaccgacatgtttttgaataacggtgcagagtttatcaagacgctgaaacagcttgcagatagcggtcagacgctcaacgatgagcagattaaacagataatggagtatggtgacctcaccacgaaaatggcggctctgacaaacggcctggatattaatctgtttaccgggtttatggatggatttggaaaatctggtgatcaactaactgagaacactaagaatcttaacgagagcgctcatctcctcggagagggattaggcaatctggctacacaggtgacaggtgcaacagtgcaaatcagtcagagcgtgcaggctattaacgattacctaaaatccaagttccctgaatggtttagcggtgataacaatcagcctgcggcacagcagttgtataacggggccgtaggtggctcagccgatgctgtggcagcttggattagatcaaacacaggaattgatacgcagagtgttggccctgctgttatggattggttaggaatgggacgagcatcaacagggacggctgcaaacaactacagcctatcagggcaatctctccgcgatggcgctatggctctgccatcaaccccggcactgagctatcaggtgaatccgactttcaatctcacccttgcggcggaagtgcctctgacaatccaaagtgatgtatcacggctgagtgactatatcgacttcaacgccagagcgtcagcagcgagttttgaacaatcattaacattgcaaataaatagcggtcaatcaaccacaggtggctaa

SEQ ID NO: 230391 - DNA, 711 bp, Klebsiella pneumoniae
atgagcggcaaactatacgccctgagcagcgggccgggggcggccgatctgatcaccgtgcgtgcggcgcggatcctcggccagctggatgtgctgtatgcgccagccggccgcaaaggcggcgacagcctggcgctctccatcgtacgcgagtacctgggcgcacacacggaggtccgctgctgccattttccgatgagcgccgacagcgcggaaaaagaggcggtgtggaacgacgttgccgcggcgctggcccaggaggtggcggcgggcaggcaggtcgggtttatcaccctcggcgacgccatgttgttcagcacctgggtctttctgctgcagcggattggctgcccggactggctggagattgtccctggcgttacctccttcgccgccattgccgcgcgggcgaaaaccccgctggccatggagcagcagtcgctggcggtgatctcctgcaccgcgccggaagcggacattgccgcggcgctgcgccagcatgacagtctggtactgatgaaagtctacggccgcttcgcccgcattaaggcgctgctggcgcaggcggggctgctggatgcggcgctgatgatgtcagaggccaccctgccgggcgagcagtgctggcgccatctgcgcgaggtcagcgatagccagccgctgccctatttctcgaccatcctggttaacaaacagtgggaggaggcgtaa

SEQ ID NO: 230392 - DNA, 333 bp, Klebsiella pneumoniae
atgaaagagttaacactaaacgaaatggagtacatctccggtggctttaatctgttcggcgcggccagcggcttcgccagctttgttgccaactcgggcgtcggcttcacctcttttgttctcacctccggcagcgcgtttgcctccttcgtcggcgacagcgcgatggcgtttggttccttcctgaccgggcagtcaaactgggaaacctttgtgaccactggtagcgaaaactggggaaactttgtcctcaccgctggcaaaaactggaacatcttcgtagataacgccgccagcaactggaacagcttcctgaacaacgcgtcggcgtaa

SEQ ID NO: 230393 - DNA, 945 bp, Klebsiella pneumoniae
atgagactcaggaaatacaataaaagtttgggatggatgtcattaatcgcaggtactgtattactcagtggttgtgattctgcactccttgacccaaaaggacagattggactggagcaacgctctttgattctgacggccttcggcctgatgatgattgtcgttattcccgccgtcttgatggcagtaggatttgcctggaagtatcgcgcgagcaataaagatgcgaagtatagcccgaactggtcacactccaacaaagtggaagctgtggtctggacggtacctattctgatcatcctgttcctggccgttctgacctggaaaaccactcacgcactggagccaagcaaaccgcttgtccatgacgagaagccaatcaccatcgaagtcgtatcgatggactggaaatggttctttatctatccggaacagggtattgctaccgttaacgaaatcgccttcccggcgaacgtaccggtacacttcaaagtgacctctaactcggtgatgaactcgttctttattccgcgcttaggtagccagatttatgcaatggccggtatgcagactcagctgcacctcattgctgacgaagctggtacttatgacggtatctccgctagctacagtggcccgggcttctcaggtatgaagttcaaagcgattgccaccccggatcgggcgactttcgatcagtgggttgcaaaagccaaacagtctccgaactccatggactccatggccgcgttcgagaaagtggctgtgcctagcgaatacaacaaagtggaatatttctctaacgtgaaaccggatctgttcaaagatgttgtgaacaaattcatgtctcacgagagcatgaacatgtctaaacctgaaggcgagcacgctgctcacgacgggatggaaggcatggacatgagccacgcggaaaccgctcactaa

SEQ ID NO: 230394 - DNA, 525 bp, Klebsiella pneumoniae
atgctgaataaagaaagacttgatgagttattagattattcgcctgattcagggttatttacttggaaggttaaccgccggggaaaggctaagtctggatgtatcgcaggaagcaaaaatggacaaggttacattctcataaaaattgacgggaagttttattttgctcatcgcctcgcgtggctagttacgcatggaacattcccagtcaacatgatagaccacattgatggcaacagagaaaacaataaaatcaataacctaagagaagccaccgctgaacaaaatatgtggaatagcgcagccgggaaaaataacaaaacaggagtaaagggtgttagctgggatggcagaaggaaaagattccgggccagcatatccataaaagggaaaaacaaagaaatagggagttatttgtcacttaaagatgctgagtcggcaataaaggattatcggctgaaactccatggcaaatttgcaaataacgaagttattaataacaaccttttggaggggaaaccatga

SEQ ID NO: 230395 - DNA, 204 bp, Klebsiella pneumoniae
gtgaaacttttagcaaacatagatgagggcgtagcaattgaccttgaaaaggttgcgtgccttctgcgtgaaaaagacacaaaaaaaacattggttattttggtttctggcagtcgctttgtcatagagcagcctcttacggaggtattgaagatgattagtgactacgaagttatgagcaaagaggagaagggtctcggttaa

SEQ ID NO: 230396 - DNA, 753 bp, Klebsiella pneumoniae
atgctaaatactaatcaagacagatttagcaatttgcatatttatcattctgctaaaaatgacaaaaatgagcagatggaaagtaaagagattagaaaagcgaatctggagaacttgatcgaacagcagcgtgtagatgcaggcctgaacaaggctcaatttgcagagcttatcgatacaagcccagcagctctgagtcagctgataggtgataaacctcatagaaacatcggcgataaaatggctcgtaaaattgaatctgcactcaatctgcctttcggctggatggatacgttacatgccaaagagaaccacacgaacgtaacattcagatcagtaaatacccctcaggggagctacccagtgatcagctgggttagtgccggacagtggatggaagcagtagagccttatcaccgaagagcgattgaccgctggtatgaaacaaccgtcgaatgctctgacgattctttctggttagatgtccacggcgattctatgacatctcctgtcggccttagcattcctgaaggtgcagctatcctggttgatcctgaagtagagcctattaatgggaaattggttgtggccaagttggaaggcgataatgaagccactttcaaaaagttagtaattgatgctggaaggcgcttcctgaagcccttaaacccacagtatccgatgattgaaattaacggaaactgtaggattgtaggggttgtagtagatgctaagatattgaatattccatga

SEQ ID NO: 230397 - DNA, 234 bp, Klebsiella pneumoniae
atgagtaatgaacttttacgctggcgaaaagatgccagcacaggcgagtgggctcagttggcaaaactggcaaacacaaccgttggttatctggatcaaatcgcctatggaaaccgtcgggcatcgcctgagaaggcagaggcaatagaagaggcaaccaaagggtttagccattaccaacccgtatcaaaagagagccttgttttttcacgtccgagatgttccgcggcttaa

SEQ ID NO: 230398 - DNA, 303 bp, Klebsiella pneumoniae
atgaaaaagaactctggcaaacaagccgttattaacttcatcggccagcatcctggctgcaactttcaggatatccgccgcggcaccgggcttgactcttcagtggtcaattcctccctgtggcagatgcaccgtgacggccaggttaagcgtgagggtgagtgcaggagctaccgctacaccctgattgacacaacagccgtaaccgacagcgatccgtctgttcagtatcgccagcgtcctggcggtgtaaacccaatgaccaaactgtttaaccagtgcctggcgggagtaagaaaatga

SEQ ID NO: 230399 - DNA, 225 bp, Klebsiella pneumoniae
atgatttttctgaaattaacacaaaaaatcgtggtacagcaccagggtgcatacggttgggaaccagaaacagtctacgagcctgtgtttgttgctgcagaccacatcgccagcatgtatttcgctggtctgacgattctgaaaatgacctccggagaacgcattgacgtgaaagagaccccggaagaaatcatcgccatgctcgcagaaggagccgccaaatga

SEQ ID NO: 230400 - DNA, 450 bp, Klebsiella pneumoniae
atgactatcacactacaggctgtaaatgagctcatcgcctcccttgagagcgcaggcgagccgtcgatcagagagcagaagttcctgaagctggcgaaagcgtaccagcagctggctgcggagaatgcggggctgaaggctggcattgcagaagaaattgaagttatcaatcgtggcggtcaggcgtactgcgtgaaggacggcatgtccataaacccgatatatgcgcgcggatggaatgaccaccgggctaatttggcagcggaaaaaacccccgccaccgatcgcatcgtagccgggattaaggctgatggggtggaggatatggctaacctttttttcaaattagccaaagatgaggcgaatagtttgattgccgagcaatggcgcgaatcaggtcgagttgctaatgagcaggccaagcagctgcgcgagggggccgacaaatga

SEQ ID NO: 230401 - DNA, 276 bp, Klebsiella pneumoniae
atggtcagtttgcgtcatatgtgttcgcgcttcatctcggcttgctgggcaattatcactaccatttcgtttgaagacatctcggtgagccgagcggttagtaagttgcgccgggtggtggagcgggtcatttccgcagtctccgtgaaagcctcgcctgaaaaggctgactggcgaatcgtagagcgaatgtgcagtgaaagcgtgcgcgagcaagttaatattttcggccgccgtcctcgcaacaccggcgctttgtgcagtccgttgctatag

SEQ ID NO: 230402 - DNA, 879 bp, Klebsiella pneumoniae
atgagttacaaggaaagagagataacggttgagtttactctggccaatgggacctttgacggtaaaaaaggtaacacgctcatagccgaagggttcaagtgcgagctttctgtttcggcttatgggggagctaccgggacgatgatggagcttagcctgtggggcttatcccttgataacatggctaaattgaccaccaactccgaaaaattcttcggtgagcagcaaaacgccatacgggtttttactggagatgtttgcgtgtttatgggcacgataatatctgccagggttaatctgaatcaaatgcctgatgctccgattgaaataacggcctccgctattggaaaggaaaagcttgtcgtatgcgagccaacttcaattgaaggtgaagcgtctgtcgctgatatgataaaagcactggcctctaaggtggatttgaagttcgtaaatgttgatgttaaatcggtgcatagcaacccttattatgagggaaatgctattgagcaaattcagaaaattgcggccgatcacaatattattgcagatatagactttgggacggttacaatctacacgggggaaagccctattgattctgtggttccatttatatctccagaacatggactaattggctatcctattttttatgatattggtataaattttcgctgcatttattcaccatcaataaagctggctcgaaaaataaaactggaaacctctctccctcacgcaagcggggattggatagtccagtatggaaccactcattacttgtcatgcagggtccccggtggtctatgggaaacattcgttgtagcttatcccggatttgtatttggagtgtgggatgcttaccaagcaaaagcctag

SEQ ID NO: 230403 - DNA, 204 bp, Klebsiella pneumoniae
atggaatggattattggcgtaatcgtaatagtgtttctcgttaaccttttcaaaccaaggcgttgcgatgtatgcggcacaggttttaaacgtaactactacacctggaagatcgacggcaaaaagcaacacctttgcccgaactgcaatagcaaaatgaaaaaaagaaaaagtgacatcagctttaaagacagattcggctga

SEQ ID NO: 230404 - DNA, 174 bp, Klebsiella pneumoniae
atgcaagatacacttttcactgagcgcaaaaacatcaaaatcaacctacgtcttccatcacgactaaacgaggaagttcgccgcctagctgaaatggactgtatttctcttaattcggcgattgttcgtttgctggcaaaaggcgtgagggaagaggtggcgaatggtcgctaa

SEQ ID NO: 230405 - DNA, 2226 bp, Klebsiella pneumoniae
atgacaatcaccgaaacgcaaaaaactgctcaattagcagcagatgccgccgttagtgccgcagaagccaaacaatacatgctggaggctgagaaaggatatcaggatactagtgctgccgcccagcaagcccaggatgcagctggatcagctcttttatccaagcagagcgcggctacatcagaaaccaatgccgctcaatctgcagaagaggctgaagcagcaaaaatagaggctgccgccgctgcagctaacgcctccgactacgctaaaaacaagttcactttttacaaaacaccaactgatccggacggcaccattgcagggctggcagcaactactgatggccagtcgttctgggtagcccagggcccagatgcgctttccgctgcatggcagtatcaaaacaaagcaggcgtggccgtattgcaggcgaagcagccgggtacagcggccataacagggacaatccgcgagtttccgacgctggctgcggcgcaggcagacgcagatgctggcaacataccggtaggatcaactgcgtattaccgtagccccgatgatagtgcgctggctattgaagtcatcaataacggcgggacgctgcagcctaccgggcggaaaatgccctcacaggaagctataaacgcagtttttgatttcatcagcaaatttattgtcagcgctgacgttggaaacaactatttcccgttcttcactgatggcgctgacaacgttcccttgtggtgggatgatgggtttgcggtatcacgaatttcatctgagctctatcagatgatttatgatgatgttcactcccgactaggggatgcgctgaactcggttgttaatgacgtatcaaattctttcttcccgctgtttattgatgccagcaataacgttccggtttggtgggataatggttttgatgtttccataatttctgaaagcttgaaagcgaaaatatggaactatattaactccattatttcaccagctcttaataaagcggtcccgcttgtatcgacgggattcgttccgggcatgacagatggtgctgataatgtactgttctggtttcaggatgggaaatttgatacgtatgaagtggggccaaacattagcgcctcactcgccagtgcttaccagcgcaggatgtataccgcatattacaacatgcctttgcataccgacggccgcacattgtggcgctggcgtgcgaaaaaagcgcaactcaaggcagggatggctacgcagcctaatttccttctcacaggtgacagttggacgcagaacaatgaacttgcgaccgctattgcaagtgtcctgagcgctgaatatggtgacgctggtttaggctggcgaactgtgaactatggcgcatcgcgcgatggttcaaatatctttcgctctgccggctgggatttatatgacgcctcgccaacgagcggcgccccgctttatggttgcggcattgacggccagtccatcaacaccaccacgaacacggcctatttcaacgtgactaatgtccgctgtactgattgccgtatttattatcaggacctgaatggcacctttcagtacggctacgacgttggcggagtgacacagtggaccactgttgtgtgtggaaatacaggcacgactaaatcagtattgctgacagggatgactgatgaggtcaggacgatttataccaagactgatggtaacaccgggcgggtggccatacatggattctatttctggcgatctggtgtctctggttgcgtgatgagtaaggccggtaatgctggtattctcgctgatcagtttttgctgttttccgacaaaatagcaacgtatctcagcaccattcagcctgatgtgatcgctatcgtcatcggtaacaacgactaccgcatttcgacagggacccagacatttcgcacagcgctgcaaacctatatggctgcctgtcgtgctgtgttgcctgatgtgggtttcatcctcatggctcccccgagaaccaacggcacagcggtaacgccgctcgttgatttccgtgatgtaatgtacgacctctctcagacgctgaactgtgaatttttcagcatttatgacctgttcgatacctggacggaaatgaacggacttggctgcttcattgataatcttcaccccagcaccgtcggtggaaacatgatcgcttcatcccttaataacgcgctgatcaaaggctaa

SEQ ID NO: 230406 - DNA, 810 bp, Klebsiella pneumoniae
atgagcacaatttatattccaaaactgggcgacattgttattccggggagccatcccaaaaaagggcacttcatggtgcccgatttacctgttactaccggtctgaaagggatgcatattcagggtggtaatgctgcactgagcatcaggaatctggcggatagtaccaccccgctgaccatggtaggaacgccgacaatctccccgacctttggcgccgtttgtaatttcagcaactgttttgatacgggaagggtgtccagtcggaaccagacacacatcgtcatctgtaagccagtaaagccaactgcagctactgagcagcaacaggctttcatgatgggtaactacaattactcagggtcaccgattgtttatcgtggtgatggcctcgcatttatgtatacgaccactgcgcctaacacgatctatggcgctttcgttgaggataataatgccacgccgaccaatcttattaataacttcacgaccaactatgacgtaaccaaatgggcagcttttgtgtcactgatcgacggcgataacaacattgcccgaatcggtgggcggcagggaggggcgcttgcatggcaggggtcgcgaacgctaactaacaggacggcatacactggcagaaccatcaggattggatcgcatcatgccagtgctgcatacccggccggagcggatatcaccatgggtatggaactgatttttgaagcagcgctaacgcaggccgaagtagcatctgttatcgacagcatcagtgcgtatctgaacgctgcgtggggcattaacgatttgggttaa

SEQ ID NO: 230407 - DNA, 2304 bp, Klebsiella pneumoniae
atgtccgttgagacccgagggcgcgtagccccctcgccaccacccccgctacaaaaaagcaccggtgattcattcgtcggtgcttactcctggaataacctcaagcaagaggccataggccgcgacagaccccttacacgtgccgaattccgtcaggtgcaaggcgttttaaaccggattgaccacctgccgtttttcctgcaaacgctgtttacctcgcgttataacttcatccgccgcacaaagagcccgttgggtgggctgtatttcttaaaaaacacctttgagcgcaagctgctgccgcgtcttgagcgtgttaatgagctatgcggcatgaatgagtccgcctcgattggtttcctgtctgagcgtgatgaatatgcgcgcctgcctgacatgaatgataaagagcttaagaaatttgcggccagaattgccgcccagctctggagtcagtatgaggaattaagcgacgcatgggctgatgctcacggtggcaaagatatgcttttcaccgacgaggctcaggcgcatttatacggtcaggtggccggtattgcgcgcgctttcaatttcaccccaatgtactggaaaaaataccgtaagggtcagatgacgatccgcatggctttttccgcaatttcccgactgattaaagaaaagtggtgggttaaccagctcaagacgcagcgtatgcgctggcgcgaggcgttgctcattgccgccggtgaggtcaataaagaccgttcaccctacgccagcaaaatggcgatccgcgatgttcatgcacgccgcctggctaatctcgaataccttaaatcctgcgagctggaaaacaaagtcaccggcgaacgcatcgacctcattagcaaagtcatggggagtatttcaaaccctgaaatacgtcgtatggagctgatgaacaccatcgcagggatagaacgctatgcggccagcgtcggtgacgtggggatgtttatcacgctgaccactccatcgaaatatcatccgacccgacaggtcggtaaaggtgaaagtaaaacggtgcagctcaatcacggctggaacgaaaccgcattcacacctaaagacggccagcggtatctgtgccgaatctggagccttatgcgtaccgctttcaaagataacgatttagaggtttacgggatgcgggttgttgagccacaccacgacggcacacctcactggcacatgatgctgttttgcaaacccggtcagcgtaaagccattaacgaaattatgcgtcgttatgcccttaaagaggatggacacgaaaagggcgcagcaaaacagcgctttgagtcacgtcatcttaatcagggcggagcggcgggttatatagctaaatatatcgccaaaaatattgacggctatgcgctcgacggccagctcgaccacgataccggcaagcctctaaaagacacagctgcagccgtaaccgcatgggcgtctacatggcgcatccctcagtttaaaccgattggtctgccgacgatgggggcttaccgcgaactgcgcaaacttcctcgtggggtgagtatcgccagtgagtttgacgacagggtcgaagcggctcgcgctgctgcagatgaaggtgagtttgacctgtatatcatcgcgcagggcggtgcgaaccaaccgcgtgatgctcaggccgtcagggtcgcccgtaaagtgacggatgaggtcaacgaatacgaggaagatatcgagagagtagtcggtatttatgccccacacctcggggctagtcgcgtacatgtaacccgtaccgccgagtggcgcatcgttccaaaggttttggccgttgagcctttgaccttaaaaagcggctctgccgcgcctcggagtcctgtcaataactgtggaaagctcatcagcggtggcgatccagttatgaccctcacaccgtttgagcaagccgcagcggtgttaaatctgattgagcgcggggtcataggctggaatgagccagaagtcgtgaaggtgcttaatggcgcattaaaagctggtgcaccacgaaagaatcgccagcagagaagcaatgtgccactcaaaatgagtgagcaagcgccatcagccaggatgacgaagcctgaaagggatcgcatcgcaaaaattcgtttcgatttggctcagcaaggcattatcccggaacggtgggaactcgacgtactagcgcgtggggcaacggtgatttttgatgggatagggtattgctacttgcgcacggatgatttttgtgaggacatttattcattgaataactgggctgttagttaa

SEQ ID NO: 230408 - DNA, 1014 bp, Klebsiella pneumoniae
atgacaattaagaaactcgatgatggtcgatatgaagtggacgtcagacctgctgggcgcaacggaaagcgcatccgcaggaaattcgataaaaaaagtgaggctatcgcttttgagaaacacactcagtacaaccaccacaataaagattggttagcaaaaccggcagataagcggcatctgtcagagttaacaaaaatatggtgggagttgaaaggcaagcatgagactcatggtcgagattatttaggcaaaattgagttattcaccaagattacaagtgacccatgcgcctttcagattactaagtcattgattagccagtacggcacagtgcgccgctctcagggcatcaaaccatcgagcatcaaccgcgatttgacttgccttagcggaatgtttacctctttgatagatgcagagctatttttcggtgaacaccctttcagggggctaaagcgattgaaagaggacaagcccgaaacaggctacctgacacaagaggagatcgctgatctactgtccaaagtggacggggataataaaaaaattgcgatactttgtctgagtaccggagcgaggtggagcgaggcagcaaaactgaaagcggaaaacataattcaaaatcgcgtcacgtttgttaagacaaagaccaacaagccgcgaaccgttccgatctccgaggagctggcaacaatgatcacttcaggaaagcgtggttatcttttcactaacgctaactatcctgcgttcagacgactaatgaaggagttgaaaccggacctgccaccgggtcaggctacgcacgcattgcgtcacagctttgcaactcactttatgattaatggagggagcattatcacgcttcaacggattctcgggcattcacgaattgagcaaacaatgacctacgcgcatttcgcccctgagtacctgcaagatgcggtaacgcttaatcctttacgcggtggcactgacgttaagagtgtccacacattgtccacgctagaatga

SEQ ID NO: 230409 - DNA, 2199 bp, Klebsiella pneumoniae
atgcacaccacgcactattcatccttcccgctgcgtaaaacgctgctggccttagccatcggcgccgccagtcaaacggtgatggccgcggacgctgccgccgcgaagcagcctggcgaagagaccttcatcgtcgaggctaacgaaaccagcgattttaaatccggcggcgacctggtggttccggcattcctcgatggccagatcgcccacggcggccgtctggggatgcttggcgaacaaaaagcgatggacgtcccgtttaacgtcatcggctatacctcgaagctgattcaggatcagcaggcgaaaactatcgccgatgtcgtcagtaacgacgctggcgtgcaggccgtacagggctacggcaacttcgccgagacctatcgaatccgcgggtttaagctcgatggcgatgacatgacgatgggcggcctggcgggcgtggtgccgcgtcaggtgatggacacccagatgctggagcgcgttgaaattttcaaaggggctaacagcctgcttaacggcgcggccagcagcggcgtcggcgggatgattaacctcgagccgaagcgggcggaagatctgccgaccgcacgcgttggcgtcgactatacctctgattctcaggtgggcggcaccctcgacctggggcgccgtttcggcgacaacaaccagttcggcgctcgggtcaacctggtgcaccgcgagggtgaaggcgctatcgataatgataaacgccgtaccacgctggcttcgctggggcttgattaccgcggcgaccgtttccgctcctcgctcgatttcggctatcagaagaaaacgttccacggtggtacgatgggcgtcaatatcagcggcgtggatttcgttccggcgctgccggacaacagcaaaaactacagccagaagtggggctatagcgatattgaaagcgagttcggcatggcgaaggcagaatatgacctgaccgatagctggacggtatacagcgccctcggcggccagcattcgcatgaaattggtacctacagcgcgccgaagcttctgaataaaaacggcgatgcgacggtgggccgcctggatactaaccgcattatcgacgcgatcagcggcatgggcggggtacgcggcgatttcaataccggcgcgatttcgcataaggtgaacctcggctatgcggcgcaggtgcataccgatgcgaccgcctggcggatgtcggccaggaacccgaccactaatatctatgacaaccatgatgtggcgatgccggataacgcctattttggcggcaactaccacgatccgctggtcacctcgcgcagccgtacgcagggctggctgctgagtgataccctcggcttctttaacgataaagtgctgtttaccgccgctgctcgtcatcagaaagtggttgtgcgcaactacagcaacgccaccgggctggaagatacctcttcgcgttatacccaaagccgctggatgccgacgtttggcctggtgtacaagccgtgggagcagctgtcgctgtatgctaaccataccgaagcgctgcagccgggctctgtggcgccgacgacggcggccaatgccgggcagagtaccgggatcgcgcactcgaagcaggacgaagtgggcgtcaagatcgactacggtacgatcggaggatcgctggcgctgtttgaaatcaaaaaaccgaacgccatttccgataccgctggcaattacggcctcgacggcgagcagcgtaaccgcggcgtagagatgaacgtctttggcgagccgatgctgggactgcgtcttaacgccagtaccgtctggctggatgccaaacagactaaaaccgctgaaggcgcaaccgacggtaaagatgccatcggggtggctaacttctacgcggtactcggcgccgaatatgacatcaagccggtggaaggcctgaccgccaccgcgcgcgtcaatcatagcggctcgcagtatgccgatgcggccaataccaagaagctggatagctacaccaccctggatttaggcctgcgctatcgtatgcgtctgaacgccgaccagaacgaaatgatctggcgcgtcggggtgaccaacgtgaccaacgagaagtactggtctggcattgacgataccggtacttacctgttcgaaggcgatccgcgtaccgtccgcgtctcaatgagctacgacttctga

SEQ ID NO: 230410 - DNA, 417 bp, Klebsiella pneumoniae
atgggcatcctggggtcaaccgcacgctacgcctatctgacccgggagcagcgcaagcgcgttgccactctggcaaaacagcatgccggggacatcccggttatggtctgtgtgggatcggtccgtatcgacgccattctgcatctggctgatgatgcccaggcagctggcgcgaatgtcctgttactcccggcggtcagctaccagtcactccgtgacgacgaagtcttctcacgcttcgagaccgttacccggcacctgtctgtaccagtgtgtatctctgataatccgggcacgacgcattttacctttacggacgaactccatggtcgtctctcatcacttaagggtgttagctcggtcatgttccctgacgagccggacagtgtagctgacagctggcaaaggaatcgttga

SEQ ID NO: 230411 - DNA, 696 bp, Klebsiella pneumoniae
gtgttaaccgtctctccgtcaattgcccctgaaatttatcgtattgccccaggttttcgggtactcagtatctgcgtaaaagctgcgccagtgcttcatcccgacgctggagaaatcgcgctgcgggaagcctgtgaagccgttgtggccggcgaaccggaatgggcgggagctcatctggcagcctgggccgacgtttttcaaaagtttggtgctaaacctaaacgcaccccttgctcagctgatgcgttacgtaagcgcgtattacgtgacggaacgatgcccgcactcgatcccatcgttgatctttataacgccgtgagtctccgctacgccgtaccggttggtggtgagaatatctctgcctatcaggggtcaccacgtctggctgtggcaaacggaacagagccttttgataccgtcaaagagggtgaaacggccgttgaatatccttcacaaggagaggttatctggtgtgatgatactggcgcgacctgccgccgctggaactggcgacaggggatcagaacccgtctgggcgtggacgctcagcaaatgtggttcattctggaaagcctgccgcagatgccgctggagaaactgcacgaagccgggaagatgctgaccgacggcctggaaaaaatgatgcccggcctgtggtttgacgttgctctcatcgaagaacaacagcagtaa

SEQ ID NO: 230412 - DNA, 1476 bp, Klebsiella pneumoniae
atgaaacaaaacggaaaagcatactcttacataagattctcatcgaaaaagcaagaacaaggcgactcagttagacgccaaacagagcttgccgaacagtatgcacatgctaataatttaattctatcagataagaacttccaagacctcggaatctcagcattcaaagagggaaacagaccttcgcttggagatatgctcgaagcaatcgagaaaggtcaaattgagcagggctctactatcatcattgaatcgttggaccgtctgagccgtcgaggtatcgacgtaactcaacaaatcattaagtcaattttgcaaaacaacgtcttcatcgcttcattggtcgatggcttattgttaaacagggaatctgtcaacgatctcgtaagtgtcatcaggatagctctagctgctgatctggcgcataaagaatcggagaaaaagtctcagcgtttacgtgagacgaaaggacagcaacgtcaacgtgccttaaatggtgaagtcatccacaaagtcctgcccttctggctacaacgtaaaggggataagtacgtttttagtgagaagctcgatacagttaaaagaatcattgagttacgacaaaaagggcttggaacaaacaaaatcgctaaaacgttaaacgatgagggccatgaacctttacgttccactggatggaatcatacaactattggaaaaacaataaattcagttgctctttacggagcatatcaaacatcagaaacgaccaaagaccggaaaataattctacttgatattgtagaggatttttaccctgctgttattagtaaagaagagtttatgcttttgcagtctgatcagaaacagaataaaccaggatataaatctgtacataatgctttcgccgggatattaaagcatgaatgtggtggggcccttgtaagaaaatttcatgccgtttcggggaaaacgtatcaatatcatgtttgcgctaacgcaagagatggaaaatgcaacgttacgaagaattttaaaaatatagaaatagcactctatcgtataatgaaggaactcaaacttgagaaaaagactagtattgatgagacattactgttagaacgtaattcagtgaaagcaaagattcaggatctaaatgacatgctcctcaatttatccaaagttcctattagtgtaattcaaacgattaacaatcttgaggaaaaactacagagactcgaagagagcattaagcaacagaacaatatgattatctcagagcaggctgttgactttaacttgttgcaagaaattaaagatccacaagaactgaacatgatgcttaaacgagtaatcgaaaagataattgtatttaatattggaaaaagatggagagtaaaagttatgtaccgaaacaaacactctcagagcttcatttgggacggtgaaaaaattagcttcatctctgatacaaataaactacttgatctcttttaa

SEQ ID NO: 230413 - DNA, 405 bp, Klebsiella pneumoniae
atgagtaatgaatattatttaaatgaacatgattgtgaagaaggatgcccatgtgaacttattcgctctggatggaaagatgataaaggcgattggaaagaatcagttttcgcattcaaagatgctaaccaaaaagaatttgtccctcattgtttctttattgatgagactggacattacgatcttgaagaagataaaaaacatttggatagtgctatgtacaaaatattctgtactgagaataacaacataagcattaaacagattaatgaatggaatgccaaaccgaactcagaaaaaaaatacttcgctgggaatgaagcaagatcaatggagacttttaaattcgttccgcgaacaaaaaaccttgatactgaacttaatgatatgtttgataatttgtaa

SEQ ID NO: 230414 - DNA, 1086 bp, Klebsiella pneumoniae
atggagcgggtgcatcagcggaatataatccgtcagaaaaaactggagggaaaaattgaaggtcatgccagttttgcactgggggaggcgaaggccgaaacggccctgtacctgccggacaggttaggtgtcagccttttatttccggcgaaaaaagtgactccacagacaccggatggtgtctgtaatatgggagcgctgcgttttgccatgaaactggtattgtcaggtagcgttggtgccagtgctgcaattgaattaggggtgacagtagactggagtggagaaatgggaaagggctatggcattaaaggccgtcctgcaaccctgactgttccaccgttgccaggacagcagcaggtgaatttaaagacctcaacaatacctgaagcacaggggggaggtgaaattggtgtttttgttggtgctcaggcgggaggtaatatcagtggtgccattgagtggtttgacccgcatcctgatgatacgccagtagctataggtgttgagaaagataacaaaccccttgtcaataaagagaagaagtttgccgcgatagccaaactggaagcggggatgacggtgcaggcaggcgctgggggaagtggggttttttatatcacctatattcagggacgttttcgtatttactgtaaagcggctttatgttggggagtgggagccaaaggggaagtcggttttgaagttgatggcagcagttttgcggcttttatgaagagttttatgtttatgctaaggaatgtggattatcagaagcttgagcagatgatggcaggagatgccttccgttctttatgtgcaattcctattattatggcggcacaagggatacaggcgggtgaggccatgctaaagaatatgggaataatattacgacgaattgaaaccgatcttgaagatgaaaataagcgcgttcatctgatgaatagtattttgtcaaaccccgaccagcttaaatatacccctccggaaacaaaaggggcagtgattgccacattaattgatcagaaatgggtggactggcttgaccctcgcaatcagaataatgatttttttttccgttaa

SEQ ID NO: 230415 - DNA, 1254 bp, Klebsiella pneumoniae
atggataatcatgctaacgaaataaataaactaagccgcgagcttggccttttatcaaattacgaattcaatatggatgaacttaaaaatttatcgccattggattctactagctcatcaatttatataggtgataatcttacctaccttcagggactttcaaaaaccagtccaaagaccattgatttttgctatattgatcctccttacaatacaggcaataaaatcatatatcatgataaccggaaatcagtttcctctgatatttttggtttacataacgaatggatgtcatttttgcttccaagactttttcatgcacataaaatgctaaaagatacaggcattattgctatcagcattgatgactatgaatttgctcatttaaaaatactgatggataaaattttcggtgaagataatttcatcggaaatatcgtcgtttgtcgttcaaaaaatggaaaaggcagcaagcgaaatatagcgtctgctcatgaatatttactggtttatggaaaatcagatatggcggaactatctggacaaccagatgataaatctctttatgataaagttgattgttttggtgaatatagaattgacggaatgttcagaaaaaaaggtgattcaagtttgagaactgatcgccctaatatgttttatcctttatattttaacccatcaacaggtgaagtacaggtagagccagaacttggtttaaaaacagtctatccaatcgattcaaaagggattgaacggagatggttatggagtaaagaaacagcacgagaacgctcttgggaattgtttgctagcaagaacggtgtagtttatgttaaaaactattcatcttctcataaacggattaaagtcagaactctctggaatgatagttctttttatactgagagagcgacgaacgaaattacaaaaatatttggctcaaaggtatttgatacccctaaagccctaaattatattatgtctataattaattgcatggcaaaacctgacgcattaatccttgatttctttgccggttccggaacgactgctcatgctgcggctgttctaaatagcctagatggtggttcaagaaaaacgatcttaatggaaagcaatcatccgattactaagacacacattgcatataaatccggctttagaaaaatatcggatataaccatatcgagattgaattatgtttcggataattttccggattttaaatataaaaaaatagaaataatatag

SEQ ID NO: 230416 - DNA, 585 bp, Klebsiella pneumoniae
atgagtgcaatcgatactttaagggagcatgccgaagtatggcggctatttggtagtatgccagatgatgcaaccctgagtgctgaggtttcggctctttatcttggtgtaagtgtcaaaacattggctcgttatcgccagactggtaatggccctgcttatatccaatatcaggcagaagacagcaaagcaaggaatcaacgagtaaattatcttttaggtgatttaagaacatggcgtgatcgtcataaggtcagcagcacaatggaggctgcacaggtccgtggactggcttttacttcgttggttgactttatcgaaccggaacctttctggactattgataataaaatttattcacatgttcttactgtttctgacgaaatattcaaggaactattaaatacaagccgtgcagaagttatctggatctctgtggaaaaagttttgtctgaggactggcatactgcgagagaacggcagagatggaatgatctgtttgttggggttatgacaggattggtagatgcttgtgtggctgagcaggagaggcatgtattgtatgaagaatttttgcaatcataa

SEQ ID NO: 230417 - DNA, 1428 bp, Klebsiella pneumoniae
atggcttttgatgatttgcgcagctttttgcaggcgctggatgaccagggacaactgctgaaaatcagtgaagaggtgaacgctgagcccgatctggcggcggccgccaatgcgaccggacgcatcggcgacggtgccccggcgctgtggttcgataatattcgcggctttaacgacgctcgcgtgacgatgaacaccatcggctcgtggcagaaccatgccatctcgctgggcctgccgcctaacacgccggtgaaaaagcagattgatgagttcattcgccgctgggataacttcccggtgacgccagagcgccgcgccaacccggcgtgggcagaaaatactgttgatggcgatgatatcaacctgttcgatattctgccgctgttccgcctcaatgatggtgacggcggtttctacctcgataaagcctgtgtcgtttcacgcgatccgctggataaagataacttcggtaagcaaaacgtcggtatctaccgcatggaagtgaaaggcaagcgcaagctcggcctgcagccggtaccgatgcacgatatcgcgctgcatctgcacaaagcggaagagcgtggggaagatctgccgatcgccattaccctcggtaacgacccgattattaccctgatgggcgccacgccgctgaaatacgatcagtctgaatatgagatggctggcgcgctgcgcgagagcccgtatcccatcgctaccgcgccgctgaccggctttgacgtgccctggggttcggaagtgatcctcgaaggggtcattgaagggcgtaagcgtgagatcgaggggccgttcggtgaatttaccggtcactactccggcggtcgtaacatgacggtagtgcgtatcgacaaagtctcttatcgcagcaaaccgatttttgaatcgctctacctcggtatgccgtggaccgagattgactatctgatgggcccggcgacctgcgtaccgctgtatcagcagctgaaggccgaatttccggaggtgcaggcggtcaacgccatgtacacccatggtctgctggcgatcatctccaccaaaaaacgctacggcggttttgcccgcgcggtgggcctgcgggcgatgaccactccccacggcctcggctatgtgaagatggtgatcatggttgatgaagacgtcgacccgttcaacctgccgcaggtgatgtgggcgctctcctcgaaggttaacccggcgggagacctggtgcagttgccgaacatgtcggtccttgaacttgacccaggctccagcccggcaggcattaccgacaaactgattatcgacgccaccaccccggttgcgccggaccttcgcggtcactacagccagccggtgcaggatctgccggaaaccaaagcctgggctgaaaaactgaccgctatgctggccaaccgtaaataa

SEQ ID NO: 230418 - DNA, 1284 bp, Klebsiella pneumoniae
atgaatactgataactattttttcagagtaccggccacacgcggaatacagggcggcatagaacaatacatgctgacggttcctatggtcgtgttacgtcgtattcttgcaatggacaatgatggcgatgttatggatcgcagccagcgagaagcgaacaaaacgcgggcaaaaaaaatacggaattatgttgccggcgcaacatcaaaacgagctccctatattttgccgtcaattaccggaaatattgatagtcatgttgaattccttccctgcgaactctcgccggcagtgggaattcttaaaattccgatggacgctgatttaaaattattcgatggccagcaccgtgcgctgggtatttttgaatttgtacgcgattattccaatacggaagatacgatcagcttgttgcttaccgttggcctgccacttgagttacgccagcagtttttcgctgatattaataacaacgcgagcaaaccggcagcggcgatcagtatggcatataacaacaatgatccggtcaaccagctggcaatgcatctggcccgaaccgtcaccgggctggcgggcacagtggattttgaacacaacgtggtcccggcgaaaagctcacggctgatcagctttaaagcactgaacgatgcgacgaaaaaaatgctcaacctgcgggccaacagcattccctcgacgcaacagcgtgatatggcagaaaagctctggactgcctgggcacaggcgatgcgctggaatgatattgcccaggatgatatcgctgcggagtaccgtcaggaggcgctgggactgcatggcatcatgataaatgcgatcggtatggcaacggccaggatgttacggcacagaacacctgaaagcatcgagaatcttctggcctgtgcggaaaacggtgacaacggttttcattatcgggagtcgtttgtacctgagtgctgggaagggaagtgtgttgatccggagactggcaccattaaaactgaccggcgggcgcttgaagcaacggctgaagcgttgcaaaagctgatagacccgttcgcagatgcgctgtggttgcgtgcttatctgccagctgaagaggcgagtgatacggcattactgaaatatgctgctgacatcgagagttataagcagcgcacagccgtgccgatgatcaatatcgtggagaagctgaaggcgctgggtgacggcgaaccggagttcagagcgtcggtgctggcttcccgtgaggggctaagccgctatctggccggggctgaaggctga

SEQ ID NO: 230419 - DNA, 363 bp, Klebsiella pneumoniae
atgaccatgcaatcagaatttttatttactgatcctatgctcaacgtcgttatagcagaaattaagcgttttaattgcccgcttcttttcgtcaaagatcacggcgtgtatgtgatggcggcgaaaggtgagaaaaacagtaaagggaagcgtaatgtctgttatgccaatggcttcaatccggatacaacggattttgacgaactctgggaccgtatggaggcagcctgtggcggagatgatttttgcgaaacccttgccttcgatacaagatcgattgaacttctcagccgcgcgaaaccttatctgagaattatggtttcagattcgatgctggaagttattaccggggggcagaaataa

SEQ ID NO: 230420 - DNA, 417 bp, Klebsiella pneumoniae
atgttatacatggctttatgcagttttatgatgatcctggcgctaagtgagatgttccgcacgatgacggcgatcggcaatggcagtttcgccggcaaccgcttcataccgctcgccttagttctgttaacgctggcgctggcatcacctttctttgccacattttatacgctgagccggcctgtttcgatggatgcactctccaggctgtccgttggtgcgcagtgggcaggtatcgccgccgccattctgctgtgcatcttgtatggctatcgtgcctggaaaaacggccgtttctggtataccggtgcggccattgcctcagtggtgattgccgttatttttgccaacagcctgcttttcgtgtccaggccacgatgccggcatcgtggccacttttgtgctgaacaacgatga

SEQ ID NO: 230421 - DNA, 321 bp, Klebsiella pneumoniae; identical to SEQ ID NO: 83621

SEQ ID NO: 230422 - DNA, 849 bp, Klebsiella pneumoniae
atgaagaatgatgagctggccacacgacgcgcagaggcgatagccggcgatcggtgcttcacgaaagggcgcctgcgcgatgaattcagaatgaagccggctcccggtgctgagccggtgaaatggtacaaaagcgcctatggcggcaagtacgccgtataccgcattgcagactgtgttccgatgcgggaaaaacggccgccgaccgagaagcagcagcaggccggcctgcgtctttccgtcctgtcccggcttaacagcaccagtggccggatggcacggcgggcacacgactggctgagtctggcgccgctctttctggataccgaaacgacggggctgggtaataccgcagaagcgctggaaatcggcctgaccgatgcggccggccgggtgatatttgaaacccgcctgaagccgacagtcgccatcgaggcgcaggccgctgccgtgcatggtatcgatgagccggcactcagcggcgcaccatcctggccagatgtggcgctgcagctgcgccacgccatcggggcccggccagtgattatctttaacgccccctttgatacccgcattctgaaacagacggccgccgcacatggcgatccggccgactggctgggagaactgacagtgtattgcgcgatggagctggctgcagggtattttggggccaccaatcgctatggcaccatttcgctggccagcgcggccagtcaggcagcattgacctgggaaggggaggcacactcggcgatcgccgatgcacggatgacggccggggtggtgaacgccattgccgcataccatctggcattactgcaggagcaggaacggctgcaggcctga

SEQ ID NO: 230423 - DNA, 1305 bp, Klebsiella pneumoniae
atggggtgtggttacgttcactgtcatgagacaccgcccgtgtacgccttaatcgatgtcaattcgatgtactgcagctgcgaagaagcgttccgccctgatttacgaggtcgccctgtggtcgttctcagcaacaacgacggggcgcttgttgcggtcaatcgcgcggcgaaagcgcttggcgtgcgccgcggggagccctatttccgctgccgccgcctgctggaacagcataacgttgccgtattcagttccaactacaccctttacgcctcattctccgccagatttgcaaccgtggtggagagtctggcgccgcggacatttgtttactcaattgatgagctctttgcggatgcctctcatatggagggagtgatgacgccgcaggcgtttggccagcttttgcgggctgaagtgctgcgccagacaacgctcacctgtggagtcggcgtcgcgccaacgaagacgctggccaagctgtgcaaccatgccgcaaagacgtggcctgccaccgggggggttgtggcgctcagtgatcctgtaagactgaaaaagctgatgagcctggtggcggccggcgatgtgtggggcgttggccatcgtaccgaaaaagggctggcggcaatggggatcaaaacggcgctggcgctcgcagagatggatatccgtcttgcacgccggctgtacggtgtgacgctggaaaggaccattcgtgagctgcgtggcgaggccagctttgccctggaggaaggaaccggcgcgaaacagcagcttgttgtatcccgttcgtttggagcgcgggtcacgcaactggcgcagatgcagcaggcggtgactaaatatgccacacgggcaggggaaaagttgcgccaggaaaaccgcctggcgaaggtggtaacggtctttatccgcagcagtgcttatgacgccggcggtgtgccctacagtaaccaggctacggaagtgcttcccgtgccaagccaggatacgcgcgacatcatcgccgcggcgcagctggggctgtcgcgtatctggcgtgagggcgtgcggtatgcaaaagccggcgtgatgctcagcgatctgcagggatatgaaacccagctggatctgttttcgccggctgcagtgcggccgggcagcgaaaaactgatggccaccatcgacaaaataaacagggaaggaaggtcaaggatcttcttcgccggagaaggtattgatccggaatatgccatgcgccgtgaaatgttgtccccggcctacaccacgcagtggaaggatattcccgcggcgtttatgcgataa

SEQ ID NO: 230424 - DNA, 654 bp, Klebsiella pneumoniae; identical to SEQ ID NO: 95946

SEQ ID NO: 230425 - DNA, 564 bp, Klebsiella pneumoniae
atgccgaaccggagaaaatcgacccaggctattcgggtgattttacatgatgcccggcacgattcaattgctctgcctgccaggcccttcgctgctggctttcaaacctcgccgatggtagaattcaatgaggtatttaagtacgggacaagatgtgtttttggagtaccgccgacacgcggcagccgtccaaaaacgtcttggtcagggcaagccccgacaccccctaatgaggttagctatctgatgagccgtagcgagagcagaaaaacagacgatcgaatccaggtgagatgttccacagaagtgaaagctaaactcaccgaaaaggcccatgaagcagggcttagtcttagtcaatatcttatcaaatctgggcttggaaagcgcattcaatcgaaagggaattacaatgcacttgccgctcttgtaaagataacagcccttcaaaaacatctgtttaacgaaggtgccggggttcatagcaaggagtattcagagattctgatcgaggtcaaaaaggccgcacagaaactgcaacaggagatggatggtgatacctaa

SEQ ID NO: 230426 - DNA, 1062 bp, Klebsiella pneumoniae
gtgatctactattccgcgcagctatttaggactgattcagaatctgattcagtaaacgttgagcttttaattgatgaggcaacaaaatttttatctgtagctaaaacaagacataatgaggctgaagaaaaagaatttagaacgatattaagtgcattatacaaaggggtaactaaagctgcgttacttacaggagaagaattcaggcaaaaaaatcaagggaaaaaaatacagtttaaatatcataaagagttaatatcaaaattaatttcaaatcggcaacctggtcagtcagcaccagcactttttacaacaaattatgatttggctttagagtgggctgcggaagatcttggtattcagttatttaatggcttctcaggcttacacacaagacagttttatccacaaaattttgatttggcttttagaaatgttaatgcgaagggagaggctagatttggtcactaccacgcctatctttataagcttcatggttctcttacatggtaccaagatgatagtttgacagttaatgaagtaagctcatctcaagcttatgataattacatcaaagatattataaatgaagatgattattatcgaggccagcatttgatttatcccggggcaaacaaatatagccatacaattggatttgtttatggtgaaatgtttaggaggtttggagagtttctttctaaatcacaaacaactctttttataaatggattcggttttggtgattatcatattaatagaattatattaggtgcgttgttaaatccttcttttcatgttgttgtttattatcctgaattagccaaggctcaaatcaatgttgattctggtaccgcatcggaaggcgaaaaagcaataattacattaaagcatttaactctcaatcaagtgaccgtcgtaggaggcggaggtgacgcttactttgatagttttgtgaaacatcttccatacccagttcttttccctcgcggaaatactgtagatgatttggttgaggctatctctaaattgtctaaaggagaaggtcatgacccattttaa

SEQ ID NO: 230427 - DNA, 1815 bp, Klebsiella pneumoniae; identical to SEQ ID NO: 194016

SEQ ID NO: 230428 - DNA, 900 bp, Klebsiella pneumoniae
atggaaaaacttgatgttagaggatggacagtaaaaaattttagttttattgaatgcgatttttctgggagttttaattcaatactatcattcaatgcatgtgctttttcaatatgtgacatgggttctacgatatggcgaggagtaaaattttcaaattgtaatttcacacgatgctcattcacaatggcaacatttgaacaatgtatttttcataattgcacttggaatgaaataggtatctctgggactgaaacaaagttatttgatacaatcataacaaatcctgaatctttcatttctgcaggatatacaaatttggacgaagatgcgctaaagcaatatggtcctacaacgccagattaccaaattctaaggctggaagagtctaaggtaaagttagccagaacagttctgtccaataatgaaagaaatgcagaagatattgcgtattacgaatctgtaaaaatatatcttaaacaatcaattagggctaaaatatcaaaggcaacctttgaaaaaaaacagaataaaagtatagtaaaaaactcgatatctcaaactcttggtttctttgagcaaatagttatttcactttcgggtttgataaatggttggggtggcaatattagtcgagctgcaatatgtggtggaagtatcatatttatattttctctgttatatacttacaatatattagggatattgccatctattgcatggaagtttgccctgattaaatcatttgatatcacattgctaattggttatacaaaacatgcaacatctgctcaaacatggcaggagcagacattttacggcatcaacgccctgctaggattgtggtggtatgctatatttgtcccaactgtaatcaatagaatatgcagggtgcgataa

SEQ ID NO: 230429 - DNA, 690 bp, Klebsiella pneumoniae; identical to SEQ ID NO: 194119

SEQ ID NO: 230430 - DNA, 1095 bp, Klebsiella pneumoniae
atgataagaacattggaattcatagattggaataaattcctcgaagaaaaaaatgagcatattacattggtacttgactttgaaattgatgcggggtttagttttactaatgctgttgctttaagaaaaatgtataaaaccaattcagctgtgccgcttgatggctcactttgcgtaccatctaaattattgcgattcactaacctggttttttcagatgctattgtattgcattctgtcacaatcgaatctaatgattttcaaaaaatagaaacgactgagcgctatactctgtcagctaatttctcgccttgcagtattgattatgaattgattagcttggaattgtctcgacttatagaaaggaaagggggttcttctaaagaaaatatcattatgttatatatggtgagttattttcaatctctcgctaatattgtaaaaaacaatattatttctttcgtagggctttcgggttttttcacaaaatttgtgagtggatcttataatttatattttattaaagacggcaaaccttatcgcattgttcaggagtcagggggggaggaaactgcggggcataatcctgtacacccaaactcacttgtagcaagtattattcagaaaaaatatgaggtgcaatcaaatattcctagtaacgttaagacctatcttattaagggattgcactataagttccttggtttttatgatgaaagctttataacttattataaaattgtagaaacaatatttaaagggagtgtcttcccatctattttagctcaagagatattcggttgtgatgataaaaaattgatcgccaccctcaaaaattcaaaccaaaaaaccatgatgctttttatttttcagtggttagtgtttaatgaatttcttgaaaaaaacaatgagagtagaaaagatcttatggataaactgctggcagctagtcagttgcgcaatgatatatcgcacagtgtcgatcaaagtgaagaaagcaagaaacaattgccgtttatcattttgctttcatgcgttctgatagaaagcacaatgactcatcgccaaccaataaaagtaatgaagacagaatag

SEQ ID NO: 230431 - DNA, 957 bp, Klebsiella pneumoniae
atgagtaaaaacagcaatgaaagtgaagtatcgcccgctcaagacagaataaaaaaccacgtttcagggtttaaggttgcagctatggagagattcagcaatcctatattttatagtttcctcatatcttggtcaatatttaattgggatagaattgctgtcttgctactatccaagcaaaatataatagatcgtatttcaacaattaaagacatgcctagcaactccacgcttctatttaatttaccttatgccaacacgattatctttccattgatatcaactattttcttagtagtactaagccctttcattaataatgtaatatattccatacattcaggccaaataaaaaagaaaatagcaaatcaagaggctttaaacatacagcgttatagtgtactaattagcactatagatgcacgagtgcaatatgaaagcgccgaggagtctaaaaaactggaaatcaaagaaacacaaatgcttataaaagcaagaaccactgaggcagaatcccaaattgctaaccttaaaaagcaacagtcagaattaaatgaagatattttaaataataatatcattagaaaccaattaatcgaagacaacaaaaaactaactgatttgatcgccatttcaaattccaatcatacagaaatattagagtccatcaacaccaagacaaagcaacttaatgagttaaccgcggaaataggtactataaaagattgcagtgaacgcataaaaccgctagaactgtccattaaaagagctcgtgaaaggattgaggcacttgaaagtcagtatgatgaaacacatagtatttttaactcattaattgagcatttaaatacaacctacagagaaaagagtgatgttgaaataagaagtgaaaatgagatcaggagaatgatatcctcacaaataacaaaattcagcaacctaatcccaataccataa

SEQ ID NO: 230432 - DNA, 846 bp, Klebsiella pneumoniae
atgacattgtatcattatacagaccaaaatggttttttagggatatttaacaaccaagagctttgggcttctcgaatacaatacctcaatgatgaaaatgaatataatcttggggtcatgttcgccatacgccatttggataaattaattgcattaaaacctgaaggtctgacgaaagatcgcttaataaattatagagcaataatacctagcataaggaatgagaattattgtgtttgttctcttaccgaaaatggagatcttttaagtcaatggagaggttactcgatgagcctcggtggttattcaattggtttcaaacatgaagtactaaaagacctagtgcttaaacaagggtttgacttaataaaatgtatctatgatcctcatgaacaggaaaaaataatttcagatatgattgataaactagtttatgagttcatgaatgaacatccattattcgatccttatgcaaaaaaaacattttttaaaagtggagatgtatttcttgacagattggctgaaatatcaccaaaaatcaaggatgtaagttttgcagaggaggctgagtggcgaattattggtagagtaccatttgaaaaactcgaatttcgccctgggaaatcaaccttaacaccatactgtaaaatcaaaatagccatgggccataaaagggattttcataaacttatagcggagatcattgttgggcacactcctcatcctgaattagctttgaagtctactgaagcattcattataaaatgtttttcacctccagaagaagatgagtgctcatcccctattgatataaaaattagccgtataccttttcgaaactggtaa

SEQ ID NO: 230433 - DNA, 798 bp, Klebsiella pneumoniae
atgaacaatatctatatcccaagactcggtgacgtcgttattccgggaactcatccgaaaaaagggcatttcatgcagccggatttacctgttatcgcagggttgaaagcgatgtacatccacggcggaaccttagagctgagcatgagaaaccgtgccgacaacaccgctccactgaccaaagtcggctcgccatcgatccaggctgatttcggggcggtctgtagttttggtaactgttttgataccggaaaagtttctaccaaaaaccagacccatatcgtgatctgtaagccggtaaaaccaacggcagctaccgaatcccagcaggctttcatgatgggtaactacagctattccggctcaccggctgtgtatcgcggcgacggactcgcttttctgttttccgggcaaagtctttacggggcttttgtagaggacaacagcgtaacgccaacgaacatgatcaactactacagcgcggcatacgacacaacgaagtgggccgcttttgttgagctggttgatggtgataatgggatcgccaggattgctgcccggcagggagggacgcttaactggcaaaactcgaaagcgctggtcaaccggacagcttataccgaccgcacgatccggatcggttcacatcatgcgccagctgcataccctgcaggcgctgccataacgatggggatggagcttattttcgagacagcactgactcaggcgcaggtcgcctccgttctcgacagtgttagcgcctatttaagctctgcatgggggatttcagatttgtag

SEQ ID NO: 230434 - DNA, 1947 bp, Klebsiella pneumoniae
atggcctttgatccgccacttgggagcacatctcccgctgtgttgctcgataacgctgagcgcctggataagctggtcaatggagatgcggccaccgttcccgaccgggccgggcaaccgctggactcctggcgtctgatgctgcagaccttcgctgctgttgtcgaaaatacccgccagaacctgatcccacttggcaagcaataccagagtgtggaagaggctcaggctgatatcgcgaatatcccagagggctcaacgacctacgtacgcagtccggatgattctgctctggcgatcgaataccgaaatgtcgccgggacgctgacggcaaccgggcgcaggatgccatcacagagttctgtcgacgcagttatccagtttatcgataagtttattgccagcggggctgtcagtggtgacttcttccctttctttgtcgatggggccggtaacgtgcctgtgtactgggataacggttttgcggtttcccggattgccacatcgttgtatcagatgatctatgaggatgttcatgcgcggctgggggatgcgttgaatgtgcaggtcacaggggtttcccctctgtttttcccgttattcatggacagcgccggaaatgtaccggtgtactggaatggtggacttgatgcgtcggcaattgcgacagggctgctggaaaaaatatggacttatatcaacggcatcatcgctaatgcgcttaaccagaatgtccctctggtttcccctggttttgtaccagggatgatggacgccgccggaaatgtcccgttctggttccaggatggcgagcttgatgcgacaggtatcgggccaaacatcaagggaattttcgcaagatggtatcagcggcgtatgtacacctcagcttataacattcctctgcataccgacgggcgaactctgtggcgctggaaagcaaagaaagcgcagctcaaagctggcctggcaacccggccacacttcatgctgacgggcgacagctggacgcagaataacgaactggcgaccgctatcgccgggctgctgcatgatgattatggtgatgccggtcttggctggcgcacggttaactacggagcggcacgcgatggctcgaatatcaaccgctctgcagggtggaatctgtatgactcatcgccgacaagtggtgcgccgctgtacggctgcggaattgatggtcagtcagtcaatacgaccatggcgaccgactatttcagggtgacgaatgtccgctgcacggactgccgtatttactaccaggatttgaacgggcgtttccagtacggctacgacgctggcggcatcactcagtggacagaggttgtctgcgggaataccggcacgacaaaatcggtgttgctgacaggcatggccgacgaggtcagaaccatatacgtcaaaaccgatggcaacacggggcgtgtcgctatccacgggttttatctgtggcgcagtggcgtggcgggttgtgtgatgagcaaggcggggaactccgggattcttgccgatcagttcctgctgttctccgacaaaatcgcggagtacctgagcacaatgcagcctgacgtgattgcgattgtcatcgggaataacgattacaggatttctgaatcgacagccacattccgtaccgctctgcaaacgtacatggccgcctgtcgtgccgtgctccctgacgtgggatttattctgatggcaccaccccgcacgaacggaacagcgataacgcccatcgttgatttccgcgatgtgatgtacgacctctcgcagtcgctgaactgcgaattcttcagcatttacgacctgtttgataactgggctgaaatgaacagtctgggttgttttctcgataacttgcacccgaatgctacgggcagcaacctggtcgcaacgtcactctacaatgcactgattaaaggctaa

SEQ ID NO: 230435 - DNA, 246 bp, Klebsiella pneumoniae
atggcagaaatcacaccagcagaacagatccgcctgaatttgctttccaccctgaactacgacaccgcagcggctgctaaggctattgagttcgtacaggatagcccgctcaaatatcagctgttcatccagcagtacagccgcgtaacaactgaatccgaagtggtggcgcggaccatcaaagcagttcaggagtcgaccgaagcgctggcgctgtttgataccgcggctgagcaggccagttaa

SEQ ID NO: 230436 - DNA, 249 bp, Klebsiella pneumoniae
gtgaaaaaactaagttgggaagaagcaagggacattactgagtcttattttttaccctttaagtgtgttgttgatgaaacccggagtgattacaaaaatgtcgttccgttcgtggtttactacgactttgaaaatagcgaagagcgatacggccccttcgagcttacaaaattcaaagatcctgaacgtcttgaattaatgctaagttcacacaaagcccagtttgaaataacaatgaagaagaaataa

SEQ ID NO: 230437 - DNA, 270 bp, Klebsiella pneumoniae
atgtctgacatcgaagagcgcattgctgatcttgaaggaatcgtcagcgatctgcagattagcgagcacgcatcaagaatcgctatcaccattcttagttcagttgtgaataatttctcaaactccccagggttattggctaaaggctatgcagaagcagccgagaagtccggccctttagagtttgatttccctacgccagaaggttacgaagaagagcttcaccggcgtgtgatttcacttctctcaaatttcgaagacactgattga

SEQ ID NO: 230438 - DNA, 180 bp, Klebsiella pneumoniae
atgaaatttaatgaactcagacctgaaacggcagacgccgccagaaatgccctgacagcagcgattattaacgcctccccggcaaccaaagaaaaacttgaaacactcgccgagggaattgctgcggcatttattaaactggagcactttgatagtgctccggatgaatgtggggattaa

SEQ ID NO: 230439 - DNA, 318 bp, Klebsiella pneumoniae
atgaaaaacgaagttttaaaaaaagcgatcgagaactatcagtgcctgaaagcacaggtcagccagcaggagtctgatgatcccttatcgttcggcggtgttgatgtggacctgttcgaagcatttatctttgcaaaaagccagcttcaggaattgattagtcccgatgaatatttggagttaaagcggaaagtatctcatctcaacaataaggttggtgcgttgatacttgaaaatatcattcttaaaaatgaggtagccaggttaggcggcgatcctgattttttgggtaatgtagacgctgaggggaaagcatga

SEQ ID NO: 230440 - DNA, 1872 bp, Klebsiella pneumoniae
atgggtccggctgaactatccgaaaaactgtgggacaacgcagagagggtggcgaaatatttgctgcctcgcggacatctggaaggcaaagagtggtgcgcaggtaacaccaatggcgattctggcaagagcctgaaaattaatctgggcgggaaaaaggcatggtcagattttgccagcggtgacagcggcgatctgctcgatttatgggtgctggtgcgcaactgccagctgcatgacgccatgcgggaagccaaagagttcctgggcctgaaagatgacgatcatcacttcgaggcaaagaaaaaaacattctcccggccgacgaaaaagggcgtaaaaaaagcgaaccattgctacgactatctggcctcgcgcggaatcactcgcgagactgctgaccagtttcgcgtttctgatgctctggtctggtaccacgatgaaaaccgagaagtggcggcggtggcgtatccatacatccgcaacggcgaactactgcaggtgaagcggatcagtaccgaacgtccgggcggtaaaaagctcatcatggctgaggccgactgtgaacctagtttattcggctggcaggctatggatgccaaagcccgcgctgtcgtgttgtgcgaaggggaaatcgactgtatgacctactcgcaactgggcatcagtgcgctgtcggtgccgttcggtggcgggaagggcgccaagcagcagtggattgagtacgagtatcacaacctggaccgcttcgacgaaatctggctcagtctggacaatgacgaagttggacgcgaagccgcgaaagaaatcgcccggcgtctgggcgagcatcgctgtcgtctggtggagctgccgtataaagatatcaacgagtgcctgatggccggggtgagcgaagatgatatctggcaatgcctgggtacggcgaaattcttcgaccccgatgaactgtgctcagcaggtgatctcctccaggaaacaattgatgcgttcgagcatcgcgatgtcggcctgttcaccagcccatgggaatcactgaacagcaatttcaagttccgcgccggggagctgacgctggttaatggggtgaatggtcatggcaaaaccgagctggtgggccatatcgctatcgccgccatgaaccaggaagtccgcacgtgcatcgcttctctggagctgaagcctggaaaaatgctggcccgtctgacacgccagaccatttgcaccgcctcgccaaagcgcgaagaaatcatcatgacaaatgaatggttttctgatcgcctgtgggtattcaagcttaccggaaccgcgaaggccgggcgcctgctggaaatcttcgcctatgcccgccggcgttatggaattgacctgttcgtgatcgataacctggcgaaatgtggtctcgacgaggaggactacggcggccagaaagaattcatcgacaccctgtgcgacttcaaaaacgagcataactgccatgtcctgcttgtcacccacgcccgcaaaaccaacgaagcggcgcccacggggaaaatggacgtcaaaggcacaggcgcattaaccgatatgcccgacaacgtaatggctatctggcgcaatatcccccgagaactggcgcagcgtaaggctgagcgaatgggatatgagagtctggataaggacgaacagacagctattcagatgccagcttcaatgatccgcctgctcaaacagcgtgagggcgaaggttggattggtgacattggcgccacctttgacgcccggtcacaccagtttcttgaaggcgataaggggccgtttaactacctggtcggtaaacaacaaagcgaactcgatattgagtgggacactgataacgttacgaggtactga

SEQ ID NO: 230441 - DNA, 918 bp, Klebsiella pneumoniae
atgagcagcaaaattcagggatatgtatgggatgcctgtgctgtctttggcatcaaaggaacacgccttatggtcatggtgcgtttggcggattattccagcgatgaaggcacgtgctatcccggcgtcaaaacaatatcacgtcagataggcgccggcgaaagcacaatccgaacggcattgtctgaacttgaagcggaggggtggctgcgacgagagaatcgccgaaacggtaaccgtaacacttcaaacatgtatcacctcaacgttgagaagttggaagaaatcgcactccagcaaagaacgttaattcgactggaacgtatcaaaaacaaccgttttgaccctccagaatctgacgcttcggattttgaacagtcagaatctgacgcgtcaaaaatgagaggctcaagtgcgcttgacccttcagaatctggcaaaaacaaccgttttgaccctccagaatctggaggacatgatccacaaggtttaaaacctgatccacaagtaaaagatcatgaaccacaagaagcggtcgcaaagcgtcagaaaaaaacatcattcgaccctgcaaggctaaaacctgaaaacgtcagtgatgaagtctggcaggactgggctaagttccggcgggaaacccggaaacccctgaccgaaacaacttgcgtataccaggctaagcagctcgctggccaccagaacgccgatgaggtgatccgtcgctcgattgcaggtgggtggcaagggctctttcctgaacgcgtacccaatcaaccgccagcgccagaggtcacttcggccagcgcggaaaatggcgcaggaagcacctggtacaccccgtctaacgacggctccgccgaggtgtttatcaatcaggccgccattgatcgtctcaagcgtggtgccaaccgcccatga

SEQ ID NO: 230442 - DNA, 282 bp, Klebsiella pneumoniae
atgaacggagaagtaacgattagctacctcgggaagcgtagcggggagttattaattgtctccccggtgacgtttgctgctgcgaatcagttattgctgggacttgaggaaagcgaaattgaatcgggccttgctatcggggttgtacccaaagatccgacaaaattcgatgaattcctctttgctgtcggcatacgcgcaattaacgacaattccctggttctggagtacccgaatagttatttcggtgtttcttttccagacctcaaaggtcactggtag

SEQ ID NO: 230443 - DNA, 132 bp, Klebsiella pneumoniae
atgtcacaacagtcaaccgctatgcctgatccgcgctacttcctgaagttgctgccacgcagcatcaggtacgacccgataagtagggtgtattacctgatctctaaagccaaacaacaggagcccacatga

SEQ ID NO: 230444 - DNA, 366 bp, Klebsiella pneumoniae
atgagtaatttaatcactacctatcgccgccgaattttaaaagcagccttgttacgccaccagcgaaaaacaggaagtagcttacttgttattaagcttaacaagggtgggattagtactatcgaattaactgagattctttttgatggattgttgcggaagttcgagcgactggcgatcggtgagtacggaaatgtggaaggcgtgaaagctcttaagggaatttacagcaactctgttgatgttaatggcagcggcgaattcctcacagaaagcgggaaagagttaatcgacgagcttatttctgaactggtggagttcgtcaaaaagcagaaaccagttactgcggagcccggcaatgaataa

SEQ ID NO: 230445 - DNA, 255 bp, Klebsiella pneumoniae
atgaataataaacaaacaattctctatcaaggaataaacatcccccgcccagtattgaacgtggggctgcatgtcctccctgattttaccggaagggttgtcctgcacattcaaaacgggaaggtgatttgcgactgcagactgcttgacgacgaacatatttgttcactgaagacgtttattgaaatggcgcgcgacgcggggctgaggatcgaggaggaagctggtggcactgacagcaatacgcattcctga

SEQ ID NO: 230446 - DNA, 1155 bp, Klebsiella pneumoniae
atgaataatgatattctaacagcatttaaagcttcagatttggttgataaaaatattaactttcttattggttctggtgcatcagcaggctatataccaactttatgggttaaggatgatgtaacatacgaggatatacttaccaacaaaaaatatcaagaaatcgaaaacgttatttatcattcttactacgatgatatattatctaaaagcttttgtataaccccgtctgatttcaaagaaaagttaaaattcaaaaaaacatttatcaattatcttagattcattaaaaaactttcttctttggttgacaaaaaaagcgccaatcaaatccgcagagcaaacatttttacaactaattatgatctttttttagagaaagcttctgacttactgttaaaaaacaacactggatttatatttaatgatggagggagagggcttcatacacgacacctcaatataagtaacttccatacatcaacttggcatcagggtacaaatgatctttataaatttgaaatccctactatcaatcttataaaaatgcatggctcaatatcatggaacaaagttaacgaagacactattagcatacgctatctcgataaccttcctgatgaactttctattgaaactgatcattgcttagacataaatgagacgatagaaaaggtagatgagttatattattttgatggtgcgaaaaacgctattgagctctccagagaggatgaggaaatattacaaacgttcagaaatgaatatgacaaattagcaattgttaatccaaccaaagcaaaatttgaagaaactgtcttccagcaacattattaccaatcattgcgactgttaagttatgaactcgaaaaaccgcaaacaattttaatttgcttcggattttctttcaaggacgaacacataagagagataatccaaagatctttaagcaacccctctcttgtaatctatatattttgttataagttgaaagacaaagagaatataaaaaaaataatcagtagcaagaaaattgttttcatatcacctaactcttataccgatgaaaacaacattgattttaaaaggtttatatcatgcatattcccaaagaataatgaatattcattgcgggggttaacatgcaatttgtaa

SEQ ID NO: 230447 - DNA, 1776 bp, Klebsiella pneumoniae
atgcaatttgtaataggggctgtaacttcggttaaaggaacatcagtcagggctctgatcaaccctaacctttatcaaaccacttatatatatgatggtaaattatatcgcggcgtgtctataaatgaatacatcgtaataaaaaagggatatcatgaaatcgttgggaaaattgaaggcgaagaagtaattgaaagaaaatcttataatcaagagcaaccaaactcagataaatatgatagatttatagatcttaaaattattggatacgtgcaagataatagttttcagcccggcataaagtatctccctatgattcaagacagtctgtacctagcttcagatactttaattagcgccatatatacatttagcgggaaagttgattcaaagtctataacaatagggaagtcattattagaggatatacctattagaataccaataaatggcgtattcaattctcacctaggtattttcgggaataccggaagtgggaaatctaatacccttgctaaactctacatagaattatttaggtcatttagagataaaatatttgcaaactcgagatttatgtttatcgatttcaatggtgaatatcgaacaatgcataatactttcaatgattatagttcttatgttgaccttgacacacacgctatagcaggaaaagataagctatttttaaagcaatccgaattttgggatgctgagctactttcagtattattctctgcaactgaaaaaacacaaaaaccctttctgaatatattaattagaaatagaattgagtatggcgaagaacttaataattactttcagaaaaccctgcaagttatgtttggtcaaaaccaacatagagaaacaataagtgttttgcgaagcataataaagatcatcaatccagacaacgaggaaaatataagcgcagaacttgcggcgttcagttggttttcaagaggtgagagtaataaatactatttaggaagtattttcccaaacacaccagaagagtatttagcttacactccttgtctcagaagcacttatattaaccaagagctacttacagcatttgagcaattgtcagtacgtgcaacattgcaacttatacagtcagtatcgaggaattatgttcaatatgagcatatcagtcctttaattggtaaaataaatgcatcgacaaaatcacttgaaaaagtcattaaaataatttcagatgttgagatccgccccacaccattaacatttatttcactaaaaaattgcaatcaagacataaaaaaaacaataccaatgatgattgctaagtgttctttcttagagcacaagcgttttgaagaaaaagaaagaagtttccatttaattattgatgaagcacataacatcctttccgagagctctgtcagagagtctgaaacatggaaagattataggcttgagttattcgaagaaataattaaagaaggccgtaaatttggcttctttataacaatttccagtcaaaggccagctgacatatctccaacaattgtatctcaaatacacaattactttctccatcgtctagttaatgataacgatatttttttattgaaaaactctttaaacaatctcgatagctcatctcgttccctaatcccgtcattaccgtcaggtgcgtgtgtactatctggtacagctttccatacacctgtagtaatacagattgagcggttatctaaagagcttgcaccagagagcgatactattaatttggatgcgtattggtaa

SEQ ID NO: 230448 - DNA, 2196 bp, Klebsiella pneumoniae
atgcttgaggtatatgccattgctggcggcgactggttacggggcaacctgaacgcgattgcggcttttatggggaccggcacatggtcgactatagaaaagatgtgtatcgccatctcggtactcattgtggcggggagctgggtaaaaaaacacaacgtgatggaccttattggctgggtcttttccctcaccctggtctctatgctggttgtcattcgcacccctgtgcagatcatcgattacagtaacgtggcgcaggtctatgaagtcgataatgttcctattggtctggccattcctgcgtcgctgacaacgagggtgggaaacgcgctcatccagagttatgagatggtcttcgcgctgccggacagcgtcacgtacagtaaaacggggatgttatttggcagtaatctggtcgcgaaaagtacggattttttatcacaaaatcctcagattacgacgctgttttccgattacgtacaaaactgcgtgatgggcgatattttcctcaatcataagtactcttttgaggaattactgaattcacctgatccgtatacactgatttttgcaaacccaagcccactgcgtggcgtgtttgataaaaacaaccagttccagacatgcgaggaggcctcacgggatctgaaatcggctcttgcgctggatactcagacagggggtaaaacctggaactactatgttcgtcagctgtttggtggcaaacctaatcccgatgtgcttttcagccagatgattggcgacagctacaattacttctacagctcgggacagagcgccgggcagattatccgccagaacgtcacgatgaacgccctgcgcagcgggatccagagttatgcggcccgcagcggggacaccgccagtctggtcaatatggctaacacatcatcccttgaaaagcagcggctggcacaggccacaatggggcaccaggcgcttcgcgcacttccactgatgcagaccgtcattatgggtttaatgattgggatgttcccgatcatggtgatggctgccatgtttaacatgatgacgctgcaggtgcttaaagggtatgtgtttgcgcttatctggctgcagacgtggccattactgttcgccatcctgaacagcgcgatggcctactatgcgaagcaaaatggcgtgccggttgttctctctgagttgtcgcaggttcagctcaaaaactcggatattgcgaccaccgcgggttatattgccgtgatgataccgcccttgtcgtgggggatcgtgaagagcatgggggccgctttctccagtgcctacagccatttttcttcatcggggctcagtgcaacatcgcaggctgcctccggcgtggtggacggcaattactctttcgccaacatgcagatggagaacgtcagcggctacagctggggtaccaacagtacaaccagtttcggacagatgtcgcggcagctggcgaatgggggcatgagcacgcagacgcgggatggatcgatggtctgggacagtggtggtgcaatgtcaaaactgccggtggatatcaacgtcggtcgtcagatagccagtgcgcagcaacagatggcgcgtgagtctgatgtccaggccgaaagcgcgctgcatggctataacagcagcgtgacaagtgcctggaatagcctgcagcaatttggcaccaataaagggaacagcgcctcaacaacgaccggggccgatactaccgagtcttcgcaggattcgatggccagaagcaagatgatgaatgctgtagattcgtatgctaaagctaaccatattagccgtgatgaagcattcggccagcttatggacaagtcagtgagaggtgatgtttctggcgaggcttatgtaggagccagaggtggtgttggattcgagctcttcggtaatggcggtaaagctgaattcggtgggaggatgtcggcgagagggacagcaagttctggatctcaggacaatactactgagtcaggacgccaatctaatgctgacaatcatgataccagcagtcaggcagttaaagacttcagagagtcttctgattacttcatcaaccagaaatcaagccagtctggaaacatcactgataacaatgcatcttctcgggttgatcaattttctgatcttgaccctccatctccgaacagcttttgtatcttaagttaa

SEQ ID NO: 230449 - DNA, 270 bp, Klebsiella pneumoniae
atgaataatactttgcagttgttctggagtggcgggctgcatatcgcgaaaatcttcatgctgaacaaaaaaaacatccagctgaagcaaaaaaaagaagaacccaaaaaataccatatagcagatcaaaacgtttcaattcttgcctttctttttcatcggcctttcttattaaatcccgagagcgctcttcaatttcttgttgtctttccattgttccatccctaccggtcaatccagtttattaatcagcatttcattttgagttag

SEQ ID NO: 230450 - DNA, 138 bp, Klebsiella pneumoniae
atggtaatgccgggcgacaacatcaaaatggttgttaccctgatccacccgatcgcgatggacgacggtctgcgtttcgcaatccgtgaaggcggtcgtaccgttggcgcgggcgtggttgctaaagttctcggctaa

SEQ ID NO: 230451 - DNA, 138 bp, Klebsiella pneumoniae
atggtaatgccgggcgacaacatcaaaatggttgttactctgatccacccgatcgcgatggacgacggtctgcgtttcgcaattcgtgaaggcggccgtaccgttggcgcgggcgttgtagcgaaagttctgggctaa

SEQ ID NO: 230452 - DNA, 711 bp, Klebsiella pneumoniae
atgctttccaccactgcttttctggcggtggctatgcagtgtgccgccaccgttcacccttctacgtccctcgatgtggcaagggtggagtccggttacaacccctatgccatcgctgagatcgtgcctaagcccgaacggaaacccggcgataaaggctttattactcacatgccaaaaagtaaggaggatgcagtcagcatcaccaatcagattgaggcgaaaggtcgccgctactctgttggcctgatgcagataaccagcaccaattttaagcgttacggcgtcaccgctactgaccttttcaatccctgcatcaatctttccgtctacgaaaaaatcatcaccgactgctaccagcggggcggcaccctgaaaagggcgttgagctgctactactccggcaatttcagtaccggacaacagcaggaacccgctttttcaaagacgagctatgtacagcggattggctactccccggcggatacccgctatgccgttcccggcacccgcgatgatatcgcaaccccagcggccaccctgaaagctacgccagtggatgcgccgacgcgcccgcgcgtggtgtggccgggggcgatcgttcgcggcgttccggctcaactccgccagaaaaaggcggccaccgtctattaccccgcgcaggttgtgcgcggaaatcgcgatgtaacaacgaaagaggaagaaaaatga

SEQ ID NO: 230453 - DNA, 219 bp, Klebsiella pneumoniae
atgagaaaacccacctataatgtgtacgtcacgcaggaaacccagcccggcgagaacggcgaaaaaaatacgtactggacgaaagtcggtgcggccttcgcacacaatggcaagccggggctgaacatcatgatcacgcccggtatttccgtttccggcaagctggtactcctcgaacctaaagatgacgcagcgccgcaggctgctcctgtcagttaa

SEQ ID NO: 230454 - DNA, 216 bp, Klebsiella pneumoniae
atgccgaaaagctttccaggcaaatcaagcacggctgttatttacatcgggcaaaagcgctatcaggagttagcaaagcaagcccgtgaaatcagctacctgtctgaatcaaatatccggccaagcacctttctccagttcctgatggatgaatttggtgagcaagcccgtactgagctgctccggcagctactcgcagagaaacagaaggagtaa

SEQ ID NO: 230455 - DNA, 456 bp, Klebsiella pneumoniae
atgtatgaatggtacgttttatactgcaacaatcaggatgttgaacgcatcacccgaagagtcgagggactggatgtcgaggtgttttgcccccgctatatcaaagtaacgccacgtaaggattgccgggcggtacgtcaggaagagaaggtgttgtttcctaattatcttttcctctgctttgacgtcaacataacgcatacatcgacaatcacatccattccgggcgctcatggttttgtcagcttcggttcaacaccctgctccgtccccaaatcagtgataacagcgattgaatgcgcccgtctgatggcgctcaatcctgatgaagatgctatcgagtgccgaaatattgccccggatttgctggcaaaaattcaagaactctctctgataaggtctccgctccaacgccaggtagccttttcaaaactactccagaaccaataccactaa

SEQ ID NO: 230456 - DNA, 369 bp, Klebsiella pneumoniae
atggtgcctaagagactgaaagaagccaggatggaggcaggattatcgcaggcaaaattatcccagcttctcagcgtggaagagggggttaacacacgctctaggttttcgagctacgaggtagggagaacggaaccgccgtttagtctggttaaaaaaattgcggaattactcgactatccagcgaactatttttacaccgaggatgatgattttgctaaagctgtcttgcaatttcaccgagagcgcaccgatccagagtcaaatcctcattacaattcggtagtaatagaagcaagaaaattatcatcaaagcttgataaggtgagaaaaaccgtagcccagttgaacgaatacctgaaagagtga

SEQ ID NO: 230457 - DNA, 714 bp, Klebsiella pneumoniae
gtgcgggcgggtgtgactgataagagtctctctctcaaatcgtccgtatcacctaggggcgtcgcaaagcaaagcccctgttataacgttgcctcgcgcaagcgtcgccggttcctcaatcggtggattaagtcgctggcgaccgaagccgggcgtatcaaaatcaaaaatgaactccggcgccgtatccggcacaacaagtactgggtcaacgaggccaataaatacggtatcgaaacactctgcgagctgatgctggccatctttgacgatctggatttaagagactggcaaacccggcataacctggagacgctttctgatcgcgcaggtttgtctactcgcagtgatgccggaaataaatctgtctcccgtgcgagtaacggatgcgatcgcctggtctggctggatgcgattatcacagagaaagcagccttcaatccttatgacgcccgttgtgcctgtaagcacattgaggtaacagaggatttctttgccattctcggcgttccgctgaaacaggtctaccgggaacgcgccaggctacttaaggccgacccgaatgaaatcatatcatccggggatgtgcggttaatcgcaatcagggttgaaaactggacgcgcaaggccgcagccggattagccaggatgaaagcgaggcgtgacgctgctcgccagcgcaaacaggaatactactcaccaacctttgcctga

SEQ ID NO: 230458 - DNA, 2679 bp, Klebsiella pneumoniae
atggctgttaatcaagcgaagattcttgagaatcttgaacaacttgtaggaaattctgagcaaaacgaatttatctacggctttttaaccgcttttgagttccctaaagcgaccctgagtcagattcgccagggtggagcgcgtaatgttgcgaaagaacccggacacgttgggttaaaaaataagctttattatcagccagtggctggttccgatgatatcgaatcagcttttcagcaacgtattgatgatacggctgttgcaaaaaataagatccgctttgttctgatgaccaattttgttcgctttttagcctgggacacactgacgaaggagcgtatcgatattgagtttgaagagttaccacgtaactacggtttcttcttacctctggttggactggagaaggcgattctcaatagtgaaaatccggccgatgtgaaagccgctgaaaagatggggaagctgtttgatcttatcaaagagcgtaatgagttaagcaaagcagaagatatccacgtgcttaatgtcttcctcacacgtttgttgttttgtttttttgccgaagacacgggcatctttgaaaaaggtcagtttacttccgccgttaagagttacacggctgaggatggcagcgatttagatcagtttttgacagacctgtttgctgtgatgaacagcaagtcgaatagtgaatttagacagtcacttcctgttcatttaacggcattcccttatgttaatggtggcttattcgccagcgatgagcctgttccagatctggggttgaaaggcaggcgtattttactcgaatgcagtgcaatggactggagtgcgataaaccctgacattttcggcagtatgttccaggctgtgattgatgtggagcagcgtagccgtttagggcagcattacacttcatacagcaacatcatgaaggtcatacaaccgctatttcttgacccgctgcgtactgagctggaaaaacaacgtacaaatgtgaatggtcttaaaagattgttggtccgattgggcaaaataaagattttcgatcccgcgtgtggttccgggaatttcttaattatcgcctataaagaattacgtcttctggaaattgatgtgatccgggcgctattgcagagtgacccgcaatcaatctttatgagtggtatccatcttgatcaattctatggcattgaaattgatgattttgcctgtgagatagcccgtctttctctctggcttgcggagcatcagctaaataaacagtgggaagcgcatatcggttcagcgccgccagcattaccgctgcgttcatcaggtaaaatctggagtggcaacagtctgcaaacagagtggcagactgtatgtccaaagggtgttgatgatgaagtttatgtgattggtaatccgccgttcctgggaaccctgggccgttctgatgagcagcgagctgatatgcaggcagtatttagcggttttaaatcattgggggggctggattttgttgcctgctggttctggaaaggggcgcaatatatccagaacagccgtgctgaactggcactggtagcaacaaattcgttatgtcagggagagcaggtggcaacactctggccgccaattttcgccctgggtttacatatacatttggcatattcctcatttccctgggaaaataatgcccgcgataaagccgcagtacatgtggttattgtcggcctgtcagggcgaagtaaaacgcgtcaacttttccagcaggtggacaggcagtggcacagcaaactggtgagcaatattagcccttatctggttgaaggtagcaacatagccgtgttggcgaaaacaaaaccgatggtaaagaatgtccctccgctattgtttggaaataaacccacggacggcggtcacttgcttttgaataggggggaacgtgatgctttgctatggcaggaaccgcaggcggctcgatggataaaaaaaatattaggatctgacgagtttctcaatggtcaggagcgctggtgcttatggttggtgggtatttccagtgcagagctccagtgtatgccgcttgtatacagtcgtgttcaaaaagtggctgaaatgcgcgggaaaagtgccaagttaagtacacaaaaaaaatcaaaaataccacacctttttgatgaaattcggcagcctgaatccggggattacatcctgatccctcgcgtttcatctgaacgcagaacttatattcccattggatttttcaactcagacataatcagttccgacagaaactttattctaccgaatggcactttgtatgagtttgccatcctgacgtcattaatgcataacgactggatgcgtctggttacaatgcgtcttgaaagtcgttacagttacggtaataaagtggtttacaacactttcccctggcctgttgtgagtgaagaacagcgtaataacataatttcattagctaaaacagtgttactggcgcgggaaaattacccagaaaatacgctggccgagttgtatgacccgttaaagatgcccgcagaccttctggaagcccatcaggcgctggataaggcagttgaccgtctctacagcgccaagccattcagggactctactgagcgcttaagctgcctgttggaacgttatgaatcattgactaaagcatag

SEQ ID NO: 230459 - DNA, 2016 bp, Klebsiella pneumoniae
gtggacaatatcttacaggtgacttacggacagaccgggcaaagtgcgtgccttaataatctgggaatgcgtgagatgcagtcgcgcgcttttgagcagcgcaaaagtccttatctccttatcaaagcgccacccgcgtccggtaaatcaagagcgttaatgttccttgcgctggataagctcgtcaatcagagtttacgcaaagctattgttgctgtccctgaaatgtccatcggcggttcgtttaaagatactgaacttactaagcatggcttctttgctgactgggaagtgaaacctgaaaataatctgtgcattggcggtggagaggcagggaaggttgaagcctttaaacggtttatggcgagtccagacgacattctggtatgtactcatgccaccctgcgctttgctttcgacaagctggacattgaatcatttaatgactgtctggtggctatagatgagtttcatcatgtctctgcggatgaaaataaccgtctgggtgctcttatcgatgctctgatgaagagttctaatgcacatattgttgcgatgacggggtcttactttcggggcgatacagtccccattttgcagcccgaagatgaagcgcgatttacaaaagtgacttacacctattatgagcaacttaacggttatcagtatttaaaatcactgggtattggctaccacttttatcagggaacgtatatcaacgccctgccgtcggtgctggatgtcagcaaaaaaacaattattcatattcccaatgttaattccggtgagtcgacaaaagacaagcatgccgaagtggacgccattctggatgtaattggtgaggtgcaacagcaagagccagatactggtatctatcgtgtaagacgtaaagccgacggcaaaatattgcgcgtagcgaatctggttgatgataacccagcggaaagaccgaaggtgcaggcgtatctgcgtaatatccacactgctgatgatatggacatcattattgcattaggtatggcaaaagagggatttgactggcctttctgtgaacatgtgctgaccattggttatcgaagctcgatgacggagattgtgcaaatcattggacgtgcgacacgagattgtgtgggcaaaactcacgcacaatttaccaaccttatcgctcagcctgatgcacaggatgatgatgttaaagtgtcggtaaacaacatgcttaaggccatcactacctcgttgttgatggagcagattatggctccaaatattcaatttaagccacgcactcaatggacgggcgagccgttaccagccaatacggtgctggttgatgatcacaccttaccggtatctgacaaggtcctgacaatcctgaacggcggtaaaaacgagatcctggcggcgctaatggcgaatgagcaggtggttaaagaagcgattacggagtcagcaccgcctgaggtgatcacgcaggcggtgttaccatcggtgatacaaacgcttcaccctgatctgactgaatacgaactggagcaggtgcgcagtggtattttgcagagtctatttatcggtcagtatggcggtcttatagatgaagctgatttgccgccttatgcgattgtcgatggcactccgggtcaacgtaccggcaatccgaatgactcatcaagtgggaataatcagtttataaaaatgggtgataaattcatcaacattgaaaatctgaatattgacctgattgatgcggtgaatcctttccacggtgcttatgagattttgtcaaaatctgtcaccgcgacgatgctgaaaactattcaggaagccgtcagggcgaatcaggcgcaggtctctgaggaagaagcagtgatgctctggcccagaataaaagcatttgccagtgaacataagcgggaaccctcactgaacgccagtgacgcaatagaggttcgttacgctgaagcactagcctatattcggaaaatgaaacagcagcgtgctgtgcgacaggaacagtaa

SEQ ID NO: 230460 - DNA, 1257 bp, Klebsiella pneumoniae
atgctcagactttcccccgctcagcctcgtcataacatgaccattgacgatattttttctgaagctgatgatctgggtttactggtggtcgaaccactgaaaatgcattcacctgccggtaatcttccactcagtcgcttagaagagattaatgctttttatgttgttcatggccggccgcccctgcccgattcggaggagtttaaggaaacgctgcttgctcaacgtttgcgggcactcagagccaacaaacaatgccatgatgcgttgcggccgtttgacatccatggtttgcttgatgatatcgagatttcccgtgaatcatcgggatcgccgccagccccctctgtcgttgttgataagtctgagctggtcacctcgctggatgatatcttcgctgatgatgatgggttgctctcattttctgaacccgatattttcacgctaaaacatgttcctgttgaaaggaaaataaagcctgatgaaattgccagacggcagccgtgtccggatttccatcgattttcttcactgtttgagaccgttcacaatggtctgaaaacgggagctttttcatttgtccgtttccgccatgagttaaaaatgtatgagggcgatttttttattctcaacggcattatgggctatgtagacaaagtcggtgagcgactggaggaatatgggccctggaatgcacgtctgcatctggtgttcgaaaacggaactgagatgaatatgcttttcctctcactgacgcatggtctggtacgggacaccgaaggtcgtaaaatcattctgaatggccaaaatgtgcggcccgatgatacgccggttccaacaggatatgtttatgtccttgccacgaatagtacacagcctgctcttcagcgtttcaaacctgatttgtataaaattggctttactgaaggcaccgtcgaagaacggattaaacatgctgaaaaagataaaaccttcctcgaagcctctgttcgcatagtcatgattacgcaatgtttcaacatcaacacacacaaacttgaagcgcttattcatggttttttagggatgcagcggctgaatatctcgctacggggtctggatggacaaacttaccatccccgtgaatggttccatgcacctttatcgacggtgctgtcggttatcaagtacattcttgacggtacaatttcacaataccggatggacaacacgacaggaaagattgtcgttaagagtgagtcgccacgtctgagatag

SEQ ID NO: 230461 - DNA, 435 bp, Klebsiella pneumoniae; identical to SEQ ID NO: 187583

SEQ ID NO: 230462 - DNA, 1395 bp, Klebsiella pneumoniae
atggcaccgttaacaaaaaaacaaaccgcacagctttcagagatgagtcatgacgtgctggtcaatattatttatgacctgatacaggataataagcaggccaggaccacactggtgaatgggtatctgctatcggcagcagaggtacttaaagccgtcgagaaggagtatgccagacgagccaaaagcaaacgtttttatgattactatgatgccgatgccttttttgacgagctgacacgcagtatagcgaacccccttgtgggtatcgcccacgagctccccgagcaagcggaaagtctgagcgtaaaaatgatgcttgagttcgaaaaattcaccgggaacgtggacacttccagcggaagctggatgagctactataccattctgttggatgcgtggatgaaatcactggaagcacaaaaaaacaacgatccagtattcattgctaaaaaaatattcaccgttgttgaaagagaattctattttggaattgagatatttaaaaaataccggacattactcggcacggatattttacgtgtaatccgtgatatgtattatcaaaaacaatccctccgggaagctcttggtctcagcatgataataaaagaccttgattttctgacgatggcgtttaaaaacgatgaattttgccattccacccattattttgattatgtcagattacttatggaagacctgcggtccgacgatgcactcgctgtattaaacagccagcggattgacgatgaggagatcacagataacataatatggaatgaactcttcattcaggccctgattgaagaagggagaaaagaggaagcgaaagcccactgtattacagcattcacttttcaatgcgatacacgtttttatcatctgtacacaaaagccgctgaaaaagatgtcgatcacagccctgcattcctgaaaatagcaaaagatacagggttagcgccgtatgtctgctttgcgtcagacatcgaacggtatgatttaatcgacgcctgtattatggccatgccaaaaaacaacctcaccgactcgctggcttatatcacccattcatttttacggacattatccagcaccctgtataaacacggctatgcgcatacggcgaccctgttgcgtcgctttttggtggaggacaacattcagcaatcaaaaagcaagtattacagctatgccgcctcagacatgaaaaaagccatcgattacggcgaaggtctggaagattgccctcagcttccggaaacagaggactacctcagaacgctctacgaacaacataaacgtaaaaccgcactctggccgttgatggcagataaaatcaaaggattatcagtaggaaaggacggtatccgttataacggagatgcctcatga

SEQ ID NO: 230463 - DNA, 597 bp, Klebsiella pneumoniae
atgaatcccgattacttcggtggccgttcgctggccgatactctgtcaacactggtgcatgaaatggtgcacgtgtggcagcattacgcccccgttaaaaaatgccggggcggctatcatgatcgtgtatggggcgcgaagatggaggaagtcgggcttatgccatcaaataccggcttacctggcgggaaaaagaacgggcagcagatgacgcactacattatccgtggtggccgctttcagaaagccgtgtatgacctgcttaaaaatggcttctctatctcctggtatgaccgctggtctgacggagcaatcgttacctcaaagattaacagcgatatcctcgatgactggctggccgtcaccgatgaaaacgatactgaccttatcaatcggctatcactgaccgtcagcaaatcccgcccggaactcattccagacgatgacgatctcagcgtcatgatcaaaccgccagtaaagggtactggcacccgcatgaaatttacctgcccggagtgtgggctgaacgcatgggcgaaaccttccgctgtattgctttgcggtgagtgtcgatgtgagcttatggcggcagaataa

SEQ ID NO: 230464 - DNA, 648 bp, Klebsiella pneumoniae
atgaccgctgttatcgcgctggctaacgggaaaggtggggtgaaaaagtcctcgatgtcacgggctatcgccaccgagtatacaaaggcaggatggggggttcttgggctggatatggatatcgatcaggggtctttcctggactgggggcaacgtaggttgcggaatggttttgaacctccggtgacaattcagggatgcggaacggtttcacaggcgaagaaacagattgaatccgggcaatgggatttgattgtcatcgacagtgcggcgtatgcgacgaaatcgttactcagcctgattgatattgtcgatttgctggtactgccgacagggtttagcgtggacgatctacgaacgaccgttacgaccgtaaacgcgctgcgtaacaaagggcattcgacagataaaatggcggtggtgtttgcgggggtaagtgaaagtgagagtgaatatcgcgcggcgctggaatacctgcaaccctgcggcgttcccgtcattccgggcgctattccttttctgacatcgttcagccaggcgcaggataaagggcttgctcttacggagtcgccttttcctggcccacggcaaaaagctgatgatgttgtgcagggtgtgatcgaccgactgacaacgcttacgcagtag

SEQ ID NO: 230465 - DNA, 234 bp, Klebsiella pneumoniae; identical to SEQ ID NO: 25259

SEQ ID NO: 230466 - DNA, 1968 bp, Klebsiella pneumoniae
atgacagaatttgaaataaatagtccgctgcttcatctcgctttgcttgaaacgctaaagcgagacgatataaaagatgaaatagatttgtttctaccctttattgcagtaactgcatcagaaattggcaagtcagttataaatgagagtgatatacaggataagctccagcagagttttgggtttaagcctccattggccgcggtgaaggtcttgatgacacgagctaaaaaaagaggacttctaatccgcgaaaattatgcttttattcctgttcacgataaaataactgaatggaaaaatggcttcgagcataaaaaagaagatgtggaaacatcccttgcaagtctcaaacaagaatttatcagttttacggagaccaacttttcgaaaaaactctctggcagtgaagctgaaaaactaattaccgagtttattgaagtgaatgtcagcagcgtgattagccacagagcttatcaaagaatggaacttgctgatcgcattaaaaacactaaccatgttatcgcatcttttataagtcacattcatcgcaatcagcctggagtgcttgagcatttcagtcggtgtgtcaaaggaatgttactagctaattatctattttatgcggataaagctacagacaagaaatcctataaaggaattaccgtttaccttgactctcctatagtcataggaatgctaggatacagcggacgccaagccaaagaagcatatacagactttttgaaccttttgaaatcactaggaattgaaattgttatttttgaccgcacgcttagtgaaatcgagggtctgctttacgcctggaaaaatgacatttcacggaaacgttatgaacgttttaatacgaaaacgttagaatggttgagggcgcaaggttatgacgcagaacgtattgatactgatcttaagcttttagaaagtaacatctctaaacttggtatcgatattaagctcggttttagtcctaaggcaatgtatcaatgtgatgaagcaaaactgcaaagtgctattggtagagcttttcggcgagataaaaatctagagcacgatactgtttgcatttcccgtgtacacaatatgcgggaaggtaaaataattaataacctcagtcagtcttttagtgtttttgtcacccccaatactggcctagtcaaggaggctaatgattttttccgacatgaaactaaccgccaggctattcctgtggtcgtttcagaacaatggatgacagccatgttctggctaaaaaaaccggacatttatgctcggctgcctcaagagcagcttctttcaacagcctacagcttattgtataccgatgatcgcttctgggaagctttcatcggtcgtcttgagaaacttgaaaaacgcggagatattactcaggatgaatttcttcaaatccgctgggatagtgatcttctccgacttgtccatgatgtttctgttgatgtaggagaagatttttccgaggaagatgttttcgacgttgttaatactatcaagagaaaacatgaggaaaaacatcaaagtgatatggcagaacttgaagaccgcagtcgctctgaaattgagactgtacgtcaagaagcatctactcaacttcaggccattagtcaagaaaaacaagttgcggaggtaagaattgaatctctagagcgcaaaatacgtaaggtgagtgcgtttctggctggatcaatagcctggtttttcagtggattgcttgttttcgctctttgtctggcagctgtgaaaggtattcctgatgaaatgcagccagctttgttcaaaagcgaactatttaaaggtaatctagtcgggcttaccatagtcattaccttaatattcggattgataagcagcgttacagggatagatttagctgtttgccataagtacataaaagcaagaatggaaaaatggtttttgtccttatttaattaa

SEQ ID NO: 230467 - DNA, 342 bp, Klebsiella pneumoniae
atgatattcgctaaatttcagtcactgacccataagatagacacaatggttatttgtgacattaaacgggagatgccattgaaatactggtcattcaaagtggcggaatggatcgccagaatcggaatgattggctttgtttgtacctttcttacgtatttcggactcggcctcatcatgcagcactcaggtcaaaacctgccggaatcgtttactgagggatgcgctcaagccatcgttgcattgatagctattgccctggtcggtttcctggtcagaggcgggttgtacgtcgatctggaaaaaagaatcctggataagtggcagggctacgttcagtga

SEQ ID NO: 230468 - DNA, 474 bp, Klebsiella pneumoniae
atgaaatgccgatctcgtttgtttgtgtttctgcccctgcttttccccgccctttgcctggctgacttttctggccgtgttgttcgggtcgtcgatggtgatactgtccaggtactcaccgatggtaaaatggtgaaagttcgccttaacggtatcgatgccccggaatcggggcaaccgttcggccagcgctcgaagcagaacctgttaaagctggccgtccagaaacaaacggaggtcatagccaacaatacagatcgctatggccgctggctgggaacattgatgattgacggtatcgatatcaacgcagaacaggttaaagcgggtatggcgtgggcttatcgatatcatggccttgccagtgacgaaacaattctacgccttgaagaagaagccagacggcatagaatcgggctgtggtcgtcatctgatccagtggagccgtggaagtggcgcaaacagaataaatag

SEQ ID NO: 230469 - DNA, 756 bp, Klebsiella pneumoniae
atgcttatacataatgtatcagagagaaaaaaagcctctgctgacaaaatgctctcccttctaaactttctgaaagaagaaacttactctgattttaacacgctaagatgtgttctcggctttagcaaaaattctcacagcccattatataaggtactaaatagagcaattaaagctggcttcatcatcaaacatgaaatgcctggagtaaaacaaaaaataacgatttgggggataactatgcaggggttagcaatggtggtcatgcctgacgatgctgttttccctggatactttgaacccagcaaactcaaatactggactctggaacatcgtctactaaatcagagggtcagaattgcactggaagagaaaggcgggcaaggatggcttaatggtgatcggggggagtttatagcgcgttatcctggcgttcgccatcgccctgacgggattatcacgttagatagcggcgcaatcgtcgccgtcgaaacggagcgctcaatgaaaacccgcgcacgctatatcaacatcattaacagccatctggcggccagcgatgccggacgctggcactacgcgatgtatgtcatgccggatgacaaaaccaaaacatcgttaatccggttgtttgactccatcaaaacggtaatgaggaacaacgttccggtgccgttcgacgcgaagaaccgcgaaatgtttcttttccgcaccattgatgaactggatcaagcagccgccagcggcggccagtga

SEQ ID NO: 230470 - DNA, 1737 bp, Klebsiella pneumoniae
atgggatcacatcttatgcaaaggctgaatgcttttgctgacgccttttcctttttcctgttatggctgcaaaacagccctgttatattatccctgctcgcaggccttacattaccatttatattacacctcccccgcgaggaaagaaaaaatgccccgttctggttaaagtcggtagcgtgtgtgtccattttcttttttatattcggcaccatatcaccgctaactattcaggggttgagctacttttttaagtcactcgacaacaacatattgtttagagttccgctatggatgatgaccataatatttacggcagcaggattaatatttcacattgcagctcgacgactttttgcaggagaaattgacaacctaaaacatcgaatgattaagaaaagcaagttagagagaaataccagaacggacgtaagggatgtaaaagacatgctgccggatagcgtgtcatacgatccgctaaaatacatcgacctaaaaaaaggtgtttttatcggactcgacaaagaagacaaaccgcaatacatcactataaaagagtttcagtcacaacatgcggcgataataggaacgacaggttcaggtaaaggagtgagcgcaacagttttactgtaccaggctatcatgctggatgaagctgtttttgttgaagacccaaaaaatgacgaatgggcaccgcatgtattgagagaggcttgtcgcatagcgggaaagaaattttttcttattgatctgaacaacctcaatttccaaatgaatttactagcggaaatatcacgcgaacaactggaagaattatttaatgccgggttcagtcttacaaaaaaaggtcagggagctgatttttatcgaatagctgatcgacgcgcagccagaaatacagcagcaatacatcagccaggtatgacattacgtgatttatttaataatgacttcgtaatctcactaaaggaagatgtccctgcattttatggagaactagaggaaatcgcattggtaaactctattaatgccaatgaagggttttctcttaaacaaatatttgacgagggaggatgttgctatgtcattggctccacgcgcaatcaaaaaatcatatccgcacaaaggatgattttaacccgtttaattcagatagctgaaatccgcgacagaataaacagcaaacctcggacggcagctatattccttgatgaattaaaatatcatatttcccgcccagcattggaagggctaggtacagcaagggacaaaggcgtgcatatctttatggcatttcaggctatcgacgatttgcgagattgtccggctgatttaaatcctgagtccgtgattggtgcagtggttgagaacgcgaaatttaaactagtgtatcaactacagaatccagaaactgccgaatgggtggcaaggatgacgggttcaattctggtagacgatgaaatgaggaaagttaaaacagatattgcattaacagagaaaatggaaacagacagaatgatccgacaagcggaaagatattatatagactgcaatatgctgttaaacctaccgccctttgtcggttttgttttcacacctaccgaccttgcaaaagccacaaaactttctcatatcgccgttaaaaaatcgcacattgatacgctttcatttgagtataaacaagctactccggaaaaaaatgagactcaggaacataagccatcaattaatttgtga

SEQ ID NO: 230471 - DNA, 690 bp, Klebsiella pneumoniae
atgacaatatctgtgcctgtcaggtctcttgatacacatgaactgatgcctggcgatatttacccacatcctgcagcggggggaatttattccctgtcacatcgcgaggtctgttctctcttcagtgaccacatcatgtatatctgcagcgcgttagttattcttctgcttgttttcatcgcaggtgtctttttccgaaaaataatgacgtcttccgtggagcgtaagcgaaacacggcgtcagttatttccgatgcaaagccagaagtacagagcaaaccggaatacttccatctttccatatgtgtggaaggcccggccagcatggatgactccgccttgtcctctcttgcctcccgtgttgtccgcgaagcagaaaatctgtatatccccggcgtcaatcgccgcgacagcgctgacgacgtgtttgcctggtccgtgcagactcagtttccttctgacaggctcttcggcacacggattttcccgtcaaccggctggtttgaacgtccggatatgattaaacatccggtgaaatgctactgcgtctgcctgcagtacacgactgaaacattgccatccacattgtatgccctggtcgatgaggccggacggcaggtggcgaagtcgtatattaaaggcgggcactgccctggctcagagggctataccttctgcataacctcttaa

SEQ ID NO: 230472 - DNA, 258 bp, Klebsiella pneumoniae
atggggaatgccagtatcatcccgcgtaattaccgtaaatatctctatcacgcgtatctggcctatatggaggccaacggctacaggaacgtgctcagcctgaaaatgttcgggctgggactgccaatgatgctgaaagagtacgggatgaattatgagaagcggcacacaaagcaaggtatgcagaccaacctgtcgctgaaagaagaaagctacggcgactggctgccgaagtgcgacgaacccaccgcgacttaa

SEQ ID NO: 230473 - DNA, 696 bp, Klebsiella pneumoniae
gtggacaagactagagatttcattctagaaggactctcccgctttgacttggctgatttgcctggtcgaccttatgactgcgcttttgacctcttggctgcaacgccatcgagaaaaaggctgattatgatgggctttaatggctcgttagctgattcatgcatgactaaccgccagtctattctgcaagattatgaacatccttttatttcaggtattcaagaagggatacaaggaaaatgggggatcactcatcttgctaaaagactccagcaaataccttcttgcctcggttatagctgggaagatgttatttataccaacgcattaatgatgtgttctcagaatgctgcaaccctgaaaaaagaagcagctcgtcacgagatgacaatgaatgaaatcgaagcaaactcaatggcattttttgagcatgtaacagcccatttgagcgaaccagatttgatcgttgcatatagcaacagtctccagtcactctcagccgcgagtttgttgctaaagcactttggcgatgcaactactctcaaattttctcagccgaaaggctaccacactactttcgcatttatggccaatcttaacagtagaaatattccggttatctgcgtgcgacacatgtcacgattcaaacctgaagagagttatatcagggcggctgtcaaattaatgggttgttaa

SEQ ID NO: 230474 - DNA, 1842 bp, Klebsiella pneumoniae
atgtttcgtcttgatataaatggtttgcgcttcattgctgttgcgatggtcgtactttttcatttcaaaataggatatttttatggcggctacgcaggggtagatgttttttttgtcatatccggttttttgatgagtgaaatttgcaagaataaagttggaacaaaagaatgggttattgacttctataaaaaaagatttaaaaggatttatccagcgcttgcaatatgcgttttattttcttttctcttagccatcacatcgactcctccgtcgatgttaaaagggttattctatcaagttatatctgcgttaacatttacatcaaacctatattatttgaaagcaacatctggttattttactgatgctgcggatagttttgtttttttacacacatggtcattgtcagtcgagtggcaattttacttagtttttccactcttgcttttcttggcaagcaaagtgacgagaaaatttggtcaagttatattttatttaattttagtattgatatctttttccatttgtattctacttactaaatataatcagatatattccttttatcttctgccaagcagggcttgggaattactaatcggggtgttggcctcaactgtcaatattaaaaatagagctccaagaatcacagaggcagtttgtcttttcgttttaattgctttcactgcggttgtgaaggaaagtagtaattggcctgggttcgaaaccctcattccaacattggcaacagcttttttattacatgctaatgtagggaatgaaaaaactctgttgagagctaaacctttacagtttattggctcttgttcttattcaatatatgttgtattttggtattatttgaataatatcgaattcaatttttttaatcagctaataggaattattgtttctgttattttgggttatttatcttattcatatattgaaagaaataaaagttttactttctttaaattagtactcattgccttaagtgtgtctgcgatctctttggttagcgacaaaattagtattacaaaattttggatgtctaaggagattttagcaatggataggtttcatatatatagttcttctgatgaaggcttagcgcaattcgggaatgctaaaagaatttgttttctgacaagtggttttaataatgcatcaaatttcagtgaagataaatgccttgtcaataacccttccaataataagccaaggttattattaataggtgatagccatgctgcggagttctatcaagccgccaaagaatactatcctaatcatttagtaatgcaggttacttcatctggatgtatgccttttattgaagccaaaggtgagaaacggtgtgtggatttaatgagggggttttatcaaaaatatatcaacaaatataaatttgatattgtgttaatttctgcgaattgggttgatggtaggaaatactatactgacagacagatggttgaaaacattaaacattctgtttcaatacttaatgctcattcacaacatgttttcgttctaggacaaacaaaagtatttgacaccccattctatagaatcgcgttatctggagatccagctaaaatactaagacatgaattgattgaacctaaacattttaatgattatttagttaatattttccacgaaggagatgttaattatattgatttatatgattctgagtgcgtgaatgacaactgtagatatatttccagcgacaattaccctctgatgtttgacaacaaccattttactttaccatggtctcgattaattatgaaaaatataagcatcgctacacccggagttgaaaaataa

SEQ ID NO: 230475 - DNA, 1326 bp, Klebsiella pneumoniae
atgagtggtctaaagagccaagccttgtggctattattctctaattttttttcagcgatattgcagataattcagataagtgtcttggcgaggcatttagaattacatgagttaggtgtgttggcaattgtaaattccattcttatgattgctatgatattacaagatatggggatgagtagttatattgttcataagcagaaccttactcgtaatgagcagagtactatatattgggtcaatttcctactaagtctttttgctggattactcgtatttatttgtgcattgcctttggccaagttttatgcgatgcaaaatcttgcccctttggttatgttggccagtattaattttctttttttaggttctctttctcaatatcaggctcattatataaaatcgaaaaaaatggttcttcttgcgaaaatagaaatgacagcaaaaaccatttcgtttctctgcgtgatatatttcatattttatactgatttaagaacgtcagcagttatatttggactaataattaacgccgtgtgtagactaatgttaatgtctttattgggcgaaaaagattggcgtcctctgttttattttgataaaggtttgtgcaaggatgtctttaaatatggtgtttaccagctcggttcacagattattaaccagttaagaacacaactcgatgttattataattggaaaagtgcttggcagcgattctttaggtttgtattcccttgctaaagatttaataatgcaaccattgaaattaattacgcctgttataaacagattggctttacctcgttttgctgaagcacaaaataatagtgatatacttaagtctgtatacttaaaaggtactgctgtaatagtattgtttagtgcactttcttttatttttatttatattttttcacccactataataacattgttatatggttctgaaagaatgactattttgtcacttttaccatttatgcttttatttggaatgttaaggccaatgggcggtttgactggtgctatcgcgcaagcaaatggtagaactaatgtagaattctactggaatgttatagctggtattatggttgtttgtgtgtcattgaccattttgatttattcgtctttatggtatgtttcccttgtgctttctttgtcacaaattcttataacatttatggtttttcctttttttgttaagccaattgttaacgttaaattttcttcatatattctgaattggcttcctgtgacaataacttttacaatttttgtttatttgatttataattttaatctgtttgtttttcctttttggtaa

SEQ ID NO: 230476 - DNA, 885 bp, Klebsiella pneumoniae
atgaataaaaaattaaatggcgatattatagtcgctcatttcggaccatgcggagttcttgctaatgcattgagatcatcttctctattacaggggaaggtcgtgaccgtctttcatggttatgatttatctgctacagttttactcaaacgatatacacttgcttataaatctctttttttacaaggagatttatttctccctgtaagtaatatgtggaaaaatagactgttagacatgggctgcactgaagaaaaaattggtgttgttcgaatggggattcaattaaaggattttccttttaaacctcgtaagctaaatacagattgtatacggttaatttcagtttgtagattgactgaaaaaaaaggcattaagtatgcaatttcagcttgtaatattctgaaccgtgcaggatacaactttcattatactattataggttacggagaattattggatgaattaaataaaatgattatagatttagatttaaaatcgaaagttgatattattggtttccagccgcagtcaattgtaaaaaaaatgctttctaacagtgatgtttttcttttgccctcagttaccgcttctaacggggatatggaagggatcccagtcgctttaatggaagctatggctacaggattacctgtaatttcatcatatcatagtggaatccctgagctgatacaaaatgattattctggttggttgtgccaagaaggtaattctcaagaaattgctaactgcataatcaaacttatagaagataaagtggaaataaatgctatcgagaaaaacgccagaaatcacatcgaggtaaactttaaccaagataatgaatataataaaatggcaacaatgttggagcatattagatga

SEQ ID NO: 230477 - DNA, 321 bp, Klebsiella pneumoniae; identical to SEQ ID NO: 104979

SEQ ID NO: 230478 - DNA, 651 bp, Klebsiella pneumoniae
atggatgctgttgatttccttaagactctgaaagatgattcattagacttagtcattactgaccctgcttatgagtcacttgaaaaacatcggaaagtcggcacaacaacaagattaaaaaatagtacgaaatcaagtaatgagtggttcgaaatctttcctaatgaacgattcgaagagttgtttagagaaatctatagggtcatgaaaaaaaatacacatttttatcttttttgtgaccaggaaacagcgttttacgctaagccggtggctgagaaggtggggtttaagttttggaaacccttagtttgggataaacaacgtatagggatgggctaccattaccgtgcgaagtatgagttcattctattctttgagaagggaaaacgaaaacttaacgatctttctattcctgatgtcctctcttgcccaagaattttgaagggatatcctacagaaaaaccctcaaagcttatggaaatattgctaaaacaaagtagtattgctggtgaaattgtctgcgatccatttatgggagcctgcccggtaggtgttgctgctctagaaaatgatagattctttctgggtaatgaccttagcaaagaatcgcttaggattgcgactgagaggcttaactctttgataaattga

SEQ ID NO: 230479 - DNA, 1278 bp, Klebsiella pneumoniae
atgtattacttaccaattacgaatgaacttggtgagctttctatagagaaaatctatagtttttatgatgtgccaaggacatttttagcgaagagcgcaaaaactaaagagttctatttagtctattggtttgatgagtctgatagttttgattcatggtattatgcaccgatgaataacttagagatttctaatcttgattctggacttattcaagttagagatttttttattaataaaaatgttattgttatatcaactccgtatgatttatctgactgcaaagtagatgttcttccttatcgggatattgactcagaaacgcttccgccagctggctattttatagcattagatgaggatggtgagttttctgttgtctataatgatgagagagagatattaaataatgtccatgaaataagaatttatcgtgaccgaagcgaaaagaatattgagtgggagccaatccaaaaaattgttaatacttggaattctttatataacaaagtagccaaagttatttgtaatgatgacttttcacttataccttatacttcatccataggttcttataaatcaaaattcatcgccgagaataatgacgttttcataagcaatttcattgaatttctttctgttttgaaatcatctgaacttgattacgaggcaattaaaggtcttggtgttgatttggatgattttgaggctttactctccagtttaagaacttacaactataaattagaagttaggtcaaatgctggggcatctttatttaccatagatgcaaaaaaattagcatctgaaaaagagaaaattcaagagcataaccaaagatacttttctagtgagcttgtcccccaagctgatgatatccatagggttattaagtttgttcgttctgttggtaataatgagttattcaatgaagagtctgagggtattactccgcggcaaataaattattacaagcacgcagcgaagttgttgggtttggttaaaactaatggttttgttctccaacctcttggctggaaagttttttatgctcaaaactccaaggagcaaatatctttgctggcagaagcattcgaaaactcagattgtggttgggcttggatgaaatattgtggtgtggagaagatcaccgaaattgatgagtctaccgctgcagagtttcttatcgaaaaagctaatggattagcagtggacacagctaagcgtcgctcaaaaactttgtcttcatgggttaaagaatttaaatcggctttatga

SEQ ID NO: 230480 - DNA, 738 bp, Klebsiella pneumoniae
atgaccgacaccccctttatccctgattacctgaaaccggcgctggagcgactggccgccgccagagcggcccatcttgaacaggcccgccggatggaggacaccctgacggccatcacccgtgcggaggagcagaaagcggcgctggagcaggacaacggcagcgatacccgcacctggcgcgccgctttccgtgccgggggtgccatgctgaccgatgagctgaaaagcggccatatcgaacgcgtggcccgccgggagctggcgcaggaatgtgacaacctgaccgaagtgctggcctttgaacgtgaccagttgaaagccacctgcaacagcaccgcgcgtgcattccgccaggcgcatcatgctgtgctgagtaaatacgctgaggaagagcttaaccgcgcgctgaatgacaccctcgggccactggtccgggcgatggtgctgaaagcggatgtgatggcaaacccgctcgccaacaccatcggccatcaggggtacaccgagccggagaaagaggtcatgcatcaggtggtgaccttcctgaccgggaaagtgagcgccttctccgtcacgccagccgatgagccggtgctttccctgaccggcttcccggccgtcgcgcttgcgcacatggaccacgacgccgccagcacgcccggcgagcgtaaggtctggcaggagaaaatgcgtcagcgcgaggctgacctgaaagcgcgggggctgctgccatga

SEQ ID NO: 230481 - DNA, 417 bp, Klebsiella pneumoniae; identical to SEQ ID NO: 10075

SEQ ID NO: 230482 - DNA, 321 bp, Klebsiella pneumoniae
atgctcacgatgtgggtgacggaagacgaacaccggcggctgctcgagcggtgcgacggcaggcagctggcggcgtggatgcgtcagacctgcctcgatgagaagccggcacgtgccggcagactgccgtcgatatcgccggcgctgctgcgccagcttgccggtatgggtaacaacctgaaccagatcgcccggaaagtgaatgccggtggtgccggtcatgatcgggtgcagatcgtggccgccctgatggcaatcgacgcgggactggagcggctgcggcatgcggtgctggaaacagggggggatgatgatcgttaa

SEQ ID NO: 230483 - DNA, 555 bp, Klebsiella pneumoniae
atgatgatcgttcagcaaacagcccctttttctggcttgcatctgttgtgtgtttcctggtacagttttgctgttgccgcaaaatcggcagccgggcgtaggaacccgtgttacttattggcgactcaacacgcgccatgcgtgtttttttacgtcgttgctcagactcaccttatttttgaacggtggcttttaacccgccgttttagtcagataatggtggtccgggcggggcagccttcgggctggccggtttccaataaggccggtattcctacccccgtccgggctaccacccatgagtgtaggaactccggtggtggcatttaccgctacttattggaggctgccatcatggctacaaccctcaccgcgtctcaccctgaattcgtctttgtatttgcggctgttcgtcgcactgatcgtaagccacgcatttgcatgctccgcaccgttgccggtgacgagcgtaccgcacgtcgttcccttgtccgcgaatacgtcctttctcttgccgcccgtctgccgcttgcggaggcatcacatgcatactga

SEQ ID NO: 230484 - DNA, 300 bp, Klebsiella pneumoniae
atgcatactgaaaacagcattcagcgcgtctctgtgcgttgcgatgacactggcacctttcgcgagcaccttagtattgaggcttaccacaaactcaatcgcgccagcgccatgacgcactttgtcgggcttgatttgaaacaacgtgaactctccgggctgcatcagctttcggtgccccatattctgagttatctgcatgaggacatcagctacgtgctggaggagctcaaagccaaaggactgtgccgggatttcgtggccccaccatcggtgagcggaggtgaacagcatgtttga

SEQ ID NO: 230485 - DNA, 450 bp, Klebsiella pneumoniae
atgtttgatttccctcagccgggtgaaatataccggagctccggttttcctgacgtaatggtgtcgggcatgctggccgatggtattccgtgggacatgccgtaccgctgtccggggctggtctggaatccgtaccggcacacctacaccatccttattcgtattattgccggtggcagcatggcagaaattccgctcggtcgctttttgcgggactttacctgtgagcgccccgatttaataaagcgcaaccctgaaaaccgccatgccgttttacgtgaaatcgctgctgatccggaattacagcaataccgcgtgcggaatatcgataagtatccgggtgatatttccccggagagacgtccggcaccggcggtgcggaaatggcggaataatgtcggcacggacacgaaaataaaaccggataacagctaccgccattatctgtaa

SEQ ID NO: 230486 - DNA, 534 bp, Klebsiella pneumoniae
atgctgagcgcctcgtcggagttctgctgcgactggagcagggcgcgggcactcatcgggtcgctgaactgctgcatcagctggcgcacaatcacggccagctcgcgggcgattttatccctgagctgcgggtcgcgctcctccggggctatctgctccgggaagtggataatcacccggcgacgtgacacgccgccgctgcggtcggtgaagcgcatcgggttattgttcacggccagaatcaccgccggaatatgcgtcgagtacgggttctggtatttcgggtcaacggagaccgcatcgccgccggtgatggccttgagtccggcaccgtcaccgctccatttctcctggtcaggcagacgaatgagcgagaagcctatcagggaggcgcgcttgcgcgggtcttccagcgtgtcgatatcggctgacgtggcgttatcctctccggcgagcatcgtggcgatttcggcgagaatacttttcccgctgccgccggggccggtgacttcgagaaagagctgccagtcgtag

SEQ ID NO: 230487 - DNA, 486 bp, Klebsiella pneumoniae; identical to SEQ ID NO: 10073

SEQ ID NO: 230488 - DNA, 651 bp, Klebsiella pneumoniae
  misc_feature (250)..(259): n is a, c, g, or t
atgaaaacatatgcatatactcgggtgtcaaaagcagattctgaaaatggaactactgataatcagattcatttaataagatcgcaactggatattgatatcgtattttccgatgtaaatatttcaggctctatgcctttcatcgaacgtccagaagcaaaaaaattattaaaatgccttagtaagggagatacagttgttatagctaaattagataggggattcagagatactgctgattgcttgaatnnnnnnnnnncagtaaatttattgaagaagaaaaaagtgtttcttaaagtgttggatatctctctggatctatcttcacctattggtgagatgattctcactattatggcttccgttgctacttttgaaaggaaaagaatcgcagagcgaataaaagatgggtttagtgctggtcgtagtaaagggaaaaaatatggttttaataatatgaatacaagagctagcgtgataaagagaaactcacaaagacaaatcgaaactcaacttcggtatgaagaaatactgcaatgcctcaaaggattacacactgaaaaaccaacagagcgagttatgcttgctcatcttcagcaagcagggcattcggtgagtagaaatactttgcgtaaggctttaggtaaataa

SEQ ID NO: 230489 - DNA, 657 bp, Klebsiella pneumoniae
atggatgtctttgataaagtttatagtgatgataataatagttatgaccaaaaaactgtaagtcagcgtattgaagccctatttcttaataaccttggcaaagttgtaactcgtcagcaaatcattagggcggcaactgatccaaaaacagggaaacaaccagaaaattggcatcagagactttcagaactacgaactgataaaggatatactattttatcctggcgggatatgaaggttttagctccgcaagagtatataatgccacacgcaacaagacgcccaaaggcagcaaagcgtgtattaccgacaaaagaaacctgggaacaggttttggatagagctaattactcttgcgagtggcaggaagatggtcaacactgtgggttagttgaaggtgatattgatcctatagggggaggcacggtcaaactaacaccagaccatatgacacctcattcaatagatcccgcaactgatgtaaatgatcctaaaatgtggcaagcattgtgtggacgtcatcaagttatgaaaaaaaattattgggattcaaataatgggaaaataaatgtcattggtatattgcagtcagtaaatgagaaacaaaagaatgatgctttagagtttcttttgaattattatggattgaaaagataa

SEQ ID NO: 230490 - DNA, 456 bp, Klebsiella pneumoniae
atgcttgaactcggcggaggctttcatcctgaacttaccgggcgtgagaatatttacctgaatgctactctgctgggccttcggcgtaaagaggtccagcaacgtatggaacgtattattgaattttcggaactgggagaattcatagacgagccaatcagagtgtactcaagcggaatgctagctaagttaggtttttcggtcatcagtcaggttgaaccggatattttaattattgatgaagttctggcagtaggtgatatcgcttttcaggcaaaatgtattcagaccatcagagattttaagaaaagaggcgtgacaatattgtttgttagccacaatatgagtgacgttgaaaaaatctgcgacagagtcatctggatcgaaaatcataggctcagagaagtggggtctgcagagcgaatcattgaactgtacaagcaagcaatggcttaa

SEQ ID NO: 230491 - DNA, 321 bp, Klebsiella pneumoniae
atgaaaattgacaatgccagagatttattcattaatttagaagagaaagaagagcctaaatcaaatagtttaactcgcactgatgaaagaaaactatggtatcgtaaaaaccgatatatgaaagattggtcagatgataaagttttaaaggcggcggttgatcatatgaacaaaataatgccatttattttgaaaaatggaccaaaattaccagtggataagttaggtgagctaatgttggcatttggtgattttattgaagagtccaacatgcgtggcttagatctaaaaggacttaataaccttttcacggataagtga

SEQ ID NO: 230492 - DNA, 516 bp, Klebsiella pneumoniae
atgataaatacaaatgttattctaaccagagaacaaaaatccgcgattgcagaagcattagacgtatcattagacgatttagaagaacttagaattaaagccagtaataaaaggaaaacctcctttaaggatgatttttccatgatctttaaaacaaatatcggcactctggcaaaaatgaagctaacaccaacttcttttcggataattatttatcttttttcaatcattgattatggtaatattcttgttaatttctctcaatcaagggtagcaaaagatttaggactacaaaaatctaatgtttcaagagcattcaaagaattattcgaaaagaaaatattgattcgagatgcagaagacgatcatgtttatttgaactctaatttatgtgtaaaagggattcctcataaatttaatgaggagcaaatgggtaaattcaagagatccaaagcagaaacagaggactttgataactcatttagtttttatagtgttagaaaaaaacaatcgtga

SEQ ID NO: 230493 - DNA, 198 bp, Klebsiella pneumoniae
atgttccacccgtcctgtgtggttatccacggtatacagctcaacgtccgtctgtttcagcggcaacattacgaccacggcgacgagcgccagcaccgcaatcagcagacccacaccgccaaccacaaaaccggcttttgtggcgcgtttatcccgctcaatcatttgctgctcaaaggtgcgggattcagctattaa

SEQ ID NO: 230494 - DNA, 213 bp, Klebsiella pneumoniae
atgcatcaggtggtgaccttcctgaccgggaaagtgagcgacttctccgtcacgccagcggatgagccggtgctctccctgaccggcttcccggccgtcgcacttccgcacatggaccacgacgccgccagcacacccggcgagcgtaaagtctggcgggagaaaatccgtcagcgcgaggctgacctgaaagcgcgggggctgctgccatga

SEQ ID NO: 230495 - DNA, 402 bp, Klebsiella pneumoniae
atgcgcgtcgataaagcgcgcgagcttgggctgccggtgctggcgcgcattgtcagctcagcggtcgccggggtcgacccatcggtgatgggcattggcccggtgagcgcctgccgccaggcgctgcagcgcgccggctggacgctggacgaggtggaccttatcgaagccaacgaggcttttgccgtccaggcgctggccgtcggtcagctgcttgagtgggatagcgagaaggtcaacgtcaacggcggcgccatcgccctgggccatcccatcggcgcctccggctgccggatcctcgtcagcctggtgcatgagatgcagcgccggggcgccagcaaagggctggcaaccctgtgcgtcggcggcggccagggcatcgccatgaccctacaacgttaa

SEQ ID NO: 230496 - DNA, 657 bp, Klebsiella pneumoniae
atgctgacccgtgaacaaatggcgatgcgcgtcgcccaggagctgcgcgacggcgactacgtcaacctcgggatcggtatcccgacgctggtggccaactacattcccgccggcattgaagtgatgctccagtcggagaacggcctgctggggatgggcgaatttcccgatgaggaaaccatcgacgccgacatgattaacgccggtaaacaaaccgtcaccgcgcaaaccggggcggcgatcttcgattccgcccagtcgttcgccatgatccgcggcggccacgtcgacctgaccgttcttggcgcctttgaggtcgacgtcgcgggcaacatcgcctcatggatgatccctggaaaaatggtcaaggggatgggcggcgccatggacctggtggccggcgcgcagaacatcatcgtggtgatgacccacgcctcaaaaaacggcgaatccaaactgctgccgcagtgcaccctgccgctcaccggcgtgggctgtattcgccgggtactcaccgacctggccctgctggagattgtcgacggcgcgtttgtcctgcgcgaagtggccccgggggtcagccccgacgaggtgatacgtaaaacggcgggacggctgatcgtcgccgacgacgtgcgcgaaatgcgcttcagttaa

SEQ ID NO: 230497 - DNA, 1263 bp, Klebsiella pneumoniae
atgcttcattttcttatttatgatgtgctaggaacaccggcgatactggttggtttattttcactgatcggtctgctgttgcaaaaaaaaggaatttcagacgttatttcaggcacgctgaaaaccatcatgggttttgtcatattgaccgccggcgccggtattatagcctatacgttaaccatctttagccagttatttgagcattctttccatattcagggcgtggtgcccaacactgatgccatggccgctctggcgcaaaagaattacggcacggaaaccgccaccattatggtattgggcatgctgatcaatatcgccctggcgcgtctaacgccattaaagtacatctttctgaccggacatcatacgctttatatggctgcgatgctggcggttatcctgtctgtagggggcttgtcagggggatgggtggtggccatcggggcggttattctcggtgcgatgatggtcatctccccggctatcttgcagccgtttacccgtaaaataaccaacaccgacgatctggcgctcgggcattttggatctattggctacctgctgtccgcgctggtgggcaaaattattggtaaaggtagtccctcgattgaagagatcaaagtacctaagtcgctcaatttccttcgcgactcatcggtggccatctctctcaccatgatgattctgtttctggtgctggtgctcgttgcgggcaaatcctttgtcgaggagaccctgagcgctggtcagaactttattatcttcgccattattcagtccctcacgtttgctgcaggagtttatatcatcctcgccggggttcggatggtgattgccgagatcgtcccggcgtttaaagggattgcggacaaactggttaaagacgcgaagccggcgctggactgtccgacggtgtttcccttcgctccgaatgccgtcatcgtcggcttcctcgcaagctttgtcgcaggactggtcagtatgttcctctgcccgctgttcggcttgagcgtcatcgtcccgggcctggttccccactttttctgcggggccacggcgggggtttacggcaacattaccggcggacgtcgcggggcggtggtaggggcttttgctcacggtctgctcatttcgttcctgcctgccattctcttgcccatgatgggggatatgggactgggctccacaacctttggagacgcagactttggcgttgtcggcatcgtgctgggtcatatcatcgcaatgtttaactaa

SEQ ID NO: 230498 - DNA, 2163 bp, Klebsiella pneumoniae
atgtcacaagtaaaacaaaaatctgtagatagagacagagatgagatcgatttaggacgtcttcttggcgagcttattgaccatagaaaactaatcgtctcagttactgcgttatttactttatttgctcttgtttatgcgctttttgctacaccaatatatcaagcggatgctttggtgcaagttgagcaaaagcagggtaatgcgattttaagtaatttgagccagatgatacctggcagtcaacccagttctgcaccagagataactttactacaatctcgaatgattttgggtaaaactgttagtgatttgaatcttcaggcgaaagcagaacaaaaatatttccctatttttggcaaaggatggtctcgcctcattggtgataagcctgccaatatatctattactagattatatttagctagtgatgatggagaaacaccagagttgactctgatcgtcaaaaataattcacagtatactcttacttacaacgataaggaattggacggtcaagttggtaaacttttggatagtgatgggatatctttgaatgttgcaagcattgatgctgaacctgggactgtattctccattacttatgtgagtaaattaaaagcaattaccgatctacaaaattcattcactgtaatagacgaaggaaaagacacgggtatgcttactctttcactcatcggagaagatcctgagttgatcgagaaaatagttgatagtattagtaataattatctggcccagaatatttcacgacaagcggctcaagatgcaaaaagcttagatttccttaatcttcaattgccacaagttcgtagagatcttgatgttgcagaggacaaactaaatcaatatcgtcgtcaaaaagactctgtagatttatctttagaggcaaagtctgtcttagagcaaattgtaaatgtggataaccaattaaatgagttaaccttcagagaatctgaaatatcgcaactttatacgaaagagcatcctacatataaagctttaatggaaaagcgtaaaactctgcaagatgaaaaatcaaagctaaatgaacgtgtttcatcaatgcctaaaactcagcaggaaattctgaggcttagcagagatgttgattctggtcaagcagtatatatgcagcttttaaatcgtcaacaggaactcaatatcgcaaagtcgagtgctataggtaatgtaaggattattgatactgcagttactgataccaaaccagttaaaccaaaaaagattattgttgtattaattggagtcattcttggttgcgtagtttctgttggattagtccttctgcgggtgttcttacgtcagggtattgaaagtcctgagcagttggaggaaaaaggaatcaatgtctacgccagcattccggtttcagaaacgtttgtaaaaaaagctgcacaaagacgaggttggagaaagaaacctcagagtgaaattcaaggttttcttgcagttgataaccccgctgatttagcaattgaatcaattcgtggactgagaactagccttcattttgcaatgatggaagcaagaaataacgttctcatgatctctggtgctagtccaaatgccggtaagacgtttgtaagtacaaaccttgcagcggttattgctcagactggaaaaaaagttttactagttgacacggatgtgcgtaaaggatacacgcataaattatttaatgtttcgaatgataatggactttccgattacctttctggaaagatagagataactaaggcaattcaaacaattcagcctataggatttgattttatctctcgcggggtagttcctcctaatcctacggaactattaatgcatcgccgttttggcgagttaataaactgggcgagtcaaaattatgatattatagttttagatactccgcctattcttgctgtaacagatgcagcaattattggtcactatgctggtacaacacttcttgttgccagatttgagcaaaatacagctaaagaaattgaagtaagctttaagcgttttgagcaaagtggagtaatagttaaaggatgtattcttaatggtgtagttaaaaaagctagtagctattacagttatggctatagtaattatggttattcttacactgatgacaaataa

SEQ ID NO: 230499 - DNA, 174 bp, Klebsiella pneumoniae
atgagcaactcactgcaaattctatgtatcaaagataccgagggatactggactgagggtgaaatgtatccggcccgccagttctggcgggctttctcatatctcgtgcaggagcatgaaatacacgacacaaaacgggcagacgtgacggggatacgagtgcgctacgggtaa

SEQ ID NO: 230500 - DNA, 915 bp, Klebsiella pneumoniae
atgacctaccaactggtaacgcttagcccggttgctaacgatctggaacagttagggactaaagaaaagttttggttctattacgcaaatgacactgataatttacagctgttcaagtattctagggttggaactggtgagcattggtctgaaaaatgtgcggcagagctttgtcacatactgcacattccgcatgcaaactatgatttggctacgtgtaatgatagatttggtgttgttagtcagaatcttatcccatttggctttcgaatggttatggggaatgaggttttacacagttccacggctgactatcctcaacctttgcaggcaggtgaaaagcctgtaagggttcgagaacacacggttacaagagttttaggatgtctggataaggcatcgatccagccaccgccgagcccctatgatttaaacgggttaaacgctgcagatgtgttctgtggttacttaatgcttgatgcactagttagtaaccaagaccgccaccatgaaaattgggcgattatgctcaacaatgaaactggtgagcagtttttgtgtccaacgtatgaccatgctgccagtttaggaagggagatgttagatgatgaacgcgatgaaagacttacgaccagagataaaaatcgtcaaattccgtgctttgtaagcaaagctcgctcagagcttttcaaagcaaaaacagatagaaagcccttacttacagttgaagcctttcagctcgctgttgaaggtagaactgccgctcgcaaccactggctgggtaagctgagcgctttaacagaagattccattcgagaagtgtttaacaatgtgccctcatcgtgtatctccgatatcgcgcgtgagtttgcaacactcatggtaatggaaaatcgtagaaggttattagaatga

SEQ ID NO: 230501 - DNA, 741 bp, Klebsiella pneumoniae
atgactaactcaaactccgtttacgtcgcatggcaggagcccgataccagaaactggcatgttgtcggtaatttgcaagaacgcaactcggggtatgtttttaagtacacaaagggtgcgcttaagtcctcaaaatttacattctttagtggcatgaatgatgtccgtgaaacgtatgtttctgaagagttgtttcctcttttcaaaaaccgccttctgtcgcctaggcgaccagagtatccacgtttcattaagtggcttgggtttgaagatgatagcgtgaatgcgattgacattttggctcgatccggtggactgagaagtacagaccaactgcaaatcttcaagaaaatcgaagctgatgaaaacggaaggtttgaacactttttctttctacatggcttgagctatctgaactcgatggcgaatgagcgagtaacgggattacaaccaggtgaaaatttacgcctttgcttggatcctcagaatgaatttgacggtgatgctgtcattgttcgtgcggataagcctgctgaaattgttggatattgtccaagatatctgagtaacgacatcaagaaaatgctactgaatgatcctaaatcagtaacgttatcggttgaaaagattagtgatgatgcaccacataattatcgcttgctatgcaagttgtctgggactttaaattcagcttgtcaagcttcgcttattcttcaggatgagtttgaaagtattgagtaa

SEQ ID NO: 230502 - DNA, 306 bp, Klebsiella pneumoniae
atgcatcgacagtcagacatcaatcaggcattccgcgagtcggtattgcgcaactccaaaggttttcagtacctgcacacaaaggattttgtgtcagcgctgcgccggcgtggcatccactttaccgaggtggaggcgaactcctggatcgcacgcgagcagtcttatttcattgataaaacggcagagcatagcgaaaacaggctgtggatgatggcagagatggaacgagagctgattgtcgagcgaaccagagcgggtttagccgcagaatgctggagaacggcgctacccggcagcaggtag

SEQ ID NO: 230503 - DNA, 645 bp, Klebsiella pneumoniae
atggacgatcagcggcgcgccgggcacgatatgccgctccaggctgagctcgcccaaagacagcgctttcgcccccgccaggggatggtccggacgcatcacaatccccacctccagttcggcaaaggccagcacgctgagtccagcctgcccctgcggatcgaggatcaggccgacgtccaggtccgcctgacgcactttctggctgacggtgtggctgtcagccacctgcagatccagctccagccacggccagctggcgatgatctccgccagcgcggcggcgaagcccccttccgccagcgcctgcaccatgccaacgctaacgcttccgcgcttcatcccctgcagctcatcgaatttctgccgcgtctgacgaaattccttctgccagcgcagcagattgtcatacagcaactcaccggcggtggtcatccgcagtccctccggcaggcgctcgaacagcggggtaccgaaggcctcctcggcctgcaggatctggcggttaattgccgaggcggagatatgcagctgctcggcggcccggcgcagactgccgcagcgggccacggcgatgaaatagtgcgcgaaacgggaaaatggactcatggcgcccctgtactcttttttgcaacagcagagtga

SEQ ID NO: 230504 - DNA, 192 bp, Klebsiella pneumoniae
atgctgattggtttctcctccatggccggtgtgatcggcggcggtggactcggcgacctcgccatccgctacggctatcagcggtttaataatgaagtcatgtttggcacagtgctgatcctggtggcgatggtccagggggtgcaaatggccggcgatcggctggtgcgtagcctggcccaccgccgctag

SEQ ID NO: 230505 - DNA, 1170 bp, Klebsiella pneumoniae
gtggggtggtggatgaataaccaatcgcgccaggccttatggctggcactggctggatcgatagtactgatgatcggcatgggctacgggcgctttgccttcaccggcgtgctgccgcttatgcttaatgaaggtctgttaaccctgcacgagggcaatctcgccgcgtcggccaattacgctggctatctggtcggtgcgttgctgctggcgcgggtgcagcctggggccgccacccgactgagtattatctccgccgggttgaccatcgccagcctggcgctgctggcctgggtgagctcgccgtggaccattattacgctgcgcgccgtcgccggcgcgctgagcgcgataacgctaattgcaggttcgctgtggctgctggaacatatggggcatcatcacggggcgccgttgctgtatgccggggtggggctggggatatttatctccgcggaggggatcgcccttggacatgccctgaacctcaccagccagcagatctggctgctctgcgcattatgcgccggtctgctgctggcgctggcgatccgttggctactgactccgccggctgcactggtgagggtttcccatgttgagacctccctgcctgcgtccgggagcgatacccgtcacgcggcgtggcgactcttgatggtttacggtctggcgggcttcggctatatcatcaccgccacttatctgccgttgtttctgtccggttcgctgcagagcgttgacccggtccatctgtgggcgctgtttggtctggcggccgcgccgtcctgcctcatctggcataagctggtgctaaagtggggataccggcaagcgctgacccgcaacctgctcgtccaggcgcttggcgtgatccttccagcctgcagcgcttcattgctgttttgcgtgctaagcgcgcttttggtgggctttacctttatgggcaccgtaaccattgcgctaccgaaggcgaaaagtctcagccatcaggtgagcttcaatatgattgccgcgatgactgcactgtacggtgtgggacagattgccgggccgcttatcgccggcgcgctgtatcagatcgcggcttcatttaacccggcgctctatgccgcggcgctggcgctgctgattgccgcagggctggtctttaccgaacgccaggcttag

SEQ ID NO: 230506 - DNA, 423 bp, Klebsiella pneumoniae
atgtcgttctgtcatatgcgcattgccaggccggtcagtgaactggacaccaccgccagcatgtattgcgccgggctgggactcgagcagctcggcagctttaccgatcatgaaggattcagcgggataatgctcggcgcgcccgaagcgggctggcatctggaattcacccactgccgccaccatcccgtcaccccctcggcaggcgatgaagatctgctggtgctgtactatccgcagcaggcggcatgggaggcacagtgcgcagccatggacgccgccggatttctgcgcgttacggcgtttaacccttactgggaggtcaatggcgtcactttcgtcgaccgggacggctaccgcacggtattgcaaaaccgcgcctggggcatggtgtgtgattcgtcgggtatggcggcgagctga

SEQ ID NO: 230507 - DNA, 3216 bp, Klebsiella pneumoniae
atgagatcgagaccttcccttttactgatgcgaaacctgcggtcattggccgttgtggtgctcgcaactttgccatgcgttgcttttgcacaatggcgggttgtagccgtgagcaccgaagtagacaaaatgcgcttcaacaccatcatagacgcgcattccttcatgaagaattatcgctctggtgaggagcaagggaagggaacgccagttggggatgcgctttatccggttgccagttatggtgatggccgttatgtctccaggatctgttttaagtatctaggtgctactggcgattatgaccccactacctgcactggcgacccagctacggtctactggcgctcaacctatgttctgccgggtgagatggataaaacaccgttcctggacagggatctcggcttaccaacaacgaccatgtgtgtagggaaccctatccatcttggcaccggcaacaagttccaggctgaactggattatcaaagcggaggctccgaccctttcacattcaccagatactacaatagccaccttcctgatgaagagctcggcggctggcggcatacctactcgcggagcgtcgaggtcaacgcctcgaagtacggtgagaacatggttgtcctgcaccggccagaagggcaacaactcgcgttctacaactcgtcctctgtctgggtgccaacatggaaaaccgatgataccttgacgaaggatgctaccggctggcgctacactcaatctgacggggtagtcgaggcctatgatgaaaccggacgactgaccggcatcgagaagcccaacggcaatcacatcaccctgagctatctgaacggagagctatcctcgatcactgacggctttggccgcaccatccagttccagtatcaagatggccgcatggtcagtgtcaccgatcctgctggtggcagtattcagtaccagtacaacagcgctggcaagctggcggaagtgatctaccaggacaatacgagccgcagctatctctacgatgacccgaatgcaccgggtttgctctctgggctggtggacgagaacggcaaccgtttcgccacatggggatatgatactcaggggagagcggttctaagcgaacacgccgggggcgcagagaaaactcaggtaagctacaacgctgacggaagcgtctctgtcaccaatgccctcggccacgttcagcgatacacctacagtcgccacaatgggatgctcaagcctgatgtggttgagggtgcgccgtgtaccggctttgtgggcggcaaggaaacctacgtctacgacagcaaaggcctcgtctccagcattactgaccgcgctgggcagaagcgcacgttcacccataacgaccggggattggaaaccacccagatagaccaggacgggggtaaggttacgaccgactggcttccttccaagtcgctcccggcaaaaatcacagaaccaaccaggatcactgagctcacctacgacactcatctccgggtgataagccgcaaggtcactgatcgcagctcgggcgcttcccggacatggacctacacctatgcccctgttggtacaggaaagccgagcctgttggcctcggttgatggtccgcgcaccgacgtcagcgatgttacgacatttgactacgatgaccagggcaacctgatccggacaacgaacgcgctggggcaggtgacgcagtttggtgactacgacgcgaacggtcgcgccgggaccattcagggtgtcaatggtgtaacccaaaccctcacctatgacgccagaggaagacttgtcagctccactgggccagaaggaaccacggtctacaactatgatgctgtgggcctcctgagttcgctgaccaagccaaatggtgcaaccgtcagctatgagtacgacgctgcacatcggctggtggcggaaacagatgcacagggcaaccggcgcgagcttgagctcaatgacctcgggaacccagtagaagagcgactgctcgatgcgctgggccagacccgttggatagagcgccggatcttcaacgaaatcggctggctctccagtgtctccgacgcctatagcaatcagtcatcgttttcctacgatgtggtggcaaacctgatacaggagaccagtccctctggtaacacacactcctacaagtacgacggcttccatcaccggacacaaacgaccgatcccctcgggaaggtcacgcaggtgctctacaaggataccggcgatgtttaccgtgtctccgaccctcgttcgcgcctgacctactacagctacaacggctttggcgaagtgacccaggtccggagcccggacaccggcaccaccgacattacctatgacgaagccggtaacgtggcaacgcgcaaaacggccaaggggcaaaccacaagctacagctatgacgcgctgaaccggatcatcgaaacctccagcgatgtcgctggcgaatcgccaattctgtacgggtacgacgaagcaacctcaccatacggcataggccgcttgacctcagtcgatgatggcaacggtgtccggagatttggctacacccccgaaggatggctggcttacgaaacctgggaaacccacgggcagagcctgactacccagtaccaatacgatggtgcaggcctcgtcacgaagatcacgtatcccagtggccgtgaggtctcctacacccgtgactcagccggtgacgtcatcgaggtgacaacgacacaagcaggcaccacaacaaacctggcaagccagattgagcgagcgccctttggccccgtcaccagtatggtcagagggaacggcatttcagaaagccgcactctggatctcgattaccgtgtcaccggcatcgacgctgctagggtgcattcgctggtctatcggtacacgccagactcgttgatttcagccatagacgacaatctcagctcatcagtcaatcagtcactcggttatgacgcggttggccgcatcacctctgctgaggggatctatggcgttttgggctatggctatgacgccaccggcaacaggacctcgatcacgaccgatggcctgagccaaagctacaccatcaactacatgaacaactggttggtgaaggccgggcaaacctccagaagctatgttaagcagatccacgatattggccgcagcttcattttcctctccgtcatctcgaccggctaa

SEQ ID NO: 230508 - DNA, 282 bp, Klebsiella pneumoniae; identical to SEQ ID NO: 25056

SEQ ID NO: 230509 - DNA, 537 bp, Klebsiella pneumoniae; identical to SEQ ID NO: 199626

SEQ ID NO: 230510 - DNA, 1011 bp, Klebsiella pneumoniae; identical to SEQ ID NO: 25053

SEQ ID NO: 230511 - DNA, 831 bp, Klebsiella pneumoniae; identical to SEQ ID NO: 96578

SEQ ID NO: 230512 - DNA, 492 bp, Klebsiella pneumoniae; identical to SEQ ID NO: 199232

SEQ ID NO: 230513 - DNA, 876 bp, Klebsiella pneumoniae; identical to SEQ ID NO: 25050

SEQ ID NO: 230514 - DNA, 1041 bp, Klebsiella pneumoniae
atggcaagaaaattggttgagtttgacgatgtagcggctgcggcccaaaagctcaaggacgccggtaaacgcccaacggtcatcgctatcagagacatcattggcaaggggagctttaccaccatttcaacgtatctcaaacagtggtcagaggaacactccctcgatgaagagctggtagaggtagtccttccagaatcggttatgagcgatgctgagctcttcctacagaagatctatacggtagccaaagcaagcgccgatgaacagcttgagcgcgagcgtgaactgctacgacagaaagaaattgagtaccaggaagatatgcagcaagccgtggacatggcaaatgatgccaccgaacgggctgagctactggaagaacaacttgaagctctcaccaacaaaaaatcagagctcgatgcggcccttggtaaggcagaaaactcgctatccctcaagtctgcggagctagaacgctcactggctgacattgataagctggaaaagcggatcgttgagttggagggcaagctggaggcgaaagccgcagatctgacccgagcacaggatcacctggagcaagctaaaagcgaaaatcgctctttgagccaaaaattggcaactacagagggtgagttggaggagcaaaaaggcaagagtatagagcagacagaaaagctccgggccgctcaggaacaaaaaacatcgttgaaagagcagctcgaaaatgtacaggccaaactggcccaatcacaggactcccttgccacagccaaagctcatggcgaatccgctgaacgagagtgccagcgcctatctggagaggtagaaaagctggacgccaaattatccagcgccgaagcagaagctcgcgctcttgttcaagacaaaggcatgatggctggtcagttgcaggaaaaagaccagcaggccaagagcctcgaacaaagactcaatgatgcactgaccaaaatttctgggttggagcaagagctcgctaaagctggtaagggagggaaaaagaaagaggaaaactga

SEQ ID NO: 230515 - DNA, 204 bp, Klebsiella pneumoniae
atgacactagccacctcatctattggcgactatcgctggttacaccgtctccatagttgggttacggaggtggctcaaggtaaagccccagactggtggacagatctggattgtgaagtatccctcccccgagaagaaaagcggatcagtacgttcctctcgacacaaaagaagcgcatcactctccagatgtgtttgtcgtag

SEQ ID NO: 230516 - DNA, 1512 bp, Klebsiella pneumoniae
atgaaacaacttcctcctgacacaccagaacaatcactgatcactcagtacaaagggcctcgccttgtcgttaaggcctacgctggaacgggtaaaaccacgacactggtgaagtacgcccacaacaacctcgattcacgtatcctctacttggcatacaacagggctatccgcgacgaggcaagagaaaagtttcctgcaaacgtagactgcaaaacgtcccaccagcttgcctacgccactataggaaggggctaccagcacaaactctccggcaacctaaggctcaccgatattgcccaagcggtgaataccaagaactggacgtttgccaaagatattctcgatacgctcaacgcctttatgtgtagtgcagacatgcggattctttatacgcattttgctcgcgccgatacgggtaaagtgcttacgtccaaacaggagagataccaaatccaggtggtcgaaggtgctgagctcatatggaaacggatgacaaacgttcaagatccgttcccgaccgtacacgattgctacctcaaacagtatcagctcgggatgccgaatctgtctcgccggtacaccaccattctttttgatgaggcacaagacgctaaccccgtaacaagtagcatcgtcctacagcagaactgcaaggtaatcctggttggagatcgccaccagcagatctataggttcagaggcgcaaacaacgcccttgatagcaaagagctcatgaacgccgaccaactctatctcactcatagcttccgctttggccccaacgtttcgctggtggcaaacgcccttcttgaactcaaaggtgaaacacgacctgttgttggccggggaccagcagatcaggtactcatgtttttaccaggtgacgtgggccaccgcgcaatacttcaccgaaccgtcatgggggttatagagacggcgctctctgcgaccgaatccggagcgcaggtattctgggtcggtggaatcgacgcttaccagatcaatgagctccaggatttgtactggttttcgatggcagagccagaccgggtaaagaataagaaactgcttgatgagtatgaagactacttcgagtatcaagaagtagcgaaggcgaccaaagaccctgagatgatgagggctgtcaagatcatcaacagctacgatgaaatccctgaacgactcaccactctacgacgcaatacagtcaaagaagagtttggggctgacattacggtctcaacagctcatcggtgcaaagggttggagtgggactttgttcagctctatgacgactttccggatgtcctggacccagagctcgacccaatggcccgtgacgatgaaataaacctgctctacgttgcatccaccagagcgatgcgaatccttgcgttgaacagcgctgtcgagatggttatccgctacatcacccaaaaacgcatggtcgagaagcagatgaagatggccgcagaagcgacagaagttgaagaggacacgaccaaatag

SEQ ID NO: 230517 - DNA, 1029 bp, Klebsiella pneumoniae
gtgcgtgagactatgaaaaaatcacctttgaatttactgctccttgcagcgctcacgctgggggcatcacaccaggcttgggctcaagatggcacaagacctggtttttatgagcgaaaggaagagggttggttctggtacaaggaagagcccaaagaaccagagaaaaaacccgaaaagcccaaaccaaagcctgtggcagaagcgaagcctacacagcctaagcctgctgctccgcttccgagcggcccagaaatgttctcagcggaatggttccgggaaaacttacccaagtacaaagaccttgcttggaacaatcctaccgttgaaaacgtcaggacgtttctctacttgcaacgatttgcgatagatcgctctgaacaattttccgatgctacagagctggcggtcgtaggtgatcctttcttggatgaaattactcgacgtcctgctgccacgtttgcctcacaacaagttgatcgtgacgctggtaacgccaaaaacatgctactcaaaagcgtagccgaacgcgtagggatattcttcttctacaagtccgacgatgactacagtgacttgcaagcaccgctcatcaagatgttggaacaaggagaaggattctcgatcattcctgtatctatggacggcaaaccactccccagtgggcttttcccccattacaaaaccgatgaaggccatgccaaacaacttggtatcgtaactttccctgctgtttacctcgcatctccagacggtcagttcgctcctataggacaagggccaatgtctcttcctgagctgaatcacaggattttggtcgcagcaaaacgcaatggttgggtcacagacgaagagtttaaccgtacacgtccggtactcaacctagaaaacaacatagccgaacgcttggcctcaccagagctgggctctgacctcaaacaactatctcaagcgagcggcgataaagacaactttgtgccaccggaacaactcatgaagtacatccgggacaaattacaggagaactaa

SEQ ID NO: 230518 - DNA, 1434 bp, Klebsiella pneumoniae; identical to SEQ ID NO: 25045

SEQ ID NO: 230519 - DNA, 3615 bp, Klebsiella pneumoniae
atgggatctttttcaatccactctatcggtgactctgcttttctggagcaaatcctgattgcagtatcaatgatcaccggcaccggggatttcgagaagatggtcagtattggcctgcttcttggggtcttgatgatctgtattcagtccgtctttcagggcgcaaagcaaatcaacctccagcaagtgctggtaggttggattctatatgcctgtttcttcggcccaaccacaactgtgactatcgaggacgcttatacagggcaggttcgagtcgtcgccaatgtccctattggggtaggctttgctggaggtgtcatatccaacgtgggatacaccatcaccaatttgtttgaaactggatatggggtaatcgtacccaatgtcacggaaagccacttttccgaaacactgaaactgttgaatgacgtcagacggcgagcctatgacacaggagtttttactgcgcttaactcagcaaatggaggcggctatgttgacgtgaggcgttcctggaacaattacattcgggaatgcacgttaaccaaagtcgatctcaacctaatgtcccttgatgagttgatgaaccgttcaactgactcagctttgcgattcaactcacagctctacggaactaggttgtatttgtctacagcaaaccctgacggcgctgactacacatgtactgacggatgggtggctattagcactgcaaccgccaacctaagcagcccggttgttgttgatgctcttaacagcctactgggtattgacacgtcaactggagacaacgctctaacgaagctgaccgattcgcttcaagcgatgggtgccacaactacgtcatcaatcgactatctgaaagccgccgttctggagcccctctattatgaagccgcagcaggacgttatcaggacctccaggattatggctctgcattgatggtcaaccaggctattcagcaacggaacacacagtgggccgcagagcagtcgatgttcatgaccgtcgtccgaccaatgctgacgttctttgaaggctttatttatgctataaccccgatcattgcttttattatcgtgatgggcagcttcggcctccagttagccgggaaatatgtacaaaccatcctctggattcagctatggatgccagtcctctcaattataaacctgtttgttcataccgccgcgtcaaatgagatgtctagcctcagtgctggtggtctcaactccatgtacgctctttcctcaactggagatgttctgcaacactggattgcaaccggcggcatgttggctgcggccactccggtgatttccctgtttatcgtcacaggtagcacctacgccttcaccagcttggcatcgagaataagtggttctgaccacgttgacgaaaagatgcaaacgccagatctactcaagcaaggtccggttatgcaaagtcagccagcgtacaatcacaaccagttcagtggtgcgattgcaaacggcgcagaaagcatgatcagtaccttctcgcttggctccaccttagcatcaggcgtgagctccgcacaggcattacaaagtcagaaatcggaggctttccaaagcactcttggtcgaggtttttctgatggagtaagtcaggatcaagcctattcaagactctccaatgtcgggcgcaacgtttcgtcgcaaaacacagctcaaagccaattgatcaaccagcaagccaagaacttcatggataagttccaggtggatgatagccactctgatgctgtcaaaggtgcttttgccatgcaggctatgggcacactcgatgttgacgaagctgcgtccatgcttatgcctatggttggcaaggccagggcagcaatgaaggccgctgctggtgtgaaatcaaacagtacagccctagttcctgctggtggtaatggcgaatcaggcggcggcagtgatgtcctggacatcaaagcgcaagcgaagggagcaacagagtcatcaactcaagactcttcaagctggtcagcgagtgatgtgtcccagttcatgaagggtgtgagctattcgcaaaccgatagccaggcgttgacaaatcaattagcgcagggtttcagccgttctggaagcgagtcattcaagcaaacctggggcgatagcttatcccagaacctatccaagtccgcttcggaactggtgtctgcatcggacaccttcacaacaatgagtcagctccaaaaccaaatgggctccatgactaataccgactttaaaactctcggtggtgcagtagcacaaacccctgcggccatgaaccaactgaatgactatttccgaaatgccgcgccgcaatcggttaaagacgaggcggcttcactacagcaaagataccaagcctacggaatgtctcctcaagtggcccaggcagcagcgcgaatgacagcaatgaccaactccaaaaattacgaacagggtaaggagcttggcgggtatcaagccgcactacaggcgatcaataccgcgtccggtcgcaacggagcatttagtggtgatgcttacggaaataacggcattgaaggcccgaatgttcaaggcctaccaggtcaggttcaaggggctgtaggcagtggacctaacatcccaaccggattccgggagaatgtggctgggatggctggaactaatccggcatcagaagctgggcagttaccaacgaatagcccccttgttcaaaatgaacatgcagccggtacgtcagctcttcataaccaagcacagcaaacagagcgaaatgtatctgctcctgaactgaaaaaagcccaagataaccttatgaactcgcttccggaaatgtcttggagcgcttcggcgtggggagcgtgggacaactccagtgattggatgggccgcagagctgaacaagcaggtggagctctcattgctggtggtcaagctggcgctgatgcgttctcaagagcgatggatcaaatgagaacgatgacacctgaacaacgcgaccaattcatcgcggccactcaacgcggcgaccaggccgtgcaagaggagtttggctgggccggtgattcgatggtcggtatggctaaacttggccgcaacgtcatgggagctgctgcaagcggctatgatgcagcgaaggagtggttaactggtaaatctgatctatcggaagccgctaaagggatgagcattgaggaacgcggcgcgttctatgcagcagcgctatcctctgccgcagaagctggtggtggagccgcgcagcagtttatgaaccagtacggtgatgagttcaaagaaacgatgcagtctatcgctcaaagccgttatgggctgactgaatcccaagccgctgtttatgccgaatcgtttgacacaaacgaaggtcgcatgaaccaggctgttcagaatctgaaaatggagtatgcagaacgtaacccggatggctcaccgatgatgcaaggaggtcagcctgttctttctcagcaaaacgaagagtttacggacaagctggtaaacgtattgcagaactcgacggaagctggagaccgttcaggtagctatttgactgccgtcagggggtacaacatagcaaatcaaaggttctaa

SEQ ID NO: 230520 - DNA, 273 bp, Klebsiella pneumoniae; identical to SEQ ID NO: 25042

SEQ ID NO: 230521 - DNA, 534 bp, Klebsiella pneumoniae; identical to SEQ ID NO: 25041

SEQ ID NO: 230522 - DNA, 609 bp, Klebsiella pneumoniae; identical to SEQ ID NO: 25040

SEQ ID NO: 230523 - DNA, 552 bp, Klebsiella pneumoniae
atgaacattggcaactctggtacattgggtcgctgggttacagctcgacacatggcccttgctgggtacatcacaaaaatcatcatgatcgagactggcctgacctacaaacaggtcagacggctttaccaggatctggagagggacggatatactctggaacgaaaatccagaactttccggggtggtgcgacactgattcatagtcacacatccaagatacaggcctctcttctaatgcagctctacttcaacattggtggagaagccgtgttgcggtctgtgaacatcaaagccttgaacaaggcatttagaatgtatcacgcaatccgcaaagaagtgcccggaatgaaaggtgctcggtgggctccgtttgatattactgatgcctggtgtcttgcttcggagctgagaagtggggacgcaatgctggaggtgtgcgacaactgcaagtgtacgtacttcacctctgttaatcaaagaacctgcgttgaatgtccgttctgcaaagaacaaggaaggcatggtggtggggagaaagagtgtgcttga

SEQ ID NO: 230524 - DNA, 420 bp, Klebsiella pneumoniae; identical to SEQ ID NO: 25038

SEQ ID NO: 230525 - DNA, 984 bp, Klebsiella pneumoniae
atgagtcaatttgttctgggtttggatattggttactccaacctgaaaatggcaatggggtataaaggtgaggaagctcgcacagtcgtcatgccggtgggggcaggtccattggaactgatgccacaacagttaactggcggtgcagggacctgcattcaggttgtgattgatggagagaaatgggttgcaggcgtcgagcctgaccgattgcaaggatgggagcgtgagcttcacggcgactatccttcgaccaatccatacaaggctcttttctacgctgcactcctgatgtccgagcagaaggagatcgatgtgctggtgactggcctgcctgttagtcagtacatggacgtagagcgcagagaggcgttgaaagctcggcttgagggcgaacaccagatcacgccaaaacgatcggtagcggttaagtctgtcgtggttgtacctcaacctgccggtgcttacatggatgttgtaagttcaaccaaagatgaagacctcctggagattatccagggaggaaaaaccgttgtaattgaccctgggttcttttctgtagactgggtagctcttgaagagggagaggtccgctatcactcatctggcaccagcctcaaggcgatgtcggtgttgctacaggaaacggaccggctaattcaggaagaccacggcggtgcccctggcatcgaaaagatcgagaaagctattcgtgccggtaaggccgaaatcttcctctacggtgaaaaggtatcgatcaaagactacttcaagaaagcctcaaccaaagtcgctcaaaacgccttgatccctatgcggaagtcaatgcgtgaggacgggatggatgctgacgtagttctgctggctggcggcggtgccgaggcttaccaagatgcggccaaggagcttttccctaagagcaggatcgtactgcccaacgaatccgtggcatccaatgccaggggcttctggttctgcggctga

SEQ ID NO: 230526 - DNA, 540 bp, Klebsiella pneumoniae; identical to SEQ ID NO: 25035

SEQ ID NO: 230527 - DNA, 288 bp, Klebsiella pneumoniae; identical to SEQ ID NO: 25034

SEQ ID NO: 230528 - DNA, 1065 bp, Klebsiella pneumoniae
atgagcaagagaaccaaagacaaagacctggagaaactcgacgtaatcaaagactcaccgcaaatgagcctgtttgagatcattgaatctccggccaagaaagacgactactccaacaccatcgagatctacgatgcgctgccgaagtacatttgggaccaaaagcgtgagcatgaagatttatccaacgctgtagtgacacgacaatgcaccatcagaggccagcatttcacggtgaaggtgaagccagccatcatcgagaaggatgacggaagaaccgtgctgatctacgcgggacagcgagaggaaatccttgaggatgctctacgcaagctcgcagtgaacgggaaaggccatatcatcgagggcaaggctggagtcatgttcactctgtacgaactccagaaagagctctcgaagatgggtcacggttacaacctgaacgaaatcaaggaagcaatccaggtttgtcgtggcgcaacactcgaatgtatcagtgatgacggcgaagccttcatcagctccagcttcttcccgatggtgggacttaccaccagaggtgagtttcgcaagaaaggcgggaacgccaggtgctatgtgcagttcaacccgctggtaaacgaatcgatcatgaatctgtcgtttcgtcagtacaactacaaaatcggaatgcaaatccgctcccctcttgcacggtacatctacaagcgaatgagccactactggactcaagcatcgccagattcgccgtacacgccatcgcttatcagcttcctgacacagagccctcgtgaattgagcccacggatgccggagaacgtcagagctatgaagctcgctctggaggccctcatcaaacaagaggtcataagcgactacgacgcgaaccagatcaaggatggccgcagagtcatcgacgtgcggtacgtcataaggcctcatgagaacttcgtgaagcaggtgatggcgtccaacaagcgtaagcagcagacagagctacgggccatcaagcaaggcatgatcgaccacgacatcattgatgaaccccagcgtaaggggaggtag

SEQ ID NO: 230529 - DNA, 435 bp, Klebsiella pneumoniae; identical to SEQ ID NO: 199234

SEQ ID NO: 230530 - DNA, 1116 bp, Klebsiella pneumoniae
atgttgagacgagaaaaccaaggagatttgttcgatgaccaggtggtgttgccatcactggagtcggttcttaccggtatatcttccagtcagcgttgtgacgatagaacaacgtacttctcagcgccggatgtggacttgagtttgtacgaccacatcattgtttgcctgtctggaggcaaggactcgattgctgcgtacttgcggctggtggacatgggtgttgataagtcaaaggtggagttctggcaccatgatgttgatggtcaggaaggtagttcgttgatggattgggccttcatgcgtgattactgtcgtcagctcggggaagaactgggtgtcccaatgtacttctcgtggcttgagggcggctttgagggcgaaatgctcaaagacaatgcctatagccacccccatcgtgtagagacgcctgaggggcttctggtgctgcctagagaccataagcgctctaagcttggtacacgccttcgtttccctcagcaatcgccatcactccaaacaaggtggtgttcatcagccttgaagatcgatgttggccgcagagctcttaataaccaggagcgcttcaaggggaagaagatccttttcatcactggtgagcgccgggaggaaagtgcaaacagatccaagtacaaccagcttgaggctcatgcctgtgacagaagatatgggaagactgcacggttagttgatgcctggaggcccgttcttcattggactgaggaagaggtatgggaagtaatcgagcgtcaccgcattctggccccagtcccttatcgccttggttggagccggtcttcgtgtatgacctgcatctacaactcacagcgtatctggtccactatccgtcactactggcctgaacgagctgggaagattgctcagtatgaacaaacctttggtgtgacggtatcaagaaaaaaaatcgacgtaatagatttaggttctgctgttgcgccgatacagattagtgatgttgaggcattggagcaggtatccagagaggattacacgctcccgatttttgtgccggaggggcagaagtgggttctccctggtggcgcatttggccgagaggcctgtggttctgattga

SEQ ID NO: 230531 - DNA, 609 bp, Klebsiella pneumoniae
atgaaaacgataaagcggttcatcgtatgggtgaattacggtcttgagggttggagcattttcggatcgagcgatgactgggatgaagcggtatccatccgttcggaagcgatagacgaatgcaatattgatgaggaagacatcatcttggcagaaaacaaaaacgagctggtggtaaaacctgcggccaagcaaatgacggagtggcaccgggaactggaagccgtccttatgaccttggatgactgccagatggaatgtgacggcatgacatgggcagtaagccacctactcaatgacgcgggtgtacctcatgactgcatgtatggttttgtgcgaaacgaacagaccaaggacatcgtgacaccgcatttctgggttgtcctggatgatgggtggttggtggatctgaggctacgcatgtggcttggcgatcacgacaacattcctcacggggtattccatcccgataacgagccaggatttttctacaagggagaccccgttcaaaaccataaagggatgagactgggcaaagccgtcctggacatcatgaccgacggaaaaatttcacatgtgaaagttcctgaacgacaagacggagagtaa

SEQ ID NO: 230532 - DNA, 522 bp, Klebsiella pneumoniae
gtggaatttgattacgacaagtcagtatcaaacgcacatcttgaggccgcaggctggggtatggatgcctttaatcactccaacccatttgagagccatgtcatctatgtgcgtgactaccgcaacgatcacatccgcctgttcaccatcaagaaggctgacttcgacacgataaagctgccgcttcaccttacctccgacatgctggcttcggtgatcgctgagttcgtatcgaaggcagcaaaagggaagttgaatacgaaggagtccgatacgctggctcctgccttggttggctatgccaaatcaacagaaacctaccggagctggcggagagtgtctggaacaacagagcgattgcatatggtcatcaatatctacgcgggttctggattgctgagacctttcatcgctcgggctcctgagaccgtcctgacgacccaagagctactggtcttctcatcacaggttaagaacatggatgtatccaatcatccagagtggtttaggggcctgaggtag

SEQ ID NO: 230533 - DNA, 522 bp, Klebsiella pneumoniae
atgaaggcagttctctggatattcgtccttatcattgcacctttcgtcattgcgaaagtggaccagtggcgcaaacgcggcattggagacacctgggcgtggtggaaatcagagaacatgccttatgagctgcgctcggccactctgtttttatccgaacaggacatatcaaccacacagccggtgcccatgcacggcagggttgatcaggtgtacaaagccaagaatggggttctcattcccttggacaccaagctgcgccaggtaaaccacatctatgagtcggacattatccagctctcggtttaccgggtaattctgtcacacaagtacaaggcacccgttgccaagtacggctatgtccgaaccgttgttgagacagcggacggggatagagtccgttacatcaagacaaaccttctcagcgaaaaagaagtggtcaagttgtggcaccgctatcaatccatccgttctggtcaggtaaaaacctcctgttcctgtggcggaaagtttcacatgtga

SEQ ID NO: 230534 - DNA, 474 bp, Klebsiella pneumoniae; identical to SEQ ID NO: 199235

SEQ ID NO: 230535 - DNA, 315 bp, Klebsiella pneumoniae
atgttgcatgaggacaatgtgatggaaaaagtcaaaagcgtagatgccgtggagttcacggcagcagataagaaggcgatgacccatgcggcatacgcccagtgtttcttcattctggcccaagtgatggcattcccttccctaggggtggctggcgctatggttgctgctctgtgcggcatgatgccgtggttgaccaagttcgccaaagaggctccatcgaaagcctttggcatggtgatggcttcactctgccttgctcctgtgtacgggaaactctgtgagctggtggtccacgcgattcagggagcttga

SEQ ID NO: 230536 - DNA, 855 bp, Klebsiella pneumoniae
atgggggtagtacgagttccctacctcttggctgagctgaaagaacgcggatgtgctgatgaatctgctctggcgcaggttatgcagcctggatgccgaattggagaggaagacctacggaagttggccgcaaatttagggcttgaagtttctgagctggcaccagcgccagagaacgcggccaacacccggttcaaagcaaagctgagaggaggtttggcctcctttctttttgagtacgacggctgtttccgacatgccgaaggctccagccatgcagaaatgttgggtatcgagcaagaagacgatattggtcttccgagtcgagctgctgacgccatgctcctggaaaagatgctttaccaggtaatcgctcgggctaagtacatgctcggcaaaatcgacagcaagtttgtcaggtcagaacaagcaatcgagttccgtgagcaacttgctcctgggatcttcaggccagggtacagaggtttccgattcaaggaggctgccgctggtgatttgcctacagtcatgattgacggtcggaagttcaattgcgttgccagtatagccagagcgcatggacttgatccggtaacggtgcgtaggcgcattgcggacacaaggaaggccgcagacaaactctccaatgatgagtggaaactcatcctcgccaagaaaaaaggtaaagggaaacccttcacctatctggacaggacctacagcaacattgcccagttctgtcgtgagcatcagctcaacaccaaccttgtttaccagaaagtcaaagaccgggctgatagcgctgatgaagagttctggggacagataatcgaaacatgcaaaaggaaagactaa

SEQ ID NO: 230537 - DNA, 960 bp, Klebsiella pneumoniae
atggcagaaaacaaagagatcccctgggagaaagagctcattgagaagtacatgttcaccctgcataaagagcaggtgaaagaccggcgctggcggaccatgttgcgtgtgcttcgcgcatcaggtttcgtgcttctcatgatcggcttcatcattttggcatctaatccgggtgggatgccgtggcaaagcgccaaggctggagcccctcacaccgcgtatatcaacatccgtggtgaaattgctgctggcacactggccgatgctgatcaccttatcccgtccatccaagcagcattcgacaacccgaattcacaagctgtcgtgcttcgcataaacagccctggcggtagcccggttcaagcaggacggatttatgaagaagtgaaggcgcagcgagcccttcatccggagaaaaaggtctacgccatcattgatgacatcggtgcctctggcggttattacatcgcctctgctgcggatgaaatctatgctgaccgcgccagtcttgtcggttctatcggcgtcattagctcagggtttggattcaccggcttgatggacaggctcggcatcgagcgccgggcaatcacttccggagagcacaaagcgcttctcgacccattctcccctcttacctctgatatgaagaaattctgggagggcgttctatcgaaaacccaccagcagttcatcgaacgagtgaaggctgggcggggtgatcgactgaaagacgccccagaggtgttttctggattgctctggaacggggagcaggccaaagaaattgggctgattgatggcctggggagtttgaactccgtggcgcgagacgtcatccaccagagcaacttggtggactacacaccaaccgaagacatcatccggcgactgacccaacgagcgaagctcgaagccagttccttcgtgcaagaactcagcgctgtgaaagtttactga

SEQ ID NO: 230538 - DNA, 1866 bp, Klebsiella pneumoniae; identical to SEQ ID NO: 25119

SEQ ID NO: 230539 - DNA, 546 bp, Klebsiella pneumoniae; identical to SEQ ID NO: 25118

SEQ ID NO: 230540 - DNA, 630 bp, Klebsiella pneumoniae; identical to SEQ ID NO: 25117

SEQ ID NO: 230541 - DNA, 447 bp, Klebsiella pneumoniae; identical to SEQ ID NO: 25116

SEQ ID NO: 230542 - DNA, 378 bp, Klebsiella pneumoniae; identical to SEQ ID NO: 25115

SEQ ID NO: 230543 - DNA, 663 bp, Klebsiella pneumoniae; identical to SEQ ID NO: 25114

SEQ ID NO: 230544 - DNA, 144 bp, Klebsiella pneumoniae; identical to SEQ ID NO: 25113

SEQ ID NO: 230545 - DNA, 366 bp, Klebsiella pneumoniae; identical to SEQ ID NO: 25112

SEQ ID NO: 230546 - DNA, 282 bp, Klebsiella pneumoniae; identical to SEQ ID NO: 25111

SEQ ID NO: 230547 - DNA, 627 bp, Klebsiella pneumoniae; identical to SEQ ID NO: 25110

SEQ ID NO: 230548 - DNA, 918 bp, Klebsiella pneumoniae; identical to SEQ ID NO: 25109

SEQ ID NO: 230549 - DNA, 1317 bp, Klebsiella pneumoniae; identical to SEQ ID NO: 25108

SEQ ID NO: 230550 - DNA, 579 bp, Klebsiella pneumoniae; identical to SEQ ID NO: 25107

SEQ ID NO: 230551 - DNA, 384 bp, Klebsiella pneumoniae; identical to SEQ ID NO: 25106

SEQ ID NO: 230552 - DNA, 4527 bp, Klebsiella pneumoniae
atgaccaatgccttgggagagatgtccaaggtaggagaagatgccagctatgtttatctcgtcacaaccgcaccttatggcaataccgacggcaattattggcgttgggtgaacttcggccagtgggggggaggcggtattgcttataacctcacactctctccatcagcgcctaaaagtcccagacttttgggtgtggactacaattacagtgatataggatggtctagtttttaccgctactgggtgaacaattctgttcttcctgtcactgttagtagtatccgtgtcaaagttgaaccaaggccttacgttcaaactgccgttcacaggggaagctgtgaaattcctgttggtcaagatagctgcgtgattgcaaatagcttcacaatggctaaaggcacaacagggtacgtccacgataatgcgacagttttcaatccggataaatctcttcgctcgaatcctctttgggcagaggttaactggaacgatcagcactaccctcagctaagtcagcagttcgatcaaaatagcaaggtatttaccttattcgttaaccagccaggacgaggcgcttactttgataggctgcgtctgcgaagtgcatggattgaagatagcaaaggcaacaagctgtctccaactggtgggttaatagccaacaactgggagaactacacttaccagtgggatcttaaaactctccctgaggggcaatacagtcttgttgccgcagcagaggagatgcacgggcctttaacgcgacaaccaatgttccagataacgtctgatagaacgccaccaaccatgacactcagtgtggcagatggagcagctatccagactctagatgatgttgttattaccttggctgatgctatcgacccttcacctaaattgacctctattgcccttgtaggggggcctgccaatgacaaggtgcagttgtcttggcgtgaggagtcgaaaggtcgattccgccttgagtacccggtaatgttcccttctttgaaggaaggggaatcttacacgctgactgtttccggtgaggatgcacaaggcaatgcggttcaaaaggctgttggcttcgagtacaaacctcgtcaggtaatgctggcggatgggatggatggcaaggtcatggtccccgctgtcactcatgaatttgttcatgcagatggcaaacggatcatcgaaaccaagccgctgacgctcagtgatggtgctgtcgtgacaggttcatacgacgtgtttgcgaccctacgttctgatgcgaaagtaccgctggtggttaatggggtgcgtatcgagccaggccagacaatggggatcatgagccaacatgatttcggtgcgtcaggtggtcgtttgagcattccggttaaacctgctgttcctgatgtggtcggctcttccagccttcttgtcatgacctccgcgccgaactcacccatcttggttgtggacatcaatacctggaaagggacggctaagctctctgctgaatcatggacaattcgccaggtcattgacccagtgaaaatctatgccctgccagagtcgggtgtgccttgccggttcaccacgaaagaggatgtggctatggccgcagacccaattcgtgacccggtgtgtttgctccagtgggacagaactccagatgaggctgaacaaactacgcaggacaacaacgggatgaaagttgctgggctggtggggcaggctgtgagcattggtgaacaacctgtcgaatacagcctgtacctgttcagtggtgacggttccaaggtaaaagttgggtctggctctcagaacctgacggtaactactgcctatggctctgttggctacaccccgattgatgacattgctcaggtgaatcgcgtcattgaagattttgatgtgaacttcaagcagagcaaggggccagactgttctataaccctcagcgcagaccgtgcgaaaaaagaggccgcgaacaaggctgttggtagtgcaagccgtgcctgtctgttcgagtggcagcagatccccgatggattggtccaagacccgttatcggaatcaccttcgctctctggttcattggcctccaacggcgttcatccactggggtggcgggtaagtattttcacccgtaacggcactagggtgacgttgaacgacgagactttcaatgtcgaagcggttgacccaccagctccgaccgttgaactagcctccgactacaacttcaaagacaacatctacttggtgccgatgacaggtaactacctgggtgatgccattatcaactctgaacgagctgatctggatattgccatatcgcgcaactcggatgttcttgagtctgagaccttcactccgggatggggtgccaccaataaggtgtatcgccgcatcaataccgatgagcgagcgttgtgggaggagaccacctacaaggtgaacgcggcctacaacaaggtgcctgatgtgaagactgaggttgtctaccgggctatctctgcaccttctgacagtatccgtcctatcgttgaagttaaaggtgataccgcgattgacacccaggcattgccggttagggttctcatccgtgatcagtacaaacctgatggtgactatgacgctaacacgatgggggtgtggaaagtacgcctgatccagcaaaaggcctacaacgagacggttgcgctcactgattatgcggaagcatcgaacggtgaagctcagttctcagtagacctgtctggtgtggatacttcctccgtccgtatcgctgctgaggctgttctggaaagccctgttgagggttacaaccgcacagagttgtctatcagacctgccttcttgacagtgcttcgcggtggtgccatcggtgctggcgtggaggctcgcaagttgtctggtgaagctccgttcactgctgtgttcaagctatctttggacgaccgtcaggatctccgggctaccggccaggttgtgtgggaaaccagtaaggacgacggtaaaacctgggagcagttcatcccagaagatcgatacaagtatcagcttgtgaagaccttcgacaagggggagtaccaggttcgggccaaggtggtgaacgtcaactcaggtgcggaaaagtacaccgaagcggtcagtgttgtcgcttacgacaaacctgatattgctgttatcggcccgaccacgttgtttgtcggaagtgaaggcaagtacacagcgaacctgacgttgaacgatgagccaatctccggtggcaatgccattgttgagtggtctactgacggtggcaaaacctacgcgcagacaggggatagcatcacgctttcgagcgatgaagaaacccgataccgcctgtgggctcgtgtgcgctctgccacggcaccggctgatgacggctatgcctatgaagttgcgaaaacggcggttgacttccgagcagtgaaggcacctcgtccttacgtgacagggccgcgagttattgagaccggtaagaagtatgtgttcaaagccgaaaccagcctgccttaccgtgggatggacgtgaagctgaacgggttcttcacgctgcctgatggctcgattgtgcagggtgatactgctgagtacgaaccctctgacactgacctcaatcaggctactgtagaaacgaagtacaccacctggatcgaaggataccgagatcagggtgcagaggcttcgcatagcctacgctcccgcgtttggcagtatgtatggccgagcttcggaatgcaggttaggaagaacgcagacgtggctcctgcgacgatcaccgcgtcagtgcggccaattgccttcaacggcaagctggaagagccgacctacgagtgggagttgccggaaggcgctgtgattcaggatcagcggcaggatattgtccggtcctttgtgatcaatgagccgggtgattacaacatcaaggtcactgtccgtgatgctcgcggccatgagaccgtgatcgagcaaccgctcaagatcggccaggcagcgccctatgccattgacctgcaatactctggctcgaacaaatacgagcgtgagcctctggatgtgctgttgcgaccgtacatttctggcggccacccacgcgaccgtatttcgactcgtgtttattcggtagatggtacaccgttggaaagcagtggttactacggcagagcaactctgggcgctggtgagcacagcatcaagctgaaaataacctcagaaatggggcatgaagctgagggcgaggtgaacatcaatgttgcagagaacaagttgcctgcatgtagcctgagctcacgagagaccgttgggtcgtggatcgtctatgcgaactgcgaagataccgatggccgcatgaagtcctacgaatggaccattgccggtgagttgcagagcatcagctctgatcgagtgactatcagcaagggcacctatgaaacgatgccgaccatctctctggttggggtcgatgactctgggggcaaatccgaagctgttaccatgaactaa

SEQ ID NO: 230553 - DNA, 708 bp, Klebsiella pneumoniae; identical to SEQ ID NO: 25142

SEQ ID NO: 230554 - DNA, 2448 bp, Klebsiella pneumoniae; identical to SEQ ID NO: 49841

SEQ ID NO: 230555 - DNA, 318 bp, Klebsiella pneumoniae; identical to SEQ ID NO: 25062

SEQ ID NO: 230556 - DNA, 531 bp, Klebsiella pneumoniae; identical to SEQ ID NO: 25063

SEQ ID NO: 230557 - DNA, 1266 bp, Klebsiella pneumoniae; identical to SEQ ID NO: 25064

SEQ ID NO: 230558 - DNA, 672 bp, Klebsiella pneumoniae; identical to SEQ ID NO: 25065

SEQ ID NO: 230559 - DNA, 1008 bp, Klebsiella pneumoniae; identical to SEQ ID NO: 25066

SEQ ID NO: 230560 - DNA, 2796 bp, Klebsiella pneumoniae; identical to SEQ ID NO: 25067

SEQ ID NO: 230561 - DNA, 861 bp, Klebsiella pneumoniae; identical to SEQ ID NO: 25068

SEQ ID NO: 230562 - DNA, 642 bp, Klebsiella pneumoniae; identical to SEQ ID NO: 25069

SEQ ID NO: 230563 - DNA, 321 bp, Klebsiella pneumoniae; identical to SEQ ID NO: 25070

SEQ ID NO: 230564 - DNA, 186 bp, Klebsiella pneumoniae; identical to SEQ ID NO: 25071

SEQ ID NO: 230565 - DNA, 969 bp, Klebsiella pneumoniae; identical to SEQ ID NO: 25072

SEQ ID NO: 230566 - DNA, 909 bp, Klebsiella pneumoniae; identical to SEQ ID NO: 25073

SEQ ID NO: 230567 - DNA, 528 bp, Klebsiella pneumoniae
atgtctaaaggcgtcaacaaagtaattctggtcggtaatctcggttctgacccggaaattcgctacatgccaagcggcactgccgttgccaacttcaacgttgcaacaacggatacgtggcgcgataagcagtctggcgagcaaagagagcatactgagtggcaccgtattgtgcttaaaggtcgtttggcggaagtcgctggtgagtacctgaaaaagggctcccaagtctatctcgaagggagcaaccgcaccctgaagtggactgacagccaacaaatcgagcgctacaccaccgaagtacactgcgttgaaatgcagatgcttggtggtcgtggaaatgcacctcaggacaactctcaacgtgcagcgccccaaaaagggcaacgtacaggagccggtacgcaatctgctcctgtgcagcaatcagcaccgcaaggtggtatgggcggaggctatggtcccgctcctgatggctgggatgatgacatcccgttcatgcggctgcaccacttggctggcgggtaa

SEQ ID NO: 230568 - DNA, 990 bp, Klebsiella pneumoniae; identical to SEQ ID NO: 25075

SEQ ID NO: 230569 - DNA, 1011 bp, Klebsiella pneumoniae; identical to SEQ ID NO: 25076

SEQ ID NO: 230570 - DNA, 1278 bp, Klebsiella pneumoniae; identical to SEQ ID NO: 25077

SEQ ID NO: 230571 - DNA, 1797 bp, Klebsiella pneumoniae; identical to SEQ ID NO: 25078

SEQ ID NO: 230572 - DNA, 540 bp, Klebsiella pneumoniae; identical to SEQ ID NO: 25080

SEQ ID NO: 230573 - DNA, 501 bp, Klebsiella pneumoniae
atgaaaaacctatcagctttggaagcagttcttgactacgacaaaccttctcgacgttttcttgatgagctcaacgaaaaccagatgaaggatttgtctggggaaatcttcgccaagctctactggagcaagcgtaatccccagtggtacgagaaagacaccaatcggctgtttgcacgacttcgttgggttcagcgcatcatcaagaagcgcttgaaaaccggcaaggttaaacctgaactgacagaaaatggttcagtgatggagcgcttcaacttcccttatggtgacactctcgatttcttccatcggtacttgcgacatcccaaatgggaggttgtgtatcaagaatcggggtgcagtgccttttggaaaaatgaagcaacgcttgagctatgcacctactgcgaaggtgatgtggtcatgatgaaggctcctgatgaagcaaccttctttcgtgattgcaatcgccttagctggtggtatgcagataacgcttga

SEQ ID NO: 230574 - DNA, 885 bp, Klebsiella pneumoniae; identical to SEQ ID NO: 25082

SEQ ID NO: 230575 - DNA, 225 bp, Klebsiella pneumoniae; identical to SEQ ID NO: 25083

SEQ ID NO: 230576 - DNA, 390 bp, Klebsiella pneumoniae; identical to SEQ ID NO: 25084

SEQ ID NO: 230577 - DNA, 453 bp, Klebsiella pneumoniae; identical to SEQ ID NO: 25085

SEQ ID NO: 230578 - DNA, 192 bp, Klebsiella pneumoniae; identical to SEQ ID NO: 25087

SEQ ID NO: 230579 - DNA, 354 bp, Klebsiella pneumoniae; identical to SEQ ID NO: 25088

SEQ ID NO: 230580 - DNA, 345 bp, Klebsiella pneumoniae; identical to SEQ ID NO: 25089

SEQ ID NO: 230581 - DNA, 303 bp, Klebsiella pneumoniae; identical to SEQ ID NO: 25090

SEQ ID NO: 230582 - DNA, 1626 bp, Klebsiella pneumoniae; identical to SEQ ID NO: 25091

SEQ ID NO: 230583 - DNA, 432 bp, Klebsiella pneumoniae; identical to SEQ ID NO: 25092

SEQ ID NO: 230584 - DNA, 555 bp, Klebsiella pneumoniae; identical to SEQ ID NO: 25093

SEQ ID NO: 230585 - DNA, 261 bp, Klebsiella pneumoniae; identical to SEQ ID NO: 96712

SEQ ID NO: 230586 - DNA, 2454 bp, Klebsiella pneumoniae; identical to SEQ ID NO: 25095

SEQ ID NO: 230587 - DNA, 204 bp, Klebsiella pneumoniae; identical to SEQ ID NO: 25096

SEQ ID NO: 230588 - DNA, 606 bp, Klebsiella pneumoniae; identical to SEQ ID NO: 25097

SEQ ID NO: 230589 - DNA, 270 bp, Klebsiella pneumoniae; identical to SEQ ID NO: 25098

SEQ ID NO: 230590 - DNA, 219 bp, Klebsiella pneumoniae; identical to SEQ ID NO: 25099

SEQ ID NO: 230591 - DNA, 558 bp, Klebsiella pneumoniae; identical to SEQ ID NO: 25100

SEQ ID NO: 230592 - DNA, 852 bp, Klebsiella pneumoniae; identical to SEQ ID NO: 25101

SEQ ID NO: 230593 - DNA, 387 bp, Klebsiella pneumoniae; identical to SEQ ID NO: 25103

SEQ ID NO: 230594 - DNA, 555 bp, Klebsiella pneumoniae
atgaacattattaaaacagagattcctgaggtgctgatttttgaaccgcgcgtgtttggtgatgcgcggggtttcttctttgagagcttcagcagcaaggtgtttaatgaggcggtgggccgccaggtggaattcgtccaggacaaccactcccagtcccagaaaggcgtattgcgcgggctgcactatcagctggatccgcacgctcagggcaaactggtccgctgcgtggaaggtgaggtatttgacgtggcggtggatatccgtcgttcatcgccaacctttggcaaatgggtgggcgcggtgctcagcgcagagaataaacgtcagctgtggatcccggaaggattcgcccacgggtttatggcgctgagtgacacggtgcagtttgtctacaaggcgacgaactactacgcgccacagtcagagcggagcatcatctggaacgatccggagatagggattgactggccggcgctgggcgactgcgcgctgtcgctgtcggagaaagatctgcaggcacatactcttgccacagctgaagtctacgcataa

SEQ ID NO: 230595 - DNA, 891 bp, Klebsiella pneumoniae
atgaagatattactgattggcaagaatggtcaggtgggctgggagctgcagcgctccctgtccacgctcggtgatgtggtcgcggtggattactttgataaagagctgtgcggtgatctgactaatctggacggtatcgcgcagaccgtgcgtaccgtccgcccggacgtggtggtgaatgccgccgcgcacacggcagtggacaaggccgaaagcgagcgggagctctccgacctgctgaacgacaaaggggtggcggtgctggcggcggagtcggcgaagctgggtgccctgatggtgcactattccacggactatgtgttcgacggcgccggcagccattatcgccgggaagatgaggcaaccggcccgctgaacgtctacggtgaaaccaaacgtgccggtgaactggcgctggagcagggcaacccgcgtcacctgattttccgtaccagctgggtgtatgccacccgcggcgccaactttgccaaaaccatgctccgcctggcgggtgagaaagagacgctctccatcattgacgaccagcacggggcgcccaccggtgcagagctgctggcagactgcacggcgacggcaatccgtgaaacgctgcgtgatccggcgctggccggtacctatcatctggtggccagcggcgagaccagctggtgtgactacgcccgctatgtgtttgaggtggcgagagcgcacggtgcagagctggcggttcaggaagtgaagggcatcccgacgacggcctatccgacgccggcgaaacgtccgctcaactctcgcctgtcgaatgaaaaattccagcaggcattcggggtgactctcccggactggcgtcagggtgtggctcgcgtggtaacagaagtcctgggtaaataa

SEQ ID NO: 230596 - DNA, 1890 bp, Klebsiella pneumoniae
atgtctatttccagaaggcgttttttatcaggtgcaattcccttcggagtgtctgttggaattatcccatcgaatgctatgtctaacgaacgtaagcatccttttgatgttagtcaagcatctgatttaagtgaaaattccagtaatgctaaagataatatcaatgataacacagaaataatctcagcctccagtgtttatgtgactcctgagatgtttggtgcggttggtgatggtattagtgatgattctattgctttgcaaaaagctattgacttttgtgtcactttttattttaaaacaaacgttgagtatactgaccgtcattgcattaaagttaatgcatatttgattttacaaaaacaatatcgttttacacagacgatttatataccaccatgtcttagggttgagggtgtttctcagtcttatttggtctataatacagctgaagttcctgctctaatcccagattttcaacttgtcgatgggtatgcatttgagacaatgaactttaatacgcatgggcaacttattaaaaaggttgactctttgcctgcgtccgcaagtgatcgaaatactgttacacgatgtcccgggatatatttaaataatattactgttttccccggggaaaaaactttattgaaaggggtgtttaattttaggttggctcatggggctgttattaatagactgcatgctcgattaaaacataatgcagcgaccatagttaatattacatgttcgtggaacggagctatgagggattcgatactgagagcaggagttatccctctgacattacggaaaaatgttactacctggctctttgataactgttattttcaatccactcaaggcgataatccctttaaatggtttactgattatcctgagtttacgaatcagaatgatatgtctaaagcgactgcctgcgttgctagttcatggagttcccctcattttcgtgattgtacgttagagaattcgcaatatggttatagatttttccatatgcaagggggtagtgaatcaggaacatattttgaaaatattaactttgtttgttatgcattatttgaatctgtattgcacatgactcctgcatatttttatcataatgataaaaaaaacaataaatgtagaatggtatttatctctggttcggagagaaactcggcaagtattaacatgtcaaatactaattacttttccaataatatttctccatacgaatgccctggtaatagccgactttctgtttatcataatggcgattttcgaaccaagtgtaagatatcgaatccgcataatattcaatttaattgttactctaccacttatggccagtgtgatatctatgtttctaaaggtggggacgacgcttatcacggatatgcaataaatgcgccagtatctagccttaatgaagcgctgttgcgatgtaaagttggattaagaaataatattaatattaaatccattgctaaacgttcctcaaagttgaatgatagtgttatttcttttgacggtttgattttgtcatttttaggggggggcaataaatccaataaaccaatcgaattttctggtgttgattttcctttaaaattcaaaaattcaactttatttttttccaatttgacttttactagttcaagtcaaatgtcctacttgctagaacttgcgggggtttgctcagtgactttctttaactgtaatatcattcttgactctgtagggagtgagttattcaagttaagtggtgccgctggcataacccttcttctggaaaaatgtagtattaaatctgttgattctattaataagctttctgacaattctcacggtgtttttattagccatcataattgtaattttttatag

SEQ ID NO: 230597 - DNA, 420 bp, Klebsiella pneumoniae
atgaagaaaatacttaccgcgctttgcctgctggccaccgccggcgcctgggccgctccacagctgatagcccaccgcggcggcaccggcgatgcgccggaaaataccctgccggccattaagctggcgctggagaataacgccgaagccatctgggtcacggtgcagttaagccgcgacggcgtaccggtgctctaccggtcaagcgatctttccgcattgaccaatagcgagggcaaagtttccagtttgaccgccgccgagctggcgaaagtcgacgccggctggaaatggggggtgacaaccacccgtggcgcggtaagcaggccaccattccgaccttgcaaagcgttttacagcaatggccgcacacttttttctatatcgatatcaaatctccggatgccgatccgaccgtga

SEQ ID NO: 230598 - DNA, 966 bp, Klebsiella pneumoniae
atgattaatgtatttatatcctatgcaagagaagatgttttaattgcaaaaaaactaaccgaagagcttagtcgatatgattacaatgtatttttggaccaacaatcgattcggcttgggtctcattggcaagaggatatactaaagcatttaaaaaacgctgatgtatttatcgcacttgttactgaacatagcgataagtcttactattttaatatagaggttactggtgctatatcctatgttgctaatagcaatcgggataagcttgttttgccagtggtactggataaagaagctcttaatgatagtgatcttggggcgttccaggcattattcgcacgttctgatgatatgacaaacctcgttaatgaaattgtaaatgctatcagccgcttcgaaggagcccgagtagctcaggaagagagaaaagaaattcgagcaaaagttcttaaagatgaatcagccgattatataagtgaaacaattgaggatcttaaggcgcgcgaaaaagatggtcgtcaattatcttcaagatggcattttgctggatatggggcattagtagcctctgtcattttcgtattaattctttggtttttagctgagcgttcatttgtagaatcacctcttgatactactagactgattttcgatgctattaaaggtgtaacagttgtagcgttacttttgggcttggcaaggtattcatttttaatggcaaaaacgcatcaattagaagctttgaagaatgccgatcgactgcacgcaatttcgttcgggaagttctatatgcgcgttttttctacgcaaatatctcaaactgaattgaaagaagtattccaacattggaatacttcaggggcatcagatttgtcgcatcttgatgtagataaaattgattcacgatttattgaactctttgggaaaatctctgaaaaatttgatattaaaaataaatcttaa

SEQ ID NO: 230599 - DNA, 1098 bp, Klebsiella pneumoniae
atgaaaaagacccgctataccgaagaacagatagcatttgcgctgaaacaggccgcaaccggcactcgggtggaggaagtctgcagaaagatgggcatttctgaagccacattttacaactggaagaaaaagtttggcggcatgggcgtgacaaaactgcgccgcctgcgccagcttgaggaagagaatcagcgtctgaaacgtctggtggctgatttaagtctggacaaggtgatgctcaggaagttatcaaaaaaagttctgaggccggctcagaagcgtcaggcggtgcattttctgcgggaggcttaccgtatcagtgtccgacggggatgcggactgctgatgcagagcagaaccgtttaccactggcagagccggcgggatgatcgggcgataaccctgcgtatccgggaaatagcggaaacccggatccgctacggttgcccgcgtattcatattcagctgcggcgggaaggctggcctgttaaccacaagaaaacacaccggatttactgtctggaaggcctcaacctgcgcaaaaagcgcccccgcaggcatgtcagtgcagcacatcgtcagcaacgtccggtcctgagcggagtcgatcagtgctggagtatggatttcgtgtcggataacctgtttaacggacgacgtttccgggcgctgactgtagtggataattttagtcgggagtgtgtggcgatccatgccggaaagtcgctgaaaggtgaggatgtggtcggtgtgatggaaaggttgcgggtgctgggcaagcgcctgccggtacgtattcagacagataacggcagcgagtttatctcgaaaagtctggataaatgggcgtatcagcacggtgttacaatggacttctcccgccccggaaaaccaacggataacccgtttattgaatcattgaacggcagtctgcgggatgaatgcctgaacattcactggtttctctcgctggaagatgcgcaggacaaactcgacaactggcgcagggaatataatcatgagagaacgcattcatcattaaatgacatgactccggctgaattcatccgaaatctccggaaagacgaagatctctga

SEQ ID NO: 230600 - DNA, 1257 bp, Klebsiella pneumoniae
atgaagccatttttgggacgccttagcaggtatggcagcgtactattatttccactggcgatgatcatctacgatttttcagcctacctgacaacggaccttattcagccgggcgtcattaacattataaatgagttacaggcggatgttacgctggctccagtatcagtcagtttgtatatggcaggcggactggcgctccagtggctcctgggtcctctctccgaccggattggacgccgcccggtcctgctcactggtgcaatgatctttgccctggcatgcctgagcatgctgtttgtcacctcgatcgaacagtactttattgcccgttttatacagggaaccagtatctgcttcatctccaccgttggttatgtatcaatacaagaggcgtttgatgaaaaggattccatcaggatcatggctgcgctgacctctattgttctgctcgccccagttatcgggccggtggccggtgcagcgctgatggcgttcattcactggaaactgctctttgccatcatcggtgtgtttggtctggtagcatggttcttactactgttcaaaatgccggaaaccgttatatctcagggaagagaattcaaaccgggtgaagtactgtcagatttcatcgcggcatttcgccatccagtggtgctgaccggctcactggcagtcgcttttggtaacctgccaatcatcacctgggtggcgctctcccccgtgatcctgattgagcacgggggtatgtctcccggtacctatgcctggacacaggtgcccgtgtttagtgggatcattatcgccagtgtgattgtagcgaatgttatcaaagacccgacttcaccgcgttttatctggggtactgttccgatacagcttgctggcttgctggctttgctggtcggcaacctgctatggccacacgtctggctatggtcagtactgggaacgagcttttatgccctgggtattggactgctctatccggtgctgtttcgcttcacgctcttttctcataacctgccaaaaggcaccgtttctgccacgctgaatattcttgcgctcggcataattgctcttagcattgaaataacccgctgggtttacttccatgccggcggcaggattgctttccacggcgcggcgctgctggccggtatagccgtcatcatatcagttgcccgcctgcttatgctgcgtgggcagcatcagagccagtcagtatcaccgtcaggctgtcaggaacaataa

SEQ ID NO: 230601 - DNA, 393 bp, Klebsiella pneumoniae
atgttttcttacgtgatgctgggtactaacgatctacagcgcgccataaggttctacgatccgctgatggaattgcttggacatccaaaggcaggccgtaatgaagaaggcgcatcctgggggacgttcagcaataaccataccatcggattgtgcgtcggcaggccctttaaccagcaaccagcgagcgttggtaatggcacgatggtcgcactgaatacccactcgtttgaacacatccagcagttgtacgaacttgctatcagtctgggcgccagggatgaaggtacaccggggcacaggccacaatacggacagggattccatagtgcctatgtacgcgatccggacgggaataagctggcgtttgtgttctatgccgatgagggttga

SEQ ID NO: 230602 - DNA, 477 bp, Klebsiella pneumoniae
atgcaaataatatcgtcaagatgcatcattcgaccatttcagtcacacgaaattgatagttttatgctgtatcgtaatgatgctgagtggatgaaatatcagggatttaaggggctaacaaaagaggactatgaatcagcattgctgggcgttcttacgcttactcagggaattcaattggccatcgtcaacaagctgacgcaggttttgattggtgatatctatttacgtcagcaatgcgatgtattttggctcggttataccatcacccccgctcatgctcgccagggatatgcatttgaagccattaccgccaccatcggctggataaaagagaacggtttttcactcatcaaagccggtgtggatccggaaaatacctcttcaataaaattacttatcaggactggctttcatttttcaggcatcgaagagggtgagcatatttatgttctggatttaacaaaaggagaataa

SEQ ID NO: 230603 - DNA, 258 bp, Klebsiella pneumoniae
atgaatttatcccgtcaggaacaacgtaccttacacgttctcgctaaaggtggacatattgcgcacgtccgcgattcttcaggccgcgtcacttccgttgaatgctacagccgcgaagggctgttgctgaccgactgcacgctcaccgtcttcaaaaaactcaaaaccaaaatacttatcaagtccgtcaatggtcagccctaccgcatcaacaccaccgggctgaataacgtccgctcacagctcgataaccgctaa

SEQ ID NO: 230604 - DNA, 297 bp, Klebsiella pneumoniae
atgctgggaaccaacggcctgccacgcgccattagattctacgatccgctgatggagttgctgggatatccccgtggcggccggaatgaggagatcacatggtggggcgtattcaacggtaataatacgacggcactgggtgtcggaaaaccttttgataaacaggatgccacgaccggaaatggtgtgatggtcgccctgattgcgcggtctgtcgaacatatccagcagcttcacgcgctcgctttaaaccacggtagcacggacgagggagcacctggcctgcggaggtggtga

SEQ ID NO: 230605 - DNA, 312 bp, Klebsiella pneumoniae
atgtggctgtcgtctggcgctgcatgcaagctattggcctggtttgaacacgaccagcgctcagtggcgcaacatgtacagatgagctgtgctcatctggatccggaagtcaacgcggaaactcgccacagaaagttacgcagcattatcgacggattggatgtaccggtgataacaagctcctggtactgtgtctggtgcagtgctcattacggtggggataaatactgtgcttcatgtgggacgggcatttacagtattgaagaatccagttggcaactcaattactgctgcgacatcggtcttgaataa

SEQ ID NO: 230606 - DNA, 324 bp, Klebsiella pneumoniae
atggtacaactcaatctggtaaaagtactgctgttgagcaatgaacgcactggcgatgtccgctatgagattttctcgaaggaaggtgaaaatcctgactatccggagaaaatcatcgtttatcgtgagggaaatatcggtgagcatggtgagcgtggctggatcaagactgacgatgttataagtcttgaacacttgggatttcaaaccggtaagggattccagacagcaataacctatcacatgcgccctgcacgagatatatattcagcaatagctgaatgccgacagcactttcaggaaaagttgtgttctgatagataa

SEQ ID NO: 230607 - DNA, 1170 bp, Klebsiella pneumoniae
atggttaaaactattggcgatgcctgtaatattagaacaggtaaacttgatgcaaatcgggcagtgaaagatggtgattatccattttttacgtgcgctgagttcccagaaaaaatcgatcactatgcatttgatggtgatgtggtacttattgctggtaataatgcaagaggtaattttcacgtaagcaggtatcaaggaaagtttaatgcatatcagcgaacctacgtgcttacagctaaacctggttatgatattgattatatttattatgctttaaagcttgaactaaagcggctgcgagaaaaagcgcaggggtcgcaaacaaagtttctgactatgccgattttgaccagcatttcattacgagattttgttgaatctgaacagtcgacagtttcaaaaatattaaagatactggataaaaaaatcgcacttaacaaccgaatcaacgccgaactggaaacgatggcgaaaacgctgtatgactactggtttgtacagtttgatttccctgatgccaacggaaaaccgtataaaacctccggcgggaagatggagtataacgccacactgaaacgggaaattccggcgggttggagtgtaacaaatattggttctattaccaaaactgtattaggtggtacaccatcgacagaaaatgatgattattggaaaaatgcgaatatcccctggcttagttccgctgaaacagcatcttttcctgttgtatcatctgaacagatgataacttcatcaggaattgaaaactcttctgcaactttgttatctaaagggacagtcgttatttccattgttcgttatattcgcccttcaatattaggtatagatgccgctaccaaccagtcggttgtcggaataagagaaaacgacatctataagagttcttttatttactcttacttttgcagtgaagttcctcgattaatgagtttaagaacaggggcgcagcaacctcatattaataaaggtgttattgacgaaagtccaatagctttacctccatcatctacgcttgtagaatactataagttggctaatcctgtttttgataaaattatggctatcgcatttcaaaaccatgaattagttagactccgtgactggctccttcccttgcttatgaacggacaggtcacggttaaataa

SEQ ID NO: 230608 - DNA, 690 bp, Klebsiella pneumoniae; identical to SEQ ID NO: 229500

SEQ ID NO: 230609 - DNA, 840 bp, Klebsiella pneumoniae; identical to SEQ ID NO: 6027

SEQ ID NO: 230610 - DNA, 564 bp, Klebsiella pneumoniae; identical to SEQ ID NO: 62449

SEQ ID NO: 230611 - DNA, 1242 bp, Klebsiella pneumoniae
atgaaaatcagagcagcaaatggttcatattccccatcgaacttttatatgcatatcgaatccaacgaacaaattgaggagtgtgttcggaataacgaacaaacatttgttcatgaatatatacattttttacaggatctaatcctcccatattccatacgaaacacactaacctcaaaaagacgatttcttagtgtcctccttcatgcaaataaagtaaaaaaaattatacgaccattttctgagtgggatgacgatacccaactgactgacagacaattctcttcaacatggggatgcgacgatttcatcgatgaaaatgttaaaatcaaatctttaaagaatgaatttttcacaattgatactggtgctagggtttttaaatatatcttagtcttagaaaacaactcggaataccatgttggggcaagagatttccttgaatatattgcacataaaattgaaactaagcactgggaaacttctcatcctcactttccatatatgactgttgattcgctatttgattttttaggctttgattatgttgctgatgaagttagagtatgtttcgttgaatattgtctatataatgacaacccattaaatatgtttttcaatattattgaagaattaaaaatcaataatatgatttctgttcttgatactttcgattcatgtagtcactacctcattaatcgcccatgggaagcaaagggaggctttaatgaaactatatttaccaaaactcagagaagactatttgatttcaaagaatcattatcattaacttattctggaaacaatttccccaacatccaaagatggatacaacttgttattgattttgcaaaaaccgaattatctaataaatttatatttgccgaacttttcaggttaaatggtgatgattttttcataaaaataaacggtttcattcaagaaataggtatcccccttgttatgaataataatggggaatgtatttccttacttccagaagactttgaccagaatgaatttatgcaacttctaacagttctcgcccttatgatttatgtctcaggcagtgacagaaattgcgcactgatagatttatgtagagtttcaaatcctaatgtcactaatagtctctgcacaacaaaccctatattaagagctcatgatgatgagttgtgtccttttggactactcataaagaactatggtctacataaaattgattgggaatatcattcttaa

SEQ ID NO: 230612 - DNA, 441 bp, Klebsiella pneumoniae; identical to SEQ ID NO: 146579

SEQ ID NO: 230613 - DNA, 1179 bp, Klebsiella pneumoniae
gtgaagggtatgcggaagatcaagaggggtaagagcttcgcaggtgttgttcaatatgcattgaagctgggagcacaccacaaaagtgatccagtcgtcattggcgggaacatgttaggtgattcagcccttgaactggtcgctgaattcgacagcaccaagcatcttcgccaggatgtcgcaaaacccgtttggcacaactctctacgattgcctgacggagaagcattatcgaatgaccaatgggtaaacatagctgacggctacatgaagatgatggggttcagtgatacccatctccgttgctatgtcttacatgacgacgaaggtcagcacatacacattatcgcaagcagaatcgacatggccggtggaaagctttacttaggtaggaatgaaaacctcatcagcacccggattatcagtgaacttgaaatcgctcataacctgacaattaccaagacagcttctgcgattacaccaaggcaaccgaagcgaaaaagaatctctcgcaacgaacaaatgctatcggcccggactggtgttccctcccctaaggaagctctccaacagatacttgataaaagtttggcagatacacctgaccttttaactttgatcaagaggctggaagaggcagaagtcggctggacggctaacattgcctctaccggtaagatgaacggcttctcattcgaataccgcgatatagctttcaaggcttcacagttaggcaagggttactcttgggcaaatcttcaaaagcaacttaactacaaccccgaccacttagaatttctgctaaagggtatacagacgaaggaagctcttcctgctcctgctcctgctcctgctcctgctcctgctcctgctcctgctcctgctcctgcaatagttttgaaaaccgctgagagaaaggaaagtatcggtaaaaaaattgcagaactggaactacggctcagagaagacaaacggaacgaaatcgtagaaaagatccttcaaaagaatgcagccaaacagcaaaagcatctcaggctcaccggctggattccctttttacaacggctcatagagcttctcagaaaatatggaaagagcatcctccacaaggttcctacaaacttctcagaagtctattcaacacatcatctgaaacctacaagaaaaattcgtttatag

SEQ ID NO: 230614 - DNA, 282 bp, Klebsiella pneumoniae
atgataactgtgataattgagtatattttcattttcttatccaaaaaacaattaattaagaatgccagttttggtgttgttattgtcagaggaaaaagtccatttacttacagtctctcccttgaagtcgatttcaagagttttagactgagtttgggaaccgccagtaaacagccccacaacaggaatgaaagtcgttgcattgaactgattgttagacatgaaatatttccattgctcatttccgtcatcgagtgtggttcttgtatcaggctcacctaa

SEQ ID NO: 230615 - DNA, 441 bp, Klebsiella pneumoniae; identical to SEQ ID NO: 191886

SEQ ID NO: 230616 - DNA, 861 bp, Klebsiella pneumoniae; identical to SEQ ID NO: 19455

SEQ ID NO: 230617 - DNA, 1545 bp, Klebsiella pneumoniae; identical to SEQ ID NO: 23311

SEQ ID NO: 230618 - DNA, 639 bp, Klebsiella pneumoniae; identical to SEQ ID NO: 199895

SEQ ID NO: 230619 - DNA, 1596 bp, Klebsiella pneumoniae
atgatggccttgcgatgtctcgaacaggcccttttgcaggttcagaacactggtctcatttataatgttacagccgttgttttcgatgaggcaatgcagatcgggagtaaatattttgaaggtaacgttttggctaaatgtggaatacagcttgaaaaaatatcaaagtttctgtgtgaacataatcttgtgaagtcaggatatatctcatggaaaaaccatgtaaaacagaaagtcaaaaacaattatcttcctgagattgaggattatcaccgaagcgataagttaccagatgaagaagcattgctcgctattgctgatattttttctcaaaatgatgagttactgagtccaagggataagttcaccagttcagtatttgcacttctactttgttgtccgagcagaatttctgaaattttagccttacctgctgattgtgagattacacaaatagatggcaagggtatcgaaagatatggtttgagattttattcggtaaaagggtatggccctaatatcaaatggattccacgggttatgataccagttgcaaagaaagcgattagaagattactttccttatcacaaaatgcaagagcacttgctcactggtgcgaaaagtacccggataaattttaccgacatgagctttgcccaacagttgatgaaaaagctaaattgaccgttgtacaagtttgccatgcactggggtataatttatttgatcataaatcatgtgttttaaaaattaaaagaacgagtttggatggtgggaaaagtttcttaaaccacaatgattacaactattcattgagtaatttgtgggaaattattagttctaattttagcagagattttccatggtatgataaagaaaaatccataaaatttagtaatgctttatgcttgctcaatactgatcaattttctttatcaagaatgacttcaattttcacattttacaaacctactaaaagtttctttttcagtgacatacaaagaaaaaaaagctatgagatgaattataaaaatatattttcccgatatggatattatgatgatgaaggtaaaccactacttattcgctcacaccagccacggcaccttttaaacacaatagcccattatggtgaaatgtctgaactggatatagctaaatggtctggtcgtatcaatgcgaatcagaacagagtttataaccatgtgtcggaagaagatatgttagataaaatcaaagctattaaattgaataggagtaattactgtcaaagggagtcaatacccacaaatgaattgacaattgattttgataaccttaatcaaggtgcaatacacttaactgaatttggttactgtgtacataactatttaatcaagccttgtgcaaaaattaatcatcttattgaatgtgataatgaaacaccggacattaactcagtagatagaattagactgcaatctgtccgagagaaagtaatgcaattaaagagaataactcagatcgcttatgaaaatggtgattatggtgcagacaaatggttgcaacaccacaaaaaaaatttggaaagaattaataaactattgaataattga

SEQ ID NO: 230620 - DNA, 1320 bp, Klebsiella pneumoniae
atgcaaacctatttcgaccaggttgatcgcgttcgctttgccggacccataaccgataatccgctggcgtttcgccactataatccggatgaaatcgtgctgggaaaacgcatggcagatcatctgcgttttgccgcctgttactggcataatttctgctggaatggcgcggatatgtttggcgccggctcgtttgagcgtccctggcaggccgcgggcgatgcgctggaaatggccaaacgcaaagcggacgtggcgtttgaatttttctacaagctcaacgtgccgtattactgcttccacgatgtcgacgtctcgccagaaggcgcgtcgctgaaagaatatctgcacaatttcgccgtgatgaccgaagtgctggcggagaaacagcagcaaaccggcgtgaaactgctgtggggcaccgccaactgctttacccacccgcgctacggcgccggggcggcgaccaaccccgatccggaggtatttgcctgggcggccacgcaggtagtgaccgccatgaatgccacccaccagctcggcggcgaaaactatgtgctgtggggcggccgcgaaggttacgagtccctgctgaataccgatctgcgccaggagcgcgagcagattggccgcttcctgcagatggtggtggagcacaagcataagattggctttggcggcacgctgcttatcgagccgaaaccgcaggagcccactaagcatcagtacgattacgatgtcgcgacggtgtatggtttcctgaagcagtttggtctggaaaatgagatcaaggtgaacattgaagccaaccacgccactctggcggggcactctttccaccatgaaatcgccagcgccatcgcgctgggcattttcggctccgttgatgccaaccgcggcgatgcgcagctcggctgggataccgatcagttcccgaacagtgtggaagaaaataccctggtgatgtacgagatccttaaagccgggggattcaccaccggcggcctgaactttgacgccaaagttcgtcggcagagcaccgacaaatacgacatgttctatggccatattggcgccatggacgtgatggcgctgtccctcaagctggccgcgcgcatgattgaggatggcaagctcgatcagggtctggcaaaacgctatgccggctggcagggcgagctggggcagaaaattatgagcgggcagatgtcgctggataatattgcccgatacgctgagcagcataatctgaatccgcagcctcagagcgggcgtcaggaattactcgaaaatctcgtcaatacctatatctttggttaa

SEQ ID NO: 230621 - DNA, 909 bp, Klebsiella pneumoniae
atgaatattttggctcggcaacgaggatatacagatatctatcagccttccaacggactacagccaaaagaaatttcgtcaattgaaagatatcttgatgcaatccgtagtgatgtgttgtttgctaaaagtgtaattctcgtagagggtgatgctgaattaataataatcccagaacttataaaggtcactttaggtattagcttggatgaattaggtattagcttaataaaattggatgggactgtatttaagcatatttcaaatctttttcatagtaatagattaaaacgctattgcgcaattttaactgataaagatttggcatatgtgcaagaaccggatgaactatttgatgctgatttcgttgaatctttgaaaaacgctgagactgacggtttacgcagagaacgagagttggcagagtatgtagaaggcaatcaatttgtctccgttttttatgcagagaatacgtttgaaacagagcttgttcggtatgatgaaaattccgatcttttcaacagtgtcattaggacaacatataaaagatcaggtgatattgagcgagttgttgcaggtattaattccgatgatttacgggtaagatttagaactgctctttttttcgccaataaaataggtaaagggtggttagctactgaaatggtagagtatctccataatgagaatcgtgttcctgactatatattaaaagcgattcattttgcacttaaagatagagaactgaatgctgtgcttactaaaatgcttgcctataatatgtctttaatgggaactcactgggatgatgtatgcaacaagattaattctgaacctgattttgataaaaagatgcaagagtataggaaacatttcaatgatagcttttctagattttgggagttgtaa

SEQ ID NO: 230622 - DNA, 231 bp, Klebsiella pneumoniae; identical to SEQ ID NO: 139462

SEQ ID NO: 230623 - DNA, 924 bp, Klebsiella pneumoniae; identical to SEQ ID NO: 221105

SEQ ID NO: 230624 - DNA, 546 bp, Klebsiella pneumoniae; identical to SEQ ID NO: 223176

SEQ ID NO: 230625 - DNA, 396 bp, Klebsiella pneumoniae; identical to SEQ ID NO: 100678

SEQ ID NO: 230626 - DNA, 282 bp, Klebsiella pneumoniae
atgatactggtgtgtgctgtccaggcctctggagtggaggaaattctctacaatatctgctatctgctgattattcttatccgcaaacgcaaaatgagtgttcccgtgtattccatgctcgggaagaataaagagcgtagcctgcccaccatgtcggttgagagtatcaacgaattgccgcgcacgtatttcattaacgcgccagagttcctcaccaaaactcgcactctcagaccgtacaacgttgtccccaatgatgaccataacggggatggctgttaa

SEQ ID NO: 230627 - DNA, 252 bp, Klebsiella pneumoniae
atgaaagtgacaaagttcggcaccatcacaacagacggctgcggtaatctctgcgtcagcgacttcatgttttgtgcggaaagccctgatgagataggcctagacccgaatgacccggcaaccaccattccggttatcgcgaaccatctgctgaatattgtgaaccacggaaaggtggagatgaccgacttcaaagtggagcggattgtttctgacgccttgcgtaaggcaaaagctggatggccggaatga

SEQ ID NO: 230628 - DNA, 204 bp, Klebsiella pneumoniae
atggccggaatgagtgacaaagacgaaagccgcattccgctttacgcagcgcagccagcgacggtagtgccgaaagaccatcaaatccgcgaactggttaatcagttgcgcgatattgcgattgaatatcatgggacacagcaacttcgtgaacgcattgcgcgggttctacgcgccgccatgctcagcggaggtaagtcatga

SEQ ID NO: 230629 - DNA, 282 bp, Klebsiella pneumoniae
atgaaattcgaagaatggttatcgcaacaaaacggcgtcattgaggttgattgcggctgtgttaccacagaagctttttatcactggatgcgcgtagcttatgaggctggcaactctcaggtgattccggatggttggacatgcaacgataaagcaaacgcagcgctgatgatgcttgatcggattgaaacggtagacccggttgatgatgaccgtatcgacggcattaagcgcattgttcgtgagcttgcagccgccccgcaggaggttaaaggtgattag

SEQ ID NO: 230630 - DNA, 2724 bp, Klebsiella pneumoniae
atgaccgtttcaacgcaggtaagccgtaacgagtacaccgggaacggcgccactacccaatacgatttcacgttccgcattcttgataaaagccacctgctggtgcagacgatggatacctccgaaaacatcgtgacgctaacactcggaaccgactacacggttaccggcgtgaaccgttacaacggggggaaggtggttcttacatcagcgctaccagctggttacaaaatctctatcgagcgcagcactcctgttacgcaggaagccagcatcaggaaccagggtggctttttcccggagatccacgaagatgctctcgataagttgaccatgctggtgcagcaggcatatgggtggtggtctggtctatctctcaggaagccatcatggctcgctaactattacgacgcgcttaacaaccgcattcgtaacctgcgtgacccgtcacaggcgcaggacgcagccacgaagaattatgttgatgagcagatcgttgacaacaccaatgcatggaaagctggtgatgccattcttgatcagaaaattgatgcaaatttcaacaagtccttgcgtgttccagatgttagtgttgatatgctgccttcggctatgtacaggaaggggaaggtacatacctatgatgtagctaccgggcagcctttacttattgatgctggtcaattatcagtcggtgatatattaaatctatcaagtagcgatggatttaaatatataggaaaatgtaagagtgttgcatctctaaggactattgagccaacgatttcagggcaaagtattattctggagcgtgctgttatcggcgggccattattaaacgcaatcattacgcataacccggccgcatcggatgcggtcgacgatggctatagtcgtttcgttaccgccggcggtgcggtatgggatgctgatatttcatttggtcataacgtgtttctggcagggtattctgacgagctaaataaccttgccgactgcctgaatatgattattcaggataaggttaacaaagtaatttcccgtggctacgttgcgggcggcgtggatgctgagataagaatcccaccgaaccccaatgctgaaggtatgacggatttttacatgaataaaaaaaccgtcaaaatcccgtcgtttttgagggtttattccgcgccgggggcaatttatgattacagcgacttcaccacgggtgtcggcattattggcagtaatgagtttgaaggcctcaccaatgacatgatgtaccggaataacggtggtggatggggggccggagccggtgcctctaacagccataattcgggcggatttattggtaatggctgtttaataaaaggcccgaacacaacctcaaaccccaacgcgaccacctatccgggcgtgcgctggggtaacgtcacgtaccccggcggcgaccaggcccgtttcagggataccaccttctctgatgcgcgcgtatccgggtggggttcagggttccgccctggctccgttaatacctatctgatggatgtggctgcctgccattttacaaataacacctacggcattgatacctatacggcatggagcggtagcactccgcaatgggctaacagtggcgagaaaatttcatttcgtgggtgcctgataggcaacaaccgaagccatgctgtttatctggataaccgcggtgatttcttctacttcgatatgtgtagtattgactacaacggcggggatgtattccattgcagcccgaccaacctcggggaagtgaattacattaacggccacatcgagggtaacagcggattaatccttaactgtccgacgcgaacaacgaatgacggggaaaataacgtcaaaattcgcggggcgaaaatctacccaaataaatccaccaacgataaatatggtggcgtcagggatattgtgttcgggacaaccatcaggacgattctggagctggacagctgcaatatcttctgccgcgcaccgtatgttaacggcgcatacccgacctggaaaagttacaacccagccaacctggcacgtatcatcattaaatatccaggcagcggccagacgtaccgcttcctgccgtcctatgacggggcatacggttatcgaatcaatgacaagctgctgttttccggcactgaaaatgagaacgtccccacatcaagaacgggggatttctggtgcataaaatcaggcggcgcatcatgtgtgtacggcggcgctggtgacgcagacagtgacggggtcatcccaattaaaatcacgctgaactctccgaccgatacggtgcagttgctgttcagccgacaaataacaccggagcggggaacgcagcatattcatggtttttgctcgataaaagcggcggcgtttgccggggcactgaacgtatcggctatcgccagaaccattgccagcgtcaccagaacggtaactgcagcacctggacctgtaacggaaacggagaatctgtacggggtaaaccagagtatttctcaggacattctgacttcgctggcaaaccccacaatttccatcaccaaagatgactacatgggtacccggcctctggctgttcagctaatcggcggtaattactcttatctcggttttctgttcaccggtggcgtcggcaccttctacgtcaagttaccggtatgggcaaacctcgattcgcatccaactatcggctaccagtaa

SEQ ID NO: 230631 - DNA, 195 bp, Klebsiella pneumoniae
atgaccgtgtattacatcagtaaagagaaggacggcgtttacgtcgtctccacaaccgatattaacagcatcatttctggcgactggcctgacgctgagtattttgaatacgcgatggcagcactggtttcttatctgtcgtctcagccagaaggtgaggggtatgtgctgatcgataaaaaatatgaagagtaa

SEQ ID NO: 230632 - DNA, 252 bp, Klebsiella pneumoniae
atgcatcaccctgacccggcactgaaagcggtcattgaagcctgcgatcgcgctatctcgcaggaagattacgataccctgatgagttattacgcagaagacgccgcgctggtcgtcaaaccgggcatggtggtcagagggaaagagaatatccgcaaagcctttatcgccattgccgactatttccagcaccgactggtggtgactcaggggaaatggaggttattgaaggcggcggcaatgcgctggtga

SEQ ID NO: 230633 - DNA, 2907 bp, Klebsiella pneumoniae
atgccttttacacttggtcaacgctggattagcgacacagagagcgaactaggattagggacggtggtagcgctggatgcgcgcatggtcactctccttttccccgccatcggcgaaaaccgtctgtactctcgcaacgattccccgatcacccgcgtaatgtttaacccgggcgacaccatcaccagccatgaaggctggcagctccgcgttgacaaagtgaatgaagagaacgggctgctgtcctacacaggcacccgcctggacacccaggaagcgaacgtcaccctgcgtgaagtgctgctcgacagcaaactggtattcagcaaaccgcaggaccgcctgttcgccggccaaatcgaccgcatggatcgctttgccctgcgctaccgcgcgcgcaagttccagagcgaacagtaccgcatgccgtggagcggcctgcgcggccagcgcaccagcctgatcccgcaccagctgcatattgcccacgatgtgggccgtcgtcacgcgccgcgcgtcctgctggccgatgaagtgggcttaggtaaaaccattgaagccggcatgatcctgcaccagcagctgctctccggcgccgccgagcgcgtgctgatcgtggtcccggaaaccctccagcaccagtggctggtggagatgctgcgccgtttcaacctgcgtttctcgctgttcgacgacgagcgctacgccgaagcgcagcacgatgcctacaatccgttcgaaaccgaacagctggtgatctgctctttagacttcgtgcgtcgcagcaagcagcgcctggagcacctgtgcgacgccgagtgggacctgatggtggtcgacgaagcgcaccacctggtgtggagcgaagaggcgccgagccgtgaatatcaggctattgaacagctggctgagcgcgtgccgggtatcctgctgctgaccgcgacgccggaacagctgggaatggagagccattttgcgcgcctgcgtctgttggatccgaaccgcttccacgattttgaacagtttgtcgaagaacagcagaactaccgtccggtggccgacgccgtcgcgctgctgctggcgggcaacaagctgagcgatagcgaactcaataccctgggcgatctgatcggcgagcaggatatcgagccgctgctgcaggccgccaacagcgatcgcgaagatgcccaggccgcgcgccaggagctgatctcgatgctgatggaccgccacggcaccagccgcgtgctgttccgtaatacccgtaacggcgtcaaaggtttcccgaaacgcgagctgcacaccattcgtcttccgctgccgacccagtaccagacggccatcaaagtgtccggcattatgggcgcgcgcaaaaccgcggaagagcgcgcgcgcgacatgctctatccggagcagatctatcaggaatttgaaggtgataccggtacctggtggaacttcgacccgcgcgtcgagtggctgatgggctacctgaccagccatcgctcgcagaaggtgctggtaatctgcgctaaggccgccaccgccctgcagctggaacaggtgctgcgcgagcgcgaaggcatccgcgccgcggtgttccatgaagggatgtcgattatcgaacgcgaccgcgccgcggcgtggtttgctgaagaagacaccggcgcccaggtgctgctgtgctccgagatcggctccgaaggacgcaacttccagttcgccagcaacctggtgatgttcgacctgccgtttaacccggatctgctggagcagcgtatcggtcgtctcgaccgtatcggccaggcgcacgatatccagatccacgttccgtacctggaaaaaaccgcgcagtcggtgctggtgcgctggtatcacgaagggctcgacgccttcgaacatacctgcccgaccggtcgcaccgtctacgacagcgtgcacgatgaactgatcaactatcttgcggcgccggaatccaccgacggctttgacgatctgatcaaatcctgccgccaacagcatgatgccctgaaggcgcagctggagcagggccgcgaccgtctgctggagatccactccaacggcggcgagaaagcccaggccctggcggagagcatcgaagagcaggatgacgacaccagcctgatcgctttctcgatgaacctgttcgatatcgtcggcatcaaccaagacgaccgcggtgaaaacctgatcgtcctcaccccttccgaccatatgctggtgccggatttcccgggcctgccggaagacggttgcaccatcaccttcgaacgtgacgtggcgctgtcgcgtgaagatgcgcaatttattacctgggaacacccgctgatacgcaacggtctggacctgatcctttccggcgataccggcagcagcaccatttccctgctgaagaacaaggcgctgccggtcggcaccctgctactggagctgatctatgtcgtcgaagcgcaggcgccgaagcagctgcagctcaaccgcttcctgccggcgaccccggttcgcatgctgctggataaaaacggcaacaacctcgccgcgcaggtggagttcgaaagcttcaaccgccagctgagcgcggtcaaccgccataccggtagcaagctggtcaatgcggtgcagcaggacgttcatgcgattctgcagcagggtgaagcgcagatcgccaaagcggcgcaggggctgatcgacgcggcgcgtaacgaagccgatgaaaagctgacggcggagctgtcgcgtctggaagcgctgaaggcggtgaacccgaacatccgtgacgacgaactggcggcgatcgaaagcaaccgtcagcaggtgatggatgcgctggcgcaggccggatggcgtctggacgcgctgcgtctgatcgtcgtcactcaccagtaa

SEQ ID NO: 230634 - DNA, 1281 bp, Klebsiella pneumoniae
atgaccgtaggaattaataccgaagcaattaatcataagaatattccctttaccatgtatgatttagggtgggtggtgctttgcatcggagctgccattggctccggaatcgtctttttcccattacaggttggattaaaaggggtgtgggtctttgccctggccgttatcctgggctatccggcagtttattacatgcagaagctgttcatcgaaacgatggcgcgcagcgatgagcaagattcctacctgagtattattaccagctacgttggcagccgctggggcgtactgcttggcgcgctttactccttcaccatgctgaagtcgatggtggagtatgctcttgccattaccaacgacagcgcctcgtatctgaaaacctttggccttactaaccagacgttatccgaacactggtggtggtctctgctgttaatcgccgggctctctctggtcgcgtcgaaaggagaaaagctgctcttcaaagtttcaggcagcatgatcgccgtaaagctggtgatcatcgtagcgattggtttcgtggtgatccctttctgggatgtgagcaatattggtgcattcccaaccgttagccaccttgtcgtaggtacgttcccgacgcttccgttcgctatcttctccattatgtttgttgggatactaaatccgatgaacatcgcctataaaaaacgtgaagaagataaggacgtggcaaaatataaaattttacgcgtacacaaagtggcttatttagttcttgtcgctaccgtgctgttgtttgtcatgtccatcgtactttctatcagcgaagccgatgcgctacgagcctatcaggataatatctcggccctggcgctggccgccaaggtcattcctggggccacggtgaagtatatgagcgttattctcaatgtgttttccattgtgacggcattcctggcgctctatctggccgtacatgaatcttttgtaggtctgatcaaagtcactgttgaaaaaatagttaagcctcaggaaaacaatagtaaggcgatctcagttgccgcttttgtcatggttgtgctggtgctgtggctgatagtactaacgaactttcccattctgaaggtgtttgtgtttggtggcgtgacttacggacttattagctgcatcattcctggttttattattcttaagaatgacaagttttctgaccttcgtggcgtctcggtttactatgtgattttaatcggcatgctcatgtgcattggaccttttgtcatgctgttttcacaataa

SEQ ID NO: 230635 - DNA, 2415 bp, Klebsiella pneumoniae
atgtttggtttagatgcttttcatctggcacggatccagtttgcattcacagtttcgtttcatattatctttccggcgataactatcggtcttgcaagctatctggtcgtactcgaaggcctctggttgaaaaaacgcagcgcagtttacctggatctctatcatttctggtcgaaagtctttgccgttaactttgggatgggcgttgtttccggactggtaatggcctatcagtttgggaccaactggagcggtttttctcaattcgcaggtagcatcacgggccccttacttacttatgaagtattaacggcctttttccttgaagcaggtttcctgggcgttatgctgtttggtcgcgacaaagtaggacccggcctgcatttctttgctacctgcatggtggctctcggaacattaatatcaaccttttggatcctggcttccaacagctggatgcacacgcctcagggatacagtatcgagaatggtgtagtcgagcctcaggactggataaaaattgttttcaacccatcattcccatggcgtttggtgcatatgacgacagccgctttccttgcaagtgcgttcttcgttggggcatctggcgcatggcatctgcttaagggcagggacacgccagcaatccgcaaaatgttctctatggcgttatggatggcagccattattgcgccgattcaggtatttctgggcgatgggcacgggctaaacacgttagagcatcagcctgcaaaaattgcggcgattgaagggcactgggaaaacaggcctggtgtagccacgccgctcattctgtttggcattccagatatggagcaggaacgaactaaatttgcacttgaagtaccttaccttggcagcctgatcctgactcacagtctgaaccaacagatccccgcgctaaaaagctttccgcctgctgacaggcccaactctaccgtggtgttctggtcatttcgtatcatggttggtctgggactattaatgattacccaaggtattttaagcctatggctacgttacaaaaaaaaactgtacgcctctcgaccgttcctctggttcgtcttgctaatgggaccgtccgggttgattgccatcctggcagggtggtttaccaccgaaataggaagacagccctggactgtttatggccttcaacggacccgtgaggcggtatccgcacacggcgagctgcatatgagtatgagtctcatggcctttattatcgtttacagtgcggtgttcggtgtgggttatatctatatgatgcagctcattaagaaggggccgcaaaccggtgaaggtcagtatctacaggagggggcccggggaagttgcgcacaccagccaggccactttcagctggcaattgtactgaggacggcaatcatgattgatcttccgttaatttggttcggcatcatcatcttctctatcctgatgtatatcgtgatggacggtttcgatctgggtatagggattatatttccgtttaacagaaatgcagaagagcgcgatgttatggttaactcggtagcgcctgtatgggatggcaacgaaacctggctggtgatgggaggcgcgagtttgtatggtgcgtttccgttggcctatgctgttattactgatgcactagcggcgcccttgacgttaatgcttattggtctgattttccgtggcgtcgcatttgaatttcgcttcaaagcgactccagcccataaaccattttgggataaagctttcatttcaggttctatactggccgcgttctgtcagggtatcgttgttggcgctgtgattaatggcttaccggtaagtgggcgagcatatgcagggtcggcatttatctggctcgatccttttgcgctgttttgtggactggggctgctaattgcctatgcactactgggtagcacttggctgatggtcaaaacagaggggcatctgcagcataaaatggcaaaactaaccctcccattgttgctggccttaatggtcgctatgggaatcattagtctttggacgccattagcacatcctcatattgccaaccgttggtttagtttgccaaacctgttctggtttctgcctgttccggtattagtgctgttcagctcatgggggatcgtccgggctgttaaccgctgcgcgcactacaccccctttttcttaacgctgatgctggtgtttcttggtttttcaggactaggaataagcatctggccaactatcattcctccatcggtttcgcttcgccaggccgctgctccagtaatgagtcagtcgttcatgctggccggtagcctggtgattatccccgtcattcttgtttacaccttctggagctattacgtctttcgaggaaaggtcagaacggatgatggataccattaa

SEQ ID NO: 230636 - DNA, 354 bp, Klebsiella pneumoniae
atggagctgaccgccgttcccgccacgcagttcagcagcgtgcagttaacggatattctcaacgcctgttttgaagcctacctggtgcctgttacccagtcggtagagggatttgttcggcgttttagcgccgaggggatgagcctggtcgattcccgcgtctggctggccggagatgaaccggcggcgatcgcggtcgtcgcgcgccggggggagtgccgctcgcctggcggcctttgccctgcgcccggcctggcgcggcaaaggcctgggccggaaactgatgcaggagctgctgatgcttttgcaacagcaggggatcgagacggtattcctggaggtgatccgcgataa

SEQ ID NO: 230637 - DNA, 1446 bp, Klebsiella pneumoniae
atgaaaaccttaaaccgacaaaactttccaggacctcagtatccgacccgtgctattcagttcggcgagggcaatttcctgcgggcatttattgactggcagctggatttgctgaatgagaaaaccgatctggcgacgggcgtcaccattgttcgcccgatcaacaccgtttttccgccgtcgttaaatactcaggacgggctgtataccacgatgatccgcgggttgaatgaacgcggcgaggcggtgagcgaggcgcggattatccgctccgttaataatgagatcaatccctggcaggattttgctggctacctggcgctggcccgtgacccggagattgcatttgtgttttcaaacaccaccgaagcggggattagctatcacgccggggaccggcctgacgatatgccgccggtcagcttcccggcgaagctgacccaattgcttcttgagcggttccgtcatttcaacggcgcagcggataagggctggacaataatcccttgtgaactgattgactataatggcgaagcactgaaggcgttggtgctgcgctatgctaaagaatggcagttgccaacggcattcagcgactgggttgaaactgccaatacattttgttcatcgctggttgaccgcatcgtcaccggctatccgcgcgaggaagcggaaaagctggaggcggagctcggctaccatgatgctttcctggatactgccgaatacttttggttatttgtaatccaggggccgcaggggctggcggaaatgctgcggctggatcgctgcccgctgaatattcgtatcgtagaggatatccggccctataaagcgcgcaaggttgccattcttaacggcgcgcataccgcgctggtgccggtagcatggctgtgtggggtggatacggttggcgaagcgatgcgggacgaagccattcgccattatgtccagcagacgattgatgaagagattatcccggcgctcgatttaccggccgaggagcttcgtcagtttgccgatgcggtcaccggacgctttcttaatccctatattcgccatcaattgctcgccatcgccctgaacggcatgactaagtttcgtacccggatcctgccgcagctgctgacgactatccgccagcaaggcgcgatcccgccgcggctaacgtttgctctggcggcgctcatcgccttctatcgcggtcagcgtgacggacagacgtatccgctacaggatgacgaagtttggttaacccgctttgctgaaggatgggctcaggtggcgaacggcagcccgctgcatgaactggtcacagaagtcctgcaggatgctgcgcactggggtgaggatctgacggccattcacggccttgccgaccaggtcacgcgctatctggaaatgattttgcgcgcgggtatgcgcgaggccctgtcgcggctgtag

SEQ ID NO: 230638 - DNA, 1104 bp, Klebsiella pneumoniae
atgttaaatcagtattttttagatgagagtgggaatactggggatttggttaaaaaaccaccggatttgaattttgctaaccaaccattttttgcattatcttgtatcggggttcctgattgcgatgatcttcaaaaatatattgattcattaaaaagcaaacacagggtccaaggagaagagttaaaatctaagaatctatataaatcaaaaccaggattcatctatgatttatttgattatattgcaaaaaacaaattgccattttatgttgaggttgtcgataaaaaatattgtattgctgtctcaattgtcaatcatcagatttgcccgccatattttcaacagtttgattcagaaatcaatgcacaaggatttcgtaacgaactatctgattacttgtcagagaatctaccactagattgctatatgtctttttttgaggcatgtatagataagtccgaagccgctttgctagcgtcaatgaaaaagttgagaaattatttcagaagtaaagaatttacttttaagtacaaatctgatgctgtacgctgcctgcaatctactatcagattttatcattctaataaatcatcaaatactgatttgataaaaaatcttgttcctatacctgacattaacaagaaatgtaatgaaatacatttattgcctcatgtgcattcatggttcaatattatgggcaaagtaaataagtaccataatggtgatatatcagatgtgacattttttcatgacaaacaagatcattttgatgatattttgattttctgctcggagcaattaaaaaactcaaacgtaaaaaatccattcgattcaacaacggattttaatataaaaacggacctgaatttaaaattcccagactcaaaaaaatctgcgggaattcagcttgcagatgttctggcaggttatatctcacgctatgtcatggagtatctttacgataattcattaaagaatgaattgtatcatgatattttttctgaattgatagcttgttatggtcctgataaaaactttggagttaattttgttcttccaatcaacaggaggagtgtgatttttaagaaatttaatttataa

SEQ ID NO: 230639 - DNA, 183 bp, Klebsiella pneumoniae
atgttatctatgatttatgaaaatccgtgggcgacgatttttcagctgactgttgccagttgctgcctcaacagtattattggcgcattgctcggccaggaatcgcgacaaaaacaggcaaaaaccggcaccctgaatgccggtttttttatgccattttttcgaaatccccctattttttag

SEQ ID NO: 230640 - DNA, 573 bp, Klebsiella pneumoniae
atggcaatggtcaatgaaaatatcgtcattcgtctggcgcaagacgtagacatccctgaggtgaaacaactgctggagcgctatcacgcaaaaaatcttgcaggcgagcaacgggcgaatggatttgtcaccaccgatatgacggagcagcaattaagcgaactaagttcagccgaaagtggtgtggtgatcgccgttgatcgttcatgtgacaaggtcattggtctgctgctcggcggatcgtgggaatttctcagcccgtggcccatgtttaaatacatggcaagtattctcaacgaatatcgctaccagggggaaaaactggatgcagtaagctcatatcagtatggccccatctgcgtcgcagaagagtatcgtggccggggcgtgggcgagatgctgcttgagtatcagcgcaaggtgtttgcaccgcgttatcccgtcatcgttacctttgtcaatgtgctgaacccgcgctcgtatgcgtttcatacccgcaaccagttcgaagacgtcggtttctttaacttcaatggcaataagtaccacatgatggcattaccgacctcctga

SEQ ID NO: 230641 - DNA, 1155 bp, Klebsiella pneumoniae
atgactgcaaaactatgtttcttccccgtaggtaatggggatatgacacttattcaaactgaagatggaaaaaatatattaatcgattgccgtattagggatggagaagaacatcctgatgtccgctcacaacttagagaaaaactctctcgagatagcgaagggcgtcttttcgtcaatctttttatttggacgcatcctgattcagatcattgtgatggagtatctgatcactttcacttggggaaacctgaaaattggagtgaaaagagcgataaaatttttatcaatgaaatttggtcaagcccaattgtatttagacgccatcatgctcaaaatcacccattatgtgatgatgcaatagcgttaaatacagaagtgaagagaagagttaatctttacaaagagaagggctacttggatggtgtcggaaatcaagtcttggttttaggaaaagacgagaatggtaaaactgatgatataccatatattcttttagaattagataatacaaccagttatattaacggagaatcttcatcagtttttcaagcccggttattaggtccatcacccaagaaagatctcgacgagttagaagataaattaggtaaaaatcattcgagtgttatcataaactttgaattaaaaggtgataacaaaactgcttattttttaagtggaggtgatgctgaggttgtgtgctgggaaggtgtgaaagatcgtctgtcagacaagaatgaaatgtcatggttagattatgatatcttacaaacaccacatcattgttcttggcacagtatatctcatgatagtctaagccaaaaaggcgatgatgcaaaaacctctgaaaaagcaatggaggtatttaaccgtgcaaaacaaaatgctttcattatatcaagttcgaaaacaattgaagacgatgaaaaagatcctccagcttaccgagcaaaagaagagtatgaaaaaataacagatgataaaaacggtcaatttctgtgcgtatctgatcataaaaaaaatgggaaaaatgttcctttggaaattgaaatttccagtaatggtattaagaagatagcggcatctacattaggtatggcagaatcatctaatactgtcgtaaatagacaaggtggtggtggttatgcctga

SEQ ID NO: 230642 - DNA, 1356 bp, Klebsiella pneumoniae
atgtcttttgattcccttggcctgaatcccgatatcctgcgcgctgtcgctgagcagggctacgttgagccgacccctatccagcagcaggcgatcccggcggtactgcagggccgtgacctgatggctagcgcccagaccggcaccggtaaaacggcgggctttaccctgccgctgctgcagcgcctgatccagaatgagccgcacgcaaagggccgtcgtccggtgcgcgcgctgatcctgaccccgacccgtgagctggcggcgcaggtgggcgagaacgtccgcgattacagtaaatacctaaatattcgctcgctggtggtcttcggcggcgtgagtatcaacccgcagatgatgaagctgcgcggcggcgtcgacatcctcgtcgccaccccgggccgtctgctggacctcgaacatcagaacgccgtcagtcttgataaagttgaaatcctcgtgctggacgaagcggaccgtatgctggatatgggctttatccatgacatccgtcgcgtactggccaaactgccggcgcgtcgacagaacctgctgttctcggcgaccttctccggcgagatcaagggcctggccgagaaactgctgcacaacccgctggaagtggaagtggcgcgtcgtaacaccgcgtccgagcagatcacccagcacgtccattttgttgacaagaaccgcaagcgtgaactgctgtcgcagcttatcggcgaaggcaactggcagcaggtgctggtgtttacccgtaccaagcatggcgccaaccacctcgcggaacagctcaacaaagacggcatccgcagcgcggcgatccatggcaacaagagccagggagcgcgtacccgcgcgctggccgactttaaatccggcggcattcgcgtgctggtggcgaccgatatcgccgcccgcggtctggatatcgaagagctgccgcacgtggtgaactacgagctgccgaacgtaccggaagattacgtccaccgtatcggccgtaccggtcgcgcggcggccaccggcgaagccttatcgctggtgtgcgtggatgagcataagctgctgcgcgatatcgagcgcctgctgaaaaaagagatcccgcgcatcgcgattgccggctatgagccggatccgtccattaaagccgaacctatccagaacggtcgccagcagcgcggcggcggtcgtgggcaaggtcaggggcgcggcggccagggtcagggacgcagcggacagccgcgcagccagaataatgccccgcgccgtcaggacggcgaggcgccgaaagcgcgcactcaggacggcaaaccgccgcgccgccgtcgcccgcgtaaaccggctggcgaataa

SEQ ID NO: 230643 - DNA, 570 bp, Klebsiella pneumoniae; identical to SEQ ID NO: 14276

SEQ ID NO: 230644 - DNA, 1653 bp, Klebsiella pneumoniae
atgtccttagagtttatcaaagaacagttgtcagattttatctcatctacagaaccagaagtaatggctatacagggtgaatggggaattggtaaaacctatacttggaatacgttcctaaaagataataaagataaggttgcatttaatagatatagttatgtctctctttttggtataaattcactagattctttaaagtattctatttttgagaatgcaattacaaaggaatatattggaaataaacctgatttggagacagcaacaacaaacgcaagtggactttttgaatcgttttctcgaaaagccgcaggtttgttaaaagaagctcctgttgtaaaaaacttctctacgacacttgaagcaatgtcatttctgaccgtttctaaaatgattgtagtaatagatgacttagaaaggcgtggcaaaaacttagatgttaaagatgttttagggctagtatctctattaaaggagcagaaggattgtaaggtggttctattgcttaacaatggcacagctagtatggaggattattctacttataaagaaaaggtcattgatagagatatcacttacaatccaacaccagaagaatgcgcagatatagcctataaaggtgattttcatgtttataacttgttaagtaaatattccatttctttaggtatcaagaatattcgaatcttaaaaaagatagaacgttttttcgtgtccttaacaccaaatattataggtgatgttgagacaatttcaaatgaagttgcgcattcattaactctgtattgttggagccattacggattttctccagagggagatgtgccatcactagaatatattaggggagtgaggaatatatatacttataatgacaaggaagaaggccatgagaaagtctggcttaataccttgcttaaatatggatatagaaaaacgaatgatcttgatgaggttcttattgatatggttagatatggctatcttgataagagcagtttccaaagacaaataagcctaaggaatgaggagattacgcgtgataataaacgaggttccttatctgaggcatggcagttctttcataattcatttgatgacaatcaaaatcaggttgttgacaagctatatcaagcggtggttgatgggatgaagtatgtgactccaagtgatttagataatgttgtcggactatatagggatttcggagagaatgctaaggcgagtgaattgattgaacagtttattaattatggtaacgatgctctaaaggaatatgttcaatctatttatgtgaatgttcatcccgtaagagatgctgagttgttgtcaaaaattcaagcctattctaatattataaatattgatggttcaatatatgatgttcttaagaaattatcaggtcagaatggttggtctgatagacatgaggaaatattggatgctgcttcagtagatgactactatcaattatttaaaaatgtcattcttgatggtggtgattcaataatagctacggcgcttaaattcggaaattatagtaatggttctgatagaatgaatcgtatagggaaaaaggcaagggatgccttgataagaattggagatgaatcggcgattaataaaatacgtgtaaggcgatttttgtga

SEQ ID NO: 230645 - DNA, 429 bp, Klebsiella pneumoniae
atgacgcgtgcgctggcagtagtggtggcactggcactcgttgcgctgggctggcagtcgtggcggcttaacagcgccagccacaccatcgaaacgcagcgcgcggcgctgaaaagtaaagcgcaggaactgacgaagaaaaacagccagctgatcggtctatccattctggctgaaaccaacaaccgggagcaggcgcggctctacgccgaagcagaacagaccagtgcactgctgagacaacgacaacgccggatcgaggaactgaaacgtgagaacgaggatttacgccgctgggctgatactcctttgcctgctgacattatccggctgcgggaacgtccggcacttaccggaggtgcagcttaccgtcagtggttgtccgcgagtgacgccgtgttggctggagcaggctgcgccgcgcactaa

SEQ ID NO: 230646 - DNA, 780 bp, Klebsiella pneumoniae
atgaacgcactctctgttttctcgtttcaggaaaaccaccccgtgcgggtggttctggttaatggtgaaccctggtttgttgctgctgatgtctgcaaagcgctcgatatcgctgataaccgtgctgcagtgcgtaaattggatgatgatgaaaagggtgggtactcattacccacccctggtggggtgcagtctgtaggtattgttaacgagtccggtttatacactctgatcctccgctgccgcgatgcggtgaagcagggaacgacggcctggcggttccgcaagtgggtcaccaacgaagtcctgccagctatccggaaaaacggtgaatacagctacgtcgaaaccaccccaaaaagcgccggcgaaccattggactggcggcaaaaggaagaattacgcggcctgataaacgatatagcccaaagttttcagtatcgaaacgcgtggatcagtggtgtttggctggcgctgcgacgtgcctgcaggaatccatcacctaacccaattacggttgacgatctgccggctatcattgccgaattacgccgaatattaacggcggcagaaactgccctaggtaatatgcgagtttatgaacgggagctgctgcgcgaggtagttcgtggcgggcgccagagtatgtcgtgtgaagaattgcctataactgatatcaatacggaaatggagaaggtgctgccagcgcattttgagctggccatcagtaaactggagacgctatccacgaaattaacgcccccggctatcacctcctga

SEQ ID NO: 230647 - DNA, 1134 bp, Klebsiella pneumoniae
atgcctgaagaaacattgactgtcgtaggtggtggtaataacagctgtaatgttagctggggtggtggcaatggtaacaacggtggtgctggctattctggtaaatacggtggtactagctatgaaggtgcaactagtatgttgaagttgaatgaccgtgttttaattcagctttatctttgcaatccgcttaacccagattatattggagcaccttggggcagtgataaagatgcagaatcaattatcagagctaacagagataaagcaggaaagttcaaggctaatattcagaactggaaaacaagcggtacaggttctttaggtagccctgtagttgggaaatcttatagctcaggtgatgtagatacttattcggttagcttcggaaaagaaaaatacaatgtcctgtataaccgtaaaaaagactcttttactacagcttatgtcgatggcggcgcaaataaacctgagcatagcatgaaggatcaggctattgccgttgttaaactttaccttctcaacgaaagtcaggcatcggtaatcgatactacatcgggaattattactgactctggtaaaactcttagcgggaaattaggtgataaatacaacactctggcgaaagaagctgctgacaatataaaaaacttccagggtaagaaactccgcagttttaatgatgctatggcatctattaatgaactagctaacaatccaaagatgaagttaagtcaggcggataaaacagtcgtttctaatgccctcaaacaaatggatttgtcagcactagctgaccgattcaaagggttagagaaagcctttacttggggtgatcgacttcttaaagccgagaaaatcagagaaggtgttgttactggtattaccacaggggactggcaaaagctggcgtttgaggttgaagctatgtacctcagtggtgttgctggcgccgtagcgttagggattactactgccatgattagcacagtcgcagtcgctttgtcacttccagctgtagctgtctctgcgcttactgttgtgtccgtcattggcatctctattctcacatcttatatcgatgctgataaggccaaagcactgaataatgcagtgcttggcttatttaaataa

SEQ ID NO: 230648 - DNA, 525 bp, Klebsiella pneumoniae
atggaagggaaggggctgttcaaatattcattaatttcattactattagggataatcccaataataacaatattttttatttattacagcaatgaaaattcacacatcatttcatacctttttgatattgcaaatggatatcaaagggatttttcagaacaatatttagccgtgagcactatagcttctgcatatactaaaaccgcaccatttttcgtcatattaatgtatataatttgctggaacaagtttgatataaaaaccatcaaactcgatttgaagcgatggcttaaacttctgcctggtgtactccttttaacggcaggagcatactatttaacatatgttggtgtggaaaatatgtctgatagtatgtaccgtattaaaagaattatctctggcaatgaatatttcttaatggtttattacattcttttatttttgacaaattatttttttatatggttatttttcctttatttatatcttttaaaagggttaccttactttcaaaagcggagataa

SEQ ID NO: 230649 - DNA, 207 bp, Klebsiella pneumoniae
atggctaacttggtgctgttactcatcgtcgccctgtgtctactgcagcagtgggttgcctatcgaacctggcgcgctttccgggaaagcaggttggtacgccgcgccctgtttaagggagaggctttcgctcaccgctaccgtatgtggcagcgggtatatcgggaaatactgatgaccggagggaggaaagatgtcgactactga

SEQ ID NO: 230650 - DNA, 4005 bp, Klebsiella pneumoniae
atgaccttacaagaattctatgcggctcgcttcggtagcgatccgtattcattgcttgaagcagcgcgggatgagctgtcagagctggccacaatggctggcattaactggacagcatgcgctgataacattcagttgaacccgcgcggcggggaagaacgttattcaaaatataacggtggcgcccccgaggctctggaaaagagcctcaaagggcgtgtggaaatctactcccgcaaggaacaacacaaaagcggcatcagctacccattcgtcaactttgtccagaaagggcatgacgaaggttcctggagcggcttctccttcctgttcgccgaataccgccgtgaacaacaaagaaaccatgcgaccgtggtcgcacaacctgctgaagaactggcgcgtattgaacgccaggcagaagcccgcaagcgccgcgccgaacagcaacggataaatgaacttaaaaacaatcagttagagcaagagcggttgctcggatggttggcgttccacagtgcatgggaacatgcgccagctgaggacgggtcgtggccttacgcagtgaaaaaaggcattcgtgacgtattcagcgcttgcgatattcgtcgcgtgaccagtcacgacaacgcaaaatggagccgtggaccgactacatacatggcgattccgctggcccacctggacggacgcaaagacggacgaattgtcggctggcagcgtatcgaccagcgcggcggtaaattccagaccagcgcgatcaccagcggtgatttcgtcggggcgtgctttgttatcggcaacctgaacggcgcgcaaaatattgcagtggtggaaggtttcgccaccggcgcgtccgtatggctggctacccgtaaggacccgaaaaaaagctttgatgctgtcgtggtcgctgtggccgcaaacaacatgatccatgttgttgagcagctggtgaacatgtacccggcagcaaaaattacctgcgccctggataacgaccgcaaatcatcggctgaaggtaaaggcaacaccggcttacgtaccggcttcgacattctcgcaaaatttagcggcatcaaatgcgtttatcccacctttgaagacgatccccagctggagtgcagcgacttcaacgacctgcatagattacgtggactccgcgagacctgtcgccagctattcgccaaagggaaccgcctgagtaacagcactgatttgctgtccctaacgctaaacaagctgaaaacggctaaacgtgacaaccgcaggacgtttgctaaagaactgctaaacgcggtggatattggcatgctgacctgcccggtaccgaatagcccggcggatctgtttaacatgttctgcatcgtgctgcgtgatatgggactggaaagcgtctatcgcgccacggttaaagaccacatcgcacgccgcctgaaccgcaaatgccgtactgcccaggcaccccgttcctttagcgagcggatcaccgacccgaacaagcgtccccagcacatcacgtataaacgctttgaaacatccgtgatgacggatgaaattctgcaatacgtgcagcagctgcagggcatcgttattgttcgcgccggtatgggatcaggtaagtcgacaggcctgctgcgcccactgatgcataacgctgatcgcggcgtttccgttgcgcaccgcgtaagcctcatcggtggcctgtgggaaatgatgacagagcagaaagggaccaaggccgatattctgcattaccaggaccccggctatcaggaaatggcgccatacgccaataagctgaccatttgcatcaactccatcgtcaaaggctgctggcagccgctgatgcgccagcatgactatttcggctttgatgaggcaacgcagggacttcgcgccatcctttctggccgcgcaatggagaacccggtcgccgttttcaatacgctgatcgacgcgctggccagaactgaattgcaccccatcatggtagacgcagatgctaacgatctgctggtcgacctggcagaactggcgatgaagcgccgcgaagaaatgggcctgccggcatggttacagattcacgtcatcgagctgccggtcgacgttcgcaaccgcgaaacgggcgaacctatccgcgtattctacaccgagaaagatcgcatcatgaccgaggtgattaaagcggtggaactcggtgaaaaaatcatgctggcgaccgatagctcaacgtttgccgaagacgttaccgccacgctgcgccagcgctacccggagaaaaaattcctctgcgtaaaccagaagagcaagccggaacccgaggttgaagaattcaccaataaaccgaagaagatggtgaagaagtacgacggcctgatttacagcccgtcgatatcctccggcgtctccatcgagcaaaagcatttcgaccgccatttcggcatgttctgcggcgaagtggtccccagcgatgcgatccagatgctgcgccgcgaccgcacagccaaagagttcatcatcggttttgacaaggttcgcgcacgacgcgaaaccgatccgcaaaaaattgagcgtgcgtttgtccaggcattgctggccactgccggcatgaacggcgaactaaccgacgttgttttcgacggcgaccgcatttctatgggtgtggccaacaccgattttacccggatgaaaatcaaggcagcagcgattgaggcctccgcgcgtaatgactacgccagcaatatgatctgcataatgcacagcgacggctacaaggttgcccccctggcatccgacgagctggcgaactgcgtcggcaaggagctgcgcaaggaagcccgcgaaattgtctgggaacaaacgctggatctccacctgaatatcgaaacgccgaacgaatctgaacgggaagccattctgaagaaacgcgccctgaccctggaagagcaggcgaagctggtccgctgggatatcgagcatgagctgaaactgccggtcaacgaggacaacctgaaattctacttcgacggcgcccgcgataaggttcgccgttatgaaaccatgctgctcgatgagatcaccgcgcggcgtttcgaccgcgaggaatccgcgatcaacttcacctacgctttcaggcaggcgggccaatggcaatactttaccgccaccgcgatgacccgcgagcaggctgatgaagcattccaggcgaaacaccctggcatcaccgagtacaaagtcaaatcgacacccgcggtcgaggtcggtatgcgcggcttctacggcctcaaatctacggtgctacgccagtacttcattgactgcggcatcgacccggaaaccatgaccggagaagccacccaggcgcgcctggcatacgccagggataaactcatgaccgccgaacggagagacctgttaaacaacgtcctgcgcattggtggctttatgacgcccaaaggcaagccgaaggtccccgaggcactgtttaaaaccatctgcgagtcgctcggcctgaaaaccgacaagcgccgcgccagggacggagacaagcgcccgaccatacgctttgtggatcagcagtcggcggcgttcatgatggaaattctggagaaccgtaaagacgacggcctgtctctgcagttgcgtaaagccgagaaagccaccaccgaagtggatcacggtttagatctcaatatatatatggatcataaaacgcgatccacaaacgagcaggatttggacgcccctcattcagtaataactgaggcgctggccgagctgccggtgccggtgccggaggcctgggcgatgaccgcgctgtctgatgatgagctggccactatgacctcctggtcgcctgccagcatagcgatgaccttcgcgtccctgtacctcacagagttcatggaccgcctctccagcaacgaactgcgccggctgcgtgaatacatcaccggcacggttacgggcggctacgacgcgcaggaggcgttctatggctaa

SEQ ID NO: 230651 - DNA, 639 bp, Klebsiella pneumoniae
atgaaaacgccactcacgtatggtgcccaccgaattcttcacgatttgttttcaaaaggcgcgatgttcaaaggtgcgttaagccgtgaaaaattacccgaactggaagagcgtggctttgtcgctactaacgccaataatcttgtatatctgacccccaccggccagcaatatgcaattgaatcctttattggtgagcattccaaagtttcgcaaggtctttgcggcaataccatcgagcaggaaacactttcatcagtattagcgcattacctgcccaacactcctctggataaagccagagaccacgctgtgatgctggcctctgcggtcaaagcttcttttgcagaattgaagcactccaccggtggtttcgtaatttcccgcgatggcgccgctcaggttattggcgaaaaaatttctgaaacaataatccctgcgtcggcctttaaaccgagcacagatggaaaggaaaagcggggggcaacctttacgataaatattgaggtggatgccagcaaagccattcaagcgcttgatgagttcagccatgcattcgataagcgcatagcctccgcgttagaaaaaggacttatgccaggcggttcattatggtttgcgattaagagtcaacgttaa

SEQ ID NO: 230652 - DNA, 429 bp, Klebsiella pneumoniae
atgtttaatcgtaatgaactgaccatctctatgttttatgcatccactactgatgctgatggcaaccgtatcgccactattaccctacaggtgaatgatacagaaggttcgccagtacaaagcagccagttattgtgtgtcactgataaggcaggaaagaaaacgtattcagtcggtgagcaaagcacgaagaatggctctgaccctctgttggtggcgattgagaattactggcgacagaacaccccagcggtcactggtagtctgatgtcggatgtcactgacttcatcaccggcaatgtaaatcagtcttcaacgtgggttggtttcaatggcctgaagatcttcgatggtgttcagctggatacccgcctccctgaaagcgtgctacaggctgatggtagctccgctacagcgacagggtcctga

SEQ ID NO: 230653 - DNA, 201 bp, Klebsiella pneumoniae
atgagttacaccagctgtacctattgcggttcacgtctccatacgcgggctaactgcccgaaaacatggggcggctcatcgcgtcgcgcccagctgcgctgcagctattgtggccagtccgggcataactcgaatgcctgcccacataatgcgagcagcggtcggcggcgcagcctgaatgacgacttccacctcgactga

SEQ ID NO: 230654 - DNA, 366 bp, Klebsiella pneumoniae
gtgaaagacaaagattacctgtccacgctgaaatccgcgttgcttaaatcggagccaaccgtcattaaaaccgagttgtttggcgctaccgtattcatccgccgcctgaccggggattacctcatcagctacgaagagaaaatggctgaaaccgcaaaagctggcgcagcgcgcgaggcatcggagcaagtcatccagatcgtcatcgatgcactggttcagccggatggaacggccattccggatgagtttaaacccacggcagccgagctgctgaaggcccatgaaaaccccgaactgctggctgcagtggaaaaagtgaagcaacacgcaatcggcaagctggaggaagcggaaaaaaactga

SEQ ID NO: 230655 - DNA, 339 bp, Klebsiella pneumoniae
atggctattgagatattcacctggagtccgcgggttaatccccagcagaccgttaactttcgtgtccggaaggcgcagttcggtgacgggtatgcgcaggtatccggcgatggtattaacacccgatcacaggattgggagctgagttttgtcggtacggaggactatatccgtccgattaagcagttcctcgaccgtcatgccggcacccgcgcgtttcagtggaccccgcctctggaagaggtggggctttaccgctgcgaacaatacaaaccggtgccgctgggcggcggaaattactcactttcagccacttttattcaggcatttaaaccatga

SEQ ID NO: 230656 - DNA, 711 bp, Klebsiella pneumoniae
atgcgtcagaaaacgattaaggccatccaggaacatgcggccgcagaatatccgcgcgaggcctgcggcctcgtcgcccagaggggccgagcggagcgttacttcccctgccggaacctggccacagagtcgaaagataattttgtgctggcgccggaggattatgcggaggttgaggaatggggaacgatcaccggtattgttcacagccatcctgatgccactacccagccgagcgaactggataaagcgcaatgcgacgcgatccttctcccctggcatattatcagctggccagaaggcgatctccgtaccatccacccgcgtggtgagttgccgctcctcgagcgaccattcgtgctgggtcactacgattgctggggcctggtgatgagctattttcggcaaacccacggcatcgagctgcacgattaccgcgtcgattatccgtggtgggaaaaggagtatccggacaatttttatcaggactgctggtatgaatgcgggttccgtgagtttgatggtccaccgcaaccgggtgatatggtgatcatgcaggtgcaggcggataagtggaaccacgccgggattctgctggaagggaatatgctgctgcatcacctgtatggccatctcagcaagcgcgtgccgtatggtggatactggttagataggacgatgaaaatcgtccgataccattctctgtgttaa

SEQ ID NO: 230657 - DNA, 309 bp, Klebsiella pneumoniae
atggcttttggctacaacgcatgggatgccaatggtgtcccaaataactatggaatcaagcctgtatctgttacaggctttttttttattgacgtaaatcagaaatcaggacaatgggagttttccattccgcagggaagaaatatgtcgtttttctttgttgggaatggggaccagccaggatcatcacgtcggcgcattactcaatcgggaaacgtgatcaccatttctgatgccagtgatgaggatttctccgcaggaacctacccggcgactcgcgggtttatcattgttcaggtagtgaggtag

SEQ ID NO: 230658 - DNA, 648 bp, Klebsiella pneumoniae
atgagttatggtgtcacgcttactgtacccagcggtgaaatgtgggttactccggatagtattccgctagcgctgtattcgaagcaggaaataacgcttaggggagggacaaattctgatgaattcagagcggtaacttatgaccagacaaaaccaatgatagcttttgtctgtttcactaacggccaggcaaaagctaataccgtttataacggaaacgaatgtcgggtagtgttttcctacggaagccagcaagccagggcagaaatttatttcttcaccatatttccacaaccaaagccagactatggtctggcaatttgggatgcatcagggactcttgttctaactgataagacaaggatactaacggacgtgcaaagctacggtgaaggatacaatataaacataacgaatgaggggaaatgggcagtctccccgctggccctaggtctggttgttggtgtggttaatgatccactgccgaggccatttcagggggagtatcatgcttatgccatttttaacgggtcaagtaccaatattaggggcatggtgacgcagatgcctggaggtaacatatcgggagtgacgtaccttaatatgcgtaatcattgtcttgctattgagtgttctaaatatgactga

SEQ ID NO: 230659 - DNA, 1146 bp, Klebsiella pneumoniae
atggctattatcagtgacgaattagcgaacagtattcagaagtgtttcgaccgcacctatgtagatttagcgaaccaacaacaatttttattcggcgccggagatgtcacggtcacgaaaccggacggaacaacggggacggtaaaatcgtgggcgcagttcctcagcgaatacagttcccgccagactgctatcgatggcgcgatcacagcagcagggaagaacgttgccagaacgtcatcaaccaacacgttcacgcagcctcagacattcagcaatggcgtcacattcagcgccacaataaccgctgctgggcaaatactccggaataacagcggcacacaatttacggcgattgatgccggaagtctggaaatcagcagcgataccacgccctatattgattttcatcataaaggtagcgtagcggattatacgcacaggattatcacggaagacggtgcgctggccgtctaccctggccttcgtgttcgcggtggttttggtctttatggcgtggggacggtttacggtgatgcttattcgcagggatttattgcgcgtcttaataatgatccaaacgcatctattggagacattcttgcttctccgcgtttcacggttcggtttaactcacgaggcagtgacagtaacgtagacggcgggcagggggcaatgtggtttgaagagcaggtgggcaccaaccatcgccttgtattaatggccggcgggtttagtgccaacgttcagtactggcaatttctggcagacggcaggatttatagtagccagaacggaaacgttcaatggcaaggaacatccgatgcacgcctgaagcacgatattgaaccaacagatggccagttgtctgtcgaacgtatccgcaagctggagttggtcacgttcgtctataacgatgacgagcagaacaggacacggcgggggattatcgctcagcaggcacagaaagtggacccgcagtacgttaagcaggtgaacacgtcatacatgaggaacggtgagcaggtaaacgacgatcgcctgcaattggataataacgtgatcatgatggacacactggcggcggtaaaagtactgcttgagcgagtagacgaactagaggagcgattatcggcacatggataa

SEQ ID NO: 230660 - DNA, 1146 bp, Klebsiella pneumoniae; identical to SEQ ID NO: 230659

SEQ ID NO: 230661 - DNA, 648 bp, Klebsiella pneumoniae; identical to SEQ ID NO: 230658

SEQ ID NO: 230662 - DNA, 12159 bp, Klebsiella pneumoniae
atggcaaataacataattaaagggcgcaagggtggcgactcaaaaccgcgtacaccgacggaacagccgaatgatttacagtccgctgcgaaagccaaaattctgatcgcattaggtgagggggaatttgcaggtggtttaactgggaagaatatttatcgcgatggtaccccgcttgaaaatgctgatggttcgcaaaacttcagtggcgtgtactgggaatttcgccccggtacgcaggctcagacgtatattcagggtattcccggtactgaaaatgaaataagtgtaggaacggaagtttccagcaagacagcctggacccatacctttaccaatacccagctatccgccgttcgcgtccgcctgaaatggccgtccctgatgaaacaggaagatgacggcgacgtggtgggcaataccgttgagtatgcgattgacctgcagaccgatggcggcgcctggcagacggtactggaaaccgctgtcacgggtaaagccacctccggctatgagcggagccatcgcattgatctgccccaggccggcagtacctggacgctacgcctgcgtaaaatcactccggatgcgaacagtgtcaaagtcggcgacgtgatgacgctgcagagctacaccgaagtgattgatgccaaactgcgttatcccaacaccgcgttgctttatatcgagttcgacgccagccagttgaatggcagcattccgcaaatttcctgtgagccgcgtgggcgagtgattcgtgtgccggataactacaatccggaaactcgtgaatataccggggtctggaccggcgggtttaaatgggcctggacggataacccggcctggatctattacgacattgttacagctgaccgttttggtctcggtaatcgtctgagcagcgccaatatttcgaaatggacgttgtaccagattgcacagtactgcgatcagctggttcctgacgggcgtggtggtgacggcatggagccgcgctatacctgtaacgtctatgtccaggaacgcaacgatgcttacaccgtgctgcgagactttgccgccattttccggggcatgacctgctggaacggtgagcagattgttgtgcaggctgatatgccgcgtgatgtcgattttacctatacgcgcgccaatattgtcggcaaaccccgttattcgagcagcagcagccaggttcggtacaccaacgccctgatttcctggtctgatccggataatgcttatgctgatgcaatggagccggcgtttatcccggaactggtttcccgctacagttttaaccagctcgaaatgaccgcgattggctgtacgcgccagagcgaagcccaccgtaaggggctgtggggcatactgaccaacaacaaagaccgggtcgttgagtttgatgtggggctggacggtcgcattcctcaacccggttatatcattgccctggcggatgagttgctggccggacgggtcaacggcgggcgaatcagtgcggtgaatggccgggtgattacgctggatcgagatgtggatgccaaacctggcgaccgtctccagctaaacctgccatccggtatctcacagagccggaccattcaggctgttaacggacgccggcagattacggtcacaacggcgtacagtgagacaccagaacgggaatgcgtctgggccattgaatccgatgacctcttcctgcagcagtaccgggttacaggggtaaaagagaacagcgatgccaccctcacgatcaccggcgtggcacatgatccggataaattcgcccgcatcgataccggcgctattatcgaccagcgcccggttagcgtattgccggcgggcaaccagtcacctccagaggatattgtcatcacatcccgctcggtcgtgaatcaggggatcagcgtcgaaacgatgcaggttaactggtcagcggtcagcggtgctattgcctacgaagcgcagtggcgccgtaacgacgggaactggattaatgtgccgcgcagctcgaccacctcgtttgaggtcagcggcatttatgccggtcgttatctggttcgcgtctgcgcgatcaatgcggcggagatctcgagcggctgggcgtattccgaagagaagaccctgaccgggaaagttggcgaaccgctgccgccgttggcgctgacaaccgtttcactgaccgcaggtattgaaatccgctgggagtttcctgcaggagcagaggatactcagcgtactgaactgcagtacagcccgaaccagaacggcaacggagcactgccgctaactgatttggcgtaccccggtaaaaagtatcagcagatgggcctgcagattgccacgcagttctggtaccgcgcgcgtctggttgaccgcctgggcaatgcctcgtcatggaccgactgggtgcagggaatgtccagcgataacgtcagtgattacttccagcaattggatgaagccattaaagatacggaaacgtatcagtcactggtgaaagagattgatacccgggccgtggccgaagaggtggactcggcaattgaagcagcgaaaaaggacgttgcttcacaggtaacggatgcgaagcaggaagcgcagcaactggtgcaggaaaccagaaatgacatcgaacaggccctggcggatgaggcgctggcgcgggccagtgctattgctcaggaatcggctgaccggacagcagccatcgcgcgcgagtcggctgaactgtctgatgccattgcccgggagtctgctgaccgggcaaacgctattgcacaggaatcggctgaactatcggatgccattgcccgggaagcagctgatcgagcttacgcgctggcagatgaagcccgggcccgggcaacggcgatttcagatgccgtgaaggatgaagctgctgcccggagtaaggctattgctgacgaagcacagaaacgtaacgatgctatcgctgcagaaaatgccgcccgagtgaaagccgtatctgagcttgacaccagaacagccgatgcactggcaaatgaaacagctgagcgtattagtgcggtgtccagtgaagcgaaagcgcgtgcggatgcattgttgaatgaggagaataatcgcgaagccgcgatccgttccctcaactcacagctgcagacggctacagagtcactggcacaacaaatctcccaggttgccgccggtacgggcgaacagtttgatcctctgaatatctggtattttgataccagcaatgagggctggaccgaagatgacaatggttacacgccaatgatcgtcacggatgatggatggttgaaagcggataacggtacttccagtgcccgctccccgaatgatttgggcatcgatgccgccgcctaccgcttcatcaagcttcgcctgaaaaaagtcggtaacccggcatggaatggacgcctgctctggattggcgcggacgaatccggctgggataatgcgcgttcagttgtgattgatgagccggaatatgacgttaacgatacggcgacggtcacgctgcatgatattccgtggctgccatcgcagcgcatccgtcgtttccgtttagatctggcgcagggtcagaatgaagagaattacttcttaattgactggctggccgtgggacgtccgacgccgggggccggcatggccgcgctgcagaacgagcagcttgcccggacgcaagcggacgcggcagaggcggcaaacagacaagacctggctgttcagctgcgaggctcgtatgacggaaatgatctgaccaaagtcagttctggtctgatttatcaggaacaacaggcacgagtcacaggggacaaggccgaagcttccgcccgacagtctcttgagacccggatcaacgacagcctgtcaacgataaaccagtcccttgatacgctgaatacagccgatgaggcgatggcatccgacatcaccggcctgaagtcatccctggccggaaaggccgatgcgtcggcgctgacgacgctgaaaacgcaggttaccacgcagggggacacgttggcttctcagggggccagtctcacgaacctgcagaatagcctgaaccgcctcagcagcgatgtgagcaaaaaagcagatgctgccgctgtccagtcactgcagaatcaggtaactcagcaaggtaaggatatcactgccgctaacagcagcatcacgaacctgaaaacgtcgctcgatacgactgacagcaatgtggcgaagaaggctgacgcgacgacagtcagtgacctgacatcccgtgttacatccgcggaaggaaaagtgtcgagtcagggcaacagcattacccggctgaacaattcgctgaacaatgttatcgcggattccgacgctgcttccgccattccaggcaaccttatcgtcaacccgtcctttgaacgtggaacggacgggtatatcggggttagtgcacagagcacggtggtggcagtacaggcgccgcgaaccggtacacgtgcactaaaagttgatcctggcagtgttgccccgggtcagactatcgactttgttaagggtcgcacttacgaggtaggtgtttgggttaagcagatcgcgggcacgacggacaatggcgccggcaacaataagttaagaatcggcaacagcgcaggtaatccagtactggaggttccgtataccggagctggtacggactggacaaaatacagtaagcgctggaaagcaacggaaacagcccgccttccagtaacactgaataactacctgacagccggaaatcgttattttgatgacttctatgtcatcgatgtgacagacagcgtcaatatagacgccaacgcctctgctatcgcttcagtccagaatacggtgacgcagcagggtaaggatattacgtcacagtcatccagtatcacagatctgaaaaacagtctaaaaacgacggatgcgaacgttgcgaagaaagctgatgctgccgctgtacagacgctgcaaaatacggtggagcagcagggcagagatatcaccactgcatccagcgatatctccggtctgaaaaacagtctcagcacgacggatgcgaacgtggctaaaaaagcggatgcttctgccctgggcgcgctgcagagcaccgtgacgcagcagggtaaagatattacgtctgccggtaacagcattacgcagctgcagaacagcttagcctcaacaaacagcgcggtgaacaaaaaggccgatgctcaggcattgtccgcattgaccggacgcgtctcggatgccgaagggaagctctcctctcagagcgatcagttgtccacgctggaaaattccctgcgtctggggagcctgatttcaaacggcagtctggacaacgacgccaccttctgggcggactccggctcaggctctgcgtttgtatatgaggccgccgaaaaagcgctgcgcaccaccacaggttctatccggatcgccaacaccacacgtattcctgtggaagtcgggatgacgctgacactcagctttgagtttaagacgacagagaccatttcggccatttcgtctgattcggtgggtttcattacggacctgaacgatcaaacgaactggctggtttcccaggcatcatggcttacagcggtcacgacagaatggcagcgacagaccctgacatttacgatccccgataaattcaccgggcagtatgtttaccttcgttttgctgcggggggctggtctccgtcgaacagtgcccggctttacctgaaagatatcgaggtttattcctcaaccgggatcgccggaaaagcagatgcctctgcagtgagtgaactctccagccgtgttgagacggcggaagggagcatcacttctcagggtaacagtctgacgaatctgcagaacagcctgaacaccaccaacgcaaatgtcagtaagaaagccgatgcaagcgcactgcaaagtctgcagaacactgtgacacagcaggggaaaacgctctcctctgcctccagtgatctgtcttccctgaaaaatcgcctcgacaccaccgacgggaacgtggcgaaaaaagccgatgccactgctttgcaggaactgaaaagcacggtggagaatcagggcagggcgctgaacagccagagctcacagctcgtgacgctgaacaacagcctgtccgccaccaggaacgatttgagtaagctggcggcggatgttgatacggccgggaaaacaccgggcaaccttctttccaacgccagctttgagcgcggtacagaaggctggagtaacgacggcaataactggcaggtctatgccgcacaggggccgcataccgggaaaaacatcattcgcatgatcaccgccggcgatgcgatgctgacgcagtcttttgtcgttaaaggcgggcggacgtatcgtgttggcgtatgggtacgacgtaatgccgctgtcgtgattgctaatgccgggaataccaaaatcagcctgcgtgacgcgaacaatgttgaagtgaaaaacgttctgctgacactggaaaatatgggtaatgcctgggcggacgtaagtctggaatatcgtgcaccggcagacgccaccatgcagatttcactgcgcgcatcgctgagtgcgggtgaggtctacatggatgatgcgtatgtcgtggatatcactgatgcggttaacattgatgccgccgctgcggcgaccactgctctggaaaaccgagtttcgaaaaacgaaagtgcgataaccagccagagcaccagtctgacgaatctgcagaacagcctcaacaccaccaacagtaacgtcagcaaaaaagctgatgcgacggcgctgacgacgcttcagaacacggtgaagcagcagggggattcattatcgacccagagcggcaccctcacgaaactgcaaaacagcctgacgaccacgcagtcagatctggatgccgcaaaagcgacactggcgaaaaaagcggataccgcagccctgtcttctttacagaataccgtgttgcaacaggggaacacgctgacctctcaggcttctcagctgacccggctgaacaacagtctgacaacgacacagtccgggctggatgccgtgaaagctgatgtggatgccagcgcgccgggaaacctgctggtaaacagtacattcgaacgtggacaggatggctggaacggctggacttctcaggcctccgttgttgagctacagcaaccacgtagcgggaaaatggcgctgcgtctggcacctgcttccggcacagcggcattgcagcagaatatttcggtactgggtggtcacacttatgagctttccgcgtggacgaaagtggccgcaggcaccactatggcgcccggctctgcgggcaataacaaattacgtatcgggaacactgacggatcagcggtagcggataagcagctcgatcctgctacgatttccacgacaacgtggcagcagaccaccctgcgttataagccggcgacggaccgcaccatcactgtcggtctgatgtattacctcagtgccggtatccagtattatgacgacgtgacgttcactgatatcaccgatcgcattgatatcgatgcgaatgcgaacgcaacaagtaacctggattcacgggtgactgcggcagaggggaaggtcacatctcaggggaattcccttgtttcactgcgtaacgacctgacggcggtacagtctgatatcacgaagaaagcggacgcctccgccctgcagaatctgcagaataccgtgtcgcagcagggggatgccctcagctcgcagagcgatctggtgacgatgctggaaaacagcctgtcggaaggcagtctgattggtaacggcagcctgaaaactgatgcctcgctgtgggaagattcaggtactggctcgggcttcacctgggatgcgagcgagaaagccatccggacgaccacgggctctgtccgggtggcgaacatcacacgaattcctgtggaagcgggtgtctctctgacggtgacgtttgaatttaaaatgtcggaagccatcacggcgtacagttcggacacggtcgggtttatcgccagtctcagagacccggtaaactggctgacctcacaatccccgtggctggacggcgtcaccacacagtggcagagccggactgtcacgctggacatcccggcaaccttcaccggacgctatgtttacctgcgttttgcagcaggcggctggtctccggctaacagtgcacgactttacctgcggaacattgacgtcacctcggctacgggcgtggcgaataaagcggatgcctcggccgtcagcagtctgtccggccgggttgataccgttgaggggaaagtaacgtctcaggcgtctgatttgacgaacctgcgtaacagccttaacacaactaacaacaatgttagtaaaaaggctgacaccgccgcgttacagagtctgcaaaacaaagtggagcagcaggggaatgatatttcttctgccggcagccaaatcactgaactgaatgccgcgatccttgccgcgaaagcggccggggatgattacatcccgaatccgtcgcttgatccggcttataaccgcatggggtataccgtgcaggcctccgatgctgatggcattcctgcagggtgtccgtttgcatatgtgatccgccttgccagtcgtgatcatattcccggcatcaacaatattgccgtcacaccgggcgacgtttttgagatgtctgcgctggttgcgtgcggcgcaggcagtgccgactttaatttttacatcggtcgggcaaccaccgttaccggtggtgtcaaagcgagatcctccggtggcaacacaaaagccacagcagcatggacgcgcgtgacctggcgcttcaccgtaccgtccgacacgaatctgatgcgaccgttcctgcaggtgaaccagagttctccgttcggcaccatctggtatgtaactgactggcatctgcgcaacgtgacggcggcaaacaaggcacaaaataccgctgacaataccgcctctgccgttgagtctctgacgacgaaagtcacccagcagggtgatacgctcagcagcatcgggagccggaccacgacgctggaaaatgggctaaaaacgacgaataccagtgtcagcaaaaaggcggatgcggataccgttcagacactgcagaacacggtaacgcagcagggtaaagacatcacggcggcgaacagcgcaattacgaagctgaccggcgatctgtcgacgacgaatgccaacgtcaacaggaaggccgatgcaacggcgctgtctacgttgcagaacaccgtaacggatcagggccaaaagctggcctctcagggcagcagtctgacgcagctggcaaataccctgagtgatgccatgaccagtctggccgcggatggcaaaattccgggaaacatgatctccaacgggtcatttgaacgtggtcaggatgcgtttaccggatggaacaatgtgacctcagttatcgacgctcagtcccccaattttggcagcaggattttgatgtgtgctgcggggcttgccgggatcacacagaaagtgcctgtcgtcaaaggcaacacctataaaatcggcgtgtttgcccgcgctcaggctggttcggtcatgcaggacggaaacaataacaaactgcgtattggcggcacgagtttgctgtacgaccgccagtttgacaccgcgaatctgccaaccggctcatcatgggttgagctgaccggcacatggaaggcgacggtcgacgggatggtcgatgtgtcgatctattcgtcccttaaatccggcgcacagtatttcgacgatttctatctggtcgatgttacggatgaggtgaatatctcagccaatgccggggctatcagcggtctgactacgcgggtgacgaacgcggaaggcaaagtgacaagccagggcaacagcatcaccagcctgcagaacagtcttaatacgaccaacagcaacgtcagtaaaaaagcagatgcagaagcactgcaaaacctgaaaaacacggtgacgcagcaagggaaggatatctcaacccagagcagtaatatcaccagtctgcagaacggcctgaacacggcgaatgccggcatcgacagtctggttgccgataatgacgcgtcgaaaagattcgtcggtaacctgttggccaacccgtcatttgagcgcggtctgaccggatacagtggcggtggtgcttttatcacggtgattgatgcccagtcacccaacaccggcagcaggattttgtcctgcggtacggggactggcgcagtctctcagtccgtggatgtcacaaaagatcgcacctataaaatcggtgtttttacccgctgtcaggctggttccgttctcgatgcccagggtaataataaactgcgtattggtagcagcagcctgttgtatgaactgcagttcaggcctgccagctcatcatgggttgagctgaccggtacatggaaagctacgataacgggcaaagtggatgtctcgatcaattcctcactcaaatcgggtaatcagtatttcgatgatttttatttcatcgatatcactgacagagtggatctcgatgcgacaagcaacgcggtcagtagccttacttcccgcgtcacgaatgcagaagggacgatttcaagtcacaccggcagcattacgaacctgaataacagtctcagctcgctgaacaaaaccgtttccgggaaagcggataccagtacggtacaggcgctgcagaataccgtgacgcagcaaggcaaagatctggatgcaaacgccagcagtctcacatccattaacgcatctctgagcacactgcaaagccagggattaaatccctgggtggacggttcattcgagtcatatgctgccggtaagagcctctatggtgatacggccatagtaacgacagacgtttcccgtaacgggtcgaaatctctcaaaatcacccgcaaagcgggcgaaaccggtaacagtgataaaatgctggggaaatggctatctgttcgaggtggcggtaagtaccgcttctccctctgggcatatatggacagtgatatgtcggcgccgaacgcatggagtgcaattgttggcctctatgcgcgcggtgagaatggtggagccaatcagtggccgggcgcggttaccataaatgagacgaacatcacccgtggaaaatggacattcctgacaggagtcgccagcgtggccgccgaccgcagtatcgctcagatgtggatttccactcgcggtccatcgggcggcgccgggttctcgctgtatttggatgatatcaatattgtcgatgtgaccgatgctcaggcagcgcagaccgatgcgagcgcggcagcgaatgcggtgacgcagctgacagcgacggtcagtcagcagggacgtgacatcaccgcacaggctaagcagttcacggagctgcagagcagccttaacagcactgatgcccgtattgcccggcaggacgaaactatcgcagccaatggcctggcgatggcgaatggttttaaccagatgcgcagcatgattggcgacaacagcgccgcgatcaccactacgaataaaaccgttaccgacctggaaaaatccacgacggaaagtatgacgcaactgacgtcgcaggtaggggatatgtcggcctctgtccagcagacggcatcgactgtggcagatctgaacgggaaactgagtgcgcagtggggagtgaaggttggcacgtcctccggcggtaaacactatgtctccggtcttcagctggggatggatggcagtggccagtcacagtttctggtgcaggctgatacgttcggggtatatgtccctaacggcgataaaagcaatctggtcttcggtgtcgacgggaacggtgcctatatgcagcaggctatggccaggaacctgacgattaactttggccagatttctgacagtctgcagtcgactgactaccagccaggttccactggctggcgtttgcctaaaagcggtgcttttgagatgaacggtaatgtcccaggagaaggacgcgttcagcttgattcttctggtctggctgtttatgaccagaacggtgttctgcgttgcaaaatagggagaatttga

SEQ ID NO: 230663 - DNA, 711 bp, Klebsiella pneumoniae; identical to SEQ ID NO: 230656

SEQ ID NO: 230664 - DNA, 339 bp, Klebsiella pneumoniae; identical to SEQ ID NO: 230655

SEQ ID NO: 230665 - DNA, 261 bp, Klebsiella pneumoniae
atggctgtgaaaaataaagcagtggagccggaagaaacaggcacacaggacaaccatgcgaccgtggtcgcacaggcagagcgtaaatccgttgtgttccttgggccgcaccaccgttattcccgtggagatatcgcgtgctttgaaggatcgcgcgccgaagaactggttaagcggcgtatcgcggtatggccggaggatgccgaacgtgcgctgaaaccgaagccgggagacagcgattttgatactgacattggatga

SEQ ID NO: 230666 - DNA, 1287 bp, Klebsiella pneumoniae
atgccacatattgaagaattgcgtcgtcagcgtgcgggtatcaacgaacaggttcaggccctggcaaccattgacgccagcggcggcacgctgactgcggagcagatgacggagttttcgaacctgcagcagcagttcactgatatcagcgccaaaattgaacgcctggaagccgccgaacgtgctgcggcgctggtcgcaaaacccgtgaaagcgactcagcaggcccccggcattattgttaagcaggagccgaaacagtacaccggtgctggcatgacccgactggtgatgtctgtcgccgcaggcgcagggaatctgcaggacgcggcaaaattcgcttcagaagagctgaatgaccagtccgtatcgatggccatttccaccgcagcggcgtccggtggtgtgcttattccgcagaacctccacagtgaggtgatcgagctactgagcgaccgaaccatcgtccgcaagctgggtgcccgtcccgttccgctgcctaacggtaatatgacgctaccacgcgtggccggtggagcaacggcaagctacacaggagaaaacaaagacgccaagacatcagaaacacgctttgatgatgtaaaactgacggcgaaaactctgattgcgatggtgcctatttccaatgcactgattggccgcgccggattcaacgtcgagcagttggtcctgcaggatattctgaccgccatctcagtgcgtgaggataaagcctttatgcgcgatgacggtaccggcgatacaccgattggtatgaaggcgcgcgcgacgcagtggaaccgcctgctgccgtgggaagctgatgcagcgatcaacctgaacacggttgacgagtacctggacaagatcattttgatggcgatggacggcaacagcaatatgatcagcagcggctggggcatgtcgaaccgtacctatatgaagttgtttgggctgcgtgacggcaacggcaacaaagtctatccggaaatggctcagggattacttaaaggatatccggttcagcgtaccagcgcgatccctgcgaatctggggaccgggggtaaggagactgagatttactttgctgacttcaatgatgtggttatcgctgaagacggcaatatgaaagtcgacttctcgaaggaagcctcttacatcgatgccgatggcaccctggtatctgcgttttcccgtaaccagtcgctaatccgcgttgttactgagcatgatattggcttccgtcatccggaaggcctggtgctgggtaccggcgtcctgttctaa

SEQ ID NO: 230667 - DNA, 201 bp, Klebsiella pneumoniae; identical to SEQ ID NO: 230653

SEQ ID NO: 230668 - DNA, 429 bp, Klebsiella pneumoniae; identical to SEQ ID NO: 230652

SEQ ID NO: 230669 - DNA, 639 bp, Klebsiella pneumoniae; identical to SEQ ID NO: 230651

SEQ ID NO: 230670 - DNA, 312 bp, Klebsiella pneumoniae
atgaacacagctatcgaatatggaaatcctgatctctggctggtcttgctcatgctggccgccggggtggtatcaagcgccctgctttccgaaacccctatcaacccgcgccgcctcatcggagacgttctgagaggcgtaatcgtggccatcatcctctgggcttacggtgccatgggcaacatctcaattttgaacgtaatcactctcgccggtttatcggctgtggcatggccacacaccgtcaacgaaatcaccggctttgcaaaacgaactatcagccgaattttcggcgggagaaaagaacgatga

SEQ ID NO: 230671 - DNA, 246 bp, Klebsiella pneumoniae; identical to SEQ ID NO: 180600

SEQ ID NO: 230672 - DNA, 609 bp, Klebsiella pneumoniae
atgattgatcgtatgaaaacacgaggcgaacgactgaaagcacgccgtttagaattgaagatgacactgaagcaagtcgcgcaaagtgtcggtatctctcttcctggcgtccaaaacttagaacgtggcgacgtaatgccgtcgctggagatcgggcttgccctggcgaaatgcctgcgcaaacctgtgcaatggatactttttggtactgaatctgatcctgaccgcgttcctgttattggcacaacagagagtggtccggatagcgactggcagccaggagaacctgccaacacagaacgattcctgccatttgttagccaacgggaaaccgtttatgcgctcactgtcgggaaccaggttcagcacaactatcagccgggtgacgtcgtcctggttgactcagctctcacgccagttccgggtgaggatgtgttagtttgtgataaagacgggaaaatctcgatacagcggttagcgcgcttcgacgatgagcgctactacttagatggcgctaactctcaacgagttatccatgagaaaagtgatcttcaatttgtgcaccaaatagtcggtacgatcaaatcgttcatgatagagggtagatga

SEQ ID NO: 230673 - DNA, 327 bp, Klebsiella pneumoniae
atgtcgactactgaatttttgaaaacgctggattatgaccagcttcagttctgccgtgatgagtgcgaggccagaatcaaggccatagaggaagaagagaaaaaggtagcctgggcggttactgatggccaaattaattatggttggtatcgaacagaggactacctgaaagcggttgaatgtttggcgcgcgaagcagaagagcgctggaaagaagaagataaaagcaaccctgagccgcgcaattggttgaatttttctatcagggggcagcggttgccggtttctgagtacgaggcgttatttgccgatggccagtgggggtga

SEQ ID NO: 230674 - DNA, 333 bp, Klebsiella pneumoniae
atggtacatgacttacaaaaaatgatggacggtgagctggtccgcttacaacttgagattaagaaagaacaggataggcgtttagctgaaaagatgattcctgtttttggggtgaaaaccagcccggcaaatcagtatgaatttgctgatccggcgcaggcaatttcctgtgctgcgggattgctggataaggtactcgacgaggttagagatgacctctctaaaggtggattacaggggtggaacggtgatttgctacgtatctacgttcagcatgtaagtgagagtgattttgctatattgcggcctcatttgagggataaaaaatcatga

SEQ ID NO: 230675 - DNA, 525 bp, Klebsiella pneumoniae; identical to SEQ ID NO: 230648

SEQ ID NO: 230676 - DNA, 1134 bp, Klebsiella pneumoniae; identical to SEQ ID NO: 230647

SEQ ID NO: 230677 - DNA, 780 bp, Klebsiella pneumoniae; identical to SEQ ID NO: 230646

SEQ ID NO: 230678 - DNA, 330 bp, Klebsiella pneumoniae
atgagcaagcacggcgtgagcgatgagcatatcgtcacccgcgtcaccggctgcccgaacggctgcggccgcgcgatgctggcggaagtgggactggtgggcaaagcgccgggccgctataacctgcacatcggcggtaaccgcaacggcacccgcatcccgcggatgtaccgtgagaatattaccgagtcggaaattctcgactcgctagacgaactggtagggcgctgggcgaaagagcgcgaagcgggtgaaggcttcggcgattttacggtgcgtgcgggcatcattcgcccggtgctcgacccagcccgcgatttctgggaataa

SEQ ID NO: 230679 - DNA, 189 bp, Klebsiella pneumoniae
atgctgaaacctgatgttattgagtcggctatagccctgatggcaacaaaacagggccatagcctcaacagcgccgacatgctggaaattcgttctcgcgttgctggttcgctggcagcaaaagaaaggcaccggcagcgcatgacctccccggaataccactggcgcaaacccaatccccgcagatag

SEQ ID NO: 230680 - DNA, 249 bp, Klebsiella pneumoniae
atgaatgagcggctaaaacgcattattgcactggagaaagtcatgaccaagaccaaacttttaagcgcagaggctagcaccaacgaaatcgccgcagcgttgattattctgtatgacgacccccgcagcccggcagatatcgccgatatggtttccagcggttgctattcgccgccagtacaccagttagaatcaaaattcgaagattccagagagtccagtgagcgctaccggatgatgtgccgctaa

SEQ ID NO: 230681 - DNA, 255 bp, Klebsiella pneumoniae
atggcagcgtgcagaatcattctcgatcgcattgtcccgccaagcaaaccgatattgcctccaacgccctttgaactcgacgactcagacccacagtcgctggcccgttcggtgatgaaagctatagccgctgggacgttatcagcagatcagggtaaggttatacttgatgggctggctagtatgatgaaggttattgagataaccgagttggaagaacgcatagcccgtctggaaggagaaagtaatgaatga

SEQ ID NO: 230682 - DNA, 516 bp, Klebsiella pneumoniae
atgctcatgagcaaatcagaatatgccaggcatcgaggcgttagccgtcaaacggtttacgattgggtggcgaaaggtgaggttgtattatcaggcaataaaatcgacgtagaggccacggaacgcaaaatgcagaacgaacagaaaggccagggcgaacacgttccccgcaaactggaaatgacgtgggggcagtgctgggaggcggtcaaggcgttagacggaaaagccccggaacctcgcagcgatgaggagataaagcagagggtacagcttgcagctggcgaacttggttgggatgttgaatttctggaaggcaatgggattttcatgtgtgacggtgacactgaattctacctaacgcagtacgaccagcttattcaaaatgcagatgtggccatcgggcttatccggcgtgacctctgttatgcagcttgcgattgccctgatgatgaggacgaatggagcaaagaagggctggcagcactcgcagaatggaaaacgggcaatgtgtaa

SEQ ID NO: 230683 - DNA, 177 bp, Klebsiella pneumoniae
atgaacaacatcgaaaaaatgaagcctgaaaatcatgaggcggcatcggttgagaaggttcgcacatggcaagacgatttagcaaaccagccccagcttgatagcaatagcgacattgtagagaggcaattacggggaagcgcttacgaaatttgtgttaataatatgttaagctga

SEQ ID NO: 230684 - DNA, 660 bp, Klebsiella pneumoniae
atggcgatacttagacctgttagcaacaatgaggtgaatgattctctcgaatacagcgtcaagagatctcttcgggtggcaatgccgggagtcattcaatcgtttgaccctgaaaatctcacatgtgttgtagagatatcagttttcagtgcaaagacagaaggtacgtctatagacaggttgagtgtcgataacgtgttctaccctctcattcttgatgcgccaattgttttccctcgaggtggcggcgttacgctaacgtttcccgttaaagaaggtgatgagtgccttgttgtattcgcggatcgctgcattgatttctggtggcagagcggcaatgtgcagaatggttcaagggggagaatgcacgattattctgatgcgtttgttattcccggcccacagtcacaggcaaagaaaatcagcggtatcagcaccacggccgcacagcttcgaaccgatgacggatcggcattcattgaagttgcatcaaacggcgctgtaaccatcaccagcccacaaacaactgttaatggccctttgcatgtaaacggtgcaataacctccacaggcgaccagacagcggcaggaatcagccagatagatcacactcacggcggcgtggagtctggcggcagcaatacaggaaaaccacaatga

SEQ ID NO: 230685 - DNA, 342 bp, Klebsiella pneumoniae
atgaaaaaaataattctcgtaattggtttgcttgccgcaggtgcgagcaatgctcagacggtgaccatgaagtgtgggggctttacccttgagataattgctaactcgatgtcaaaaattaatggcgagtatgtaacctcacaaaaaatagcatccctaggtgagcagggggcaaaaatggatatgactctcacttcagctaaagacggaaatttctacggctttgaatatgtccatcctaacggcagcaataaacgttggcttaatgttgagttaatccgcagcagcatgaatcagccgcgcatcattggtacgttcatgtgcaaacgtgtagcgaactaa

SEQ ID NO: 230686 - DNA, 1080 bp, Klebsiella pneumoniae
atgtctacaaattggaatcgacattttgagttacagctggtggatgagaaaggtcaagggatcagcctcagcgacttcaaagttacctttaccatagagcgtaacgataaccgatggccggcagcggcggtggtcaaaatctataatctggccactgagactcaaaaccgcatcatgcgccgtgaatacagtaagatcactttgattgcaggttatgacgggctggatagcacttcttctgacaccgtaagcgccagcgaagttggcaaggtacgctatatcacagatgacaagataaacagccctgaaggttcaaattatggcgtgattttcagtggtgatatcggctttacattggaaggcaaagaaaacattaccgaccgttacgtgcgcatacaggcatttgatggcgataaagcgtttatgaacgccgaaattatcggaaagactctggccgcaggttatacattgcgcgatgagtatgaaatgctcatgaagtatcttgagccgttcggcattaaaaagggtgttgaacccgttttccccgataccgtttatccacgtggggcatcatatcacggacctgtaatcgaatacctttcccgcctggcgaaagacctgcgagccacgtggcaatttagctttggtaaggttgatttcatccaggaagatgtagccaaacaccgggcgattgtcctgaacgccgatacagggcttatcggtatgccgcagcagactatcggcgcgggagtaaatgtaacgtgccttattaattcctttattcagttgcacggactgattcaactggatcaggcgtcagtgtatcgcgcacagttgagcaatcagcaggttgtagaggctggcggcattgcgccggaaaaggaagttaacggtaatctcgttacaagcggtttggtgcagaaagagaccccttacagcatcgctaccgatggcgtctacatcgtccgatacatctcatacaggggtgacactcgcgggcaggactggtatatggatatggcctgtgaagcgcgtggaaatgctgatgttccttctgattcttatttgctcaaggtctaa

SEQ ID NO: 230687 - DNA, 306 bp, Klebsiella pneumoniae
atggctctatcagaaattccattatcgccaaacagccagagttttaacatcaccctggctggcgttgattatcagatgcgcgttgtctggcgcggagtatgctggttcctcgatttaatggatagcgctggaaacctaatcattggtggtatcccgttaatcaccggcgctgatttgctggaacaatacgcatatctcaattttggattttcgctgtatgtgctatgcgatgacccagccagtgaaaacccaacccaatccgatctaggcattaaaagccacctttacgcaaaaaccgaggattaa

SEQ ID NO: 230688 - DNA, 609 bp, Klebsiella pneumoniae
atggatattctctcaacacttttccagcagagcagtcgtaaaatcggggtaatggttccgagtgttgttatctccgaaaagcatagcgacacactggagattacagagcatccggtagagcgccccacgtcaggcggaaccggttttatcgcggatcacgcttatcgccgcccctcagaagtggtgatgcagatcggatttgctggtggtggttcgctgctggatttgctggatacccgaaatctggggttatacacgccgcttaaccatatggggccgaaagaagtttatgcggaactgctaaagatgcagcaggaaaagcagcttctgaatgtgaccacgggcaagcggctgtataaaaacatgctaatccgggcgctggaagtaaccacagaccgcactacggaaaacgtgttatcagccacgattacactgcgtgaagtgattattactcagaccaaaagcatcaaagtcgctgataaggctgatatgaagtacggcgttgaaacttcggcagtggttaatactggcactaaaacgccgataccggtaaatgaatcaataattgggagcgtttggggagtggtaaagcgtaccttgggagggtaa

SEQ ID NO: 230689 - DNA, 558 bp, Klebsiella pneumoniae
atgccaaacctactgcaattcagtgctaccccatctggaaaaggcgttgcaatttcagccagctacgatgacggcgctaccatctcgttctctaccgatgaacaatccgcaaactttatgacctctattgttcaggcgcttgctgctgcgaataagagggttagtgctgctgagaatcgcgcagcagctgaacggcgtacagcagaccgcaaacacaagcgcaccggtgatagttatgaaagtggcaacatgccaacaacctgcgacgctgaattcatgcggctggtgcgtgctgtatgccctaagtacaacgagaacacaaaggatgatgatccgcgccttgttgctcttgatgtactccgctatgcccccgccgaagccttttcagcagcctattcccgtccaatgtcagagattcagttaagcgatgctatagacgtactggcgcaggtgggggattacatgaaagcaaacaacatcgagccaaaaccgtataccacctttgattcaataatggctattggtgacgcggctaaaaaagcgtgggggagaaaataa

SEQ ID NO: 230690 - DNA, 2343 bp, Klebsiella pneumoniae
gtgaaagatgattttattaatgaggtcaggcataaagccaacggctattggccctcaatcatgcagcgcctgaatattcccacaaacaggagtgagggtccgtgtccggcgtgtggcggaaatacccgctaccggttcgacaataaagataaccggggaacatatttctgttcgcactgtggagccggcacagggctggatctggtgatgaaggtcaatcagtgcggtgcgagagaagcggctaatctggtggcggaggcaatggcgctaccgttgccggaaccgaagccagccagagagagaactcaaacggatatcgccgggaaagtggctgcaatgaccgccaaagccttgccgggacaatctgcatatctcacatcaaaggggcttacatgccccttcccgttgctgcctgatggatcacttgtgctggtgctaaaaaacgccgcaggcgcaacgacaggcgcacaggtgattaaacctgacggctctaagcggctggtggccggaacggtgaagaaaggtgcttgctatgtggtcaactctattgaatcgccggaaacggtcattattgccgaagggctggcaacggcgctatccgttcaccagatgcaccccgaagcgctggcggtggtcgcagtggacgccggaaacctgctttcggtcgcacagcttatgcgccaaaagcaccctaacgcgcggatcatcattgccgcagacaatgaccagagcgccgaaagtgacagaagcggaggagtgaaaattaacacaggtaaggagtgcgcggagaaagccgcaaaagccgttgctggctgggcctcgctgccacccgtggactacaaagcggactggaacgattaccaccaacaatacggactggaagccgctacagcagcatttaacgattcaatgtatcagccggagggagaaagcgtgggcgcaaaactaaaagtagttgatggcggtaaacagtcccggcgcggtgatatcaaccttattcagatggctgacaatgaaaaggcattgatgttagcggatcggtacgagggtatagccattcatccagagagtgaggcggtttatctttaccgcgagggggtatgggttaaggctgcacccttagagttaagccgtgaaatggtggctatctacaacgaaaaccacactaatttcagcaaacgctctgtaaataacgtcattgaggcgttaaagatagtcattcctgttatgggggagccacgccgtagcctcatcccgttcaaaaatggcgtgtacgacatggaaaccggggctttctctgagcattcgttagacaactggctcaccaacgataacggcgtgatctatacgccaccggagccaggcgaaaaccttcacgaccatgcaccaaatttccataaatggctgagttacgcagcggcaagagacccgcacaagatgcagcggatcgccgctgggctgtttatggttctggcaaaccgctacgactggcagctttttcttgagataaccggcgagggcggcagcggcaaaagcgtattcactcacatcgctactatgctggccggcgaacaaaacacggctagcggcaatatggcggctctggacagcgccagaggccgggcgcagttcgtaggcaaaagcatgataaccctaccagaccagcccaaatattcaggcgaaggaacagggattaaagcgattacgggcggtgacgccgtagagattgacccgaagcacgaacaccagtacaccgccgttctgagagccgttgtggttgccacaaacaacactccgatgatttttaccgaacgggccggaggcgttgcccgccgcagggttatttttcagttcaataaccgggtaagggaggaggacaaagaccctgatttgtcggaaaagatatccgcagaaattccggttatcgtccgccgtcttttggctaatttttccgagccagaaaaagcaagggcgctcttgctggatcagcggaacagtgaggaagcgctggaggttaaacagaaaacagacccgctttatgctttctgtgcctaccttgaaaagctgtcagagtgtacaggaatgctggtggggaaccgtaatccgccgctctatccgcgagtgtatctctatcacgcttatctggcctttctggaggctaacgggttcgataagccgctaaccctgaataaatttgctgagggcatggaaagcgcaatgcgggagtttaaccacgagtacaggaaggagagaaagacgcgaggtgtagtaaccaatgttgagctttcaggcagtgcagaagactggcttccacaggcttaccctaactccgtgaagaagtag

SEQ ID NO: 230691 - DNA, 222 bp, Klebsiella pneumoniae
atgaacggaaaattcacaatggaaagagatgttttcgacgtcatcactgatgctgaacatgccattggctacaccaaccaggcgctggcagttcttgacctgtggctggatagcatgggtattgaagacgacaccgaagctaaccgtatcgcagcggttcacagccttgtgcatgagtctctgacctggcttaaaaaggcagccggtattaacgaggaataa

SEQ ID NO: 230692 - DNA, 180 bp, Klebsiella pneumoniae
atgcgtaaaaccttccagattgacggatacgctgttaacaggcgcgggcatacggtagggattcactacaccatgaccagcaccagtccagaaacagctaaatctactgcgcaactattggcgcataaaggcggctataagcatgttcgtattaatttcattcgggaggtggcagcgtga

SEQ ID NO: 230693 - DNA, 879 bp, Klebsiella pneumoniae
atgcttaaccttcagactctgacagccaaagcccgcgagcttcgcggcaacgtggttaaagcggttagcacgaagggtagccgcaccatgacccctgtttatgaccgcgacgaacagcgcaagctgcgtgagcgtatccagcagacgcaaccggattgggtcttgctttggtgggacattgcgaccgtaaccggttggcgtaccagcgacgtttgcaacctgcgttactcctgcatcaattgggagacgggcaccgctacgattgtggtagcgaagcaaaccaaagccgcagaagccagagcaacccgcaaaggcatcgaaattgtgcgccagcagcgcaaggacgccgcgaggctcgccgctgaccatatcgcctacatgaagtgggatagcatcacctgtgacgctctggcggctgatatgagcgacgaagaacaggcgatagtgtttgggctggtggctaaagctgacgttaagcacgacaccaaacagttaccgccgggcatcataaagcggctgcgtgaacgtcaggatcgtaatctggttgaagatgatttggtattttcccgctcacagattgaaagtaaccgttgtcaacgtctggaaggtagcgtgacccgccaaaccatctggcgcaaacttcatggcgtcatggcgtggtttacccgcttcattaacgctaaattgcgcctgagcgcctattcaagccgaaaaatagcagcctttaatcttatgtccgcaggtggcgaacagggcttgctggtggcgtctgaaatgctgggccatagcaacccggcgataactcgcacttaccttcaattaggcagcaaagccgccgctatccagtcccgtttagcaatggaggccggaaatgcgtaa

SEQ ID NO: 230694 - DNA, 288 bp, Klebsiella pneumoniae
atggctaaatcaatctgccctaaatatacctggctatttctggccacgccgaaaaaacacgattgcagcccgattgtattgcgcacacaggccgatagcgaagaagctgcgcgtaacacgttccccggctgggatttagtctttgccgcaaaaatccgcaccgaaagcccgtttcaggattgttggactgattccgacaacggaaccatctggcagatcatagccgacgacattacgccgttatcgtcttttcctgagaacgtcgagcaggaggttcgccatgcttaa

SEQ ID NO: 230695 - DNA, 213 bp, Klebsiella pneumoniae; identical to SEQ ID NO: 99272

SEQ ID NO: 230696 - DNA, 1230 bp, Klebsiella pneumoniae
atgagtagtaagcccctaacccatacagaagtgaagaacgccaaaccacaaaaaaaggattacagcttatatgacgggttcggcttgttgctgtacgtttcagccgccggcggtaagtcctggcgtttcaggtattcgcacccgctaacagggaaaagacagacgctaaccataggccgataccctgaatttagccttgccgaagccagagaagaaagagataaagcccggcgtctggttgcccgtggtgttgaccctgtggaggtcaaaagggaggaaaaggcgttaaaacagaaggaacacggggagaaattctccgtactggccgctgcatggctggcaaaaaaagaaagcgacggtttacgggagcggtcacttatatacaccagaaagggaatcgaccacctgaatagcatcatcggcggcattagcgtacataaaatcactgcatctcacacgctcgcagagcttgagaaattctccaaacatccagccttgagactgaaattatgcagctatgcaaatggggtaatggattttgcagttaacgccggaataatcgcttacaacccgcttctacgcattgctaaagcgctgccaactgtgaaggttactccattgccagctttttcccctgcgttgttccctgaattcctcgatgtctgggatgcgagcatatgcggcgaaccgactaaacaggcgctaattttccagatccttaccatgaccagacccgcagaatcatacggggcgcggtgggaagaaatagacatagacaacgcgctatggaatatccctgcggagcgcatgaaggccaagagaccgcatacagtcacgctatcacggcaggctatggatattcttcaaactatgaaggcatggcgacgcggtgattatgtgtttccctcgctgaagcgtcaaaacgaggcaatcagccgctataacgtgacaaagataatcagccgctcgaagtttaaagggcttattgtcccgcatggcttccgatctctggcctccacagtgctaaacgaagaagggtttaacccggacatcatagaggctgcattagcgcacaaaagcggtgacgccattcggaatatctacaaccgttcaacatatatcgaaaagaggcgcgttcttttgcaatggtggggcgattatgtagaagctgccggaaagggtgaaatactggaaacgaagggtgataaggggctaaggctcgttggatag

SEQ ID NO: 230697 - DNA, 1083 bp, Klebsiella pneumoniae
atgagtacattaccagtggataatcccggtatcgcttcggtaccggtcagtagcgtcggggatgtggcgcggctaattaattccggcatggaacaagcgaaatatgcgcggatgattgtcttcctcgcgctggggggcgtttttctcgacgcatatgacttaaccacgctctcctacggtattgatgacgttgtacgtgaatttcagctctcaccgctgctgaccggcctggtgacttcgtccattatggtcgggactatcgtcggcaatattatcggcggctggctgaccgataaatatggtcgctattcggtttttatggccgatatgttctttttcgtgatttcggctatcgccgccgggctggcgccgaacgtctgggtgttgattggcgcccgcttcctgatgggcatcggcgttggcatcgacctgccggtagcgatgtcctatctggccgagttttcccgctttgccggcaaaggcaacaaagcggctcgcctcgcggcgtggtgcccgatgtggtacgccgcctcaaccgtctgctttctcattatcttcggcctctatttcctgctgccgcaggagcatcttgactggctgtggcgcgcctccctgctgttcggcgcggtgccggcactgctgattattgccgtccgcagtcgatttatgaatgaatccccgctgtgggcggcgaaccagggcgatctgacctctgcagtgcgtattttacgcgactcctgggggatccatgcccatgaggtcccggcggcgaagcccgcgccagcgccgaaagtgagcttccgcgtgctgttcgaaaaaccctaccgcgagcggactatcgtcgccggggtgatgaatatctgtatctccttcgagtacacggcgattgcctttttcctgccgtcaattcttgcccagttcctcggggctggcgtcttcgaaactatttcggcatcgctggggctgaacgccctgtttgcttttaccggtgggctgctcggtatgcatctgaagtggaagtgtgattatcattcgaattcaatcggatacctttcaaatcatccggcaaatccccgccaatag

SEQ ID NO: 230698 - DNA, 396 bp, Klebsiella pneumoniae
atgctggattacgaacgcttctctgccacccaggatattgatgccgaactgcgttactcctatatgcatctgcaaagtttcggcagtagcgccgaggtggtgcagggcgaggccagcgcggagaatctcggcctgtatctgcgccgccgcgcgccgatagccgactggtcgctgctgggcaacccactgcgttatgtgctggagggggcgcatactgaatttctcggcgagcagcgaggggcgctgggctttaccggtttgacctccttgggggttggcctcgagctggacagcagtaaatacccggtctttatcacccgcacccggctggtggcgcgctatatgttcggcaataacaccacaggctatggtgtaggcctggcaaagagtttttga

SEQ ID NO: 230699 - DNA, 1875 bp, Klebsiella pneumoniae
atggcgaagggattctttctgtatcacctggataaaaccacctgtgggggacgcatactttcgggtgcgcctgatgacacttaccacattggcggcattgagcggcaacaggtcagggtgggcgatccggtgacctgcggtaagcacgaggggcgatttcgcgtctgtgggggaatgggtgacacctacgatgtcggtggatccctgaaagaatgggctggctcactggacagctacagctcttgcccgtgtcgtgctcggttcgtcccgaccgtcttttctcactcctacgatagggactgcaatgccgggcgggtagctgaacgggcggaaacggcgaagaaaaaaaaccaacagcctgagcctgaacagcgtgcgcaggacgcaaagaaaaaacgggaaatcacactaaccatcggtgtgttttttgatggaaccggaaacaatgcgaataatagcggtgaccgtcaggccgcctgttccggcgaacatttcgggatgaatgacgccgatgcggtaacggcgtactctcagtgcgtgcgactaaagcatggctatagtggtactgccgcagggagctatattggctattatagcaatgtgcactggttgtatatattgtacaggcaggatatccgacccgatagcggagcaggccagcacgccatttatgttgaaggtattggcacggaagacggagctggcgacaatacttacggaatgggtactggtcgaggcgataccggtgtggtgagaaaaaccgataaggcagttgcagctctgactgtcggtattcaggaatatttacttcagcatgcaagcgatggttcctgcaccatcaaagagacacaatttgatatattcggtttcagtcgcggggctggtgcggcacggcactttgccaatcgggtattcagtcaggaccgtgccattatcacggcgattagagccggtttgaatggtattgaattctccggtgcaccaggtggtaaaacccgctttctgggcatatttgataccgtggcggcgatcggcaccccggttaacggctttaacccgcacagcgcagacacaggagatgtcaatctggcgctacgtccaggtgtagcggagaaggtttttcacatcaccgcgcagcatgaatgtcgttttaactttgcattgaacagcgtaaagccagcgtggccggagctggcgctacccggtgcgcactccgacattggtggcggctataatcccaacgagaatgaagcttatttccttacccgaccagagtttgaaaccgtccccttttccatcccggatacggaaacgcgtatttaccggcagacctgtgcaaaacttaaaaccatggacggctatccggcaatagctctactgctaaatgcggtagaggtgagcgtcgatacctggcatgacgacagaatgccagctgaccgttacggcacgctacagaaacgcagtggagcagctctggttatcaaccgtccgactttcaacgactggtcaaaagtggtattgcgggtgatgctcgatgcggcccaggatgccggggcggtgtttgaacctattcgagatacaaatgcacacttaaagcttaggcaagaactgaacggtttgtgtgaaaaagcgattgcgatgggccgagccataaggagtggtaagtctgccccaggctttaccacaccggaattgcggatgttggccgaaaaatatatccactgctcggccaactggaacagcgttatacaagacagtcggggtattatcagcggtgcggtcaaaccggcgaagctggtgacattcaccaaccggcctgatgaccgctggcagcgtaccgtttacgatatggacggaaataaaatatggaaataa

SEQ ID NO: 230700 - DNA, 876 bp, Klebsiella pneumoniae
atggaattgcgtcaatgccgctacttcatctcagtagcgaagctaggtagcattagtcaagctgcgttagaacttcatattgctcaacccgctctgacacgccagatgcaaaaactggaagaagatcttagagtaacgctcttcaatcgaacagggcgcggggtgcaacttactgatgcaggaagccagttcctcgttgacgcggaaatattgatcaacaatgtaaccgtcataaaggagcgcgctgtacgagcctcccgtggagaatgtggtaatatttcgctagcgcttcctgtaatacaaaatgcggcaccaccgatcacaacattattaaaaaaattcaagaaggcatcaccgctcgtcggtattacgcttcatcacctcatatctgaagtgcaactttcaaagatcgctgagggagagctggatgctggttttttattgtttagacctcttaatgatccgctttttgcaggaatccccgttttcaaagaaaaaatgttattagcttatccgactgagtggaagtggcctgataataaagaacctcgttacttaagagaattgcagaatcttgactttatatggcttcctcgtaccgcggcaccggcgtggcatgatcgacttattcattgcttttacgatgcaggttttacgccacgttccgttatgcacggcgttgatgcagtatcgatgcttacattagttagcgcaggcatgggatgtaccatcgttgcagaagggatgagacatcttgctccgtcaaacgtgtcgtttgtggttttagaagatttaaacattgttcaggaatgggagttagtatggcgcaaggacaggtgctctgaggttttaaaaagtttaataaatttgatttga

SEQ ID NO: 230701 - DNA, 291 bp, Klebsiella pneumoniae
atgaagatccccttgagaaagcgcatcgttaccattcccaatccatccatatgcgccaggtacctcctggagcataaaaccaaaatcttcggcggtcatcgctggaagaacattatcatgagcattattttcaccaacaatttcccgcatcattttagccataaaacgagcttctttgggatgattattagtatttggataaccaccttgtttaataattacctcagcgtgcgcgccatgagcttctgctatgctgatggcaatacgctgcatattatccagaatcaatga

SEQ ID NO: 230702 - DNA, 1764 bp, Klebsiella pneumoniae
atggccgaacttaacccgcctttgggaacgacgacgcctgaaatattcctggataacgtcaagcgcgctgacgagctggttaacggtccggccggaacggttaacgaccgcgcaggcgaaccgctcgatacctggcgccagatgatggctaagaatgacgaagttcggcagaacatcatcccgctcagtaagcagtatcagacgctggaagcagcccaggcggatatcgcgaatattccggtgggctcgaccacgtactaccgtagcccggacgacagcgcgctcgcaatcgaggtgatgaacgttggcgggacgctgcagcctaccgggagaaaaatgccttctcagcaggcggtcgatgaagccagcgattccgcaaatttggcgctggaaagagttcctgaggaaacggtgatgcctgctctggttcctgtagtgcgtgatatggagggtaaagtacccatctggctaaaagatggtgattttgatacaaggggagtaactgatgagttctcagacaaggtcgcgggaaaaggcactgccattccagccgccctggcaatgcttcccagtgaggtcgtttccccgcagatggttcccctatttcgggacctcgcgggtaatgtccccgtttatctcgttgacggtagactagccgcgtatggcgtagactcgtctctgctcaacttgatttatgccgggcttcagggcctttttcagccaaatatgaaatttaccgatgggcgtagtgcctggcgctggcgggtagcaaaatcgaagtacaaactttcggtgggagcaaaactgaaagtcggttttacgggggattcatggacggagaagcgcgccatcccgcagatgatggcgaacatcctttactctgaatacagcaaagctggcgaaggctggataaattttgcgtcggctaacggtgacacccttaacggtatgtcgttcaacatttccggctggacgacttacgatgcatcagagacaactgcggagccgacgtatggctgcgcactcgatggtttgtgtctctacgcaaccggcacggcagccaggatcacgctcaacgcggtcaacgccacctctctctctatctacttcaaagatacggcaggcgtcttccgctacaccattgacggcggcacaccagtagtggtcacgggcgcaggaactggcaatgtgaccaaagtggatgtcacgggccttagctctaccggaacacatcagctggtcattgacctgacgggtaatactgacaccgtggttatctacggcgtttatgcgtccatctcgtcgaacggcgtggaaatccaaaaatttggtaacgcgaacatcacggctgacggttacacaaaggtcctcagtaatatcagctactttgcccaacagctgaacccggacatcatttttatgattatcgggaccaacgactaccggctggggcggacactatcgaacttctacacagcactgacttcatgggtgcaggcttataaagcggcgcttcctgatactgctctggtcctgatcgccccaccgcaatgtaacgcgtcaggaagttatccgctttcctcataccgcgatgtgatgcggcaggtagcgaacgagaaccacgtcgagttcttcagcctctatgatgacttccctgcagcatatgcaacggcgaatacctacggcctgtggaatgacgctttgcacctgaacaacaacggggcagattttctggcccgggaactttataactacttcctctaa

SEQ ID NO: 230703 - DNA, 951 bp, Klebsiella pneumoniae
atgctgactcagttaaaaaaaaatggtactgaggtatccagagcaaccacgttattttcatcattcgttgacaagaacaaagtaaaatgccctggtaatgtaaaaaaattcatctttctgtgtggtgctaataaaaaaaatggagagccatcagcgaggcgactggaattaataaatttttctgaacggtatttaagtaattgccatttttttcttgctgaactagttttcaaagagttaagcacagatgaggaatcattatctgataatttattagatatcgaagctgatttatcaaaattagccgaccatattatcattgttttagaaagttattcttcctttacggaacttggtgcattcgcatacagcaagcaattacgcaagaaattaataatagttaacaatacaaaatttataaatgagaaatcttttataaacatgggaccaataaaagctattactcagcaatctcaacaatctggtcatttcttgcattataagatgaaagaaggggttgaaagcatagagcgctctgatgggattggtgaaattttcgatccattatatgatattctttcaaagaacgacagagcaatttcaagaactttaaaaaaggaagagttagatccctccagtaactttaataaagactcagtacgctttattcatgacgtgatttttgtatgtggtcctttgcaactcaatgaacttatcgaaataatcacaaaaatttttggtacaaaaagccattacaaaaaaaatcttctaaagcatcttggtatgctaatggcaattagaataatatcatgcacaaatgggatttattattctttgtataaagaatattattttaaatatgactttgacattgacaacatatcatcaatgtttaaagtttttttcctcaagaacaagccagaaaggacgagggtatatgagaatatatag

SEQ ID NO: 230704 - DNA, 951 bp, Klebsiella pneumoniae
atgagaatatatagcctaattgactcacagacattgatgacaaagggatttgctgctgaagtaatgcgatcacctgagccaccaaaaaaatgggatatagctaagaaaaaaggaggtatgagaacaatttatcacccatcatcaaaagttaaactaattcaatattggttaatgaataatattttttcaaaactgtcaatgcataatgctgcatatgcatttgttaaaaaccgttcaataaaaagcaatgctttattacatgccgcatcaaaaaatagatactatgtaaaaatagatctcaaagatttttttccttcaataaaatttagtgattttgagtatgcattcactcgttatcgagatcgcattgaatttacacccgaatatgataaagagttactacaacttataaaaacaatatgcttcatatcagatggcaccctccctatcgggtttcctacatctccaataattgcaaactttgtggcaagagaacttgatgaaaaacttacgcaaaaactaaatgcaattgataaacttaatgctacttatacacgatatgcagatgatattattgtttctacaaatatgaaaggggctagtaaattaatacttaattgttttaaaaacacaataaaagagattaggcctgactttcaaataaacattaaaaaaattaagatctgtagtgcttcgggaggaagcatagtagttaccggcttaaaagtttgccatgactttcatattacattacataagtcaatgaaagataaaataagattgcatctttctcttttatcaaaaggggtattaaaagatgaagaccacaataaactttccggttatattgcttatgcaaaagatatagacccccatttttatacaaaactgaacagaaaatactttcaagaaataaaaatgattcaaaatattcacaacaaagttgaataa

SEQ ID NO: 230705 - DNA, 297 bp, Klebsiella pneumoniae
atgggatacatttgggcctcaaaggaactcgaggttgcggcaaaaaaagcgaccactgcatcagttttagatacacacatacgtaacatcactaaaaaacatgaagacgatatgctccctttacagcttgctttaaaaagtactgtagacaatttaaaagtctcgttactagagagtaccaggagtcagtatctcaatgaaatagaacgaatcaataaagttattcgtgaaagagaaattattttctcagaaaacataaacaatcttaaaaataacatatcaaaagaagtcgattaa

SEQ ID NO: 230706 - DNA, 996 bp, Klebsiella pneumoniae
atggccggctttgagtcagcctacgtggccctgtcgcgtatgaagcagcatgtgcaggtgtacaccgataaccgtcagggctggacggatgccattaacaatgccgtacagaaaggaactgcccacgatgtgctggagccgaaaccggaccgggaggtcatgaatgcgcagcggctgttcagtacggcacgggaactgcgggacgtggcggcaggccgtgccgttctccgtcaggcagggctggccgggggagacagccctgcacggtttattgcaccgggacgtaaatatccgcagccgtatgtggcactgccggcgtttgaccgtaacggcaagtccgccggtatctggctgaacccactgaccacggatgacggaaacgggctgcggggattcagcggtgaaggacgggtgaaaggcagcggggatgcgcagttcgtggccctgcagggtagccgtaacggagagagcctgctggctgataatatgcaggatggtgtccggattgcccgtgataatcctgacagcggtgtggtggtaagaattgccggtgaaggtcgtccgtggaatcccggtgccatcaccggtggtcgcgtgtggggggatatcccggacagcagcgtccagccgggagccggaaatggcgaaccggtcacggcagaggtgctggcacagcggcaggctgaagaggccatccgccgtgaaacggaacgccgtgcagatgaaattgtccgtaaaatggcagagaacaaacctgacctgccggatggcaaaacagagcaggctgtcagggaaattgccgggcaggagcgtgaccgggctgacataactgaacgggaagccgcgctgccggagagtgtgctgcgtgaatcacaacgggagcaggaagcggtccgggaggttgcccgggaaaatctgctgcaggagcgtctgcagcagatagagcgggatatggttcgtgacctgcagaaagagaaaaccctgggcggagactga

SEQ ID NO: 230707 - DNA, 780 bp, Klebsiella pneumoniae; identical to SEQ ID NO: 15299

SEQ ID NO: 230708 - DNA, 1548 bp, Klebsiella pneumoniae
atggctagaaaacctaaagaaatcaaaacagacccgttagaagtcatcctttggaaagcggcggacaagctgcgtaaaaacattgatgcagccgagtacaagcatgttgtactgggcctcattttccttaagtatatttctgattcttttgaatctcattatgagttgctgaacgctggtgaaggcgagttcgcaggcgctgacccggaagacaaagacgagtacaccgcttacaatgttttctttgtccctgagtttgcacgctggaactatctaatatctaaggccaagctacccgaaatcggtaagctggttgatgatgctatggagcttatcgaggcaggtaacccacagctaaaaggtgtgctgccgaaagtctatgctcgccagaacctcgacgccactgtacttggtgaactgatagatctgattggcaatattgcactaggtgatgccaaagcgcggtctgctgacgttttaggccatgtgttcgaatacttcctcggtgagttcgcgctggcagaaggtaaacaaggcgggcagttctatacaccaaaatccattgtaagcctgctggttaacatgctggaaccctataaaggcagagtcttcgacccctgttgtggttctggtggtatgttcgttcagtctgaaaaatttgttggcgctcatcagggtaatatcgacgatatttctatttacggtcaggaatccaaccagacaacatggcgtctggcaaagatgaaccttgctatccgcggcatcaactcagaacacgtccgctggaataatgaaggttcattccttaacgatgcccataaagatttaagatccgattttatcattgctaaccctccgtttaacgtctccgactggtctggtgaacagcttcgtggtgatgcccgctggcaatatggcattccacctgccggaaatgctaactttgcctggatgcaacacttcctgtatcacctgtcgccaaaaggtcaggctggcgttgtgctggcaaaaggggctttgacttcgaaaagttctggtgaaggtgatatccgtgcggcactggttaaagatgccaatgttattgactgtatcgttaacttacctgcaaaactgttcctgaacacccagatccctgccgcattatggtttatgcgtcgcgatcgtgaaaatagcagccagtatcgtgatcgcagtaaagaaattctgtttattgatgcccgtaatctcggccatttaattaatcgccgtaccaaagtactttctgacgaagatatcaaaacgattgctgatacctaccataactggcgtaacaaaagcggccactacgaagatgtggctggcttctgcgcttctatcgatatcaatgaggttgctaaactcgattatgtgctgactcctggccgttatgtcggccttgctgatgaagaagacgatttcaactttaaagaaaggtttacggctcttaaagctgagtttgaagcacaactggtagaagaagcacgtcttaataaagctatcgctgaaaatctggcgagggtggtattatga

SEQ ID NO: 230709 - DNA, 1266 bp, Klebsiella pneumoniae
atgagcgagtggacacctataaaattaggttcaattgtaaatataacaaatgggtttgcatttaaatctgaaaattttctaacatctttaacatttaatactttgcctgttctgaaaattaaaaatgtggctaatggggatgttcatttaaaagatgttcagtatcacttaatcgatagcaaatatgataaatacacgtcttccaaaggtgatatccttataactttaaccggtaatcacccacaagctcttactcaggttgtgggggcggtatcaaagcagaagtttgatacacttgcatatattaatcagcgagttgctaaaatagacccaatttccagcctggcctttaaggatttcatttattattttcttaaagaaaaatcgactcatgattacttagcaagtcaatcttctggaagtgcaaatcaagcaaatatttcaaaagcagatattgaaaacgtagagttattacttcctccggtcactgaacaaatagccattgcctctgtgctctcctctctggatgacaaaatagacctgcttcatcaccaaaataaaacgctagaatctatggctgaaaccttatttaggcagtggtttattgaagaggcgcaggcagattgggaaataacgacactcgattgtcatattacagtagctaagggattaagttacaaagggtccggccttaccacgtcagataatggtattccactttttagtttaaactcagtacttgagggaggtggttataagagtgctggtttaaaatattacaatggtgattttaaagaaaggcatattataaatcctggggatatcattgtagccaatacggaacaaggtcatgaatatcgacttatcggataccctgctataattccgacgataaaaagcgaattatccatatatacgcatcatttatttaaaatcagcatcaatgacgatagttacttaaccaatgcttttctgtactatttactttgctccaaagatatgcatgagcaagttgttgctgcaactaacggttcaactgtaaatcagctgtcggctgacggattacaacgcccagaattcaaactccccccggagtgtatggtgaaagaattcactacacagattgatttcttctggaaaaaaataagtattaacaactcacaaattaaaaacatagaatctctgcgcgacactctccttcccaaactgatgagcggcgaagtacgggttcagtatgcggaagaagcaatcgcatcagtagcataa

SEQ ID NO: 230710 - DNA, 3240 bp, Klebsiella pneumoniae
atggcaaagatgaccgaatccgatattgaagtaatggcaattgagcacctgcaagggctgggctatgagtatgtttacggcccggacattgaacccagtggaatcaatccgttacgtagctatcagcaggttatccttgaagataaagtgcgtacagcattgcaacgaattaacccgcaccttagtgagaagaagtgtgaggaagcgctaaaacaggtgatgcagataagcacacctgatctgatggcaaacaatctggcctttcatcgcctgttgaccgaaggaatcaatatcgaagtcagcaaggatggtaatacacaaggagagctggcctgcctgatcgactttaacgatcccacgaataatgaatttttggttgtgaaccagataaccatcaaagaaggcaatcatacccgccgaccagaccttattttattcatcaacggtctgccgttagtcgttatcgaagttaaaaatgccgctgacgaaaatgcaacggttgcaggtgcttataaccagattaaaacctatcagaaccaaatctccagcctgtttacctacaatgcatttaatgtgatttcagacggactggaagccaaagcgggaacggtttccgccgatttcagtcgttatatgacatggaaaaccgctaatggtcaaacacaagctaccagtacccaaccacagctcgaagttttattacaggggttgcttaatcctgtaacgctgttggatgtgatccgccactttatcgtgtttgaagccagcaaacatgaagacagcaaagggattatcagtatccgtaccgttaaaaaaatggctgcttatcaccagtactacgcggttaatgcagcagtactttccactattcgtgcctcaggtgtaaatgcagattccccctctgccgaagtagcactgcgccagcagggacgtaacagtaaagttcttgttaatgcgcaaaaaaccggagatcgtaaagcgggggtcgtgtggcatacccagggttccggtaaatcgctttcgatggtgttttataccgggaagattgtactggcgctgaataatccaacagtggtagtgatcactgaccgtaacgatttggatgatcagctattcggtacgttttcttctgccactcagctacttcgtcagacaccaaaacaggccaacaaccgggaagaactcaaagaatatttgcgtgtcgcctctggcggtgtggtgtttactactattcaaaaattccagcctgatgatggcagcaatatctatgagttgctgtcagacagaactaatattgtcgttatcgctgatgaagcacaccgttcccagtacggtttcagcgccaaagaagttgacgtgaaagacaacgaaggcaacgtaacaggtaaacgcaccgtttacggctttgccaaatatatgcgtgatgccttgcccaatgcgagctatcttggctttaccggaacccccatagaaaaaacggacgtaaacacacctgctgtttttggtaactacgttgatatctacgatatctcacaggccgtagaagacggtgcaaccgtgcgtatctactatgaaagccgtcttgccaaaattgccatcagtgacgaaggtcgccagctcattgaagacttcgacgatgagtttaacgaggacgaactgacacttactcagaaagaacgttctaaatgggcgagaatcgaagggctgattggcagttcaaaacgtattaaagccattgcagcggatatggttcagcactttgaacagcgcttaaaatctaatgccgatcatggtaagggcatgattgttaccatgtcccgccgtattgctgctgaagtttataaagaaatcatagcgttaaaacctgaatggcacagcgatgatctaaatgatggcgtgattaaagtcgtcatgacctcttctgctgctgacgggccagaaatcgctaaacaccacaccacaaaaaaagaacgtcaggttctggctaaccgtatgaaggatgacgacgacaagctgaaactggtgatagtgcgtgatatgtggttaaccggcttcgacgctcccagcatgcatacgctgtatatcgacaaaccaatgaaaggccacaacctcatgcaggcaattgcccgtgtgaaccgtgtgtataaagataagataggcggtctggttgttgactatctgggcattgcctctgatttaaaagaagccctctccttttactctgatgcaggtggacgtggagatcctgctgaggttcaggaagaagccgtaacgctcatgcaggaaaagctggaaatcctggaaggcatcatgcatggatacgattacaaagcttactttgccgcaactacctcacaacgcctgacaattattcttgaatcagaaaaccatgttttagggctggataacggtaaaggtaaaatgcgtttcctcgctgcggttgcagccttatcgcaggcatttgcattggcgacaccgcacgataaagcaatggaagcggcacccgaagtagcattcttccaggcagtaaaagccagactgaataaatttactgaaaactcagacggatcagaagaagaacacaatgacagtctcgaagttcgggtaaaacagactatcgatcaggctctggttaccgataaagttgttgatatttttgacgctgctgggatacaaaaacctgatatttccgttctttctgaagaattccttcaggaaatgaaggattaccaacacagaaatattgctttggaaacgcttaaaaaactgctttctgacgagatcaaggttcgctcgaatcaaagtatcacccaaggcaaaaaactgattgatatgctgacctctgcaatcaatggctaccagaacaaggtactgaccgcagcggaggtaattgatgagctaatcaagcttgccaagactatccaggaatctgacagccttgccagccagttaaacctcagcgcttatgaatatgccttctattctgctgttgcagataacgacagtgctcgcgagttaatggaaaaggaaaaactacgagaactggcagtcgtacttacggaggctatccgcaacaatgtcagtcttgactggacagtgaaagaagcagcaagagcaaaaattcgcgtggtggtaaaacgtctgctcaaaaaatatggttatccgcctgatatgtcattgctcgccacagagactgttttgaagcaggctgaacttttagctggagaattaggaaaatga

SEQ ID NO: 230711 - DNA, 159 bp, Klebsiella pneumoniae; identical to SEQ ID NO: 25286

SEQ ID NO: 230712 - DNA, 1422 bp, Klebsiella pneumoniae
atgtcagtaacaaagtctgaaccaaaatctacccgtaaagcaagccgtaaacctgcaaaaacgcaggaaactgtcctgtctgccctgctggcgcagacggaggaagtgagcgtgccgctggcctcgctgattaagtcaccactgaatgtgcgcacggtgccgtattctgcggagtccgtcagcgaactggctgattccattaagggggtcggcctgctgcagaatctggttgttcatgccctgccaggtgaccgccacggtgtcgccgcaggtggtcgccgactggcagcactcaacatgctggcagagcgtggcatcattccggctgactggcctgtccgcgtgaaaattatttcgcaggaactggcgacggccgcatcgatgaccgagaacggtcatcgtcgggatatgcacccagccgaacagattgccggattctgtgcaatggcgcaggaaggcaaaacacctgcacaaatcggtgatttgctgggctattcaccccgccacgttcagcgaatgctgaaactggctgaccttgcgcctgtcatcctcgatgcgctggcagaagacctcatcaccaccgagcactgtcaggcgctggcgctggagaacgacaccgcgcgtcaggtgcaggtgtttgaagccgcctgtcagtcgggatggggcggtaaaccggaagtacagaccattcgtcgtctggtgaccgaaagtgaagtggcggtggcagggaacagtaaattccgcttcgtgggggctgatgccttctcgccagatgaactgcgcactgacctgttcagcgacgacgagggtggctatgtggactgcgtggcgctcgatgccgccctgctggaaaaactccaggctgttgctgaacaccttcgggaagccgaaggctggggatggtgcgccggacgcatggagcctgtcggtgagtgccgtgaggatgccggaacataccgctgtctgccggagccggaagcggtgctgacggaggcggaagaagaacgtctgaacgaactgatgacgcgttacgacgcgctggaaaaccagtgtgaggaatctgacctgctggaagcagaaatgaagctgatgcgctgcatggcgaaggtcagggcgtggacgccggagatgcgtgccggaagcggtgtggtggtgtcctggcgttatggcaacgtgtgtgtccagcgtggtgtgcagttgcgcagcgaggatgatgcggctgacgacgctgaccgcacggaacaggtgcaggagaaagcgcccgtggaggaaatcagtctgccactgctgacgaaaatgtcttccgaacgcacgctggcagtccaggcagcactgatgcagcaaccggacaaatctctggcactgctggcatggacgctctgccctgatgaatcccctaatgatttttaccaaaatcattag

SEQ ID NO: 230713 - DNA, 363 bp, Klebsiella pneumoniae; identical to SEQ ID NO: 39670

SEQ ID NO: 230714 - DNA, 765 bp, Klebsiella pneumoniae; identical to SEQ ID NO: 6031

SEQ ID NO: 230715 - DNA, 273 bp, Klebsiella pneumoniae; identical to SEQ ID NO: 162485

SEQ ID NO: 230716 - DNA, 975 bp, Klebsiella pneumoniae
atggctttttttaacctattgtttgttgcatctctaatttgttttggtggtgttatggggagctattccagaggttgccgagactcccaaaataaattttcaaaagataaggatgagaataataaaagagctagtgtttatagatttggtatagcatccgcatttatttgtgttcctttcatatcatcatttcttcatgttgattactcaagtataatatttcctgtggctgatggtggtggaactaagttcatagaacaaatattgcttcttatttctgtttcggggatctctgcgtatcttgggtacgcattactggatggtcttgccaacaaagtattaaaagagcaagtagacggtatagataaaaagcaacaagatttggaggctgaacaagatgagtttaaagatgagcttgataggagcaaggagctgatagaacagcttgaaatggataagaaaacaacaaaattcgagctaggatactttaaagccatttcagctgtggataaagcagaatcaatgatgtccattccggatgaggctctttctgttaagaaaaaactaactgaggcattagatgctgtaacggaatcattgtctcttgttaaaagagaggatgtagctaaggatgactacgacaagctcttagtgcttaaagcttatattttgaaaagacttgatcgtattgatgatgctctgtcaattacggatgagttacttatgagtaatgaggataaccctatacttatttacaataaggcttgctatcaatatattttgcgtcgttgccaagctgataactccgatattaaggatatgattcgcagggctctgactattaaagttacagatcctgaattcattcgcaggcaagaaaaaataagaaccaaggtcataggaaataaagataatgatcttgaagggttgtttactgacgctgagctggaggaattaaaggtggctatcaaatag

SEQ ID NO: 230717 - DNA, 699 bp, Klebsiella pneumoniae; identical to SEQ ID NO: 6085

SEQ ID NO: 230718 - DNA, 1200 bp, Klebsiella pneumoniae; identical to SEQ ID NO: 6086

SEQ ID NO: 230719 - DNA, 678 bp, Klebsiella pneumoniae; identical to SEQ ID NO: 54015

SEQ ID NO: 230720 - DNA, 984 bp, Klebsiella pneumoniae
ttgatagccattcactatcgacattatggcaatgtcaatctgctggccgaaagcttgccatttcttgagaagcagatcctctccctggaaatgcgcgactttgatgacctggtgacctgctgcctgggtgactggggaagccgcgttcatgatatgcgtaattacaaaaatggctcgccagctctccatttcaccagtgcttgtttctattattatcatttgttaattatcgcaaaaatatgtgatgatcttggctttaaagaaaaatggctaaaatatattggcaaggccaataaaattagagagaaaattttatcactctataagaatacggatggcagctttgccgatcgcagtcagaccagctttgtttttgcaatctacttcgatttgtgtgatgatatcgagagttcattgaatgcattgatcgatctcatcaaaaaagagaaaaatgttatcacttgtgggatttttggccaaagttttgcctatgaaatatttcatcgctatggtcataatgaattaatccttgaatggttaagagtcgaagccggattcaagaaaatgcttaaaaatgatgccagcacattgaaggaatttttcggtgataacctgaatggttcgaataatcatgcgatgttcagttcttattccagttggctgtttcaggctttgggcggcattaccgtcgctgaggaggcggttggtgctgatgttattttaatcagtccatcctttactgacacgattaactttgtggattgctggcatcaaaccatcagagggcgtattgagtgtcgctggcggcgctataaaaaaggcatagaattagtcatcaaagtgccatttaacctcaaaaaatgcactcttaaattaccaaaagtgtatcaacttaataaacaattacctgcgccgatagactgtgatacctatcatcacttttatgacattaccgatgcaggtgagataaaagtactattgtaa

SEQ ID NO: 230721 - DNA, 603 bp, Klebsiella pneumoniae
atgaataaagccgtattaaatagcgaactcattactacaaaggcaggaaacattaccgtttataattttgatgctgagacgaaggaatatctttccacatcaaccgaataccttgctgtgggtgtcggtattccggcgtattcatgcttagatgcaccaggtacacataaagccggttatgcaatctgccgctctgcagattttaactcatgggaatatgtgccagaccatcgcggtgaaatcatctatagcaccgaaacaggagaatcgaaagaaatcacatctctgggtgattaccctgaaaatacaaccactatcgccccgttaacgccatatgataaatgggatggtgagaaatgggtgacggatactgaggcacagcatagcgccgcagtagaagcggcagaagcacagcgccagtcactgattgatgcagcaatgtcttccatcagtctgattcaactgaaattacaggccggacggaagctgacgcaggcagaaacaacccgacttaacgctgtgctggattatattgacgcggtgacggcaacagataccagcaccgcgcctgatgtcatctggcctgaactgccggaggcgtag

SEQ ID NO: 230722 - DNA, 882 bp, Klebsiella pneumoniae; identical to SEQ ID NO: 180798

SEQ ID NO: 230723 - DNA, 777 bp, Klebsiella pneumoniae
atgtcaaaagtacttcctgtctggctatatggggaatcattatcgagagccgagttaaccgcagatatcggtggaaagatgaaatggttcataaatgaatcactaataaacgctgtaaataactataacatacaaccagtaaaaatatattcttggttctcctcgcttgcaattttaatcggcttatacactatttttgtgggaaaatcaggcagatggaaaacgttcatagtcatagcgatcgggataggttcctacgctccaaatttagcgacaaaagagaattgggcagcattccgctcgttagtggccttagaacttattatatcaactctatttcttattggcataaatagccttgtcagtagaatttttaagcaagcatttgtctggcctcttatcgctttaacaattatgataatagctcagtataatattataaatggatttattattcctcaacgctctgaaattcaggcacttgctgcggaaataactaataaaatacctaagaattacacaggaaaattaatgttcgatctcacagatcctgcttacaatgcctttacaaaaacacagagatatgatgagtttgggaatatttcattggcagcaccctgggcgctcaaaggtatggctgaagagatcagaattatgaaaggatttaatttcaaactatctaacaacgttataatttctgagaccaatcgatgtattgatgattgtatggttatcaaaacgtcagatgcaatgcgaaggtcaacgataaattattag

SEQ ID NO: 230724 - DNA, 402 bp, Klebsiella pneumoniae
atggccagagtgtctattagtgaggcagcccgactgacgggtaagagtagaacaacactgcacaggttaattaaagcaggtgacctgtccacctgtagcggtgagcgcaatgcaaaaatggtagatacttcagagcttttacgtgtctttggtccctttgaacaactgaagggtgaacaccattctggacaggtctctgaacggcgcgatacagcctctgttgaccagtgtgaacaggtgattcgtcatctgaaacaggagattgaacacctgaacaccttacttttgtccaaagattcgcacattgacagcctgaaacaggccatgctccttcttgaaaatcaccaggcaaaattaactgaatccccggcgccatggtggaaattctggaaaaaatcctga

SEQ ID NO: 230725 - DNA, 516 bp, Klebsiella pneumoniae
atgaatatgccgttctcgcgtgtaccaacctcccttggcgacactgtacgctatttacgctaccctggagagtttatcccggcagctaatcgttctatgttcgtacaaacggtttcatttgttgggatggtcatacatcgtgatctgctcgcgaccagtcttgactacattcgcgaacagctctttatctactttgatgatctttactttggctatcagctatcattagctggtgagcaaattatgtatagcccggagttgcttttttatcatgatgtgagtattcagggcaaacttattgcacctgaatggaaggtttactatctatgccgtaatttgatcctgtcgaagaaaatattccagaaaaatggcgtgtatagcaattcagcgatagcgatacgcatcctaaaatatatattaatcctgccatggcaacgtcaaaaatattcctatatgaaatttattcttcgtggaatttcacatggcataaaaggtattagtggtaagtatcattaa

SEQ ID NO: 230726 - DNA, 639 bp, Klebsiella pneumoniae; identical to SEQ ID NO: 199696

SEQ ID NO: 230727 - DNA, 402 bp, Klebsiella pneumoniae
atgacgaataaccctaccgatgacagcagaccatggtcggtctttcttatttttctgcggcttggattgacatcttttggcggccccattgcgcacttgggctacttccgcgccgaatttgtcacacggcggcgctggctctccgaacggagctatgctgacttggtcgcgctttgtcagttcttgccagggcctgcaagcagccaggtcggcatagcggtaggactgtctcgggctggatacagcggggcgctggctgcttgggctggcttcacgctgccgtctgccatagccttgatcctttttgcgctcggcatctccagctatggcgattacgtctcgcagggcgcgttgcatggcttaaaagtggtggctgtggccgtggggcactgttgcaaatag

SEQ ID NO: 230728 - DNA, 504 bp, Klebsiella pneumoniae
atgccgggcaaccgcccgcattatgggcgttggcctcaacacgattttccgccatttaaaaaactcaggccgcagtcggtaacctcgcgcatacagccgggcagtgacgtcatcgtctgcgcggaaatggacgaacagtggggctatgtcggggctaaatcgcgccagcgctggctgttttacgcgtatgacaggctccggaagacggttgttgcgcacgtattcggtgaacgcactatggcgacgctggggcgtcttatgagcctgctgtcaccctttgacgtggtgatatggatgacggatggctggccgctgtatgaatcccgcctgaagggaaagctgcacgtaatcagcaagcgatatacgcagcgaattgagcggcataacctgaatctgaggcagcacctggcacggctgggacggaagtcgctgtcgttctcaaaatcggtggagctgcatgacaaagtcatcgggcattatctgaacataaaacactatcaataa

SEQ ID NO: 230729 - DNA, 186 bp, Klebsiella pneumoniae
atgatcacgctgatcgataatgtggacttgatgtcccttctcagcaagttggcgaccgataactgcaccagagaagccagcacctacgatcaatatttttttacttttcatctgttgtctcttttattatccaagaatagcacggcgtactttgtaataatatttagtcatcatgtttcttcttga

SEQ ID NO: 230730 - DNA, 297 bp, Klebsiella pneumoniae
atgagcgtaattcatgatttaaagatcggcccgctgttttttaatgctgtagcaaatggcgagaaaaaagcagaagtgagaaagaatgaccgcgattttaaatgcggtgattttctgctgctgcgtgaatgggagggggaatattcaggtaataagctggtcgtaaaggttacgcatatattgccacttgatggtttagttgtcggcggcggcaattgggtaatgatgtcggtttctcatattgaagaaagtgatattcagccatttatggaagcagttatcgggggtgttcaatga

SEQ ID NO: 230731 - DNA, 624 bp, Klebsiella pneumoniae
atgtcaacgcaaaaaatcacaaatcgccacatcaaaaagaagttacaaagtaacattatgcaaaatactggcggccagcccgtcattgagcgaattttgaaagcctacggttttactactcggcagtccctatgtaaccatctggggatttcccaaagcacgatggcaaacaggtatgcacgcaatacctttccttctgattggacaatcatctgcagcatcgaaacaggcgcatctttgcagtggttggtttcaggtgagggggttatgttcgaggatgaggtcgagcgtaaagccttagccttaaaacacttcaaaataacagatggggttttgacatcacataatgatatatactatgacagcagcttgattcctgatggtttatcgagtccatctttagtggcatatgaaagctctctgtatcttattgatgaacatgaaggagagataaatgatgggtggtgggtcatagaaattgatgggttatacagtattagggaaatctttagatttcccggaggccgtatacgtgtcgaaaatggcaaagcatcctttgaatgtcaggctcatgatataaaagtgtttggtaaagtgttcctcaaaacagaacaaattagttaa

SEQ ID NO: 230732 - DNA, 867 bp, Klebsiella pneumoniae
atgactacttcgcctaaaacaacaaaagaaaaagtaactgaaaatattgagcgcacttgctttgtaatcatgcctatcgccgacatggcgagttacgattcgcgtcacttcgatagggtttataatcatttaataaaaccagcatgtgatgctgctggttttaaaaccgtgagagctgatgaagttaacaattccaatctaattgttttagatattttaaaaagaattgttgaatccgatattgcaatatgtgatctaagcgggcgaaatcctaatgtgatgtacgaattaggactaagacaggcctttaacaaaaaaacagtattaataaaagacgatcgaacaattagcccgtttgatgttcaagcattcagatattgtgaatatgatagttcactgcgtattgataatgcttttaacaatatcaaatctttggaaaaagctatagtaagcacctttgaggcagacacaaatgacgtaaattctattgttcagcttctgagaattgaaccagctaaagtcggtgaaaaaacgcagttaagcaagcaagacactttaatatttgaaacactgaatcagattttaaataaaatagacacaccagcaaagatattccgcagtagcaaaacagttaaatacaaacctcgctctaaatatttaattgagcaacttaaattgaacagaacagatgatctaatagggaaaaattacatgaatgagcgaacatttgtaatgctcgggacgctagagtctgttgaaagcattaacggagaactgctctttgtctttaaatatggtaaagacgcgtattttaaataccctgagagccatcctgaatttgaagacatagcagaaatcgacttttag

SEQ ID NO: 230733 - DNA, 1263 bp, Klebsiella pneumoniae
atgaattttttacagcaatttaaatgccttgtatgtgacacggtcattgatacaagaataggtatgtctaatcgagacatacaaccgttccaatttgcatgtccaaattgtgagaataatatatcgtttactcttggggagggagagcctgtatttaacggtgcggaaactgtagaaagcaatgactttggcacaacaaatccattcatcgatttgcatttagattttcccgtaggctttggaaaatacgaaaaaggaaaaacagcattcttaaaaataacaagtgcaataggtcatgaaaaatacttaatgctgaacgcacatctaaatggaatgaattatatttataaacatcgcgataagctccagcgactcattactcaatacaaacaaggaaattacaatactttcagtaacctaatgaaagaattacctactctgaaaaaacctcgttcgctaaaaatacaagatatcctttccgcactttatacagcaacctctgcaatgtcatttccctttacaatacatgcacataatgctgaaattagtgaaaaaatgccacaatttcttcattatattcagaaatatcatccaaaacagctaaataaatttttagatgatattattggaagtgggtttctgaaaagtttgcatttcgattgtttaagcctatatcccaaaatgcttgactttgaactcccttcacgcccagcgctttactatgattatgataaaaacgtagatttatcaatgattcctgctcgagtttcaactgccgaatttgatgactgtaacaatttttacaaagacttatctgaagtattctctcggcaattaataattgtggccggattgaataacttattaaaacgcggagatcataatatttttgacgattcagtaagactaaataaaaaaggcgatttaattaaaggtttttctagtctcaacgaatatgcaaacgttgatttaggcacgaaaataagcggattggatgatagcttttatatagttgatctcaatgctttagacaacaagctgcgaaatggcattgcacattataaatatgaatataaagagtcaattcagatgataacctactatttcgctaaggaaggaatggaacgcactaaatacaacgaacttagtttcatgtcttttatgaggaagctattactattatttcgcgaggtgcacagcattaatcacattatcaaaaccttatatttttactgtatttttatcgctaaaaagaaaatttga

SEQ ID NO: 230734 - DNA, 528 bp, Klebsiella pneumoniae
gtgagtgataaaacccaaattgaactcggtcaatttttgtccgaactaaataaagaatcagatcgtggctctgttctaatagcagcatccattttcgatgagtggttatccgagatcatccaggctcacctgttaaatgacaaagtagctaaaggtctactgaatggtgcaacagcgcctttatcatcttttgctgctagaacaggcttagcatatgcgttaggactgataatggaacacgaatacaaagaactaaacacactgcgtagcattagaaatgcttttgggcatagttggaatggtgttagcttcgcaacacccaaaatacaaaatcaactggagcagctaccttggcttggacccaaagatgttcctaatactcccaaaacaaaattcatattctttgtttctatactgcttgccgatttgatgcaccgtaaacaactagtggaaagagataaggtgacctctaaagtatggggtcacactgcgcgcggtaatttggtcggaaagactacaaattgttaa

SEQ ID NO: 230735 - DNA, 678 bp, Klebsiella pneumoniae; identical to SEQ ID NO: 169824

SEQ ID NO: 230736 - DNA, 1080 bp, Klebsiella pneumoniae
atgaataacatgaatatttatttcgcaactgacaaaaatatatatgatgcacttcatcataaacgaattaccatcgcaagattacgcgagatattattacggaaaggtattattgttgctcaagacttaacaaaggaggaattaattgaagaggtttgcaaactacctcagggatatagtgatctagattctattaaggaacttgtacaaacttatgataaaagagagagtataactagcgtcaagcttcaagcatcatcctctcagacggaattaaaaacagcagcagagttagttaaaagaaaattagccactggctctggtgaaacagtaaaaatcactgcgaaaaaagatgggtctttagcaatcgaggtaaactaccaagaagtagacttgtccagaacagcattgcgtcagatagacaaccgaaacatcaagattgatcttactgtaaataacgataatgttgatattcgtatgcctcagaaccaaaaggctaaagatgtaataacactattacaaaaagagttgtcaaagattaaatccgttgatgttgaaaagtttgaaatttctttagaagcgattcctacaccagcgctaagaagtcagttttttcaagaggttatgggcggcttgagtggatatgaaattgacgacgttactaatgtagagcttaaccgttcaacaagcaaaggtgatgacgaggaagaagaagaaatcgagacaggattcgtaaaaaaagcggttctaaaaggtgattctgttaatagttctgctattttcacccaactacacaacaaaggatactatattggaagaattgcttggtctgctaaacctaaaaacggaataggagacaggattttggttgaagctttctttaaggattcagaaaattgctctgatttttcctatcaaattaaaggaatcaataaccaaaaaggtagtggatacaatgttactattcgtgcagcaaatgaagttgaaaagaagaaaatcagcctactaattgaacagtcagcagcagatgcctataatatcgtgacgggtaaaaaggtggaagagcatgaaaaaatttaa

SEQ ID NO: 230737 - DNA, 1002 bp, Klebsiella pneumoniae; identical to SEQ ID NO: 169822

SEQ ID NO: 230738 - DNA, 216 bp, Klebsiella pneumoniae
atgcacagcaggctgaagggtaatgaagtatttttacttgcgagaatgctggctcctgaactaggtaaaaaagagagagctatcgcccgctttatagatgataaccctcagtccctggcacgtatgtcaatcacagaaattgctaattatttgaaggttagcgtatcgagcataaccaaagtctccaaaaaaactgggatttaccgggtttcatga

SEQ ID NO: 230739 - DNA, 1911 bp, Klebsiella pneumoniae
atgaataggcgtttattatttaagcaagttttggcttttttgtttgttagtcccctaacaagagctaaggtcagtctacaggattataaaagtaatttatttgaattaataccttcattattctctttgaacaatgaaatgaattcatcactaagatataaaatctcatttattgtcgatgccaatgatgacaggaagaatgtatattttaagaacgagaatggtatttttaatatactaaaggaagatgtttatttcgatagaggtgtattttattctacaaatgggcaggcgttgagcatttacgttcgaccaaatacacccgccaaaatttataatagagaagatagaagccataaattcgtatcggatgtttatttagggaagattgatactacaacttcatctgttgatgaaaaggccgggagcgcaggtaaatttcataaatttataactcctgaatatttcggtgcaactggtgatggtataacagatgatacagtttgcatcaacgaggcaatagctagcggctattctgttttttattcagcacgatatttaattagctcttcaatttccccagtaaataatcaaaagtttgttggtgttaataatgctgagttaattctattgaagccaaaaacttcgctcatcaaaaccaagggtgtttccgatgttgtcattaaaggtctcgttttaactacacatcctaccttaagcaaaccttataatggttcatgtatagaaattgaggacgctaaaggatggtatattggcaataacgtgttctccaattatggtgcctctgcaatattttgccgcaactcgagtgaaatgtttatatataacaataaattcgctggctccaaaggagctgctggtgatgttacattgtggggaagtacttgtcagagcaagattaaaaataacactatgctatcaggttcagactctgcaataattattcaaaccattgttgatggtgatttttgcagtgataatcttattcaagataataatatttcgaattgtactcgatatggtattgttgtttataataatctttcatctaaaaaaagtattcttcgcaatacaaaagtaattggtaataaaatatataatattcttggccaagttaaaaacccttctgttcataatactaaaacttatggtgcagggatctatgttctaagtgctgaaaatataactatccagtataacgaggtttctaaatgtaatcttttaactaactcatcaactttagctccgggttgcataggactcaatgccacatcaaatgcgattgttagtgataacattatatccgatggggcttattatggtatttttataggtgatgcacttcaacaaggaaaaggaagtaatgcaaactctcctgattttatacctgatggaatcgtctatgtacaacgcaatagaataataaattgtaagcgtgatgggatatttattattaataaacattccgtcattattaacgataatatggttgaaggtaatcagggttgtggaatttcaacatctgtaagtaataatgaaatttatcattctatgaaaaatataacaatagctaataattcatcgtgtaataacaagcttgatggcataaatcttagcgatgcttattgtgctcgtatttctggtgggacttattctaataatgatcggtgcggcattaatctaacttcttttggtactgaggtttccttattgcaatgtcaaggcaataagataggtatttcaatatctgataaaggaatgaaatgtcgtattgaagattgtaatttaacgtctaataatgttggagtgctgtctgtagttccttatgaagagcgtggttgtgtattatctaaaaataaactgtcacgtaagcttaatgcctcctcatag

SEQ ID NO: 230740 - DNA, 276 bp, Klebsiella pneumoniae
atgagctttgaaattattgctgggctggtggtcgtcatcctgggcgctatcgctggcgcgtttggcattggtcatgctcgcgggaccagcaaggcagaagccaaagccgatctgcagcgtaccgaagagaacgccgccgctaccgtcgccgcggcagaacgccgggctgaagtcacgaaaggggccagtgatgtacaggaatacgttaagcgtatgggcgatgactatgttgatcgcgagctgcgcgaaaagtttacccgccccggtagtcgttga

SEQ ID NO: 230741 - DNA, 1332 bp, Klebsiella pneumoniae
ttggaatctactaaatatcaagttttcctgagttccacatattctgacttagcagaagaaagagaaagtattataaaagctattttggaaatgtatcatatccccattgggatggagatgttcagtgctgaagatgaagaccagtgggaaatcatcagacgaacgattgaagttagtgattattatattcttgttttaggtttaagatatggttcaaaaacatcagatggcattagtttcacacaaaaagaatatgagtatgccttagaaagaaagatacctattcttgcgtttgtcatgaaagacaatgtgcctctaccaatagatagaagggacgatgatctctcagaaattaatggatttagagaattagtgttaagaaattcaaaaatggctcaattttgggagacaaaagaccagcttataaaaagcgtatcaatttcattgatgaagcagatcatgcagaaacctgggataggatggattcgtggtgataaggcagatatcgatggagctctttcaaaagagttaacatctttgagtaaagaaaacagagagttacgaaaaagagttttggatcttgaatcaaaaatttcatttagaaagccatcgatcgatgtttccataaataaaccgactatcgatgaaaatttcaattcatatgaaatcctaacgatgcctgatgttttgaggttacaaaatgtgccatcacatttacataagtatatctctgaagatgacatagagaaatataatagggagattccaagtcaaaatgaattatttaattataataaagaaattgaaagattttataagataaataattattcatcagcacttgaaatattagtgtctaatataggaagtataaaagcaactaatgtatatatagatatcgaatttcctgatgcttttttaatttatgagaatgacgacacattcagtgagcctgaatcgcctcttccagttaatcctataattcgagcgaaatcggaatatagtaaaaataaatatatgcaaaattctgcattatcccgtttacagacacagttaggtggtggttatagtgtgatggatcgttttccatctttgaataataatctatcatttctgagtaaaattccacctatcaatcaaaagtggtggacaaaacttgatggaagaaaaatcacgataaaaattgataatttattacacacgagagagtcatcatttgatgatgaatacatgatagttcctttaacaacaggaaagcatataattgaggtcaggattatatgtgaggaatatgaagaaatagaaactagatatattgaaattgatatataa

SEQ ID NO: 230742 - DNA, 213 bp, Klebsiella pneumoniae
atggctgattataatagctttgttttgggaggaataaaaattatttttgccgataacaacaaggagtttattaaagagatttgtgaaccattgataaatattctatgcatcgaagagtattattctgctacgggaatttataattatgatgatgctgatgagcaaacggagttacttaaaaatgcattaagggactataaaatagctcactag

SEQ ID NO: 230743 - DNA, 891 bp, Klebsiella pneumoniae
atggattataaaaataagttagttgatgcatcaccaaaattaaacaaccctcaactattggctataatatacttaataccttttggatacttgattgtagaaaacccattatggctagaaaatatatacattgccgctccaattttcctatcatctatagctttattaaccagtgtatacataggatatcgtgatttattaaataaagtatttaataatgcagtagttaaatggggcgtaactggctttacatattccgtatgcttatggatcgcaaagtttaagcttgacatagcttatggtatagtcccagaaaaccttaattactcgacattagcttatgctttcatgctctcatttccaataggggcaatgatttgtgcaattacagtctatatatacatatttttgcgagatgtatccccagcaaaaatagtaatatcctctatgatttcagtatatattggaagcttggctcaacatcatatacaggtgaacaatcttcctgaaaaaataatattaataggacttataattatggtcccctataacatggtcaatttagctagttcattagttattaaaaggaaatttaattttaatcgtttagtatcaggcttatccctttttgctgtgtcagttgctctttttattattagcatgacagcaatgaaatacattgaaagatttcaagaaaagtttatttttctcgatgcaagaacatctacgacatgtggtagctcagaaagcaaatctctttatattgaaaaaaatgaaaaccagtgttataaaatatcaggaaataaattctcggagttaagactaactcttgtagataaaaacatcttgaatataaataataaaggcacttcaacttatgaacaaaaataa

SEQ ID NO: 230744 - DNA, 2538 bp, Klebsiella pneumoniae
atggacgatagtaaattacgctattttgccagcgcatggttaatctccatcacgttaccggcagacagtgcggaacgctataatgcccagtttgtgaacggtatcgacccgctggcttttaatcagtttgtcgccagcgatggcgacgtcatgccgggcacctatgacgttaatatttacattaacgatctgctggtggacagtcgccccgttcgcttctcagaggatagcgcacacggcgggttggccccctgcctgagcgcggcggaatatatccgctatggagtaaagattgacgatgaccaccagccctgtttcgcgctgtcgcagacgatccgccaggcagagcaacaactggatatcgctaatcatcggctgatcattcatatccctcagcaatatattgagcactatccccgtgactatgtttcccccatgcgctttgatgaaggtattaacgctgccttcgtcaactacagctattctaccgatgccaataatggcgacgggggcagccaccagtatcaatatctttcgctaaacagcgggatcaatattgcatcgtggcgattgcgcaataatgcctactggaataagttcagcggccaggcggataagtggcaaagcatcgccagttgggcggaaacgaacatcattccctggcgcagccggcttgtcgtcggccagaccagtaccgacaacagcgtcttcgatagcgtccagtttcgcggcgtacagcttggcaccgatgccgaaatgcgccccagcagccagaccggcttcgcgccggtcattcgcggtgtggccaacagcaatgcccgggtggaagttcggcagaacaactatctgatttacagcgagaacgtcccagccggtccctttgagctaaatgatatcagcgccgttaaccgcagcggtgatttctacgtaaccgtcattgaagccgacggtagccagacgacctttactgtcgcctacaccaccctgccacagctggtgcgggcaggccaatggaattatcagttgtcggcgggtaagtatcatgacggcgctgacggctatgcccccgccctgatgcaaagctcgctctcttatggcctgaataataccttcacactgtacggtggcgcccttgccgcggagaactatcgcgccggcgcttttggcgtcggtagcaatctgggggagattggcgccctctcagccgactatacgctggcgggaacgacgctggcgaatggccagcgcaagcagggagggagcgtgcgttttctgtatgctaaatcctttttatcgagcaagaccgactttcaaatcgcgggctaccgttactcaacggcaggttattatagcctcagcgatgcggttaacgagcgtcgacgctggcacaatggcctgtacgaaaatgattactggccctctgacgaagacgaaagctggcaggcaagcgctccccaacactattacacgtcctggttttataataaaaagcatcgctttgatatttctgcccggcaaactctcggtaagaacagcgctttcttccttaacttcagccagcaaaattactggaatagctcaggaagtgatatctctctgcaggcgggttttaacagcactatccataacgtgaactatggtctgtactatcagaatacgcgtagccacttcacgcatgacgacaatagcatcacactgcgcgtttccatcccttttactctgcaagaaaaccgccggatcaataccgcatttaccctcgcccacagtaaatcgtctggcacgtccgggcaggctggggtaaacggcacgctgctcgatgatggtcgcctgagctgggccgtcaccagcgcctatgatgacaccagccatagcaccaacagcgccagcctgggttatctcggccagtacggtaacctgtataccggctacgcctacagcaaaagccatcgtcaggcgagtctgaatctgagcggcggcgtggtggcacaccgcggcggcgttaccctctcgcaaccgctgggctcaacctttgcgctggtggaagccaaagacgctcagggggtagggatagagaatcagaccggcgtgcgcatcgatccattcggctacgcggtcgtaccacaaagcgttccctatcgggtcaattctgtcgcgctcaaccctcaggacttcgatgcctttcttgatgtccctaacgcagtggcggataccgtgcctacccgcggggcaattacccgggtgcgctttgatacgttccggggatatagcgtgctgatccacaccaccctcgccgacggcagctatccaccattgggcgccgagctatatcgcgccagtgggttcagcaatggtctggtcggcccgggaggagatgtctatgtcagcggagtcgattcaggcgaaaaactgcagataaaatggggcgaaacgcaccagcaaagctgcgaaatcaccctgcccgaactgcgccaggagcctcagcaggcgacggcctggcgtgaattatccttaatctgcacagtaaccccctcgaggtaa

SEQ ID NO: 230745 - DNA, 2151 bp, Klebsiella pneumoniae
atgaccactgtaaataacccaaaaaactcaccgacagaagcagaagagatagatttagggcgtctcatcggtgagctaattgatcatcgaaagttgataatagcagttacatcctgtgtgacgtttatcgcgcttttctatgcaatattagcgacgcctatttaccaatctaatgctttaatacaagttgagcaaaagcaagggaacgcgatactaagtagccttacacaaattttacctgatgctcaaccacagtctgcaccagaaatagcattgttaaaatcaaggatgatactcggcaagacagttgatgatcttaatttgcaaactgaagtcgagcctaagcactttccaataattggagatgggatagcacgattactagggaaagaaaatggtcatattgacattagtactttatacattcctcagaataatggaaccaagactccggaaataattcttactattaaaggtgcaggaaaatttgaagttgaaggcaattcatttacagctataggaaaggttggtgaattgtttcaaaaggatggtgtaaagctcgttgtaaatggttatgacgcaaaagaaggagatagatttgttgttaaatattttacaagactgaaagcaattagtaatctccaagatgcgtttagtgtttcagatcaaggaaaagatactggaatgcttacgttaacattaacgggacctaagccgaaacagatttcggaagttttaaataatatttctgaaaattatttagaacaaaacgttgctcgacaagcagcacaagatgccaaaagtttagatttacttaataaacaattgccaattgttcgtacagatcttgataatgctgaaaataaacttaacagctatagaaagcaacgagattcagtcgatttatccatggaggctaaatctgtattggatcagattgtcaacgttgataatcagttaaatgaaattactttcagagaggctgaaatatcacaactgtataccaaggagcatccgacttataaagccttaatagaaaagaggcagacgttacagaatgaaaaaacaaaattaaataaaagagtgagtagtatgcctactactcagcaagaagttttgcgcttaagtcgagatgttgagtctggtcgagcggtatatttacaattattgaaccgtcaacaagaactaagtattgcaaaatcaagtgcaattggtaatgttaggatcattgataaagcaataacagaaccgcaaccggtcaagcccaaaaaatcgttagttgtaataattggttttatccttggtttatttatagctgtttccgcagtattaattcaagtctttttgcgtcgtggaatagaatctccagaacaattagaagaagctggaataaatgtttacgcgagtgttcctgtttcagaatggttaacaaagaatcataatagaaataaaaattggagaaaagaaactactaaacttcttgctgtcgagaatcccactgatttagctgttgaagcgatacgtagtttacgaacaagtctccatttcgctatgttagaagcgaaaaataaagtacttatgatatctggggcaagcccgaatgcagggaaaacttttgtaagtacaaatttagcagctacaatagcatcaacaggtaagaaggtattatttattgatgcagatctccgtaagggatatgtccataaaatattaggcaacactaaacaagtaggcgtatctgatattttatctggtcagtgtaaaattgaagatgcattaacaagagcttcaagtggagactttgattatataagtcgcggtaaaaatcccccgaatcctgctgagttactaatgcatccaacatttgagaagttattaaaatgggctgatgagaattatgatctggttatcatagatactcccccaatattagctgttactgatgctgcaattattggtagatatgcaggtacgacactattagtagctagatttgagagtaacactgtcaaagaacttgctgttagtgtttcaaggtttgagcagagtggaattgtagttaaaggttgtatattgaatggagtggtcaaaaaagccagtaattattacgggtatggatacggatactacgattattcctataaaaaataa

SEQ ID NO: 230746 - DNA, 1368 bp, Klebsiella pneumoniae
atgatcagcgtattcgatatctttaaaatcggcattggcccttccagctcccataccgttggaccgatgaaagcgggcaaacaattcactgacgacctgatcgcgcgcggcctgctggccgaggtgagcaaagtcgtcgtcgacgtctacggctccctctccctgaccggtaaaggccaccataccgatatcgcgattatcatgggactcgccggcaacctgccggacaccgtcgacatcgacgccattccgggctttattcaggacgttaatacccatggccgcctgatgctggccaacggtcagcacgaagtggacttcccggtggatcagtgcatgaatttccatgccgacaacctgtcgctgcatgagaacggcatgcgcatcaccgccctggccggcgacaaggtgctctacagccagacgtattactctatcggcggcggctttatcgttgatgaggagcacttcggccagactaccgaggcgccggttgccgttccttacccttacaaaaacgccgccgacctgcagcgtcactgccgtgaaaccgggctgtcgctctccggcctgatgatgcagaacgaactggcgctgcacagcaaagaagcccttgagcaacacttcgccgcggtgtgggaagtaatgagcgccggtatcgagcgcggcatcaccaccgaaggcgtcctgccgggcaaactgcgcgtcccgcgccgcgccgccgcgctgcgccgtatgctggtgagccaggacaccaccaacagcgatccgatggcggtggtcgactggatcaatatgttcgccctggcggtgaacgaagagaacgccgccggcggccgggtggtgaccgcgccaaccaacggcgcctgcggtatcgtgccggcggtgctggcctactatgacaagtttatccgcaaggtgaacagcaactccctggcccgctatatgctggtcgccagcgcgattggttcgctgtataagatgaacgcctccatctccggcgccgaagtcggctgccagggtgaagtgggggtcgcctgctcgatggcggcggccggtctggcggaactgctgggcggcagcccgggtcaggtgtgcatcgcggcagagatcgctatggagcataacctcggcctgacctgcgacccggtcgccggccaggtgcaggtgccgtgcatcgaacgcaacgctatcgctgccgtgaaagcggtcaacgccgcgcgaatggcgctgcgccggaccagcgagccgcgcgtgtgtctcgataaagtgatcgagaccatgtacgaaaccggcaaagacatgaacgccaagtaccgggaaacctcccgcggtggtctggcgatgaagattgttgcctgcgattaa

SEQ ID NO: 230747 - DNA, 1227 bp, Klebsiella pneumoniae
ttggatatcttagatttcaaaaagcgtttacaacttcgagataattatagaaacgaaataggcaagaaaaatattattcttgtcgacattaaccaagcaagaaagaaattaaccgaagaacatcagaaggctacatctctatcagaaaaaaattgtttactttgcgggcacgactggctcacaaaagatttgttattagccgcgattgatattaaaagtaaattattagaaggctcattagatgacataggtaaattactacaaactgaacttaatgaaataaataaatataaggatgctgaaatacagcgtttagtcgaaacacaagcacaacttaaatttgacaagaacttgtttgacagtttacaaaaggcagagagtattttcgaaaagataataaaaataaatgaaaggctttcacaaatcggaatatcttacccgcagacttttacaaatataccagaagaaatagaatcaagaaaacaatcattaatatcgctgatacgtaagcaaaagaaaaatgagctgatcacacttcctggaggttgggaatcagtcttgaatgaatcattcgccacaccagatgatgttttcaacttagacttagcacagatcaatcgaaaggaaaaatacttcttatacaaaaagattgaagcaaataatcttagacttaaagctttaaaaaaagagcttaacgatttgttagatatggataaagccttaacaaatgctaaaaagaaaattaccacattaaaggaacaactaactatactaaacagagattattctaaaaaaactatcgctgatatagagttaacgttccatatttatagcggtagacttatccaaaactaccaacgtggcttaggactatttatagatgaagggaatggagatagactgaggttctgcacagcagaaaaatcagaacatgacgcaaccatgtcaatgagttctggacaactatcggcattaagtttggcctttttcctatcacttaataaagtgtatgcgaagtccccccttgttctgatagatgatccagctcaatctcttgatgagataaatattgcttctttaagcgacttactacgctgtgagttaagtaataggcagttgatactctcatcacatgaagataatatttcttcatatctcaggtttagatttatgcgtgcaggcttgtcgcaaaaaccatttaatatgcaatcacatacgagtaaataa

SEQ ID NO: 230748 - DNA, 1095 bp, Klebsiella pneumoniae
atgagtttagaagagcgtgtatcaaaacttgaatctttaatgccactggattttgccgattacccggtagatgttttgaccggctactacatcagtcgtaatacaggattactggttgagcagtcagtttctgaagtcgtttttttacaacacgaggcaggagaaagatggcgagttactgcaagggttaatggctcaggcgtctctctcgctatttattacgatgagaacgatgaagttattgggaaggagtatgatggaaattcaagtgtagttaatctggaacggtatgaactaacggtgcctgtgggaacgagaaaaataggtattaccagtcgtactgccgtaccgatttcagtcgaaaaatttcaaatgattggaacatccagcattaaagacagactggaaatggtcgaggctaatataaagtcaaaatggtctggaaaagttattgacgtgatgggagacagtaacgttgcatataatcgctggcaaccccttgtcgctgcagagctgggatgttcattcctgaatcatggtgtaggaggttcgaaaattgccaagcctgacagcgcgtcaacgcaaatcagcatgtgtgatgacgttcgaatcaatgcactcaatacgtcatcggatgcctggatttgcggcccctgggggactaatgactgggcgcaaaatattccgattggaagtatcaccgacacagtgaacacaactgtttacggtgcgctgaacatcatcgctcagaagttgcgtgcacgcgcgccaacaaaaccgatcttctggtgcactccatttaatggtgactatgattctccacggtattcagcctgggttgacggtgaaacaaatggctatgggcgggtttctgactatgcggcggcgatacgcgccgtggcattacgatacggtttcccattaattgacctgaacgccgattgcggatggacgaagtttaacagcagcaacttcctgatgacggaaggtgatactaacccttcccgtatccacctaaatgcggacacggggcctgcgcgtatttcctcactggtaatagaccggctaacgaacctggaaacactggttagttaa

SEQ ID NO: 230749 - DNA, 234 bp, Klebsiella pneumoniae; identical to SEQ ID NO: 95529

SEQ ID NO: 230750 - DNA, 348 bp, Klebsiella pneumoniae
atgacagaagatgatctctatgacctgctgtcgccgctggcagacgggcgggtttatccgtatgtggtatcgctgggcagcgacggacttcctgcagtttccactccctatgtcattttctcgataccgactgatgttgccggggatgttttctgcggccaggcagagtcgacactgcgcattcaggttgatgtatgggctgaaacgaatgacgaagccagagcgttacgcctggatgccctggcgcgcctgcaggtgctttcacctgtcgaggtgacaaaaattcctggctacgacacgacaacccatcttcatcgggcaaccctcgaaataacggtcattgcctga

SEQ ID NO: 230751 - DNA, 924 bp, Klebsiella pneumoniae
gtggcaaagcaaaagttcaaaatcaccaactggcccacctacaataaagccctcatcaaccgtggctccataactttctggctggatgatgaagctattcaggcctggtatgagtcagcaacaccttcttcacgaggcagacctcagcgctattctgaccttgccatcacgactgtgctggtcattaaacgcgtattcaggctgaccctgcgcgctgcgcagggctttattgattccattttttctctgatgaacgttccgctacgctgcccggattacagctgtgtcagcaggcaggcaaagtcggttaatgtcagtttcaaaacgcccacccggggtgaaatcgcacacctggtaattgattccaccgggctgaaggtcttcggtgaaggcgagtggaaagtcaaaaagcatggccaggaacgccgccgtatctggcgtaagctgcatctcgccgttgacagtaaaacacatgaaatcatctgcgctgacctgtcgctgaacaatgtgacggactcagaggccttcccgggtcttatccggcagactcacagaaaaatcagggcagcatcggcagacggcgcttacgacacccggctctgtcacgatgaactgcggcgtaagaaaatcagcgcgcttatcccaccccgaaaaggtgcgggttactggcccggtgaatatgcagaccgtaaccgtgcagtggctaatcagcaaatgaccgggagtaatgcgcggtggaaatggacaacagattacaaccgtcgctcgatagcggaaacggcgatgtaccgggtaaaacagctgttcgggggggcactgacgctgcgtgactacgatggtcaggttgcggaggctatggccctggtacgagcgctgaacaaaatgacgaaagcaggtatgcctgaaagcgtgcgtattgcctga

SEQ ID NO: 230752 - DNA, 582 bp, Klebsiella pneumoniae
atgaaaaaacaacctcgatttataaccatcctcataggagcgctgctttctggcgtagccttgcaggctaccgcggccaacactatcaatcctgactcgggcaccagttcggaaggcgccggcgggcaggtcatcttcaatgggtcaatcaccgacagctcttgcaacgtcgatagtagttctaatggccagaaggttgatctgggcaaatgggccagcaactattttaccggcactggttttgaaaccaccaaaacccccttccatatcaaagtgaaagattgcccggccagcgtgactacggtcgccgtgctgtttgacggcgcgcgcgatcagtctgataactccctgctggccatcaacggcggcgccagcggcgtagcgattaagctgtatgagcacgatcggtcgacggctgtcagcctcggtaaaacgtcagccaaacagacggtcactccgggtaccagcggcggcaccggctctgccgacctcgagttttacgccgactatatctccaccgcggcgaccgtgacggcaggtaaagccgacggtacagctaatttcaatatgatttataattga

SEQ ID NO: 230753 - DNA, 348 bp, Klebsiella pneumoniae; identical to SEQ ID NO: 215498

SEQ ID NO: 230754 - DNA, 366 bp, Klebsiella pneumoniae
atggcgggctttcgtaaaaaagaagtctccgttccggagtgggataacgccaaagtcatcattcgtgagccatcagcagaagcctggattcgctggcagggcattgccagcccggaaccacccaaactaccggaagggcaggaagccccagaggcaccagaactgaccccttcagaacgagccttccgcacgatgcgggccgacgtcacgcttttcatcgatattttgctggataccgacctgcagcccgtctttactgtcgatgacaccgaacaggttgaagcgatctatggccctgtgcattcccggctgttgaagcaggcacttgatctcattcgtaacgcggatgatgctaaagcaaagtaa

SEQ ID NO: 230755 - DNA, 261 bp, Klebsiella pneumoniae
atgatattggttacccaggattactatctttttcaaggtgttaagaatttttttcctgatatcattcagttagattctagcggaaaagcgattttagataatgaggttgatgaagtctctctgctggttgatagccgctcgccgctttgccattacgattatctcgtgctggcagcggcgaaatccagaaagcgaatatgttgtatcgtcctcgatatgcgccatcgggaagagggtgatgctgccaacttactgatttag

SEQ ID NO: 230756 - DNA, 879 bp, Klebsiella pneumoniae
atgacccttgttctcagcgcttttgccatgagcgcttacgcggcgctggatctgcgcgccaatgagcagccattgccggtcacccgcgacccgcaggcgatagcgaaaattccgccgggctatcgcttcgtcgagccggggacgctaacggtggcgatctcggcgctcaattcgccgccgctggccctgctggccagcgacaaccgcacgcggatcggtagcgacccggatatagcccgcctgctggccggaagccttggcctgaagctcaggctggtgcccaccgcgtgggaggactggccgctgggcatcgcctccggccgctacgatgtggcgctgatcaatatcgcggtaaccgagaagcgcaaagagaagttcgattttgcgacttaccgggtggactccctggccttctcggtgaaatccaccagcgatatcgccgcggtaaacggacccgccgaccttgccgggcgcaaagtgatcgtcgggtccggcaccaatcaggagcggatcctgctgggctggaacgaggacaaccgcgccgccggacggccgcaggcccagccggtctacctgaccgatgatgcctccggcaacctctatatccagtccgggcgggcggatatctttttcggcccgcagtcggtggcagcctataaagcggcgcttaacggccagacccgggtggtgggcctggggccgaaaaaagcgtgggtggcgacaaccaccaaaaaaggcaacggtctggtctatgccctgcaggcggctctcgacggggcgattgcccgcggtgaatatcagcaggtgctggcgcgttggggggagcagggcgaagcggtggcgcagtcggtggtcaacccgccggggataacctactaa

SEQ ID NO: 230757 - DNA, 954 bp, Klebsiella pneumoniae
gtgcacaatcccgcatttctcatcacgattgatacagagggcgataacctctggcaaaaacatgacagcatcaccaccgagaatgcgcgttatcttccgcgttttcagcagctttgcgaaaagtatggctttaaaccggtctatttgaccaactatgaaatggccatcgaccccttttatatcgaattcgccagagacgtgattgcccgcggcaccgcggaagtcggcatgcatctgcatgcgtggaacagcccgccgaccgagccgctgaccgcagatgactggcgccataagccttatcttattgaatacagcgacgctatgatgcgtgagaaggtcgactatatgacgcgtctgctggaggataccttccagaccaaaatggttagccatcgcgccgggcgctgggcttttgacgagcgctatgcgcgtctgctggtggaatacgggtatcaggtggattgctcggtgaccccgcgggtgaactggaagaccgccaagggggcgccgcagggcgatggcgggaccgattatcgccgctttccgcagcatgcctatttcctcgatgaaaatgacatcagccgcgagggccactcgccgctgctggaagtgccgatgagcatccagtacaagcactcagcgtggatgaacagcgtgaagcagggctacgaccgcctgcgcggcaaagtgcgttccccctccgtacactggctgcgaccgatgggcggcaatgtggagacgatgaaaaaagtcgtcgaacaaacgttgacgcagggcaatgactacgtggaatatatgctccactcttcagagtatatgcccggcggcagccccacgttccagaatgaacgggatattgagcgtttatacgctgacctcgaagccttttttagctggctggcgccgcaggtgaagggcatgacgttggcagaatattaccagcggaaatgctaa

SEQ ID NO: 230758 - DNA, 984 bp, Klebsiella pneumoniae
atgagtgacaagcgacctctactcagtatcattattcctgtttttaataatgagctatatataaaacagaccctcacatccgttttcgagcaaatcgataacgatgtagaagttattattgtcaacgacggttccacagataatagcgccgcgctcattcagaaggcaattgatgagtatcaaggcactggcgaccttcactttattagccagcaaaatgctggcgtatccgtagcgcgcaacgtcgcactcgacaaagcgcagggccgctggattggctttattgatggagacgacctctggtgtcctcactttttgcagacgatcaagcctctgctattagaggatgaaggggatttaatcgactttcagtatcactattttgcccagcaccctccgacttccagcgtaccaacgcttgtaaaacgcaccgatatcacacaagttaaccatgatgcgctttatgaaatcttccgtcgttcccactggcatatctggagccgtatctatcgccacgagctcattaatcagcgtcgttttcacgttgggcggcgctacgaagatatgatgttcactccgtggctgtatctcgaagcccaccatatcattagccttgatcaagtcctctattggtatcgcgataatgcacaggggattacgcgcaatattcaaccgtcagatgccaatgatatggtttttgccctaaatcaaattattgataatgccagaactcagccaccgtcgcagatgccctctcgaataattacgcctttaatcataaattgcttcaatgaaatcaaggggatacatgcaaagctttatgggttttataactacagtgaacacactatatcaacattgaaggctgccgccgggcttcttccctccggtagcctttcactaaagcgtcgactccatctacgctatcccggtctctggaaacgcgtttctcagcttcgccatatactgcgccggggacgatag

SEQ ID NO: 230759 - DNA, 1251 bp, Klebsiella pneumoniae
atgcatcgcgtgcttaacactcgtctaaaaatcaagaacatggttcttaaccttgccgttttgctttatttatttacgtttatgctattttacgccgcaccggtagaaatgagaaagatctactatttagcaggttatctgacgttttttgtcgcattgttaggatgccgttcactgacatcctggaaaaacaatcgagatattgcgggcgcaacagcgctttttggccttacgctactggggtggtatgctctaaacttcactcatagcgaatattggtcgatctacgactcctataaagaaacaggtaaggtattgctcattaccgcgcttatcgtgtttttagtttctaatctccgtttttcttttccagccgaaaggttttcgtggctgcttatcgtcgctgggctagcgactaacgcctatgccatctaccaaggcctggagatagaatcagttcgattgcaaatcgaactcgaccgtgccacggttatcgcctatatctttaccatgacgaatatcgtcatgctggccgcaattctcgaacttaagagccaatatcgctattttcttttccttcttgccgcattaagcggattcgcagccattgcctataccgaaacgcgggctgcgcttctgacgttccctgtattaattatcttgctattaatcgtgcatccccgggttcgaaaaaaacaactgctcaagctcggtacagcctttatcgttatgttggcactactggcaattgccttccatcagaagttgacggaccgctatcagggtttacgtaacgatgttagccaatatcaggacaacaacagcgtatcctctatcggctcacgattagccatgttccagagtggtctacaggccgccctggatgcaccttttggcgagtcggcagaacggcgtaacgataacatcaagcgccaagtagagaaaaaaccaaaacttaccggggcgctggattacatggatgtccacatgcataacgagcttattgaaaatttctcactgcgcggcgtagggggagtcatcacactcattattttctatgctactttattaataaacgcctggcgcaaatgtaatgtgatgcaaggcatgttaaccttgtcggtgattatctatggtttaagtgacgttattttcttcggcaaagaggccgttataatattttctacggcattaatccttagcatcttgtatcaaaaaattgtgatacataaggatgagaaccatgagtga

SEQ ID NO: 230760 - DNA, 1173 bp, Klebsiella pneumoniae
atgcgtaaactccatattatcaacctagaaaaaatgggtggtgtcgaacgcctatttttacaatacattcaagacgttactacaaatcaggactgtattttctgtataagtaatcaaatagggcctgaaatagcccaacatttaactggtcgcaaagtgacttttgtgaaccgaattctgaacaattatccgattaaatttccaccttttttacgcaagtatgccctgcaaaccaaaacctggctggcaaacccagaggcaatcatcgtctgggatctagtccctgtttttgtggctaagcctacgcgaggaaaggtcatttattacgatcatggctgctcgtggcgttatccgcataataaaaaaaccatgaatttctttgcggcactggatggcacaatttccgcctcctatgcgtcaaaaagggtcatggagctacgttttaatctgtcgtgcccctcccaggtattgattaaccgcattctcccgcctgcaaatatttttaccggtgacaaaccgcttaccgccccgttgcgtctaggaattgcggcgcgcctcgttggtctgaaagggattagtgtcgcactcctgaccttaaaaaacctgctcgatcgcgggataaatgtcaccttagatattgcaggcaaagggccggatgaacatcaatttatccagcttgcacagaagctggggatcgcgggaaacgtaaacttccttggatttcgcgatgacctgagcgatttttttaatagtatccatatttaccttagtactccagtcactgagcccttcggcctttcctgcctggaatcgttgttttatggcgttccggtgatctacccattgattgatgggcagcctgaagttgtcaaaaatggggtctgcggtatcgggatcacgccagacatcacgcccgaagcgcattttgagcagtgtggaatcaacgtcaattttccttatgatgtttattttccagggcaggacgcgttacaccctccgcgattactggcaccggaaaaatgtgctgatgccgttttacgcatcgttaacggcgactatgaggctttccgcaaaaacgcttttgaacatgtaaaatcaaatttcgacgcttccgcttttatgagcgactttaactctactatcagcgaaattctggatgcatcgcgtgcttaa

SEQ ID NO: 230761 - DNA, 306 bp, Klebsiella pneumoniae
atggcgctgaagtggatacaaagtcaggcagattataacaatgtcatgcagcatttgacgttgtcgccaggggagaagaaaggtaataaagaactgaatgaaaaagatgtgattaactttttaggtatcggggaacaaaaattgtttttttacaccaattatggcgaaaagctcaccttactgcataataacctcccggtttttgttgacccggatgagccatttaaacccatacctgacatcctgatgtcagaatatcttgccatgatcgacgaccagcacccgacgggtacaatgactgcctga

SEQ ID NO: 230762 - DNA, 567 bp, Klebsiella pneumoniae
atgttagaactcaatgcaaaaaacacggcgctggtggtaatcgatctgcaggaaggcattctgcctttcgccggcggcccgcatcgggctgacgaggtggtggcgcgcgccgctcgcctggcagacaagtgccggcaacagggttcgccggtcatcatggtccgcgttggctggtcggccgatttcgccgaagcgctgaaacagcctgtcgacgctcaggccggggcgcatacgctgcccgaaaactggtggacctacccggccacgctgggtaagcaggagagcgatatcgaagtgaccaaacgccagtggggcgcgttctatggcaccgaccttgagcttcagctgcgccgccgcgggatcgacaccattattctctgcggcatctccaccaacatcggcgtcgaatccaccgcccgcaatgcctgggagctgggttttaacctggtcatcgccgaagatgcctgcagcgccgcctccgccgagcagcatcagggcagtatgacgcatattttcccgcgcatcggccgggtgcgcagtaccgaggagatcctcacggcgctatga

SEQ ID NO: 230763 - DNA, 1059 bp, Klebsiella pneumoniae
atggcactgaagctattagccaacaataacgcaaagagtgtactcgctgcgggtattagcgcgtctgctaccgttattaccgttgggacaggaacgggggctttatttccatcgccggtatcaggagaaagttatttcaaattaacgataactgatgcagccacgaaaacaatttccgaaattatgcacgtcacgtctgtatctggcgacgtaatgacagtaattcgtggtcaggaggggaccactccgcgagtatggtcaacaaatgatattgcggcaaatatgatgactgcggggtctttactttcctgtctgcaagtatcaaataatttttctgaaattgcagatgaaggaagtgaagctgtaaagcaggcgctattaaatctcgggtcgtcagatggcacaataaatggtcgccttattggctttcctcgcgtcgttacgagctccggatcatttacaaaaactccaggtgtaacaaaatggaagattagaattttgggaggcggcggtggtagctctgctgcgccggctaccggttctggtcaagtttcaataagcaatggcggcggtgctggcgcatacgcagaggggatgtatgatgtatccgcgttaacctcagtaatgattactattggtcagggcggcaaaggtggtactgcatcatccatttatggggaggatgggggaacaagttccgtcggagcgctgatttccgctccaggaggcaaagcgggcctccctgcggggccggctaatcctccatttcagccagtcgcgaacacaaactcaaacagccctaccggctggaatattgtcgggataagcggtccgggatcggaatgtgcatcagccatttcaactgaatatgcaatcgcctcgcgcggggcaaatagccaacttggcgtagggggctcaattcctgccataaataatccagcgaacaatggcggtggatatggcggcggggcatctggatgttccaatggcccttcaaggcctgtgaatcctggtgcagatggtcagaatgggatcgttataatcgaggaatacgcctga

SEQ ID NO: 230764 - DNA, 858 bp, Klebsiella pneumoniae
atgggtactcgtattattgcaaccggcgcggactggtcaggtaaaggcaagccgaatatcagcccgttcatcagcatcagcgatgctgattttgcttatgatttccgtccgcgggcgagcaaatataatgacctgactaaaaaaacgtcgctggctctcatgcgtggcgcgctgtcagctggtaatgcatcaatagcattcaacgtggatgacaccgtgggtctggtcagcgcagacggatttggactcacggtagataacctgggggcggcatttatttcccatacgccaaaacccctggctattgacgggagcctgcaactcactgcgtatgtggtcggcggttatagtggtctcgcgtttcctgcgggctctcagtatagaggctcaccaggttcgacgccgtctatctgtaacctgttcgattatggttcgcgcgtgaatccggggtttggtttctcactgcagcgatccggtgcagctgcggctgagacagtagcgtttggcggtcgggtaaattcgggggcaataaatgtgggcggccagaaccttggcggtgcgacaacgaaaaaatgcgctatttttctgacgtttgacggagtaaatttcaaggtttacaacgcgacaaccaactttgaacaaacggtcactgccgcatcgctgggcctcacggctgcactgccgatatcaaactcgatccgccccggggtcgcgttcggtacaacaggttcgatatctaatgccgcgctggctccgacaatatatcagattgcgcaatggggtcgggttctgtcaaagccggagatggttgatcagtacaataaaactatagcggcattcccggaggttggtctttag

SEQ ID NO: 230765 - DNA, 2064 bp, Klebsiella pneumoniae
gtgccagagatcattgtcggtggcactaccagtataggtgccgaaacgttccaatatgttgaggccataactgacccggcggggaatgtcgcgtttggcatccgagataccggcgtggtggatgctcctgagctgatgtcagggggtattattacctctgaatctgagatgccgggctggatggtggcgtggacagacgacgatggcaatattgcgttcggtttacgcgacgatggaaccatatatcctgatgcgtcgggcagcgttgacggagttgtagaattcagcgctaacgagtcagatattattgcaatactcggggacagctataccgatagtctctatacgctgagtgataaaagctatatcgggaacctgtctgcgttgtctgattatcgattccgtaactacggggtttcaggtaatacagctacggctatcaataaacgcctggttgatagtagtgcatattttgacgggaaaacgttttctcagatgaacgctaaatatgcgctcattatgacctaccaaaacgactcagcctatttcatcaatcacgcgatggagtactacatgtataacatggagcgtctgattgattctgtcatggcgtatggggctgtaccgatcgtcgtggcggagtgggtaatatcaaatgaagcagctgtacagctgagagccctgtgtgagcgtcgcggcgtagcatttatctataatgctaatttcatgaaagaagtcgggaacctggtgctgtctaattttcatcagggccacccggggacgcgtaccaatggcgtcatttgggcgtcactctatgagcatctgcgcaggatgccgaggccgacccggtccattaaaatataccgccagcgcccgacgtactctccatcagcagattccgatatgctgttctctgacagcatcgacatgctgactaaatggaaggagattcgcgtgtctcaccggtcactctcagacgccgatgagccgtattttgaggagttgcgcggcagggggaacgtaacatcctggcaggttcgcgctgacgaatatgacctgctcggcggcgttggcgtggcctatacaaaccggttgctggttaacatcacctatccggcaggcgcggttgggatgaaacaggccggtttcacgctccagtgcgatgctgatactgagattttcatccggcatatcctggactcagccacgtctatagggcagtcgggggatgttaccccgggcgcaacgagcaccagtacgctaacccctgattatctggaaaaatatgataacccgcgcggagcctggcaaaaaattgggaccgggcccggagagtatttattctcagaaaacctgcaccagataatgttcggagaccagatccaggtgatgctgaaatcaggggccggcaccctgacaaacatttcgggtaaatatcagtctggtgccagcgcgccagttaaatacccgtcgcccgaatatcgcccgcagtcgcaattactgggagaaacgttcgttgatttttcatcgtgggtcgtctcgggcgtaaccagtttgatcccactcgaccaggtaaatacaccccgcaacctcgcatacacgggggctctggcaacggtcgcatcgctgatgaacggatcgacgatgaagaaaactgtcgccgtcacaatgcctgcaacgagagattttacgcaacccgtcaccctgcaggtaattttgtggggacggtattttccgaaagcctacctggataacagcatttataacctcgacccgactcaggttgtcgattcgtcacagccggaaaacacgtttcccgcaaccagcccgataaccagcgacacctgtgattttcgcaacgtggctctgcgctgcgctctgggggggacaatgacgctgcaaaatacgattacacagcgtgattttgcatgcctgttctggcgcccactgaaatacaccgtagaaatcccggcctacgtttccgtatcacaactcacgctggagattacgtctgaatctgactatatccagctcgctaaaatttatattaaggaaataaaataa

SEQ ID NO: 230766 - DNA, 627 bp, Klebsiella pneumoniae
ttgtggcgtctcctgcatctgtcatcggcggggatagcaatggcaactaaccaaaaagcttctgacatctcttgtcaggggaatgcgatcttgtcgcttatagcctcggcatcaaagggcaatgtttttgctgatattgttctggttaaagatgttggtgatggcgttatgactgtgctccctcttgtgagcggggcgaacgtatccggtggggagattaaatgtcaggaggtatatgacattccattcattcggtatcaggcagggaatagcgctgtaaaaatgactccccgcattggtgatattggcctggtaatcgcctgtgacaaagacacaaccaatgtcagagcatcaaggcaaagcggtccgccaccaactcagcgcaggcactcgtattcagatgccgtttacatcacggctatcgctagcctgaacggcgagccgactgagtacgcagagtttaccggcagcggcataaacatcaaaagccccggcgtggttaacatcaatggactgaagatactcgcgaacgggaaattgcagttggttgatggttcaatcgttgatgggcacgaccacggcggggtagagagtggtggcagtcgaacaagcccgctgggtggataa

SEQ ID NO: 230767 - DNA, 870 bp, Klebsiella pneumoniae
atgagttacaaggagagagagcttaccgtatctttcacgctggctaacggtacgttcgacggcgacattggcgacaccttgactgttaaaggtttcaagtgtgaagcggcgatatccgcatttggtggcgctaccggaacaattcttgaacttagcctctgggggctttccctggaaaacatgtcaaagttgacgaccaacgcgcaaaagataatcgcgtatgcacagaattcaatcgtcgtttatgccggtgatacccgtgttttttccgggtcgataacatctgccaggattaacctgaaccagatgcctgatgcgccgatcgagataactgcggcggcagccgcaagggagcgcctgatcccatgtgagccaacgtccattcgtggcgatgcggatgtggctgacatgattcgagcccttgcctttaaagttggattaaagttcattaatgttgacgtcaaggctactcatcgaaatccatatttcgatgacaacgcaataattcaaatattaaaaattgcggcagcgcatgacatatctgttgatatagattttggcactgtcacaatttatacaggtaaaacaccgtcggattcagttgttccgtatatttctccagccactgggcttattggttatccaatattttatgagatggggattaactttaggtgcatttattcaccggcgctaaaattgaacactaagatcattcttgagacagagcttccacacgctagcggagagtgggtggtacaagcgggaacaacccactacttgtcttgtaaggtacctggtggactttgggagacatttgttgtggcgtctcctgcatctgtcatcggcggggatagcaatggcaactaa

SEQ ID NO: 230768 - DNA, 504 bp, Klebsiella pneumoniae
atgacgccatcaatgaggaataaactgattggcgtgatcgccggcggcggtggcgccatagccattgcctctgcgctcatcactggcccaaccggtaacgatggtcttgaaggtgtgcgttatgacccctatcaggatgtggtaggcgtctggactgtctgttatggccacactggcaaagacatcatgctcggcaaaaagtacaccgaggctgaatgccgtgcgcttctcagtaaagacctgaacaccgtcgcccgccagattaacccatacatccagaagccgatccccgagacaatgcgtggggcgctttactcattcgcgtataacgtcggcgctggcaatttccaaacctccacgctactgcgcaaaatcaaccagggcgaccagaaaggtgcgtgcgaccagttgcgccgctggacctatgccaagggtaagcagtggaaaggtctggtaactcgccgcgagattgagcgcgaagtttgtctgtgggggcagaaatga

SEQ ID NO: 230769 - DNA, 225 bp, Klebsiella pneumoniae
atgagcaaaatccaatacccaatgtccactgccgctgtttttgatgacgtggtttatcccatctacctgaacggatcgcatcagatagagagtgaggttatgggcgcgatcagatggttctgccggtggaacaacgaggagatggccgtcgttaaggcgcatgtgctgtttagctgctggggcctttacctgacgtatgaccagcttatggcggaggccaaatga

SEQ ID NO: 230770 - DNA, 417 bp, Klebsiella pneumoniae
atgactatcacactacaggcagtaaacgaactcattcagtcgctggagtcggcgggcgagctgtcgatcagagagcagaagttcctgaagctggcgaaagcgtttaagcagctggctgcggagaatgtggcgctgaaggacatcaacgcatggtgcaaaacggatgcattcaaaaacatgtaccgggagtttaaaacagcagaggcgcttggatgctctgatgcggattgcatgcatgatgcaatgcttgccgcaattatgcatgcgccggaaaccccagctaccgatcgcatcgtagccgctcagcgctcagcattcgttgatgaagctgtctcgaagattactgaatcaggagcgcttaccctcggtgattgcattgtggctttgtgccagctgcgcgaggggggcgacaaatga

SEQ ID NO: 230771 - DNA, 177 bp, Klebsiella pneumoniae
atgagaccgccgatcacaaaggaagaagtcgagttactgatgcaggatatggagatgctggcagagcagcagctagtaggactggaggcgttagaggctctgagactgctggagatgcgcagacagaccggtaagctggaggctataaagcgattgatatcgcatggaaaggagtag

SEQ ID NO: 230772 - DNA, 2007 bp, Klebsiella pneumoniae
atgatttacggatcaatatgcagtggcattgaagccgcaacggtcgcctgggagccgctcggatggaaagcagcatggttctcagaaatcgaagcgttcccgtctgctgtactggcggaacgctggccagaggtcgtgaacctcggggacatgaccaaaatagccgcggcggtgcgcgccggtgaagttcaggcacctgacgtaatggtcggcggcacaccttgccaggcattcagcattgcaggtctgcgtaatggcctttccgatgcccgcgggcagttaaccctatcatatgtggaattagcgaatgcaatcgacgataagcgcatcgagcgcggagaagaagaagcaatcttcgtctgggaaaacgtccctggcgtcctcacaagccacgataacgcctttggttgttttctggcaggacttgccggagaaagctgtgaacttgagccatcagggggaaagtggacgcactctggttgtgtgtatggaccccaaaggacaatcgcttggatcgtcaaagacgcccaatatttcggagtggcccaacgacgcaagcgtgtgttcgttgtcgcaagtgctcgaaaaggatttgatcccggccaagtactttttgagtccgaaggcgtgcgccgggatactccgccgagcagagaaccgcaaacggcagttgccgcccttactgcgagaggcgttggaacgtgtggcgcagatgacaatcaggcccaagcaggacacatcatcgccgagtgcgccaacggagatatcagccacacactgaaagcagaaggttttgatggaagcgaagacggtaccggtcggggaattcctgtaatcgctttcggtggtggaaacacagggggaaacatcgatgttgccgcctgcctgacagcaaagggccagcgcattgattttgaagtcgagacttttgctgtgcatggtacccaggatcctgacactaatctggagcttgcgcatacgcttggtcgtaaccatgggcaggagaatgcatgcattgcgttcagttacaaagaccatggagcagacgcatcagaagacctgtctccgacattgcgcgcaggaaattcagataacagcaacgcaaacggcgggcagcctccggcgattgcttatgcattcaaaccgggacaaggcgccaaagcaagaggcattggattcgctgaagagcaatcaccaacgcttacaagcgccagtagcggtacaaatttaacacctgccgtcatgcatggcgtatctgttcgacgtcttatgccagtcgagtgcgaacgcctgcagggcttccctgatagccacacactgatttcgtggcgcgggaaagaagcgacagaatgcccggatggcccccgctatcgcgccatcggtaacagcatggcagtaccggtgatgcgctggatcggcgagcgtattgcggccgcattgccagttaaaaaatctgcgggtgattatggcggcagcaacacgccagcggaacagcgcgacctctggcgaactccgcccgccctcttcgcatgcctgaatgctgagttctgcttccagcttgatgcagccgcagcagcgcataacgcgctgtgtcgcaagttcataacagccgagcagaacacacttgaaacgccatgggctgattacctgagcattcagggctacgtctggctgaacccgccatatagcgacatcacgccattcgtgaagaaggcagccgccgagagcgccaatcagatcggcacggtgatgctggtacctgcagacacttcggttggctggttcaaggaggcgatcaagaccgctagcgaggttcgctttattaccgcgggaagactggcatttatcaacccggtgacaggtaagccggtaagcggaaataacaaaggctcgatgctgattatctggcatccctaccctcgtactcactgccatttctcgacggtcgagcgggatgctctgatgaatttcggggcccgtttgatagctaagcgggaggcagcatga

SEQ ID NO: 230773 - DNA, 1260 bp, Klebsiella pneumoniae
atgagtaaagaatcatacccaacgggcgttgagaaccacggaaaatcactccgcatatggttcatttttaaaggtaagcgtgtcagggaaaacctcggtgtccctgacaccgctaaaaacaggaaggtggccggggagctgagaacgtcagtttgtttcgctatccgcatggggacctttgactatgcggcccaattccccaactcgccaaatctgaaaaccttcggcatcgggaagaaagatatcaccgtaaaagatctgtctgaaaaatggcttgagcttaaacggatggagatctgcgctaatgccataaacaggtatgaatcggtggtgagaagcatgctgccgagggttggcgcgaagaagctggtttcgtctgtgacaagagaagagcttctctatatcaggaaggatatgctggcgggggataaaggtttgagtgtggtgacggtaaactactacatgaccacgatcgcgggtatgtttcagttcgctgttgataatggctatgtgagtgaaaacccgtttaacggcatcaagccgctaaagagggccaggatagaaccagatccgctcacacgtgatgaattcgttcgcttcatagatgcctgcaagcatcagcaaacgaaaaacctgtggtcaattgcggtatacacaggattacgtcacggtgagctggtctccctcgcatgggaagacatagatctgaaaactggaacgatgaccatacgccggaattatacgaaactcggtgatttcactctaccaaaaaccgaagccggtaccgacagggtcgttcacctgatcaagccagccattgaggctttgaggatccaggcggaaatgaccaggttaggcaagcagtatcaggttgaggtacaactgcgggagtatggccgaacggtcattcacgactgtacatttgtgttcaatcctcagttggttaaaaaaagtggcagcgtaggttacctatacaaagccgattcagttggtgactcatgggatgcggcgcttaaacggtcaggtttaaggcaccgcaaggcgtatcagtcgagacacacttacgcctgctggtcgctgtctgccggggccaatccgagtttcattgccagccaaatgggacactccagcgcccagatggttttcaatgtttacggcgcctggatggccgacagcagcagcgatcagattgctatgttgaaccagaaattatcggactttgccccacccatgccccacggcatggcgataggaatatga

SEQ ID NO: 230774 - DNA, 1056 bp, Klebsiella pneumoniae
ttgaataaaaaaatactatccaattcagtttggatgatgtctgaaaaaataattactttatttggattgatatttgttacttcttttgttgctaaatatgttggcaccgaggtttttgggcagatagcatttgccacatctttatttcagattgcgatgataatagcccagttaggaagtgatgttattatatttaaacgtgtaagtaaaaataataagtcaggtgctcggctcatatctgccactctttatcttaggtcctttatttatttttttgctgccgtcccgatagtatttattagttatgaaaagaatgatgtgggtagtatctactttattattgcttgcgcaatatcttgtttttttagcgcgatggatgtttttagtatatattatgatgctagattagaatctagaaaaaacaccgttgtaaatgttgtaggtttaatcgtcagccttttttttcgatggcttattgctttttttcatctcgatcccatttacttatcttttcctatcatactgacaggttttattccttttattctaaggtgggctatttttagaaaagaactcgttagaaataaattaaatgcacgatgtaaaattaaatatatgaagtatttgattggcgctgggattactttcgttgtatctacaatatcggttgcaatatatacacgaatatcaatgctatcgcttgggtatttttatgataaatcattagtcggtattttttctgtgtctgtgtctttagctacatcttggtcttttgtttgtaattctttaataacgtcctcattgccatctattttttctgaaaagaatgatgctcaggcaacattaaaagcttcaaggttaaatactataattatagcttgtagcatgccaataattttgctgacttatttgtttggttcgttctttattagggtattatatgggggggattatgttagtgcattcactcctttggttattctatctttttcaactatgatatcttcgcttggaataatttctgctcgatttattgctagatgttatcagttgtga

SEQ ID NO: 230775 - DNA, 1485 bp, Klebsiella pneumoniae
atggaaagacgtaagttcgtagtttcggcactcagcgcggtggctgttacttatgctggacatacaaaagcaagtgagcaccgtaatacagatttatcattgtcaaagtcagtggataatataaatattttactgaaagaaaacaaaattaaaaaatccctaaatttagaacctgaaggtgaaggtataccgctcacagactggatattgggtaatattcgatcgctctttctttatttgacaaaagataaaatcgattctatcaatgctgctataccagttgatgtaaccactgaattaaattctgctatgcaggataatattccgatatttatcccgagtggtaattatattataactagctcaataaatgttggaataagatctggccttataggcgcaggagcaaagagtgtattaattgataacagaagtagtgaccatgcttttatattccctgttggatatgaccgaggaacaaaagactttctcggatttagtatcgaaagctctataggtactgcaaaagataaatatgctttctatttaagttcagcagcagacggccgattaaattattcagttggttggagattcgttggtattgaaattaatggtcagggaatgggaggtgggtggtatcttcaggactgttttagggttaccatacgcgattgtggagcttcttctctttcaaatcctttttaccttgcaggaagtgtggttcagttgacagtagataatttcgtcaacaatggagacaatcaacctaagacaaatataggcagttatggtgtgtacatgactactaaaaaatactctgatgaaaatggaatcaaaatgcctgaaggtatcactttcataaattgcaaatttgttaagcaggaggttggggctcatgctcttggactttatgttcaatttgttaatactgaatttgattactcttcaaagtttggcggattttatgctggaggtgataaagtcgatttcataaattgctacgtaggcacaacgcatgttcgtaataatgattttgtggcatttatggtgcaggctcatgcttcaaaggttccagaacctgtactaatctctaattgtactataaatatgcaaaagaatagttctgacggttataaatcttatggagttatcctttcaggagagaaagatttcatttctggtgctaaagtggttgattgtttttttagaggggatggctatgagaattgcattctggttaaacgcgttgatggtgtgattattgaccacaacacttttaaagtaaggggggaaaatgtgaaggtagaatcagctaaaaatattactataagtaataactttgccttaggaaactatagtcttcctaaccccgaaccagattactgctggataataactggtaatactggtgatttctctgatgttgatttaagtgaggcaaaaaaatctttaatagtcaatcaaggattaatgcgtaattaa

SEQ ID NO: 230776 - DNA, 537 bp, Klebsiella pneumoniae
atgatagcatctggatataaaagtgataccgcaattatggagataggccaggcaaatgatattttctattctataccttcaggttttttttgggtttatttatatgcatcgtctccatatgcgaatctagcatcccaggaaagatttgctaatgtagataagggggatctagaagacttctttgcatcttcggttcttccagattttataagtaaatataccgctccttatgtgtttactaaatttcaaccgaaaaggattactgaggaacttacagttggtaccggatttagttttgccttagttagctttggtatagttggtgttatactattatatttttggatggtttttctttcttttttcttggcgtgggcaaatagaaatatgtacataaattcaatttgtgctgtattgtcgtcaacggcagtactcatgatatttgataatatgtttatatttgcatcatgtgtgttacaaatgcttatgttaacaatatttacaagagttaaaattgggaaatactattttatgtaa

SEQ ID NO: 230777 - DNA, 894 bp, Klebsiella pneumoniae
atgctgctgcccatacgagtcaacaagcggttcttgaatttatttagaacacttacattagacaaagcaccacggcaatctaccgtaaacttacatgttctaaacattgagagtaacagttttgtttataacaaattggttgaggaattaagagacttaatagtctgttacgtacattcgaatagaagaatagctgagtttgaaaaaaatcatccatcttttagtcccaaaccatatttagaggcaatacagaaatttcgtacctatacatcaaatgaaggtgagttaggtgaactactattatacgcattccttgaatcaggtctcaacgcacctaaattactatccaaaatggagctaaagactgatgcaaatgattatatcaaaggttccgatggtatacatttattagagatcgacaataattatcaactaatctttggcgagtccaaaatgtactcggacttactggagggggctcgtgaagcgtttgactctattgctgactttaaagccaacggattaggatttgaacgaggtctaatagatactcatgtcataaatgaaatggttactgaagaaggatatgagacaataaaatctatactattaccttcaggaaataatgggccaaaccttgatctagcttttggcgttttcctaggatttgagttacctgttagtgatacacaattgtctatgagaaacaacgaattccgagattggacatattcattagtaaaaaataatgcttctcgtgtaattgatacgatagaaaaaagaattataaagcataaactctttggtcacgactttcatatatacattgtccctttcacagacatagatatcactcgtaaaaaattaatccaagaaatgctaacaattggataa

SEQ ID NO: 230778 - DNA, 2076 bp, Klebsiella pneumoniae
atggggaaatcgtttgtcataaatgaatatataaaacatattgtttttggtaatgctaaaaaaaatatagtgctcatagtcccaactagagcattaattagccaaagtacattaaaattaaaaaatgaactaagagatgaaattgatggcaatcagtataagatagtaacaacatcttacatgctcagaggaggtattgatcatagtaaagggtatgttttcgtattgactccagagagattagttagtttaattagtacatgtcctgatataattattgattatatttttgtcgatgaagcacaaaaacttactattaaaaatgatacacgaagtctcgtaacctattccgcgatcgaacaaacattaaatttaaatccaaacgcaaaactatttttctcatcaccaaatttatccaaccctgaagtatttaatgatttatttaatcgggaccatgctaaagtttatcgcagcatagaaggcgctacagctcagaacttatactttattgatttattaaacaacaagtttagttatgttgataaaaacaaattaattgatatagataatgttaatcagacttatacatctgttaatgatcttatcttccagattaacaaagggaaaagtaagattatttacactggaggtatcgataatacattatctcgaacaagggatttcctacgttacataaagaaattacaaagtaacaagaaacctcaaaattttgatctagcatctcaggtccgagaatttgtgcataccggctacgaacttgctgaagctatagagtatggagtagcatttcatttcggaaacctgccacaagcaataagagatcttattgaatacaactttaaaataggtaatattgattacctgttttgcacatcaactcttcttgagggggtaaatttacccgcacgttcagtatttattttgacatcaaaaaagggtactagatattttgaacctgtggatttttggaatctcgcaggcagagctggaagactagccatagagttagctggtgatatattttgcgtaaaagatgaaagtgggacctggaatgataaagcggtaaaaaatttaattctatccaataaaaatgaaattgaactaactcccagcttttatcttaacgattctaaaaggattaaagagctagaacaaataataaaaactggttctactgaggggattcaaaatagcgaatttctcagaacactaagtgatatggtaaggattgataccctacgaactgacaaagccaataatttaccacttatcaattatttcagaaataatggaaataacgatatattacattatgccttgaaaagcataaataacattaacatacctacacatattttattagcaaatagccatattgctattaactcacaacataatgcatttaattgcatcagaaattattcaattgacgaactaaagttatcatggaatcctacaaatgaagaaataaaagaaaaattggccctcatattcaatatttatcaaatagataaatatagtaaaggattaaaccgtcttaattttaattcaattccatattacgcagtcattttaactaagtggatgcatggtaatacattaagtgaaattatctctgacgcgattgtttattacatatcgaatagaaagaatatctatctttcagataagactcaagagccatttgatcaaaataattctattcatataacaaaattagtaaatgatacaattaaagatatagaattaaaaataggttatcaactacaaaattatatttcacattattgccaacttctttcacttgtttttgaaaataacccgggagcaaattggtcacaattcatagagtttggctcgaatgatccgattgtatggcaactgcaatttatgggattttccagacattgtgcaatatttttaaagaaaaacttccctaaacaccttaaatatgatcaagaaaacaatcagttatacatattaaacagagctgaaatcaagtcaaaggttaaacagaacaaattatattggcttgaaattcaggccctgctttaa

SEQ ID NO: 230779 - DNA, 1893 bp, Klebsiella pneumoniae
atgaaacatagtgaattttacgactatttagactcggagttggatgcaattatatcaagcgaggtttattcaccttatttcataaagcataagcaggatgagcagaaaaaatcagcagcatttctaatttggttccttaaaacatatgcagatactgggaacgttgaggagtatattactgacggtcacgatgatttttcatgtgatattatcttggataagaatgattcacagcgagttaaaagttattatatagtccagtctaaatggaataataaaaagaattgtgattctgaatttgatggaaaagagttaaagtcttttttaagcgatatacagagtgttttaaagggaaagaaagaaaaaggtgcgaacgaaaagtttaatgagaaatatgacgaattgcgtgagcatattaaaaataatggtagggttaaggtaatatttttatctttaaaaaataactgtgatacatcaaatgataatataagatctcttaaagaggttatgagcggtgatattgatgttgaaggctttgatattaatagattgaaaattgattttatcaacagagaatataagaaaagtatcccacctaatccattagataacatatacgacccaggtttagaacgtattgaaatgcaggtttgtcgtgatggtggtaacagttgtgttgagattaaggcgccttttaatgcctatgtatttattgttaggccgaagattatctatgagcttgtaaataaatatggggtttccctttttgacagaaatgtaaggaaccctatctcaaactctatcattaatgatgaaataaagaatacaatacaaaagaaccctgcgtatttttggtattataacaatggaatcacaggtattacaaggcgaataccaaaaatcagcaatgaagccgaacgatttgaaataacaggcttgcaaataattaacggagctcaaactgcttattctatatatagcgcatataaagaatgtaatgacgagcaacgagctattcttgatgaggaagttaaaatcacgtttaggttactaaaatcaggaggagatgagtttgaccttaaagttacaaaatatacaaactcacaaaaccctgtaaatgatagagatttttggtctaacgatccggtacagcaaagcttgcaaaattatttctttgcgacatctttctggtatgaaaaaagagaaggtgaatttaaagaagtacctgagcacgttgataaaattgcaaacttttattttggtgcagcgtattgggcattttgtcataatggggcagtagatttgatgaactcatcattttcactacgtgataatgatgtcgatttactatttgtgtcgaggattgataatcaagaaggcttatatgaaaaagttttcaataaaaacgtattgcatcgtgaatttcatgcttcattcatcatgttagatcaagcagcccaaattccattattgcgtggattagctgcgacgcaactaagattttcaaattccttccatttactttctatcgcccgagtggtaatggaaaaatatctcaaagcaaaatatggtcccgaggttcaagtaataccatttattttaaaagaggctggggattacaaatgtggggaaaaggtagatatccttttaaagataatgatttattcttttaatgcattttttgaggagatagaagagaaagatgaagatgagcaaagcgattattttttcacactcctatcaaagtcattgagcttcgaaatgcttattgaaaaaataaaagctaaagatattagtattgatgatattgaatctcaagatcttgcaaagctggaagctgaacttgatgaggaggacgatgatcctaattttgaaagggggctagtccattaa

SEQ ID NO: 230780 - DNA, 336 bp, Klebsiella pneumoniae; identical to SEQ ID NO: 216425

SEQ ID NO: 230781 - DNA, 210 bp, Klebsiella pneumoniae; identical to SEQ ID NO: 216424

SEQ ID NO: 230782 - DNA, 1086 bp, Klebsiella pneumoniae
atgggaagagaagcacagccgccgcattcccggctgaccccgcgactggaggccgacatgccgcggatcaatttttaccgcttctgccagcttctggaaaaacggcgtcccggccaaccgctgatggggggaaccagccatccggctgacgatccggtgcgtttttacccgcatccgggaatgggatttcccgccagcgaactgaaagccgtggaatacgatgaggccgatgacagcaggccgccggtcattcgcaccacctttatggggttgtacggtgtcgattcgccgctcccgacggcatatctcgatgatatcgcccagcacagggaagggcatgaggcgctgcagggcttactggatatcttcagccaccggatcatcacgcagttttatcggatctggcggaaatactcctggcccgccacctttgagcccggcggcaccgatcgtctctcgcagtcgctactgggcctggcggggctgggcatccccggcacgacgcagcatatcgcctcgccggcgtcgcgctttctggcgctaaccggcgtgctgcgtcagccgggcaaaacccagcaggggatccaggcgctggtcaccctgctggccccggagaccaccgtcagggtgagcccgtacagcctgcgtccggtggcgatcagccagccgctggggttttacggcgatgacgacttcttcctggacggcaatacgccgctgggtgacgaagcgatggatgccagcagccagctcctcgttgcccttaccaccgacaatcccgcggaggcgcagggctggaagcctgacggcccgctgtttcgggactttctcatcctgctgcgggtatacctcggctggcgattccgggccaacatcaccctgaccgcgccgacccgactgctggctgtcccgccgctgggggacgagccgttctggctcggtatgaacggcgtgctgggcgtgggtgagggcgagagtgaggacgatattcctcagacctttaccaccgagctgggtacctatacgggcctgcagcctgccacctttctacaaggaaaccgacgtgttacgtataagtttgactaa

SEQ ID NO: 230783 - DNA, 1272 bp, Klebsiella pneumoniae
atgaagctcaacgccagacaggtagagactgcaaagcctaaagacaaaacctacaaaatggccgatggtggcgggttgtatcttgagatttcagccaagggggctaaatactggcgcatgaaatacagacggccctctgacaaaaaagaggatcgcctcgcatttggtgtctggcctaccgtgacacttgctcaggcaagagcaagacgtgatgaagctaaaaagctgttagtacagggtgtcgacccaaaagctgaacagaaggaagctcaggctgaaaacgctggggcatatacttttgaaactatcgcccgcgaatggcatgccagcaataagcgctggagtgaagaccatcgatcgcgcgttctccgttatcttgagctttacatctttccttatatcggcacgtctgatattcgccagctcaaaaccagccatttgttagccccgattaagaaggttgatgctagtggtaagcatgacgtcgcgcagcgcctgcaacagcgcgtcacggccattatgcgttatgccgtacagaacgattacatcgactcaaacccggccagtgatatggctggtgcgctagcgacaactaaagcgcgacactatccggctttacccttcaaccgcttccctgaatttcttgctcgtcttgctgcataccgtggccgaatgatgacccggattgccgtagaactgtctttgctcactttcgttcgctccagtgagttgcgttttgctcgatgggatgagttcgatttcgagaaagcaacatggcgtgtaccagcaaaacgggaagaaattaaaggtgtgcgttattctcatcgtggcatgaagatgaaagaggaacatatcgttccacttagccatcaggcattggctttgctcgtgcaattaaaacaagttagtgggggtaaagagctacttttccctggtgatcacgatgctacgaaagttatgagcgagaacacggttaatagtgccttacgcacaatgggctatgacacaaaaaacgaagtttgcgggcatggatttagaacgatggcgcgtggggcactgggtgagtcagggctctggagtgatgatgcaattgagcgccagttaagccactctgagcgtaataatgtgcgtgcggcttatattcatacttcggagcatttggatgaacgtcgattaatggttcaatggtgggcgaattatcttgattatataaaatcttacccactaactccctatgaatatgcaaataaaatggcctatgaaagttgttag

SEQ ID NO: 230784 - DNA, 2409 bp, Klebsiella pneumoniae
atggatatcagacaggttatatataaggcaaggcaaggaaatagtgttttatttttgggtgccggttttagttttgaagctagaaataaattttccagaaggtttccaaatgccattgaactatcttctgaaatacaaggaaagttaagtgagccctatgatgagattttgcaactgaaagagtcttcagaagagtatattgaggaatttggaaaagagaaattatataatttaatttttgatactttcaaaactaaagcaacagaaaaagactataaagtattatctcaaataaaatggaaaagaatttacacgactaattatgacgatttggtcgaagatacttacaggagtatgaataagaatattaattctttgcttatgtctgatgatccatcccttatggttcccggtgagacgacttgcattcacctaaatggatttgtggataaaatgaccttaagtaactttaactccgattttaaattaacagaaacaagttatttgacaaaaatgttttccaatgggaagtggaaaactatttttaatgcggatttgagagagtgtgattttatattttttattggttattctctttatgatatcgatattgagttattactaattgaaaactcggaaataaaagataaagtaatattcattacctctccggagcctgggtctaggttagaaaaaaaattaaataaatatgggagtgttcacaaaataggaatttccggttttcttgatgagttgagtttttcattagaaacatggcccgaagtgaaatgtgaatttaactttacacagttgaaaaaattcacatccccaattccgcaggaagaatttaaaacaaatgatattacatctctttttttatatggtgatgtgagtcaaagtttgataaaaaatgcggttttaaataatacatcggggtattatatttttagagagaaggttagagatttagaatacgatctccgtaattattcttgtgtggtcgtacattcaaaattagcaaatggcaaaacccttttctgcttaggtgcacttgaatacttgcaccagaaaggttatacgccttatattttggagttaggtaaggaaattactgcaggtgaaatagaggaattaaaaaaatctgctaaacctctattgcttattgaaaactatcatcgacatctaaaaaatttagagcttatttcttcattgagtatcgatggggtcaaaatattgctatcaagtagaactgagttgcatgagatatatgttgatgagttggctaaattagagtggtcagtttgtgatgtcgatgtgaattatcttaataataatgagataagtaaattggttgagttgatgaactcaaacggcttatttggggctaatgctaatctttctattaaagggaaagaaaaactcttgaaggagaagttaagaaaagagttttcatttatactggcagaaatacttaaagcgccgcagataacagagcgtttagaatcattattgaatattattaatgagaatagtgagtttgatgattgcctgttaatatgctcaattgcttcctatatgtcatatgatcttgatagtatagatattcaaacattgacttctgtcagaggggtcgacagcgttaaatattttagaaatgaagttgcctcacagattttagagaaaaataatggcgttgttctacttaaaaatcctatcctcgctaaggttataataagcagaaaagctaaaaataatcctcgtggccttttagaattcctagtggaattgtatgggactttaaataagtatagtgattatgacactaaatataatagctttatgaaagacattaatgtgttctccaatctactaaaaatatttggggtggagaatgttggtcttatcgatgagttctatgaacgagtgagattatattctgataatagtaaaaatcagcacttttggcttcaatttgcgattgctaaactttcaataaaagattatgtcactgcagacaatttcattaaaacaacatattctttagcgcaaggaagaaattataatcatgactgggttaattgccaatacgctcgactattgattgaaacttctggagacttgacggataaacaggaaagaatacaaagattaaaaagtgcacatgctttgatcattggtcaagaaaacaggcattacccttttagggttgcatgtaaatatttcgatttcttagatgaaaatgagaaggatattgatctagatacaaaaaaaacccttgccggtttcttaagagagtttgatgcaaagtatcataagacaaaaagtcagatgcataaccagaatcatcctgtcatggaagagtttaaacgccgatgccgcgcattttttagagtcaattcaaccttatga

SEQ ID NO: 230785 - DNA, 720 bp, Klebsiella pneumoniae
atgggattattaaagacagggcttcgtaccgcaaatgccatcataacactcggcggatcgctggaattagagcgtgcgaaagcaagcttcgaatccgtttatgcttcctacaaaacaacgtatgacgaagtggcacaaataaaaaccaagattgataatcgcattagtgagttgggcgacacgctaaaaaccgtaaaagccagattggatcatatcgagcaagtgttagaaaccgccttcctttctctcgataaacagtcccagccaacaatgcatgcatcgcagagtattgagaagtttaatcaacagtattccagcgtgctcagcttgggatttggtgggattgtcggtagctcaatggcattgggcgcgtgggcacttgtttcagccattggcactgcgtctactggtacggccatcggcacgttgtccggtgtagcagcaaccaatgcgacacttgcctggttcggaggtggtgcagttgctgcgggtggagcaggaatgagcggtggtatgttagtactgggagggatcgttgcagtgccgattatctatttcgcagcgaaaggtgcatggaccaaagcccgtgctttccaggagcaagaagagcttgttgaacaagaacatgaaaatttacgtatattaaaaccagaactcgagaagcaatataatgatgtattaacatacactactcaattaaaccgccattgccaggtatag

SEQ ID NO: 230786 - DNA, 138 bp, Klebsiella pneumoniae
atggatgtcctggtcatcgaagaaaatgtgtggtttaaacgccttcaggacttttgttttttctaccccgcccagaaaaaaagcttcatcgacgtataccccccaacttctcaacgttttgataacgcgcatgtctga

SEQ ID NO: 230787 - DNA, 1743 bp, Klebsiella pneumoniae
gtgagtaaatatagtgaaatacagcgtcaattaaatgaagtaagcccaatcccgaaaggtattcctaaagtatatcttttaggggatacaggaacaggaaagacgacttttattcgaaaaatattaggaactgaaagcagtaaattccccactaccagacaacttagaacaaccgttgcaccaactgaatatgtaatatgtaaatcaaccaattatgaattaactatcttattaaaatcttttgatgaaattaatggatatgtcagagaaattctaaaagaagcattagagaaatcattgaaaggtgaagatgttataagaagcttacggcaaacaaatgatcagcgatttcgattatactatcttcttaatgccagtgatcttgaaagtttcgctgaggcagtaatttcacttacacctcttctttctggaagaattgaagaattaaaaaaatcgtccactgataatatcactgatcaagacgaatatgttagtgttgttattgatgaaataaacgataagattgagagcattcagagtaaaattatggatgctatccagcacattgtaatgtctatatgtgatggaattatgttaaatgatgaatcacaggggtataaatttagttcaaccgaaaaagaagatttcattcaaaaatgtaaaaaaatactatccagtgataaagaatctatctcccctgttgtcgagtatgcgagattgagtgggaaactcaaatcagaatgggtgagtgatagtacggaaatagtcattattgatggggaaggtattggacatgacacaaaagaatcagcacagttagatgctaggcattatgatttcttttatgatactaattcaattctatttattgaagaatcaaaaaaaccatttgtgggtggtgggaaaaatgcactaaagagtatttttcaacgaggatatggtgataaattaaagttagttttcactaaacttgacgaagttattcctttcgattcagataccccaacagatgaagaaagaattgattgtgtaaaagatagtcttaataatgtcatggatgcgctaaaaaaagaaaatgtaaaatgcaacatttgtattgatgatatatattttcttggcgaccttaataaggttgaacataataaacggctggcatcgtgttttaactcaatttttgagagcacgatttcattaatggatgatgatgatattttcattgagccaaaatatgactttgagttattggcactgcatataaatgatacttccattggtttcaaagaacgatataatactttattaaataatgaacactggaaaacaatagaggcttttaatagacgtatgtactggagtatggaagcatttagaatgttttctccaattaccgactttgaggcagcagtaagtgaatacatcggagaatttttggcaaagccaatgtcatgggaatatgaagcagttgataatttaaaacgaaaaagtattgatagcgtgaaacgagaattcaacaagcttattcttagctttattcgcaataagttaattactgaaccatatgagaaatggaaagaatcctatttcttagctggcactggttcaacgattagtagaaaacgtgagataactactatttttagtaatacagttattgatgcctcccaagctgaacgctttaaggtgttcaaggatcaaattaaagcgattgttgtcaagtcaatagagaactgtaagtccatctaa

SEQ ID NO: 230788 - DNA, 3132 bp, Klebsiella pneumoniae
atgctaagcgaagacgatttagaacagcaatgcctgcaatggtttgctgaacaggactgggaagtgctacacgggccagatattgcaccggatggcgataacccgctacgtgcctcatttcatgatgtgtttctgcgcccggtaatgctggaacagttgcaaaccattaatccccatctccctgttgccgtgctggaagaagtgatacagcgtatcgcccatgcccaaagcccggatctggtcgtcagcaataaagcctttcatcacctattgctcaatggcgtgcccgttgaatataagcatgaagataaggtgattcacgacaacgcgctgttaatggatttcaaccatccagacaacaaccgctttatggtagtgaaccaggtcgccattcagggaacaaaacaagtgcgtcgcccggatgtcattggctatatcaacggcctgccggtggcggtgatcgaactaaaaagcccgattgatgctaacgccgatatctgggcggcgtttaaccagctacagacctataaaaacgaactcagcgacctgtttatttgtaacgaagcgctggtggtgagcgatggacaaaatgcgcgcatcggctctctcacggcggatgaagagcgcttcctgccgtggaaaaccgtggcgaacgaaaacgacaaaccgcagtttgactggcagcttaaaaccgtggtgcagggcttctttaaccgtgaattattgctcgattatatccgctattttgtcctgtttgaaaacgatggtaagcggctgattaagaagattgccgcctatcaccagttccacgcggtgcgtgaagcggtgacggcaacgattgtcgcctcgactggtaaacacctgccgctgcacagcaacattcagcctggcagtaaaaaagcaggcgtggtctggcatacccagggttccggcaaaagtatctccatgtgctgctatgccgggaaattgttgcaacaggcggagatgaacaacccgacgattgtggtggtaacggatcgtaacgatctcgacgggcaattatacgccaccttctgccaggcacaggatttactgaagcagacgccattacaggccaatgatcgcgatgaattgcgcgaactgcttaatgcccgtgaatccggcggcatcatctttaccaccgtgcagaagtttgcgccgctggatggtgagcagagtcatccggcgctcaaccaacgcagcaatatcgtggtgatttctgatgaagcgcaccgtagccagtatggcctgagtgccacgctggacagacaaactggtgtctataaatacggctacgccaaacatatgcgcgatgcgctgccgaatgcatcgtttatgggctttaccggtacgccaattgcctcggaagataaagatacccgtgcggtgttcggcgattatgtctctatctacgacattcaggatgcggtcgatgacggcgcaacggtgcctatctactatgaatcccggctggcaaaactcgacctgaaccatgaagagctagaaacgctctccgaccaggtggatgagctggtggaagatgaagaggcgggtcagcaggagaaaaccaaaggcgactggagccgtctggaaaagctggtcggttcagagccacgtattcagcaggtcgccgccgatctggttcagcattttgaaacacgcaacacggccatgaatggcaaggcgatgatcgtcgccatgagccgcgagatctgcgtgaaactgtacgatgctatcgtggcgatacgccctgaatggcacagtgaagacgttgaacaaggggcgatcaaagtcatcatgaccggatcggcgtcagataaagaccatctgcaatcgcatatctacaacaaacagaccaaaaaacgcctggaagcccgctttaaagatctgaacgatccgctgaagctggtgattgtgcgggatatgtggctgaccgggtttgatgccccatgctgccacaccatgtatatcgacaaaccgatgcgcggccataatctgatgcaggcgattgcccgtgttaaccgtgtgttccgggataaacccggcgggctggtggtggattatatcggcattgccaacgagctgaagcaggcgctgaaaacctataccgattcaaaaggcaaaggacagacaacggtcgatgccagggaagcctttgcgattctgctggaaaaaatggatgtcattcatgggatgtttgcccgttcggcgggtaagccgggatttgattacacgggcttctcccgcgatccgctggccttcttgcgtgatgccgtgaactacattctgggactggatgacggtaaaaaacgttacctcgatgtctcgctggcgatgagcaaagcctggtcactatgtaacacgctggatgaggccgaacctttgcaggaagagttcgcgtttctttcggcgatccgggtggggcttatcaaactcgatccgaaggccaaatttagccagtcagaaaaaaattcgctgctgagtaaaattcttgataatgcggtcgtcgcgaccggcgttgaagatgtgtttgctttggctggattggataagccgaacataggtttgctgtcggatgagttcctggaggaagtgcgggaaatgccgcagcgtaatctggctgtagaattgctggaaaaactgctcaatgacgggattcatgcacgttccggtaataacgtagtgcagcagaagaaatattctgaccgcctgaaagccgtactgctcaaatacaataaccgggcgattgaaaccgcgcaggtgattgaagagctgatcgagatggcgaaagcgtttcaggaagcgatggcgcgcgatgatgcgctggggttgaacccggatgaaatcgccttctacgatgctttagccgaaaacgaaagcgcggtgcgtgaactgggcgatgacacgctcagaaagctggctattgaagtcacacggcaactgcgtaaatccaccaccgtagactggcaagtacgagacagcgtgcgggcaagattacgggttctggttcgccagacgctgcgtaagtacaaatatccaccggataaaacagcgggtgcggtggagttaatattaaaacaagcggaagttatttctaatcattggacgatgtga

SEQ ID NO: 230789 - DNA, 1350 bp, Klebsiella pneumoniae
atgagttctaagtttcggaaagtaaaactatgtgaaatcctctcatttaagacaggtaaactcgactcgaatgcagcagtagataatggttgttatcctttttttacttgctcgccagtaacactttcgataaatacgcatgcttttgacactgaagcagtattattagctggtaataacgcaaatggggtgttttcagtaaaatactacaatggtaagtttaatgcttaccaaagaacatatgttattactcctctggataattcagaggtcaatgtgaaatggctttattttagaataaaatatgttacgtcagaattacaatcaatgtcagttggcactgcaacaaaattcttaacaaaaaaaattttggatgcatttgagattgaactgccaacttttgaagagcaaacatatcaagctcagattttatgggcgttacaggataaattagctaataatgaagctataaaccaaactctcgaacaaatggcgcaagccctgttcaaaacctggtttgtcgattttgaaccggtaaaagccaaaatggcagcgctggaagcgggtggttcgcaggaagatgcaatgcttgctgccatgacggcgatttccgggaaagatgtgaatgcactggcgatttttgagcgtgaacatcctgcgcaatatgccgaattaaaagccacggcagaactgtttccgtcagcgatgcaggatagtgagttgggggcgattcctaaaggatggaggggggcgtcaattagtgagatggggaaggttatttgtggaaaaactccgtcaaaaaaagaaccagagtattatggtagtgatgttccattcataaagataccagatatgcatgggcaactttttgtgcttaaaactaatgaatatttaagcgaagtcggttcaaagtcgcaactaaaaaaacttgtgcccgcaaattctatctgtgttagttgtatagctactattggtgtcgtttctatcaccaatgaaccatctcataccaatcaacaaataaattctgttacacctcataagagctcattactctattatctttatttttgtatgttgggattgaaagatcatcttcacgctttaggtagcgcgggtagtgcaactttaaatgtcaatacatctactttctcaggaattaaaatcgctcagcctgatgctaaagtattggagttatttcatgccaaatgtacacatttatttaatgagattaaatcgctcagtgtacaaactgaatcactaacccaactccgcgacacccttctccccaaacttctctcgggtgaaattaccctgccggaagcagaacaaataatcagcgaggaagcctga

SEQ ID NO: 230790 - DNA, 1710 bp, Klebsiella pneumoniae
atgaacaacgctgaacagctattcctaaacgagctggataacaaattctggaaggcggctgacaagctgcgcgccaacatggatgccgccaactacaagcatgtcgtgctggggctaatctttctgaagtatgtctccgatgcttttgaagcccgtcagcaggagctgatcacgctgttccgcgatgttggcaacccggataacatctacgccatgtcgcgcgatgattacgactccgacgaagactacgcgcaggcgattgttgatgagctggaaatcgaggattactacaccgaaaagaacatcttctgggtccctaaagctgctcgctgggacacgctgaaaacgaaagccatgctgccgaccggtacggtgctgtgggtggatgaaacaaccgggcaggatgtgaagctgcgctctgtctcctggctggtagacaacgcgctggatgaaatcgaaaaaaccaacccgaaactgaaaggcatcctgaaccgcatcagccagtaccagttgggcaacgaggtactgactgggctgattaacaccttctctgacgccaacttcagcaacccggaatataacggtgagaaactgagcttaaagagcaaagatattctcggccacgtctacgaatatttcctcggtcagttcgcgctggcggaaggtaaacagggcggccagtattacacgccgaaaagtatcgtcaccctgattgttgaaatgctgcaaccgtataacgggcgcgtgtatgacccggcgatgggttccggcgggttctttgtttccagtgaccgttttattgaagagcacgcgggtgagaagcagtacaacgccgccgagcagaagcgcaatatctctgtttacggccaggagtcgaacccgaccacctggaagctggcagcgatgaatatggcgatccggggcatcgactttaactttggcagtaaaaacgccgacaccctgctagacgaccagcacccggatctgcgcgctgacttcgtgatggcaaacccgccgttcaacatgaaggagtggtggagcgcgaagctggaaaacgacgtgcgctggaaatacggcacgccgccgcagggcaacgccaactttgcgtggatgcagcacatgatccaccacctcgcgccaaaaggctcgatggcgctgctgttggcgaacggctcaatgagttccaacaccaacaatgaaggcgaaatacgccgcaacctgattgaggccgatctggtggagtgcatggttgcactgccgggccagctctttaccaacacccaaatcccggcctgtatctggttcctgaccaaagacaaatctggtggcaacggcaaagcacaccgtaaaggtgaagtgctgtttattgatgcccgtcagattggctatatgaaagaccgcgtgctgcgagactttacccgcgaggatatcgccagaattgcccagaccttccatgcatggcagacggataaagactatgaagatgaagcgggattctgcttcgccgcaacgctggaagatataaagaaaaatgactttgtgctgacccccgggcgctatgtcggtgctgcagagcaagacgaagatgatgagccttttgccgagaagatggcacggctgacggcgcagctgaaagatcagctcgaagagagtgcgcaactggaagcgcagattaaggcgaatctgggggggctgggttatgagttctaa

SEQ ID NO: 230791 - DNA, 1686 bp, Klebsiella pneumoniae
atgccttacccatctcttgaacaatacaaccaagcgtttcagctacatagtaagctgctaatcgatcctgaattgaaatctggcgctgttgccacgacagggttgggtctacccctagccatcagcggtggctttgcattgacctatacgatcaaatcaggcgttaagaaatacgccgttcgttgttttcatagagagtcaaaggctttagaacgccgttatgaggctatctcgaggaaaatttctagccttcgctccccctattttctcgacttccagtttcagccccaagggatcaaagtcgaaggaatattttaccctattgtcaaaatggcatgggccaagggagagacacttggagaattcctggaggtcaacaggcgttctgcgcaagcaatagcgaaactatctgcatcgattgaatcacttgctgcctaccttgaaaaagaaaaaatagcacatggtgatttccagaccggaaacctgatggtttccgacggaggtgcaaccgtccagttaatcgactatgacggaatgttcgttgatgagattaagacattaggaagctcggagctggggcatgtcaattttcagcatccccgccgtaaagcaacgaatccgttcaatcacactctggaccgtttctcacttattacgctctggctagctcttaaaaccttgcaaatcgatccgtccatttgggataaatcaaattcggaactggatgcaatcatttttcgagctaatgactttgtagaccccggttcatcttccatcttagggatgctatcgcgcattcaacagctttccccctatgtaaagaattttgccgcagtctgcgcttcagcgatggaaaaaacgccttcccttgatgacttcattgctggcagaaacattcctgtatccctggcaactattagtataaatggggatataccaagcagcagactgaaaccaggttacattggtgcttacaccgtcctgtcagccatggattacagtgcttgccttcagcgagttggtgataaagttgaagttatcggtaaaattattgatgtcaaacttagttatgcccgaaatggaaaaccatatatctttgttaatttcggtgattggcgcggtaatatattcaaaatatcaatatggaacgaaggcattagcgctttgccttcaaaacctgatgcctcatggatcgggaaatggattagtgtaatcggtcttatggaaccgccctatgtcagtgggaaatacaaatattcacatatctcaataacagttacgaccatcgggcaaatgaccgttctttcagaaacagatgcccgttggcgccttgctggaccaaacgatagtcgacaaatatcaacttctactagcagcaatcaggaagccttggagcgcattaagggtaagagcaccacttcaactcctaagcctgtgagcactaacgccacaactgcaaaccaggcaatcctcaacaagttacgggcttctacacaaactgtagcaccagcaagagcgcaaactcagcatgtagtacctaataaatcatcaacgcattatgtagcaccgacgagaacatcagcttcgcagccggttcaaaatattccgagccctgctaacacctcaaagcagcaaacctctcaaaaaaatatagttacaaagattttgaaatggcttttgggatga

SEQ ID NO: 230792 - DNA, 240 bp, Klebsiella pneumoniae
ttgggtgagtttttcaaggtaaaaagttttcccatgccgtgtccagaaagtgcttccaccaacgaaatcgttatgagcgggcaacgtagcaaggagtgttggccgctcattaaatttttctggatgatcgaaaggccatgcgcaaatgagtttgtcgcaatcaaccagcatggtgatgctatctccaatagcaagaatctctaccgcctgatgctcttcaaattcctctacacctattag

SEQ ID NO: 230793 - DNA, 834 bp, Klebsiella pneumoniae
atggcatacgaagctcagatcagccgtactaatccagcagcatttcttttcgtcgtcgatcagtctggttcaatgtcagacaaaatgtcctccggtcgaagtaaggctgagtttgtcgccgatgcgcttaatcgaactttaatgaacctaatcactcgctgtactaaatcggaaggcgtacgtgactatttcgaaattggtgttttaggttatggcggtcaaggagtttctaatggcttttctggtccacttggaggacaagtcctcaatccaatttcagctctcgaacaaaatccagccagagtagaagatcgaaaacgtaagatggatgatggggctggcggaatcatcgagacagcaattaagtttccagtatggttcgatgctattgctagtggcggcacgcctatgcgtgaagccctgaccagagccgccgaagagttggtgacttggtgtgatgcccatccggattgctatcctccgactatcctgcatgtgactgacggcgaatcaaacgacggtgacccggaagagattgccaatcatctacgacagattcgcaccaatgacggtgaagttctgattcttaatattcatgtcagttctctcggaaatgatccaatcagatatccttcctcagacactggcttaccggatgcctacgctaagctgcttttccgtatgtccagccctcttccggaacatctggtgcgcttcgctcaggaaaaagggcatacagtcggtatcgaatctcgtggattcatgttcaatgctgaggctgccgaactcgtcgacttcttcgacatcggaacccgcgcttctcagttgcgttga

SEQ ID NO: 230794 - DNA, 1239 bp, Klebsiella pneumoniae
gtggcactgggccagcgcccggactatgcccgtatcgcccgtcacgttatcaacatcgacgagctgtttatcgactacgcccgcgtcttcctgcccggccacgaccgacaggcatgggacaacgtggtgcggattgccggtggcatcaccgaaaagaatacgccacgtaaccttcaggggcgggacagctacgttgtcgcgctggagcagtacctttccaccacccgattacatgacccgatcctcgacggtctgcgttctgccgtgcgctacgacaaaacgtatttcgacaagatcgtcgcctcgctgctgccgctgctggaaaaactgaccaccgggaaaaacgcccaactgctggccccggactacggcgatctcaacgacccacgcccggtgttcgactggcagcaggcgattcgccagcgggcgattgtctatgtcgggctggatgcgctgtccgatgcggagattgccgccgccgtaggcaactcgatgtttgccgatctggtcagcgtcgccgggcatatctacaaacacggcgtgatggatggcctgccgcaggcggaagaaaaagcagccatcaacctgcactgcgatgagttcagcgagctgatgggcgacgaatttattccgctgatcaacaaaggcggcggcgcaggcgtacaggtcacggcctacacccagacgctctccgatatcgaagcccgcatcggcgaccgcgccaaagcggaccaggtcgtcggcaacttcaacagtcggatcatgatgcgggtgcgggaatctgccaccgccgaattgttgacgaagcaactgccgcaggtggatgtgctcagcaacagcatcagttccggcgttgccgacagcaccgacgcacagggcaacatcggtttttccagtaacacccaggatcggatgagcagcattcaggtgccgttactggaaccctcctcactggtacagcttcccaaagggcaggcgttcgctctgctggaaggcggtcagctctggaagctacgcatcccattaccggacgcagcacacgatccgctgatgccggaaagcatcacacacatagcccgctatatggaaaaacagtacgacagcacgcccatatggtgggaccgcccggagacagttgtaacggcgaaaaatgaccctattttatggctgaacgacagcgaaaccacggagaaacagaccgatgataccccggacacaccgccagctcgtgagcgttga

SEQ ID NO: 230795 - DNA, 135 bp, Klebsiella pneumoniae
atgccgcagctggtactgctgaaggtaactgagaaagggggcgtactggccttggcgcgcttgcaagatttgctggtcatagagcgaatccgctccctgaaccagcgccgggaagagcaaaagcaagccgattga

SEQ ID NO: 230796 - DNA, 669 bp, Klebsiella pneumoniae
atgaatttattaaaatactatcaacaatatcgcgacaagtggtgggctttaccgctcgttctgcctgcgctgttattaccggtcgccagatgggcgaatacctacaccatgctcaatggtcatatggtatttttgtattatcttcccctggcgctggtgctcagcctgatgatgttttttggttgggcggcgatccctggcattattattggcctgctgttaactctggcccacggcatgatgtttgagcagtccatcggtgtactgttccatttccttatcccctgcgtgctctgctggggcggctaccgcatttttgtcccccagcgtcagcaggtctcacacggcaacgtccgactgatgccgcatcgtctgttctggcaaatgctgctcccttcggtcatttttttgattttgtcacagattgccgaatatcttggactccatccgcgcacaacggaaatgaccggcgttacgccatttagtttacgttcattaatcacctttcaggcgctaatggtagggtgcctgaccggcatgccgctgtgttattttgtgttacgggtcattcgtaatccttttcatttacgcggctttatttctcaggttcgcttacaaattgatccaaaaataaaaaaattgaaattatttgctgggcgacggtattaa

SEQ ID NO: 230797 - DNA, 2166 bp, Klebsiella pneumoniae
atgtcatcagtaaaaaatagaactgttgagaaagaggcagatgagatcgatttaggccgtttagttggagagcttatcgatcatagaaaactcattatttcggttacggcgttatttactttaatcgctctgctttatgcactttttgcaacgcctatctatcaggctgatgcgttgttacaagtagagcaaaagcaaggtaatgctattctgaatagtctaagccaaatgttacctgacagtcagcctcaatctgcaccagaaattgcattgttgcaatctcgtatgattctgggaaaaactgtagatgatctaaatttacaagctaagatcgaacaaagttattttccgttattaggtaaaggatgggctcgtttggtaggagaaaaaaaagggattttagttgttagccgactctatttgtcatctgacagcgacacagaaataccaaaattaaaactgaaggtaaaggacgcgaacaactatattgttacttttaatgatcacgagttcgaaggcaaagtcggggttttgctcgattcaaatggcatttcgcttaaagttgatagtattgaggctaaacctggaactgagtttgttatatcttatgttagtaagctgcaagctataactgacttacaagaaattttttcagtagcagatcaaggaaaagatactggaatattaagcctatctttaactggcccagatccacttttgctagagaaaacgctaaacagcatcagtaataattatcttgcacaaaatgtagcgcgccaagcagcacaggatgctaaaagtctagagtttttaaaccaacaactgcctaaagtacgcaatgatttagatattgctgaagataagctaaatcaatatcggcgccaaaaagattctgtagatctttcgttagaagccaaatcagtacttgaacaaatagttaatgtcgataatcagcttaatgaattgacattccgtgaatcagaaatctcgcagctttatactaaagaacatccaacctataaggcgcttatggaaaagcgtaaaactttgcaggatgagaaagcaaagcttaatgaacgtgtttcagcaatgccgaaaacacagcaagatatcttacagttaagcagagatgtagattctgggcaagctgtttacatgcagcttcttaatcgtcaacaggaactcaatattgcaaaatctagcgctattggcaatgttagaattattgatgatgctgtgtcccaaccgaaaccagtaaaaccgaagaaaataataattgtacttgttgggattgttctgggaggtatgatatctataggcatagtattgttaaggatcttcttgcgtcgagggatcgaaagtcccgagcaacttgaagaacttggaattaacgtatatgcgaatatacctatttctgagacttttgctaataaggctcttcaaaatacaaaattgagaagaaaagcaggcagtgaatatcagagctttttagcggttgataaccctgcggatttggcaatagaagctatccgcggtttgcgtacaagcctgcacttcgcaatgatggaagcacgaaacaatgtcttgatgatttctggagctagccctaatgccgggaagacttttgttagctctaatcttgctgcaataattgctcaaactggaaaaaaagtactttttatagacaccgatatgagaaagggttatacccacaagttgttcaatttgagtaatgataatggactttcggatgtattgtcgggaaaaattgaagtaagtaaagcaattaaaaaagtatcttctgcaggctttgattatatttcacgaggtatggtcccacctaatccagcagaattattaatgcatcgtagattaggtgagctaataacgttggttagtcaaagttatgacatcgttatattagatacgccaccaatactagcggttactgatgctgctattattgggaattatgttggaacaacattattgatagcccgatttgaacaaaatacgacaaaagaaattgaagtaagtgttaaacgattcgaacaagccggtgtgtctgtgaagggctgtatattgaatggtgttgttaaaaaagcaagtagctattatggctatggttatagccattatggatactcttacagcgataaaaaataa

SEQ ID NO: 230798 - DNA, 435 bp, Klebsiella pneumoniae
atgtttgattctattcttgtcgtttgtacgggaaatatatgtcgttctccaattggggaacgttttttacagaaagccttgcctacaaagaaaattgattctgcagggactaatgcattgataggccataaagctgatgatagtgcaattaagattgcggaaaaacatggtatttcattagcggaacatgtaggacgtcagtttacttctgttattggtcgacaatatgatctgattttagtaatggaaaaatatcatattgaaaaaattggacagattgccccggagttgagaggtaaaacaatgctttttggccaatggcttaaccaaaaagaaattcctgatccatatcgcaaaagtgatgaagcatttgcatctgtatatcagttaatcgagttagctggcttacgttgggttgagaaattaggcgcataa

SEQ ID NO: 230799 - DNA, 1467 bp, Klebsiella pneumoniae
atgaaaaagattaaccattggatcaacggtaaaaacgttgccggcgcagactattttcataccaccaacccggccaccggcgaggtactggcggaagtcgcctccggcggtgaagccgaaataaaccaggcggtggcggcggcgaaagaggccttcccgaagtgggctaacctgccgatgaaagagcgcgcgcgcctgatgcgccgcctgggggatctgatcgatcagaacgtcccggagatcgcggcgatggaaaccgccgataccggcctgccgatccaccagaccaaaaacgtgttgatcccgcgcgcctcacacaatttcgaatttttcgccgaagtatgccagcagatgaacggcaagacctatccggtcgacgacaagatgctgaactacaccctcgtgcagccggttggcgtctgcgcgctggtgtcgccgtggaacgtgccgtttatgaccgccacctggaaggtggcgccgtgcctggcgctggggaataccgcggtgctgaaaatgtccgaactgtcgccgctgaccgccgatcgtctgggcgagctggcgctggaagccgggatcccggctggcgtactcaatgtggtgcagggctacggcgccaccgccggcgacgcgctggtgcgccatcatgatgtgcgcgccgtctccttcaccggcggcaccgccaccggccgcaacatcatgaaaaacgccggtctgaaaaagtactccatggagctgggcggaaaatcgccggtgctgatttttgaagatgccgatatcgagcgcgcgcttgacgccgcgctgttcaccatcttctcgatcaacggcgaacgctgcaccgccggctcgcgcatctttattcagcagagtatctaccccgagttcgttaaacgcttcgccgagcgcgccaatcgcctgcgcgtaggcgatccgaccgatccgaacacccaggtcggcgcgctgattagccagcagcactgggagaaagtgtccggctacattcgcctcggcatcgaagagggggccaccctgctggccggcggcgcggataaaccgtccgacctgccggcgcatctgaaagccggcaacttcctgcgcccgacggtgctggcggatgtcgacaaccgtatgcgcgtcgcccaggaagagatttttggcccggtcgcctgcctgctgccgttcaaagacgaagcggaagggctgcgcctggcgaacgatgtggaatacggcctggcgtcgtatatctggacccaggacgtcagcaaagtgctgcgtctggcgcgcggtattgaagccgggatggtgttcgtcaacacccagaacgtgcgcgacctgcgtcagccgttcggcggcgtgaaggcctccggcaccggccgcgaaggcggcgagtacagctttgaagtgttcgccgaaatgaaaaacgtctgcatctcgatgggcgaccatccgatcccgaaatggggagtctga

SEQ ID NO: 230800 - DNA, 633 bp, Klebsiella pneumoniae; identical to SEQ ID NO: 139325

SEQ ID NO: 230801 - DNA, 378 bp, Klebsiella pneumoniae
atgactagaagaacccaactgcagaaggtgcgggatgttcggaagattattgattttgtcaaagaacatgggcgcatcaccaccgaacaggtagctgaaatgactgggctttccataaaaacggcccggctggatatgcaggttgcgcagagaaccggggagatcatccgctatggccttcagggattattccgtgacctacgcgcaacaatcaattttgaccttgccaattacgatagtaggaaaaatgctgggggatgtgtcgaaaactgcatggcggaggagactcaaatggaatttacaaaaaatttagaacgcatgggtaccggatcgttgatatcaacatgtgtgtgttgcagtcgagcgaactctacgtag

SEQ ID NO: 230802 - DNA, 315 bp, Klebsiella pneumoniae
atgaacagttatatgacccttgagctggatcatccattttataaaaacatcagtgcgtttgaatgtgaaaaagatacgttggtagcaaaacgtgattttagaatgttggtccacacactgggaacaacagctaaagcagactttcaaattacaatcctcaatccggaaaaatataaaggagtatggatatttaatggcgaaatgatgcatccagagacaccatatggagattcggggtttattctcagaaaaaaacaaggaaatgaagaacttcaacccgtgcgctatcttcctgttaccagaaacttgtcgtaa

SEQ ID NO: 230803 - DNA, 423 bp, Klebsiella pneumoniae
atgatgtatcaacgcacggatctgacgctctcaatgttctatgcatccagtgctgatgcagagggaaacaaagtggctacattgacgatgcaggtcatcgatgcagaggctggcgccgtccagaccagtcagttgctctgcattaccgatagcgcgaagaaaaaaacgtataccgtaggcgagcaatctatcagtaatggttccgatccgttgctggtcgcgattgagaattactggcgtcagagtacggatgtcgtcgttaaaggattgatcgccgaggtgaccgacttcatcgcagggaatatcaactcagtcagcacctggatcggccagtttgggatgaaggtgttcgagaaccagccattagctgaacggctaccagaaagtgtattgcaggccgacggcggcgcgtctgcaggctga

SEQ ID NO: 230804 - DNA, 711 bp, Klebsiella pneumoniae
atgcgtcagaaaacgattaaggccatccaggaacatgccgccgcagaatatccgcgcgaggcctgcggccttgtcgcccagaggggccgggcggagcgttatttcccctgccggaacctggccacagagtcgaaagataattttgtgctggcgccggaggattatgcggaggttgaggaatggggagcgatcaccggtattgttcacagccatcctgatgccaccacccagccgagcgaactggataaagcacaatgcgacacgacccttctcccctggcatattatcagctggccagaaggcgatctccgtaccattcacccgcgtggtgagttgccgctcctcgagcgaccattcgtgctgggccactacgattgctggggcctggtgatgagctattttcggcaaacccacggcatcgagctgcacgattaccgcgtcgactatccgtggtgggaaaaggagtatcccgataatttttatcaggactgctggtatgaatgcgggttccgtgagtttgatggtccaccgcaaccgggtgatatggttatcatgcaggtgcaggcggataagtggaaccacgccgggattttgctggaagggaacatgctacttcaccatttgtatggtcacctgagtcagcgcgtgccctatggcgggtactggcaggaaagaacaatgaaaatcgtcaggtatttttcactatgttaa

SEQ ID NO: 230805 - DNA, 153 bp, Klebsiella pneumoniae
atgcagtggttcgaagccgcagacctgatcgtcaaaggcatggaaggcgctatcgccgccaagaccgtgacctatgacttcgaacgtctgatggaaggcgctaaactactgaaatgtagcgagtttggcgacgcgattatcgcgaacatgtaa

SEQ ID NO: 230806 - DNA, 216 bp, Klebsiella pneumoniae
atgacgacaacagagcttgaagagtactttgggaccccgagtaaagccgcagattttttctctgtatccaccgaggccttctacttatggcgaaaaagaccagggggattaatccctaaaggtcgcgctgctgaagcggcatatagaactgacggaaagctggtttttcgtcctgagctttacaaaaagtctaccgcctcaacaggcaagaagtaa

SEQ ID NO: 230807 - DNA, 378 bp, Klebsiella pneumoniae
atgcgtgatatttctttgatactggaacggtggggtgcttgggctgcaatggatagtagtggtgttgattattcgcatatcgctgcagggttcaaaggactactccctcaaactggcaaaacacggctatgttgtaccgacgatgatgcacttatcatcgaaggctgtatggcaaagctccgcggtaagaagccctacgagcacagtttgcttgtagcccattatctattcggtatatcaaagcgtaagttagctaagtctctaaaaaaagacgaaaaagtgattcgcattgagatacagatggccgagggctttgttgatggatgtttagcgatgctagatttgcgtttggatatggatattgaagtgaaatcttga

SEQ ID NO: 230808 - DNA, 1011 bp, Klebsiella pneumoniae
ttggatgatatccagtatgatgtagcgtctgaacaacaagcttttgaattactagagcgttacctgagcggagaaggcatacctgaaaaaattagtttcaatggatggcctagcctaactatcaggctaacaggtgataaattcaacaaatcacttaccccctctgtgatgaagggttttgttgagatgcaatcgcaaatcaacaaatcttacgcactagcaaagtacggcactccagatgttcgcaggctgacaaaagaagagcttgatgccctagaaattgaagttacagtagagcaagggtcgtcacttgttgagataaacattgatgggttcctgagcaaacttacgcatgaactggtaggaaaaatgaacgccacagagatcgtatttacagttctcggtgctgccgtcatatggggcggggtaaccgtctttaaacgctttttagataaccgtaaagatactcgcctcgctgagatcgctaaagaaggcgacaaggagcacctgcgtgcaatgcaggttatgacccaagaagaaacgaagcgccttcagataatctctgaaatggttgcccaaaaacctcttctggacaacatggatcgtatgtcttatgacgcaaagacaaccatggtcaagtctttcgtacgttctgacaccgcagaaattgacggcgtaactatcgattcagagactgcaaaagagttggttacaaacgcccgccgccgttcggtagaaatcaggatagacggtgtataccggattgaggaagtcaataacactgatcctgaaagctttaaggttaaggttcgcagagttgattctgaccaaaggctaacctgcgttgtacaggatattttccttgatgagtcaggaaacaaagaagccctacagcgcgctgagtgggaacgaaaacctgtgcatttgagcattaacgcaaaacacgtagacggtgatattaaatccgctgtgattttgtatgttaaagacgtagaagataagcccgagtaa

SEQ ID NO: 230809 - DNA, 270 bp, Klebsiella pneumoniae
atgagctttgaaattatcgcggggctggtggttgtaatcctgggtgctatcgctggcgcgttcggcattggtcatgctcgcggaacaagcaaggcagaatctaaagccgatcagcagcgtaccgaagaaaacgccgctgctactgtcgccgcggcagaacgtaaggcggaagtcatgaaagaggccagcgatgcacaaacaactgtcagccatatgcctgatgataatgttgatcgggagctgcgcgagaactttacccgcaaaacctga

SEQ ID NO: 230810 - DNA, 198 bp, Klebsiella pneumoniae
atgataatgttgatcgggagctgcgcgagaactttacccgcaaaacctgaagtgatcgataccgcctgcagctgggtgagggtcatctacctgactgaccacgatatcgacgtgctggataagcagaccaagcgcgacattctggcgcacaacaaatcggtgcaggccaattgccagagcattacccctactcactga

SEQ ID NO: 230811 - DNA, 252 bp, Klebsiella pneumoniae
atgctaaagtcagatttaacatttaaagacataccggtaacgggtgcgttgattattgttaccggaataacaatagctgcggaccattcgtccatgacatttggtgttaattatcgcgcgacagagctatcagacccgttcaactcggatgtgttttcatgcgagtatgattcctccggggataacccgataactcaggcgtatgcgtatctgaaagcgctggatgagtttagtggcgcaacggaatcctaa

SEQ ID NO: 230812 - DNA, 1530 bp, Klebsiella pneumoniae
atggagcgtagagatttcgccaaacgactcgcgctgatagtcggcgctggagcagcaggagccgtttcaactagagtgtcagcagatgaagaaagaagtaaaattcaggaactttatacaccacaacaaatacatgatactgtcaatgttctcaagtttggtacaccagaaaatgccagcgatgccttctacagggcctttatctatttaaacaaacgaggtgggggtaacctactggtccctaatggaaactacatcttcgacaggtcagtaaaaacgagaataggatgtaagatatctgtatatacctcatcgaattcaattatgactatgaagtccgatgaagatatgttcaatattaccggttcagaaaacgcagcgcttagattttttgggaatggggagttcatctatgatggacctgagacaaaaaacgctacatgcatcagattcgtctctctggtaaatggaaaaaaatttgcgtcaagttccttcgaatgcaatggaaggataagaataagaaaggggaataatgagtggaggtatggtgttcacttgactgatgttagagatgggattctgtcaggactccaaattgatggacttaataggagtggttcacccagcaatcaaattggagtttcaattaactcacaacactccccgtcagtatcttgggtaatcagtaacatgcagataaatgatgttaatactgcatatgaaataaattcagagtcagtacccggagtagaggggttgaagttttttaattgtgatatggggggcgtaaggaggggtatttattttaataattcatcaggatacatgcctccacaaatggaggtgatcgggtgtcacataaatggagtcggtactttaatatcaataaatagggctgtaagcattcatatcattggtggtcttttctataagaagggtgttgatggggagttttttcattttaatagtgttagtgatatctctatagtcgggtctactctggctgttattgggagtggatcagattctcctggaatctatatagaaggaagcaaggcttcaccatctgggcttataaggatttctgactgtaattattgggctcatggtaaaaaaagcccatttatcatattgtctggatatgtatttaagttttctatatcaaacaccatgaaggattcctctggtaagatgttggagttgtctaatcttagttctgggaagtcaaccataacagtagatagggacactgttaagttaacagatatggaaaaaggcgagtcatggggagttaatgttgaaaaccatgatggagtagttgatttaacaaatgtctctccaggaattgtttatttaaataatggcgctatatcatcaataaaaggggcatccttaaatgctgaatacacccttgtatccacaggaagtgtaattagtatatctaaaaaccctgagttcattaatagcgaaaataataacagaaaggctgtgaaattattattcgacggggaaaaatatattttcatttag

SEQ ID NO: 230813 - DNA, 1206 bp, Klebsiella pneumoniae
atgcttaacactgggctaagcaaagtgcatgaatgggcgctaagatgctttattgttgtttgcgtggtactaccaacaggtagcgtatttgacatcaaccttaaagttctattattgtttgtcgtattatttttaagcttttttgctaagcgaggagttccggcaataaagataataaccggcatgcttatcccgtcgtcaataatagttgcatttatggcaattacattatttaattcaaaatatatacctgaaatgataccgcaagcgcgcgacatactggttttttttattatgtctactttggcttatgcgatagttgataaagataagcaatatgaactaataacaaagttaattgtcaactgtcttatattacttggcttatttaaattctttgtttttgcgtactctgtagtatctggcattagtgttagttcaatagttgaaggtatatcctcttttttcaacactaccctaatgacaatgagttcagatgatattgtcattagtagaataacctttatgtctgattacattctgccggttgcaatatacctgaaaacaaaggagtttatctccaagagaacaggattacttggcgggattatagtattaatacttctttattccattgttattagcatgtcgagattcctctggttaatggggattattacttttgcaattgcggtattgggtgacataaaaaagaaaaaatcaatcgcaatcattataattgccatttttgggtttatgtatattctttctttgcaatcagtgcaggatgcaattgagttcagagtatcatctaaaatggttgcggcggcagacagtaccagagactttcaaaagctggcgattgataatgcttttgaaaacgcccctatattaggtaatggtcttggttattacattcccaatctaataagaagcgaaaccgcacgatattcatatgaacttcaaatacaagcattgtatatgcagattggaatcataggggcaacgtcattattattattgatagtcataaggctattaaaacagtccagagtgcttagctttagagaaaaattgttatttattgctttaatagcagggtggatttcaggtggtttcttcaaccctgtgatattttcctctaccggcggtatttctttcttgctattgtatacaacgccgaatgcaatgcgtaggttagtgtaa

SEQ ID NO: 230814 - DNA, 1065 bp, Klebsiella pneumoniae
atgatgaacagagaagccatatcgacagacacaaattttgttggtatgtcaaggcttgaatatgttgattccctgcgtggggtatcagcgctccttgttgtcttttctcatgcattccaatcacttacattcaatgactattttataaacatagggaaggttggggtatttatatttttcatgattagtggctttgtaataccatactcacttaaaaaagagtcaaattgctctattatatttattacaactagattttttagattgtatcctgcttactggttctctttgattttcgctattgcaatttattatttactgagcgaacccattccaacaataaatcagatactatctaatataacgatgttacaaatgggcatggggcaagaaaatataataggcgtgtactggactttattcattgagctgattttttatatcatctgcattggattagcaaagacaggattcctatggaatgaaagaaaaatggtgctcatgttttatgttttcatttcttgttctatattaacctctttagcaaggtttatgcttcacaagaaaattccagtcgcaattcctttaggtttatctttgatgtttcttggatacgcatggcgagcatgtgtcatagacaaaagcgtatttgttatgtcaaaaatcaaaactatggttgctatttgtatggtttcaacttttctgtgcggatatctttcttattcatgggatacgcaaacggatgagccatggaaaaatttttcttacgcatatactctagggatcgtgtgctttatagtcttcactaagtacgcaaagatcaatacaaaaataacagcatactttggtgtcattagttactcattatatttaatccatgaacctacaattaaaatagtttcttctctaaagatattgacggacagtattgggagtgaagaggtgaggcttatatctatatttgtagctttattgttttcagtgatcgtgtataacacgatagaaaaaccaagtataaaaatcggtaagaaaattgtaaaaaaaataaggatttctcatgcttaa

SEQ ID NO: 230815 - DNA, 1560 bp, Klebsiella pneumoniae
atgaacgttatgtattattcgatcgcaggggctatcgcttttgtgaccattttaacggccctaattgttaacgcgaaaaaactgaaaacagctagggctgattctgccgataaggcagcacaattggcgcgttatgccgccattattgatgccgaagatgaagcggcgcgcatcgtggctcaagcgaagacggaagcagccaacatcatttcggtaagcgaaacagatgcgaagtttgttagagacttagccaatgcggtcttaggggatgcccgaacggctgctgaaaaactcagtaatgagactcagcaaaccgttgccaagcagctcgcagaaaaagatgaaattgaacaacagatccaaactttgcgcgcttcttacgccgataagaaaatcacgtatgacgaactggagtctgcgctctctatctacaaagaggatatggattttgcagaaatgggcttctacgcgccacatttcgatttcgatacatcggaacttttccaggcatctatccgtaacaatcgacaacagcagaaagatttgcttcgtaacaagaccacttttggggccatctactgcaccacagaatggacggtaagtggttcaaaggccgaagggaataaaatgacaacgcgaggtatcaacctgacggctagagcctttaacagtgaatgcgatgcagccattgccaacgtaacattcaaaaacatcaacaccatggaatcgcgcatttacaaagcttttgatgtattgaataaactcaatgaagttaaccaaatctacattaatcatgccttcttggatcttaagctgaccgagctgcgtttaacttatgaataccgagccaaaaagcaggaagaaaaagaagaacaacgtgaaatccgcgcccagatggccgaggaacgcaaagcccagttagagattgagcgcgctattcgtgaagctgaagaagaagaacgccgcgcccagaaggccctagataaagctcggaaagaaatgaatgaaaaactggcgaaaatgaccgccgctcaggccgaaaagtatcaggagaaaatcgattccttgcaagaagcgcttaccgaagctgagttgaaaggattaaaagcacttagcatggcgcaacagaccaagcggggccacgtttacgttatttccaacatcggctcttttggtgaaaatgtctttaagattggtatgacacgccgccttgatcctcaagaccgagttgacgagctgggcagtgcatctgtgccgttcctgtttgatgttcatgctatgatcttcagtgaagatgctccggcattggaatatgccctacaccaacatttcgctgaaaaccgcactaatctgatcaacagacgtaaagaattctttaacgttagtttggaagacatcaaagcagccgtgtttgatgtggcaggtgatgatgtggacttcattgagacggcaaccgcacagcactatcatgaaacagtggcaatgcgaaaacaaaaagctgatgcccttacgatgcccgtaaaagttgagaaacagccacgttttgcagaagctctctaa

SEQ ID NO: 230816 - DNA, 345 bp, Klebsiella pneumoniae
atgaaaaactacaaagggacgttaaaaagaagagataaaaaagatgttcctaatttcatgtttgctgatgagaaagaatggcgctacgtgccagaacctttcgttggggatttttggccaagtctgaacttggaaaaggtcaaagagcgtaatgatgcaagattaatgagtgagaagttcgccaactatggtgttagatttactttcgaagacatcaagtatattatcatcccgactgaaaagcacatcaataagctaatcgaacatatatccgagctggataactacaacccttcaataataagcaaaattattactatggaaaaggtgagaaatgatttctaa

SEQ ID NO: 230817 - DNA, 411 bp, Klebsiella pneumoniae
atgcttaattttgatgtcatctctaaacgtttaggccaatgtttagatattcttttgctaaaacatccgatgcgtacagtgtttggaatctttttaggttatattttatatacatgcctctatactttaaaagaatatttcaaagcacatctgtttgacgttgataacgttcattatattggttgttttattctggggattttaatatttcatacaaatactattattgatgtttataatggaactgctatggatgaggaaattagcaatttaataaatgctataacaaagcgaaccgatttgtcagaaccgcagaaaacaatgatgataactgaaattattcaaaatgagattaataaactggggaaacgaggtctggaagaagtagcaaaaaatgtcattcagaaatga

SEQ ID NO: 230818 - DNA, 768 bp, Klebsiella pneumoniae
atgaatccattattaacccttatcgcaaatttcatagaaaaactggtttccgatgtggaaacagtggttgagaaagtttccgatatttttaccaaaggagcaagaaggaaagatattgaaaccaaaataaaagatctcgaaagagagagagagttcttaattaagtacactataaagaaaaatataggcgctttttcaagcgttactactgacgcattaacagggaaaatttataacacagcaatatcaagtgctattgcaaaaaaactggttgaatataatgttgactttaaaaatatacgtcacgttaataaaacgttagaggaactggagatgatcgcgcttatagagcgcgatataaaaaaaaaggaagaagctgaaaagaaaaataaaaatgaaactgtagtgaatttgtttttattaaatgaaaaaagtaagttattgaaagcaaaaacattgtctgttgtcattgtcattgctagtgcattaacggtatttttctttggaattccaatttggtctgttcttattggtttaataccattagtacttattgagatgaaagatagagtcataacctatcgtgttgccaaaggttattttggaagaaatgcaccagaggcaattcaattggtaaaatttataagagaaaatacagataaatttgattctaatgatagcggagatggtagaagaaaagttctcaacccagagaaagaaaaaaatgtaagcgcagatgatactgtaaaggggtggcaaaatgcttaa

SEQ ID NO: 230819 - DNA, 207 bp, Klebsiella pneumoniae
atgagctgctgtaacgaaataaaagcgtcattgcggattcattccgtcaagacttgcttattgttcgttacgaacattttaatacctggggaattgcacatagccgctaacctgtccttattattgccacgcaacctcatctctgttgcccttactgacgttgcactcgttgcacatgatttgcagattggcaatatcgagggctaa

SEQ ID NO: 230820 - DNA, 1098 bp, Klebsiella pneumoniae
atgctcatctcgtcattaccatcagatgaggcgcaaaacatcatggatttaagcgccggtgaaggctcattgttgtcgacagcttcggtcaaatacaaggcagctaaattatatggaattgatattgatgaaataaacttcaaaaagttagacagcttaaaaaacacaactagcctatgtttggatgcaacccaatcagccagttttaatataataaaagagcaaagcaatacgtatgacattgtcattggcaatcctcctttttatagagctaaacatactgatttttctagaaagatattttatgagtggtcgttaaatcacaaaacaaaatactaccgtaccgagattttatttttaatcttatcactaaaattacttgatagagaaggcagctgcggaattgtagtaccagatacaattatttcaagtgaaaaatacaaaccgctacgagaaaaaatagcttcattatttaaatttataaacgttatagagttagataataaggcctttttgggaactgaagcaaggactcatattctaactgtaagtaacaaaaaaacattaaatccatctataacaacaagaaactcaaaagaaagtagatctataaaacttagtaaatatgaatttattgaaagagctgaccatcagtacaactcctttagagacaaccgcagcgaaaaaaccattgaaaactctggtataaaagttctgagggggaatctcactaaaacaaaaaacacccaactacatgatgctataattcattcatcatctttttatcatgattactcccaatttgagaatgatcatgatagtgaaaaaaatggtactgctatccaagcggttaaaggcgatgttgttttaccccgagttggaacaaggtcgttggggaaagttggaatcattcgcaacggttcttttatcatcacagattgtgtttttgttatcaaagcttcagagtacgaatgtggtgaaatgattgccaaggcactaaaatcgaagttcggagttgactggattagaagtatttcaaaaggcattggagcgcagtacataacattaaatgacttaaaaaaactccccctgcgataa

SEQ ID NO: 230821 - DNA, 894 bp, Klebsiella pneumoniae
atgaaaatagaccatattactttaagagatacagaagcaattattgagcagtccaaaaagttaatcatgattgggtactgggataatgtaaaggtatcagccttgcaacgctggctagataatttcaaaaatgaaaaagaaaaatatctagcggcttctgttttaagcgaattgatatatagaaacagaaatactgtaacttcaatgggctataatatcttctcgattattctcccccaagttttagaagaattagatatttatcatgttgacgatattgatcaatggatgcatgatatcaactcccctaagaatgcaagatatcttccgtttagaacatctgtgataaataatgtggatagtaaagtcactaaaagcggagatctgattcacacatttctacagagagatttttttgataaaaacttaggtgtcaaggttgaaaacctgaaaagggtaccacacacaataaaagcaatagttttctttgatgatatgcttggttctggtactcaaattgatactttcatgaaagaaacaaaaatcgatgaactcggtaaaaaaataatattcattccatttgctgccatacgtgaatctgcaataaaaattcaggctaaatataataacttacatataagaccagtagagtacttagatgataatcatagattcttcagagaaacgaactggaggataaatagagagaatttctattcacacaaagactttttaaaactttatgaggacatgtgtgacaagaactcaataattaatcctttagggttcggtgaattaggcttgagttatattttaactaattcgactccaaataataacctttctttcctttggttcgagaatgaaggatggaacaggttatttaaaaggtaa

SEQ ID NO: 230822 - DNA, 138 bp, Klebsiella pneumoniae
atgtcgtccatgcctgtgatgagaggctataccaataagctgttattcgccttttttatggtcgtgttccttcagtccgggatgctttggcttgttttccggagtgacacgccttcttttatcttctttgccagttga

SEQ ID NO: 230823 - DNA, 342 bp, Klebsiella pneumoniae
atgcaggtctttgggatattttgctggtctggcaaaacgacgattgaagtcaataatgaaggaatccagccaggcattggcatcctcgatgctgctgatgccttcaagccacatttctttgataagtcgatctttgcgcgctcaacgcgacctttagcttgcgaactgttggcgcatatcaactcgatccccagttcggaaagcacccggccgaacgccatctgtccggtacaggcgcacaagacgctgcacctgacgaacactgagttcaagaatatctgcagcgtcgcgctgaagcaaagcccggtcaaatactcgctgaatgatgccaagccggtatag

SEQ ID NO: 230824 - DNA, 144 bp, Klebsiella pneumoniae
atgatggcccgtctgaaagagttgggggacgaaaaccgccgtcttaaaaagatgtacgccgaagagcgacttaaagccgaaattattcaggaggccatggcaaaaaagtggtgcagccatcgcgtcgaattatctctgtggtga

SEQ ID NO: 230825 - DNA, 1254 bp, Klebsiella pneumoniae; identical to SEQ ID NO: 101463

SEQ ID NO: 230826 - DNA, 3822 bp, Klebsiella pneumoniae
atgagaggaacattactaacggaagttctaataccggaacccggtactgacaatgctcaggaagaacagatacatatcgcttatgaacctctgactccctcagtcattgatgatgaaaaagcgcaaagctatattgaagcattgaattttgcctgttctcgcccggatatcagaaatattgcggtaacaggcccatacggggcaggtaaaagttcggtattactgacatgggaaaagtctgaggataatgattatcgggtgatgaccgtatctcttgccgactttgaaatgcagcgcgcatcccccggagatgcttatgtgggtgagagcaaacctgacagtgatggtcacgataaaaaatcgaccaaagctgaagagaaaacaatcgagtacagcatcctgcaacagctgctctacaaagagaaaaaaagcgtcttgccgtattcccgtctggagcgcatttctgatgtaagcacgtgccagatagccatgatggccgccaatttgttattcatactggctttgacggtcaccggcctactttttcttttccctgattacatctgcacgaagctttccatgccgccagagttgagtcggtttctcctggctttgcctgtactgggaagggctagcggcgcagggatatttctttttactgccttatttcttgtactgaagaaactgcaccatacaggggtgtttgatcggcgcgtcagcattgacaaggtggacgttctgaaaggagcgatttcaacacgccctgcagccccctctcttcttaatgtatacattgatgaaatcgtctactttttcgaacagactcaatacaatgtggttatatttgaggatcttgaccgtcataacgatggggccatcttcatcaaactccgtgaaattaatcagcttatcaataactctcttccctcagacaaaccggtcagatttatctacgctgtaagagataatctgttcagcacgccagaatcgcggacaaaattttttgatttcgtcatgccggtgatcccggtgatggacagtgagaatgcttccgaacatttttttggcaaatttacacccgatgaactgagtcagagtgggttcaaagattgccttgccagactggctctgtttattcctgatatgcgggtgatgcataacattgcgaacgaatttcgtctttaccggaatattgtgagtaatggagaggatctaaagcggcttatttcccttatcgcttataaaaatctttgcgcggaagattatcacaggatagaccagaaaaaagggctgctttttggcattgtttccgagtatacatcgggtaatttaagaactgagttttgcgacgaaatgaatattcaattagaggagtatctatctgagctaacacaacttcagaatgaacgaatggtcaatgaacacggattaaggagtgagattctgcgcccttatattagtgaagaaacaggacccatgttgcactttgtaactgatattggatcacaatacaatattgaagatgttattggtaatgaatctttatttctttctttgctcaatggtaatgtgaccattaaaccacgaatatataattttgctattgccacaataaataaaacagttgccaatatgctaaaagaaaagtatcaagaaagatatgcctttattcaaaaaaaaacaaatggagagatttttcgtttagaggaaactatcaagaaaattaaatatgatattcagaatacattctcatatgatcttgctttttttatcaaaaatatggggagagtaggcttcgaaaaacggtttgcaggcagtgacatatccgttcatcacgaaggtgtgacctctgctgataattccagcaaccttgatttcatttttttccttttatctcacggctatctttcaactgactatatggcctaccgttctgtatttatgccgggcagcctgagcacggaagacaataactttatcagggcggtgacgtcaggaagaagcccagatgaaacggcaaaaatgcctatcagtaatattgctaacactgtcgtaaaattgcgtaacctaggcatgctgatgcatgacaatgcatggcattctcagcttctcaggcatcttctgtataatgataacatttccatgaagactatcatgcaaatgcagttagaggccggagccgagcagcgcatgatcaggctggccaaggagatcttccctcgctgggacaccaccacgcagctgaaatacatcaggttgatggtcgacggagatggccatttgtccagtatgatccaccagattggtagcctgagggataccgaagctgaacaaacgctactgccgttattactgtccttatcggctttgccctggagcaccgtatctcaggcaactcgggaagcgctacagcggctcattgatttacaatctaatctcgtcgcgtccttaccagataattgtgcgcagcatttctgtgaaaatctgcgggattcaggctgtcttctgactaacattcctttggttcggagcccatctggccagcagacgctgcatttggtagcacaggaaaaattgtggtcctattccgccttcaatctgcaaagcctctgtttctcacttactcatgagtcagagaataacagcgatatcttccgcaagaggccggtatcaacgataaggtcgctttgcgttccagcactggaaaaatatgtgaatgaaaatatatcatcatttatccgtgatattttcattcattctgaagaggatgaaatcattcctgagttccttaatgcgacttttgttgactgggaggatgcaaagtacctgacagaaagtatgagcttcatgctagaagatgtttcggttatcctgaacaaagagaatacagaaaccacagaactttattacgagcaaaatctgcattcacttctggcacattataatcatataaccccaacatgggataatatgttattcctgcttgataatagtgtatctattgctggcgatactttttgtgaatggctaaacattcattactcattactgccagatgaaacattgccattgaccgacgttcagctttcacaattacttataaaaacggtatcgtcagcaatcatcagtaaagcagcgtttgtcgtggtcactcaaacattcaggctatctcttattcaattacctgataacttactgattaacaatgctgcagttctgatggagcagaaatggctggcaccaaccagcaccgtatttgaacaactttatcaggcactgcacgaagacggtgataaactgacaccactgctttacgcgcttatctgtgcccgtcctgtattattaagtgagaattacgagcttgttttgtttgctgatgaagagtttgatcgggacattacccgtttaattctgaatggcgataagattgcagacgaagtctgtatcagtatcctgaactggctctgggaaaaagatgaagccctgctctctgaggcaccacttctcagccagcaagccctgatcaggttctccaccaaaataaccgatgaccggcagaagcagatactgctgatgcaatgccttaaaaatgacaaagtgtcgcaccagttcatcagacagatgctcttgacgttcgggcatcaggattatgctgctttcctcatagagaggagttatcgtagcattccctggagtgatgccatgtggcaactagctgtccagctgggaaatagcggatttatcaggccgccgaaactcactcacgatgatacacgtatccgcatcgagcccttttttaacgctgaaaatgaatacgactga

SEQ ID NO: 230827 - DNA, 1083 bp, Klebsiella pneumoniae
atgctcagccagcttaacctgcgttttcataaaaagctgatcgaggcactgaaagtgcgtgccggtcgcgaaaatacttcggtcaacgccctggccgaacgcttcctcgataacggactgaaaacggtcgcgcccggcgacgggtatttccagctgatcgccgaccctgaaagcacgatccggcagctgtaccgcaagatcgtcgtcggcatgtccttcgagccagtctcccgggacgaactgcggttcatgctggtcagcgcccgacagggtttcctgcgcggacgtcaccgcctggtcacccggccggcgctcagcacgctgctgcagatcgtccaggaactgctgacctggcaggtggaacaggacagggtgcgggacgaacattatttgcggggaacctaccggctgcgcgacggggatctgctggcagactatgaccggtttctgaccggactgcgcccggtcatcgaccacgccaccgccgagcagctgctgcgcccgctggaaagtggctgtctggaactgacagattttccggattccgtgctggcagggagtttcactctggccagactgagggaggtttttccgctggtgctgtgcggactggagcggaccgagacccaggtcgaggccctggtgcaggagctgcgcccgcttatcccggccgtgacggaaactattgcagccggtacgttgcgcctcgatattcagatcgacggactccagcctgggcagcgtcctggcgcgctgtacaggacaccgaaactacatatgatcctgaccgggcaggagtttgtgttcccctgcggctgggcggcattctctgaactgctgggcctcctcactctgtacacccgtcacccggaagccctgcagcatggtcatcagggggagcgggtgatgttctctccgccggggagcgtaaccaaagaggggtttttcgggatcgacggcctgcggatttttttgccggcggaggcctttgatgtgctggtccgggagctcaccacgcggtgtaatgaaggctcgctggcggaggccctgaccgggctgcgctgcctgtacggggatgtctga

SEQ ID NO: 230828 - DNA, 1146 bp, Klebsiella pneumoniae
atgaataaattaataatagcattattaaatgcggtcatattatatttctattcaccaacagctcaagcattacttttttggggagggttaaatatagatacaaagataggactttcttctgaaactattgctttgataaataatcttcccaacaatattcgtgagcagactgtattattattacaacagaccttacctcttattgatcaacgtataaataaactcgataacattataacccaacaatccataatgaccgtttgtcgagccgatgcagtgaaacaagggagccttagtgaattaattggtgttaatggtgatattataggtggacttaaaaataaatggaaaaaaagatcaggtgctttcacagagaaaacatcacctctagaatacgcacaaaactatgctgaatatctttaccaaataaagattagtatatgtaagacagaatcagagaactcaatgaatgttatgctaaatgacttaaaaactcccaatgatgttcgctggcttatgtggtactcattaaaagataagtgtaataatgcgaaagattgttatagtaaattaaatgatgagactaaagtattcttaagtgagagtgatgagcgtgacattagcactgctaatgtagataaaaacatcgttaacaatctcttgccggagaaaaagacatttaaattttttgatgggtttaattatcaaagatatgaagaacgaatgatttatcttaataatctacgtacaaacgttacactggttcgtgttatcagagagcaaaaagaaaaacgttatgcggagcaggaatctgtgatttcgtccgtaaaaaaaagaacagcagatattgaatcagccttgaatagcattgagaataaaataaaatcaagcaacaacgttaaggaattgaaaaatatattggctgagctcaatggatatgatcgcgcattcgatgaaatgaagtcatcaatggtttcattaaatcaagagtttcctgatgtggtggctgaacgaaacgtgattagcacctctcttaatactgttatcaacaggaaaaatcagcttaataaacaaactataagtaagatagaatgggtttatgatagtcttcctccccgttttccgtttaaaaaaagtgtgtattag

SEQ ID NO: 230829 - DNA, 303 bp, Klebsiella pneumoniae
atgtcctgcccattttttgtaggctcaaaaaagcactatggaaacaaatctaaatccgacctgacaggggccctgattatcatcaaccctgaaatgcagggaaccaacaccaattacagtaatctcttccgtcccagaaaatctgatcttttcccccaaaggattgccatcgttgaatatccccataccaacctgacaaacacggtcagcagggcaattcacttgatatttggctacaggataaatataatcctctccccatttccagtcgccatctggcacattaataatcttaaattctga

SEQ ID NO: 230830 - DNA, 2001 bp, Klebsiella pneumoniae
atgtcagtgaccgagtctaaagcaaaagcaacggttaaaaccagcaaaaaaacggtgaaccctgccgaagccgccgccctcaaagccgcgcttgaggctgctcagattgaaatagtgccgctgtcgtcgctggtcaaatccccgttgaacgttcgcacgatcccctatccggctgacagtgtccgggagatggctgattccatcatggcgatcggcctgatccagaatctggtggttcactcgctgccggacggtatgtcaggtgtggctgcaggtggccgtcgtcttgccgccctgcaacagttgctcagcgagcagcgtatcgatgccggatatccggttgtcgtcaagcgtgtcagtgacgacctggcggtggtcgcctcgattgtcgagaacgacaagcgtgtggccatgcacccggcagagcaaatcagcgggttccgtaccctctcagaacaggggaaaaccccggcgcaaatcggggaccagctgggctacagtgcccgtcacgttcagcgcatgctgaagctggcaaacctcgccccggaactgattaccctgctggcagaggacaaactcgacgtggagcagtgtcaggccctgagtctggagagcgacccggcacgtcaggtgcaggtgtatgaccaggtgaaaacctcatacggcagcacacccgctcacctgctgaagcgggccatcacggatacggaaatcgccgtaacccactcccgcttcgtgtttatcggtcgtgaagcgtatgaggccgccgggggcgtggtgcgtgaggatctgttcagcgcccaggagggagacggaacggcggacggggtactggttgagcgtctggttcaggagaagctggcggcggctgcgctggccatcgaacaacaggaaggctggtcatggtcactggctcgtgagggatccgtcagaaactacggcgatgaccgcgagcattatctggtgctgccggcgccggagggggaattcagcgctgaggaactgcagcgtcttgatgaactgtacgccacgatggaggcaacggaaacctttgaggatgaagccgcgattcaggtgctgattgatgagattgaaaatgcggcatcggttcgggcgtggacaccggagcagaaagcggcctgtggcgtggtggtcagtctgtatgacggtgagctttgcgtccagcgtggtgtgcagaagaagagccagacggcggcatctgacggcggggagcacggtggcgaacaggcttctgtgcatgtggtcacccgcagtatgccggatgcagcagagggtatcagcgtgccgctcctgaaaaaaatgtcttcagaaaggacactggcggttcaggccgaactggttaagcagccacagaaagccgtggccctgatggtctggcggctgtgcagctgcgtgttcgactactgcaccaccacccggcacccgtttgtcctgcgccttgaggtgcatcacagcggcctgaccagtgaagccccgaccggagaggaaggtcaggcatggcggtatctgatgcaggagaaagcccgtctggaagccctgctgccggagggctggcagaaagatttcaccaccttcttcaccctcgacggacagaccctgatgtcgctgatggccttctgtaccgcctgttccgtcgatggcgtccagacccgtgaatgtggccatacccgccgcagtgacctcgatggcgtggaggcagcgctcgggttccatctgcgcgactggtggcagccgacagcggataacttcctcgggctgctcagcaaggcccagattgtggcggcactgaaggaggccgggctgaccggagccgcctcggatgccgaaaaaatgaaaaagggtgatgctgccagccatgctgaacagtggctctccggctcccgctgggtaccgggctggatgcagtccccggatgccgcaaagccggacgatgcacatgctgccccggacactgacaaaccgacttcccacgctgcctga

SEQ ID NO: 230831 - DNA, 231 bp, Klebsiella pneumoniae; identical to SEQ ID NO: 190500

SEQ ID NO: 230832 - DNA, 1413 bp, Klebsiella pneumoniae
atggaagttgcaacaataagcaagtcgcatagcgataattcttttaaaaaggaaatgaaaactcgtcatattatcatgctggcgctaggaggcgtgattggtaccggcttgtttctgacatccggatatacggttaatcaggcagggccattgggatcggtgttggtttatgcggtaggcgccgtaatggtgtatctggtgatgatgtcgttaggggaacttgccgtacatatgccggaaaccgggtcatttagtcgctatgccgcaaagtttatcggtccggcaacgggatatacggttggttggttatattggttaacatggacggtggcgattggttccgagtttaccgccgccggtattctcatgacgcgctggtttcctgagtctccggtatggatctggagtctgctcttcgcagcgtcggtgatgatttgcaatattgtctcggtgcgactgtttgcggaaacagagttttggctgtcgctggttaaggttatcgcggtggtcgttttcattgtcgtcggtgggctggttattgttggggtgtttcatcacgacagttctatgcagtacgggttggcaaatttcactcgtgaagggctattcccgacgagccccgcatcgatcttatcggcattattagccgtggcatttgcgttttcggggacggagctcatcgggattacggcgggtgaagcagagcacccggaaaagtcaatacctaaagcgatcaaaaccacgatctaccggctggtactattcttcatcggtacgatttttgttctggcagcgctgctgccccgagagaaagcgggtttggtcgaaagcccctttgtgatggtgtttgagttaaccggtttttcctattcggcggatgtgatgaactttgtgatcctcacggcattgctgtcagcggccaactctggactatatgccgcctcgcgtatgctgtggaccctttccgatcaggggcatatttcgacttcattctcacgtttaaccgccaaaggcacgcccgtctttgccattattttcagcatgatgggtgcaggcgcatctcttttgagcagcgtgctctctcccgatacggtgtatttagcactcgtctcgatctcgggactcgcggtggtgctggtctggataagtatttcagccagccagctcgcttttcgtaagacatttatcgctaacggcggcagcgtagatgatctcaaatataaggtgaaagcctttcctattgttcccattgtctccatcgtactgtgcgtgtgcgcgtgcatcggtattgcattcgatccctcccaacgcgtcgcattgtattttggcattccgttcgtcgtctgctgctactgcgttttctggctgaaaaacagaacgtcgggctatcaacaacaaaaccagagcctgtaa

SEQ ID NO: 230833 - DNA, 903 bp, Klebsiella pneumoniae; identical to SEQ ID NO: 190502

SEQ ID NO: 230834 - DNA, 1140 bp, Klebsiella pneumoniae; identical to SEQ ID NO: 190503

SEQ ID NO: 230835 - DNA, 930 bp, Klebsiella pneumoniae
atgaatacacctataacgccgttggtaaagcgtaaagaccgatatcgaggatatagcctatggctgatgctgacgctcatggtattattatggggattaagttggccagcgatgaaaacagcgctccatgatattcctccactgtggctaggaaccctgcgattcttaaccgccggaatatgtctgtttatcatcgtcgggtgtaaaaagcaattgaccgtcccatcgaaaaaagatctgccgatagtcttcagcgtcggaggccttcagatgctcgcctttacggcgctggggctgatcgcaatgcaatataccgacgtcagtcgggcggcactgctggcctatacaacgcctttgtggggggtgctcttcgcctggataatcaataaatcgctgccccagaaaaagcagctgctcgctttatgtataggcattatcggtattgccatcatctgctctccgctggagatagactggtcccagcaggggatggtaaagggcaatctgttcttgctactagcggcgctttgctggtcggtggtgatttttcacgttaaacagcatcaatggcatctgtcaccgctggcgctggcaccctggcaaatgttatttgcgacaataccgatgctgttgcttgccattaaatatgagggatggccacgtgagatccactggagtccgctgctttgcgcgttgattgttttcatcggaccgattgcgacctctgtttgtttcgtgatatcgacggagtgcggccgaaaagtatccagctttacaatgtcaaatttcacgttgggcgtcccggtgattggcgtcatctcatccgtagttttcctcggcagtcatcttacctttgtctttttgagcggcttaatcttggtgtttaccggtgccatgatggcagtagccttttcatttcgggacgcttaa

SEQ ID NO: 230836 - DNA, 312 bp, Klebsiella pneumoniae; identical to SEQ ID NO: 190505

SEQ ID NO: 230837 - DNA, 417 bp, Klebsiella pneumoniae; identical to SEQ ID NO: 190506

SEQ ID NO: 230838 - DNA, 720 bp, Klebsiella pneumoniae
atgaacttgcgaggcattctttttgtactgccattgtgcgccgggctcctggcgggctgtgataacaaacaggaagcgctgcagtttgaagccgcccgcacggcggcgctgaaggccgacgatccgtttctggcgctggactcgttcgaacagcagtccggcgactacggccgggactgcgactcgctgggggcatttctgtttggtaattttgattccacggctaaggcctgtcaggcgcggtatgaggccacgcgggatatggtcctgaaagccgttgaaaagggttccgtgccggcactggtgttcctgtttgacccaggcagcaagacgccggatgtgtatccgcgcgatattgatccacagaaggccgggcaggcggctgagcggcttgttgcactggcagagtcggcgccggtggacagcaaaaatcaggcgttgctgatgcgtgccggcgatgtactgcaggcgggccagtacgttctgcaggattcccggagagcggcggccctgtatgtcaaagcctggcaggcgggcgatcagcgtgccgcggacgagctggtcagggtctatcactttctcaaggacagccggcgtacctacttctgggaggtccggagcaaaaacgtgcagcagctggacagtcgtgctgagctgaccggagatgagatcagtgcaattcagaaactggccgcggacagttctcggaccgacatttga

SEQ ID NO: 230839 - DNA, 405 bp, Klebsiella pneumoniae
atggttcagcctatggtgcttcttggtgctgcacaccctgtagcgggttatctttttcttgaagtgatccctgacagtgaggttggctacgttgatatatatcagctgaccgatagtctttatgtcggcgattatctggtcatcaatcatcgggactggcggcggcgcttacctgcatatgacggccggccgtgggatgaatgggtgatccgcgaacacttgtcccgcatagactggtattcgaataacaccattcagaggttatgtcagaggcacaatctgtcatgtgctgacctgcacaaatggggagaaaatgtggcgcgttgggaggatgttccggtgatggttgcgcgtgaagaagacgacgtgtccatcactcttctttcagggtttacagataactga

SEQ ID NO: 230840 - DNA, 3123 bp, Klebsiella pneumoniae
atggcgaaacctgaaattgcaactgaaagaacccgtctgagtattccctttgacgatcgccaacgtgcaatacgtgcggccggcaaactggctgatggcagtaatgctctggactacgtgaaggaagaaaaggtgtggtatgcacagccgggggccaacctgagccggctgaaagagtggatttttgaccccaataaggtgatcgaagaaccgcccctggatattcaagccattgaagatgaatttacggcgtggcttgaagagcgcggtgccattatcaaagaccccatagagttcgatggccagaagcattatgtcgatacagtggacggtaaagctggttcaagaaagggggtgtatgccgcctttctggatggccgacctgcagggtggtacagggactataagaacggtggtgaaattcagaaatgggtatctaccggcgcagcccctaaccctgaacaaatggccatgctccgtgctgatgctgcggcaaggcgtgaacaaagagctgcagcgcaagcggataagtttgatcagaccgctaaccggttgatggaagaatataaccggcttccggatgccacgggagatctgacatacctgaaaaacaaacaggtcattgccgctaacggccttaaagctgatgagcggggcaacgttgtgatccctctgtttaatgctgatggcgagttcaggacccttgagcgcatctggtccgacggtagtaaacaccttgaaaaagacggccaggcatgggggagttttttcgttgtgggtggccaactgaaggatggtgacaacctgctttatgccgagggatatgcgacagcagccagtatcagcgaagccatcaatcagcctgtgatcatgacggttaatgcaggcaacatggtggaagttgctggccgcctgaaagacacctttccaaacagcactcattacttccttgctgacaatgacatttataaagacgagaacgttgggctagaaaaagcgacagaagctgcagagctgactgccggccatgttctggtccctgcctttagcaacccgaaagaagggcttactgactacaacgatttgcatgtctctgaagggctggagcaagtcagattgcaggtagaaggagccattaatcaaatgaacagggtagacactatgccgactgataacccgaacattactgacgttaatcacagctcgactgacagcgctgccgttgcagctcctgaaaaagccgcgccggtggccagcacccctgaagctgctgaaccggtggaagccgcgccggtggccagcacccctgaagctgctgaaccggtggaagctgcgccggtagccagcgcccccgcagctgccgaaccggaatacgccgcaccaacagatcgagacggcgatgatgaagagagtaatagcgccagtgatcttgaggcgtatgcagctatgatggcctttggtggtgaaacaactgacactgctcagcaaaagcctgaagggatagcgcccagcgaacctgtagctaataccgccccggctgaaaatgaaaccgagcagaagaaaaaaacaaacgaagaactggaaaacggcatacgctgggcaaccaacgataatgcagaaacgcccccaaaagaacgtatagacctggaagggttaattgcccggtttgggtacagagcagagaaagactatacggcgtatacgcttgatgggcaggatgcgttttacgattacggctcacatctgcgtatggctacccctgaagccagccagagtgacgagatgatcctggcggccgttcttaccgcggataagcaacatcatcgtggtattgaaatcaccggcagtgacgaatttaaagagcgagtgtttaaccttatcagtgaatacaacattgaggtgaaactgactaacccagaacaaagggttaaattgctcgaactcaaaaaagcaaatgaaacagcaaaagaaacggcaaatgaaaatgttgctgattcaaatgcgaataagcaggaaggggcaaacgaaaaggcaaattcatcagttcagcagaatggaatgcgctgggaagagtcggcctctgtacaaccgaagaagcagaatgcatctgatactcaaaaggaagataaagctgcgggtgaatcctgggagaaaggcgttatcgtcgcgcatggacgtgctaagtatgagtggaaagatgatgaatccatgaactactttgtcaccctcaaaaatgaacatggagagaagacactctgggggaaagaccttgagagagcggttaaagatgctggtgtagacaccgaacgtcttgttacagtcagaaagctgggatttgtggatgttgaggtgaatgcacctgtccgtgatgaaagcaacaagatcgttcgttatgaaactatccagaccaaacgtaatgagtgggaagtaaagcctgtatacccacagccaacagcagggaatgaacaggcctataagccttctgaactggttccgtatgatgctgcaaccttccagaagctccgcacaacaattcagcagattaccggtgttgatctcagccgtgaggccgtgcctgaaaaagaactgtactggttcctgcctaatggtaagccagctccagaaagcatgacaaagcccacaggctataaactccctcaagagtcaaaaactgcgggtacacctttgctgatcgcaccgcataaaaaaggcgaacgcccagattatttccttgttgagtcgcgtaaaggattcatgcaggggatcgcaaaggataaggagtccggtgagtaccatagcgtgattggaaaagtgaacaagcgtattgataaagacggaaactggaaaacgtatatgactctttcagcaatcaataaaaatgccgaaagtggaattgttttgcatggttatggacatgtagatcaggggggtaaaaatttgctttacaaaaacacgattgcaaatgaaaaacagcctcagcatttacaagcggcctcagatgaggtaaaaaacaaaacagtaatgaagcagctttttcatccttcaaatgctgcaaaaagaaaagatgatgaaaggagagaacagactcatgcaccagtcgcaaagtcagcgcctcggccataa

SEQ ID NO: 230841 - DNA, 231 bp, Klebsiella pneumoniae; identical to SEQ ID NO: 195505

SEQ ID NO: 230842 - DNA, 396 bp, Klebsiella pneumoniae
atgaaattgacatctaacatcgtactttttgtaaccgctgctgttttcagttgtagtgctttttctcaggcagtttctgtatctaaagccggtgaacagcttggcaacattgcccaggctgtaacagccccagaaactgattcattgctgaaacatattttcgaacagcagttacagacaaacagtcttcttctgcaaattgccaacgaccaggcatccggtgtcacattaaccccagctcaaaagaagacatcctgtctaaacgaaaacaaatactacagtagcggtgcgttgcttaccgtaggttcagagaagctccgctgcacgctgagtggcgaaatcccgacatgggaaaatgcaaatgagggcaacattgtctctgtcgaaggcaaataa

SEQ ID NO: 230843 - DNA, 348 bp, Klebsiella pneumoniae
atggattttgaagcgcggaaacaaaaggcgctggcgataatggccagctgtaagatgtggaaaagcaattatgcaccgcttctgatacgactgttgtggcggctggggataaacattcccccgctgccgtttgctccgttctggcaggtttttgtcgtgatgacaggctatttctccgtcggatacggactgtggatgtactggatggtgtggcgggcccaggggatgccacccctgttcgcttgcaaaatcagtcttattgcgggcgtgttatttggcctgacgatggcactgtttcatctgtggcgccgaaaggtgaataaattacctgactggaaagatttataa

SEQ ID NO: 230844 - DNA, 351 bp, Klebsiella pneumoniae; identical to SEQ ID NO: 222423

SEQ ID NO: 230845 - DNA, 195 bp, Klebsiella pneumoniae
atgatcatcaacacgcagttgaacttccgtgcctttaactcgaccactcctgcgtattgccaatgtcagatgctgataagtttcatcgtcacaggtaaaaacaactgcactacctgcagcaggacgattaacaagtcgtttcacctttacccctcctggaaaaagctaaaagaattgttctccatttcccaataa

SEQ ID NO: 230846 - DNA, 606 bp, Klebsiella pneumoniae; identical to SEQ ID NO: 53558

SEQ ID NO: 230847 - DNA, 861 bp, Klebsiella pneumoniae
atgcatacaacaggtgcaataatagagtcacttcagaaactcggcgtccaggttggggacctattgatggtgcatgcgtcattgaaggcgattggtccggtcgaaggaggagcagagaccatcgttgcagcactgcggtcgaccgtggggcggtctggcaccctgatgggctacgcatcgtgggataaatcaccgtatgaggaaacgctcaatggtgctcgcatgggcgacgatgcccgtcgctcctggccgccgttcaatccggcaactgcgggtacgtaccgagggttcggtctactgaatcagtttctcgttcaagctccgggcgcccggcgcagcgcccaccccgatgcatcgatggtcgcagttggcccgctcgcagagacgttgacgcagcctcatgaactcggtcacgcattgggcgaaggatcgcctatcgaacggtttgttcgactgggggggaaggttctgctgttgggcgcaccgctgagctccgttaccgtcttgcactacgccgaggcggttgcggatatccccgacaagcgccgagtgacatacgaaatgccgatagctggaagcgacggcgaggtcgtatggaaaacagcagcagatttcgattccaacggcattctcgattgctttgccattgagggagcgccggacgcggtagaaacaatcgcaaccgcatacgtgcagcttggtcgccatcgaggcggaatcgttggttctgcgccatgctacctattcgacgcgcaggacatcgtatctttcggcgtcacctaccttgagcagcatttcgggtccgccgcgatggttcctgcacgccaaggggcggagtcctcttgcgaaccgtcaggctag

SEQ ID NO: 230848 - DNA, 282 bp, Klebsiella pneumoniae
ttgcgaaccgtcaggctagaggccattgacatgatagtctggatcaacggacccttcggggccggaaagacgaccctcgccgagagactgcgcgatcggcgacccggatcgctgatcttcgacccagaagagatcggtttcgtggtgaaggcgaccgtcccgaagccgggaagcggggactatcaggatcttcccgtgtggaggggcttaacaattgcggccctccaagagattcgaaggcattactcgcaggggctctgttgcaaaaatcgtgaagcttga

SEQ ID NO: 230849 - DNA, 765 bp, Klebsiella pneumoniae; identical to SEQ ID NO: 6031

SEQ ID NO: 230850 - DNA, 831 bp, Klebsiella pneumoniae
atgacttccgctctgcgccagctggttgagggtggcgttatccagctcacgctgcgtcaccgacgcaaagaccgttgccgtctcgctaaccgacctgccgggactttccacccagccgtggccgattttaataccgtcaaacacgcccgcgcccacggccagggtctgcgtggttttctgccccggccgctgtaccgtcagctgcccttcctccactttcatcaccgtgatgctttccccgcccttcaggcgtgtgtccggtatcttcccgagcaccgccagacgttccccctctgccaccggcagtgtatctgcccggaacagcgtccactggctgtcgaccgcggaaaccttcagatccagacggcccccttcccggtctttcagggtcagcatattgctgctcgcggtcacccggtcaatgacaaagcgatcgtgcgtccgggtctccggatcccggcgttccatcaccatcccctcccggtaataatcccgcacgccccggcttttgctgtccagccataccggcgtcagggctgtaatggtcgtgtctttctcacccagcactccctcatttctgagggagtcacggataaggccgttgagtacgctctgttcacgcgtcccgctgatttgcgccacgctttccagcccttcacgcacgctgacggcaaactcctgtgccagccggctgtagcgtgcgcctttatccggttcactgatgatgtcggctgtggtctgatggccaccctgccagcgatacgtattcacgccgctgtccttcagcaccgtcagcgcactgccggtcccgctgcgcttcccgctgtctga

SEQ ID NO: 230851 - DNA, 720 bp, Klebsiella pneumoniae
atgacggacgtcagccgttcgccaggttgcatggtcaatctggggggcttcagtatcaatctcggcaagaccggcatgggaaccgcgagaaaggacgataagcaggtgaacggcgccttctatcacgttcactggtacaagtacccgctgacgtattggctgaacatcatcacgtcggcaggctgtctggaaggcggagacatggatattgcctatctgtccgagattgacccgacctgggtggacagcagcctcaccaccatcctgaatccggaagcgatcctgtttgccaaccccatcgcgcagggcgcctgtgctgcggatgcgctggccagtgcattccatatgccgctggatgtgctcttctggtgtggtggaagccacggctcactttacccgtttaacggccaggtcagtaatgaatccagcccgctgcagtcatcggtactggtcagtgaacgtatggccttcaagcttcaccggcagggacaaattatggagagtatcgggaaggacaaggcggtctgttacgaatatccctccccgatcatcccgaaagaacgctggcgctatcagatggtaaacatgtatccggacagtggtcagtgccatccgcttggacgcagcgtgatgcgctgggaggccggcaaaaatccacccaactcccgcaagaactatggctacctgatgtggcgtaaacgtaactgcgtatttttgtaa

SEQ ID NO: 230852 - DNA, 645 bp, Klebsiella pneumoniae
atgtttaaatattttattctgcgcaaacagcagcagctgttctgttatttctgcggtatcgtgctagcgatggttcttatgctcctgttcccttccgttcttcgggggagtgggttttatctgcttttatcgtctgttgcgctgttctgggcaggccttgccctatatacgcgtcacatcgaccggatgagaaagccagaggtctcaccgctggtcagtattcgcgacggtaatcaggtggtggccgaggtgccgcgccatgaaaaggcccggctggaatgggaaatcttccgggacgatgaggtgtttcgccagcaaaggtgggagcttacaggcctgaccggacgggttatcagccgggggctgttgtatacgccggcggtgatgctggtcggtatcggtattctcgcctggggttccccacaggatgccatccagctgattaatgctcttcgtaatatgcctgctgcggaactggtgcatcagattggttttgtcctgtgcctcgtcctgcagattagcgtcatatcagttctgatcgctgatgttgtagccgggagaggattgccgaatgtatttcgccgcgcgttgctcgacagtctgccggcagagttctgccttatcagaagagggacagaaagatga

SEQ ID NO: 230853 - DNA, 309 bp, Klebsiella pneumoniae
atgattatcgccgccgaagtgaaacgtgatgaacaggggtactggacacatccagcgctggcacgcagtggttgtgaaacttccgcagaattaagctactggctcagaattcataaacttcagtgctttgtgatgacaatgcgcgatgaagcgcctgaagcctttgctgccggatttacggatgaagccccggatgcccttggctggataccggagccgccggatgatgatggctggttcctgggctctgtccacgataccggcgaaggacccgtctgctactggtttcggcataccacaaaatcctga

SEQ ID NO: 230854 - DNA, 1086 bp, Klebsiella pneumoniae
gtgagcatcatccagcacgttggcgaatgggttaaacttgagggtatcgccatcgagatatacgccccccatgttttcacacagggacttatagccatcgcccatatcgaacacccaggcaaacccgccggagtcgagcacactgcgaatgaggggctgaatcagaccggttttacccgccccggacgtcccgcagaccgccatgttgaaattggtattgttcattccctcgtagaacaggtcgatgaacgccagctgatttcgataggtgggcgccaggagtcccgccggcgccagcgggctgtcagcgacgatcggcaggaggttagccacctggaacgtctccgcccgcttcaccacgcctgccgcctgcagctctttaaacaggccttcgccgcatttgaacggcatcatggccagaaagttacgcaggtgatggtagcgggccgggataagctggaaaccgcctttacggtagctgttgagcacctgctgttcagcggcgagagaggcctctgtgctgtctgcggtgtacgtggtgatattaaagaaataggacaccagggaggtctggttggtcgacagtcgctggcggatatcgccccactcctgcatttcctttatcacgttcggaaagtacttcgcgtaggaggttttgcttttcttctccacgtccatgaacttcaggttggcttcgttctgggtcttcacctggtcctccaccatcagcgtcagcgtgatgacaaagggacaggaaatggagagctccgggttaagcaggttggcgtagttgtccgcagcggtccagaggaaggccatttccggatcactctccagatggtagctcgtcacccgggtcacgcactctttcccgtcgcgccccaggcggccaattttcagatgaccggcggtgacctgcatatcaaagctgtcatcgacacactgatagttcagatcctgataggggtccagcttatacggtacgcggtacatttcgtgcgggtccgggtttatcagctcacgcatcagttcgaccagcccggccgcatcaaggatacgcgtcggaatgtaagccccgcccagtga

SEQ ID NO: 230855 - DNA, 1098 bp, Klebsiella pneumoniae; identical to SEQ ID NO: 226843

SEQ ID NO: 230856 - DNA, 138 bp, Klebsiella pneumoniae
atgtcggccggcttcgtggaatatttcagggtctcggccaccgcgccgcgcaccagttcggcggtcgcgcaggccagcgattcgccgttcttcggcttccggggttttactgcccggacatcgacattcggatcgtag

SEQ ID NO: 230857 - DNA, 786 bp, Klebsiella pneumoniae
atgtttgacgtagtcacgcgtgaacatcgagggcggcaccatcatcagggtgtggaagtgcgggtgtgcgctgccgtcactgccgcgggtgacttccgtggtgcggatccatccctgaactggccggaactcttttcgatccttcagccgctggaaagctgtgttcatccggctcagcgtctcgcccagatccccgatcgcacagttgcgcacggtcagggtcaggaacatccagcgggcattggggtaatccgccacgatacgcggcagggactggtagaaacgggcttgccacatcagggagcgcctccactggcagacaggacagtgccggacacggcagaaatgcgcctcacgcagcctcaggcgcgtttctccggtttctttgagggtagaccacccaaaccgcagcaaaccgccacaggaggccatacgcgccccgtagcgctcatattcggctgcaagcaggtaaatccctcccacgtcgtcagaaacgcttctgtgagcgtcccagggcgcatctgcgggggagtagtccgtgaggttctggagttcaggatttttcatgcacaccacccaactgtgggcgatggctcatttgacgtgttatcattgccatatcacctgtgttgtcgtatcaccaattcgaattcctacaggtggtcacacccccgaacgatggccgtcgttgcgggggtcgctttttctgcgaccactcccgaaagaatacttccaaaacctcctacaacgcaaatcagcctgaaagccttgcggcacaagggctga

SEQ ID NO: 230858 - DNA, 720 bp, Klebsiella pneumoniae
atgacggacgtcagccgttcgcctggctgtatggtcaatctggggggcttcagtatcaatctcggcaagaccggtatggggaccgcgagaaaggacgacaagcaggtgaacggcgctttttatcacgttcactggtacaagtacccgctgacctactggctgaacatcatcacctccgcaggctgtctggaaggcggagacatggatatagcctatctgtccgagattgacccgacctgggtggacagcagcctcaccaccattctgaatccggaagccatcctgtttgccaaccccatcgcacagggggcgtgcgcggctgacgctatggccagcgcgtttcatatgccactcgatattctgttctggtgtgccggctctcagggttcgatgtacccgtttagcggctgggtaagcaacgagtccagtccgctgcagtcctcgttacttgtcagcgagcgcatggcgtacaagcttcaccggcagggacaaattatggagagcatcgggaaggacaaggcggtctgctatgagtatccgtccccgatcatccccaaagagcgctggcgctatcagatggtgaacatgtacccggacagcggccaatgccatcccgtggggcgcagcgtgatgcgctgggaggccggtaaaaatccacccaacacccgtaagaactatggctatctgatgtggcgtaaacgcaattgtgtctttctctga

SEQ ID NO: 230859 - DNA, 762 bp, Klebsiella pneumoniae
atgataatcctgctcgatcagtacacggtgaatgggatctacggggactatttcaactcagataaaccaacactccacgatgatgcccggatggtggtactggagctcggtggcctggagtcgaggccatcactgcttatcgcagtgatgttctcattgattatctacatcgagaacaggatgtatcagtcaccgcgtggcctgaaaaaactgaacgtcatcgatgagggctggaagctccttgatttcaagaatgaaaaagtggggcagttcatcgagaaaggctaccgtaccgcgcgtcgacataccggcgcatacatcaccatcacgcaaaatatcgtggacttcgactccccgaccgcatcgagcgccgcacgtgcagcgtgggggaactcatcgtacaaggccattctgaaacagtcagcgaaggaatttgccaaatataaccagctgtacccggatcagttcagcaagctggagaaagacatgattaacggcttcggttcggccaaagagcagtggttctcctcttttatgctgcaggtggaagcgaactgctcctggcaccgcctgttcgtcgacccgctcagccgggcgatgtactcctccaaaggcccggattttgagtacatgaaagcgcgccgggaagagggggttgatatccacgatgcggtgtacggcctcgcgtgtcgcaactttaaagaagaaatggctgagcttgaatcccgaataccggtgaatgacatggaggataaacagtga

SEQ ID NO: 230860 - DNA, 3108 bp, Klebsiella pneumoniae
atgcaaattagcgataccggccgcagccacactcctgactttcacgccgtcctcgcccgtgaagactggcagaaccagaccattacccaccttaaccgcctgccagcgcatcccgttttcgccagctggcgcgatgagcttgccgcccgcgataacctaccttcatcccgccgccgtcaactggacggcgagtggcagttctcttacgcccgtagcccgtttgccgtcgatgcgcagtggttgacgcaggatctaccggactgccgcggcacgcctgtgccttccaactggcagatggagggctatgacgcgccgatctacaccaacgtccgctatcccattgacaccaccccaccgcgggtgccggaggataacccgaccggctgctactccctgcactttacggttgaggacacatggcgcgagaacgggcaaacgcagattattttcgatggcgtcaactcggcgtttcatctgtggtgcaatggcgtgtgggtcggctattcgcaggacagtcgcctgccggcggcgttcgatctcagcccctttctgcgtccgggcgacaaccgcctgtgcgtgatggtcatgcgctggagcgccggcagctggctggaagaccaggatatgtggcggatgagcggtattttccgctcggtatggctgctgaataagccgcagcaacggctatgcgacgtgcagttgacgccagcccttgacgccctctatcgcgacggcactctgcaggtccaggcgaccgtcgaagcgactgaggcggcgcttgccgggctcagcgtcggggttagcctgtggcgcggcgaggagcagatcgccgccgggcggcagccgttaggtaccccgacggtggatgagcgcggccactacgcggaacgggtcgatttctccctggcggtggcgacgccggcgcactggagcgcggaaaccccgaactgttatcgcgccgtggtcaccctgtggcgcggcgacgaactgctggaggccgaagcgtgggacatcggttttcgccgcatcgagattgccgatggcctgctgcgtctcaacggtaaaccgctgctgatccgcggcgttaaccgccatgagcatcatcatttgcgcgggcaggtggtcaccgaggcggatatggtgcaggacattctgttgatgaagcagaacaactttaacgccgtgcgctgctcgcactatcccaacgcgccgcgctggtatgaactctgcaaccgctacggtctgtacgtggtcgatgaagccaatattgaaacccacgggatggtgccgatgaatcggctgtccgacgatccggcgtggctaccagccttcagcgcccgcgtcacccggatggtacagagcaaccgcaaccatccgtgcattatcatctggtcgctgggcaacgagtccggcggcggcggcaaccacgaagcgctgtaccactggctgaaacgcaacgatccgagccgtccggtgcagtacgagggcggcggcgcggataccaccgccaccgatattatctgtccgatgtacgcccgcgtcgaacgcgaccagccgatcccggcggtacccaaatgggggatcaaaaaatggatcagcctgcccggtgagcagaggccgctgatcctttgcgagtacgcccacgcgatgggcaacagcctcggcaacttcgccgattactggcaggcctttcgcgagtatccgcggctgcagggcgggtttatctgggactgggccgaccaggcgatccgcaaaacctttgccgacggcagcgtcggctgggcctatggcggcgactttggtgataagcctaacgatcgccagttctgtatgaacggtctggtgtttcccgatcgcacgccgcatccgtcgctggtggaggcgaagcacgcccagcagtattttcagttcacgctgctgtcgacctcgccgctgcgggtgcgcatcatcagcgaatacctgttccgcccaaccgataacgaagtgctgcgctggcaggtgcaggcggccggtgaacccctgtatcacggcgacctgaccctggcgctgccccctgagggcagcgacgagataacgctgctcgatagcctgatcctgcctgaaggcgcccgcgcggtgtggctgacgctggaggtgacccagccccaggcgaccgcctggtcagaagcggagcaccgcgtcgcctggcaacagtttcccctgcccgccccgctggcgctgccggcgcccaccgtgtctgccggcgctccggatcttatcgtcagcgatgaggtctggcagatccgcgccggttcgcaatgctggaccatcgatcgccggacgggtctgctgagccgctggtcggttggcggtcaggagcagctgttgacccccctgcgtgaccagtttattcgcgcgccgctcgacaacgacatcggggtcagcgaagtagagcgtatcgaccccaacgcctgggtggagcgctggaaaagcgccggcctgtacgatcttgaggcgcactgcgtccagtgcgatgcgcagcgcctggcaaatgaaaccctcgtcgactgccgctggcactacctgcgcggcgaagaggtagtgattgtcagccactggcgcatgcacttcactgctgacggaaccctgcggttggcggtggacggcgaacgggcggaaaccctgccgccgctgccgcgggtcgggctgcacttccaggtggcggatcagcaggcgccggtgagctggctgggtctggggccgcatgagaactaccccgaccggcggagcagcgcctgcttcgcccgctgggagcagccgctggcggcgatgaccaccccctatatcttcccgacggaaaacggcctgcgctgtgatacccaggcgctggactgggggcgctggcacatcagcggtcatttccacttctccgttcagccatggagcacccgtcagctgatggagaccgaccactggcacaagatgcaggccgaagacggcgtgtggatcaccctcgacggcctgcatatgggggtgggaggcgatgactcctggacccccagcgtgctgccgcagtggctcctgagccaaacgcgctggcagtacgaggtctcattgcgttgcttttaa

SEQ ID NO: 230861 - DNA, 2412 bp, Klebsiella pneumoniae
atgaccaaccactgggtggatatcaaaaacgccaacgtcgtggtggtgatgggcggtaacgccgccgaagcgcatccggtgggtttccgctgggcgatggaggcgaaaaacaataacgacgccacgctgatcgtcgtcgacccgcgctttacgcgcaccgcgtcggtggccgatatctatgcgccgattcgttccggtaccgacattaccttcctgtcgggcgtgctgctgtacctgatcgaaaataacaagatcaatgccgagtacgttaagcattacaccaatgccagcctgctggtgcgggatgattttgccttcgaagaggggctgttcagcggctacgatgcggaaaaacgccagtacgataaatcgtcctggaactaccagttcgatgaaaacggctacgccaaacgcgatgaaacgctcacccacccgcgctgcgtgtggaatctgctgaagcagcacgtttcccgctacacgccggaagtggtggagaatatctgcggtacgccgaaagcggacttccttaaagtgtgcgacgtgctggcctcaaccagcgccgcggaccgcaccaccaccttcctgtatgccctgggctggacgcagcacaccgtcggcgcgcagaacatccgtaccatggcgatgatccagctgctgctcggcaatatggggatggccggcggcggcgtcaacgccctgcgcggccactctaatattcaggggctgaccgatttgggcctgctgtcgaccagtctgccgggctatttgacgctgccatcggacaaacagaccgatctgcatagctacctcagcgccaacacgccgaaggcgaccttgcccgagcaggtgaactactggagcaactacccgaaattcttcgttagcctgatgaaatccttctacggcgaggcggcgcaaaaagagaacgactggggctttgagtggttaccgaagtgggaccaggcttacgacgttatcaaatacttcaacatgatggataacggcaacgtcaccggctatatctgccagggctttaacccggttgcctccttcccggacaaaaacaaagtggttcgcagcctcagcaagctgaaatatatggtggttatcgacccgctggtgaccgaaacctcgaccttctggcagaaccacggcgagtctaatgatgtcgacccgtcggcgattcagaccgaagtcttccgtctgccgtcgacctgctttgccgaagaggacggttcgatcgccaactccggccgctggctgcagtggcactggaaaggtcaggatgccccaggtgaagcgcgcaatgatggcgaaatccttgccgggatttaccatcgcctgcgcgaactgtaccgcaccgaaggcgggaagggcgcggaacccctgctgaagatgagctggcgctacaagcagccggaccatccggaatcggaagaggtggcaaaagagaacaacggctacgcgctggcggatctctacgatcaaaatggcactttgctggcgaaaaaaggccaactgctcaatagcttcgcgctgctgcgcgatgacggcagcaccgcgtcgtcttgctggatctataccggcagctggaccgagcagggtaaccagatggcgaatcgtgataacgccgatccttcgggcctgggcaatacgctgggatgggcctgggcgtggccgctcaatcgtcgggtgctgtacaaccgcgcttcggccgatatcaacggcaagccctgggatgcgaagcggatgctgatccagtggaacggcagcaagtgggtcgggaatgatattccggacttcaataccgcgccgccagggagcaaaaccgggccgtttatcatgcagcaggaggggctgggtcgcctgtttgcgctcgataaactggcggaagggccgttcccggagcactacgagccgatggaaaccccgcttggcactaacccgctgcacccgaaggtggtctccagcccggtggtgcggttgtatgaagaggacgccattcgcttaggtaagaaggataaattcccgtatgtcgggaccacctatcgtctgaccgagcatttccacacctggaccaagcatgcgttgctcaattccatcgcgcagccggaacagtttgtcgaaatcagcgaagggctggcgaaaagcaaaggtatcgctaacggcgattgggtgaaagtcagcagcaagcgcggcttcattcgcgcggttgccgtggtgactcgccgactgcgcacgctgaacgtcaacggccagcaggtggagaccgtcgggatcccgctgcactggggttttgaaggcgtggcccgcaaaggctacatcgccaacaccctgacgcctaacgttggcgattccaactcgcaaacgccggaatacaaggcgttcctggtcaacatcgagaaagcgtaa

SEQ ID NO: 230862 - DNA, 348 bp, Klebsiella pneumoniae
atggagaaaaagagagccacgacgatcggcttcgccgccattatcttatggagcacgatggtcggattgattcgcggcgtcagcgaaggactgggagcggtcggcggcgcggcgatgatttacagccttagcggcctgctgctgatctttaccgtcggctttcccaacctgcgccagatcccgcgtcgctatctgctggccggcagcgtgctgtttgtcagctatgaaatctgcctcgcgctgtcgctgggctatgccgccagccgccagcaggccattgaggtgggaatggtcaattacctgtggcccagcctgacgattttattcgccattctctttaatggctag

SEQ ID NO: 230863 - DNA, 774 bp, Klebsiella pneumoniae
atgcgttttaccgataaagtcgtcgtcatcaccggcgcggcgcagggcattggccgccagacggcggagcaggcggctgcagaaggcgcggctctgctgctcatcgatcgctcgtcatacgtccatgagctggcggcgacgctggcgcaatccggctgtctggtgctggcgctggaggcggatctggaagcgtgggaaagtaccgagcaggcgtttgccgccggggtcgctcattttggccgtatcgacgtgctgatcaacaacgttgggggcaccatctgggcgcgcccctttgccgaataccagccggatcagattgagaaagagatccgccgctcgctgttccccacgctgtggggctgccgcgcggcgctgccatggatgctgaagcagggcaaaggcagcatcgtcaacatttcgtcggtggcgacggcgggagtgaatcgggtgccgtactcggcggcgaaaggcggcgttaacgcgctgacccgctcgattgccatggagtacagcggcagcggtattcggattaacgccgtggccccgggcgggaccgaggcgccgccgcgcctgacgccgcgtaacgaagagcagccgagcgagcaggaaaaggcgtggtatcagcaggtcgtcgatcagacggtggcgagcagtctgcagcaccggtaccgcacgctggcggaacaggcgaatgcgatcctgtttctcgccagcgatgaggccagctatatcaccggcgtgacgctgccggtagccggaggcgatctcggctaa

SEQ ID NO: 230864 - DNA, 252 bp, Klebsiella pneumoniae
gtgaaaatttttgcttttattctgctggctatcggcgctgtggcgctgagctatggtaatgccccggcgaaacgaatccaaagctgtgagatgatgggcgtagggcaggccgtctgcgccgccgccgaatgggatagtgaaaaagtcaatgtactgccgcgctataaccccagacttaataaggtaatggctgccgcgcagttagcccccgccgcccgacagcaagataacaactctgttgttcgcgcgtaa

SEQ ID NO: 230865 - DNA, 291 bp, Klebsiella pneumoniae
atgaggaacaggctgataaacgatgcaaccagtttggtaaagcaaccgctggggcagtcacgctaccggatggttgttcaccggggggcgcaatatcgacagcctgctgaatcagcaactgttaacccatatggcggcaggaccgaagccgcagcacttgacgcggagcgggatgaggaagaggggaacgcctcaagaggagtgtccgcatttttgcaggaagtcttgccggattattattatccgttggtgctgaaacatccagagcaatatacacgtcccgatatctga

SEQ ID NO: 230866 - DNA, 3264 bp, Klebsiella pneumoniae
atgatccccacgctgtacaaactggccggccagctgatgccgtttgtgctgcacgtcgccgcccgtactgtcgctacccatgcgttgtcgatcttcggcgaccattccgatgtcatggccgtccgccagaccgggtgcgccatgctgtgcgccagcagcgttcaggaagcgcaggatttcgcgctaatctcgcatatcgccaccctgcaaagccgggtgccgtttattcatttctttgatggtttccgtacttcgcacgaaatcaacaaaatcgccccgctggcggatgacactattcgcgccctgctgccgcaggataagatcgctgagcatcgccagcgcgcgctcaatccggaacatccggtgatccgcggaacctcggccaaccccgacacttacttccagtcccgggaggccaccaatccgtggtacgacgcggtgtatgaccatgtcgagaaagcgatggacgacttcgctgccgccaccggccgtcagtacaaaccgtttgagttttacggccacccgcaggcagagcgcgtgatcgtcattatgggctcggccatcggcacctgcgaagaggtggtcgatgagttgctgagtcgcggcgagaaagtcggcgtgctaaaagtccgcctctatcgcccgttctccgccgcccacctgctggcggcgctgccggagagcgcccgcgcggttgccgtactggatcgcaccaaagaacccggcgcgcttgccgaaccgctttacctcgacgtgatgaccgccctggcggaagcctttaaccgcggcgagcgcgagacgctaccgcgcactatcggcggccgctacggtctctcctccaaggagtttggtccggaatgcgtgctggcgatattcagtgaactgcaggccgcccagccgaagccgcgctttaccgtcgggatctatgatgacgtgaccaacctgtcgctgccgttgggcgaaaataccctgccggcagaggccaagctcgaggccctgttctacggcctcggcagcgacggcagcgtgtcagccaccaaaaacaacatcaaaatcatcggcaactcgaccccatggttctcccagggctattttgtctatgactcgaagaaagcgggcggcctcaccgtctcgcatctgcgggtcagcgaaaaaccgattcgttcatcgtatctgatttcgcaggctgatttcgtcggctgccaccagctgcagtttatcgataaataccagatggccgagcggctgaagcccggcggcattttcctgctcaacacgccgtacagcgccgatgaggtctggtcccgcctgccccaggaagtccaggccaccctgaatcagaaaaaagcgcgtttttacgtggtcaacgcggcaaagatcgcccgcgaatgcagcctcggggcgcgcattaataccgtgatgcagatggcctttttccatttaacccagatcctgccgggtgatagcgcgctggcggaactgcaggcagccatcgccaaaagctacagcagtaaaggtcaggagctggtggagcgcaactggcaggcgctggccctggcccgtgaatcactggcggaagtaccgctccagccggtgaacgccagcagtccgaaccgcccgccggtggtctccgacgccgcgccggatttcgtcaaaacggtcaccgccgcgatgctggccggcctcggcgatgcgctgccggtctctgccctgccgccggacggcacctggcccatgggcaccacccgctgggagaaacgcaacatcgccgaagagatccccatctggaaggaagcgctgtgtactcagtgcaaccactgcgtcgccgcctgcccgcactcggcgatccgcgccaaagtggtcgccccggaagagatggagaacgcccctgccagcctgcattcgctggatgtgaaatcccgcgatatgcgcgggcagaaatacgttctgcaggtcgccccggaagactgcaccggctgcaacctgtgcgtcgaagtctgcccggcaaaagaccgccagaacccggagatcaaggccatcaatatgatgtcccgcctggatcatgtggaagaggagaaggtcaattacgagtacttcctcaacctgccggaaatcgaccgcagcaaacttgagcgcattgatattcgcacctcgcagctgattagcccgctgtttgaatactccggcgcctgctcgggctgtggcgaaacgccgtatatcaaactgctgacccagctctacggcgaccgaatgctgattgccaatgccaccggctgctcctccatttacggcggcaacctgccctcgacaccgtacactaccgacgccaacggccgcggcccggcgtgggccaactcgctgtttgaggataacgccgaattcgggctcggcttccgcttgaccgtcgaccagcatcgccagcgcgtgatgcgcctgctgagcgaattcgccgacaagctgccggcagagctgaacgcggcgctgcacgccgaggcgacgccggaagttcgccgcgaacaggtggcggccctgcgtcaggcgttggccggcgtggcgggtgctgaagagctgctgaccgatgccgacgcgctggtggagaaatccgtctggctgatcggcggcgacggctgggcttacgatatcggcttcggcggcctggaccatgtactgagcctgacggaaaacgtcaatattctggtgctggacactcagtgttactccaacaccggcgggcaggcgtcaaaagccaccccgctgggagcagtgactaagtttggcgagcatggcaaacgcaaggcgcgtaaagatctgggcgtcagcatgatgatgtacggtcatgtttatgtggcgcaaatttcgctgggcgcgcagctgaaccagacggtaaaagcgattcaggaagcggaagcctatccggggccatcgctgatcatcgcctatagcccttgcgaagagcatggctacgatctggcgctcagccacgaccagatgcgtcagctgaccgccaccggcttctggccgctctaccgcttcgacccgcgtcgggcagatgaaggcaagatcccgctggcgctagattcccgtccgccatcagacgcgctggccgagacgctgcttaatgagcaacgtttccgccgcctgaacgcccagcagcctgaagtggcggagcagctatggaaagacgccgccgccgatctgcagaagcgctatgacttcctcgcccagctggctggcaaagcggagaaatcgccaagcgaaggttaa

SEQ ID NO: 230867 - DNA, 2196 bp, Klebsiella pneumoniae
atgagtaagcttaatataagggctgtaagaagttatcgtagtgataaatcagtcatattagatctttcgaagagaataaatttagtctatggccagaatggctctggtaaatcaacgatatctggttatttttataagtcagatgatgaagcttataaaaattgctcttttgaatgtaatgatgaatataagtttattgtctacaatagtcagtttgtggaggattcattttataataaatctgaacagccaggtatttttaccttgagtcaagaaaataaagaagtaatggaggcaatagaattaaataatggaaaaatagcaagtctgaagaaaaaattatcaagtataagttcagaacttgaaaaaaaagaagaaatgatagataaagttaaggatagttatcagactgatatatggaataaaactgcacatattaggaagaaagatggcggtttaggagaactgatggttggttttttacaaaaagcaactttctttcaacgagtcagtcagcaaatagatatggaggatactgacaccttaaatttaacttttgagtatgggaagcttaaggataataaaaatactacatatgataccattgttatgcctcccattccgaagctttctgatgagcaaataaatatattatcattatctttgactgcttctggtgatagctatttatcagtacttattgataagctcggaaatgctgattggataagaactggtttagtatatattgaagatgaacattgccctttctgtcaagaaaaaacaataaatgaacactttaaatctgaagtaaagaaagtatttgatgattcgtatgataaaactattcatgaaataactaaaatatataccacatataaagaagcaacacacaattatgtcgatgcgataaaagcatctgtgtcatcaaatagttatatcaccgataaaaatgaaatttttaacattgttgatgattgtaatgtcatttttcagtccaatctaaaatctatacaagaaaagttagataagccttctcaatgtatagactttgttattgaaaatccaagtttatatatccttattcaaaagatagaaaattataactctgaaatacatgagattaatttaaaggttaataattatgatgtcagtgtcaatgaacttaaaacaaagttatggcgtgcaataagatttatttgtaatgaccttatagaaacttatagcaaacaacttttagacctaaatgctgaaagggaaaatattctttcaaaaaacagggggggtttagacgatatagagaaattaagctctgaggtcattagtttgagccagaaggtatcaaatatagacgagacaatacgtaaaataaatagaacacttaaatcgcttggtattgttcattttaagctaaagaaaaaagaggaaagtgattttttccagatttgcagagataatggtattgaaaataatatttataaaacacttagtgaaggtgaaaaaaccttaattacattcctttattttcttgagttgtgtgatggtcggttgggttctgagacaaacagctctaaagaaaagttaattgttatagatgatcctatatcaagtctatcgcatgactatatttatgagatatcatccctgatccatcatcgactaattaaaaaaaatgagaacactaaaattgttatcctcacgcacaatttgtttttcttccaagaattaataaaagttgctccgactaagaaagatgtatttgataagaaataccaactttatcgtgttattaaagatcagtatagtgatatattaactataaacagagatgagataaagaatgaatatgaagctctgtggatggttttaaaagatgttaaacaaggaaagcttaatcctatagtattgccaaatattatgaggaatattcttgaatattatttctcattctcttgtaaaatggaaaagttgagtgaggaacttgataatcttgttagctctgaaactgacataaattataaaactttttatcgttatataaatagaggttcacattcagattcaattaatataagtaatttaggtcagatttcagctaataaatatttggaaatgttcgagggtatatttaaaaagactaatgatgaaaagcatttcaataaaatgttaggattagaaattgaggaggttgtttag

SEQ ID NO: 230868 - DNA, 600 bp, Klebsiella pneumoniae
atgtatctgtattcatcttcatcaacctacagtggatgtatcttcatgaaaagagtagttaagtttggcatcatcggaatacctttaatagcctctctctgtgcaatatacgcttttatgttcccaagagcaccagatactcaaaagacagatgatatcattggcatatggacatcagattattcatatgatactggagggattatagttagagtaaatggcgagacatcatacttttctaatggaaaatacaatgttaatgctgatatgtcttttcaaccagatagcacaaccataataacctttgctactaatggtgctggagattggaatattcacggcaaagaattgataacaacacttaatactctaaagtctgctcccactaaaatggtttataaagggaaagtattggaatctcaagattttgatatgatggaacgaatttccaatcagaaaattaaaaccatagaagatttcacagcacctggagcaagtcagtcttatactataaaaaatgatgaccatgacataaagctattagaagccataaatcccttcggcaaaaacttcaacatagagatgtatagaaaaaaatag

SEQ ID NO: 230869 - DNA, 384 bp, Klebsiella pneumoniae
atgagtaataagatctactttggtctaaagaaaatatttaacaatgagctgacaatagatcgtttttttgaaaacgatttttcagatctggataataagcatatagcagcattatcagcacaggtttttgttgaagataagataaacactaacaagttaaatacatacagtgatatagtttcaagattgaatcttgatgattttgctttcgctgtcgtgtgtctttacgaaatgtatcaggacaatgatattccttttccgttccaggaaagacaagatataacatggtctatatgccaggctttgattgataatggtgatactgattatgatgaatacacacgaagggctacgatgggctatatctggagcctatcaaggtga

SEQ ID NO: 230870 - DNA, 1830 bp, Klebsiella pneumoniae
atgggagtaatttctggagcagtgttaacctctgttggtaatgatatagccaaaagaacaatagcgtctgtttttgaacttttagcaaaaaagtatcaacttatggatatactaaaatttaaggaacattaccttgattattgtgaaaaaaaccttgaaataaagactttagtttcccaagataaatcttttaacatagatgagatttatatccccatccatataatgcagtcaggcactcagacaaggcaagaaataaatgaccttacagctttagataatgatagagctatattgttaaaaggattagccggacagggaaaatcaacactattgcgaaaattattatctaataatgcaaaaagatttaatcgccttcctgttttctttgaactaaaaaactataatggtggaaccttagagctgtccatatcaaaatcattgagtcattatggagttgatatatctgaatacgcgctacataaattactttctgatagtaatgtcaaaatctatcttgatgcatttgatgaagttaaacctgaatttagacttgaacttgttgatgaaataaaacgtttcattaactcgtttaactgtcatgttatctgcaccagtaggcctgacacagaaatagatactctttcagaattcagaacatttactgtatgtgaattaactgaagatcaaatatttggcataataaaaaacacagcatctgacaatgaaaaatgcgaagagttgtgtgcggcacttaaacgaagtcctttacacaccaacaaagattcaattctcaaatcgcctatattagttgttttattctgcattagctataatttaggtgaagacataccaaacacactctcacaattctattcaaatatttttgatactgttttccaccgtcatgataatatcaagggaaaagtttacagagagcgccactggaatgataacaggcgcatttatagagaacttttcgactgtctgtgttttatctcccttaaagatggcctaaatggatttagtcatcagaagttagtcaattttgtatcaatttcactcaagcatataaatgaagacgcttccgtagctgaaaaagctgttaaagaattatcctctatcacaaatttgattattgaagatggctttaatgaatatcgttttgttcataagtcaatacaagaattttttgccgcatcctttattactacattgcaccatgataaaaaaattgcattttacaaaagatgttttaatgattattcttttcatactacatttcatagcacgttattctttcttgaggaattggattattataattatcatgaatatggtttcatccccgcaattaccgatttcctcggcttatctcataatataacaattgataattacacaattcctaccattgtaaaagatgctttttttgataagatctctatgagagcaaaattatctatattcaaagcaagtaatcgagaaagctatgatctggagaaaacaaacttcgttttcgaagcatcagaggcgtaccctacccttttttcgagtgtattcatcttttctcttgattttttaaaaatagaattaaccgaaaaagagttaataagccttattaaaaaaaatgaaagtatgctggaaaacgggtggtgtaaattaagcattagaacaattcttgcatttaaaaatctacctgagtcagtagctttagaagcattacaattaggaattgatgttcttattcgaagaaaattcaataaagcggttgataagttgaacaatagaaaacgttcattagattcaactgattatttcaacttttaa

SEQ ID NO: 230871 - DNA, 594 bp, Klebsiella pneumoniae
atgagtgttgttgaaacattgagagaactatcagaagtatggaaactttttggtgatatgcctgatgacacaacattaagtgtagatttagctgctctctatcttggtatcagtgctaaatcattagccagatacagacagaacggtggtggacctcaatacattcaatatcagactgaagatagcaaagcaagaaaccagcgcgttaattatcttttgaaagacctccgatcttggcgggataatcacaaagtaagcaatacaatgcacgctgctcagtttaggggattagcctttaactgcctatctgatttcaccgaacctcaacctttctggcgaatcactattggctctacaagcaaaatcatatcccatgcattaactctcactgataaggaattcaaaaaactactactgaaaccgtatactgatgttgtctggatatctatcgaaaaagcgctttttcaaacatgggaaaacaaggatgaaagaactatttggcataaagtatttatatcagtgctaaataatattttttgtgcttcggacgttgaacaggaaagatatacgctcaatgatgcgttgaagagctaa

SEQ ID NO: 230872 - DNA, 1065 bp, Klebsiella pneumoniae
gtgtccgattttccaagtatcgatcaagcccgtgaggtagctcaacagttggttcagacaatgatcgcaacaaagagaaaccctaacaaaattaagcgagaaacggatgcttctgaactcacgatcagtgaagtctttgctcaataccgccaacatctccttggtagatcgaaaccagccaaaccaaacacactgtcagtgttggacaaggcagaaaatcgtttaaaggaatgggctggtttacgagttaaagatcttactggtaatgaaattcttcgtaagtttgatgagattgcttcaagagcaagaacagcatctgagcaaacattcaggtgggcgaatgttgctgtcagacatgcaatcgatatcgaagcaagtaatgcacagactcaacaacgacaaccttctctatcttacaatcctttcagtatcttaaaggtgcagaagaagttcaggactcgatccgagcttgaagacagctacaaagcgaaaggagtaagaaatcctctatcaccaaaggacacgcttgggcgattcttgtctgcattgcataacaagagaagcttcaaccgccttgggtgcgattatctgctactgactgtcctgttaggtgccagaaaggaagaaacagcatcgctatgttggaaggaaacactaacaagcgaagaagcaaaaatgacaagttatgtagatcttgaaaatcggctcattcgcttctatgacacaaaaaaccgaaatgactatgagcttccgatctgtgatgccgtgaaacgggtgttggaagacaggagagatatcgttatggattcagggattcgtccagaaaaacagaaatgggtattccctgctcgatcaaatcgtagcaaagccggccattactctgacagtaaaagtttgagagagtatatttgtgccgacgctggtattactaaacttggtatgcatgatttgaggcgaacatttgggcgtgtagccgaagagcttacgtcatatgctgttgtgaagagattgctcaatcatagaaatacaacagatccgacagagcgttatgcaacgcctgattaa

SEQ ID NO: 230873 - DNA, 1386 bp, Klebsiella pneumoniae
atgatggatgatgctgccgcgacttacaccaatctcgattcgcataagaagctgacagcggagcagaagaaaggtgagagtcaggcagagagaaatgcaaaagttgtcgaagagtacagccagaaagcaaaattggctgccgattctacaagcgaactctcgcgcgaacaggcgatactggcagcaaaacagaagttaacgaatgctacaccgcagcaggttgctcaagttgaacgtgatgcagcggcggcatgggatacggccaatgctctcaaagcccaagccgccgctcaaaagctcctccctgaaacaagagagaacgcctcttatcagcaggatatgaaggatctgaagactgctcttgatgggaagaggattacccagcaacagtacgatcaaaccagtgagcaactggaggctcagcatcaggccaaccttgccaaaatacgctcacagcaggtggttaaccccacccagcaggcacttgccgaagttgacccggtgcagcaattggccaaccagcacgcgcaggagctggcgctgattcagcagtttgagcagcagggcgttttggcccatcagaatgcgctggccctcaaaaacgcagccgacacgcagtacgagcagcagaggaccgcggctcaatgggaaatcctcagccagcagagcctcggctataacatgctgacgagtgcggtggatgcgtttagcgggaatgcctccaatgcgatcaccggtctgctaaccggcacaatgtcagcacaggaggcgatgcagtcactcggcaataccatcctgaacagcgtgatcaacagcatcgttcaggtcggcgttgagatgctaaaaaactttatcatcggacagacaatcggtgcggcatcaactgctaacggattgctacaggcatccctgttaaccaacgcatggacaccggcagcctatgccgcctccgtggctacaggtggcgcagcagcaaaagtgggggccgtggcctatggttctgggctggcaacatcaatggctctaagcactgtatctggtgcacgctacaacggcggcccggtatcagctggcggcctgtatcaggtcggcgagaaaggtaaaccagagatttaccaggccagcaccggcaagcagtacatgatccccggcgataacgggaaggtcatcagcaataaggatatgaatggcggccaggtccaggtaaacatccagttttatgaccagaccagtggcggacagcattcattccaggcgcaggccagccaggaaggtggtgttgtgacagtggaagcttttcttaccgatgttgatcgcaatgggccaatgtcctctgcaattcaaagcgcttatggcctcggaagaaaagcgcaaggtgcttactaa

SEQ ID NO: 230874 - DNA, 288 bp, Klebsiella pneumoniae; identical to SEQ ID NO: 187765

SEQ ID NO: 230875 - DNA, 180 bp, Klebsiella pneumoniae
atgcaaaatactcaatattttattgaaggcaacctggtatcatgcactgtatttaatgatgctggtctggcgttttatgcaactgctacagcagaaaatgatgacatgactacggctatgtcttcggctctgacgcaggctgaaaaagcccgtgatgaatatgaagctaaagaggattga

SEQ ID NO: 230876 - DNA, 165 bp, Klebsiella pneumoniae
atgagcgctaaatacgaaatatcaatgggtattaaaaactcgacgattaacggctatccatccgattctaacctatgtgtcattgttggaaataataggcagactaatatcacggttaacgtttttgttgagcctgatgggaaattggttattgagactgattaa

SEQ ID NO: 230877 - DNA, 273 bp, Klebsiella pneumoniae
gtgccgctcagcgaggtagccacgaaagacgactttttcaacattaaaaaagtcagcgccgccgacctgctcgacgctcaccgcatcccgttccagttgatgggtggcaagccggaaaacgtcggctcgctcggcgacatcgagaaggtggcaaaggtgtttgtccgtaacgagctcataccgttacaggaccgaatgcgcgaggtcaacgcatgggccggtcaggaggtgatccgcttcaaaagctacaacctcgataccgaaagtgactga

SEQ ID NO: 230878 - DNA, 264 bp, Klebsiella pneumoniae
atggatattgagtactatttaaaaggggaattggtgaatgagactatccaaggggacgacccgtctcaggttttacctcaccttgttcataagtatagagagattcctcttatccctgcacaggaaagacaaggaaaaaggaatcttgcgtctgattatgtagatttaacaaaatatggaataacagacgtgagttatattaatgaaaatggatatgttgtacgcatcccagaaatagacctcgaaaaagcccctattcactaa

SEQ ID NO: 230879 - DNA, 207 bp, Klebsiella pneumoniae
atgaaacaattaatggtgctaacgctggcgctactgccagccctggcgaatgccggacagattacgatgaccaatccacaagaggagcagacggagaacgggaaaacgctgtgcatctatcagaacagtaactacacatttacgttcatcactaaaggcgcttgtccctatgcaaaaacatttgatacagaggattcagaagaataa

SEQ ID NO: 230880 - DNA, 123 bp, Klebsiella pneumoniae
atgatcattatgctctattggacgctttttatctatataacagtttactattcaggagtgttttccccagacaaggaaaaatataatgggaaaaaaagaaagaaacgtattagcacgtattga

SEQ ID NO: 230881 - DNA, 411 bp, Klebsiella pneumoniae
atgggaaaaaaagaaagaaacgtattagcacgtattgaacgacaatccacagtattacctccagctaaatcgctagtctctagaaaagagtttcaggaactcagtcgattatccaagcaatataactccacccctggggaatggcatacagaaatcattgagcatgatagccctccgttatcagaggaagagcaggaagcattaaatgacattctctcctcctgtgatggtggggtgtatttcaatcctcgtaaacgaaaacattatattgtagatagctcatcgctgcgcaaataccagattctgggattcgaggactatgtgtcattttgtggatatttatcgactaatggcctcaataaccttgtacgcgattttgacgcagtatattcagataaggagagcgaataa

SEQ ID NO: 230882 - DNA, 264 bp, Klebsiella pneumoniae
atgattaatgggaatggcgggaaatgtaaatcaacagcgaataagtacgctttatccgctactgatttaccgggagaacatttagcattgatggagagcggcaatacgctgattcatagtgcgggaattatcaatacccagtttttgcatgatatggatgcggtggctatgaaccgttttatgagcaatgccgagcagggcggcaatacgcttattattattgttggcaatgagcagttcgaggatctgacactcccgtggtga

SEQ ID NO: 230883 - DNA, 243 bp, Klebsiella pneumoniae
atgcgcaaaagtacgctggcgcgcagtgctatccccgcctcgcctgcccgctttatgggtcggttttattgcagttgcatgaccactctggatccgctccagcactggcggcgcacggccagaatgggcaaccacggcgcatgcaaaaccacgcaccatatgcatgcaatgcagaaatcaaacaaatttgagtataaattagcgcggaatcctatgatttttaccttcaccctctccgattaa

SEQ ID NO: 230884 - DNA, 717 bp, Klebsiella pneumoniae
gtgtttggcaacgcgtttttagagctccgaaagagtgtcaccggtcgcccgctgaagctggaagcgtcaccggctaaatacacgcggcgtggtattgaagatgatgtctactggtgggtgccgtcatttgaccagccgcacccgttcgcgccgggatccgtattccacctgctggagccagacatcaaccaggagttgtacggcatgccggaatatctcagcgcgctaaactccgcctggctgaatgaagcggcgacgctgttccgtcgcaagtattaccagaacggggcgcatgcgggttacatcatgtatgtgacggacgccgcgcaaagcggtaccgatgttgaggctttgcgcgatgcgatgcgcagttcgaaggggctcggcaacttcaaaaatctgtttttctacgcaccgcacggaaaaccagacggcattaaaattgtgccgctcagtgaggtggcaacgaaagacgatttcttcaatatcaaaaaagtcagcgccgccgacctgctcgacgctcaccgcatcccgttccagctgatgggcggcaagccggaaaacgtcggttcgcttggcgatatagagaaggtggcaaaggtgtttgtccgtaacgagctcatcccgctacaagaccggatgcgcgaggtcaacgcttgggccggtcaggaggtgatccggttcaaaagttacaccctcgacaccgaaagtgactga

SEQ ID NO: 230885 - DNA, 348 bp, Klebsiella pneumoniae
atgatgggcatgcatcccggtggcggtctccggcttcagcaccgccttcagggcgcggaagcggtcgcgaatgtcgttcatgttcatcgccccgccggaatccaccacatagatacaggtcgcgccataagattccatcttcagcgcctgctgcgccagcgcctgcggggagatcatatggctcatcatcagaaaaccgacggtgtccatccccagctcgcgggcaaaggcaatatgctgcgccgcgacgtccgcttcgctgcagtgggtggcgacccgcaccacccgcgccccggcctgatacgccgctttcagatcgtgcagcgtgccgatgcccggcagcagtaa

SEQ ID NO: 230886 - DNA, 246 bp, Klebsiella pneumoniae
atgctccagatgttaacccttgaagagtgggcaaacgagaaatacagaagcaatcctccaagtgtttccactctcaggaattatgctaaacagaatatgttttctcccccagccaaaaaagaaggtcgattctggcgcgtcagggaggatgctgagttggtcggtacattgaccactcctgtagtaaagaaaagcgaccctattcttttgcagaggattttgaacgatggctgccagaccacgtaa

SEQ ID NO: 230887 - DNA, 645 bp, Klebsiella pneumoniae
atggtgataacttttgccattcgtgaagaccgcgccgagctgggcaacaataccggcccgcgatacaagtctgaacttatcaacccgcgcaaaggcacgccgaccagctacattgccaaatacatcagcaagaacatcgacgggagcggactggcgaaagagatcagcaaagaaacaggcaaatcactacgggacagcgctgagcacgttagcgcctgggcatccctgcaccgcgtccagcagtttcgtttcttcggcattccagggcgtcaggcttatcgcgagctgcgcctgcttgcaggccaggccgcgcggcaacaggcagataaaaaagccggtacgccggtactggataacccgcgactggatgcggtacaggctgccgccgatgttggatgttttgccacctacatcatgaagcagggcggcgtgctggtcccgcgtaaacatcacctggtccgcacggcctacgagcttaacgacgagccatctacctatggcgatcacggcatccgtatttatggcatctggtccccgattgttgaggggcggatttgcacgcacgcgatgaagtggaaaatggtccgtaaggccgttgacgttcaggaggcgacagccgaccagagcgctgccggacctccatga

SEQ ID NO: 230888 - DNA, 264 bp, Klebsiella pneumoniae; identical to SEQ ID NO: 34912

SEQ ID NO: 230889 - DNA, 219 bp, Klebsiella pneumoniae; identical to SEQ ID NO: 34913

SEQ ID NO: 230890 - DNA, 489 bp, Klebsiella pneumoniae; identical to SEQ ID NO: 34914

SEQ ID NO: 230891 - DNA, 240 bp, Klebsiella pneumoniae; identical to SEQ ID NO: 49885

SEQ ID NO: 230892 - DNA, 726 bp, Klebsiella pneumoniae; identical to SEQ ID NO: 49886

SEQ ID NO: 230893 - DNA, 3474 bp, Klebsiella pneumoniae
atgagatcgagaccttcccttttactgatgcgaaacctgcggtcattggccgttgtggtgctcgcaactttgccatgcgttgcttttgcacaatggcgggttgtagccgtgagcaccgaagtagacaaaatgcgcttcaacaccatcatagacgcgcattccttcatgaagaattatcgctctggtgaggagcaagggaagggaacgccagttggggatgcgctttatccggttgccagttatggtgatggccgttatgtctccaggatctgttttaagtatctaggtgctactggcgattatgaccccactacctgcactggcgacccagctacggtctactggcgctcaacctatgttctgccgggtgagatggataaaacaccgttcctggacagggatctcggcttaccaacaacgaccatgtgtgtagggaaccctatccatcttggcaccggcaacaagttccaggctgaactggattatcaaagcggaggctccgaccctttcacattcaccagatactacaatagccaccttcctgatgaagagctcggcggctggcggcatacctactcgcggagcgtcgaggtcaacgcctcgaagtacggtgagaacatggttgtcctgcaccggccagaagggcaacaactcgcgttctacaactcgtcctctgtctgggtgccaacatggaaaaccgatgataccttgacgaaggatgctaccggctggcgttacactcaatctgacggggtagtcgaggcctatgatgaaaccggacgactgaccggcatcgagaagcccaacggcaatcacatcaccctgagctatctgaacggagagctatcctcgatcactgacggctttggccgcaacatccagttccagcatcaagatggccgcatggtcagtgtcaccgatcctgctggtggcagtattcagtaccagtacaacagcgctggcaagctggcggaagtgatctaccaggacaatacgagccgcagctatctctacgatgacccgaatgcaccgggtttgctctctgggctggtggacgagaacggcaaccgtttcgccacatggggatatgatgctcaggggatggcagttctaagtgaacacgccgggggcgcagagaagactcaggtaagctacaacgctgacggaagcgtctctgtcaccaacgccctcggccacgttcagcgatatacctacagccgtcacaacgggatgctcaagcctgatgttgttgagggtgcgccgtgtaccggctttgtgggaggcaaggaaacctacgtctacgacagcaaaggcctcgtctccagcattacagatcgtgctggacagaagcgcacgttcacccataacgaccggggattggaaaccacccagatagaccaggatgggggcaaggttacgaccgactggcttccttccaagtcgctccctgcaaaaatcacggaaccaaccaggatcactgagcttacctacgacactcatctccgggtgataagccgcaaggtcacagatcgcagctcgggcgcttcccggacatggacctacacctatgcccctgttggtacaggaaagccgagcctgttggcctcggttgatggtccgcgcaccgacgtcagcgatgttacgacatttgactacgatgaccagggcaacctgatccggacaacaaacgcgctggggcaggtgatgcagtttggtgactacgacgcgaacggtcgcgccgggaccattcagggcgtcaacggtgtaacccaaaccctcacctatgacgccagaggaagacttgtcagctccactggaccagaaggaaccacggcctacaactatgatgctgtgggcctcctgagctcgctgactaagccaaatggtgcaaccgtcagctatgagtacgacgctgcacatcggctggtggcggaaacagatgcacagggcaaccggcgcgagcttgagctcaatgacctcgggaacccagtagaagagcgactgctcgatgcgctgggccagacccgttggatagagcgccggatcttcaacgaaatcggctggctctccagtgtctccgacgcctatagcaatcagtcatcgttttcctacgatgtggtggcaaacctgatacaggagaccagtccctctggtaacacacactcctacaagtacgacggcttccatcaccggacacaaacgaccgatccactcgggaaggtcacgcaggtgctctacaaggataccggcgatgtttaccgtgtctccgaccctcgttcgcgcctgacctactacagctacaacggctttggcgaagtgactcaggtccggagcccggacaccggcaccaccgacattacctatgacgaagccggtaacgtggcaacgcgcaagacggccaagggacaaaccacaagctacagctacgacgcgctgaaccggatcatcgaggcatccagcggtgtcgctggcgaatcgccaattctgtacgggtacgacgaagcaacctcaccatacggcatgggccgcttgacctcagtcgatgatggcaacggtgtccggagatatggctatacacccgaaggatggttggcttacgagacctgggaaacccacgggcagagccttactacccagtaccaatacgatggtgcaggcctcatcacgaagatcacgtatcccagtggtcgtgaggtttcctacacccgtgatttagccggtgacgtcatcgaggtggcaacgacacaagcaggcaccacaacaagcctggcaagccagatcgagcgagcgccctttggccccgtcaccagtatggtcagatggaacggcatttcagaaagtcgctctttggatctcaattaccgagtcaccggcatcgacgctactagagtgcattcgctggtctatcggtacacgccagactcgttgatttcagccatagacgacaatctcagctcatcagtcaatcagtcactcggttatgacgcggttggccgcatcacctctgctgaggggctctatggcgttttgggctatggctatgacgccaccggcaacaggacctcgatcacgaccgatggcctgagccaaagctacaccatcaactacatgaacaactggctggtgaagactgggcaaacctccagaagctatgacgccaatggcaacctgacgaagcagggggcggataccttcacctatgacagccagaaccggctggtggccgcaacggtcgctggagtgacagcagcttacacctacaaccatctggatcagcgtgtaactaagaccctaaacggccagacccgcctactgatttacggcttggcaggaaacctcatcgaggagctggacgcagccactggagacgtgctggcggagtatatctggctcgatggcacccccttgagctttgctcagtcaggacagacctatcaggggtcgtctcagaaaacggaaaataaagcacgctaa

SEQ ID NO: 230894 - DNA, 171 bp, Klebsiella pneumoniae
atggccgagcagatcctgcacggttcgaatgtcgtaaccgctgcggagcaaggccgtcgcgaacgagtggcggagggtgtgcggtgtggcgggcttcgtgatgcctgcttgttctacggggcactgttgcaaatagtcggtggtgataaacttatcatccccttttgctga

SEQ ID NO: 230895 - DNA, 465 bp, Klebsiella pneumoniae
atgaataaaacgtcctctctcgcaagtggtggcgtcgctgttgctgccattattgctttaaaattatttgctaaaactgcgatttttgcttctttgtttggtggtgctgctgttgctaaaaacatgtatgaatcttcagtgatgaaagttaaaggtgaagttgaggcgtttaataaaaaaaatcccagcgaacctatatatatgtatgaagataaaaaagaattggtatttaatgacgtcattactgatgtttcagatagtgatgtgaaaaatgcaagccaagacgtcttaagtaatgttaaagaatcaatgaaaaaggacgatgtgaattttattgagaaaaacaaagactcagcgtcaaattactttttaatcaaacatggatggactgaaacccataaagtcaaaacaaaaaatgatgcattaatcgttagttataaagtgaatgacacggatcttgattga

SEQ ID NO: 230896 - DNA, 576 bp, Klebsiella pneumoniae
atgcttttacccgtgagcgtgacatcatgtggcttttatcatccttattggtatcaaggggaacgcaacccccacaatgatgagctatcaagacaaatgatggatttcaaggatgaggataaccgcaatcatcaaagagctatcaaccgtttttctgagttagctatcgacaaagttggacgattggtgattcgaggaggtggtgggcgttttgttgaaagtccattttcgatagctattgttccttcacatacctcaggccggatttcccctgcattgatcgaagttgcagagcgcgttgttcgtacttatcgtcgtggtaatgtggactgttgtttagagagaacccgtactgtccccagcgcccacagagagggcggagatcgttcgatttctggtcatatgtcgactatcagagttaagggcggtaacttgcgcggacgaaatgtgttattactagacgatgtcaaaacgacaggggggagcctgtctgcttgtttttatttactggagtctgcaggtgcaggtgtaacaattccattgtcgctgttggaaacggcaacttatgaggagtaa

SEQ ID NO: 230897 - DNA, 960 bp, Klebsiella pneumoniae
gtgcactcagatgaattaaaaaatacactaggattagcaattcagatcggaaagttagcatctgaccaaagtgtattgaaattctttgagcttattgattttgaaaggattcgtgatattcgcgatttgactcaaatggtcaaccgccatggtgtgttgaaagaaattatttctgaaacggattttttaatcgcaaatgcagagcttgaaaatcatcattctcatggtatagaactcgtgccattcgggtctgagtattatcctctaagtttagcgtttactccaaatcctcctgcaatattgtatgttaaaggtggtaaagatatcctcactcaattgcctggtgttgcaatcgtagggtctcgtgacatttctcctgctggagaggaaataactagaagaataacatgccaaattgtagctgctggatatatcgttgtgagtggcttggctataggtactgatgcaaatgcccataaagcagcattacaggcgaaagggaaaaccatagctgttttagctcatgggctcgaagaagctaagccaaagcaaaatagcaggcttgctcaagaaatcattgagaagggtggggcatggatttcagaatatccgatgggacgtcccgctcaaaaacaatcctttgttcaaaggaatcgcatacaagtaggcttatcggcgggctctatactgatcgaagctgcgcttaatagcggaacaatgacgcaggcagattttgcaaataaagctaagcgtccagtttttgctgttgtaccacatcaaccgaataatcctttaaatcttaattgtgagggtacggttgatttggtaaataggaatatggcaagaccgctaaagacaaagagagattatgaaagtgtcatcatgattataaatgagtcgagagatgctctgttgcgtcttaagcgactagagaaacaaaacactctgaatttaatgtga

SEQ ID NO: 230898 - DNA, 390 bp, Klebsiella pneumoniae
atgaccgatgcggcgcagaaccaggaggacgtgaacaatatccgccaggccatgaaaagtgccaaaggaccgggtaactttcgcaacctgtttatgtactcccccaatggcaaaaaagatgggattcagatcatcccgctgtcagaagtcgcggcaaaggatgaatttctgaacatcaagaacgtgagccgtgatggcatgatggcggcgcaccgcgttccgccgcagatgatggggattatgccgagcaatgttgggggctttggggttgtggaaaaggctagtaaggtttttgtaaaaaatgagttattaccattacaaaaaagaatgaaagaattcaactattgggccagagaggaggtaataaagttcgaagagtatgaaatttaa

SEQ ID NO: 230899 - DNA, 486 bp, Klebsiella pneumoniae
atgatgatggtgcttgggttatatgtcttcatgttgcgtaccgtgccctatcaggagctacagtatcagcgaagctggcgatacgccgcaaacagccgggtgaaccgccgactatcaacgcagtttcttggaccggataacgattcgctgacgttatctggtgtactgctgccggaagtcaccggcggcaggctgtcattgttggtacttgagcaaatggctgagctgggtaaagcatggcccctgattgaaggaagcgggaccatttacggcatgtttgtgatcgagggactgagtcagacaaaaactgagttttttgcaaatggaatacctcaccgtattgagtttacgctgaccctgaaaagggttgatgagtcgctgtctgatatgttcggcagtctcagcgatcagctcagtaacctgcaggactctgcaacgtctgcgataggtaatattaaaaatacggttggagggttgctgcaatga

SEQ ID NO: 230900 - DNA, 453 bp, Klebsiella pneumoniae
atgaatatcagctctaatctgctggatctgaacagcaaaacacccgctttcagtattgtgaatgagggcaagaacgtgacggaggtgctggataagcgcctgatgagtctgagcctgaccgacaaccgaggtttcgacgctgaccagctcgatctggaactggacgacgcggacgggcagattgtgctgccacgacgcggggcggttattaccctggcgctgggctggaaaggccagccactttttccaaagggcagtttcacagtggatgagattgaacacgctggcgcaccggacagactgaccatccgtgcacgcagcgccgactttcgggaaaccctaaacacccggcgggaaaagtcttggcaccagacgacggtgggcgacgtggtgaaagagattgccgcccgccacaacctgacaatggctttgggcaaagacctgatcaactag

SEQ ID NO: 230901 - DNA, 270 bp, Klebsiella pneumoniae
gtgctggtacttaaccgggccaacgctgagcgggccgccaaaatgcagtgggaacgcctgcaacgtggtgtggcgtcattctccctgcaactggcagaaagccgggctgatctctacacggaaaggcctgtgaaggtgagcggctttaagcagcccattgatgaagccgagtggacgatcaccacgctcacgcatactgtcagcgttgatagtggtttcacaaccaatattgagtttgaggtgaaaatagatgagttcgcaatggaatga

SEQ ID NO: 230902 - DNA, 216 bp, Klebsiella pneumoniae
atgatgaattgtcctatgtgcggacaggcggcacatacccgaagcagcttccagatttccaacgaaaccaaagaacgctacaaccagtgcactaacatcgaatgcgggcataccttcgtgacgcatgagacttttgtgcggtcagtatgccgtccgcaaaaaatcagcgcagcgccacctcatcccaaaggtatgcaagaacaatttgcttactga

SEQ ID NO: 230903 - DNA, 222 bp, Klebsiella pneumoniae
atgagttctggtaaatattggataagcaataactacatttacgggccgaaggagtctggtcgcttctggatttcaggtggttacatctatgggccaagaaattccgggaagtattggataagcggaaactacatctatggccctaagcatgggggtaagttttggattagtggaggttatatctacgggccttctgggttggaactgccttggttgtcatag

SEQ ID NO: 230904 - DNA, 282 bp, Klebsiella pneumoniae; identical to SEQ ID NO: 61246

SEQ ID NO: 230905 - DNA, 3078 bp, Klebsiella pneumoniae
gtgaagtttttcgccctcttcatttaccgcccggtggcgacgatcctcatctcgctggccatcaccctgtgcggcattctcggcttccggctgctgccggtagccccgctgccgcaggtggacttcccggtgatcatggttagcgcctcgctgccgggagcctcgccggagaccatggcctcgtcggtggccaccccgctggagcgctccctggggcggattgccggggtcaatgagatgacctcctccagctcgctgggcagtacgcgcatcattcttgagtttaacttcgaccgcgatatcaacggcgcggcgcgcgacgttcaggcggcgatcaacgccgcgcaaagcctgctgccgagcggaatgcccagccggccgacctatcgcaaagccaatccgtcagatgcgccgatcatgatcctgacgctgacctcggacacctactcccagggtgagctgtatgatttcgcctccacccagctggcgcagaccatcgcgcagatcgacggcgtgggcgatgtcgacgtcggcggcagctccctgccggcggtgcgcgtcgacctcaacccgcaggcgctgtttaaccagggcgtgtcgctggacgcggtgcgcaccgccatcagcgacgccaacgtgcgcaaaccgcagggggcgctggaggacagtgcgcaccgctggcaggtgcagaccaacgatgagctgaagaccgccgccgactatcagccgctgatcgtccactatcaaaatggcgccgcggtgcggctgggagatgtcgccaccgtctcggattcggtgcaggacgtacgcaacgccgggatgaccaacgccaaaccggcgatcctgctgatgatccgcaaactgccggaagccaatattatccagacggtggacagcatccgcgcccgcctgccggagctgcagcagaccattccggcggctatcgacctgcagatcgcccaggaccgctcgccgaccatccgcgcctcgctggaggaggtggagcagacgctggtgatttcggtggcgctggtgatcctcgtggtgttcctgttcctgcgctcggggcgcgccacgctgatcccggccgtcgccgtcccggtatccttaatcggcaccttcgccgcgatgtatttgtgcggcttcagcctcaataacctgtcgctgatggccctgaccatcgccaccggcttcgtggtggatgacgctatcgtggtgctggagaatatctcccgccatctggaggcggggatgaaaccgctgcaggcggcgctgcaggggagccgcgaggtcggctttaccgtgctgtcgatgagcctgtcgctggtggcggtgttcctgccgctgctgctgatgggcggcctgcccggccgcctgctgcgcgagttcgccgtcaccctgtcggtggcgatcggcatctcgctggcggtctccctcaccctgacgccgatgatgtgcggctggctgctgaaaagcggcaagccccaccagccgacgcgcaaccgcggctttggccgcctgctggtggccgtgcagggcggctatggtaaatcgttaaaatgggtgctgaagcatagccgcctgaccggcctggtggtgctcggcaccatcgccctcagcgtctggctctacatttcgatcccgaaaaccttcttcccggagcaggacaccggggtgctgatgggcggcattcaggccgaccagagcatctccttccaggcgatgcgcggcaagctgcaggactttatgaagatcattcgcgaagatccggcggtggataacgtcaccggctttaccggcggctcgcgggtcaacagcgggatgatgtttatcgccctcaagccgcgcgaccagcgccacgagacggcgcagcaggtgatcgaccggctgcgcaaaaagctggccaacgagcccggggccaacctgttcctgatggcggtgcaggatatccgcgtcggcggccggcagtcgaacgccagctatcagtacaccctgctatccgacgacctgtcggcgctgcgcgagtgggagccgaagatccgcaaagcgctggcggcgctgccggagctggcggacgtcaactcggatcagcaggacaatggcgccgaaatggacctggtctatgaccgggataccatgtcgcgcctcggcatcagcgtccaggacgccaacaacctgctgaacaacgcctttggccagcggcagatctctaccatctaccagccgctcaaccagtataaggtggtgatggaggtggatccggcctacacccaggacgtcagcgccctggataagatgttcgtcattaacagcgacggcaagccgatcccgctggcctacttcgccaaatggcagccggccaatgccccgctgtcggtgaaccaccaggggctgtcggcggcatccactatctcctttaacctgcccaccggccgctcgctgtcggaagccagcgaggccattgaccgcgcgatgacccagctcggggtgccgtcgagcgtgcgcggctcctttgccggtaccgctcaggtgttccagcagaccatgaacgcgcaggtgatcctgatcctcgcggctatcgccacggtctatatcgtgctgggggtgctatatgagagctatgtgcatccgttgaccatcctctcgacgctgccctccgccggggtgggcgctctgctggcgctggagatcttcgatgccccgttcagcctaatcgccctgattgggattatgttattaattggcatcgtcaagaaaaacgccatcatgatggttgattttgccctggaggcgcagcgtaacggcaacctgacgccggaagaggcgattttccaggcctgcctgctgcgtttccggccgattatgatgaccaccctcgccgcgctgttcggcgccctgccgctggtgctctccgggggcgatggctctgagctgcgccagccgctggggatcaccatcgtcggcggtctggtgatgagccagctgttaacgctctacaccacgccggtggtctatcttttctttgaccgtctgcggctgcgtttttcgcgtcactcctctcaaccggtaagcgaataa

SEQ ID NO: 230906 - DNA, 912 bp, Klebsiella pneumoniae
atgcgatactttgtagctatacccacctataatgggggggaagtatggaagacggcagttgataagattagagaatatagccctagtgatctttatgttcgagtgattgactctagtagtaaagacgatactgtggctgtagcaaaaaaagcaggttttgacgtcacggttatttccagcaatgattttaatcatggaggtacacgtaacctagccgtcgaagaccagattaataattacgatataataatatttcttacccaagatactattcctgaacctgattttattgaaaaaattactgtggcctttagggatccacaaatcgcttgtgcttatggcagacaacttccacatcataatgcaactcctattgctcaacatgctcgttatttcaattatccggcaagtggacatgtttgcgatcttcaggatgcaacaaggttgggtattaagaccgtatttatgtctaactcgttttcagcatatcgtatcgcggcgtttaaagatcttggcggttttccatcaaatacaattctttgtgaagatatgtattttactgcacaagcagtcctttctggttataaagtagcctatgtggctgatgccgtagtgagacactcccataactatagcccgctggaagagtttaaacgttactttgacataggcgtttttcatacagatgaaccttggataaaagagcactttggcggggcaagtggcgaaggtaagaaatttatcctgtcagagctacgttatctactggaaaatggagttcactacattcctatagcatttataaataattttatgaagattgtcgggtataagttaggccagaaatataagaaaatccccatttcacttgttaaatattgtagcatgcacaaacgattttggatagtttga

SEQ ID NO: 230907 - DNA, 768 bp, Klebsiella pneumoniae
atggtaaaggttatttcaatatttttcttatattcatccataatattaccgactggtatttttttggctatcaatataaaaatactaagtgtttttttatttttattgtcattttgcatagaaaaaaaattctatgtgttttcgtcaataataaaaaacatgttgccggtgttgatttttatattgcttctcattttttattcattctttgtgaataacaatactgaacttgttttttttcaagcgagagatattattaccttttttgttgtttgtataataattaactcatattttaataattcagaaatgagtgacaaagcattatatcatatctcaaacgcattagttatttcagctataattaaattatttattattgcttattcggtcatgttttctgtgccaataatacaggctgttaaaagttatggagctttttttgaaacatctttaatgacatatgctgttgaggatagtgttataggtcgaattcagttcacttcagatagtgctataccttttattttattttattttattttattttattttattgattccttttttaaaggaaaaaatcaaaaacttccgtatgttaaaatcgcattcttgactatttccatctttttaggaatgtctcgattttactggggcgtgagtgcattttttgtatctatcgcttttctaagtaacattagagacaagaaatcatatataatggtcttggctattatattccggattatttgcgcagttatgatatga

SEQ ID NO: 230908 - DNA, 1473 bp, Klebsiella pneumoniae
atgtcgttaaaagaaaaaacgttaaatgccgtaaaatggaatttactttcaacaatcgtaactgtgtctttaggtatggtttctctttgggccttatcacacattctcgacgtagagcagtatggggttataagcgccgcgcttattataactaacttcattaatatgctattagactttgggatttcaaactctattgtacgtagtcagtcagttgagaaaatagagttagcatcattatcttttgtcaatatctgtatgggggtaatagcctttatattagtatttatatttagcggaaatatcgcagggatttttggtggatctgagaacctacgattacaggttgagataatatcctttggttttgtttttattgcatttggtttacaacccagagctttattgacaaaggatatggcgtttgatctgctttcaagaatctctattatggtatcaataactaatttcgttattgctatatctttggcttttatattccacaagtcgtggtgtgtagcgatagcatttctaactagttctattattggttcgttaagtacaagattctgtgcaaaaaatcttatgaattatgggaaaggattccagtttaaatcaataaaaaaacactttcgctatggcatccagcttgttatcgattctttgattaatcaaataagtataaatacatatcccgtgttaatgtctcgcttaataagtttcgcggcaatagggggttataatatttcttacagtataagtattgcgttatttgaaagacttaaccctgttctttcccatgcgcttttccctgcgttttcaaaaataggtaatgatgagtcgaagctgcaatcatcctttcttaaggtgacagttttttcctcgatgataaatttcccaatgttaattggtatgatgcttgcctctacgaatgtagtcagtatcttttttgatgaaaagtgggcatttattccccctattgtacaaattctttgtatcgttggtgttctccgctctttagaaactcctgttatatctgtattgttggttaaagctcaaatgtatcgtaatatttatttaggtatcggtaagcttttgatcgggataccgttggcttggtatttaggaactcgttttggagtaacaggaatagtatatggttttttgattattcaagtgataaatactattctaggatatttttatctgttgaagcctagtctgggtatttctgggttaacttatttaaaaaccataatgataccaactgttcatgttctgccaatggttgcaggtggcttaatcttaaataaaatggaaccaatagataatcaaattgctcatttgtttattctgattgtttcttgtttcgccttatatattgttactctatttatgtctccttctcatacagtcagagagtttaggttgacgatcattaataattttatgagcaaggcttttaaaaaatga

SEQ ID NO: 230909 - DNA, 948 bp, Klebsiella pneumoniae
atgaaattatctattattattccctgttataactgtgccgaaaggataaataaattattaatgcaaatttatccgcaggttgaagataatgataatgttgaggttattttagttaatgatggttccactgataatactaaagatgttatatcagctttcttgcaaaataatgattcgaataaattcttactgataaccacgcaaaataaaggtgctgccgctgccagagaaaaggggcttgaatttgctacaggcgaatatgtgtttttttgtgattctgatgacttgatttcacataaattcgttcaaaccatattaagtgtttgtgagacatgtgctgatgttatctattttagctctgagattatttctagtggtcaaaattatcacaaaattgctgataaggttttattcgaagataatattagttttacttcaccggatgattttttgttacatcagttaaagcatggatattggactgctgccgtatggacttatgtattcaagagaagcattgctgtttcacaacatataactttctcttctcgaagagcgcatgaggaccatctgttcactgcaaagattattttaaatgcaaaacaaataatttgcttaaaagatactttatattttcaaatcttaactttaggttcattaactaactctaaaaaaaatttaagatatatatccgaaagatatttgtcattcgttcaggctagggagctcctaaaagggaggtgcaaaaaaaagactatttttcattatgaaatatggtctctaagatctataatttcattgtttttagaaaatagaagtattcttttaaatgctatgttctcctatcctgtatggaaagctgcctttgcggaaaggacattaatatataaattcgcattttttatttttaaaaataagatatggcgtggtgtaaataacaatgactga

SEQ ID NO: 230910 - DNA, 843 bp, Klebsiella pneumoniae
atgactgaatctaaatctattattttgaatttaacaactacctgtggccgattagacttatgctctgcaacactttggtcactggttaatcaatcactggttcccgatcaaataaatttatggatatcaaaagaaccatatatggcagatgaagggatcaagacgctacctaattcaattattaaactaatagagtgtaatgatcgaattaaagtgcattatactgagaataccggcccttatcgtaaaattattccagcattaaggaattgtactgatgaggatatattggtttatgccgatgatgatgttatttattctaatctttggcttaaatacctcatcgactgctatttagaaaataaaagcgcatatgtagtttctggtcgattgcgtgaaatgaaaaaaaacattttgggcggttatcaaagttacactcgttttccattagtttcaaaaaaacaacttttccataaagactttattattactggtgtgggtggttgtgtccttgggaaaaaacatattgataagaaatatattgatttggaattatttaaaacaatagcgccaaaaacagatgacttatggattagtaaaattatcgaattgtctggtacgactgttattacttgccctagtgccttgagttgtatcatggaaattcaacatgacatacatgctttaaaccgagttaatacattttttaataaacaaaacatattctctaaagtgactggcattttcaaaagaggagtgtttggttactttggcatgcctttgtcaaataatgatcttatgataaaaaaaataaattgtttttttaaagggaacttgctctaa

SEQ ID NO: 230911 - DNA, 519 bp, Klebsiella pneumoniae
atgccttggaaaaatctagctcgtactgccatatattctagcaatgaaaaatcaccagatagtatctggaagacggtggacggtattgatattgaatttataggtgcttttcttacagcacatcttagtctagaaaaatatatcactgattatttgcgattgaaatatccaaatttatgttgggatgatgcaaggttaactttttcccagaaaatagcattgctccagaatgagcctgctaagccaccatacaatgagattttcattaaaattaaagacttcaataatattagaaataaaataagtcataatcttaactatcatttatgtgagaaggatatttctaagtttttagatttttacaaaaaaataaaagggggtgatgatcgtgaagattttattgataaagacaatccagcagagttagtcggtttttttgttatgataactcaggcctatcttgctagtggcataacctatttccattctaaggctaatgatgatggagtgaagaaataa

SEQ ID NO: 230912 - DNA, 690 bp, Klebsiella pneumoniae
atgatcattcattttactaataattttaatataattaaatcaattttaacttctcattcctttaagctaaggtattgcggagaatattttagtgataaagaaggaaagataatatcaaattctgctcacccaatggtttcttttagtgattatgacgactctgaactgaataaaaaacgcataacatatggtaaatatggagttgccctaagcaaaaaatgggctatagctaatggattaagtcctgtaaattatgttgaaaaaaactcccctgtagctgaagggttggtttctttacttaaagcacgtcaaaaaaatactataccagactcacttcgtttacctattatccaattaaaatgcttcactaaacatgtttacggatttaacagttattttgatgacccgaactttaactttaaatcagaaaacgaatggcgatttgttccaagcttgaagcaaatagacaaaaaccgtatatctgaaaacttttcaacttataaaaaaaacaaagataaatacaataagcgcctagaaaaatacccattacgatttactaatgatgatgtagttttcatttatgtcacatcagaaattgagcgaaatgaagttattagaatgacatccctcccttctagccaagtaaaaataagcacatgggaatataaaccatataaaaaaacattctaa

SEQ ID NO: 230913 - DNA, 687 bp, Klebsiella pneumoniae
atgtctagagtagtaacaaaagatgattgccttgctgaaataaaacgttttcttaaatattactttcatttttgcaaaagtccagatccagactctgttcgtgaagtacttgcatccgcctacagtattaatgacaagtttcgtaaagctggttatcaggatttttttgatgataataatttcttggccattaaagcaatacgtaattatgcaattcatcaatctgaaatatataatgaagccaaatcattaccattaatttctaaagaacctattcaggcagatctcagtatactatgcctgctacccttggaagtcatttctagaatcactgcaagtgttagtgtcgcaagtcaatcagcaataaaaaaaacttgtgttttctataaaaaatatgtcgacatctatccttgtatatttaatttcggcgtaactcttttcctttacactgaagaaaatgggttaggggttgattctttagaatatgaaaactttaaaaattcaattaactatgaaagaattaacaatttaccacatcacataaatggtggttttactttacccagtgggcgtgatatagatgaattcatcgataacaatctaactcttttaaaagaaagggataggttgttagatgaatattacgaagaagaaaatggaatgtatacatttaaagggaagatataa

SEQ ID NO: 230914 - DNA, 3918 bp, Klebsiella pneumoniae
ttggaaataaaaatttgggaaggcggattacaagcacaagaactgaatgctattgaaaaaataaaattgaccttttgcccaccaccgccaaaactgcctaaccaaggcaagtcaatgcaagggcaattacgtaacatatcaggttctagcatgtttccttggaaaggatatgctggctttcgatttgtagatgtgaatagtggatacgaaggtgaattcgacttagtgattgttactcattgcaatgtgctaattatcgaattgaaagattggaacaatggaaaggttacttcctgcaaggataactggtacaagaactctcgcttaatggggcgttctccagtaagcattacacgcaacaaaaagtttttattagataataaaattaaacgtgaaagacatcgatttactaataaagactttcctccttcagttgagtttcttattgtcatgactggtaatgcggatttctcacaattaccagatcatgagcgacttcatacactaagtttagatgattttctttcattatccgacaggaaaattttccaaaataaattcaggccacatccagccgcacaagtattaaacaaagattttcatgtgtttgacgatttattcaatattaatgcaacggcacctaaaccaattagtgttggtgggtatagatcaagcacattaatatttgatgaacacccaacaaagctttatcgagagttcttagctatttcagaagtatctaaacaagatgaggctctgttgagagtatgggactttagtaaatttcgcggagttaaaggaggcacaccagaaggacggtatagtattgtctctcgtgagcgtgaagttcttggttatattaaacaccaaaaccatgatctctacaaacactgtttacgttctttaactagtatacagaaagaagatataacaactgagttcaatgaaatatttgagcttcccccaagccataatcgttttaatgaatttattgggaaattcggactgaacttttcagatgccgatcgtattaatttagttaagctattgatatcgaaatttgctgatttgcatagaataaaaatagcgcatagggatcttgcagatcatagtttatggatttcccctggtaaagaaattgctttatctaattttatctcggcatatcaccaacccatcggtacagttggtgactacaggagccagttgtcagttattggtacaaaacccgataatgaactaactccatttcaagaagatgttaaatccattggtattatttgctggcatatactatctaatttgagaatgtctgagattagtttggaagaaatgcaggagaaactctctgcatccacattttggtatagtgaacttttaatcaatgccatcaatggaaaatattattgtgacgcaggagagctttttgatgctttaaaatcaatagagccaaaacttgataactgctttgatttcgatgattctgaattagagccatttaaaagaactataaattactcgaggcagtataaagatgatgagtttatagttgaaacagatgagaaggaagtctatatctcaggcgatctcatagttaaagcttggctcaatataaatcctactaatgatgagccattactgggctcaaaaatattacactttctcaaacgtattgaacgcattgcatccataaaccctccttatataccttgcattagagaatatggcatagcgacaaaatcagctagcctctttcttgttactgacaaatgcactggggatttttttgatactgtgcagggtacgcaggatgaaaaaataattattatcaataagttgatagctgcaattgaacaccttcatggattgggaatttatcatggtgatttaaaccctaaaaatatcctagtgaatggcgaaggcagtgaatttgaaatcattattattgatattcctgatttttgtttagatggtaatgaacctaaaagccctcgctattgtccagaacaatttgacagttgcactggatttgaaagagataactttgcagttatgaggttaagctgtgaattactcggtatcgagtggggaggtaattctgaatactttaccgagctagctgattgtgtatcaaatgaattacaagaccgtgacgctgggttcaaagatttactgcgttttaaacaagctttatcatccactaaggataataaaaactctatagtcgaaataactgcaaaagaagtttttgaagatttaataatttatccagataatggagaactatacgttcacgttgagaaaagtaacacaaatagcactgatgttcttattactttcattggacttggcgggcaagttaaaactatttaccgaactaccgaaaaggctttcatcgtttgttttcgaccaaatgttagagataacccacgtaaatcagatattgaaaaatgtcagttagtcctagatttctctattcatatacaatctggcccagtaatggaactatccggattgtccaaagagctttctactaatgaagcctttttaagaacggtagatacagtttacaatcaggatgaagaaccaaagattgatggtttaactgaacaattaaaagaagcttttagaaaattagatcatggcaataataaagataacattctctctatttctaccgctaaactctggaaagcaatattagaaaccgagactgaagcatatccatatatcgagatagtggggggggtagtatctgttgaagataatgacaacgaaattattttgccatactcttcagatgtagatgccctgggagggtttgcaaaaactgatatcgtagaagctttacaaactaaaggggatgaagaagttagattaggtgaagtcatactaaaacaaagtgcactcaatgaaattcgcttacataaacttagttttaaagccaaacatttagaagatggcgaacaagttttctttagaaccaaagcagataaagcttcatatattaagagaaaaacagcacttcaaagaatattagatcgtgaaagtgttataagtaatttatctcagtattttgatcctgactgtaatattgatgctactcaatataatattgaagttacagatacggatttttcacgatacgatcgacaagatgatcatggaaataatataatccttaatcagcaacagcgtaatgctttttcaaaattactaaacaatggcccattatccttactacaaggacctcctggaactggaaaaacagagttcattgctgcttttgttcattatcttattgaaaagcagaaatccaaaagtatcttattagttagccaatcacacgaagcagttaatactgctgctgaacggatcagaaagcactgtatacgcttagggacacctttaaatattgtgaggtttagcaatcgcgaaggggctgtatcaacaggacttaaagatgtttactcaaatgctataattgcagaaaaaagagaactttttagagcagagtttaaatatcgagtagaattcttagcccaagcattaggattacagcctgagttcatttcctctatagttgaagctgaactttttctatttaaacaaatcgaaaatttgagtaagtgctttgatgctatacaaaatcaagagctagaaaaagacgagcaacaccagttgaaattgaatattgcatctcttgatgcgagtatacgaaaatccttatctcaagtttattttctagattacccagcagataaagatataagaatggcgaaacgtgaagtcattaatcatttatgctcacgatactcagttcgccctgatgaggcaagaaaagcgactgctttggctactgtatcacgtgacatgatagatgttttagaaacagaactgacctgcccccacgattag

SEQ ID NO: 230915 - DNA, 1068 bp, Klebsiella pneumoniae
atggaaggtcattcagacaaaacgctaaaggcactggataaaaaaacagcatggttaaaaaataatcctagagctttccacttttatctcttccgggcgtgctcactaatctcggaacaattagaaaaagatatcctctctgaggatgactgccccccaccttttccccttgaggaaagatataatgctttcaacagaactatatccaccagtcaatatactcagccttcccgagatattatgccgtggtcgcaggctcttcctgctgagttagtggacactattgataaacaatccagtactattgatgctaaaaataaaacttcttcctccgcattctcgtcaccggagaaaataaaccttagtacctgtaaacagggtaagaaagaaaagaccgacaaacttccacctgaaaatatcagaaatgcaaacgggttactttttaaaagaattaaggatgtctcagagagaaacgttggcttttctttattcgtacacctgttgataaccttcgtaaaaaagcctcaaaaaatatcaaatttaatctcatctatagatatcgaatggcgtcaccagtacgccctttacccagcacctttttcatgggttaacagcaaagatgaaactcaatgccagtggttatggcaacaaatgcaggaacgatgcttaggcattccattaaaaccacatgataataaagagaaatattattttatctttgctatttttgataactggaaaggatggactaccgagcaggaatcttatcttaacggcaaaaataaaaggcgtaataaaggaaagtttcttggacatggcatcatgccggaaaatggcatcaataaaaatcataaagatattcttcttgatgagcttaaaaatgcatgggagcaaaaggaaagaagagccagaagagctaaggaaccagctgctgtgaagttgaccaaagcggctcaaaaaaaacttgagtttattgcgcatgtagagaagaccacatcgaaggaaattcttaacgaactgattaacaatgcttttaatgatgcgaagagtcaatcacggcaatcataa

SEQ ID NO: 230916 - DNA, 513 bp, Klebsiella pneumoniae
atgatttcaatcgtcgtagccaaatccgccaatcacgtcatcggggtagacaatcaattaccgtggcgattgccgtccgatctgaagtggtttaaagaaacgaccactggtggggtagttgttatgggacgcaagacatttgaatccatcggtaagccattgccggatcgaatcaatgtgatcatttctaaacaaccagtgccgatcgaatgggcaagtaaggtagtttgggttaactcgatccagcaagcgatggactatgttcgcggtctggatgggatgatcaaaacatttattattggcgggagtgagatttatcgccaatttatctcattggtcgatcaggtgtatcttaccgaagtaggtgccgaaatagaaggcgacgcgacgtttcagccgttagacgaacatgaatggacgctcaaaacttggtgggtggttccagaccaatcatccaaagatcaattccgttaccaacgtaagctctacgtgaggaaggtgttagatgaatga

SEQ ID NO: 230917 - DNA, 840 bp, Klebsiella pneumoniae; identical to SEQ ID NO: 6027

SEQ ID NO: 230918 - DNA, 576 bp, Klebsiella pneumoniae; identical to SEQ ID NO: 10333

SEQ ID NO: 230919 - DNA, 2967 bp, Klebsiella pneumoniae; identical to SEQ ID NO: 59353

SEQ ID NO: 230920 - DNA, 990 bp, Klebsiella pneumoniae; identical to SEQ ID NO: 25157

SEQ ID NO: 230921 - DNA, 1179 bp, Klebsiella pneumoniae
atgaaaaagctatatttgaaccccctatacctctttggctacgcatttcttgcggccatgggtttgtatggtcttgggctttcagggctatatgttaacggtgactcaactttaactatcactttattgatactaagtcttctttcacttgttcttggctttatttttaattcaatatttggcaggagaatgagagcagacataaaagacgatcattataataagttgttggccccaaattatatgtttatgctgcttgggtttgctatagactgcgcggcaagtggagctgttccattaattagcatactgcgcggcgatgtttatgcatataaaaattttggcttgaagacgttccatgttttttatatggcctacatgtctgcgtttgcaatagtttcatttgagcgctatctgtcaacaaggttgaagaagttcctgctaccggcaatcacgggtattgcgataacagttcttattgttagtcgtggatctacaatgcttttgattattcctatggcacttctctacctatcgcaaaagaatgtttctaagaagcgaaatggaattaagaaaaacgtcattgtcataactgctgcgctgatattcattattggctttggttatataggtgataaacgaatgattgcttcgggctataagagcgaaacagcaatcatggagattgggcaggctaatgacatattctacgaccttccgtcagggttcttttgggtctacctatatgcttcctcaccttatgctaacctcgcctcacaagagcggtataataatgtaaataagggggatgttggagacttcttttcatcttcgatactccctgatttcatcagtaaatatactgcaccatatgtattcagtaagtttcaacctaaaaggattaccgaagaactaactgtaggtaccggattcagttttgcattggtaagctttggaatagccggggtagtacttttgtatttatggatggtattcctttcgtttatattggcttgggctaacaggaaaatgtacattaactccatatgtgccgtcctatcatccactgcaatactaatgatattcgacaacatgtttatttttgggtcatgtgtattgcagatgcttatgttaacaatatttacaagagttaaacttgggagatactatttcatgtag

SEQ ID NO: 230922 - DNA, 363 bp, Klebsiella pneumoniae
atgaaaatgttaacggtgtttgatccggcgatgtgctgcagtaccggcgtttgtggttcggatgtcgatcaggttttggtcaatttttctgctgatgtgcaatggctgaaagggcgtggggttcagatcgaacgttataacctggcgcagcagcctatgagcttcgttgagaacgaaaaagcgaaagcattccttgaggcttctggagctgaagggcttccgctgctgttgcttgatggtgaaacggtgatggccgggcgatacccaaaacgcgctgaactggctcgctggtttggtataccgctggaaaaggtgggtttagcttccaccagttgctgtggtggtaaaacttcctgttgttga

SEQ ID NO: 230923 - DNA, 1752 bp, Klebsiella pneumoniae; identical to SEQ ID NO: 26691

SEQ ID NO: 230924 - DNA, 426 bp, Klebsiella pneumoniae
atgagcaacatcaccatttatcacaacccagcctgcggcacgtcgcgtaatacgctggagatgatccgcaacagcggtatcgagccgaccgttattctttaccttgagactccaccttcacgcgatgagctgctcaaactcattgcggatatgggcatttccgtccgggcgttgctgcgtaagaacgtcgagccgtatgaggaactgggtcttgcagaagataaatttactgacgaccagctcatcgactttatgctacagcatccgattctgatcaaccgtccgatcgtagtgacgccactgggaactaaactttgccgtccttcagaggttgttctcgatatccttccagatgcccagaaagcggctttcaccaaggaagacggtgaaaaagtcgttgatgattcaggtaaaagactgaaataa

SEQ ID NO: 230925 - DNA, 276 bp, Klebsiella pneumoniae; identical to SEQ ID NO: 171876

SEQ ID NO: 230926 - DNA, 561 bp, Klebsiella pneumoniae
gtgaaaaaaatgaaccgtacgctccgcagatgttgtctgtccgggcttatcagcctgtctttgtttgcaccttttccggttgtgtatgccgacagcatcgagacgggatattcgccggaaggaacggctctgcagctggtcctgaagactattaattctgcacagcaggaaatccggctgatgggctattcctttacctcacccgaagtcgccggcgtgcttgtcagggcaaagcggcgtggcgtcgatgtgaaagtgggtctggactggaaagccaataccggcaagcaaaaccaggcgagtctggcggccatgaatcttctggtcaatgccggcatcccggttcgcacagtgtcgcagtacaaaattatgcatgacaaagtcatcattgctgatggccgcaatattgaagtcgggtcttttaactacacccgctccgccgatcgggtcaattcagagaacgtgctagtcgtgtgggatgttccagtcgttgctcaacgctatctgcagcactggtcgacccgctggtcgcagggaacggactggaaacgggcttattaa

SEQ ID NO: 230927 - DNA, 1428 bp, Klebsiella pneumoniae; identical to SEQ ID NO: 221897

SEQ ID NO: 230928 - DNA, 330 bp, Klebsiella pneumoniae; identical to SEQ ID NO: 34921

SEQ ID NO: 230929 - DNA, 1047 bp, Klebsiella pneumoniae
atgttgatgcagcatatcggtgtcggctattttgggtattaccgagcaactgcttatgcgatgaaacactctcttatgcccgagattgcgaagttaagaatgaaggctctgaacttctgggataagcacgggatccgtgccgcagctgatgcttttgacgtatcaacgcgaacactctactggtggcgccggttactgcgcaccggtggtccagaagcactaattccaagaagcaaagcccctctggttcgccgttcaaggcactggcatcctgatgtactcaaggagatcaggcgtctgagaactgagttacccaatctcggcaaagagcagatttttgtcaggctgaaaccatggtgtgaagcgcggcattttacctgtcccagcacgtcaaccattggaagaatcattgctggtgctcacgataaaatgcggatgatccccgtacgcctcagcgccaggggcaaagcccggttgataaaaaaacgctcagtgaagcccagaagaccaaaacaataccgcccggtaaaaacaggcgaactcatagggatggacgcgattgaactcaggatgggggacctacgccgctatatcattaccatgatcgacgagcacagcgactatgcgctggccctggcggtcccttcactcaacagcgatattaccagccatttcttcagcaaggccacaaagctctttcctgtcgctatcagacaagttgtcactgacaacggtaaggagttcctcggtaactttgataaaacgctacaggaagcctcgattaaacacatctggacctatccgtacacaccgaaaatgaatgcgacctgtgagcgatttaaccggacacttagagaacaatttattgaattcaatgaattgttgctttttgaggacctgaatttgtttaatcaaagaatggctgaatatctggtgctgtataacagcaaaaggccacataaatcactcgaactgatgacgccagtggactatattttacgtgagagtaaaaattgcaatatgtggtggacccatacactgccttag

SEQ ID NO: 230930 - DNA, 255 bp, Klebsiella pneumoniae
atgataagtttatcaccaccgactatttgcaacagtgcctttgaaaccaacctgcgccgtgaacgccagttggaaggtatcgctgccgcaaaagcccgcggggtttatcaggggcgcaaaccgcgcatcgatcctgttgaggtccgtcggttgtacgttgaagagaaaatgggcgcaacggcgatttctcgccaactggggatcggtcgagcctcggtctatcgtgtgctggaccgcgatgagcagccggcgtaa

SEQ ID NO: 230931 - DNA, 453 bp, Klebsiella pneumoniae
atgcagcttctgttcgtcagttctgagtccactttcacctattttgaagccacccggggctatctggagcgttacggtaagcctctggcgttctacagcgacaaggccagtgtcttcaggagcaacaacaagcaggccaatggcggagatggccagacgcagtttgaccgtgccatgaacgagctgaacatcactggtatctgtgccaataccagttctgccaagggccgttttgagcgggctcacctgacgttgcaggatcgcctcgtcaaggagctgcggcttcgcggtatcagtacacccgaggcagcaaacgcctttgccgaagagttcatggctgactacaaccgccggtttgcgaagcccccacccgatgatttcgatgttcaccgcccgctcgagaatgataaaaacctctatctgcctgaaggcaatgaagaaaatcgacgttga

SEQ ID NO: 230932 - DNA, 834 bp, Klebsiella pneumoniae
ttgctcgattctctgggatatcctgcgacattgcgccgtcgactaaacaatggggccttgccggtaaagctgccgctgattgaggataccatctggctacgatctgttgtgtgctggcacacctggctcagttatgaacaaaacagcatacgttacctccgtcccggccacgacggtgattatgactacctaaaactccacatcccgcaactggccgggctggtcagctgcgagattacagaaaattatctctgtgatatttctgaaatcggtgggatgagctgttcgaggaatagtgacaggcagtgcagcagcctggaggattttgcactgcagtgctgccgggaactgaccatcccagtgagtggtgatcatctggacaacaatctgtcacattcccaactacggttgaatgagatggaattcagcaaattctcctggatgccggcacggatatactggaacaacctgggtggttcacatcattttgctgctgcccggctccaggctagccaactgggtcagagggttcctctgacaggacgactaacctcctactggattaatccgcaaaatgtgaggctgctgacgtcgaaatgggaccttttcctgatatcggataacgtggtttatggtgaatttaaagatgcgctggcgcgactcaaatgcccgtttggcgtatcccatccccctcgatgggaagatggggaagagcaacgtttccggattatatggctggaacgtaatcaaacgatcccgtcgcgcgtatcgcgaaccctggcgcaggcgggatttccatcagtaggtcagctgctgctcaaaccggagccctga

SEQ ID NO: 230933 - DNA, 603 bp, Klebsiella pneumoniae; identical to SEQ ID NO: 25057

SEQ ID NO: 230934 - DNA, 453 bp, Klebsiella pneumoniae; identical to SEQ ID NO: 34917

SEQ ID NO: 230935 - DNA, 273 bp, Klebsiella pneumoniae; identical to SEQ ID NO: 34916

SEQ ID NO: 230936 - DNA, 435 bp, Klebsiella pneumoniae
atggaaaaaaatttggagaatctgactattggcgttttcgccaaggcggccggggtcaacgtggaaacaatccggttctatcagcgcaagggcttgttgccggagccggacaagccctatggcagcatccgccgctatggcgaggcggatgtgacgcgggtgcgcttcgtgaaatcagcccagcggctcggattcagcctcgacgagatcgcagagctgctgaggctggatgacggcacccactgcgaggaagccagcagcctggccgagcacaagcttcaggacgtgcgcgaaaaaatgaccgacctggcgcgcatggaaaccgtgctatccgaacttgtgttcgcctgccatgcgcggcaagggaacgtttcttgcccgctgattgcttcgctgcaaggggagaaagagccgcgtggtgccgacgcggtgtag

SEQ ID NO: 230937 - DNA, 351 bp, Klebsiella pneumoniae
atgtctgaacctcaaaacgggcgcggggcgctcttcactggcgggctagccgccatcctcgcctcggcttgctgcctggggccgctggttctgatcgccctggggttcagcggcgcttggatcggcaacttgacggtgttggaaccttatcgcccgatcttcatcggcgcggcgttggtggcgctgtttttcgcctggcggcgcatctaccgaccggcgcaagcctgcaaaccaggggatgtgtgtgcgattccccaagtgcgcgctacttacaagctcattttctgggtcgtggccgcgctggttctggtcgcgctcggatttccctacgtcatgccatttttctattaa

SEQ ID NO: 230938 - DNA, 276 bp, Klebsiella pneumoniae; identical to SEQ ID NO: 25152

SEQ ID NO: 230939 - DNA, 1686 bp, Klebsiella pneumoniae; identical to SEQ ID NO: 25153

SEQ ID NO: 230940 - DNA, 639 bp, Klebsiella pneumoniae; identical to SEQ ID NO: 25154

SEQ ID NO: 230941 - DNA, 2487 bp, Klebsiella pneumoniae
atgaagcagaggtcaatctgcccgggaagattaagcacggctattgcggttgcgctgtgctgctttccgccattttccagcggacaggaaaacccgggaacgatctatcaatttaacgatggttttatcgtcggcagtcgcgaaaaggtcgacctgtcgcgcttctcgaccagcgctatcagcgagggcgtctactcccttgatgtctataccaacggcgaatggaaagggcgctacgacctgaaaatcaccgccggtaaagacggcaaaatgggcgtctgctataccaaagcgatgctgatgcagtatgggatttcgccggaaaaattaaatccgcagctcagcgaaaaagagggcttctgcggacgcctgcaggagtggcgtcacgaagataacgtcaaagacacgctgattcagtcctccctgagactggatattgccgtaccgcaaatctacgaagatcagcgcctgaaaaactttgtcagcccgcaattctgggataaaggcgttgcggcgctgaatttaggctggatggccaacgcctggaacagccatatctcctcggccaacggttccgataacagcagcgcgtatcttggcgttaacgcgggcctgtcgtgggacggctggctgctcaagcatatcggtaacctgaactggcagcagcagcaggggaaagcgcactggaacagcaaccagacctatctgcagcggccgattccgcagattaactcgatagtcagcggcgggcagatttttaccaacggcgagttctttgacaccatcggcctgcgcggggttaacctggcgaccgatgacaatatgtttcccgacggcatgcgctcctacgcccctgaaattcgcggcgtggcgcaaagcaacgccctggtgacggtgcgccagggcagcaatattatctatcagaccacggtgccgccggggccgtttaccctgcaggatgtctatccttccggctacggtagcgaccttgaagtgtcggttaaagagggcgatggttcggtcgaggtattcagcgtaccttacgcctcggtagcgcagctgctgcgtccggggatgacccgctacgcgctctccgccggtaaagtcgacgatagttcgctgcgtaataaaccgatgctctaccagggaacctggcagcatggtttaaataacctgtttaccggctataccggcgtcaccggatttgatgactatcaggcgttcctgctggggaccgggatgaacaccggcatcggcgcgctctccttcgacgtgactcactcgcggctgaagagcgatacccttgacgagcacggtcaaagctatcgcgccacctttaaccgcatgtttaccgaaacccagaccagcatcgtgctggcggcgtatcgctactccaccaaaggctactacaacctgaacgacgccctctacgccgtcgatcaggagaagaactacaacagcaactacaccgtgtggcgccagaaaaacgggatgacctttaccgtcaaccagaacctgccggacggctggggcggtttttatctgagcggtcgggtggcggattactggaaccgttcggggacggaaaagcagtatcagtttagttacaacaacatgtacggtcggctctcgtggtcggtcagcgcccagcgcgtctataccccggatagttccggccaccgccgcgacgatcgcgtgtctctcaactttagctacccgctgtggttcggtgaaaaccgcaccgctaacctgacatcgaataccgcgtttaacaattcgcgtttcgccagctcgcagattggcgtcaacggttcgctggatagcgaaaacaaccttaactacggcgtgtcgacgaccaccgccactggcggccagcacgatgtggcgctgaacggcagttaccgtaccccgtggacgacgctgaacggcagctatagccagggcgaaggctatcgccagagcggcgtgggcgccagcgggacgctaatcgcgcatcagcacggcgtcgtattctcgccggaaaccggcactactatggcgctgatcgaagcgaaagatgccgcgggcgcgatgttgcccggttcgccgggtacccgcatcgacagcaacggctacgccattctgccgtatctgcggccttaccggataaattccgttgaaattgacccgaaaggcagcaatgacgatgtcgccttcggcagtaccgtggcgcaggtggtgccgtgggaagggagcgtggtcaaggtctccttcgataccacgctgcagaacaacatcactctgcgggcgcgccaggctaatggcctgccgttaccgtttgccgccacgatattcggtccgtccgggaaagagatcggcgtggtggggcagggcagcatgatgtttatcagcgacgccagcgcgccgaaggccacggttaagtggagcggcggacagtgctcggtggaattaagtcaggaaaaaacaaaggaaacgctatgtcgctaa

SEQ ID NO: 230942 - DNA, 975 bp, Klebsiella pneumoniae
atgtcgctaatgaaaaaactgacgctttttattggcttaatggcgctggggacaacgtcagcatgggcatcatgttggcaatctaatagtgcctatgaaattaatatggctatggggcgcgtggttgttagcccggacttaccagtagggagtgtcattgcaactaaaacatggccaatgccggataataatacgatttatattacatgtgatagaattactactctgaaattagatgcgaaagttgttgctgctggtttggttcagggggccaataaagtctattcaactgcaattcctggaattggtttacgtttctcacgtaaaggggagatcagtatgatctaccctgatagttataccacgacaggttcctcctttagactcgcaggttcaacattcacattagatataattaagaccagtaccacaacagggagtggaaccatagccagtgggccgtatacagagtacggaccaggatttacaatccttaaaaccagccttaatgctgatgccattacaattgtttcaccttcttgtaccattttaggtggcaaaaatatgaatgtcgatataggcacgattaaacgagctgatttaaaaggggtggggacctgggctggcggtacaccatttgatattaaactggagtgtagtgggggagtcagtgtcagtggttatgcaaatattaacacctcattttctggaacattagctacaaatacatcagcgaatcaaggtgttctactaaacgaaaagaccggaaattctgctgctaagggcgttggtgtgcaggttataaaggacaacactcctctggaattcaacaaaaaatataatattggtacattacaaaaccaggaaactcgttatatcaccctgcctctccatgcgcgcttctatcaatatgcgccgactaccagtaccggtgaagtggagtcgcacctggtctttaacctgacgtacgattaa

SEQ ID NO: 230943 - DNA, 960 bp, Klebsiella pneumoniae
atgaaaaccgccactgcgccgttaccaccgctgcgttcggtcaaggttctggaccagttgcgtgagcgcatacgctacttgcattacagcttaccaaccgaacaggcttatgtccactgggttcgtgccttcatccgtttccacggtgtgcgtcacccggcaaccttgggcagcagcgaagtcgaggcatttctgtcctggctggcgaacgagcgcaaggtttcggtctccacgcatcgtcaggcattggcggccttgctgttcttctacggcaaggtgctgtgcacggatctgccctggcttcaggagatcggaagacctcggccgtcgcggcgcttgccggtggtgctgaccccggatgaagtggttcgcatcctcggttttctggaaggcgagcatcgtttgttcgcccagcttctgtatggaacgggcatgcggatcagtgagggtttgcaactgcgggtcaaggatctggatttcgatcacggcacgatcatcgtgcgggagggcaagggctccaaggatcgggccttgatgttacccgagagcttggcacccagcctgcgcgagcagctgtcgcgtgcacgggcatggtggctgaaggaccaggccgagggccgcagcggcgttgcgcttcccgacgcccttgagcggaagtatccgcgcgccgggcattcctggccgtggttctgggtttttgcgcagcacacgcattcgaccgatccacggagcggtgtcgtgcgtcgccatcacatgtatgaccagacctttcagcgcgccttcaaacgtgccgtagaaggcactgttgcaaagttagcgatgaggcagccttttgtcttattcaaaggccttacatttcaaaaactctgcttaccaggcgcatttcgcccaggggatcaccataataaaatgctgaggcctggcctttgcgtagtgcacgcatcacctcaatacctttga

SEQ ID NO: 230944 - DNA, 2106 bp, Klebsiella pneumoniae
atgctgatcctggacatcgcccgtgaggcaaagaaaacggggcagaaaaagcggctcaggacgctgaaagatctcgatcgggcagcactactgctggcgcgggcctgtgcgcttctgcttgacgaaaatactgatgagagtgcgttgcgaaagaccatattcaaaagcgtgccggtcgcaaggattgcggagtctgttgataaagttaatgagctggcccgcccgcataatacaaattttcaggatgaaatggtggagcagtacggccgggtgaagcgcttccttcctgcgcttctgcgcgacctgcacttttgtgctgctcctgacggtgagcataccctggctgctgtccattaccttaccgaactgaacggttcgaaaaaacgcatactggacgatgcgcctgaacacatcatcaccggcccctggaaacgtctggtctatgatactgatggccgtatacaacgcgccggctactcactgtgcctgctggaacgtcttcaggatgcactgcgtcgtcgtgatatctggctggaaaacagcgaccgctggggcgatccgcgccggaagctgcttcagggcagggaatggcaggctcagcgtgtggccgtctgtcgtgcgctgggacaccccactgacggcagaaaagcggtacaacagctggcagcgcaactggatgagacctggaaaacggtatcgcgtcgctttgactgtaatgatgccgtgagcatctgtcataacggtaagtatccttccctgactgtcagcagcctggaaaaactcgatgagccgcctgcgctgacacagctgagcagccgggtgaaacagcttctcccgcccgtggatttaaccgaactgctgctcgaaatcgacgccagaaccggttttacccgtgagtttacgcacgtcagtgaatcagaagccagagcaaaggatcttcacgtcagcctgtgtgccgttctgctggccgaggcctgtaatatcgggcatgagccactgataaaacacaatataccggcactgacccgccaccggctcagctgggtgaaacagaattacctccgggcagaaacactggtcagcgccaatgcccggctggttgattttcagtccacgctggagcttgccggccactggggcggtggcgaggtggcttcagctgacggcatgcgctttgtcacgccggtgaaaacgctcaacgccggaccgaacaaaaaatattttggttcagggcgtggcatcacctggtacaacttcatttcagatcagtacaccgggttccacggtattgtcattcccggcacattacgcgactccatttttgtgctggaaggtcttctggaacagcagacagggctgaatccggtcgaaattatgacagacacggccggtgccagtgacatcatttttggcctgttctggctgctgggatatcagttttctccccggctggctgatgccggtgaagccgtattctggcggatcgacaaaaacgcccattacggcgcactagatgaactggcaagaggatgcgtggagttaaccaggattgaaaaccactgggatgaaatgatgcgggcatccggttccctgaaactgggcaccatccacgcatcggagcttatccgttctctgctcagaagtacccgcccgtcagggctggcgcaggcgatcatggaggtcgggcgggtcaacaagacattgtacctgcttaattatatcgatgatgaggattatcgccgccgtattctgacgcaactgaaccggggagaaggccgtcatgctgtggccagagccatctgttacggtcagcgcggtgagatcaggaagcgttaccgcgaggggcaggaagaccagctgggcgcgctgggtctggtcactaacgccgtggtgctgtggaactcactctatatgcaggaagcactttcgcatataaggacaaccacgggcgaaacaccggatgatgaacatattgcccggctgtcaccgttgatgcacgggcatatcaatatgctggggcattacacattcacgctgccggaggatattctgaagggagagcttcgccctttaaatattaatataaacaatgaagtatcttcttaa

SEQ ID NO: 230945 - DNA, 597 bp, Klebsiella pneumoniae
atgaataactcgttgatggcgacagggtcgtcggtgctggaacagcgagccgccaaagcgtgcgccgtcatcagtgaattatccgtccctctgcgcgacctgtggaacccgtggaaatgcccggcaagttttttgccatatctggcatgggcattttctgttgatagctgggatgaaagctggagtgaacaggaaaagcgaacggttatcagcgagtcgttccggctccatcagcacaaagggacgatagccgcaatacgccgggtggttgaaaaaatgggctattcattctctatcgctgaatggtgggaagtggctgacccggcaggaacattccggcttgaagtcaatgtaaatgatattggtatcacatcccggatgctggatgaactgacacggttgattaacgatgcaaagcctgtaagtcgacaccttgcgcaattcaatatatccacaaaagtgcgtggagatattcacgtcggctcaacactgtgcagcggcgatattatcagtatttatcccgtcgactttgaggcggacgaaaacattacttataacggcgtggttttccacgacggcaattttaattacgggtaa

SEQ ID NO: 230946 - DNA, 1776 bp, Klebsiella pneumoniae
atgaccagactgccagaatcctcatcgtgggaagaagagatcgagcttatttccagaaacgagcgcgtttccggagggctggacggtgttgcgaacaggccactaaaaagcctggctaaccgtacgcgctacctgaaggagttggctgaagcatcaggcgagcttgtcgctgaaaaagtcagtgcggtaaaaaccttcacagaaggtgcaacgctggagtcgccacgcgaagaaatcctgcacggcagttatcgccttgtgtggacaggggggtttccaaaggttgtccctgtggcatcatccccggaaaccaccggaggggtggggccggggcgctgggcatacacatcagatgccgctatccgatcaagtctgagagaaagagaaggcgcgaacctgtcaggcttccgcgccagaaccgtctatgcccggctatcagataaagtaacgctgacagattatcccggagcagttgaaggcaaggataatgattcaacagcggcttttgttgcagcctatgctacggggcgttttgtctatgttccggctggtgaatggtttacccacacatatattcctaataagacatttggtgaaggccgcatctggtgtgatggggatggtttataccccgacgccggggaacgtgtcgttaatccgggaatttctcaccagcgcaattatctgtaccgtgctgagacctggggaaataaagagcgtgctgctggctggtcgttaatggtcaataatgaggatgggcgacctgccgtatccggctttaatgacaatacaatggctaattacgtcaacttcgaccagttggctctttttgtaagcatgcgcggcagcaggaagttcttttacacaactgcggctaacacaacatatacagagtttaccgtcaccgcccccgaaatcacttctgaacaggaagtaaaacccggcatgttgatttcgacttctcactccccccgctttaaggggagaattatgtcggttgattttaatacgaacaccattaccgtatcgaaatggattgcagagggtaatactgccgatggacaagttccgacaaacggcgtcagagcgcttatcaatggtgcggataagctgtgggcagccaacttcaatttatttattgacgcaaacagcccggcaaaaacagggtgcgggctggaaatagatattatttcagacggtacgcatggtaatcctgttgaaggatacaccgtatctaatgctaataatgcgggtaatccatttaactacggtttccgggcggtaggtaactggatttcaactgtctatgcgagttcgtcccaacaaaatgggctgactcacattgacccccctggggctgccgtcagggttcaaaacttaactaacccggactgggctggcgcagtcgtagttctggatacaaactacaagaagtcgggttcgtacttggcaaaaattgtgtcaggtggcgtacctcagttctcaattaattcgctaggctcaaggagtgtgcaaagagaatcttacggcgtggtcagcacaggaaccacaattacaggcttgtccgccagcgagatatcctgcacgaacgcaaatgacgtgaccatcacattaaatttgtcaacaacaagttttgttgccggacaggttttccatatcagggcgactggtggtccggttattgtcggcggctataccctgaatgatgctaacggcagatatattaaatttctgtttgatggggttagttttatcaaacgcttccagaccaattga

SEQ ID NO: 230947 - DNA, 201 bp, Klebsiella pneumoniae
atgaaagatcaatatttcattgaaggtaacagcgtgacctgcactgtctttaacgagagcggcgtgtcatttatggcaacaaaagaggctgatgcaggagatttactatctgctatgaaaatagctcttgagcaggcagagaagacgcgcgaagaatatgaaaataaaaaaaacttaataatgaatgccaaaataatctaa

SEQ ID NO: 230948 - DNA, 468 bp, Klebsiella pneumoniae
atgcaaaagcccaacagtctgcgaaaagccttaactgatgcggtgccggtgctgcgtatcaaccccgatatgctatgtctccgcctggatgacggcagcaatacggcgacacttgcgcgctccctgtcgttcgaaaagcgctacacacttaacgtcgtggtgacagatttcaccgacgatattgacctgctgtttgtgccggttatggcctggctgcgggtcaatcagccggacatcatgacgaccgacgaagggcgaaaaaagggcttcacctggtatgcagacataaacaatgacagcagcctcgatgtcagtatcagcctgctactgaccgagcgcacgctggtcaaagaggccgacggcgcgatgtacgttgagaacatcccggagccgccaccgccggagccggtgacacgccctgttgagatgtggagtaatggcgagcgggtgagtaaatgggatgaatga

SEQ ID NO: 230949 - DNA, 375 bp, Klebsiella pneumoniae
atgaccgccgacattgcgaagaaactgcgccagcggcaacagcagcgcattaaatcgcagaaagcgccggacggttcgccctttgccccgcgtaagcgccagcccgtcaggtccaagaaaggccggattaagcgcgagatgttcgcgaaactgcgaaccaaccgctatatgaaagcgagcgggaacgacagcgcggcggtagttgaatttaccgggaaagtgcagcgcatcgcccgcgtgcatcagctcggactcaaggataagccatcccctaaaagcgccgcagtcgagtacccgcagcgccagcttctcggctttactgaagatgaccggcagcttgtggaaagcgccattatcgactacctcgctaattga

SEQ ID NO: 230950 - DNA, 2445 bp, Klebsiella pneumoniae
ttgaacgataatactttccctgagttatttgatccttctcgttgcattctttttcttggagcaggtttctccgctgaatcaacaaacaagataaatactaaccctcctgtaggaaatgggttgaatatagaaattaagaaactagcaaaaatcccagaaaatgaaccatccgacttcacagattcggcagcatatgccatatcagaaaaacttgacctatttgaattactcgaaaatctttatactatcagagaaataaccgattcccagagaaaaatactatcccttccttggttaagaatatatacgacaaactatgataactcagtgtcagtttacaaagctgagagaaatgaaagcatagatatttttgacctaacagatcaaccaccgaagaaaattaagaaaggatcagttattcatttgcatggctctatagcgaagtgtgaccctgataatctcaatgagtctattgttttaacccgacgctcttacatagagcagagggtcaagaaatcaccttggtgggattggtttgatagagacattaaaatctcgcagtatgttttttttctagggtacgatataaatgactttgaacctgctagctatttgataaaatatcctgaaatggaacaaaggcgacacttcattttgagagatactcaaagtccgataattgcatcaaaattaaaagaatacggcttacgacattcatttgaacttaagggatttgtcgatagactgaatagagcaatagtttcaccaacaccatctcatgaaaacgaattaagatcctttatttatgttgatctttcaaaagacaacaagttaccctcaaaaccaacatcagctgaaattcaagaattactcgcatttgggagggttagatttgacgcaattagctctaccatgcctgaatcagaatatgttgtgtttagaaaaaaatcattaactgaatgcaataaagcattagaatacaataaaaccattattgttcacagtaagatagccaatggaaagtcaattgtaattaatgaattaaaggttttattatcgcagcagggtcgacgctgctttacattaagggataatatttcaccactcccccaagatcttgaatttttgtctggaattgacaaccctgtaatattcttccctaattacgatagtgcatttgagaacattcacttatttgaaggcttatctgagaatgcaaaattcgtggtagagattacatcaagcatcttgcaggttagaatgcaggaagttaaacggaagttactaggggatataaaaagagtagatgttgacagattagatgaaaatgatattctctacttgagagatcttcttaaaaaggctgggctgactactctttccgagacaataaaatcagttgacactttggaatttagagagttcttattaaaatcctatgaagaccctgaaattgcaaaacggctcaaaaaagttattgagccgttactcaattcttcttcggcaaaaagattgatatgtattagttcaatattaaaatttagcggtcagccattagatattggttttattcaagatgttacaggagaggatccatattctgtcctaagcgctttaggagacaaggtttttgagttaatgaattataatattgataaaatagagatgcattcatctattctttcagaacatatattaaaaaaacacattgaaacaaatgattttgtcgatattatatttaaactagcaggtgaggcagcacgcagaattgataatgagcatgacttcaactctgaacgattccgcagggcccgtgcacttctttcagcagttcttcgattcagttttcttgattttattattgggcaaaagcaatatagtaataaaaccattgaaaaactgtacgaactctgtcgccgtgattctttaattgagaaagagccgcttttttggcttcaatacagtatcttctggcagaacgctcctactcctagatgggatctggctgaatcccatatgattgaagcctacgcacgtagtgctgcgcgtaatggttttaagaccttccaacttgatacatattggcttggtttattatgcgatctagagagtttttattctgaaacaggacaaccagttactcgatttgataaattaacaagcatgatggaagtttgtagaaatatgattgatagtggaaatcataggtatcatgttttaaagtcattcttaaaattagagccgatgatttcgaagagaaaaaacgactttactgagtctcaatgtaaaaatatggtctatgttttaaatctcattgtgacgcaactagataatttatcagatatcgataaagccatgtggggaacagaaccatgtaagagaagccttctgaattgcgtgaatttattagatgtacgcaacaagattcatattgaaaaaacctaa

SEQ ID NO: 230951 - DNA, 351 bp, Klebsiella pneumoniae; identical to SEQ ID NO: 95258

SEQ ID NO: 230952 - DNA, 381 bp, Klebsiella pneumoniae
atggccggttttcagcgcatgcagcagcgcctcccgggaaaagtagaacgtcgccccaatctggcgcgatttcagaatgtcgcgaatacggtgctcaagcccggcgcggtgccagcggagctgatactcaaaagactctgcaaagaaaatctcttccagtttctcgatagcctcgtcgctgaaaaagttctttgtcggctttttgcggtcgcctttgttgcggttggccacgttgggattaaggtcaacctcgtttccggtctggccatagcgattaatgcgcgcaaagcgctccatctgccgggccagaaaatccgccaccttgaaatcgtggggcgtcaggttgggctttgcgtagagctgaatcagccgggcctctaa

SEQ ID NO: 230953 - DNA, 855 bp, Klebsiella pneumoniae
atggcaaaaaaagtttcaaaatggtttcgcatcggcgtcgaaggcgatacctgtgacggccgcgttatcagcgcgacggatattcaggaaatggcagagacctttgacccccgcgtctatggttgccgcattaacctcgaacacctgaaaggcatcctgccggatggcccgttcagccgttacggcgatgtggttgagctgaagtctgaaaagattgacgatgattcggtactgaaaggcaagctggcgctgttcgccaaaatcaccccgaccgatgacctgatcgcaatgaataaaaaattgcagaaggtctacacctcaatggaaattcagccgaatttcgccaatagcggtaaatgctacctggtcggtctcgccgtgaccgatgacccggccagcctaggcaccgaatacctcgaattttgccggggtgccaaatttaaccccctcaaccgcttcaaagccgagccgggcaacctgatttccgtcgccactctcgccgagctggagtttgaagaccaggcggaaaatgtctttaccgccctgagcgacaaagtgaaagcgatcttcagccgcaaacaggccagcgatgacgcccgttttcaggatgtgcatgaagccgtgacgaccgtcagtgaacatgtgcaggaaaacctcacggccactgaacagcgtcttgccacgctggaaaatgcctttgcgaccctgaaaaaggacgtcaccacgaaggctgaccagaccagccaggcattcagccagttaaaaacgtcgctggataacaccgaaagcaccacgcagccacgccgcaagctctccaccggtggcggtggcgatgagctgctgaccgactgctaa

SEQ ID NO: 230954 - DNA, 171 bp, Klebsiella pneumoniae; identical to SEQ ID NO: 34003

SEQ ID NO: 230955 - DNA, 486 bp, Klebsiella pneumoniae; identical to SEQ ID NO: 99332

SEQ ID NO: 230956 - DNA, 1422 bp, Klebsiella pneumoniae
atgagtgagcaaattagattgagctatcatgaaattgattttcttgttcctgttcatcgatttaacatccagttttcatatgtaactaagcaaggcttatctttcatcagagaatttgtattacgtttagtacagcttgcacctatgaaaccttcacaaatagcaacttatatcggattaaataaggccgaagttgatgaagctatttctgatctcatggataagggagatctgcgttttaatacgcatgggagtgttgaacttacaccacaatctacaggatactttgatagtattggttcctcccctaagacttcatcaattcaggaaacgggttctacattgtcgttcgagttatgtggctttaattgcataggaaataagcgtacattcgatcgctggaagcaagggattgaattgcatgttgacaacaaactattatcttgctcagaaaatttagctaaagaaaaattccagaaagaattctataaatatctcgacaaaggctatctcaagggtgttagaactgaagggacggatcgcccaagcatatacacaatggatgcagtaaacaaattaacaaaagatgctcttagattgacttgcaaattctatgttgatgtagatggaagacctattgaacgagaggatttcgatctattagatgattcaacggatattcatgaaatgataacaaaaagcttaggtcataacaaaagatcatccaatatatcgatgatagctacagctatggcttactttgaagatacatggactaagaaagtttttaacgattactctatcaatccagcatcttttgctcttgcatccgctgaatctctagccgacttacaaaaacctaaaatactggcaggaccattatattccaattcaaattggagttttatatcaagtaaggtccaaaaatacattacaaatagaactacatcagaagacaaaaaagcaaagcaactagtatggttagctccgtctgatccttattgggggaaatcatcacgaatcattgactgtttaagtgagttagagaatctccagctgacaacaggtaaaaatcctgagagggtatttatacctaaattatatcttcctctatcaagtcctacagatagaaggacattaagcaaactggtttatgattttagagaaagtgctaatttaaactatggtgttgctgaaggatttatggatggtaatgtcgaagttctataccttgaagatgaatttattgttgttttctaccatattaatttccctgaaagcttacctgtcacattgccagtcggttttatagttgaggataaaaaaatcatcagaaaaatttccaaattagtcgaggagtatatagacagctcaagtactcatgataaaccgcataattttggtcttctaaaaaacctctag

SEQ ID NO: 230957 - DNA, 708 bp, Klebsiella pneumoniae
atggcccctcagattggtaatattgtttctgcaactttctataacggcgagcttgaaaatggggctcgttcaatccccgatatttataacgatgttccagcagcattacagagtattgttacttggattgatacctctaagttggggaagaaatgctatcacagcgaagataaaggtatcagtatctacaatcgtactgaagccgatatcatcatcaaattactaaaaaatatatcctgcaaaccagatttcattaactccttaaaggacatagtaaaaaaagatgaggctgcaataggtgtaatttgtatgtatggtgaacaaaaaagaattataaggcaaaaatttaatgagattgattggaatgatgatttcaaatcattggtgaaaattgatactgttgatagttatcaaggtaaagagaatagaatcataattctttctgtaacacgttctagttctgataaaaagcctaaatttttaaaaaaccccaatagaataaacgttgcaatatctcgagctatggatcgattaataatcgtgggttcaacacatatgtggacaggtgctaataaagatctcccactaggaaaagttcttagctttatatcagatcgttcatctgaagataagcaaaacttatatgagaaatcacaaaattatcgaatagttggtatcgagaaaaatcttgaagaggtatcaaaatga

SEQ ID NO: 230958 - DNA, 885 bp, Klebsiella pneumoniae; identical to SEQ ID NO: 48589

SEQ ID NO: 230959 - DNA, 1476 bp, Klebsiella pneumoniae; identical to SEQ ID NO: 48588

SEQ ID NO: 230960 - DNA, 1380 bp, Klebsiella pneumoniae
ttgttaatcgccttttatctttttttttatgggaggagggtattagccaaaaataatcctccagaccctaatatgtattctgcttcgcaacagagtagattggatagtgataaacatacggtaatcattgttgagtcttattctgaattacagatgcatatgccagaaagtgaaaaagatattgctatattaaagtcatttcatcggggatatggcaatggtggtggtgagtttattgcagttaaaggaggagctcgtgataatggtggtactatctgttctagaagtcttacaggtgagtttcattgggaaagaagattcattgattcattcgacgtgacttggtttggtgctaaaggtgatagtaatgaagaaagttcacgtatcaatacaatcgctatccagaatgctattaatgcagcttatgttataggcatggcggccgtaaaatttcctgtgtcatctggtttttattattgtgacgagttaactctgttgccaggtgtgtctcttattggcagtggaagaacaaaatctctttatggcgctactgtttatttaacgaacccaagtaattctgttgttacaaatacttttgaaggcctttggtgcaaaaaaacattgtttcgacttttctcaaagaataatgacaaatcttttataagtaatgtaaagtttataaatatgttagttgatggtactaatataaatgattcaggaaaaactagcggagatgctcttttaataaaaaatagtacatttgatgttcatttgaataatacctatatttggaactatctgggaagcgggtatgcctgtattgctgataatgttaataatcattatcttgctacaggagtgtttattaccatgcatcaagttaagatttttaactgtgggttcggtatttttattcaaggttctgccgcagactcttctgatttacatgcttcgtctttattacttgatcataatgataataatttatatatcaaactcggtcaaagagataaatttatgggagaacttcatgtttatataaatagcgcgaggtttgaatgggccaagtattattctatatataatgaaggtgggatagtccattttaatgggtggtcattagcgccgacttcaggagggaacaagcattatgttggagctaaaggaaagaccttttacgatggtcgattgtcaggacaatttgagcggaatgaaaatgatacttccgcccaatatatattttaccctggagttataatgacaggaactctagataatactctttatagcgtctcaccagtaattgaaaacacatgtaaatctgggcaactaaaagaaaaaaggcttaaggttaagtttagtttcaattggctttgttga

SEQ ID NO: 230961 - DNA, 2424 bp, Klebsiella pneumoniae
ttgggaagaaatgacctgcttattcgcaccttccctaaccggcaggaaaagatacgcgcaaatttaatggataatgccgactggggcgaagcgtataataatttgcacaagcaggtgaatgttaaatgggcatgggacagccagaaccttggtgaatcgctttacacgaattaccagtatgaaggcgtatttgttttgtctcccgccggggagacgcgttatagcgtcattgaaggaaatcttgtcagccagcctttcgagaaatggctcaaccggaacatcaccaaagaactttttaacgacctctcacaaagccagggtaaagccgtctcacgccttatgatgaccaacgggcaactcaccttactggcggcggcccggatcacgtcggaagacgatgaaagcatcacgccggtggcggaagatgcctcggtactgattttcgccgacgtgttaacgcccgttaaactggagaaaatgggcaacgaatacggcattcataatgcgcatacgttcggcagaatggagccacacctgaaagccgactaccgggaagctcagcttattttacccattgataatggcgatgttctgattgagtggcgaagcgacgatccgggcagagcgctgatgaaccgggagctgccgttaatcatcattctgatgttatcgaccattgcatttacctggttgatgcggcgtggtgcgttaatcaaagcgcaaattaatgacgaaaatgttttcctgcttgagcaaagccgacaagcgcttacggcaagtgaacgacgctttcgcgacgtcattgaagccaccaccgactggatttgggaagcggacagcgaggcacggctaacgtggttatccgaccgtttttccggcgttaccggtcatcattctgacgactggcttgggcggaacatgttggatttcatccacagcgacaaaatcctttttcatcactggctgctgaatccgcagacgagcagtaattacacgctcaaaaaggcccgctatttctcagctcagggccatcagcgttactgcaatgtggtggcgaagcgcgccattatggatgatggttctatgggctttcgcggtacggtgaccgatgtcactctggaagtggaggcgcaggagcgtgccgagtatttatcgcggcatgatgaattaaccggcctgccaaaccgggtcagaatgaaagagtttctggaaggtgagctgcgttctttacccgatccggatcatcccctggccatgatcagcctcgacctggataaattcaaaccggtaaatgatttattcggccacaatgcgggcgatgcgttactcaatgaagtcgccagccggttgcggtcctgtacccgtaaaatcgatctggttgcccggcagggcggagatgagtttatccttattctgccggatatttatgtgcgtaaagacatagagacgctctgccagcgcattgccagtgaaataagccggccttttatcgttaacggcaatgaagtgtatatcagcgtgagtatggggattgcactggcgcctcaggatgcaatgaacgcctgcgatctgattcggttctccgatatcgcattgtataaagcgaaaaataccggtcgcaataactgggtgttttacgaacccaacatgggcgagtacttaattcagcgccgggaaatggaaaaagagtttcgtgaagcgttatgcacagaccagtttcagctggtttatcagccccgttacgacattaaaacctcgcgtatcgctgctgtcgaagcactggttcgctggcagcatccgcgtctcggtttactgatgccggatcagttcatcccgcttgcggaagagacgggcctgatcgttgccatgagtgatgtggtgctggagaaagcctgtaaagatatggtgcatctctcgcccgatttggttatttcggtcaatatttcggcggtggagtttaatacccgtggcctggcgaaacgggtaaaggctgcgctgcaaaaatcggggcttaaaccgtcccggctggagttagaaattaccgaaaacgtgacgatttccaatccggatatcacgctggaaaccatgaagcagctgaaggatatcggcgtacgctttttgattgatgactttggaaccggctactcggcattaagctatctgaaacgcttcccgttcgacggaataaagctggataaatcttatgtgttcgccatggaggaatcggaaaacgccaaaatcatcgttgagaatattatcggccttggcaaagcctattcgctggctgtcaccgctgaaggcgtggaaacggcggagcagttgaaaaggcttaaacaatatcactgtgacgaggcgcaagggtatttcatcgggaagcctgtcgcgcttgatgcgttaaatttagacgtggcatttagtgtgtga

SEQ ID NO: 230962 - DNA, 348 bp, Klebsiella pneumoniae
atgacggcccgttacctcggcatgaaccgtgcgaccggcgagcgtatttcagacgtggaccatatcagccagagcatcggggatattctgcgcacgcccgtcggctcccgcgtcatgcgtcgtgagtacggctcgctgttgtcgcagatgattgaccagccccagaccccggcgcttgagctgcaaattatggcggcgtgctacatggcgatcctcaaatgggagccgcgtgtcaggctgaccggtatcactaccgcgcgccagtttgaagggcagatggtcgtcgaggtgaccggacaaatcaccgataccggcgagagcctttccttaaccattcctgtgagttga

SEQ ID NO: 230963 - DNA, 909 bp, Klebsiella pneumoniae
atggcagttatcgacctgagccagctccccgcgccagatgtggtggaaacgctggattttgaaaccatcctcgcagagcgtaaggctacgctggtttcgctctacccggaggatgagcaggaggcggtcgccagagcgctgacgctggagtcagagccactggtgaaatatctggaagagaatgcctaccgggaggtgattttacgccagcgtattaacgaggcggcacaggccggcatggtggcctacgccattaaaaacgacctcgaccagcttgccgcaaataataacgttgaacgcctggtcatcaccgccgcagacgacacccaaatcccgccggtggcggcggtcatggagtccgacagcgatttacgtcagcgcatcccggcggcctttgaaggcatgagcgttgccgggccagccggtgcctatgaatttcacgccatgagcgccgatggtcgtgtggcggatgcctcggcgaacagtcccgcccccgcagaagtcactgtcgcggtgttgtcgcgggaaggtgacggcacggcatcggatgatttgctgctggccgtcagtacggcgctgaatgatgagacggtacgcccggtcggtgaccgcctgacagtcgtctcggctgagattatcccttatgcggtcgacgccgtgctgtacgtgtaccccggtcctgcgactgagcccattctggccgccgccagaacgcagttaaccgcctatatcactgagcagcgtcgcctcggtcgtgacatccggatgtcagcgatatacgccgcgctgcatgtgcagggtgtccagcgcgttgaactgcttcagccacgggcggatgtggtgctcgataaaactcaggctgcgtactgcaccgacacccgcgtggtgattgggggctcggatgagtaa

SEQ ID NO: 230964 - DNA, 303 bp, Klebsiella pneumoniae; identical to SEQ ID NO: 183429

SEQ ID NO: 230965 - DNA, 282 bp, Klebsiella pneumoniae
ttgtggcgggaacagcagattgccggggggtttagcaagctggccgacgtgccggctgacgatctcgacggcgagagtgtgcgcgttttctattacctgcgcgccgtcacctcaatggcgaccgccacgctctatgagcgttatcgcggtgtggatgccagcgccaaaggtgacaagaaagctgacagcatcgataccactgtcgacgagctgtggcgggacatgcgctgggccgtatcccgcgtccaggacaaaccccgctgcatcgtgagccaaatctga

SEQ ID NO: 230966 - DNA, 204 bp, Klebsiella pneumoniae; identical to SEQ ID NO: 98050

SEQ ID NO: 230967 - DNA, 486 bp, Klebsiella pneumoniae; identical to SEQ ID NO: 144787

SEQ ID NO: 230968 - DNA, 321 bp, Klebsiella pneumoniae
atgaacggcggcgcgcaggcttttcgccagcccgttaaagctgaccggcggttcgaaccagcggccattattgacgcattccacgtaatccagaatatcgcggcggtcgagcacggcgctcggttcaccaaaggtaaacgcctccattttttggggcgcgctgtctttcatgttgcgcgggtgcttttgtggctgtggcttgcggcctttgtatttactcatcagttgaactccagaatggatgatgttacctggccgctgccagcggtaagcggttcgtttaacagcgcgtgcatggtcgcccaggcgacgtccgcgtga

SEQ ID NO: 230969 - DNA, 255 bp, Klebsiella pneumoniae
atggtgctgaaagcaaaagacgttatccgccgtggctgtctcgaatatgacgtcagcgccaccgacatcaccacctcgtttatggcaatccgtaagaccatgaccagcagcgggcgcagcgccacctatgaggccagccgcaccgaggaagccagtcacgcggacgtcgcctgggcgaccatgcacgcgctgttaaacgaaccgcttaccgctggcagcggccaggtaacatcatccattctggagttcaactga

SEQ ID NO: 230970 - DNA, 234 bp, Klebsiella pneumoniae
atgaaattagcgttgggaccgtacatccgttttagcagaatcttgttatttccgctggcgatggttatctatgatttttctgcttatctgactaccgatctcattcagccgggtattatccacatcatccgggaattgaaggtttacgcctttttgcccgcaacaggaggacatcatgttttcgtacattatgctgggaacgaacgatctgccacgcgccatcaagttctatga

SEQ ID NO: 230971 - DNA, 510 bp, Klebsiella pneumoniae
atgccggatggcggctacgccttatccggcctacggagccctgtatatcaaacggttactcacaccgtaggcccgcgcaagcgcagcgccgccgggcaagctgtaccagactccgttcccgtcgttgtgccggatgacggctacgccttatccggcttacagagccctgtatatcaaacggttactcacaccgtaggcccgcgcaagcgcagcgccgccgggcaagctgtaccagactccgttcccgtcgttgtgccggatgacggctacgccttatccggcctacggagccctgtatatcaaacagttactcaacaccgtaggcccgcgcaagcgcagcgccgccgggcaagctgtaccagaccccgttcccgtcgttgtgccggatggcggctacgccttatccggcctaccttcaccccagctctaaggcttgcgccagcagggggattcccgtcgcatcacctgagtcccctcatccacacgacgatgcgtttgtttatagcctga

SEQ ID NO: 230972 - DNA, 243 bp, Klebsiella pneumoniae
atgggcgacagcacggttaatatcgcccaggtaaacgtttttaccattcagcgcgctatcggccggcagcgcggttcccagcacgatggccagttcggcgtcattcgggttatcaatcagctcaaggtgcgctttcggcgccgcggcacccagcagggttttcgccatgtaggcgcgcgcctgtccgagtccggcatcaataatcagcagcgttttcattatgcctctcctgctgtcaattaa

SEQ ID NO: 230973 - DNA, 3684 bp, Klebsiella pneumoniae
gtgagcagcaaagttgagcaactgcatcagcagttaaaagaacgtattctggttctggatgggggcatgggcaccatgatccagggctatcgtctgagtgagcaggactttcgcggtgagcgctttgctgactggccgtgcgacctgaaaggcaacaacgacctgctggtgctcagcaaacccgaagtgatccgcgagatccacgacgcctatttcgaggccggcgcggatatcattgagaccaacacctttaactcgacgaccatcgcgatggcggattaccagatggaatccctgtcggccgagatcaactttgccgcggcgaagctggcccgcgccagcgccgacgcctggacggcccgcacgccggaaaaaccgcgctatgtcgcgggcgtgcttggcccgaccaaccgcaccgcctctatctcgcctgatgtgaacgatccggcgttccgtaatattacctttgaccagctggtggccgcctatcgcgaatccacccgggcgctggtggaaggcggcgtggatctgatcctgattgaaacggtgtttgacaccctgaacgctaaagcggccatctatgcggtgaaagaggagctggaggcgttaggcgttgacctgccgctgatgatctccgggaccattaccgatgcctctggccgcacgctttccggacagaccaccgaagccttttataactcgctgcgtcacgccgaagccttatcgtttggtctgaactgcgccctcgggccggacgagctgcggcagtacgtccaggagctgtcgcgcattgccgaatgctacgtcaccgcgcacccgaacgccggcctgcccaacgccttcggcgaatacgatctggacgccgacaccatggcgacgcaaattcgcgaatgggcggaagccggtttcctcaatatcgttggcggctgctgcggtaccaccccggagcatatcgccgccatgagccgggcggtagcgggcctgccgccgcgtcagttgccggaaattgcggtggcctgccgcctcgccggcctggagccgttgaatatcggcgacgatagcctgttcgttaacgtcggtgaacgaactaacgtcaccggctcggcgaaatttaagcggctgattaaagaagagaagtacagcgaagcgctggacgttgcgcgtcagcaggtggaaagcggcgcgcagattatcgatatcaacatggacgaggggatgctcgacgcggaagcggcgatggtgcgtttccttaacctgattgccggcgagccggacattgcccgcgtgccgatcatgattgactcttccaagtgggaagtcattgaaaagggcctgaaatgtattcagggcaaaggcatcgttaactcgatttcgatgaaagagggcgtcgaatcctttatccaccatgcgaaactggttcgccgctacggcgccgcggtggtggtgatggctttcgacgaggttggtcaggccgacacccgcgaacgtaaaattgagatttgccgtcgcgcctacaaaatcctcaccgaagaggtcggcttcccgccggaagatattatcttcgaccccaatatctttgccgtcgccaccggtatcgaagagcataacaactacgcacaggactttatcggcgcctgcgaagacatcaaacgcgagctgccgcatgcgctaatctccggcggggtctccaacgtctccttctccttccgcggtaatgacccggtacgtgaggcgatccacgccgtattcctctactacgcgatccgcaacggcatggacatggggatcgtcaacgccggtcagctggccatctatgatgacctcccgggcgagctgcgcgacgcggtcgaagacgtgatcctcaaccgccgcgatgacagtaccgaacggttacttgagctggcggaaaaatatcgcggcagcaaagcggacgacggcgcgaatgcccagcaggcggagtggcgcacctgggaagtgaaaaaacgcctcgaatattcgctggtgaagggcattaccgaatttatcgaacaggacaccgaagaagcgcgtcagcagaccgcccgcccgattgaggtcattgaagggccgctgatggacggcatgaacgtggtcggcgatctgttcggcgaaggcaaaatgttcctgccgcaggtggtgaaatccgcccgtgtaatgaaacaggcggtggcctaccttgagccgtttattgaagccagtaaagagcagggctccagtaacggcaaaatggtgattgccacggtaaaaggcgacgttcatgacattggcaaaaacatcgtcggcgtggtgctgcagtgcaataactacgaaatcatcgatcttggcgtgatggtcccggcggataaaattctcaaaacggccaaagaggtaaacgcggatctaattggtctttccgggctgattaccccatcgctggacgagatggttaacgtggcgaaagagatggagcgccaaggctttaccatcccgctgctgataggcggcgcgaccacctcgaaagcgcatacggcggtgaaaatcgagcagaactacagcggcccgaccgtttacgtacagaacgcctcgcgcaccgtcggcgtggtgtctgcgctgctctcggacacgcagcgcgacgagtttgtcgcccgcacgcgcaaagagtatgaaacggtgcgtatccagcatgggcgtaaaaaaccgcgtacgccgccggtgacccttgccgccgcgcgggaaaacgatctggcctttgactgggagagctacacgccgccggtggctcatcgtctgggagtacagacggtggaagccagtatcgagactctgcgcaactacatcgactggacgccgttcttcatgacctggtcgctggcgggtaaatatccgcgcattctggaagatgaagtggtaggggaagaggcgcagcgcctgttcaaagacgctaacgagctgctggataagctgagcgcagagaaaaccctgaacccgcgcggcgtggtaggtctgttcccggccaaccgcgtgggcgacgatattgaaatctatcgcgatgaaacccgcacccacgtgctgacggtgagccatcatctgcgccagcagacggagaaggttggcttcgccaactactgcctcgccgattttgtcgcgccgaagctgagcggcaaggcggactacatcggcgccttcgccgtgaccggcggcctggaagaggacgcgctggcggacgcctatgaagcgcagcatgatgactataacaagatcatgattaaagccatcgccgatcgcctggcggaggcctttgccgagtatctgcatgagaaagtgcgcaaggtttactggggatatgcggccaatgagaacctcagcaatgaggagcttattcgcgagaactaccaggggatccgaccggcgccgggatatccggcctgtccggagcacaccgaaaaggggaccatctggcagctactggacgtcgaagcccataccggcatgaagctcaccgaatcgttcgccatgtggccgggcgcatcggtttccggctggtacttcagccatccggatagcaagtacttcgccgtggcgcagatccagcgcgatcaggtcgaagattacgcgctgcgtaaaggaatgacgccggcggaggtcgagcgctggttagcgcctaatctgggctatgatgcggactag

SEQ ID NO: 230974 - DNA, 810 bp, Klebsiella pneumoniae; identical to SEQ ID NO: 156046

SEQ ID NO: 230975 - DNA, 969 bp, Klebsiella pneumoniae
gtggaaaaagtagatgttattctcgcttcatataatggtgataaatatattgccgaacagataagatcgatattatcaaattttgataaattagcaggttacgattgtcgcttgctaatatctgatgattcatcaaatgataatactatcgaagtaataaatacgtttgttgagaatgatgagcgtataactatcgtgaatatgcaaaaaaaaggaggggttaaagagaatttctatcatttaatagttaaaacggatgcagattatgtcttttttagcgatcaagacgatttctggttgccggacaaaatgaggatcttcttagagcgattcaaaattctagaaaatgatcataccgctgatgttaaaaaaccaattttaattcattctgacctgtgtgttgctgataatgtgttatctcctgttcatcgttcaatgttttcttatcaaaagctgaataaaaacccaacgtttgcggaattattagtgagtaactccgttacaggatgtgtgatggcttgtaataaatcattaatcgaaattgcaaaaaaaaataatttaactaatgcaataatgcatgattggtacattggtcttttggcttcttgctatggacaaattgacttcatagataagccaatgattttatatagacaacatgataataatcaagtcggagccaaagagttcacactgaatgcattgttaagtgttgaaaatgtaataagtattcttagaaaagcaaagcaatcagttagaaaaaccaaagagcaggctgaattattcttatttaataatagctccataatgacaaatgaaagaaaaattttagagagctacatttcgtcttttaataaaacatatttagccagggcaaaactttttttcactggaggtataagaaaaaatggttttttaagaaatttgatgtttttctttatttacgtttttgtacggttaaaggattga

SEQ ID NO: 230976 - DNA, 864 bp, Klebsiella pneumoniae
atgaatattcaataccctcatctatatgaaattactaatgagcgctcagcaaaaaatcagtggtattttttaaatggagtgagagcagaatatgcattgctaatattcactgctgttaactcatctttatcttacgatgggaaatacattactaatttagcattattcatcttattgattatattgctactagttaggaatgttataaattttgaacaaaaatggtataaatatagagcggttaccgaatcaataaaaaccacaacatggaaatttgcaatgaaagcggagccttttaatggcgatgaagaaacacataatgcaaaacaatatgttgaatacttaaaaaatatcttaaaagatagtaaatatgcgattcagacaaaagcgctaaataatcttgaaggagaccaattcagcatttgtttaaaaactattagaaaaatgagctatgaacaaagaagagatctttacgtagaacaaagaattgaagatcaacggacatggtatgctaaaaaatctctattcaacaaaaggattggtaaggggtgggcggtggctatactgattctctatgttttatcccttgctatgacagcataccttgctaaagaaccaagtcaatctacctcgttaccaacagagctaattacaacaataatttctgctctcataggctgggtgcaaattaaaaagtataatgaactttcggcatcgtatgcccttacagcacatgaaattggtctaataaaagagcaatcttattatatttctagcgaaaaagattttttagattttattcgtgatgctgagacagcattttcacgggaacatacacaatggcaagcgagacgaattgtataa

SEQ ID NO: 230977 - DNA, 159 bp, Klebsiella pneumoniae; identical to SEQ ID NO: 100568

SEQ ID NO: 230978 - DNA, 636 bp, Klebsiella pneumoniae
atgaatactctcgcatctatccaggaactcgcccgcgcgatacgcaacatgatccgcaccggcatcgtcgtcgaaactgacctcgaagccgggcgctgtcgcgtacagaccggcggcatttataccgactggctccagtggctgacgcaccgggccgggcgctcgcgcgcctggtgggctccctccattggtgagcaggtgatgattctggccgtgggcggtgagctcgataccgcctttgtgctgccgggtatttattccgacgacaacccagcaccgtcggcctcggcggacgcctggcacgttgagtttcccgacggtgccgttatgagttatgagccggaaaccggcgcgctgaccgtctccggcattaaaaccgccgatgtgaccgcatccgattcggttgccgtcagcgtgccggtggtgctggtaaaagccgagacccgcgtcactctcgatacgccggaggtggtctgtaccaacaagctgacgaccggcacgctggaggtgaagcaaggcggcaagatgtccggtgatatcgagcacagcggcggctcattctcttctaacggcaaggtgctacacacccataaacaccctggcgacagcggcggacagacgggggaaccactatga

SEQ ID NO: 230979 - DNA, 375 bp, Klebsiella pneumoniae; identical to SEQ ID NO: 230949

SEQ ID NO: 230980 - DNA, 1770 bp, Klebsiella pneumoniae
atgaccatcaccaccgacaccactttattaaacgacccgcgacgccaggcggctttactgtactggcaggggttttccgtgccgcagattgccgaaatgttgcagaccaaacgcccgacggtgcagagctggaaacagcgcgaccactgggacgaaacggcaccgctgaaccgggtcgaaagcaccttagaggcccggctgattcagctctacgcaaagcccaacctgacgccccacgatttcaaggtggcggattttctggcccggcagatggagcgctttgcgcgcattaatcgctatggccagaccggaaacgaggttgaccttaatcccaacgtggccaaccgcaacaaaggcgaccgcaaaaagccgacaaagaactttttcagcgacgaggctatcgagaaactggaagagattttctttgcagagtcttttgagtatcagctccgctggcaccgcgccgggcttgaacaccgcattcgcgacattctgaaatcacgccagattggggcgacgttctacttttcccgggaggcgctgctgcatgcgctgaaaaccggccataaccagattttcctgtcagcgagtaagacgcaggcgtatgtattccgcgagtacatcattcagtttgcccgccgggtcgatgtcgacctgaccggcgacccgattgtcatcggcaacaacggcgcaaagctgatatttctcggcaccaactcaaacaccgcgcagagccataacggcgacctgtatgtcgatgagatattctggatccccaacttccagaaactacgcaaagtgtcgtcgggcatggcctcacaaagccacctgcgcagcacctacttttcgacgccttccaccctggcgcacggcgcttacccgttctggtcgggggaattgttcaaccgtgggcgcgcccgcgccagcgagcgggtcgacatcgatatcagtcatgacgcgctcgccgctggcgtggcgtgtcctgacggtcagtggcggcagattgtcaccattgaggatgcgctcgccgggggatgtacgctgttcaatctggagcaactccagcgcgaaaacagcgtcgacgacttccgcaatctgtttatgtgcgagttcgttgacgacaaggcgtcggtgtttccgttcgaggatttgcagcgctgcatggtcgacagtctggaagaatgggaagactttgcgccgttcgccgacaacccgttcggctcccgcccggtgtgggtgggatacgacccgtcgcacagtggcgacagcgccgggtgtgtggtgctcgcgccgccggttgtcgccggtggcaagttccgcattctggagcgtcaccagtggaaaggcatggactttgcgacgcaggccgaatccattcgtcagctcaccgaaaaatacaacgtcgagtacatcggtatcgatgcgaccggcctcggtattggcgtcttccagctggttcgctcgttttatcccgccgcccgcgatatccgctacacgccggaaatgaaaaccgcgatggtgctgaaagcaaaagacgtaattcgccgcggctgtctcgaatacgacgtcagcgccaccgacatcaccacctcgtttatggctatccgcaagaccatgaccagcagcgggcgcagcgcgacctatgaggccagccgcaccgaggaggccagtcacgcggacgtcgcctgggcgaccatgcacgcgctgttaaacgaaccgcttaccgctggcagcggccaggtaacatcatccattctggagttcaactga

SEQ ID NO: 230981 - DNA, 243 bp, Klebsiella pneumoniae
atgttcactgacggtcgtcacggcttcatgcacatcctgaaaacgggcgtcatcgctggcctgtttgcggctgaagatcgctttcactttgtcgctcagggctgtaaagacattttccgcctggtcttcaaactccagctcggcgagagtggcgacggaaatcaggttgcccggctcggctttgaagcggttgagggggttaaatttggcaccccggcaaaattcgaggtattcggtgcctag

SEQ ID NO: 230982 - DNA, 282 bp, Klebsiella pneumoniae; identical to SEQ ID NO: 104041

SEQ ID NO: 230983 - DNA, 837 bp, Klebsiella pneumoniae
atgtcaatttatatagatgatgaaaaagatatacagaatagcggaattagtgtagttataccaacttataatcgtgggcatacaatagaagaatccataagaagcgttttaaaccaaacattacaacctaaagaaataattgttgtggatgatttttctacggataatactgaggaaatcatcaaaaaaataaatgctcctaatgttatatatgtgaaaaataagatgtctaagggggcgaatggtgcaagaaatactggcattctattagcaacagaaaaattcatagcatttcatgatagtgacgatatctggttccctgagaaattaaaatatcaaatgagaactatgattgaaaaatcatgtgatttagttttttgcaatatggtttgtggtaagtttatagtaccgcaaactacagttgatggtgataatatctatgaccaacttaaagcgggtaatttaataagtacacaaactattcttatacgagcagaaattgcaaaattaaatttatttgatgaagagttaatgaggctgcaagactgggattttgtcttatcattactatataagaaaataaaaattggttattgtgacaaagtattagttgagcaacgcctatcaacagatagtataactaataagaataagctacttgatgcatataaacatatattaaaaaaacatccagaaatcgctaataaaggatataataataagatttattctctttctttagctgaaaaaaaaaccattaaatcacaaatcgaattgttaattttgaagttatttagaaagtttaaatcaaagaataagaggttatatgaaagttga

SEQ ID NO: 230984 - DNA, 270 bp, Klebsiella pneumoniae
atgaaagttgatgttataattcagtcatttaaaaaaccagagttgcttttttatactcttttatcgctgaaaaaacatagtgaacaacatattcatactatttggataaatgatgatagcgacaatgactcagttatggatttctataaatctgaaatttttcaaaaagcacttgaaccgtgggtaataatgacaaggaaaaacactcagagaggtggatggtggtttacaccagttaaaggtttgtatcctagctatttaggtaaataa

SEQ ID NO: 230985 - DNA, 216 bp, Klebsiella pneumoniae; identical to SEQ ID NO: 118659

SEQ ID NO: 230986 - DNA, 345 bp, Klebsiella pneumoniae; identical to SEQ ID NO: 118661

SEQ ID NO: 230987 - DNA, 384 bp, Klebsiella pneumoniae
atggtcagccacgtctggctgaccatgcgcagcatccctttcgtgcgctggctcatggctgaggacagcttccggtcgtggtcgaggatggcggcgctgattctcttctcgctttcgctcagttccgctctgacagacttctcgtgctcgctgaatgcggctttcagcatctcgccggtagtctgctgctgcgctttcgatttctgctctaagtccttcgccagcgttaaaagactgttcatagatggctcccttcagtcggatgtttcgccccccgtccgggtcggcaatgctgatgctgctttttgtggtgcgcaccacctcaaaacctgcgctttccagcgcctcagtgacgtcctgacgcgttttcagctccccggatga

SEQ ID NO: 230988 - DNA, 354 bp, Klebsiella pneumoniae
atggcgttactgggctatgccagggtatcaaccagccaccagaagctgacgctccaggtggctgaactgaaaagtgccggtgtgcgtgaagaccggatttttaccgacatgatgaccggggccactgacgagcgtgaaggactgcaacgactgcttggccgtgctgaaaaagatgacatcatcatctgtaccaaaatggaccgcctcggacgcaacacggctgatatgatccatatcgttgacgcctgctataaaaaggggatcgccatccggtttctggaaaacggcctcagtacggaaggggcactgttgcaaatagtcggtggtgataaacttatcatccccttttgctga

SEQ ID NO: 230989 - DNA, 879 bp, Klebsiella pneumoniae
atgagcgctgattttctcaccgacagccaggttcagaattatggacgttatgccgccgagccaaatgaagtccagttggcgagatatttccatcttgatgaacgtgatctggattttgttaatcatcgccggggcagacataaccggcttggaattgcccttcagctcacgacagcccggtttctgggaacattcatcaatgacgccatgcagatccccgctggcgtccggcactatgtggcggcacaactgggtattccccgcccggagatattgtcccgttatgcacagagagagaacacgcgctgggagcatcacgcgctcatcaggcagcattatgggtatcatgattttggcgaccagccctggtcatttcggcttaagcgcctgctgtatgtccgcgcctggctcagtaatgaacgtcccggcctgatgtttgattttgccacagcatggctgcttcagcacaaggtgctgttgcccgccgcgtccaccctgaccaggatcattggtgaaatccgtgagcgggcaaatcgccgcctgtggcgaaagctggcatcgctacctgacagctggcagaccgcacaactggcagggttacttgagatccctgaagggcagcggatgtcggttatggagcagctacgcaaaggtcctgtaacggttagtgggccgtcttttacggaagcgctagaacgttatacccgactgagaaacctggagttttcccggctgaattttagcgggctgccggccatacaactgcgtaatctggcccgctacgccggcatggcatcagcaaggtatatcaccagaatgccagaagcacggcggctggctgtgctgaccgcatttgttaaggcactgttgcaaagttag

SEQ ID NO: 230990 - DNA, 297 bp, Klebsiella pneumoniae
atgaaaatgacgcgtttcgccgctggtatcgcgctgatttacctgatgctgtgcgccggttgcaccagcgcgccgcctgcaccaacgctgccgccggtgattgtttacaacgcctgcccgaaggtcagcccctgcccgatgccgggcagcgacccggtgactaatggcgacctgagtgcggatatacgccagctcgaaaacgctctgaagagctgcgcaatccaggtcgatatggttaaacaatgtcaggatgaaatcgatgttaaagcccaacagtctgcgaaaagccttaactga

SEQ ID NO: 230991 - DNA, 507 bp, Klebsiella pneumoniae
atgacgacgctgattattaaaaagaacgatgagccgcagccgggtggcgtggtggtcatcccgccgcctgccagcgatgagccggtgataaaaaatacgtttttctttcctgacatcgacccgaaacgcgtgcgtgaagggatgcgccttgagcagaccgtcgccccggcccggctgcgtgaggccatcaaaaccggcatcgctgaaacaaatgccgagctgtttttgtggcgggaacagcagattgccggtggttttagcaagctggccgacgtgccggctgacgatctcgacggcgagagtgtgcgcattttctattacctgcgcgccgtcacctcaatggcgaccgccacgctctatgagcgttatcgcggtgtggatgccagcgccaaaggtgacaagaaagctgacagcatcgataccactgtcgacgagctgtggcgggacatgcgctgggcggtatcgcgcgtccaggacaaaccccgctgcatcgtgagccaaatctga

SEQ ID NO: 230992 - DNA, 390 bp, Klebsiella pneumoniae
atggccgctctcgtcggtaccgccgatgatattagagacagtctgcgcttcggcatcgtcgccggtcccttccgcaacgcgtacaacaacaacgaccggcttcgactggtcggcgatggcctggagggaggtggccagggtgccttttgtgcccgctttcgcaatcgcgctttgcacgctggtgatcagtacaggcttattaagtgggaaggtggcggcatcggcatcgctggccgtgcagaccatgccgataatcgctgtggatacggtggaaatgacgcgggtgccgtcgttaatctcgacaaccttgacgccgtgatgaaaatcgctcatccgtttaactccgtggttaagggtgagcattattttcagtcgtgggagaaagagtga

SEQ ID NO: 230993 - DNA, 342 bp, Klebsiella pneumoniae
gtggccactacccccaacagcgtgcgggcggtgacaaagaccaccgggctggctgacaatgagttttatcacccggcctggggcgggaccttcgttcagccgcagaacacgctgccggaagcggtaaaaaatcttctggagctgtatggcgtgtggccgtccctgaccgggaaggcgattgtcccggcggggtcgaccgtcaactacaacgcgggcgcgacaagctgcatgcatccggtgcgcggtaagaacgatattttccagtttggctttgccaacaatatcgaagtgctgaattccgagatgggtctgcgcccggtgtattacgcgcccctgagttaa

SEQ ID NO: 230994 - DNA, 342 bp, Klebsiella pneumoniae
gtggccaccacgcccaacagcgtgcgggcggtgacaaagacctccgggctggctgacaacgagttttatcacccggcctggggcggaaccttcgtgcagccgcagaacacgctgccggaagcggtaaaaaatattctggagctgtatggtgtgtggccgtcccggaccgggaaggcgattatcccgccggggtccaccgtcaactacaacccgggcgcgacagtctgcatgcatccggtacggggcatgaatgatattttccagtttggctttgccaataataccgaaacggtaaacacccagatgggtctgcgcccggtgtattacgcacccctgagttaa

SEQ ID NO: 230995 - DNA, 204 bp, Klebsiella pneumoniae
atgcaggccatcgcgcaacagggcgacacgctcgacatgatttgtgcccggtattacgggcgcactgagggggtattcgagtcggtgctcgccgcaaatccggggctggccgaactcggcgctgtgctgccacatggcacggtggtcgaactgcccgacgtccagtcatcccccgtaactgaaactattaatctgtgggagtaa

SEQ ID NO: 230996 - DNA, 234 bp, Klebsiella pneumoniae
gtgacgaccgtcagtgaacatgtgcaggaaaacctcaccgctaccgggcaacgtcttgccgaactggaaaatgcctttgcgacactgaaacaggacgtcaccagtcaagccgaccagacccgccaggcattcagccagttaaaaaccacgctggataacaccgaaagcaccacgcagccccgccgcaagctctccagcggtggcggaggtgatgagctgctgactgactgctaa

SEQ ID NO: 230997 - DNA, 126 bp, Klebsiella pneumoniae
atgtgtctttgccgcgtttttgtcttcacagcgtttctgtgcactgatccaagcttcactcagctcttcttcctgttcagcatcaccgctgaagttgaggatatagggctcaatctgttgaagtag

SEQ ID NO: 230998 - DNA, 294 bp, Klebsiella pneumoniae
gtgcatgcccgcaaagcggcgcagctggcgaaggacgagaccgccgtcgacacgctgctggcggtgacgccgggagaggatctacgcgatgggcaatcgccgcgctggcaggcggaaatcgacgccgccgccgcgctatcggtgacgccacccgcgttaaacgccgatcatctggcggcgcttgatgagcagggcttagatactctggcccagctggatctgctgcagtccgcggcctttttcgcctgggccaaccgcctgatgcttaccctgggcgaaccctggcgtgagtag

SEQ ID NO: 230999 - DNA, 1155 bp, Klebsiella pneumoniae
atgaaaaaaacgattttttcactggcgctgggcacctttggacttggcatggcggagtttggcattatgggcgtgctgccggatatggcgcacgatgtcggaatatccatacccgccgccggcaatatgattgcctggtatgccttcggcgtggtgatcggcgcgccgatcatggcgctgctctccagccggttttccctgaaatcggtgatgctgttcctggctggcctgtgtattctcggcaataccctgtttaccttctccagtagctacgccatgctggcgcttggccggctggtttccgggtttccccacggggcgttctttggcgtcggcgcgattatcctgtcgaaaatcgcgcccccggggaaggtgaccgccgcggtggcggggatgattggcggcatgacgatcgctaacctggtgggcgtcccgggtggaacctggcttgggcatcacttcagctggcgctatacctttgcgcttatcgcggtatttaacgtggcggtatttctggcgatcttctgctgggtgcccacgctttatgaccgggccagcacgcggctgcgcgagcagttccgttttcttgcctccccggcgccgtggctgattttcgccgccaccatgttcggtaacgccggcgtgtttgcctggttcagctatatcaagccctttatgctcaacgtctccggctttgctgaaagcaagatgatgctgattatgatgctggcggggctgggaatggtggtcggcaatctgttcagcggcaaaatttccgggcgctacagcccgctgcgcattgcggccatgaccgacggggtcattgccgtgacgctgctgctgatctttgccttcggtgaacagaaagtcgcttcgctggcgctggcgtttatctgctgcgcgggactattcgccctgtcagcgccgctgcagatcctgctgctgcagaacgccaaaggcggcgagatgctgggggcggccgggggacagatcgcctttaacctcggcagcgccatcggcgccttctgcggcggaatgatgatcgcccagggctttggctggaacagcgtggcgctccccgccgccgcgctgtcgtttctggcgatgagcgccttgctcatctatggctgtcatcagcggcgacaagcttactaa

SEQ ID NO: 231000 - DNA, 1050 bp, Klebsiella pneumoniae
atgagatggaatcagtcagacagaaaagtgcttacaattatagccattgtcggtgtgctcctctatgtcatttataaaggcctgcagttcctggcaggggccagtatgggggccagttttggagtgggcctgggaggaatgagtggctctcaaaaggttgaagtgtcgcggaaagttgaaacggatgctccgccacaaattatttatcgcatagataaaaatcgatacttgacgctggaaaactacatatcctgtgataagggtggacaggtatattacaatgactctcagcggggaataaaaacacacctgggatgggatatcgaattttatgatatttcctatcgccggggaaataatttagtagcttataaaggctctgttattaatggggcagataatggttatctggcactccccggcgcatctaccagacaatattgtggtagtggaaggtcagagcgaggttgtcctttgtttttcttcttttcggcagatcatggaaaaacctttatctataaaattatagctgaggagtacagtacccctgaacggttcagtaagcttaaagtggtagtggctaatgatggggtttatttaaaagatgagtctcaaacagagagtgtattttctcaccctataggtcttcgcgatcttcattcagtgaataaattaagattttcagacggaaaattaatcagtgtttatgatgattggcagaaaaaagttcatgagttagtgagaaaagaactgataagaaaaaaaatgccttatgcaaatgattatggacccacatttcatatattcgactatatcagaaaattaacacctcctaaaactcatgaggagagtaatttgatggcaaatgagttgtcagatattcgaatcaggattgaggatgaggtttatagtcacaggattgattttccgaaactttcaacgaaaagtattgatgctaaatatctatgtaataaaagcattgaagctaaaatcatcacatataccaatgagtcaaatgggaaaaaggaggtggtaaaaaatgaacagtga

SEQ ID NO: 231001 - DNA, 1416 bp, Klebsiella pneumoniae
atgttgcttcctgtgataatggctggcggtaccggcagtcgtctctggccgatgtctcgcgagctttacccgaaacagttcctccggctgtacgggcagaactccatgctgcaggaaaccatcacccgactctcgggccttgaaatccatgaaccgatggtcatctgtaacgaagagcaccgcttcctggtggccgaacagctgcgccagctcaacaagctgtcgaacaacattattcttgagccggtcgggcgtaacaccgccccggccatcgccctggcggccctccaggccacccgccacggcgacgacccgctgatgctggtcctcgccgccgaccatatcatcaataaccagccggtcttccacgacgccatccgcgtcgccgagcagtatgccgatgaaggccatctggtcaccttcggtatcgtgccgaacgctccggaaaccggctacggctacatccagcgcggcgtggccctcaccgacagcgcccacaccccgtaccaggtggcccgcttcgtggagaagccggaccgcgagcgcgccgaggcctacctcgcctccggggagtactactggaacagcggcatgtttatgttccgcgccaaaaaatacctttccgagctggccaaattccgcccggatatcctcgaagcctgccaggccgcggtcaatgccgccgataacggcagcgacttcatcagcattccgcatgacattttctgcgagtgcccggacgagtccgtggactacgcggtgatggagaaaaccgccgacgcggtggtggtcggtctcgatgccgactggagcgacgtcggctcctggtcctccctgtgggaggtcagcccgaaagatgagcagggtaacgtcctcagcggtgacgcgtgggtgcacaacagcgaaaactgctacatcaacagcgacgagaagctggtggcggccatcggcgtggagaatctggtgattgtcagcaccaaggacgccgtgctggtgatgaaccgcgagcgttcccaggacgtgaagaaggcggtcgagttcctcaagcagaaccagcgcagcgagtacaagcgccaccgcgagatttaccgtccctggggccgctgtgacgtggtggtccagaccccgcgcttcaacgtcaaccgcatcaccgtgaaaccgggcggcgccttctcgatgcagatgcaccaccaccgcgccgagcactgggtcattctcgccggcaccggccaggtgacggtcaacggcaagcagttcctgctgaccgagaaccagtccacttttattccgattggcgccgagcacagcctggaaaacccgggccgcattccgctggaagtgctggagatccagtcggggtcgtacctcggcgaggacgacattattcgtattaaagaccagtatggtcgttgctaa

SEQ ID NO: 231002 - DNA, 2730 bp, Klebsiella pneumoniae
atgaataaggagtcgatttttcgccaactagaacaacggatcgccgggcgagcgctgacggcggaagcgctgggcgagtttaacgctatggccatcgccgatagcttgaagcaaaaacgcagcatcatcagccatcatctgaataatctccatcgcaagcagcgggtggtcaaagtgaacggtcgcccggtgctgtttttacccgttaccgttctgcgcgatcatcaccgcctggcggttcggcacggcgaatacgcctccattcaggcgctgtgcgcggatcgtcaggatagtctggcgcagctgattggcgcgcagggcagcctgcaggaagcattgcgccagtgcaaggctgccatcagctaccctggcgcaggtctgccgctgctgctgcggggccctactggcaccgggaaaagttttctagctcgccagctctggcactacgcaatagatgaaggtattttacctgccgatgcgccttttaccgtatttaactgcgccgagtacgcgaataatccagaactactgacctcgaagttatttggtcatgcgaagggggcctttaccggcgccgataaggccgttcctggtcttatcgagaccagcaacggcggggtgttgtttatcgatgaggttcatcggctgccgcccgaaggccaggaaaagttgtttcattttatggataacggtagctggcgccggctgggggagagcgccgacgagcgcagcgccacggtgcggctaatttttgcttcaaccgaggatctggaaaaacacttcctggcgacctttattcgccgtattccggtgattgtaaaaattctgccgatcgctgaacgcggccaattcgagcggctggcgtttatccaccactttttccgccgtgaagcccagcgtttgaaccacgatctggcgctggatggcgaaatcgtcagccagctaatgcgtgaaacgcttgaaggaaatgtcggtgggctggaaaatttgattcgcaatatttgcgccagcgcctggacatttggcgaacgtgatagcggtcttttacatataaaagcgggtttgctgcccgaccgattactggcggatgcgccttttacccttcagcaaaatagcgagcgggttatgatttaccgcgatggcgacgcgcagcctcttttttctggtcgtcaccatgaataccaacggctaacggaaaatatttgtagcctgtgcgaggagttggctcaggataatattagcgtgcggacctttgaaaagcttatttatcagaacgtgacgctctatcttgatgcgctgatgaatcaggagagtacggtctctctgcaggacaaacggctgcgctttattgaagatgtgggcaaagcaatcgctgtcaattatgaccttcagctaaatgtcgaattcgcttatcttaccggccgctacctcaccagcctccctctggcgccgcgcagcgttgctgagcccgtgcgtctggtgatgcagcgctggctggactcctcggcggggctggcgcaacgcatcgcggagaaactactggatgtcgtcaataataaatacgatctgctcatcgatacgcttgaccgtctggcgattaccgccattgtcagtaatgctatcgatgcgaccagcggcggaaaagtgaaagcgctgataatcgcccacggttattcgaccgccagcagcattgccggcgttgccaaccgcctgattggcgagaagatctaccaggccatggatatgccgatggaggtggcgtttaacgatgtcagtcgcgccgtggttgattatctccagcatacggacacgcgtgcgggtgtgatggtgcttattgatatgggctacaccaaggagattgccgatgcgcttttgtcggtgattaacggcccgctggtagtggtggataacgtaacgacccgcatggcgctgaacgttgccagcgagatcgcgttgggaaaaaacatcgaacaaatcgccgaagagatcgtgccgcttaatcagtcgcgttgggatgtgttctggcccgcagaaaaaaaagagcgtgtgctgctggtgacctgtattacaggtatcggtatcgcatttaaatttaaaaatctaatggagaagagcctgctcaacgattttgatattaacatcatcgcctgcgagtatacgcgcttaaaaaacagtcgtacggcggtatcgttgctccaccagtatgaagttattgcggtcgtgggtacccacgacccgcagctggccggagtgccctgggttggcattgaggaactacttggcgagcaggggcatcgacatctgagtcagctcttaagcggctatcttaatgaaaagcaaattgcgctgattaataaaaatatggttcgtgagttttcactgcataacgttgtcaactctctgacgatactgaatgctggaaaaaccatgggccatatcgaaaccattatcgctgagtggcaaaatacgcttggttttcattttaataataacttaattatcagtttatatgtgcatctcagctgtatgattgagcgtctggtaatgcgtaatgaaattagccattataaagatcttgagcaatttacccgccagcatggtgaatttattgccatggtgaatcactcgttccagcgcctgaaaatactctataacgtggcgctaccggtagcggaaattggctatattcacgatatttttgaattacgtattgaagattttagctggtaa

SEQ ID NO: 231003 - DNA, 744 bp, Klebsiella pneumoniae
atgttgctcaccgcaacgttactcggactgatcgctgccctggggatacttgatggccgcctgcttggggtatcaatgatcgatcgaccgctggtgatgtgcgccctcaccggtctggtctgcggtaatttacatgaggggattctgattggcgctacgctggagcttattttcctcggcaacgtcgccatcggcgccgcgcacccgccagatatcgtgaccggctccgtattggccaccgcgttttcgatcatgtccggtcgtggtccagaggctgcgctcaccatcgccatccctgtctcaatgctggcgcagacgctgggaatcctggtgcgcgtggtgaacgcccgctttggtcatctggcggaccgctatgcggcacagggtaatacccgaatggtcggcctgatgcacctcgccggtccgacgctactctattttttaaacggatttctaccggtattttttgccattctgcttggttcttcggcggtaagctggttcctggaggccattccaccggtgataaccaatggattgatcgtcgccagtaagatcctgccagcgctcggcttcgccctgctgatcagcatgatgctcagcagcaaactgatgccgtacctcggtctgggatttctgatagcggcatataccaaactggatatcatcgccatcgcgctgttcgctgtggtgttggcatttatcatcagccagttccttaatcttaagcagcaggagagctaa

SEQ ID NO: 231004 - DNA, 471 bp, Klebsiella pneumoniae; identical to SEQ ID NO: 212769

SEQ ID NO: 231005 - DNA, 819 bp, Klebsiella pneumoniae
atgaaatcagagccgcttaccgtcaatcaactcttccagaatcgtcggcagtattgcgttccattttatcaacgagcctatgtatggacactaagagaccaatggtcagctttattagaagatattatcgataaggctgagagcagactttctaaaacaaaaccaacgcctcacttcctcggggccatcgtgctcgaaccacaatccaaagacagcctattgggggtggatacgtcacacatcattgatggccagcagcgactcaccacacttcagtatgttcttgcttccatccgtcttgctcttcgggcaacaggactttccggcctggagaagatcgtattgccttgtttacgcaacataaacgaagagactatgcgtaatgtagacgttgaacgtttcaaactttggccgacattccgtgatcaaaaagactttattaaaagtctcaacgttgactcagtcgaagctcttcgcgaggtctatccggaaaacttcacacaacacgggaccctgcgtaagtatttcagccacccaccctcactggaagcattatggttctttagtgacgcttttattcagttcatcaacgcggaagggcaccctgtagcctcaaatgcagaggctttgattaatgcagtcctgactgacctcaaaatgatcaacatcaccctggaggaaggagatgatgctcaaatcatttttgaaacgttaaatggccgtggggcagaacttcatgcaactgatctcattcgcaattacatctttatgcgcgctgtaagtgacgatattgatgctgcgatgggctttgttgaataa

SEQ ID NO: 231006 - DNA, 1800 bp, Klebsiella pneumoniae
atgaaacgtgcaccgaacttaaaatttctgccaaaggaaaaatttacggaagcgattatttttgctgggactgatgcctacgctcatgcaaagggatgggaagaggggttgggtaaacaaattgctgaagacactacgcctcctatctatctgggaccaaaacaactggcggaactggatcacctgcaaatcatcgataatggtcgccgtagtgcgcgtgtttatctggccggaaacattgagccaataatgattaatgctattggtgagaaactggcccgggcgggagtgcaggacgcaaaactgtataaggggatccccgaccgacaaccagaggactggcatgattatctggagagaatcagggcggataatgtggttgttgatctcccgatcataaaacgtgaaccagccaatagcggtgtggcaccggcattgaatcagatgggagcaagccaacgtggtgaagtgttgctggctcattatgatggcgatctggcaattcatgccgactcggacactgtacaccactacaacggtgtggtgtggaaccctttgccggataaagagctgcagcgcgaaatggcacagatttacattgatgctgaagtggcctattcacagaacgccgtcaaatcggcagtagaaaccatgaaactaagccttccagttatgggtgtgacagctcgaaatctgattggctttagtaatggggtatttgatacccggacggggcaattcagacagcatagcaaaacagactggttactgatcgccagtgaattaccattcagtccaccagccgaaggggaaacgttggccagccatgctcctaatttctggaagtggctccgtcgttccgtagccagtaatgaccgtaagacagatcgtgtgctggcggcgttgtttatggtgctggcaaacagatacgactggcaattattcctggaggtaacggggccgggaggtagcggcaaaagtgtgatggctgaaatctgcactatgctggctggcaaggctaatacggtttcagccagtatgaaggcgttggaggatgcaagagacagggcactggtggtgggttactcgctgatcataatgccggatatgacccggtacgctggcgatggtgctggtattaaagccatcactggtggtgacaaggtatctatcgatcctaagcataaagcgccatattcaacccgtattccggcggtggtgctggcggtcaacaataatgctatgacattcagcgaccgtagcgggggtatttcgcggcggcgcgtgatattcaacttctcggaggttgtaccggaaaacgaacgagactcgatgctcgcagagaaaatagagggggagttggctgtagtcatccgccatcttcttacacgttttgcagatcaggacgaagcaagacggctattgtatgaacagcagaaatctgaagaggctctggcaatcaaacgtgaaggtgattcgctggtggacttctgcggctacctgctggcgtcggtggcttgcgatgggatgtttatcggcaatgctgagatagtgccctttagcccacggaagtatctgtatcacgcctaccttgcatacatgcgtgccaatggtctcaacaagcccgtatcgctgatgcgattcggaaccgatatgccaggtgcaatggctgagtatggcaaggcgtatcagaagagaaagactaagcacggtattaggtcaaacgttacgctacacgacgactcagacgattggatgccatcctgttcaggcacctctgaaaatagcggggtagagtaa

SEQ ID NO: 231007 - DNA, 129 bp, Klebsiella pneumoniae
atgagcgacttctttattattttgtgtctgattttatgtcccatcatttcttttatggagtggcttttcctatattcaggaaaggcgcaagagacggtatgttttccgttccagaagatgattgtttga

SEQ ID NO: 231008 - DNA, 420 bp, Klebsiella pneumoniae
atgggtgcgcgctttatagtggaaaccaaacagctgcagcggatactggctgcgcagcggatcgtcccagccttcaaatgtggaggcgtagaccggcagcgggctgataacttcgtctttctccagctgccagcgggcggcaatctctgcgagtcggctggagtagatttcaattttgccggacggggttttgagcggatgcgcttcaggatcgcgccggaagtcgcgataggcgacgaagtggccgttcgggtctttgcgcttttagatgcccattcgcttcagatcctcgtaggccggcagcgccggatctttcgccaccattttggcgtacagatactgcagccactgttcctgggtacgtccctcggtaaaacgttgatgcacgtcgtcgccgagtcgtttcgccacttcgcttag

SEQ ID NO: 231009 - DNA, 294 bp, Klebsiella pneumoniae
gtgctggcgcttcccgcttcacttccggtgcgctacgccaccttactgaccgtaattgacgccctgctggcgtttgtcgcccgctttcccaatccccgtccgctgctgctggtggccgagcaggattttggcaaagcgctgggcatgctgctgcggccacagcttccacaccttccgctggcggtcatcgatgaggtgagcatccgggcgggagactatatcgacattggtacgcctctttttggcggatcggttgtgccggtgacggtgaaatcactcgcatttccttcctga

SEQ ID NO: 231010 - DNA, 537 bp, Klebsiella pneumoniae
atgagtcattacccgcactttccatcatttgaatacaatttttgcgaagggttagtcgaactaaatcggcaactggagctggcgcaatccgaaaaacaatccgtgacagaacgtgatcttttgagccttgaggggggggttgactgcgaattccttgatggcgagccacttctctatatttccttggatggtacaggtgaaccactctctagcgcacttcatcggtgtagtgatgaattaggctttgccattgatagctgtgttagcatttgctcaattcgaggctcggaactcgtaaaagcatttaatctattttttgttcctgcgtcggctggcagccttgcaaaaggaaaggtgcacactaccagcgcacaagccagatttatggtctcgcttttaaaggcgttgagatatacggatgaagaactgaaggggagtattcctgaattgatgaagaaacttgcggcagatgggatcgatgtgagcgttactgaaaagccctttcgtgagtggctggaaaagggtggcgctcgttaa

SEQ ID NO: 231011 - DNA, 213 bp, Klebsiella pneumoniae
atgaacaacacaaatacatcaatcagatacgtgcgccctaaagatctagctacccatttatccgtcagtatctcaactatctggcgatatgctaaacgtcctgattttcccatgcctgttaagttatcagagaaagtcactgcatttaacctagacgagataaacgaatggtgcgagaggaaaaacaccggtcgtattccgtcctcaatttga

SEQ ID NO: 231012 - DNA, 177 bp, Klebsiella pneumoniae
atgaaatttgaatgtacggattttgacgcagatttttttgctgaactggaccgggaaatcgctgaggcaatgattgaactggaaaaggatctggcagagacggaggctgaattcgaggcgtggttcgcttcgcttgatattgaacctctggatatagatctgagcgttgattggtaa

SEQ ID NO: 231013 - DNA, 1011 bp, Klebsiella pneumoniae
atgaattccggtaaagccgaaagaaaagccagacggctcccgcacagtgtcgcaaagcgtataacgttcaaaaaaaattcccgtcgtatcgatccgaagaaaacgcccggcacgccttatttcctcacgctgaagcctttaggcgacatggaaccggaatatttcaacgaggcaatgacagggttaataaagcgtctaagaaccgccagcgcagaatatatctacgcgctggaatgggcagagcacgagaggatgccgcatattcaccttgtcgccaatatccccggaaatacgcccgcagaggtggaggcatttgcagagggggttatccgttattggctaaagaaaacgccgaagaaccccaacaccagaatcaagcaggacgccagacccgtctacgatgcccacgggctatttaactacatgtcgaaacagacgccggacgagttcaacgcgagagcaatagcaacgggcaaggattggtcagtaattagcgtcacaggttgttcaagaggctggaaggaatccaagtctgataccacagaggtgagccgggaaaccgggagcgcaatcaagcgcgagatgaagaagattgcactatccagaggcataagcctgaaaaagcgttccaaaggctgcgatgcggagacaaagagatccatctcggaggtttcaccatttaccgtatccgggttgacgcgtacagagtctaaacggctgctcattaataccgaggacagccagccactgaaagaacggcaattcatcgtaaaaatgcgtgatttgtatcgcaaagcacatgagctgggttctcaagaggtaaaggacgaagtagaacgactgttactcgacaagggctacgatatgcggcacatgttctctgaatgggaaaagccgcagatgaacagggttgaacggtgcggcactgacccgcttttcaggcggttatgtaaagaccggaaaaggagaaaggctgtcagccgcaaatcgtcggttactgttatattatga

SEQ ID NO: 231014 - DNA, 384 bp, Klebsiella pneumoniae
atgcgtaatctgacaagaacagaaatcgccagactaattcagggcaagttgctcaacggcgataagctgagttctaagcaatttgaccgagtgttgcagaaacacggaaatcacgagcgtagtcgcgttctggagcttttacgctgtcagtggggcttacccatcaaagaagacagaaaaggctgctacggcatccctgagagagatctaatgcggttttacgcagatcctgaggacacattagccggatggaagactgaagcagatcagaatcgtaaataccggaagctgaaccgattcctttcgatgttgtgggatttgcgcggcgatataagccatgccgcaagagaagaagtattggcggcagttagcgcccggatttaa

SEQ ID NO: 231015 - DNA, 249 bp, Klebsiella pneumoniae
atgaccaattcaattgataaccaccagaatcacgcacaggcagaaaaagcggtggctatgctggctagaatggaagctaaaggaatcgaattcgttgattacgagatgttttacgaactgattagcttacccggttcaacactaagagatgaaaaaaaggatgtgtgtattcacgatatttatttagatgaccggcattttttggcagttggcgcattaaataccagcttcatagtgagaatggggtag

SEQ ID NO: 231016 - DNA, 453 bp, Klebsiella pneumoniae
atgacgcgattaacggccaaagatttcccgcagcagttgctcgaatattatgactactatgcccacggcaaaatcagtaaacgcgagtttctccagctggcggggaaatacactgtcggcgggatgaccgcgctggcgctgtttaatctgctgaagcccgactatgccctggcagagcaggtaccgttcaccgacccggatatccgcccggagtatattcattatccctctcctgacggtcacggcgaagtgcgggcttacctggtgacgccgacaaaaatagccgacaaagcgcccgctgtggtggtggtgcatgagaaccgcggcctgaacccctatattgaagatgtagcccggcgggtagcgaaagcggggtacatcgcgctggcgccggatggcctgagcgctgtcggcggctatccggggaatgatgatgaaggccgcgcgctatag

SEQ ID NO: 231017 - DNA, 486 bp, Klebsiella pneumoniae
atgggcggtatgaaatcacctattgctattaagcattatcatttcacggaaatctcagttaaagctagggatgtcgaatacgacgatattgtagttgaaggcccgtacccttcttttgaaaatgtcaatattaacactttagtaacattggcagaggcgcaagagggaggcagttttctactgacaatcgaagttggatgcgcaccagagaaagaatcaacgtttccttatgagttcaaattcatagtggaaggtatattcgaatctgatttctctgagattgaggaagagaagcagcagctgattgtatgcaatggtgcatcgatgctttatggttgtgttagagaacaactcatttctcttacctcccgtcaaaagtatggcccattgctgttgccagccacttcatttcaaggattaaggaaatctgaaaaagcgaagcatcttacaaagaaaagcagaagtaaaacaaaaaaagccacgtaa

SEQ ID NO: 231018 - DNA, 543 bp, Klebsiella pneumoniae
atgaaaatgtccgaagcgaaaagcgtaagaaaaccgattgacttttctgctgtatgggactcatcagatgtggattttcgttttgaaatcaaggcgcaagaactggctgtagatcttgttaatgctctgattcattctggaaaaacgcaagctgaactggctgagaagttggattggaaacctagtcgtgtgagcaagttgcttagcggttcttccaacattactatcaaaactctttttgtgctcttggatgccctcgatttggattttgatgttgtctttagaaaacctaatcaagagaagccgctgcaaccttggcaaaaaagttcttatgttgagtattcctcaaaaatcatcaggaatattaatgaattgcatgagaaggcatgtgccaacttgaataagagtgaagtgattttgcagactgcagtatctttgaacagaaaagcatgggccgacttcatcggtgctaagcaacaggctaccaagtctagtaagcctcgtaccgagaatacggttgaatactttatgttggctagctaa

SEQ ID NO: 231019 - DNA, 489 bp, Klebsiella pneumoniae
atggcccactatttgaagatcaatcacgctgctttgcagcgcaaacaagcagatcctcatcaagtcactagtgcacgtactttgtatgcgaggtgtgatgatgagagtcgcgatacatgcaatttgctacagcaaatttatgatatggagatgcgtgaccagaaagatgcattaagtgctttggtcaaaatgattcaaatagcagcgtctggaaaaccgtttaaagatttttacgatgtaaaacaatgtcatgactgccatacctttactcatgatggtaaagaacacaccatttggagagtttggaagggtaaggcagtacgcataacgttctattacggagacgatagagtcatcctcttaacctcagctcttgtaaaaagagaagacaagctaacaagaaagcaagagctagacttagaggctgaagtcaagatttaccttaatgatattaaaaacaaacagttagagctatttgagattgaataa

SEQ ID NO: 231020 - DNA, 231 bp, Klebsiella pneumoniae
atggtaattttcatctctggcgttaatatccgtaatgaatattatgttaatcggatcgctgggatcgctgggatcgctgggcgcgcagtcgagtttatagatgaaacgacgcgtaaaattgacttattgagcgaccaggagcgaaaaaaagcagacgtgaacgacgctgatatatttttaatgttaaaagcgtttgcagaaatgggatttaaaatcagtttacacaaataa

SEQ ID NO: 231021 - DNA, 1242 bp, Klebsiella pneumoniae
atgagtgagctgagctatctggagaagctgctggatggggctgaggttgagtggttgactgccgctgagattttcaacattaaaaatggctatacgccatctaaagctaaaaaagaattttgggaagatgggaatatcccttggtttaggcttgaggatatacgaactaatggcagagagcttaatgattctattatgcatgtgaatcaagcaggagttaaaggcaacctttttcctaaagattcaatatttatgtcaacgacggcaacaataggagagtttgctttggtcaaaataccacatttgaccaatcagcaaattaccaatttttcattaactagcagatttaaaggaattatagatataaggtatttattccataggttccatcactttggggaatggtgcaaggaaaacgctaacaaaagtggcggtttatccattataggaataaaaaaattatcatcgtataaattcccaattccttgccccgacaatcctgaaaaatctctggcaatccagtcagaaatcgtgcgggttctggataaatttactgctcttacagctgctcttacagctgctcttacagctgagcttaccatgcgaaaaaaacagtacaactactatcgtgaccagttgctttgttttgacgaggccgaagttgagtggaaaacgctagctgatgtagcaatattaagacgcggaagagtcatgtccaaagggtatctcgaacagaatgcaggagactaccccgtttatagttcccaaaccgcaagaaatgggatgattggctcaatagatacttacgactttgatggtgaatttattagttggacaacagatggtgcaaatgctggaacggttttctaccgtacagggaaattctccatcacgaatgtttgtggactaatcaaaattcatgaaaattatccaattagctataagtatctttactattggctttcaatagaagcccaaaagcatgtctattcaggtatgggtaatcctaagctaatgagccatcaggtcgagaaaattactgtgcctatacccttcccggcatcaccagagaaatcaatgctcgaacaacagcgaatagttggaattctggacaaattagaggctataacattctcattgactgaaggcttacctcgtgaaatcgagctgcgccagaaacagtacgaatactatcgtgacttgctgttcagcttcccgagaccagaaaccgccagcaactga

SEQ ID NO: 231022 - DNA, 609 bp, Klebsiella pneumoniae
atgacgaccaagaccccagcccggcaacatactggctgccgcacgaagtccaaagccagataccaaacccaccagcaatcccgtaccaacttcaaaacccccgtagtcgagttcaatccccagctcaaaaccgtaaaagtattcagtgatggctcttgcctcaaaaatccgggcgggccgggcggttacggcattgttctccagtatcgaggcgaagagcgcgagctttctgagggcttccacagcaccacaaacaatcgcatggagatgatgggcgccctgatagctttggaacgcctaaaattctcctgcaacgtgatcctgcactcagatagccagtatctcaaaaatggtatgaccctctggatgaaggggtggaaacaaaatggttggatcactgctgacaagaagcctgttaagaatgtcgacctctggaaacgactcgatttagccgccagtcgccacaatgtcaggtggaactgggtaaagggccacgccgggcatcgagaaaacgaaatatgcgacaggctggccaagatcgcagcatatgcggcagcggatactccacacaaaaaagatgctggttttttggtacaaaatgataagtaa

SEQ ID NO: 231023 - DNA, 555 bp, Klebsiella pneumoniae
atgacaactattgttgctgggcttgatattgaatctacagggttggactttagggctaaccacaagattattgaaatagccattacccgctatgagctggagacccagaagcacatcgatagcctggcgatgcgttttaacccgcgtcgcagtatcgatcctaaagcgcaagctgtacacggtatctgtcttgaagatttagccgctgagccgttactagccgatcacgcttcatctgtcgcttcattcctctcttcttccgatatttggatagcccacaatggcgaagcattcgacattccgtttattaggcatgagctgaaaagttacggtttttcgcttccagacgtcccattgattgacactgtattttccctgtgggccacagaagacggcaaacggccgcgactggaggaactcgccttctcattgggttttgtctatgacaagagtaaggcgcacagcgcgctctatgataccgatctgatgatgcactgctttttcaaagcacgggaaaaatacggcttctataagctcccattcgaaagcgcctga

SEQ ID NO: 231024 - DNA, 444 bp, Klebsiella pneumoniae
atgaataaagagaacaccatgaacgaggcacagaagattgcacaagcgctggcggctatccccgcggattttcaggataaagctgttgcggccaccatgcggtcgcagttctgggaaatcatagactgcccggtcacgttagatctggcgctggcgttcgccgggctggatggtgccgataaagtcagtcgtctgcgcaaatgtgccagagcgctggcgcttaaaacgcaagatccgaaggcgtgccagtatctgctggagatctacgaatcagataacccagaggaacagttggaggcgttcaaagtgttccgcaatcggctggtgctgaaggtggccaaagagttcatggaagtgaacaggattggcgatgtcaggaagtatcgtctgcatcgacagaccaaagccacgctatccagcatattcggtaaaagagtcgcataa

SEQ ID NO: 231025 - DNA, 141 bp, Klebsiella pneumoniae
atgcagcagattctcggcgttttcggttacctcgaaatggacgcaggtcagggcggcgactttggcttttatatccttctggcgcaacaggttcaggatatggtcatcaacgttaattgttgcggaaatatggttacgtaa

SEQ ID NO: 231026 - DNA, 414 bp, Klebsiella pneumoniae
atgaatgcgtcatatgcagttattgaaaatgggatggttgtgaatgtcattgtctgggatggcgaggctgaattcacagtgccggatgttcagcagctcattgatatttctgatatcagtgagcagcccggaatcggctgggtttattcagacgggggatttactgcaccacccactcaggaacgttctcatgatgaactggtagttgacgctgaacagaaaaaacagtcgctgttagacgcagcaatggccaatatcagcgtgattcagttaaagctgcaggccgggcgcaaactgacgcaagaggaaactacccgacttaacgttgtgctggattatatcgaggctgtgacggcaacagataccagcaccgcacctgatattatttggcctgttttccctgcaagcagataa

SEQ ID NO: 231027 - DNA, 1920 bp, Klebsiella pneumoniae
atgagcacaaaattttataccctgctgacggatattggcgcggcgaaacttgccagcgccgccgcgctcggtgtgcctttaaaaattacccatatggcggtcggcgatggcggcggaacattaccaacgccggacgcaaagcagacagcactggtaaatgagaaacgccgggctgcgctgaatatgctctatatcgacccgcagaacagcagccagattattgctgaacaggtgatccctgaaaacgagggcggttggtggatacgtgaagtgggcctgtttgatgagtccggagcattgattgccgtgggcaactgcccggaaagctataagccgcaactggctgaaggcagcgggcgtacccagaccgtgcgtatggtgttgattaccagcagcacggacaatatcaccctgaaaatcgaccctgccgtagtgctggcaacccgcaagtatgtggatgacaaaatatcagagcacgaacagtcacgacgtcacccggacgcctcgctgaccgcaaaaggttttactcagttaagcagtgcgaccaacagtgaatccgaaatactggccgcaacaccgaaggctgtgaaggctgcatatgatcttgcagcaggtaaagcatccgccagtcacacacacccgtggaatcagataacggatgtgcctgcagcttcactgacggtaaaaggcaccgtgcaactcagcagcgccactaacagcacgtcagaaacgcaggctgccacaccaaaggcagtgaaggcggcatatgaccttgcagcaggtaaggcacctgtcagtcacacgcacccgtggagccagataacggatgtgcctgcagcttcactgacggtaaaaggtaccgtgcaactcagcagcgccactaacagcacgtcagaaacgcaggctgccacaccaaaggcagtgaaggcggcatatgaccttgcagcaggtaaggcacctgtcagtcacacgcacccgtggagccagataacggatgtgcctgcagcttcactgacggtaaaaggtaccgtgcaactcagcagcgccactaacagcacgtcagaaacgcaggctgccacaccaaaagccgtgaaggctgtatatgaccttgccaatggaaaacaacctgccgacgccacactgaccgcactggcaggccttgccactgcggcagacaaactaccgtattttacggggaatgatacagccagcctgacaaccctgactaatgttggacgggatattctggctaaaacaagcaaacaggaggttattcattatcttggtttgggagctacaaacggatacgtgggacgcttggtgaatacccgggttttcacgtcatcaggtacgtacaccccgacgccaggaacaaaacggatcagggtcacaataacgggcggcggtggcggagggggcggctgcaaggctatatccaataatgaaacgtttttcggtgctggcggtggggccggtggaacaataatttcaataatgaccccgacacagaatagttatccagtcactatcggcgcaggtggggccggtggtgttagtgcaacgtacggcatcaatggcggtaatagcttattcgcatcgttaattgctcctggtggcgcaggcggcggaaagtcaggagtcacaaacacaaacggtggtaacggaggtgtgccgagtactggcgatataaacatcattggtggatgtggaggcgacggtcagtccggaaatatcggcgtcagcggtgaaggcggaacatcgtactggggtggcggtggacgcgcaggcgctggcggtggtgttagcggcaaggcatatggttcaggtggcggtggtgcatacgatgccggttatagcggaaccagtatgacgggcgggaaaggcgctgcagggatttgtattatcgaggagtttgcataa

SEQ ID NO: 231028 - DNA, 1752 bp, Klebsiella pneumoniae
atgaaatttagaagactacacaactggaatcatattgaacaatgcactgcgcttatttatttcaccgagttaatggaggaacttctctttgattacacccatagtacatataaaccttctataatgaacactccaagtttatgtatagaagcaatatcaacaatcgatgatatagaaaaaggcaacataagccccgcacatatatcccacgtcattgacgaattaactaaaaatattaagaatgatgacatcgcaatcagtcttctaaaaaaccctttaggttcatttttagatcaactccaaaacaatcagttaggaaataaaaatctaaaaataactcttgaattactgagagttcaacttaatgttgataattatgaaagcaaactcatcagtgaactttgctctacaataacttcagaatacaacccaaataaaattcgaaagtttacaagactgttgattacccacctaatatcaaaaggattaagtcaagaatatttgatggaaagtctaaaaaaacatttcttccaaagagaacgagagatcagttcaaatgaagagattattacattcctagagaacatcccctcagagacacaagaatattcagtttatttcaatgctgacaaatcttttagttatattactccatgcttatcacaattagaaattgaggttgttcttgaaacccccgaaaatattaatgaaacagatttcttcgataatcatgaacaacgaactattttagttaagcatgttaaagcacttgatccattcacggctagaagggtagctgaaagaaacttaaagctcgcatcaactttgctttctctctatcatcataagcaagaagcatcatggtctgcagagaacattgtagttagtgaaaatggtgaaaaaatcaatataagaagcagcataaacccaatgcaccgctgcaaggatctggttcaggaacacgcaagcagaagactcgaacaattcatgaataatttcagaatgcgcaaggattctttcaataaattcataagaagtgtacaattacattcaatggcactacagacaaatgctgtagaaaatcagcttttaaatttatggattgctattgaatcactcatccccgacgaatcaaaaaaagaagaacaatccacgatagaacatatcgttaattcattaacaccatttttaaacctgaattatattgaagacctagtaaggaatcttataaaagacttacaacgatggaatcatcctcgaaccatgtcacttctaagactaattggagatagcgatgcagccaaatcatttgtaattcttgttgcttcgcaagaacatgcccctagcatcaatcagtttaagatagaactctcacaatttccgttattgaaagagagatttgaatatattagcaatttaatttcctcaactgatactatgtatcaggcacttaaaaatcatgcagaaagaatcaactggcaaattaggagaatatatagaactagaaacttgatagttcacactggaaaaaccccatcaaaaacaaatgttttagttgaacatgctcacatctacctagatgcagtcattaactccttaataaagctttcatctcatcctgtagaaatactttctgttgcgcaaggcttccgaaacgttgaaatgaaatataaaatgtacattcaaaaacttaataaaaaaaacatagagctcactcctgaaaatattatcagctttatattcaaccaatag

SEQ ID NO: 231029 - DNA, 2337 bp, Klebsiella pneumoniae
atgattgaagaggtagttattgacaaggtaggctcatataatggccctacgcagcttttacatggactttctaaatttaactatttatatggagctaatggtgcaggtaaaacaactataagtaaaattattaatgaccctgaacaatatccaacatgtccgattaaatggaaaaataatatatctttaataagctacgtatataataaagattttgttgaaagaaattttagtcaagataaaattaaaggtgtatttacccttggtagcgatcttaaggaggatgaagagaaactaatatctcttaaagaagaaaaaaataagctaatggaatctattatagcaaaggaaaagttaatagatggtggtgataatgaattaggcgttattaaaaaaatcgaagaccatgaaaaatcttttaaagattcatgttggaagcaaaaagtaaaacatgacaatgtgttctcaaaggcttttgagggattaaggaatagtagtgaaaaatttaaagccagagtgttggctgagtatgaaaataatacatcagaagtttgctcaatagcagagttaattgagaaagcaaaaattgttttttctactgaattgacatcacatgtatcaattacaattccatccttcaatgggatagatgatattttgagtagggaagtttggagtgagcgcatcctagggaaaaaagacgttagtgtttcagacttaattacaatgctcaataacagtgattgggttaaggagggtttaacatatttcagtaaatctaatcccaagtgcccattctgccagcaggatgtaaatgataatatatttgataatctttcatcatattttgataaaacatatgagttaaaaaaaagagaaatcgatgcattggttttacaatatgaatatcaacttaataatatcttgaaggcgatagatgatataagggcgattaaatctccattcataaattatgaagtgtttgaggataaggctaagatagtattatctgaattaaacaagaattttgaattggcaaaaaataaacgcaattttttaagtgaatcagttcattttagtgacttaagtgaagttgttgatgattttatttcttttttgaatgattcaaatctattgatagataataataacaaaatacatagtaatagaaaggtagaggctagtaatctttctaagcagatatgggcatatatcgtaaaggtggagttaaagtctgaaataacttcttaccgtagcaaatctgataaatttaataggacgttacaaggacttaaatctgggatagaagaagacaaaaagaagttaatgttaaatacttcggctattgaggcaattgagtctaataaaaccagtactcttccaactattacaaaaattaacaagattctggactcttatggcttcaaaaatttttacttaaaaccctccgaagataaaaagcattatatgatagtgagagatagtggagataatgctcgtacaacccttagtgagggagaaaagacatttatcacttttttgtacttttatagccttgttagagggagtgataatgcatcaggtgttttagatgatcgtgttgtagtatttgatgatccaatttcaagtttagatagtgatattctgtttattgtaagttcgttgattaaagatttaatggaggatgttcgtaaggatgaaggaaatattaagcaaattatattccttactcataatatttattttcataaagagttgacttttaataccaaaagatccggtaatcaagcaatgaaagaggagactttttggattgtaaggaaaaaagggaaggtttcatatcttgaaaagtgcgaatcaaacccaataaaaacgtcttatgatttgctctggtgcgaattgagaagaacagacattaataataatactatacaaaatacaatgcgaaggattttggagaattactttaagatattaggtgggatggatattaggaagcttgagtgtcatttttatggtgatgaaaaaatcatatttaaatctttagtgtcatggattaatgatggttcccattttgcaggtgatgatctttatatgaatttagatacggagtctgtgcaaaaatatttaattgtttttcagaagatatttgaatgtagtgagcatactgcccattacaaaatgatgatgggtgagttttataaaccgttaaatgagtcacttcatctacaagatgagtttgatatagatgatagtgcgaatgatgagtatgcttcgtcaaaaattgagataaaagatggaataaacacatctctacatagcaacacatatttgtaa

SEQ ID NO: 231030 - DNA, 2121 bp, Klebsiella pneumoniae
atgagtacatatcataatgatcagccaatactaggtggtcaaaatgaccccgatttattaaacaggctcgattttgcaaatcacttggcaaatattctactattaaatcacaatgatgattgccttactgtatctatagaggcagagtggggatatggtaaaacgtcagtgataaatcttataaaaggtgctttgaatgaaaaggagttcttaccaataataatagaatataatccatggctggccggtcaacctgaatccttgattcaggattttttattacagttctcttcacaactaaatattaaagacaattcaaaagctgctttggaagcttcaaaagaattaattgcatactccaatctcttcagtgtagcaaaacttattccagggacagaaccttgggcatctatcatagaaaaagtcctctctaattttgggagtgctactaaaaagattgctgaattaaaaaaactggatcttttaggtagaaaaaaacaagtagagaaggcaataaaaaaaataaaaaatcctattgtggtaataattgatgatattgatcgattgactcctacagaaacttttcaagttttacgattggttaaagcagttgcagatttctcaggaacttcttttttacttgcatttgatcctaattatttgatttctgtgcttgataaaaataatatcgtcaattcttcggagtatcttaataaaattgttcaacttcgagtcccacttcctgtaatctcagaaaggggtatgaatgaacttgcaaatgcagaactggaaaagatagctaataaatctttaactgacagattcgaaagtgatcaagaaagactaagctggatttatcataattattttaaaaaactaattaagaatccgagagagttaaaaagattttttaaccatttgagattcgttttagagcaaattgaagggcaggtatgtttttctgatctctttgctttatctctggttgccactaaatcgagtttggtatacgagcatattaaaagcacaccagaggcatatatagggaagagattcactaatgatggccttttgatggataaacctcaagatattgtggatagatttagtgatgagcgaaataagaaactgagtaatttttctgatcaagagcgttcagtgatgcaggaactcttaggagatattttcccacttctacagtcaagcgggtattctcattatggggtttctgatcccgatacagcaggaagggtttctgcaccacaaaggcttcatattgcgtttcattataaaactccagcagggtatatttctgatcatgatattatcagtttcattaatggagatgttaaaagaaacgaatttctaagagatgtgctctcgcaaaatgcagaagaaagattttttgaaatgatgaataattattcgagttattgtaaggataatagttttgaaatattaacgtgtatttatgatacttttctgttttctcaagaattgaaatcctcattggaaagaaactatggttttttgacaaaagatctttatagaaggatgaattggctcactaataaggtaatatctgaaagtgatgataaatatgggttaataaagggggttgtaggtaggcatgagaatgcgccacttggtgcagacgtattatgccaagctcgtaaacagattcaaaatggatggaatgacaaaatatgggttagtattgaagaattggctgaacttgaaggtatctttcaacaggtggctattaaagttttaagtgataaaatatattttgattatcatcttgaatctcatatatttttcgaattaaagagagtttcatctcaatttacatcagagtttattgcttctgtattatcaagtgatggcctgattaggatgtgtgagattattggtgaaacaggtagtgattcaacaaatggccctttttttaagtttgatgaaatttacttcggggaaatacttgatgtgaatgaacttcgaaataaagcgaaaaatttagatttttcaatttatcccacacgcattcaagctgtacttaagagtattctggatggacaaaaatattatttgagagatgcaactgttggtgaagattggtaa

SEQ ID NO: 231031 - DNA, 2301 bp, Klebsiella pneumoniae
atgtctggaaaatcccttggcacattaacaattgaccttatagcaaaagtgggcggttttgttcaggggatggataaggctgaaagatcatcacaaaaatggcgcgataaagttaagaaagatgctgctgaggtagggtccgctctggctgcaattggtactggcgccgcggcggttgcaatcggcgtaggtactgctggtattactctggtaaaaaatacttcagatcatatcactgcaactgatcgttgggctaaatccctaaaaatgtctactcaagatttgctttcatggcagtttgctgccgaaaaagcaggtttaacaggggataacattgcagacatatttaaggatattaatgacaaagttggtgatgctgtactgaataagtcaggcgaagccgctcaagcgttggatacactcgggctttccgcagaaaaactagcccagcaagctcctgataagcaactgatagctatcagcgaagcgttacagaaaattccttctcaggcagggaaaaccaatatccttgaaagtttgggtaacgatttgtcaaaaatgctgccgttgttcgacaacaacaacgaaaagctaaagcaattcatacagttatcaaaggattttggcgtagctccgccgcaggaagatattgataacttggttaaagttaatcagttttttcaagatatagagagtagtgcgcaggggttaaagatagaaattgccagtgggctagcaaaagttgacctctcaccaattcagcatgggcttgatgacatcagggaagtttttaccgatcctgctgtgctttcaggtctagcaaaacttgttggtggggttgctgaactggttggctggatgggtaagttaagttctgaatcggctaacttcatcagtaacttactagaagtgccagacaggtttaaagctggcggctggtacgagtttgaaaaaaataaaaggctagcagcgatagctggcactctccaatcagatatgggggtaattactaaaccaacttcaaattctgatttgctaataaataacaacctgcttcccggtcagagtaaccagaaacaacctaaaaaacctgataatgcggctaagaggattgaaagtgcctataaatcaatagagcagtcgtatttaagacaaattgcactggtagatcagcttactggtaaaacaaaagacgctacggaagttgaaaagctacgttttgatttatcatcaggccgtttggttggaataaacaaagagcagcaaatcagacttgaaggtttagctactgaaattgataaatataattctttatcaaaattccgtgatttacaggaagagttattatctccagaggaaaaactccttaaaactacgaaagagcgtttgaaagtcctgcaagatattcaggggatacccggagtcagccaggatgaagtaaaaaaagccgccaaagctatcactaaagattctttttccgacatgccgaaatttacaggcatagattctatgtttggtggtcaacttggcgagttaaggaaagtagacgatgcgcagaaagaacaggaaaaatggtatcagaaccaacttgatttgctggagcaaaaccgacaagcacgatctgatctaaacgaggaatgggatgccagagaacttgagttaaagagaaaacaccaggatgaaatgaacaggctcgatgaagcccgtaatcaactgatgttaagcagtgttgtcgatggcttggggtcaatggttgaaatgactcgtactgcatttggcgaacaatcagacatatataaagctgcctttgccgtacagaaagcagcagctatagcccagtcaattattgctattcaacaaggaatagctatggctgctgccaatccatttccgtacaaccttggggcgatggcgagcgtggccgcttctacagcaggtattgtgtcgaacattgccgccgtgggtatggctcacgatgggatagatgcagttcctgaaacaggtacctggttgcttcaaaaaggagagcgggtgaccactgcagctaccagcgcaaaactggatgccactctggatcgagttgcaaaccagtcaacaggcggcggcgcgatttattcgcccacaatcaatatccccatcaatggtaacccttccgatgcaacgttggcgctggtccgtaaagctgcagatgagggggcagaaaggggataccggaaggcggttaattcagtcgcaagcggtcagggtgatttgcataaggccttgatggggaaaactacctcggggaggaaaattagctaa

SEQ ID NO: 231032 - DNA, 612 bp, Klebsiella pneumoniae
atgaaaacagtatcagtattgagcgcagcgattcttttaagtgggtgtgctgcgatggataattcaaaggatacacgccttaattcattctcaggaataacatatgaaaacaatggtacttatgagaccataaaaaaatatgttaaggaaagttcaggaaagattaataaggagcgggttaaattatgtattgcaaggaatgttactaataatggcgttcagttaaatgattcatcttcaagctttgtaggtgcttatacaggtaattattataacattgaaaaaagcaccaccatccaaggtggggaagttataaatacagctgcctcatcatcagatatagttgttgctaatggaactacatcttatcaatatgacgcggggattgtcatggtggaaagagtggttaaatttacgatggatattacaccatcagcaacaggcattaaatatacattctcgaacatacagcaagcgcaaaaagatactggcgcagtatcaaattctgggtttgcacctataggtgtctggaaggctgctggtggctatcaggcgattaatgcattagataatatttcctctgaaataaataagtgtatgtctgaggtatag

SEQ ID NO: 231033 - DNA, 255 bp, Klebsiella pneumoniae
atgcaagtggggggcaaagtcactaatcttgaaaagtggagtgcctggagccttattgatgttcgcaaggacagaagccaccagcgcagccccccactcggttcgcatcataacgttaagctgaccgtacttctcacggtacttgagccaaaccagaaattccctacggctcattcgctcctgagcctctgcgatggtgcggccgccgatgccgttcatcaccagttcgcaccagaattcatcctcgccggttag

SEQ ID NO: 231034 - DNA, 354 bp, Klebsiella pneumoniae
atgcaacttactctcgatacgttaaaagaaaccggtgcctttaccgggcgtcccgtggaaaaagaaattaagtggaaaggccgtgacgggaaagagcacaaggtgaccgcctatgtccgtccagtgggttaccactccacgaaagtcgatttgctggcatcaaaagggaaagtagacccagttgccggacgtattgctgcccatatctgtgatgcggagggaaatcctatttttactgaagccgatattctgggaacggcctctgaagaccgtggcgcgctcgatggcccgatagttatcgctttgctggtggcgattcaggaggttaacgagctgggaaagactacgagctaa

SEQ ID NO: 231035 - DNA, 195 bp, Klebsiella pneumoniae
atgttaacagtaaaagtaatgtcaccagatggtggcgaagaaatccattgcggcctgagcgttggtttcaaccccaatcagcagagtatcgcagtgtcgggaatggaccagaacgttttcctgaagcagggagaagtggcgtacgtgatgaacgcaaacggaaagaccatttcccgttacgagcacttgacctga

SEQ ID NO: 231036 - DNA, 348 bp, Klebsiella pneumoniae
atgaaaatgcctactaacccgagtaactggcctgatctgctggagttgctgcagagctggtggcgcggagatacgccgctgggggccgtactgctctcagttgttatggcgggtcttcgaatcgcttatagcggtggcggctggaaaaagatgcttcttgaggggcttctgtgtggggcgctaacgcttacattcgcatcggcgcttgaatacttagacttccccaaatctctctcaatcaccattggcggtggggtggggttcgttggcgtagatgccataagggcgtttgtaatgaaatatcttggcggccgattcggtatcggtggcggcgataacaaggcttaa

SEQ ID NO: 231037 - DNA, 480 bp, Klebsiella pneumoniae
atgcttacagctaaagatgatgcctacattttaaaaagtgatggcagcagatgcggtccatataaggcaaagtttgcaggggatacagttatcgtaaacgacaaaatggccgacattgatgacggagatactgttattcgaatccttccaaacggcaaggaagaacataaggaaatttataaggctaatttttacgacactggcgttggcggatttggtccacacttccaactcaaagttggtcccaaaaaggttcaaccagctgtctcttcacagcaaatcaacattcacggaggaaatgtccagattggagatcataaccgtcaggagattaccaatagtatcgaaactctgaataacttaataaatagctcacagggtacgccacagcagaaagaagaggcaaaggggctgctaagaaagttagcagaacacccattgcttactgctattgccggtggggctataggactgctctag

SEQ ID NO: 231038 - DNA, 288 bp, Klebsiella pneumoniae
atgatcaaccgcaacaaactggagcacattctcgaatacgccaaacagcagaggcacatcggccagtactgcaaggttccgccagaagatatggtcgaaatcatggagcgattgctcagcgcttgcaaccctccggtaattccggatggttacgtgatggtgccgaaggggcctacgagggagattctcgacgagtttgattcaattatcgactatggcgcagaagactctgtagatgcctggcgcagactgctcgcatccgccccgcaggaggtgaaaggtgaataa
